United States Patent Application Publication US 2014/0199313 A1 - sequence listing, part 7

SEQ ID NO: 22099 - protein, 58 aa, Artificial sequence; identical to SEQ ID NO: 2891
  Consensus
  Variant (1)..(1): Xaa in position 1 is Tyr, Phe or Leu
  Variant (2)..(3): Xaa in position 2 to 3 is any amino acid
  Variant (4)..(4): Xaa in position 4 is Asp or Glu
  Variant (5)..(6): Xaa in position 5 to 6 is any amino acid
  Variant (7)..(7): Xaa in position 7 is Ser, Ala, Thr or Cys
  Variant (8)..(8): Xaa in position 8 is Trp, Leu, Phe, Tyr or Val
  Variant (9)..(9): Xaa in position 9 is any amino acid
  Variant (10)..(10): Xaa in position 10 is Ala or Ser
  Variant (11)..(11): Xaa in position 11 is Ile or Val
  Variant (15)..(15): Xaa in position 15 is Thr, Ser or Asn
  Variant (16)..(16): Xaa in position 16 is Thr, Val, Ala or Ser
  Variant (17)..(17): Xaa in position 17 is Glu or Ala
  Variant (18)..(18): Xaa in position 18 is Ser, Asp or Asn
  Variant (20)..(20): Xaa in position 20 is any amino acid
  Variant (23)..(23): Xaa in position 23 is Glu, Gln, Phe or Met
  Variant (24)..(24): Xaa in position 24 is Leu, Met, Val or Ile
  Variant (25)..(25): Xaa in position 25 is Ala, Ser, Thr, Cys or Val
  Variant (27)..(27): Xaa in position 27 is Gly or Ala
  Variant (28)..(28): Xaa in position 28 is Leu, Ile, Met or Val
  Variant (29)..(30): Xaa in position 29 to 30 is any amino acid
  Variant (31)..(31): Xaa in position 31 is Pro or Ala
  Variant (32)..(32): Xaa in position 32 is Val, Ile or Thr
  Variant (34)..(34): Xaa in position 34 is Phe, Met, Tyr or Ile
  Variant (37)..(37): Xaa in position 37 is any amino acid
  Variant (38)..(38): Xaa in position 38 is Thr or Arg
  Variant (39)..(39): Xaa in position 39 is any amino acid
  Variant (41)..(41): Xaa in position 41 is any amino acid
  Variant (42)..(42): Xaa in position 42 is Leu, Ile, Val, Ala, Thr or Phe
  Variant (43)..(44): Xaa in position 43 to 44 is any amino acid
  Variant (45)..(45): Xaa in position 45 is Ala or Met
  Variant (46)..(46): Xaa in position 46 is any amino acid
  Variant (47)..(47): Xaa in position 47 is Asp, Asn or Glu
  Variant (48)..(48): Xaa in position 48 is Ala or Gly
  Variant (49)..(50): Xaa in position 49 to 50 is any amino acid
  Variant (51)..(51): Xaa in position 51 is Ala or Ser
  Variant (52)..(52): Xaa in position 52 is Ala, Ser, Val or Thr
  Variant (53)..(55): Xaa in position 53 to 55 is any amino acid
  Variant (56)..(56): Xaa in position 56 is His or Gln
  Variant (57)..(57): Xaa in position 57 is any amino acid
  Variant (58)..(58): Xaa in position 58 is Phe, Tyr, His or Val

SEQ ID NO: 22100 - protein, 25 aa, Artificial sequence
  Consensus
  Variant (1)..(1): Xaa in position 1 is Thr or Ser
  Variant (2)..(2): Xaa in position 2 is any amino acid
  Variant (5)..(7): Xaa in position 5 to 7 is any amino acid
  Variant (8)..(8): Xaa in position 8 is His or Phe
  Variant (9)..(9): Xaa in position 9 is Val, Ile, Leu or Ala
  Variant (10)..(10): Xaa in position 10 is Ile or Val
  Variant (11)..(11): Xaa in position 11 is Leu or Met
  Variant (14)..(14): Xaa in position 14 is Gly, Ser or Ala
  Variant (15)..(16): Xaa in position 15 to 16 is any amino acid
  Variant (17)..(22): Xaa in position 17 to 22 is any or no amino acid
  Variant (23)..(23): Xaa in position 23 is Pro, Thr or Ser
  Variant (25)..(25): Xaa in position 25 is Tyr, Phe or His
XXGNXXXXXXXRGXXXXXXXXXXNX

SEQ ID NO: 22101 - protein, 52 aa, Artificial sequence; identical to SEQ ID NO: 2893
  Consensus
  Variant (1)..(1): Xaa in position 1 is Leu, Ile or Val
  Variant (2)..(2): Xaa in position 2 is Met, Val, Ile or Leu
  Variant (3)..(3): Xaa in position 3 is Ile or Val
  Variant (5)..(5): Xaa in position 5 is any amino acid
  Variant (6)..(6): Xaa in position 6 is Ser, Asn or Ala
  Variant (8)..(8): Xaa in position 8 is Ala, Gly or Asp
  Variant (10)..(10): Xaa in position 10 is Ser or Cys
  Variant (11)..(11): Xaa in position 11 is any amino acid
  Variant (13)..(15): Xaa in position 13 to 15 is any amino acid
  Variant (16)..(16): Xaa in position 16 is Arg, Asn, Lys, Leu or Glu
  Variant (18)..(19): Xaa in position 18 to 19 is any amino acid
  Variant (20)..(20): Xaa in position 20 is Val or Ile
  Variant (21)..(23): Xaa in position 21 to 23 is any amino acid
  Variant (24)..(24): Xaa in position 24 is Val, Ile, Leu, Thr or Ala
  Variant (25)..(26): Xaa in position 25 to 26 is any amino acid
  Variant (27)..(27): Xaa in position 27 is Gln, Asn or Arg
  Variant (28)..(28): Xaa in position 28 is Ile, Leu, Val, Arg or Met
  Variant (29)..(30): Xaa in position 29 to 30 is any amino acid
  Variant (31)..(31): Xaa in position 31 is Gly, Asn or Asp
  Variant (32)..(34): Xaa in position 32 to 34 is any amino acid
  Variant (35)..(37): Xaa in position 35 to 37 is any or no amino acid
  Variant (38)..(38): Xaa in position 38 is Ile, Val or Leu
  Variant (39)..(39): Xaa in position 39 is any amino acid
  Variant (41)..(41): Xaa in position 41 is any amino acid
  Variant (43)..(43): Xaa in position 43 is Ile, Leu, Val, Ala or Met
  Variant (46)..(46): Xaa in position 46 is His, Phe, Asn or Tyr
  Variant (47)..(47): Xaa in position 47 is Leu or Ile
  Variant (48)..(49): Xaa in position 48 to 49 is any amino acid
  Variant (51)..(51): Xaa in position 51 is any amino acid

SEQ ID NO: 22102 - protein, 19 aa, Artificial sequence
  Consensus
  Variant (1)..(1): Xaa in position 1 is Tyr, Phe, Lys or Arg
  Variant (3)..(3): Xaa in position 3 is any amino acid
  Variant (5)..(5): Xaa in position 5 is Ile or Val
  Variant (8)..(8): Xaa in position 8 is any amino acid
  Variant (10)..(10): Xaa in position 10 is Ile, Leu or Val
  Variant (11)..(11): Xaa in position 11 is any amino acid
  Variant (12)..(12): Xaa in position 12 is Trp, Ile, Phe or Leu
  Variant (13)..(14): Xaa in position 13 to 14 is any amino acid
  Variant (15)..(15): Xaa in position 15 is Thr or Ser
  Variant (16)..(18): Xaa in position 16 to 18 is any amino acid
  Variant (19)..(19): Xaa in position 19 is Leu, Ile, Val or Phe
XGXSXTDXCXXXXXXXXXX

SEQ ID NO: 22103 - DNA, 2374 bp, Escherichia coli K12; identical to SEQ ID NO: 1805
  CDS (86)..(2281)

SEQ ID NO: 22104 - protein, 731 aa, Escherichia coli K12; identical to SEQ ID NO: 1806

SEQ ID NO: 22105 - DNA, 2961 bp, Hafnia alvei; identical to SEQ ID NO: 1807
  CDS (185)..(2404)

SEQ ID NO: 22106 - protein, 739 aa, Hafnia alvei; identical to SEQ ID NO: 1808

SEQ ID NO: 22107 - DNA, 4341 bp, Escherichia coli; identical to SEQ ID NO: 1809
  CDS (660)..(2858)

SEQ ID NO: 22108 - protein, 732 aa, Escherichia coli; identical to SEQ ID NO: 1810

SEQ ID NO: 22109 - DNA, 1850 bp, Bacillus subtilis; identical to SEQ ID NO: 1811
  CDS (312)..(1784)

SEQ ID NO: 22110 - protein, 490 aa, Bacillus subtilis; identical to SEQ ID NO: 1812

SEQ ID NO: 22111 - DNA, 3091 bp, Lactobacillus sp; identical to SEQ ID NO: 1813
  CDS (572)..(2767)

SEQ ID NO: 22112 - protein, 731 aa, Lactobacillus sp; identical to SEQ ID NO: 1814

SEQ ID NO: 22113 - DNA, 1449 bp, Bacillus halodurans; identical to SEQ ID NO: 1815
  CDS (1)..(1449)

SEQ ID NO: 22114 - protein, 482 aa, Bacillus halodurans; identical to SEQ ID NO: 1816

SEQ ID NO: 22115 - DNA, 2196 bp, Sinorhizobium meliloti; identical to SEQ ID NO: 1817
  CDS (1)..(2196)

SEQ ID NO: 22116 - protein, 731 aa, Sinorhizobium meliloti; identical to SEQ ID NO: 1818

SEQ ID NO: 22117 - DNA, 1380 bp, Listeria innocua; identical to SEQ ID NO: 1819
  CDS (1)..(1380)

SEQ ID NO: 22118 - protein, 459 aa, Listeria innocua; identical to SEQ ID NO: 1820

SEQ ID NO: 22119 - DNA, 2307 bp, Yersinia pestis; identical to SEQ ID NO: 1821
  CDS (1)..(2307)

SEQ ID NO: 22120 - protein, 768 aa, Yersinia pestis; identical to SEQ ID NO: 1822

SEQ ID NO: 22121 - DNA, 2145 bp, Salmonella enterica subsp. enterica serovar Typhi; identical to SEQ ID NO: 1823
  CDS (1)..(2145)

SEQ ID NO: 22122 - protein, 714 aa, Salmonella enterica subsp. enterica serovar Typhi; identical to SEQ ID NO: 1824

SEQ ID NO: 22123 - DNA, 1467 bp, Nostoc sp. PCC 7120; identical to SEQ ID NO: 1825
  CDS (1)..(1467)

SEQ ID NO: 22124 - protein, 488 aa, Nostoc sp. PCC 7120; identical to SEQ ID NO: 1826

SEQ ID NO: 22125 - DNA, 2163 bp, Yersinia pestis; identical to SEQ ID NO: 1827
  CDS (1)..(2163)

SEQ ID NO: 22126 - protein, 720 aa, Yersinia pestis; identical to SEQ ID NO: 1828

SEQ ID NO: 22127 - DNA, 2271 bp, Salmonella enterica subsp. enterica serovar Typhi; identical to SEQ ID NO: 1829
  CDS (1)..(2271)

SEQ ID NO: 22128 - protein, 756 aa, Salmonella enterica subsp. enterica serovar Typhi; identical to SEQ ID NO: 1830

SEQ ID NO: 22129 - DNA, 2148 bp, Escherichia coli; identical to SEQ ID NO: 1831
  CDS (1)..(2148)

SEQ ID NO: 22130 - protein, 715 aa, Escherichia coli; identical to SEQ ID NO: 1832

SEQ ID NO: 22131 - DNA, 2835 bp, Escherichia coli; identical to SEQ ID NO: 1833
  CDS (571)..(2712)

SEQ ID NO: 22132 - protein, 713 aa, Escherichia coli; identical to SEQ ID NO: 1834

SEQ ID NO: 22133 - DNA, 1446 bp, Clostridium acetobutylicum; identical to SEQ ID NO: 1835
  CDS (1)..(1446)

SEQ ID NO: 22134 - protein, 481 aa, Clostridium acetobutylicum; identical to SEQ ID NO: 1836

SEQ ID NO: 22135 - DNA, 1464 bp, Clostridium acetobutylicum; identical to SEQ ID NO: 1837
  CDS (1)..(1464)

SEQ ID NO: 22136 - protein, 487 aa, Clostridium acetobutylicum; identical to SEQ ID NO: 1838

SEQ ID NO: 22137 - DNA, 2256 bp, Pseudomonas aeruginosa; identical to SEQ ID NO: 1839
  CDS (1)..(2256)

SEQ ID NO: 22138 - protein, 751 aa, Pseudomonas aeruginosa; identical to SEQ ID NO: 1840

SEQ ID NO: 22139 - DNA, 2853 bp, Mycobacterium leprae; identical to SEQ ID NO: 1841
  CDS (1)..(2853)

SEQ ID NO: 22140 - protein, 950 aa, Mycobacterium leprae; identical to SEQ ID NO: 1842

SEQ ID NO: 22141 - DNA, 2202 bp, Vibrio cholerae; identical to SEQ ID NO: 1843
  CDS (1)..(2202)

SEQ ID NO: 22142 - protein, 733 aa, Vibrio cholerae; identical to SEQ ID NO: 1844

SEQ ID NO: 22143 - DNA, 2163 bp, Vibrio cholerae; identical to SEQ ID NO: 1845
  CDS (1)..(2163)

SEQ ID NO: 22144 - protein, 720 aa, Vibrio cholerae; identical to SEQ ID NO: 1846

SEQ ID NO: 22145 - DNA, 2163 bp, Haemophilus influenzae; identical to SEQ ID NO: 1847
  CDS (1)..(2163)

SEQ ID NO: 22146 - protein, 720 aa, Haemophilus influenzae; identical to SEQ ID NO: 1848

SEQ ID NO: 22147 - DNA, 2844 bp, Mycobacterium tuberculosis; identical to SEQ ID NO: 1849
  CDS (1)..(2844)

SEQ ID NO: 22148 - protein, 947 aa, Mycobacterium tuberculosis; identical to SEQ ID NO: 1850

SEQ ID NO: 22149 - DNA, 1476 bp, Streptococcus pneumoniae; identical to SEQ ID NO: 1851
  CDS (1)..(1476)

SEQ ID NO: 22150 - protein, 491 aa, Streptococcus pneumoniae; identical to SEQ ID NO: 1852

SEQ ID NO: 22151 - DNA, 1476 bp, Bacillus halodurans; identical to SEQ ID NO: 1853
  CDS (1)..(1476)

SEQ ID NO: 22152 - protein, 491 aa, Bacillus halodurans; identical to SEQ ID NO: 1854

SEQ ID NO: 22153 - DNA, 2349 bp, Sinorhizobium meliloti; identical to SEQ ID NO: 1855
  CDS (1)..(2349)

SEQ ID NO: 22154 - protein, 782 aa, Sinorhizobium meliloti; identical to SEQ ID NO: 1856

SEQ ID NO: 22155 - DNA, 1476 bp, Streptococcus pneumoniae; identical to SEQ ID NO: 1857
  CDS (1)..(1476)

SEQ ID NO: 22156 - protein, 491 aa, Streptococcus pneumoniae; identical to SEQ ID NO: 1858

SEQ ID NO: 22157 - DNA, 2271 bp, Escherichia coli; identical to SEQ ID NO: 1859
  CDS (1)..(2271)

SEQ ID NO: 22158 - protein, 756 aa, Escherichia coli; identical to SEQ ID NO: 1860

SEQ ID NO: 22159 - DNA, 1443 bp, Bacillus subtilis; identical to SEQ ID NO: 1861
  CDS (1)..(1443)

SEQ ID NO: 22160 - protein, 480 aa, Bacillus subtilis; identical to SEQ ID NO: 1862

SEQ ID NO: 22161 - DNA, 1452 bp, Synechocystis sp; identical to SEQ ID NO: 1863
  CDS (1)..(1452)

SEQ ID NO: 22162 - protein, 483 aa, Synechocystis sp; identical to SEQ ID NO: 1864

SEQ ID NO: 22163 - DNA, 2307 bp, Yersinia pseudotuberculosis IP 32953; identical to SEQ ID NO: 1865
  CDS (1)..(2307)

SEQ ID NO: 22164 - protein, 768 aa, Yersinia pseudotuberculosis IP 32953; identical to SEQ ID NO: 1866

SEQ ID NO: 22165 - DNA, 1467 bp, Symbiobacterium thermophilum; identical to SEQ ID NO: 1867
  CDS (1)..(1467)

SEQ ID NO: 22166 - protein, 488 aa, Symbiobacterium thermophilum; identical to SEQ ID NO: 1868

SEQ ID NO: 22167 - DNA, 1410 bp, Symbiobacterium thermophilum; identical to SEQ ID NO: 1869
  CDS (1)..(1410)

SEQ ID NO: 22168 - protein, 469 aa, Symbiobacterium thermophilum; identical to SEQ ID NO: 1870

SEQ ID NO: 22169 - DNA, 2154 bp, Erwinia carotovora; identical to SEQ ID NO: 1871
  CDS (1)..(2154)

SEQ ID NO: 22170 - protein, 717 aa, Erwinia carotovora; identical to SEQ ID NO: 1872

SEQ ID NO: 22171 - DNA, 2790 bp, Acinetobacter sp; identical to SEQ ID NO: 1873
  CDS (1)..(2790)

SEQ ID NO: 22172 - protein, 929 aa, Acinetobacter sp; identical to SEQ ID NO: 1874

SEQ ID NO: 22173 - DNA, 1482 bp, Bacillus thuringiensis; identical to SEQ ID NO: 1875
  CDS (1)..(1482)

SEQ ID NO: 22174 - protein, 493 aa, Bacillus thuringiensis; identical to SEQ ID NO: 1876

SEQ ID NO: 22175 - DNA, 1422 bp, Bacillus thuringiensis; identical to SEQ ID NO: 1877
  CDS (1)..(1422)

SEQ ID NO: 22176 - protein, 473 aa, Bacillus thuringiensis; identical to SEQ ID NO: 1878

SEQ ID NO: 22177 - DNA, 2358 bp, Rhodopseudomonas palustris; identical to SEQ ID NO: 1879
  CDS (1)..(2358)

SEQ ID NO: 22178 - protein, 785 aa, Rhodopseudomonas palustris; identical to SEQ ID NO: 1880

SEQ ID NO: 22179 - DNA, 2837 bp, Shigella boydii; identical to SEQ ID NO: 1881
  CDS (165)..(2435)

SEQ ID NO: 22180 - protein, 756 aa, Shigella boydii; identical to SEQ ID NO: 1882

SEQ ID NO: 22181 - DNA, 1380 bp, Listeria monocytogenes; identical to SEQ ID NO: 1883
  CDS (1)..(1380)

SEQ ID NO: 22182 - protein, 459 aa, Listeria monocytogenes; identical to SEQ ID NO: 1884

SEQ ID NO: 22183 - DNA, 1482 bp, Bacillus cereus; identical to SEQ ID NO: 1885
  CDS (1)..(1482)

SEQ ID NO: 22184 - protein, 493 aa, Bacillus cereus; identical to SEQ ID NO: 1886

SEQ ID NO: 22185 - DNA, 1422 bp, Bacillus cereus; identical to SEQ ID NO: 1887
  CDS (1)..(1422)

SEQ ID NO: 22186 - protein, 473 aa, Bacillus cereus; identical to SEQ ID NO: 1888

SEQ ID NO: 22187 - DNA, 1458 bp, Mycobacterium paratuberculosis; identical to SEQ ID NO: 1889
  CDS (1)..(1458)

SEQ ID NO: 22188 - protein, 485 aa, Mycobacterium paratuberculosis; identical to SEQ ID NO: 1890

SEQ ID NO: 22189 - DNA, 2853 bp, Mycobacterium paratuberculosis; identical to SEQ ID NO: 1891
  CDS (1)..(2853)

SEQ ID NO: 22190 - protein, 950 aa, Mycobacterium paratuberculosis; identical to SEQ ID NO: 1892

SEQ ID NO: 22191 - DNA, 2100 bp, Lactobacillus johnsonii; identical to SEQ ID NO: 1893
  CDS (1)..(2100)

SEQ ID NO: 22192 - protein, 699 aa, Lactobacillus johnsonii; identical to SEQ ID NO: 1894

SEQ ID NO: 22193 - DNA, 3625 bp, Vibrio parahaemolyticus; identical to SEQ ID NO: 1895
  CDS (1451)..(3625)

SEQ ID NO: 22194 - protein, 724 aa, Vibrio parahaemolyticus; identical to SEQ ID NO: 1896

SEQ ID NO: 22195 - DNA, 2142 bp, Shigella flexneri; identical to SEQ ID NO: 1897
  CDS (1)..(2142)

SEQ ID NO: 22196 - protein, 713 aa, Shigella flexneri; identical to SEQ ID NO: 1898

SEQ ID NO: 22197 - DNA, 2181 bp, Vibrio vulnificus; identical to SEQ ID NO: 1899
  CDS (1)..(2181)

SEQ ID NO: 22198 - protein, 726 aa, Vibrio vulnificus; identical to SEQ ID NO: 1900

SEQ ID NO: 22199 - DNA, 2307 bp, Photorhabdus luminescens; identical to SEQ ID NO: 1901
  CDS (1)..(2307)

SEQ ID NO: 22200 - protein, 768 aa, Photorhabdus luminescens; identical to SEQ ID NO: 1902

SEQ ID NO: 22201 - DNA, 1404 bp, Gloeobacter violaceus; identical to SEQ ID NO: 1903
  CDS (1)..(1404)

SEQ ID NO: 22202 - protein, 467 aa, Gloeobacter violaceus; identical to SEQ ID NO: 1904

SEQ ID NO: 22203 - DNA, 2259 bp, Chromobacterium violaceum; identical to SEQ ID NO: 1905
  CDS (1)..(2259)

SEQ ID NO: 22204 - protein, 752 aa, Chromobacterium violaceum; identical to SEQ ID NO: 1906

SEQ ID NO: 22205 - DNA, 1251 bp, Chromobacterium violaceum; identical to SEQ ID NO: 1907
  CDS (1)..(1251)

SEQ ID NO: 22206 - protein, 416 aa, Chromobacterium violaceum; identical to SEQ ID NO: 1908

SEQ ID NO: 22207 - DNA, 2352 bp, Fusobacterium nucleatum subsp; identical to SEQ ID NO: 1909
  CDS (1)..(2352)

SEQ ID NO: 22208 - protein, 783 aa, Fusobacterium nucleatum subsp; identical to SEQ ID NO: 1910

SEQ ID NO: 22209 - DNA, 2196 bp, Shigella flexneri; identical to SEQ ID NO: 1911
  CDS (1)..(2196)

SEQ ID NO: 22210 - protein, 731 aa, Shigella flexneri; identical to SEQ ID NO: 1912

SEQ ID NO: 22211 - DNA, 2271 bp, Bordetella pertussis; identical to SEQ ID NO: 1913
  CDS (1)..(2271)

SEQ ID NO: 22212 - protein, 756 aa, Bordetella pertussis; identical to SEQ ID NO: 1914

SEQ ID NO: 22213 - DNA, 2271 bp, Bordetella parapertussis; identical to SEQ ID NO: 1915
  CDS (1)..(2271)

SEQ ID NO: 22214 - protein, 756 aa, Bordetella parapertussis; identical to SEQ ID NO: 1916

SEQ ID NO: 22215 - DNA, 1422 bp, Bacillus cereus; identical to SEQ ID NO: 1917
  CDS (1)..(1422)

SEQ ID NO: 22216 - protein, 473 aa, Bacillus cereus; identical to SEQ ID NO: 1918

SEQ ID NO: 22217 - DNA, 1422 bp, Bacillus anthracis; identical to SEQ ID NO: 1919
  CDS (1)..(1422)

SEQ ID NO: 22218 - protein, 473 aa, Bacillus anthracis; identical to SEQ ID NO: 1920

SEQ ID NO: 22219 - DNA, 2271 bp, Shigella flexneri; identical to SEQ ID NO: 1921
  CDS (1)..(2271)

SEQ ID NO: 22220 - protein, 756 aa, Shigella flexneri; identical to SEQ ID NO: 1922

SEQ ID NO: 22221 - DNA, 2136 bp, Shigella flexneri; identical to SEQ ID NO: 1923
  CDS (1)..(2136)

SEQ ID NO: 22222 - protein, 711 aa, Shigella flexneri; identical to SEQ ID NO: 1924

SEQ ID NO: 22223 - DNA, 2127 bp, Escherichia coli; identical to SEQ ID NO: 1925
  CDS (1)..(2127)

SEQ ID NO: 22224 - protein, 708 aa, Escherichia coli; identical to SEQ ID NO: 1926

SEQ ID NO: 22225 - DNA, 1563 bp, Oryza sativa; identical to SEQ ID NO: 1927
  CDS (1)..(1563)

SEQ ID NO: 22226 - protein, 520 aa, Oryza sativa; identical to SEQ ID NO: 1928

SEQ ID NO: 22227 - DNA, 2181 bp, Vibrio parahaemolyticus; identical to SEQ ID NO: 1929
  CDS (1)..(2181)

SEQ ID NO: 22228 - protein, 726 aa, Vibrio parahaemolyticus; identical to SEQ ID NO: 1930

SEQ ID NO: 22229 - DNA, 4026 bp, Vibrio parahaemolyticus; identical to SEQ ID NO: 1931
  CDS (1779)..(3914)

SEQ ID NO: 22230 - protein, 711 aa, Vibrio parahaemolyticus; identical to SEQ ID NO: 1932

SEQ ID NO: 22231 - DNA, 1461 bp, Clostridium tetani; identical to SEQ ID NO: 1933
  CDS (1)..(1461)

SEQ ID NO: 22232 - protein, 486 aa, Clostridium tetani; identical to SEQ ID NO: 1934

SEQ ID NO: 22233 - DNA, 1416 bp, Clostridium tetani; identical to SEQ ID NO: 1935
  CDS (1)..(1416)

SEQ ID NO: 22234 - protein, 471 aa, Clostridium tetani; identical to SEQ ID NO: 1936

SEQ ID NO: 22235 - DNA, 2766 bp, Bradyrhizobium japonicum; identical to SEQ ID NO: 1937
  CDS (1)..(2766)

SEQ ID NO: 22236 - protein, 921 aa, Bradyrhizobium japonicum; identical to SEQ ID NO: 1938

SEQ ID NO: 22237 - DNA, 2517 bp, Bradyrhizobium japonicum; identical to SEQ ID NO: 1939
  CDS (1)..(2517)

SEQ ID NO: 22238 - protein, 838 aa, Bradyrhizobium japonicum; identical to SEQ ID NO: 1940

SEQ ID NO: 22239 - DNA, 2181 bp, Vibrio vulnificus; identical to SEQ ID NO: 1941
  CDS (1)..(2181)

SEQ ID NO: 22240 - protein, 726 aa, Vibrio vulnificus; identical to SEQ ID NO: 1942

SEQ ID NO: 22241 - DNA, 2109 bp, Vibrio vulnificus; identical to SEQ ID NO: 1943
  CDS (1)..(2109)

SEQ ID NO: 22242 - protein, 702 aa, Vibrio vulnificus; identical to SEQ ID NO: 1944

SEQ ID NO: 22243 - DNA, 2163 bp, Shewanella oneidensis; identical to SEQ ID NO: 1945
  CDS (1)..(2163)

SEQ ID NO: 22244 - protein, 720 aa, Shewanella oneidensis; identical to SEQ ID NO: 1946

SEQ ID NO: 22245 - DNA, 1419 bp, Oceanobacillus iheyensis; identical to SEQ ID NO: 1947
  CDS (1)..(1419)

SEQ ID NO: 22246 - protein, 472 aa, Oceanobacillus iheyensis; identical to SEQ ID NO: 1948

SEQ ID NO: 22247 - DNA, 2154 bp, Escherichia coli O6; identical to SEQ ID NO: 1949
  CDS (1)..(2154)

SEQ ID NO: 22248 - protein, 717 aa, Escherichia coli O6; identical to SEQ ID NO: 1950

SEQ ID NO: 22249 - DNA, 2271 bp, Escherichia coli O6; identical to SEQ ID NO: 1951
  CDS (1)..(2271)

SEQ ID NO: 22250 - protein, 756 aa, Escherichia coli O6; identical to SEQ ID NO: 1952

SEQ ID NO: 22251 - DNA, 2370 bp, Escherichia coli O6; identical to SEQ ID NO: 1953
  CDS (1)..(2370)

SEQ ID NO: 22252 - protein, 789 aa, Escherichia coli O6; identical to SEQ ID NO: 1954

SEQ ID NO: 22253 - DNA, 2136 bp, Escherichia coli O6; identical to SEQ ID NO: 1955
  CDS (1)..(2136)

SEQ ID NO: 22254 - protein, 711 aa, Escherichia coli O6; identical to SEQ ID NO: 1956

SEQ ID NO: 22255 - DNA, 2208 bp, Escherichia coli O6; identical to SEQ ID NO: 1957
  CDS (1)..(2208)

SEQ ID NO: 22256 - protein, 735 aa, Escherichia coli O6; identical to SEQ ID NO: 1958

SEQ ID NO: 22257 - DNA, 2142 bp, Escherichia coli O6; identical to SEQ ID NO: 1959
  CDS (1)..(2142)

SEQ ID NO: 22258 - protein, 713 aa, Escherichia coli O6; identical to SEQ ID NO: 1960

SEQ ID NO: 22259 - DNA, 1488 bp, Thermoanaerobacter tengcongensis; identical to SEQ ID NO: 1961
  CDS (1)..(1488)

SEQ ID NO: 22260 - protein, 495 aa, Thermoanaerobacter tengcongensis; identical to SEQ ID NO: 1962

SEQ ID NO: 22261 - DNA, 1419 bp, Thermoanaerobacter tengcongensis; identical to SEQ ID NO: 1963
  CDS (1)..(1419)

SEQ ID NO: 22262 - protein, 472 aa, Thermoanaerobacter tengcongensis; identical to SEQ ID NO: 1964

SEQ ID NO: 22263 - DNA, 2352 bp, Fusobacterium nucleatum; identical to SEQ ID NO: 1965
  CDS (1)..(2352)

SEQ ID NO: 22264 - protein, 783 aa, Fusobacterium nucleatum; identical to SEQ ID NO: 1966

SEQ ID NO: 22265 - DNA, 1431 bp, Clostridium perfringens; identical to SEQ ID NO: 1967
  CDS (1)..(1431)

SEQ ID NO: 22266 - protein, 476 aa, Clostridium perfringens; identical to SEQ ID NO: 1968

SEQ ID NO: 22267 - DNA, 1455 bp, Clostridium perfringens; identical to SEQ ID NO: 1969
  CDS (1)..(1455)

SEQ ID NO: 22268 - protein, 484 aa, Clostridium perfringens; identical to SEQ ID NO: 1970

SEQ ID NO: 22269 - DNA, 2280 bp, Ralstonia solanacearum; identical to SEQ ID NO: 1971
  CDS (1)..(2280)

SEQ ID NO: 22270 - protein, 759 aa, Ralstonia solanacearum; identical to SEQ ID NO: 1972

SEQ ID NO: 22271 - DNA, 2271 bp, Salmonella typhimurium; identical to SEQ ID NO: 1973
  CDS (1)..(2271)

SEQ ID NO: 22272 - protein, 756 aa, Salmonella typhimurium; identical to SEQ ID NO: 1974

SEQ ID NO: 22273 - DNA, 2136 bp, Salmonella typhimurium; identical to SEQ ID NO: 1975
  CDS (1)..(2136)

SEQ ID NO: 22274 - protein, 711 aa, Salmonella typhimurium; identical to SEQ ID NO: 1976

SEQ ID NO: 22275 - DNA, 2199 bp, Salmonella typhimurium; identical to SEQ ID NO: 1977
  CDS (1)..(2199)

SEQ ID NO: 22276 - protein, 732 aa, Salmonella typhimurium; identical to SEQ ID NO: 1978

SEQ ID NO: 22277 - DNA, 2142 bp, Salmonella typhimurium; identical to SEQ ID NO: 1979
  CDS (1)..(2142)

SEQ ID NO: 22278 - protein, 713 aa, Salmonella typhimurium; identical to SEQ ID NO: 1980

SEQ ID NO: 22279 - DNA, 2136 bp, Vibrio vulnificus; identical to SEQ ID NO: 1981
  CDS (1)..(2136)

SEQ ID NO: 22280 - protein, 711 aa, Vibrio vulnificus; identical to SEQ ID NO: 1982

SEQ ID NO: 22281 - DNA, 2163 bp, Pasteurella multocida; identical to SEQ ID NO: 1983
  CDS (1)..(2163)

SEQ ID NO: 22282 - protein, 720 aa, Pasteurella multocida; identical to SEQ ID NO: 1984

SEQ ID NO: 22283 - DNA, 2139 bp, Moritella japonica; identical to SEQ ID NO: 1985
  CDS (1)..(2139)

SEQ ID NO: 22284 - protein, 712 aa, Moritella japonica; identical to SEQ ID NO: 1986

SEQ ID NO: 22285 - DNA, 1479 bp, Streptomyces coelicolor; identical to SEQ ID NO: 1987
  CDS (1)..(1479)

SEQ ID NO: 22286 - protein, 492 aa, Streptomyces coelicolor; identical to SEQ ID NO: 1988

SEQ ID NO: 22287 - DNA, 2130 bp, Eikenella corrodens; identical to SEQ ID NO: 1989
  CDS (1)..(2130)

SEQ ID NO: 22288 - protein, 709 aa, Eikenella corrodens; identical to SEQ ID NO: 1990

SEQ ID NO: 22289 - DNA, 2271 bp, Escherichia coli; identical to SEQ ID NO: 1859
  CDS (4)..(2271)

SEQ ID NO: 22290 - protein, 755 aa, Escherichia coli; identical to SEQ ID NO: 1992

SEQ ID NO: 22291 - DNA, 2196 bp, Lactobacillus sp; identical to SEQ ID NO: 1993
  CDS (1)..(2196)

SEQ ID NO: 22292 - protein, 731 aa, Lactobacillus sp; identical to SEQ ID NO: 1814

SEQ ID NO: 22293 - DNA, 1482 bp, Bacillus anthracis; identical to SEQ ID NO: 1995
  CDS (1)..(1482)

SEQ ID NO: 22294 - protein, 493 aa, Bacillus anthracis; identical to SEQ ID NO: 1996

SEQ ID NO: 22295 - DNA, 1383 bp, Bacillus cereus; identical to SEQ ID NO: 1997
  CDS (1)..(1383)

SEQ ID NO: 22296 - protein, 460 aa, Bacillus cereus; identical to SEQ ID NO: 1998

SEQ ID NO: 22297 - DNA, 20 bp, Artificial sequence
  Primer sequence
atggggcagggttttccacc

SEQ ID NO: 22298 - DNA, 25 bp, Artificial sequence
  Primer sequence
ttacttcaacacataaccgtacaac

SEQ ID NO: 22299 - protein, 642 aa, Artificial sequence; identical to SEQ ID NO: 2902
  Consensus
  Variant (2)..(5): Xaa in position 2 to 5 is any amino acid
  Variant (7)..(58): Xaa in position 7 to 58 is any amino acid
  Variant (60)..(61): Xaa in position 60 to 61 is any amino acid
  Variant (63)..(66): Xaa in position 63 to 66 is any amino acid
  Variant (68)..(71): Xaa in position 68 to 71 is any amino acid
  Variant (73)..(76): Xaa in position 73 to 76 is any amino acid
  Variant (78)..(90): Xaa in position 78 to 90 is any amino acid
  Variant (92)..(92): Xaa in position 92 is any amino acid
  Variant (94)..(113): Xaa in position 94 to 113 is any amino acid
  Variant (116)..(116): Xaa in position 116 is any amino acid
  Variant (120)..(131): Xaa in position 120 to 131 is any amino acid
  Variant (133)..(188): Xaa in position 133 to 188 is any amino acid
  Variant (191)..(191): Xaa in position 191 is any amino acid
  Variant (193)..(215): Xaa in position 193 to 215 is any amino acid
  Variant (217)..(217): Xaa in position 217 is any amino acid
  Variant (219)..(224): Xaa in position 219 to 224 is any amino acid
  Variant (226)..(290): Xaa in position 226 to 290 is any amino acid
  Variant (292)..(292): Xaa in position 292 is any amino acid
  Variant (295)..(300): Xaa in position 295 to 300 is any amino acid
  Variant (302)..(302): Xaa in position 302 is any amino acid
  Variant (304)..(305): Xaa in position 304 to 305 is any amino acid
  Variant (307)..(333): Xaa in position 307 to 333 is any amino acid
  Variant (337)..(337): Xaa in position 337 is any amino acid
  Variant (339)..(341): Xaa in position 339 to 341 is any amino acid
  Variant (343)..(355): Xaa in position 343 to 355 is any amino acid
  Variant (357)..(370): Xaa in position 357 to 370 is any amino acid
  Variant (372)..(457): Xaa in position 372 to 457 is any amino acid
  Variant (460)..(460): Xaa in position 460 is any amino acid
  Variant (462)..(494): Xaa in position 462 to 494 is any amino acid
  Variant (496)..(497): Xaa in position 496 to 497 is any amino acid
  Variant (499)..(505): Xaa in position 499 to 505 is any amino acid
  Variant (507)..(520): Xaa in position 507 to 520 is any amino acid
  Variant (522)..(524): Xaa in position 522 to 524 is any amino acid
  Variant (526)..(620): Xaa in position 526 to 620 is any amino acid
  Variant (622)..(624): Xaa in position 622 to 624 is any amino acid
  Variant (626)..(630): Xaa in position 626 to 630 is any amino acid
  Variant (635)..(640): Xaa in position 635 to 640 is any amino acid

SEQ ID NO: 22300 - protein, 101 aa, Artificial sequence; identical to SEQ ID NO: 1322
  Consensus
  Variant (2)..(23): Xaa in position 2 to 23 is any amino acid
  Variant (24)..(30): Xaa in position 24 to 30 is any or no amino acid
  Variant (32)..(32): Xaa in position 32 is any amino acid
  Variant (37)..(39): Xaa in position 37 to 39 is any amino acid
  Variant (41)..(55): Xaa in position 41 to 55 is any amino acid
  Variant (56)..(57): Xaa in position 56 to 57 is any or no amino acid
  Variant (59)..(62): Xaa in position 59 to 62 is any amino acid
  Variant (64)..(64): Xaa in position 64 is any amino acid
  Variant (67)..(70): Xaa in position 67 to 70 is any amino acid
  Variant (72)..(72): Xaa in position 72 is any amino acid
  Variant (75)..(77): Xaa in position 75 to 77 is any amino acid
  Variant (79)..(85): Xaa in position 79 to 85 is any amino acid
  Variant (87)..(90): Xaa in position 87 to 90 is any amino acid
  Variant (92)..(93): Xaa in position 92 to 93 is any amino acid
  Variant (97)..(97): Xaa in position 97 is any amino acid
  Variant (100)..(100): Xaa in position 100 is any amino acid

SEQ ID NO: 22301 - protein, 76 aa, Artificial sequence; identical to SEQ ID NO: 2897
  Consensus
  Variant (1)..(1): Xaa in position 1 is Leu, Met or Val
  Variant (2)..(2): Xaa in position 2 is Gly or Asp
  Variant (3)..(3): Xaa in position 3 is Asp, Ser, Asn, Gln or Gly
  Variant (4)..(4): Xaa in position 4 is Leu or Arg
  Variant (5)..(6): Xaa in position 5 to 6 is any amino acid
  Variant (7)..(7): Xaa in position 7 is His or Pro
  Variant (8)..(8): Xaa in position 8 is any amino acid
  Variant (9)..(9): Xaa in position 9 is Gly, Ser, Glu or Asp
  Variant (10)..(13): Xaa in position 10 to 13 is any amino acid
  Variant (14)..(14): Xaa in position 14 is Ala or Ser
  Variant (15)..(15): Xaa in position 15 is Gln, Glu or Met
  Variant (16)..(18): Xaa in position 16 to 18 is any amino acid
  Variant (19)..(19): Xaa in position 19 is Ala or Ser
  Variant (20)..(21): Xaa in position 20 to 21 is any amino acid
  Variant (22)..(22): Xaa in position 22 is Phe, Tyr, Trp or Val
  Variant (23)..(23): Xaa in position 23 is any amino acid
  Variant (24)..(24): Xaa in position 24 is Ala, Ser or Val
  Variant (25)..(27): Xaa in position 25 to 27 is any amino acid
  Variant (28)..(28): Xaa in position 28 is Tyr, Phe or Trp
  Variant (29)..(30): Xaa in position 29 to 30 is any amino acid
  Variant (31)..(31): Xaa in position 31 is Val, Thr, Leu or Ile
  Variant (32)..(32): Xaa in position 32 is any amino acid
  Variant (34)..(34): Xaa in position 34 is Thr or Ser
  Variant (35)..(35): Xaa in position 35 is Ser or Thr
  Variant (36)..(36): Xaa in position 36 is any amino acid
  Variant (37)..(37): Xaa in position 37 is Ser, Ala or Gly
  Variant (38)..(38): Xaa in position 38 is Asn, Ile, Val or Ser
  Variant (39)..(51): Xaa in position 39 to 51 is any amino acid
  Variant (52)..(52): Xaa in position 52 is Val, Ile, Leu or Ala
  Variant (53)..(53): Xaa in position 53 is Leu, Ile, Val or Met
  Variant (54)..(55): Xaa in position 54 to 55 is any amino acid
  Variant (57)..(57): Xaa in position 57 is Asn or Asp
  Variant (58)..(58): Xaa in position 58 is any amino acid
  Variant (60)..(60): Xaa in position 60 is Lys, Gln or Arg
  Variant (61)..(61): Xaa in position 61 is Ser or Ala
  Variant (62)..(65): Xaa in position 62 to 65 is any amino acid
  Variant (66)..(66): Xaa in position 66 is any or no amino acid
  Variant (67)..(67): Xaa in position 67 is Leu, Ile, Met or Val
  Variant (68)..(73): Xaa in position 68 to 73 is any amino acid
  Variant (74)..(74): Xaa in position 74 is Pro or Ala
  Variant (75)..(75): Xaa in position 75 is any amino acid
  Variant (76)..(76): Xaa in position 76 is Tyr, Phe or Trp

SEQ ID NO: 22302 - protein, 39 aa, Artificial sequence; identical to SEQ ID NO: 2898
  Consensus
  Variant (1)..(1): Xaa in position 1 is Val, Ile, Leu, Phe or Thr
  Variant (2)..(2): Xaa in position 2 is Ile, Val, Leu, Phe or Ala
  Variant (3)..(5): Xaa in position 3 to 5 is any amino acid
  Variant (6)..(6): Xaa in position 6 is Thr, Asn or Ser
  Variant (7)..(7): Xaa in position 7 is Tyr, Phe or Pro
  Variant (8)..(8): Xaa in position 8 is Asp, Tyr, Phe or His
  Variant (10)..(12): Xaa in position 10 to 12 is any amino acid
  Variant (13)..(13): Xaa in position 13 is Asn, Asp or Ser
  Variant (14)..(25): Xaa in position 14 to 25 is any amino acid
  Variant (26)..(29): Xaa in position 26 to 29 is any or no amino acid
  Variant (30)..(30): Xaa in position 30 is Ile, Val, Leu or Phe
  Variant (31)..(31): Xaa in position 31 is any amino acid
  Variant (32)..(32): Xaa in position 32 is Phe, Val, Trp or Ile
  Variant (34)..(34): Xaa in position 34 is Glu, Ser or Cys
  Variant (36)..(36): Xaa in position 36 is Trp or His
  Variant (37)..(37): Xaa in position 37 is any amino acid
  Variant (38)..(38): Xaa in position 38 is Ala, Gly, Pro or Val
  Variant (39)..(39): Xaa in position 39 is Tyr, His or Phe

SEQ ID NO: 22303 - protein, 84 aa, Artificial sequence; identical to SEQ ID NO: 2899
  Consensus
  Variant (1)..(1): Xaa in position 1 is Ser or Leu
  Variant (2)..(2): Xaa in position 2 is any amino acid
  Variant (5)..(7): Xaa in position 5 to 7 is any amino acid
  Variant (8)..(8): Xaa in position 8 is Ala, Gly or Ser
  Variant (9)..(9): Xaa in position 9 is Leu, Phe, Met or Ile
  Variant (10)..(10): Xaa in position 10 is Ser, Thr, Arg or Glu
  Variant (11)..(11): Xaa in position 11 is Gln or Met
  Variant (12)..(12): Xaa in position 12 is any amino acid
  Variant (13)..(13): Xaa in position 13 is Ser or Ala
  Variant (14)..(14): Xaa in position 14 is any amino acid
  Variant (15)..(15): Xaa in position 15 is Ile, Leu, Met, Val or Phe
  Variant (16)..(16): Xaa in position 16 is His, Asn, Leu or Ile
  Variant (17)..(25): Xaa in position 17 to 25 is any amino acid
  Variant (26)..(33): Xaa in position 26 to 33 is any or no amino acid
  Variant (34)..(34): Xaa in position 34 is Phe, Val, Leu, Met or Ile
  Variant (35)..(42): Xaa in position 35 to 42 is any amino acid
  Variant (43)..(43): Xaa in position 43 is Ser or Thr
  Variant (44)..(44): Xaa in position 44 is Thr or Ser
  Variant (46)..(47): Xaa in position 46 to 47 is any amino acid
  Variant (48)..(48): Xaa in position 48 is Tyr, Gln or Val
  Variant (49)..(49): Xaa in position 49 is any amino acid
  Variant (50)..(50): Xaa in position 50 is Leu, Ile, Phe or Met
  Variant (51)..(51): Xaa in position 51 is any amino acid
  Variant (52)..(52): Xaa in position 52 is Ala or Ser
  Variant (53)..(53): Xaa in position 53 is Ser, Ala or Thr
  Variant (54)..(54): Xaa in position 54 is any amino acid
  Variant (55)..(55): Xaa in position 55 is Asp or Glu
  Variant (56)..(63): Xaa in position 56 to 63 is any amino acid
  Variant (64)..(65): Xaa in position 64 to 65 is any or no amino acid
  Variant (66)..(66): Xaa in position 66 is Gly, Ala, Lys or Asn
  Variant (67)..(73): Xaa in position 67 to 73 is any amino acid
  Variant (74)..(74): Xaa in position 74 is Ile, Val, Leu, Tyr or Phe
  Variant (75)..(80): Xaa in position 75 to 80 is any amino acid
  Variant (81)..(81): Xaa in position 81 is Arg or Lys
  Variant (82)..(83): Xaa in position 82 to 83 is any amino acid
  Variant (84)..(84): Xaa in position 84 is Ile, Leu, Val, Met, Phe, Ala or Thr

SEQ ID NO: 22304 - protein, 31 aa, Artificial sequence; identical to SEQ ID NO: 2900
  Consensus
  Variant (1)..(1): Xaa in position 1 is Val, Ile, Leu, Cys or Arg
  Variant (2)..(5): Xaa in position 2 to 5 is any amino acid
  Variant (6)..(9): Xaa in position 6 to 9 is any or no amino acid
  Variant (10)..(10): Xaa in position 10 is Gly, Thr, Asp or Asn
  Variant (11)..(11): Xaa in position 11 is any amino acid
  Variant (12)..(12): Xaa in position 12 is Ile, Val or Thr
  Variant (13)..(13): Xaa in position 13 is any amino acid
  Variant (14)..(14): Xaa in position 14 is Ala, Gly, Thr or Leu
  Variant (15)..(16): Xaa in position 15 to 16 is any amino acid
  Variant (17)..(17): Xaa in position 17 is Val, Ile, Ala, Leu or Phe
  Variant (18)..(19): Xaa in position 18 to 19 is any amino acid
  Variant (24)..(24): Xaa in position 24 is Ile, Val or Phe
  Variant (25)..(26): Xaa in position 25 to 26 is any amino acid
  Variant (27)..(27): Xaa in position 27 is Val, Leu, Ile, Phe or Met
  Variant (28)..(29): Xaa in position 28 to 29 is any amino acid
  Variant (31)..(31): Xaa in position 31 is Glu or Gln

SEQ ID NO: 22305 - DNA, 819 bp, Escherichia coli K12
  CDS (1)..(819)
atggaaacctatgctgtttttggtaatccgatagcccacagcaaatcgccattcattcatcagcaatttgctcagcaactgaatattgaacatccctatgggcgcgtgttggcacccatcaatgatttcatcaacacactgaacgctttctttagtgctggtggtaaaggtgcgaatgtgacggtgccttttaaagaagaggcttttgccagagcggatgagcttactgaacgggcagcgttggctggtgctgttaataccctcatgcggttagaagatggacgcctgctgggtgacaataccgatggtgtaggcttgttaagcgatctggaacgtctgtcttttatccgccctggtttacgtattctgcttatcggcgctggtggagcatctcgcggcgtactactgccactcctttccctggactgtgcggtgacaataactaatcggacggtatcccgcgcggaagagttggctaaattgtttgcgcacactggcagtattcaggcgttgagtatggacgaactggaaggtcatgagtttgatctcattattaatgcaacatccagtggcatcagtggtgatattccggcgatcccgtcatcgctcattcatccaggcatttattgctatgacatgttctatcagaaaggaaaaactccttttctggcatggtgtgagcagcgaggctcaaagcgtaatgctgatggtttaggaatgctggtggcacaggcggctcatgcctttcttctctggcacggtgttctgcctgacgtagaaccagttataaagcaattgcaggaggaattgtccgcgtga

SEQ ID NO: 22306 - protein, 272 aa, Escherichia coli K12
METYAVFGNPIAHSKSPFIHQQFAQQLNIEHPYGRVLAPINDFINTLNAFFSAGGKGANVTVPFKEEAFARADELTERAALAGAVNTLMRLEDGRLLGDNTDGVGLLSDLERLSFIRPGLRILLIGAGGASRGVLLPLLSLDCAVTITNRTVSRAEELAKLFAHTGSIQALSMDELEGHEFDLIINATSSGISGDIPAIPSSLIHPGIYCYDMFYQKGKTPFLAWCEQRGSKRNADGLGMLVAQAAHAFLLWHGVLPDVEPVIKQLQEELSA

SEQ ID NO: 22307 - DNA, 792 bp, Helicobacter pylori
  CDS (1)..(792)
atgaaattaaaatcttttggggtttttggaaatcccattaagcattccaaatcgcccttaatccataacgcttgttttttaacttttcaaaaagaattaaggtttttggggcattaccaccccatattactccctttagaaagccacatcaaaagcgagtttttgcatttgggattgagtggggctaatgtaaccttaccctttaaagaaagggcgtttcaagtttgcgataaaatcaaaggtatcgcgcttgaatgcggagcggtcaatacgcttgttttagaaaatgatgagcttgtgggttacaataccgacgctttagggttttatctttctttaaagcaaaaaaactatcaaaacgctttgattttaggagctggggggagcgctaaagccctagcgtgtgaattgaaaaaacaaggcttacaagtgagcgtgttgaaccgctcttctaggggattggattttttccaacgcctgggctgtgattgttttatggagcctcctaaaagcgcttttgatttgattattaacgccacttcagcgagtttgcataacgaattgcctttgaataaagaggttttgaaagggtattttaaagagggcaagctcgcttatgatttggcgtatgggtttttaacgccctttttgtctttagccaaagagttaaaaaccccttttcaagacggaaaagacatgctcatctatcaagctgctttaagttttgaaaaattcagcgcttctcaaatcccttattcaaaagcgtttgaagtcatgcgaagtgttttttga

SEQ ID NO: 22308 - protein, 263 aa, Helicobacter pylori
MKLKSFGVFGNPIKHSKSPLIHNACFLTFQKELRFLGHYHPILLPLESHIKSEFLHLGLSGANVTLPFKERAFQVCDKIKGIALECGAVNTLVLENDELVGYNTDALGFYLSLKQKNYQNALILGAGGSAKALACELKKQGLQVSVLNRSSRGLDFFQRLGCDCFMEPPKSAFDLIINATSASLHNELPLNKEVLKGYFKEGKLAYDLAYGFLTPFLSLAKELKTPFQDGKDMLIYQAALSFEKFSASQIPYSKAFEVMRSVF

SEQ ID NO: 22309 - DNA, 843 bp, Bacillus subtilis
  CDS (1)..(843)
atgaaaaagctgtacggggttatcggaaatcctattggccattctatgtcacctgatattcataacgcatcattgaaagacctcgggcttgacggacattatcatgccttcaaggtagaagagaatgatctggaggatgcggtaaaaggaataagagctctaggcgtacaaggaatcaatgtgactgttccgcacaaggtttccattatggattatttggatcatattgatgagagtgcaaaagtgctcggtgccgtaaacacggtcagaagagagggagataagcttgtcggatacaataccgatggggaaggcttcgtgaagtcattaatgaaggtattagacaagcccatctctgaactgtcattcttaatgatcggcgctggcggagcggcgagagccatttttacaacatttgtccgaaataccccgaaaaaatttgacatttgcaaccggacgttagaaaaagcaaagcggcttacagaagctactccctcgtttcacaataaagaagtattaagcataaaagaagcagaagaacgtcttgagcagtatgatgttatcatccatacaacgtctgtgggcatgtatccgaacgtggacgatgtgccgctttcattacagcgtgccgcgagcagtgccgtcgtatgtgatatcgtgtataatccaatacagacggcacttttaaaagaagcaagccaaaaaggcttgaaaacactcgatggtgtgggcatgtttgttgaacaggcagcattgtctttccaattgtggactggacaagagcctaatattgaaaaaatgagatctattgtaataggaaaattaggaggaacagaatgttaa

SEQ ID NO: 22310 - protein, 280 aa, Bacillus subtilis
MKKLYGVIGNPIGHSMSPDIHNASLKDLGLDGHYHAFKVEENDLEDAVKGIRALGVQGINVTVPHKVSIMDYLDHIDESAKVLGAVNTVRREGDKLVGYNTDGEGFVKSLMKVLDKPISELSFLMIGAGGAARAIFTTFVRNTPKKFDICNRTLEKAKRLTEATPSFHNKEVLSIKEAEERLEQYDVIIHTTSVGMYPNVDDVPLSLQRAASSAVVCDIVYNPIQTALLKEASQKGLKTLDGVGMFVEQAALSFQLWTGQEPNIEKMRSIVIGKLGGTEC

SEQ ID NO: 22311 - DNA, 801 bp, Helicobacter pylori
  CDS (1)..(801)
atgaaattaaaatcttttggggtttttgggaatcccattaaacattccaaatcgcccttaatccataacgcttgttttttaacttttcaaaaagaattagggtttttggggcattaccaccccatattactccctttagaaagccgtatcaaaaacgagtttttacatttgggattgagtggggctaatgtaaccctaccctttaaagaaagggcgtttcaaatttgcgacaaaatcaaaggtatcgcgcttgaatgcgcttcagtcaatacgcttgttttagaaaatgatgagcttgtgggttacaataccgacgctttagggttttacctctctttaaaacaccaaaactaccaaaacgaccaaaacgctttgattttaggcgctggggggagtgctaaagccctagcgtgcggattacaaaaacaaggcttaaaagtgagcgtgttaaaccgctctgctaggggattggattttttccaacgcttgggctgtgattgttttatggagcctcctaaaagcgcttttgatttgatcattaacgccacttcagcgagtttgcataacgaattgcctttaaataaagaggttttgaaagggtattttaaagagagcaagctcgcttatgatttggcgtatgggtttttaacgccctttttgtctctggctaaagagttaaaaatcccctttcaagacgggaaagacatgctcatctatcaagcctctttaagttttgaaaaattcagcgattctcaaattccttattcaaaagcgtttgaagtcatgcgaagtgttttttga

SEQ ID NO: 22312 - protein, 266 aa, Helicobacter pylori
MKLKSFGVFGNPIKHSKSPLIHNACFLTFQKELGFLGHYHPILLPLESRIKNEFLHLGLSGANVTLPFKERAFQICDKIKGIALECASVNTLVLENDELVGYNTDALGFYLSLKHQNYQNDQNALILGAGGSAKALACGLQKQGLKVSVLNRSARGLDFFQRLGCDCFMEPPKSAFDLIINATSASLHNELPLNKEVLKGYFKESKLAYDLAYGFLTPFLSLAKELKIPFQDGKDMLIYQASLSFEKFSDSQIPYSKAFEVMRSVF

SEQ ID NO: 22313 - DNA, 855 bp, Streptococcus pneumoniae
  CDS (1)..(855)
atgaagcttgatggctatacacgtttagctgcagttgttgccaatcctattaagcattctatttctcccttcatccacaatagagcctttgaggcgacagctaccaacggtgcttatgtggcttgggagattgaagcgagtgacttggtagaaacagtggccaatattcgtcgctaccagatgtttggcatcaatctgtccatgccctataaggagcaggtgattccttatttggataagctgagcgatgaagcgcgcttgattggtgcggttaatacggttgtcaatgagaatggcaatttaattggatataatacagatggcaagggattttttaagtgcttgccttcttttacaatttcaggtaaaaagatgaccctgctgggtgcaggtggtgcggctaaatcaatcttggcacaggctattttggatggcgtcagtcagatttcggtctttgttcgttccgtttctatggaaaaaacaagaccttacctagacaagttacaggagcagacaggttttaaagtggatttgtgtgctttagaatatgtttctgaactgcaagcaaggattgccgagtcggatttgctagttaatgccaccagtgtgggcatggatggccaatcctctcctgttcctgaaaacatagtcttaccagaaactcttttagttgcagatatcatataccaaccctttgaaacaccgtttttgaaatgggctagaagtcagggcaatccagcagtcaatggtctgggaatgttactctatcaagctgcagaagcttttcaactgtggacaggcaaggaaatgccgacagaagagatttggcagtctttaacagaaaaataccaataa

SEQ ID NO: 22314 - protein, 284 aa, Streptococcus pneumoniae
MKLDGYTRLAAVVANPIKHSISPFIHNRAFEATATNGAYVAWEIEASDLVETVANIRRYQMFGINLSMPYKEQVIPYLDKLSDEARLIGAVNTVVNENGNLIGYNTDGKGFFKCLPSFTISGKKMTLLGAGGAAKSILAQAILDGVSQISVFVRSVSMEKTRPYLDKLQEQTGFKVDLCALEYVSELQARIAESDLLVNATSVGMDGQSSPVPENIVLPETLLVADIIYQPFETPFLKWARSQGNPAVNGLGMLLYQAAEAFQLWTGKEMPTEEIWQSLTEKYQ

SEQ ID NO: 22315 - DNA, 870 bp, Nostoc sp. PCC 7120
  CDS (1)..(870)
atgattacaggcaaaactaaactattaggggtaattggacatccggtggaacattcgctctcaccagtgatgcacaatgcagcgatcgctcaattaggattagattatgtatatctgccttttcctatagcaccagataatttagaagcagcgatcgctcttttggctactattggtgttgttggttttagtgtgaccattcctcacaaacaagcaatcatccccctgctttccgaaattagcccagttgctcaagctataggcgcggtaaatactgtcacccgtcaaaataatcaatgggtggggacaaacacagatatagaagggtttattgcccctttgcagacaacatataaacgagattggagtcagcaaatcgccgtaattttaggtaatggtggcgctgcgagagctgttgttgctggttgttatcaactgggttttgcggaaattcatgtggtggggcgcaatgtgcaacgcttagaagaatttcgccacagttgggaaaattcccccattgctgagaatttacaagtgcatacctgggattatctagcaaagctcatccctcaagctaacttactggtgaacacaaccccgatagggatgtatccgcaggttgatgagtcgcctttgagtgcagaggaactggtgaatttacaaactggtactattgcctatgatttgatatatattcccaaaccaacgcaatttctccaaaaagcccaacaacaaggcgcaattattatcgacggcttagaaatgttagttcagcaaggtgtagctgctttaaaaatttggttgcagcaggacgatattcctgtagatgtcatgcgtcaagctttaattaagcacttaggtctaaagtga

SEQ ID NO: 22316 - protein, 289 aa, Nostoc sp. PCC 7120
MITGKTKLLGVIGHPVEHSLSPVMHNAAIAQLGLDYVYLPFPIAPDNLEAAIALLATIGVVGFSVTIPHKQAIIPLLSEISPVAQAIGAVNTVTRQNNQWVGTNTDIEGFIAPLQTTYKRDWSQQIAVILGNGGAARAVVAGCYQLGFAEIHVVGRNVQRLEEFRHSWENSPIAENLQVHTWDYLAKLIPQANLLVNTTPIGMYPQVDESPLSAEELVNLQTGTIAYDLIYIPKPTQFLQKAQQQGAIIIDGLEMLVQQGVAALKIWLQQDDIPVDVMRQALIKHLGLK

SEQ ID NO: 22317 - DNA, 849 bp, Agrobacterium tumefaciens
  CDS (1)..(849)
atgccccatgactttctcgccgagataaccggctccttcgccatgccggccggagagaacccgacggtcgccatgatcgaggctgcctatcagcatcacggcctgaactggcgttatatcaatctggaggtcagccccgaaaacctgaaggatgccgtggcgggtgcacgtgcgatgggctgggccgggttcaactgctccattccccacaaggtcgcggtcatccagcatctcgacggcctgggggaatccgccgagatcatcggcgccgtcaacaccatcgtccggcggggcgacaggctgatcggcgaaaacaccgatggcaagggtttcgtcaaggcgcttcgcgacgtcatcgacccgaaggacaagaaggtcgtgctgttcggcgccggcggcgcggcgcgcgcggtgtgtgtcgaggtggcactcgccggtgccgcgcatatcaccgtggtcaaccgcaaccgggaacgtggtgaaaccgtggcgcggctgattgacgaaaagacgccggccaccgccaccttcgccgcatgggaagacgccttcgccattcccgaagagacggatatcgtcattcacgccacctcggtaggcctttatcctgatatagacggcttgcccgacatcgatctgaagacgctgcgtccctccatggtcgttgccgacggcatccataatccgccgcgcacgcggctgatccgtgccgcagaggccgcgggcagcaagacggccgatggtctcggcatgctggtcaatcagggcgtcataggcatcaaatattggaccggggtcgatgttgacgcctatgtaatgcggcaggccctcgtcgatctcaatctctaa

SEQ ID NO: 22318 - protein, 282 aa, Agrobacterium tumefaciens
MPHDFLAEITGSFAMPAGENPTVAMIEAAYQHHGLNWRYINLEVSPENLKDAVAGARAMGWAGFNCSIPHKVAVIQHLDGLGESAEIIGAVNTIVRRGDRLIGENTDGKGFVKALRDVIDPKDKKVVLFGAGGAARAVCVEVALAGAAHITVVNRNRERGETVARLIDEKTPATATFAAWEDAFAIPEETDIVIHATSVGLYPDIDGLPDIDLKTLRPSMVVADGIHNPPRTRLIRAAEAAGSKTADGLGMLVNQGVIGIKYWTGVDVDAYVMRQALVDLNL

SEQ ID NO: 22319 - DNA, 870 bp, Listeria monocytogenes
  CDS (1)..(870)
atggaaaatagaatttcaggaacgactaggcttcttggcttaattgggacacccatagaccattcaaaatctccaatcatgtataattacagttttcaaaaagcgggtttggattatgcttacctagcctttgacacacctatccaaaaagttgcagatactattaaggcaatcaagacatttaatcttcgtggtgcaaatgtaaccatgccttgtaaaagtgaagttttaaaacacatggatgacctttcccctgccgcacggatgattggcgctgttaacactatcgtaaatgaagacgggaaactaactgggcatatcacagacggccttggttttattgcaaatttgcgagatgctagtgtagatgttgccggcaaaaaaatgactataattggtgctggtggcgcggctacagcaatccaagtccagtgtgcacttgatggggccaaggaaatcaccatttttaatattaaagacgctttttatgacaaagcgaaacaaaccgttgcttctattaaacaagaagtcccaaattgcatcgtacatatttatgatttgaacgatacagaaaaactaaatgcagaaattaccactagcgatatccttgttaatgcaacactcgttggtatgcatccgaatgaacatgaaacacctattagcgatacatccgtttttagaaaagaacttatcgttgcagatattatttataatcctaaaaaaacgcaacttctactagatgctgaagctgctggttgtaagactgtaggcgggttaggaatgcttttgtggcaaggcgctgaagcatacaaattgtttactggtaaagatatgccagtttcagaagtaaaagatctatatttcaactaa

SEQ ID NO: 22320 - protein, 289 aa, Listeria monocytogenes
MENRISGTTRLLGLIGTPIDHSKSPIMYNYSFQKAGLDYAYLAFDTPIQKVADTIKAIKTFNLRGANVTMPCKSEVLKHMDDLSPAARMIGAVNTIVNEDGKLTGHITDGLGFIANLRDASVDVAGKKMTIIGAGGAATAIQVQCALDGAKEITIFNIKDAFYDKAKQTVASIKQEVPNCIVHIYDLNDTEKLNAEITTSDILVNATLVGMHPNEHETPISDTSVFRKELIVADIIYNPKKTQLLLDAEAAGCKTVGGLGMLLWQGAEAYKLFTGKDMPVSEVKDLYFN

SEQ ID NO: 22321 - DNA, 822 bp, Listeria innocua
  CDS (1)..(822)
atggaaaaatatgttgttatcggaaatcctattcgtcactcgttatcaccagctatgcaaaatcggattttccaagaacttggaatgaacgcggagtataactctgttttgatagaagaagatacttttgagacagaaataaaaaaattaatggattctggagtgcgcggatttaatatcacgacaccatttaaagagcgtattctaccatttttagatgaattagaggatttggcagcagcatcaggcgcagtgaatacagtgcttagaaaagatggcaagtggtatggcttcaacacagatggcaaaggttatttagaaggcttagaagaaattcgttcaattacaaaagacgattctattttaatcacaggagcaggtggagctagtaaagcaatttatcttgcacttaaaagccatactgaggcgaaaataaccgttgccaatcgaacaacggaaaaagcgatagaaatgacgaaagataatgataatcatcatgccatgacactagaacaagctgaaaaagaactggctgattttacaattattatccaaactacttctatcggtctagaagcttctaagaataaaagcccaatttcgctttctaatttaacaaaaggaacaatttgttctgatattatttataatccagccgaaacagcctttttaaaagaagcaaagaaaaatggggctattacacaaaatggtttaccaatgtttgttaatcaaggggcactagcctttgaaatatggactggcattaagccagagcgatcaatgatgaaagaagcagtactcgaacaattaggaggaaactaa

SEQ ID NO: 22322 - protein, 273 aa, Listeria innocua
MEKYVVIGNPIRHSLSPAMQNRIFQELGMNAEYNSVLIEEDTFETEIKKLMDSGVRGFNITTPFKERILPFLDELEDLAAASGAVNTVLRKDGKWYGFNTDGKGYLEGLEEIRSITKDDSILITGAGGASKAIYLALKSHTEAKITVANRTTEKAIEMTKDNDNHHAMTLEQAEKELADFTIIIQTTSIGLEASKNKSPISLSNLTKGTICSDIIYNPAETAFLKEAKKNGAITQNGLPMFVNQGALAFEIWTGIKPERSMMKEAVLEQLGGN

SEQ ID NO: 22323 - DNA, 861 bp, Agrobacterium tumefaciens
  CDS (1)..(861)
atggctgattcacgtgaaacattaactataaatgccttcgttgtcggttacccgatcaaacattcccggtcgccgatcatccattcctattggctgaaaaaattcggtatcgccggttcctatacggcagttgaggtctccccagacgatttcccgaagttcattgcaacgctgaaggaaggcaagccgggtgcagcggtgggcggtaacgccaccattccgcacaaggaagcggcttaccggttggccgatcatcccgatgccttggcggaagaactcggcgccgccaacaccatctggatggaggagggtaaactccacgcgaccaacacggatggttacggtttcgtctcgaacctggacgagcggcatccgggctgggataagacccagcgcgcggtggtgttcggcgccggcggtgcaagccgggccgtcattcagtcgctgcgtgatcgggatgttgcggaaattcacgtcgtgaaccgtacggtcgagcgcgctcgcgaactggccgaccgctttggcccacgggtcttttcccatccccaggcagcgcttcaggaggtcatgcacggcgcggggttgttcgtgaatacgacatcgctcggaatgaatggaaccgaagcgccgcatcttgatttttcgcatctcgcggccaatgcggtggtgaccgatatcgtctacgtgccgttgaaaacgccgatcctcaacatggcgcaagagcagggcatcgcaaccgtcgatgggctcggcatgttgcttcatcaggcaaaacctggtttcaggcgatggttcggcaggattccggaggtggatgaaacccttcgttccctgatcatcgcggatatggagaaacattga

SEQ ID NO: 22324 - protein, 286 aa, Agrobacterium tumefaciens
MADSRETLTINAFVVGYPIKHSRSPIIHSYWLKKFGIAGSYTAVEVSPDDFPKFIATLKEGKPGAAVGGNATIPHKEAAYRLADHPDALAEELGAANTIWMEEGKLHATNTDGYGFVSNLDERHPGWDKTQRAVVFGAGGASRAVIQSLRDRDVAEIHVVNRTVERARELADRFGPRVFSHPQAALQEVMHGAGLFVNTTSLGMNGTEAPHLDFSHLAANAVVTDIVYVPLKTPILNMAQEQGIATVDGLGMLLHQAKPGFRRWFGRIPEVDETLRSLIIADMEKH

SEQ ID NO: 22325 - DNA, 870 bp, Brucella melitensis
  CDS (1)..(870)
atggatgacaaaagcatggccagggggcgaaaggctttcgttaccggatttccgatcaggcattcgcgttcgccgctgatccacggtttctggttgaaggaactgggcattgacgggtcttatgaggctgtggaagtcaagccggaagatttctcctcttttgcagcttcgcttgccgcaaatggctttgcgggcggaaatgtcaccattccccacaaggaggcggcctatgccgctgctgaaagccttgatgaagcagcccgcgccatcggcgcggtcaacacactctggcttgaaaatggcaggctttgcggcggcaacaccgatgcctatggttttgccgccaatctggatgcttccgctcccggctgggacaaggctgatcgcgctttggttctgggtgccggcggggcaagccgggcggtggttcatgcgcttttgtcgcgcggcgtctgtcatgtttcggtggtgaaccgcacgttgagccgggcggaagaactggcggcgcatttcggcgcgcgcgtttacgcccatggctgggatgaggcgcaagctcttgtttccaatgctggtcttatcgtcaacacgaccgcgctcggcatgagcgggcatggcgagggacaggattttccgatcgaccttacatgcgcgccgaaagaggcggtggcgacagatatcgtctatgtgccgcttagaacagctttcctgaacaaagccgaaaaagccggtttgaagacagtggacgggcttggcatgttgctgcatcaggctgttccgggctttgaacgatggttcgggcaaaggccgcaggtgacgcaggcattgcgagagcatattctggcggatatggcgaaggctggtgcgctatga

SEQ ID NO: 22326 - protein, 289 aa, Brucella melitensis
MDDKSMARGRKAFVTGFPIRHSRSPLIHGFWLKELGIDGSYEAVEVKPEDFSSFAASLAANGFAGGNVTIPHKEAAYAAAESLDEAARAIGAVNTLWLENGRLCGGNTDAYGFAANLDASAPGWDKADRALVLGAGGASRAVVHALLSRGVCHVSVVNRTLSRAEELAAHFGARVYAHGWDEAQALVSNAGLIVNTTALGMSGHGEGQDFPIDLTCAPKEAVATDIVYVPLRTAFLNKAEKAGLKTVDGLGMLLHQAVPGFERWFGQRPQVTQALREHILADMAKAGAL

SEQ ID NO: 22327 - DNA, 876 bp, Listeria innocua
  CDS (1)..(876)
atgacaaacaaaatcactgaaagaatcacaggacacacagaattaatcgggttaatcgccactccaatcagacacagtttatcaccaacaatgcacaacgaagcttttgcaaaactagggcttgattatgtataccttgcttttgaagttggagacaaagaactgaaagatgttgtacaagggttccgagcaatgaacttacgcggctggaatgtttctatgccaaataaaacaaatatccataaatacttagataaactttctccagcggctgaacttgtaggggcagtaaacacagttgttaatgatgacggcgtgttaactggacacatcacggacggcactggctatatgcgtgcgttaaaagaagccggtcatgatattatcggtaaaaaaatgacaatttgtggtgctggtggtgccgcaacagctatctgcatccaagctgctctcgatggcgtgaaagaaatctcgattttcaacagaaaagacgatttttatgccaatgctgaaaaaacagtagaaaaaatcaatacaaaaacaaattgtaaagcacaattatttgatatggaagaccacgaacaattacgtaaagaaatcgcagaaagtgtgattttcacgaatgcgactggcgttgggatgaaacctttcgaaggcgaaacacttctaccaagtgcagatatgcttcgtccagaattaatcgtttcggatgttgtttacaaaccaactaaaacaagattgctggaaatcgctgaagaacaaggctgtcaaacacttaatggtctaggcatgatgctttggcaaggtgcgaaagctttcgaaatttggacacacaaagaaatgccagttgattacattaaagaaatcctattttaa

SEQ ID NO: 22328 - protein, 291 aa, Listeria innocua
MTNKITERITGHTELIGLIATPIRHSLSPTMHNEAFAKLGLDYVYLAFEVGDKELKDVVQGFRAMNLRGWNVSMPNKTNIHKYLDKLSPAAELVGAVNTVVNDDGVLTGHITDGTGYMRALKEAGHDIIGKKMTICGAGGAATAICIQAALDGVKEISIFNRKDDFYANAEKTVEKINTKTNCKAQLFDMEDHEQLRKEIAESVIFTNATGVGMKPFEGETLLPSADMLRPELIVSDVVYKPTKTRLLEIAEEQGCQTLNGLGMMLWQGAKAFEIWTHKEMPVDYIKEILF

SEQ ID NO: 22329 - DNA, 870 bp, Listeria innocua
  CDS (1)..(870)
atggaaaaaagaatttcaggatcaactcggcttctaagtttaattggtacacccgtagaccattcaaaatccccaatcatgtataattatagttttcaaaaagctggtttagattatgcgtatcttgcatttgatattcctgtaagtaaagtcgctgatgcaattgctgctatcaagacttttaacctgcgtggctctaacgtaaccatgccttgtaaaagtgaagttttaaaatacatggatgaactttcccctgctgcgcgaatgattggtgctgtaaataccattataaatgaagatgggaaactaaccggacatatcacagacggtcttggttttgctagtaatttacgggattctggtgtagatgtggcgggcaaaaaaatgaccatcatcggcgctggtggtgcagcaacagcaatccaagttcagtgcgcacttgatggggccaaggaaatcgccatttttaatattaaagatgatttttatgaaaaagctaaacaaacgattgcttctattaaacaagaagttcctgactgcatcgtacatatttatgacttaaatgacgcagcaaaattacatgaggaaatagcgactagtgatattttagtaaatgctacactcgttggtatgcatccacatgaaaatgaaacgcctgtcaaagatacgactgtcttcagaaaagatttaatcgtcaccgatgttgtctacaatccaaagaaaaccagacttttgctagatgcagaagctgctggttcaaaaactataggcggactaggcatgcttttatggcaaggcgcagaagcatacaaactgttcacaggtaaagatatgcctgtttcagaagtaaaagatttatattttaattaa

SEQ ID NO: 22330 - protein, 289 aa, Listeria innocua
MEKRISGSTRLLSLIGTPVDHSKSPIMYNYSFQKAGLDYAYLAFDIPVSKVADAIAAIKTFNLRGSNVTMPCKSEVLKYMDELSPAARMIGAVNTIINEDGKLTGHITDGLGFASNLRDSGVDVAGKKMTIIGAGGAATAIQVQCALDGAKEIAIFNIKDDFYEKAKQTIASIKQEVPDCIVHIYDLNDAAKLHEEIATSDILVNATLVGMHPHENETPVKDTTVFRKDLIVTDVVYNPKKTRLLLDAEAAGSKTIGGLGMLLWQGAEAYKLFTGKDMPVSEVKDLYFN

SEQ ID NO: 22331 - DNA, 852 bp, Brucella melitensis
  CDS (1)..(852)
atgtggctggcggtctttatatggcctgacattatgattaccggacataccaagctttacggcattgtcgccaatccgattgcccatgtaaaaacgcctgaggaggtgaacaagcattttgcggccttgggccatgacggcgtgctggttccttttcatgttctgccggaaaatctggcacagttcgtcaacagccttcgcaagctcgaaaatctgggcgggctggttgtcaccgtgccacacaagacggcaattctctccctttgtgacaggctggaaggcgatgccgccgctattggggctgccaacgtcatccggcgcgagagtgatggcacgcttgtcggtgtcatgttggacggcaaggggtttgtgagtgggcttgtggccagcgatattgacgtcaccggcatgaacgcctgtctccttggcgcgggcggggcggcttcggccatcgcctttgccttggcggaggccggcgtcgcgcggctcaccattgtaaaccgttccgaggacaaagctcgcgatcttgctgcgcgagtgagtgagcgttatcccgctgtccagatcgatgccggagcaccgcaaacggcaagccgcgatctcatcatcaatgcgacatcgctgggtcttcgggctggtgatccgctgccgcttgacgatcttgccttccatgccggccagatcgtcgcggaagtgatcatggagccggaagtgacgccgcttctggctgctgcccgcgacaagggtgcgcgcattcatttcggccgcccgatgctgcgccagcaaattcgtctcatggctgaacatatgggtgcaaaggcgaacgccgacgtgcagaagccgacggagtaa

SEQ ID NO: 22332 - protein, 283 aa, Brucella melitensis
MWLAVFIWPDIMITGHTKLYGIVANPIAHVKTPEEVNKHFAALGHDGVLVPFHVLPENLAQFVNSLRKLENLGGLVVTVPHKTAILSLCDRLEGDAAAIGAANVIRRESDGTLVGVMLDGKGFVSGLVASDIDVTGMNACLLGAGGAASAIAFALAEAGVARLTIVNRSEDKARDLAARVSERYPAVQIDAGAPQTASRDLIINATSLGLRAGDPLPLDDLAFHAGQIVAEVIMEPEVTPLLAAARDKGARIHFGRPMLRQQIRLMAEHMGAKANADVQKPTE

SEQ ID NO: 22333 - DNA, 822 bp, Yersinia pestis
  CDS (1)..(822)
atggatcagaagtttgcagtatttggtaatcctattagtcatagtaaatcgccgaggatccatacgcttttttccgagcaaacaggcattgaacatcgatatggtaaggtattagctccttctgaagcctttgagaacacattagtatctttttttgctgatggtgcccagggagcgaacattaccacaccgtttaaagaacgcgcatatgaccaatgtgatgaattaaccgaccgtgcatctctggcaggggctgttaatacgattaagcgtttggaagatgggcgcttgttgggtgacaacacagatggtattggtttgctcagtgatcttgaacgacaaaacttgatccgaacaactgatcatattttgttggttggggctggtggcgctgcccgaggagtgatccttcctctactttcttatgggtgtactgtggttgttaccaaccggacacatacccgggcgcagcaactggccaaagtatttaaccatattggtgatattgatgtttgtgaaatgtcggagttggctggacaacgattcgatttggttataaatgcgacggcatcaggccttcatggagaggtacctaacttaccagcagctatacttacttctcaaacacgttgttacgatatgttctatcaggcgggaaccacaccattcttggcttgggcacaacgattgggtttagcagattatgccgatggtttaggaatgctggtagggcaagcagcacatgctttcaaactttggcacggtgtgatgcctgaaattacgccagtattagcccagctacgcagtgagttaggtaaatag

SEQ ID NO: 22334 - protein, 273 aa, Yersinia pestis
MDQKFAVFGNPISHSKSPRIHTLFSEQTGIEHRYGKVLAPSEAFENTLVSFFADGAQGANITTPFKERAYDQCDELTDRASLAGAVNTIKRLEDGRLLGDNTDGIGLLSDLERQNLIRTTDHILLVGAGGAARGVILPLLSYGCTVVVTNRTHTRAQQLAKVFNHIGDIDVCEMSELAGQRFDLVINATASGLHGEVPNLPAAILTSQTRCYDMFYQAGTTPFLAWAQRLGLADYADGLGMLVGQAAHAFKLWHGVMPEITPVLAQLRSELGK

SEQ ID NO: 22335 - DNA, 771 bp, Salmonella enterica subsp. enterica serovar Typhi
  CDS (1)..(771)
atgacaaagcgcattaataaagacactcaggtctgcatgtccctggctgcacgcccaagtaacttcggtacacgctttcacaactatctgtacgaagcgctggatctcaattatctctacaaagctttctcgccgaccgatcttacgcaggccattagcggcgtgcgcgggctggggatacgtgggtgcgcgatctctatgccatttaaggaagcctgcattccgctggtggatgaactggatgcttccgctaaggcgtacaacaccgattacattgcaatagctcgcttgctggcgaattacaaggtctctcccgaccaggtgtttgctttgcgtggcagcggtggtatggcaaaggcggtggcctgcgcgctgaaggatgcggggtttacccgtggttatattgtcgcgattgatgaagcgtcaggtaaacaactggccgaactctatggctatgaatggcgcccggataccgacggtattgaagccgatttgttaattaacgccacgcctatcggaatggctggcggtaatgatgccgacaaactctcttattccgaacaagaagtggataaggcgagcgttatctttgatgtggtggcgctaccgcccgtcacgccgctaatccgctacgcccgtgaacgcggtaaaaccgtgattatcggttccgaagtgtttgctattcaggccgtggagcaatttgtcctttataccgggattcgcccggatgacgcactgttccagaaagccgcggcctggtcacgtctgtaa

SEQ ID NO: 22336 - protein, 256 aa, Salmonella enterica subsp. enterica serovar Typhi
MTKRINKDTQVCMSLAARPSNFGTRFHNYLYEALDLNYLYKAFSPTDLTQAISGVRGLGIRGCAISMPFKEACIPLVDELDASAKAYNTDYIAIARLLANYKVSPDQVFALRGSGGMAKAVACALKDAGFTRGYIVAIDEASGKQLAELYGYEWRPDTDGIEADLLINATPIGMAGGNDADKLSYSEQEVDKASVIFDVVALPPVTPLIRYARERGKTVIIGSEVFAIQAVEQFVLYTGIRPDDALFQKAAAWSRL

SEQ ID NO: 22337 - DNA, 870 bp, Agrobacterium tumefaciens
  CDS (1)..(870)
atgacagaaaaaaccgcctacaaggtcggcctgataggcgccgacatccagctttccaaatcgcccgcgctgcatatgcgtgagggtgcggcccatggcctcgactattcctacgagcttgtggatgtcaccgcccgcaaactgccgcagagtagccttcccgctcttctcgacgagctggaggcgcgcggttttgccgggacgaacatcacccatcctttcaagcaggccgttattccgcatctgcacgaactctccgacgacgcccgcatgttgggcgcggtcaacaccgttgtcttccgggatggacgccgcatcggccacaataccgactggtacggtttttacgaaagcttcgtgcgcggcctgccggatgcaaaacgcgaccgggcacttctggtcggcgcaggtggcgccggcgttgcggtggcccatgccgcgttgaagctcgatattatcaggctggatatcttcgaccgggattttccaagagccgaacgtctcgccgacgagctcaatgcccgttttggtgaaggccgcgccttcgcggtgaaggacccggccgactcgctgccctttgccgatggcctgatccatgccacgccgatgggcatgcccgcgcatcccggcatgccggttgcggccgagctgatcgaacaaaagcactgggtcgccgatatcgtctatatgccgctggtgaccgagcttctggcgactgcggccagcaagggatgccgaaccctgcccggcggcggcatgaccgtgttccaggccgtcggcgcatttcgcctcttttgcggccgcgagccggatgcgaaacgcatgacggcgcatttcacagaactttgcatggcggagggcgtggcatga

SEQ ID NO: 22338 - protein, 289 aa, Agrobacterium tumefaciens
MTEKTAYKVGLIGADIQLSKSPALHMREGAAHGLDYSYELVDVTARKLPQSSLPALLDELEARGFAGTNITHPFKQAVIPHLHELSDDARMLGAVNTVVFRDGRRIGHNTDWYGFYESFVRGLPDAKRDRALLVGAGGAGVAVAHAALKLDIIRLDIFDRDFPRAERLADELNARFGEGRAFAVKDPADSLPFADGLIHATPMGMPAHPGMPVAAELIEQKHWVADIVYMPLVTELLATAASKGCRTLPGGGMTVFQAVGAFRLFCGREPDAKRMTAHFTELCMAEGVA

SEQ ID NO: 22339 - DNA, 786 bp, Brucella melitensis
  CDS (1)..(786)
atgacggttactggccatacaagggtgttcgccattatcgcggacccggttcatcatgtccgcacgccgcaggccctgaacgccttatttgctgcgcgtggctatgacggcatcgtcgtgcccgctgccgttcccgccagcgggctgaaatatgcagcggctgccctgcgtgccttcggcaattggggcggtttcattgtcaccgtgccgcacaagacggaaatgcccgccttttgcgaccggctgacgccgcgcgcgcaagcagccggggcggtgaatgtgatccgccgcgaggccgatgggagcctgacgggcgaattgctggatggtgtcggttttgtgcgcgggcttgccaatgcgggccatgatgtgaagggcaggagcgtttatcttgccggtgcaggcggtgcggcttcggccattgcctttgcccttgcagaggcgggcgttgtccgcttgacggtcgtgaaccgttccagcgaaaaggccgggcagcttgttgcgcggctgaaggaacatttcccggcgggcatgttcgtatcgcagggtacgcctgccggtcatgacatcatcgtcaacggcacgtcgcttggcctgaaagaaggcgatgcactgccggtggacccgcaatatctccggcctgaaatgctggtggcagaggttatcatgtcgccggaagtgacgccgcttttgcagatcgcgaaagatagcggctgctctatccatcccggcaaggccatgctggatggccagttggccgagatgttcgatttcttcacgcgataa

SEQ ID NO: 22340 - protein, 261 aa, Brucella melitensis
MTVTGHTRVFAIIADPVHHVRTPQALNALFAARGYDGIVVPAAVPASGLKYAAAALRAFGNWGGFIVTVPHKTEMPAFCDRLTPRAQAAGAVNVIRREADGSLTGELLDGVGFVRGLANAGHDVKGRSVYLAGAGGAASAIAFALAEAGVVRLTVVNRSSEKAGQLVARLKEHFPAGMFVSQGTPAGHDIIVNGTSLGLKEGDALPVDPQYLRPEMLVAEVIMSPEVTPLLQIAKDSGCSIHPGKAMLDGQLAEMFDFFTR

SEQ ID NO: 22341 - DNA, 822 bp, Buchnera sp
  CDS (1)..(822)
atgtttaaatgcaaaaattttaattatgctgtatttggaaatcctataaatcatagtaaatctcctgaaattcatagtttattttcaaaacagacaggtatttctcatttttataaatcttgtaatgttccattaaatagcttgtatgctgttttacaagatttttttaaaaaagacggtcgaggtgcaaatattaccgcaccatttaaacaagaagcttattttttttgtaataagttaactaaaagagcagaagttgctcaatctgttaatacgttgaaaaaaatagataattgtaatattttaggagataatacagacggaattggtttgttatcggatttaataagattgaattttataaaaaaaaattattcaatattgataatcggtgcaggtggtgctgctagaggtgttctttttcctcttttatcatatgggtgttcgatttgtatttttaatagaactgttttaaatgccgagaaattagtcttacaattccataaatacggaaatataaatgtttttaatacaaattcgttacatgtaaaatcttttgatttgattattaatgcaacatcgcattttattcaagataaagataattttattcctttttcttgcgtatcttctaagacatgcttttatgatatgaattatcaaacagataatacatttttttttgattggtctcgtaaaacaggatctaattttttttctaacggaataggtatgttagtttttcaagcagcccattctttttttctatggcataatgtgcttccagaaatagattatattattgatcttttaaataaataa

SEQ ID NO: 22342 - protein, 273 aa, Buchnera sp
MFKCKNFNYAVFGNPINHSKSPEIHSLFSKQTGISHFYKSCNVPLNSLYAVLQDFFKKDGRGANITAPFKQEAYFFCNKLTKRAEVAQSVNTLKKIDNCNILGDNTDGIGLLSDLIRLNFIKKNYSILIIGAGGAARGVLFPLLSYGCSICIFNRTVLNAEKLVLQFHKYGNINVFNTNSLHVKSFDLIINATSHFIQDKDNFIPFSCVSSKTCFYDMNYQTDNTFFFDWSRKTGSNFFSNGIGMLVFQAAHSFFLWHNVLPEIDYIIDLLNK

SEQ ID NO: 22343 - DNA, 4767 bp, Saccharomyces cerevisiae
  CDS (1)..(4767)
atggtgcagttagccaaagtcccaattctaggaaatgatattatccacgttgggtataacattcatgaccatttggttgaaaccataattaaacattgtccttcttcgacatacgttatttgcaatgatacgaacttgagtaaagttccatactaccagcaattagtcctggaattcaaggcttctttgccagaaggctctcgtttacttacttatgttgttaaaccaggtgagacaagtaaaagtagagaaaccaaagcgcagctagaagattatcttttagtggaaggatgtactcgtgatacggttatggtagcgatcggtggtggtgttattggtgacatgattgggttcgttgcatctacatttatgagaggtgttcgtgttgtccaagtaccaacatccttattggcaatggtcgattcctccattggtggtaaaactgctattgacactcctctaggtaaaaactttattggtgcattttggcaaccaaaatttgtccttgtagatattaaatggctagaaacgttagccaagagagagtttatcaatgggatggcagaagttatcaagactgcttgtatttggaacgctgacgaatttactagattagaatcaaacgcttcgttgttcttaaatgttgttaatggggcaaaaaatgtcaaggttaccaatcaattgacaaacgagattgacgagatatcgaatacagatattgaagctatgttggatcatacatataagttagttcttgagagtattaaggtcaaagcggaagttgtctcttcggatgaacgtgaatccagtctaagaaaccttttgaacttcggacattctattggtcatgcttatgaagctatactaaccccacaagcattacatggtgaatgtgtgtccattggtatggttaaagaggcggaattatcccgttatttcggtattctctcccctacccaagttgcacgtctatccaagattttggttgcctacgggttgcctgtttcgcctgatgagaaatggtttaaagagctaaccttacataagaaaacaccattggatatcttattgaagaaaatgagtattgacaagaaaaacgagggttccaaaaagaaggtggtcattttagaaagtattggtaagtgctatggtgactccgctcaatttgttagcgatgaagacctgagatttattctaacagatgaaaccctcgtttaccccttcaaggacatccctgctgatcaacagaaagttgttatcccccctggttctaagtccatctccaatcgtgctttaattcttgctgccctcggtgaaggtcaatgtaaaatcaagaacttattacattctgatgatactaaacatatgttaaccgctgttcatgaattgaaaggtgctacgatatcatgggaagataatggtgagacggtagtggtggaaggacatggtggttccacattgtcagcttgtgctgaccccttatatctaggtaatgcaggtactgcatctagatttttgacttccttggctgccttggtcaattctacttcaagccaaaagtatatcgttttaactggtaacgcaagaatgcaacaaagaccaattgctcctttggtcgattctttgcgtgctaatggtactaaaattgagtacttgaataatgaaggttccctgccaatcaaagtttatactgattcggtattcaaaggtggtagaattgaattagctgctacagtttcttctcagtacgtatcctctatcttgatgtgtgccccatacgctgaagaacctgtaactttggctcttgttggtggtaagccaatctctaaattgtacgtcgatatgacaataaaaatgatggaaaaattcggtatcaatgttgaaacttctactacagaaccttacacttattatattccaaagggacattatattaacccatcagaatacgtcattgaaagtgatgcctcaagtgctacatacccattggccttcgccgcaatgactggtactaccgtaacggttccaaacattggttttgagtcgttacaaggtgatgccagatttgcaagagatgtcttgaaacctatgggttgtaaaataactcaaacggcaacttcaactactgtttcgggtcctcctgtaggtactttaaagccattaaaacatgttgatatggagccaatgactgatgcgttcttaactgcatgtgttgttgccgctatttcgcacgacagtgatccaaattctgcaaatacaaccaccattgaaggtattgcaaaccagcgtgtcaaagagtgtaacagaattttggccatggctacagagctcgccaaatttggcgtcaaaactacagaattaccagatggtattcaagtccatggtttaaactcgataaaagatttgaaggttccttccgactcttctggacctgtcggtgtatgcacatatgatgatcatcgtgtggccatgagtttctcgcttcttgcaggaatggtaaattctcaaaatgaacgtgacgaagttgctaatcctgtaagaatacttgaaagacattgtactggtaaaacctggcctggctggtgggatgtgttacattccgaactaggtgccaaattagatggtgcagaacctttagagtgcacatccaaaaagaactcaaagaaaagcgttgtcattattggcatgagagcagctggcaaaactactataagtaaatggtgcgcatccgctctgggttacaaattagttgacctagacgagctgtttgagcaacagcataacaatcaaagtgttaaacaatttgttgtggagaacggttgggagaagttccgtgaggaagaaacaagaattttcaaggaagttattcaaaattacggcgatgatggatatgttttctcaacaggtggcggtattgttgaaagcgctgagtctagaaaagccttaaaagattttgcctcatcaggtggatacgttttacacttacatagggatattgaggagacaattgtctttttacaaagtgatccttcaagacctgcctatgtggaagaaattcgtgaagtttggaacagaagggaggggtggtataaagaatgctcaaatttctctttctttgctcctcattgctccgcagaagctgagttccaagctctaagaagatcgtttagtaagtacattgcaaccattacaggtgtcagagaaatagaaattccaagcggaagatctgcctttgtgtgtttaacctttgatgacttaactgaacaaactgagaatttgactccaatctgttatggttgtgaggctgtagaggtcagagtagaccatttggctaattactctgctgatttcgtgagtaaacagttatctatattgcgtaaagccactgacagtattcctatcatttttactgtgcgaaccatgaagcaaggtggcaactttcctgatgaagagttcaaaaccttgagagagctatacgatattgccttgaagaatggtgttgaattccttgacttagaactaactttacctactgatatccaatatgaggttattaacaaaaggggcaacaccaagatcattggttcccatcatgacttccaaggattatactcctgggacgacgctgaatgggaaaacagattcaatcaagcgttaactcttgatgtggatgttgtaaaatttgtgggtacggctgttaatttcgaagataatttgagactggaacactttagggatacacacaagaataagcctttaattgcagttaatatgacttctaaaggtagcatttctcgtgttttgaataatgttttaacacctgtgacatcagatttattgcctaactccgctgcccctggccaattgacagtagcacaaattaacaagatgtatacatctatgggaggtatcgagcctaaggaactgtttgttgttggaaagccaattggccactctagatcgccaattttacataacactggctatgaaattttaggtttacctcacaagttcgataaatttgaaactgaatccgcacaattggtgaaagaaaaacttttggacggaaacaagaactttggcggtgctgcagtcacaattcctctgaaattagatataatgcagtacatggatgaattgactgatgctgctaaagttattggtgctgtaaacacagttataccattgggtaacaagaagtttaagggtgataataccgactggttaggtatccgtaatgccttaattaacaatggcgttcccgaatatgttggtcataccgctggtttggttatcggtgcaggtggcacttctagagccgccctttacgccttgcacagtttaggttgcaaaaagatcttcataatcaacaggacaacttcgaaattgaagccattaatagagtcacttccatctgaattcaacattattggaatagagtccactaaatctatagaagagattaaggaacacgttggcgttgctgtcagctgtgtaccagccgacaaaccattagatgacgaacttttaagtaagctggagagattccttgtgaaaggtgcccatgctgcttttgtaccaaccttattggaagccgcatacaaaccaagcgttactcccgttatgacaatttcacaagacaaatatcaatggcacgttgtccctggatcacaaatgttagtacaccaaggtgtagctcagtttgaaaagtggacaggattcaagggccctttcaaggccatttttgatgccgttacgaaagagtag

SEQ ID NO: 22344 - protein, 1588 aa, Saccharomyces cerevisiae
MVQLAKVPILGNDIIHVGYNIHDHLVETIIKHCPSSTYVICNDTNLSKVPYYQQLVLEFKASLPEGSRLLTYVVKPGETSKSRETKAQLEDYLLVEGCTRDTVMVAIGGGVIGDMIGFVASTFMRGVRVVQVPTSLLAMVDSSIGGKTAIDTPLGKNFIGAFWQPKFVLVDIKWLETLAKREFINGMAEVIKTACIWNADEFTRLESNASLFLNVVNGAKNVKVTNQLTNEIDEISNTDIEAMLDHTYKLVLESIKVKAEVVSSDERESSLRNLLNFGHSIGHAYEAILTPQALHGECVSIGMVKEAELSRYFGILSPTQVARLSKILVAYGLPVSPDEKWFKELTLHKKTPLDILLKKMSIDKKNEGSKKKVVILESIGKCYGDSAQFVSDEDLRFILTDETLVYPFKDIPADQQKVVIPPGSKSISNRALILAALGEGQCKIKNLLHSDDTKHMLTAVHELKGATISWEDNGETVVVEGHGGSTLSACADPLYLGNAGTASRFLTSLAALVNSTSSQKYIVLTGNARMQQRPIAPLVDSLRANGTKIEYLNNEGSLPIKVYTDSVFKGGRIELAATVSSQYVSSILMCAPYAEEPVTLALVGGKPISKLYVDMTIKMMEKFGINVETSTTEPYTYYIPKGHYINPSEYVIESDASSATYPLAFAAMTGTTVTVPNIGFESLQGDARFARDVLKPMGCKITQTATSTTVSGPPVGTLKPLKHVDMEPMTDAFLTACVVAAISHDSDPNSANTTTIEGIANQRVKECNRILAMATELAKFGVKTTELPDGIQVHGLNSIKDLKVPSDSSGPVGVCTYDDHRVAMSFSLLAGMVNSQNERDEVANPVRILERHCTGKTWPGWWDVLHSELGAKLDGAEPLECTSKKNSKKSVVIIGMRAAGKTTISKWCASALGYKLVDLDELFEQQHNNQSVKQFVVENGWEKFREEETRIFKEVIQNYGDDGYVFSTGGGIVESAESRKALKDFASSGGYVLHLHRDIEETIVFLQSDPSRPAYVEEIREVWNRREGWYKECSNFSFFAPHCSAEAEFQALRRSFSKYIATITGVREIEIPSGRSAFVCLTFDDLTEQTENLTPICYGCEAVEVRVDHLANYSADFVSKQLSILRKATDSIPIIFTVRTMKQGGNFPDEEFKTLRELYDIALKNGVEFLDLELTLPTDIQYEVINKRGNTKIIGSHHDFQGLYSWDDAEWENRFNQALTLDVDVVKFVGTAVNFEDNLRLEHFRDTHKNKPLIAVNMTSKGSISRVLNNVLTPVTSDLLPNSAAPGQLTVAQINKMYTSMGGIEPKELFVVGKPIGHSRSPILHNTGYEILGLPHKFDKFETESAQLVKEKLLDGNKNFGGAAVTIPLKLDIMQYMDELTDAAKVIGAVNTVIPLGNKKFKGDNTDWLGIRNALINNGVPEYVGHTAGLVIGAGGTSRAALYALHSLGCKKIFIINRTTSKLKPLIESLPSEFNIIGIESTKSIEEIKEHVGVAVSCVPADKPLDDELLSKLERFLVKGAHAAFVPTLLEAAYKPSVTPVMTISQDKYQWHVVPGSQMLVHQGVAQFEKWTGFKGPFKAIFDAVTKE

SEQ ID NO: 22345 - DNA, 849 bp, Methanococcus jannaschii
  CDS (1)..(849)
atgataaatgctaaaacaaaggttattgggttgattggacatcctgtagaacattctttctcaccaattatgcacaatgcagcttttaaagataaaggattaaattatgtttatgttgcatttgatgtgttgccagaaaatttaaagtatgtaatagatggggctaaagcccttggaatagttggatttaatgtaacaatccctcataaaatagagattatgaagtatttggatgagatagataaagatgctcaattaattggggctgttaatactataaaaatagaggatgggaaagcaatcggctataatactgatggtattggggcgaggatggctttagaggaagaaattggaagagttaaagacaaaaatatagttatttatggagctggaggggctgcaagagctgtagcatttgaattagcaaaagataataacataataatagccaatagaaccgttgaaaaagctgaagcattagctaaagaaatagcagaaaaattaaataagaaatttggtgaagaagttaaattcagtggattagatgtggatttagatggagttgatataataattaacgctactccaataggaatgtatccgaatattgatgttgaaccaatagttaaagcagagaagttgagagaggatatggtggttatggatttaatttataatccattggagacggttttattgaaagaggcaaaaaaagttaatgcaaaaacaataaacgggttaggaatgttgatatatcagggagcagttgcatttaaaatatggactggtgtagaaccaaatatagaagttatgaaaaacgcaataattgataagataactaaataa

SEQ ID NO: 22346 - protein, 282 aa, Methanococcus jannaschii
MINAKTKVIGLIGHPVEHSFSPIMHNAAFKDKGLNYVYVAFDVLPENLKYVIDGAKALGIVGFNVTIPHKIEIMKYLDEIDKDAQLIGAVNTIKIEDGKAIGYNTDGIGARMALEEEIGRVKDKNIVIYGAGGAARAVAFELAKDNNIIIANRTVEKAEALAKEIAEKLNKKFGEEVKFSGLDVDLDGVDIIINATPIGMYPNIDVEPIVKAEKLREDMVVMDLIYNPLETVLLKEAKKVNAKTINGLGMLIYQGAVAFKIWTGVEPNIEVMKNAIIDKITK

SEQ ID NO: 22347 - DNA, 783 bp, Methanobacterium thermoautotrophicum
  CDS (1)..(783)
atgcacaacgcggcgttcaggagccttggtatggactggatatacgtaccattccctgtgaagccagagaacctgaaagcagcggttgagggcctgagggcccttggggttgagggtgtgaatgtgacaataccccacaaggaggccgtcctggagtacattgatgatatccatgggacagcggccctgataggtgccgttaacactctgaaattcgatgacgggaccgtcaggggatacaataccgatgcctcagggtgcttaagggcccttgaagaggtgacatccgttgagggttcatccgtccttatactgggggcgggtggggctgcaagggcctgtgcattccagcttgcagagaagggggcctcggatataaccatactgaacaggacccctgaaaaggcccgcctccttgcagaggatatggctgataaactgggctttgaggcatcatacgggggctatgaacttatccaggggtctgtgaaatcggctgatatcctcatagacaccacgccggtgggcatgcatccccacacagatgacaggccactggtgggggctgaactcatgcatgagggtctggtggtccatgacctcgtgtacaaccctcaaaggacggtcctcctgagagaggctgagagggcgtcagccatcccggtttcagggatccgtatgctcctctatcagggcgttgaggccttcaggatctggaccgggagggacccgcccctggatgtcatggaagacgccctgaaaagggtccttaacagggattaa

SEQ ID NO: 22348 - protein, 260 aa, Methanobacterium thermoautotrophicum
MHNAAFRSLGMDWIYVPFPVKPENLKAAVEGLRALGVEGVNVTIPHKEAVLEYIDDIHGTAALIGAVNTLKFDDGTVRGYNTDASGCLRALEEVTSVEGSSVLILGAGGAARACAFQLAEKGASDITILNRTPEKARLLAEDMADKLGFEASYGGYELIQGSVKSADILIDTTPVGMHPHTDDRPLVGAELMHEGLVVHDLVYNPQRTVLLREAERASAIPVSGIRMLLYQGVEAFRIWTGRDPPLDVMEDALKRVLNRD

SEQ ID NO: 22349 - DNA, 1437 bp, Chlamydia trachomatis
  CDS (1)..(1437)
atgctatgcacaacaattagtggaccttctttcctggaagctaagaagcagatactacgctctttaaaagaatgtcattgctttgaaatgcgggtagatcttctttctgtatcttgtttagaactcaagaaactcatggaactagctcctatttccattcttgcatggaaaaaacctgaatcatgctcacaagcagactggatagataaaatgcaatcgctagctgagctaaatccaaactatctagacttggaaaaagattttccagaagaggatatgatacgcattcgacaactccatcctcaaattaagatcattcgttccttacatactagtgagcataccgacattatacaactctatgcacatatgcgatcttcagcagctgactactataaattcgctgtttcctcttcctcaacgacagatctcctagatatctgtcaccaaaaacgctctcttcctgaaaatacaactgtagtttgtctaggaggaatggggcgcccttcacgaatactctccccgatcttacaaaatccatttacctacgcaagaagtacaggatcttcccccgtagctccagggcaattttctctcaaacaccactatttctacaatttcgcaagcctttctgctcaatcccccatctgcgctcttataggagacacttcacgaagtatcgggcatttaacccataatcctttcttttcccaactcggagtagcttgcccatatattaaactccctttaacccctcaagagctccctaaattcttctctaccattcgcacgcaaccctttttaggagtcagcgtgacttccccattgaaaactgctgttctaccgtttcttgataaacaagctccatctgtgaaagcttccggatcctgtaatacgctagtcattcgccaaggagaaattgaaggacatgataccgatggcgaagggttgttttctgtattgatgcagcaccaaattcctttaaataaccaacgagttgctattataggagcaggtggagcagctcaatccatagcaactcgattgagcagagcaaactgtgaacttcttatttttaaccgcactaaagcgcatgctgaggatctagcttctcgttgccaggcaaaagcattctcgctggaggaactccctctacacagagtctcccttatcatcaattgccttcctccttcttgtaccattcctaaagcagttgctccctgtgttgtcgatattaatacaattcctaaacatagtacgttcactcagtatgctcgatctcagggaagctccattatttatggtcatgagatgttcacgcagcaagctctcttacaatttcgtttatggttccctacgctctctttcaagcatttggaaaaaacctttattcgtagagctgctgtcttagcttctcttttttccatcgcaccataa

SEQ ID NO: 22350 - protein, 478 aa, Chlamydia trachomatis
MLCTTISGPSFLEAKKQILRSLKECHCFEMRVDLLSVSCLELKKLMELAPISILAWKKPESCSQADWIDKMQSLAELNPNYLDLEKDFPEEDMIRIRQLHPQIKIIRSLHTSEHTDIIQLYAHMRSSAADYYKFAVSSSSTTDLLDICHQKRSLPENTTVVCLGGMGRPSRILSPILQNPFTYARSTGSSPVAPGQFSLKHHYFYNFASLSAQSPICALIGDTSRSIGHLTHNPFFSQLGVACPYIKLPLTPQELPKFFSTIRTQPFLGVSVTSPLKTAVLPFLDKQAPSVKASGSCNTLVIRQGEIEGHDTDGEGLFSVLMQHQIPLNNQRVAIIGAGGAAQSIATRLSRANCELLIFNRTKAHAEDLASRCQAKAFSLEELPLHRVSLIINCLPPSCTIPKAVAPCVVDINTIPKHSTFTQYARSQGSSIIYGHEMFTQQALLQFRLWFPTLSFKHLEKTFIRRAAVLASLFSIAP

SEQ ID NO: 22351 - DNA, 993 bp, Deinococcus radiodurans
  CDS (1)..(993)
atgggctcccgccgtttcgtgcgcgggccgctccgggcgcccggcccctacactgtgactgtgaatgtgtccgcccccgacccgtccgcctctgtccctgcccggagcggctccggtccccgccgcgcttttttgttcgctgacccggcggcgcactcgctctcgccccggatgcaccgcgccgcgttcgcctgggcgggactgaacggcacctacgacgccgagcgggtgcccgctcccgagttgccgacggcgatggcccggctgcgggcgccggacgtactcggcgccaacctcagcctgccgcacaaggaagccgcgctgccgctgctcgacgggctgtcggacgcggcccgcgccatcggggccgtgaacaccgtgattcaccgcgctgggcaactttatggtgacaacaccgacgcgccggggctgttgcaggccctcgcaggcagcgggctgactgggcggctgggcgccgcagaccgggtggtcgttctcggggccggcggcgcggcgcgggcggcggtgtacgccggggcggtgattctgggccgcgaggtctgggtggtcaaccgcaccccggcgcgggcgcgggcgctcgctgcggggtggcagggtggaggagaggtccgcgctgccgggcccggtgaggtgccgtgggggcaggtcggcctcgtcatcaacagcagcagcgccgggctggacaaccccgaagaaacgccgcttcccggcttcgacttcggacagctgccggcccacgccggggtgtacgacatggtgtacaagccgcgccgaacccgattgatgcgcgacgccgaggccgccgggctgcctgctgaaaacggcctggggatgctggcgcagcaggcccggctggcgtttaccgcctggaccggggtagacgtgccggtttcggtctttctggccgcgctggaagctccggctacagggcgtggcgcaggcgacgccgcccgtactgaggccacacggtga

SEQ ID NO: 22352 - protein, 330 aa, Deinococcus radiodurans
MGSRRFVRGPLRAPGPYTVTVNVSAPDPSASVPARSGSGPRRAFLFADPAAHSLSPRMHRAAFAWAGLNGTYDAERVPAPELPTAMARLRAPDVLGANLSLPHKEAALPLLDGLSDAARAIGAVNTVIHRAGQLYGDNTDAPGLLQALAGSGLTGRLGAADRVVVLGAGGAARAAVYAGAVILGREVWVVNRTPARARALAAGWQGGGEVRAAGPGEVPWGQVGLVINSSSAGLDNPEETPLPGFDFGQLPAHAGVYDMVYKPRRTRLMRDAEAAGLPAENGLGMLAQQARLAFTAWTGVDVPVSVFLAALEAPATGRGAGDAARTEATR

SEQ ID NO: 22353 - DNA, 822 bp, Deinococcus radiodurans
  CDS (1)..(822)
atgcttcccgctccccggtttgaccgtgacacccggctttgcatgagtctcgccgccgggcccggcaacttcggcacccgttttcacaattatctgtatgagttgctgggcctgaactacatgtacaaggcgttcaccacgcaggatttacctgctgccatcggcggcatccgggcgctggggattcgtgggtgcgcggtgagcatgccgttcaaggaagcggtgattccgctgctcgacgaactgatgccgtcggcggcggccatcgagtcggtgaacacgatcgtcaacgatgacggcgtgctgcgggcttataacaccgattacgaagccgttcgcctgctgattcgggaaaaagaactcgacccgtcctggcgtgtcggcgtgcgcggcagcggcggcatgggcaaggcggtggcgtcggcgctgcgggacgcgggctttgaaaacggcgtgctggtcgcccgcaacgaggcggcggggcgcgaactggccgggcggctgggctggcgctggacgcccgagccggaagctgccgacctgctggtcaacgtcacgcccatcggcatggcgggggggccggaggaacacgatctcagctttgcgccggagctgattgcccaggcccgcgccgtgttcgacgtggtggcgctgcccgccgaaacgccgctgattgccgaggcgcggcggcagggcaagcccgtcgtgaccggggaagaagtcgcggcacttcaggccctcgaacagttcgtgctctacacgggcgtgcggcccacgccggaacaggtgcaggcagcggcggcctgggcacggcaggggtaa

SEQ ID NO: 22354 - protein, 273 aa, Deinococcus radiodurans
MLPAPRFDRDTRLCMSLAAGPGNFGTRFHNYLYELLGLNYMYKAFTTQDLPAAIGGIRALGIRGCAVSMPFKEAVIPLLDELMPSAAAIESVNTIVNDDGVLRAYNTDYEAVRLLIREKELDPSWRVGVRGSGGMGKAVASALRDAGFENGVLVARNEAAGRELAGRLGWRWTPEPEAADLLVNVTPIGMAGGPEEHDLSFAPELIAQARAVFDVVALPAETPLIAEARRQGKPVVTGEEVAALQALEQFVLYTGVRPTPEQVQAAAAWARQG

SEQ ID NO: 22355 - DNA, 789 bp, Campylobacter jejuni
  CDS (1)..(789)
atgaaatttttagcagttataggcgatcctatttctcactctaaatcgcctagaatgcataataatgctattaaagccttagggcttgatagcatttatacacgctatcatttaagaaatgctaactgtttaagagaagatttttttaaattaggacttagtggagctaatattactttgccttttaaggaaaaagctttagatattgctgatgtgaaggatgattttgctagaaatattggctctgcaaatactttatgcttaaaagaagataaaatttacgcttataatactgatgctttaggttttttagaagctattaaggattttgataatataaaaaaagctttgattttgggtgctggaggtacagctttggcgcttgcttatgtattaaaacaaaaaggcgtagaagtgtatatagctaatcgtagtaaagaaagatttaaagattttttagcttatccaacttatctttataaaaacttgcaagattttgactttgatttggttataaattcaacttctgctggattaaaagatgaaaatttaccttgtgatagggagcttttagatagaattttacctaaagctaaatttgcttttgaggtaatttatggcagagaaacacctttttatagattgtgtaaagagtatcatttaaaaattaaagatggacttgatatgcttttatggcaaggagtttttgcttttgaacttttttttgaaatacaagataaaagagagatgataaaaaatgcaatgcaacaggcattgattttaaagtag

SEQ ID NO: 22356 - protein, 262 aa, Campylobacter jejuni
MKFLAVIGDPISHSKSPRMHNNAIKALGLDSIYTRYHLRNANCLREDFFKLGLSGANITLPFKEKALDIADVKDDFARNIGSANTLCLKEDKIYAYNTDALGFLEAIKDFDNIKKALILGAGGTALALAYVLKQKGVEVYIANRSKERFKDFLAYPTYLYKNLQDFDFDLVINSTSAGLKDENLPCDRELLDRILPKAKFAFEVIYGRETPFYRLCKEYHLKIKDGLDMLLWQGVFAFELFFEIQDKREMIKNAMQQALILK

SEQ ID NO: 22357 - DNA, 837 bp, Mycobacterium leprae
  CDS (1)..(837)
atgtccttgacagcgtgcgctaacaaggggccgcgaaaagctggaattattggttctccaatcgcgcattcccgttccccgcacttgcacctggccgcttaccgtgcactgcgtctccacgactggacgtatgagcggatcgaatgcgatgctgaagagctcccgactgtcgttagcgggttcgggccgcagtgggtcggcgtttcagtgaccatgccgggcaaattcgccgcgctgcggttcgccgatgagcacactgcacgtgccagcctggttgggtcggctaacacgctgctgcggacccagcgcggctggcgggccgacaacaccgacattgatggtgtggcgggggcgctggcggcgatcgggcctttggcagggcgtgcgctagtgtgcgggtcgggcggcactgctccggcggctgtgatggggttggctgaactgggcgtcaccgatatcaccgttttggcacgcaatcccgacaaggcgtcccggttggtcgatctcggggttcaggtcggtgtggcgacccgattgtgcggtctggacagcggtggcttggcagatgaggtgaaggctgccgaagtgctggttagtacggtaccggcagatgtggctgcgcggtatgtcgatgtcttcgcgacggtcccggtgctgctagatgcaatctacgacccgtggcctacgccactggtcgcagcggtgtccgcggcgggcggccgagtgatcagcggcttgcaaatgctgttgcatcaagcgtttgcgcaggtggagcaattcaccgggatgcctgcaccgcgagaggcgatggcttgtgctctggcgggtttgcattag

SEQ ID NO: 22358 - protein, 278 aa, Mycobacterium leprae
MSLTACANKGPRKAGIIGSPIAHSRSPHLHLAAYRALRLHDWTYERIECDAEELPTVVSGFGPQWVGVSVTMPGKFAALRFADEHTARASLVGSANTLLRTQRGWRADNTDIDGVAGALAAIGPLAGRALVCGSGGTAPAAVMGLAELGVTDITVLARNPDKASRLVDLGVQVGVATRLCGLDSGGLADEVKAAEVLVSTVPADVAARYVDVFATVPVLLDAIYDPWPTPLVAAVSAAGGRVISGLQMLLHQAFAQVEQFTGMPAPREAMACALAGLH

SEQ ID NO: 22359 - DNA, 858 bp, Caulobacter crescentus
  CDS (1)..(858)
atgaccaacgccatcacgggcgcggccattgtcggcggtgtctgcggtcaaccgatcaagcattcgatgagcccggtgatccacaacgcctggatcgcagcggccggccttgacgcggcttatgtgccattcgccccggcggctgatcggttcgagacctttgtcgacggtttgcgtggcggcgcggtgcgcgggctcaacgtcaccattccgttcaaggagcgggcgctggccgtcgccgacaccgccagcgatctggcgcggatggccggggcggccaatctgttggtgttcaatgaggacggcagcgtccatgccgacaataccgacggcccgggcctgctgggcgccatcgcgatccaggcgcctggcttcgacgtcacggccgcacctgtggtcattctcggcgcgggtggcgcggcccggggagcggtcgcggccctgctgctggccggcgcgccgcgcatagctgtcgtcaaccgcactgtcgcgcgcgcccaggacctggccgacacgttcggggagaaggtcgtagccaagggcgaagacgccctccccgctctgctgccagaagcgggattgatcatcaacgcgacctcgctaggtctgggcggcggcgctgggccgtcagccgacttgaccctgacccccaagaccgccgtcgtgatggacatggtctacaagccgctgcggacagagttcctgcgccgggccgaggccgccggtcgccgtacggtggacgggctggagatgctgctgcgtcaggcgatccccaccttcgagaccatttatggccaggccccctcccccaagatcgacgttcgggtcctggcgctcaagctcctgggcgaggtctga

SEQ ID NO: 22360 - protein, 285 aa, Caulobacter crescentus
MTNAITGAAIVGGVCGQPIKHSMSPVIHNAWIAAAGLDAAYVPFAPAADRFETFVDGLRGGAVRGLNVTIPFKERALAVADTASDLARMAGAANLLVFNEDGSVHADNTDGPGLLGAIAIQAPGFDVTAAPVVILGAGGAARGAVAALLLAGAPRIAVVNRTVARAQDLADTFGEKVVAKGEDALPALLPEAGLIINATSLGLGGGAGPSADLTLTPKTAVVMDMVYKPLRTEFLRRAEAAGRRTVDGLEMLLRQAIPTFETIYGQAPSPKIDVRVLALKLLGEV

SEQ ID NO: 22361 - DNA, 867 bp, Escherichia coli
  CDS (1)..(867)
atggatgttaccgcaaaatacgaattgattgggttgatggcctatcctatccgccacagtttatcgcccgaaatgcagaataaagccttagaaaaagcgggattgccatttacctatatggccttcgaagtggataacgatagctttcctggagcaattgaaggattaaaagccctcaaaatgcgcggaactggtgtatcgatgccgaacaaacaactggcgtgtgaatatgttgatgaattaacaccagctgccaaactggtgggggccatcaacaccatcgttaatgatgatggctatctgcgtggctataacaccgacggcacgggccatattcgcgccattaaagagagcggttttgatatcaaaggcaaaacgatggtgctgttaggggccggtggtgcctcaacggcaattggcgcgcagggggcaattgaaggtttaaaagaaattaaactctttaaccgtcgggatgagttcttcgataaagccctcgccttcgcgcagcgggttaatgaaaacaccgattgtgtcgtcacggtcaccgatctcgccgatcagcaagcctttgctgaagccctggcttccgccgacattttaaccaatggcacaaaagtgggtatgaaaccccttgagaatgaatcattggttaatgatatcagtctgttacatccgggacttctggtcactgaatgcgtgtataacccgcatatgacgaagttattgcagcaggcgcaacaagctggttgcaaaacgattgatggatacggcatgttgttgtggcaaggggctgaacagttcacattatggactggcaaagatttccctctggaatatgttaaacaggtcatggggttcggtgcctga

SEQ ID NO: 22362 - protein, 288 aa, Escherichia coli
MDVTAKYELIGLMAYPIRHSLSPEMQNKALEKAGLPFTYMAFEVDNDSFPGAIEGLKALKMRGTGVSMPNKQLACEYVDELTPAAKLVGAINTIVNDDGYLRGYNTDGTGHIRAIKESGFDIKGKTMVLLGAGGASTAIGAQGAIEGLKEIKLFNRRDEFFDKALAFAQRVNENTDCVVTVTDLADQQAFAEALASADILTNGTKVGMKPLENESLVNDISLLHPGLLVTECVYNPHMTKLLQQAQQAGCKTIDGYGMLLWQGAEQFTLWTGKDFPLEYVKQVMGFGA

SEQ ID NO: 22363 - DNA, 810 bp, Mycobacterium tuberculosis
  CDS (1)..(810)
atgagcgaaggtcccaaaaaagccggcgtgcttggttcgccgatcgcgcattcccgctccccgcagctgcacctggccgcctaccgggcgttggggctgcacgactggacctatgagcgcatcgaatgcggtgcggccgagttgcccgtcgtggtcggtggtttcggaccggagtgggtcggtgtttcggtgaccatgccgggcaagttcgccgccctgcggttcgccgacgagcgcaccgcacgcgcggaccttgtcggttcggccaacaccctggttcggacgccgcatggctggcgggccgacaacaccgacatcgacggggtggccggggcgttgggggcggctgctggacacgcgctggtgctggggtccggggggaccgcaccggcggccgtggtggggctggccgaactcggggtcaccgacatcaccgtggtggcgcgcaactcggacaaggcggcccggctggtggacctgggcacacgggtcggcgtggcgacccggttctgcgcgttcgacagcggtgggttggccgatgcggtggccgccgcggaagtgctggtcagcaccattccagcggaggtggccgcggggtatgccggcaccttggccgcgatcccggtgctgttggacgccatctacgatccgtggcccacaccgctggccgccgcggtcggatcggcgggcgggcgggtgatcagcgggctgcagatgttgctgcatcaggcgttcgcgcaggtggagcagttcaccgggctacccgccccccgcgaagcgatgacttgcgcgctggccgcgttggactag

SEQ ID NO: 22364 - protein, 269 aa, Mycobacterium tuberculosis
MSEGPKKAGVLGSPIAHSRSPQLHLAAYRALGLHDWTYERIECGAAELPVVVGGFGPEWVGVSVTMPGKFAALRFADERTARADLVGSANTLVRTPHGWRADNTDIDGVAGALGAAAGHALVLGSGGTAPAAVVGLAELGVTDITVVARNSDKAARLVDLGTRVGVATRFCAFDSGGLADAVAAAEVLVSTIPAEVAAGYAGTLAAIPVLLDAIYDPWPTPLAAAVGSAGGRVISGLQMLLHQAFAQVEQFTGLPAPREAMTCALAALD

SEQ ID NO: 22365 - DNA, 837 bp, Bacillus halodurans
  CDS (1)..(837)
atgaaaaagctttttggtcttttggggcaccctgtcggtcattcattatcaccgctcatgcataaccaaatgtttcaattgttagatttcgatggttattaccatgcattcgacgtggagccgtctcagttagagaaagctgtagaaggggctcgggcgttacaaatgcaaggcttcaatgtgacaatcccgcataaggtgacaattatggattatctcgacatggtcgatgaagaagcgcaagaaattggagctgtaaatacggtagtaatgaaagacgggcaattgttcggttctaatacagatgggcaagggtacttagagtctttgatggatgttgtgacaactccttttccgacacaagatgtgttgattattggtgcaggtggtgccgctcgagcgatcgggacggtgcttaaacgggagaaggttcgatccattacgatcgcgaatcgaacgttggcaaaagccgaggaatttagcggagtccttgaatcgagtgagacaagctgttcagctctttccctaaaagaagctgaacaacaactagaacgtttctcggttattattaacactacatctgtcgggatgagcccccgtgtcgacgatatgcctttgtcccttgaacgtttatcaagggagacggttgttagcgatttaatctataatccacttgaaacgaaatttttacgtgaagccaaacaaaaaggcgcaaaaacggtagatgggttagggatgtttgtcaatcaaggggcgcttgctttcgaattatggacaggtttacgccctgatcgtgaaaaaatgagacgctgtgttttagaacagctaggaggataa

SEQ ID NO: 22366 - protein, 278 aa, Bacillus halodurans
MKKLFGLLGHPVGHSLSPLMHNQMFQLLDFDGYYHAFDVEPSQLEKAVEGARALQMQGFNVTIPHKVTIMDYLDMVDEEAQEIGAVNTVVMKDGQLFGSNTDGQGYLESLMDVVTTPFPTQDVLIIGAGGAARAIGTVLKREKVRSITIANRTLAKAEEFSGVLESSETSCSALSLKEAEQQLERFSVIINTTSVGMSPRVDDMPLSLERLSRETVVSDLIYNPLETKFLREAKQKGAKTVDGLGMFVNQGALAFELWTGLRPDREKMRRCVLEQLGG

SEQ ID NO: 22367 - DNA, 810 bp, Sulfolobus solfataricus
  CDS (1)..(810)
atgcttgaagaaataaattatgatactaagttattcggtctaataggtaaaaacataaagtacacgctatccccttatattcataatttctcatttagaacactaggaataaatgcagtttatctagtttttgatctcgacgaaatgaaattcaagcgtagtattagtgggatattggaaattgcagaaggacttaatgttacgataccgtataaggatgaagtaatgaaatatttggataatactgatacgcactccacgagaattcaagctgtaaatacaatatataaaaaaagtggttataacactgattatttagcaataaaaaatcttgtaagaaagaagattaagaatgtatctggctacgaatgttacatatatggggctggaggtgcagcaaaagcagcagcttttgcgttatctgaattaggatgctctagtattagtattgtgaatagaacaaaatcaagggcttatgagttagctgaattattaaataagaacggttataacgcgtcaattaaagagaattgcaacattacaaataatatacttattgtcaatagcactcctaattcttctgtagtcccagaggactgtgttaaaaaatctgatcttgttatagaatttgtttatagaccagttgagactgagttaattaaaaatgctaaaaaatatggtatacaatatataaacggtctagaaattttagtgaatcaagctgtagaagcggagaagatatggtttaataagagtgtggcagatgaaaagattatagagtatctttatgccagggaactcgtttggtaa

SEQ ID NO: 22368 - protein, 269 aa, Sulfolobus solfataricus
MLEEINYDTKLFGLIGKNIKYTLSPYIHNFSFRTLGINAVYLVFDLDEMKFKRSISGILEIAEGLNVTIPYKDEVMKYLDNTDTHSTRIQAVNTIYKKSGYNTDYLAIKNLVRKKIKNVSGYECYIYGAGGAAKAAAFALSELGCSSISIVNRTKSRAYELAELLNKNGYNASIKENCNITNNILIVNSTPNSSVVPEDCVKKSDLVIEFVYRPVETELIKNAKKYGIQYINGLEILVNQAVEAEKIWFNKSVADEKIIEYLYARELVW

SEQ ID NO: 22369 - DNA, 795 bp, Pyrococcus abyssi
  CDS (1)..(795)
atgaaagtttatggcttgataggaaagcccgtttcacactccttaagccccgttatgcacaatgccctcttcaggaagtatggaatagatgcagtttacgtaacctttgaggttgaggagctcggtaaggctattgatggtgttagggccctcggaatttctgggctcaacgttaccatgccctataaggaggtggtcaccaaattcttggatgagttgtccgaggatgctagggaaattaacagtgttaatactataataaatctggagggttcactaatcggatatacaaccgatggtgtaggggctagaaaagctttggaaaggtttaccgagattgagggaagaaacgtgctaatccttggagcagggggagctgggaaggctatagcgtatgagctatctaagattgcaaacattgtcgttctaaataggacaccctctaaggctaaatccttggagaagttcggtgtgaagggaggaagcttggatgagttacccaattacgtgggttgggcggatgtattgattaacgcaacctcggtgggaatgggaacaaatgaaagcttagttcccaggaggctcttgaggagggaactcatagttatggatatagtctacaaaccccttaaaacgagactattgagggatgccgaaagcgttgggtgcagagttatagatggcttgtggatgctaatctatcagggagccgagagctttaaactttggactgggatatatccggatgtggagcttatgaggagggtttcccttgagaggctcgggaagggctag

SEQ ID NO: 22370 - protein, 264 aa, Pyrococcus abyssi
MKVYGLIGKPVSHSLSPVMHNALFRKYGIDAVYVTFEVEELGKAIDGVRALGISGLNVTMPYKEVVTKFLDELSEDAREINSVNTIINLEGSLIGYTTDGVGARKALERFTEIEGRNVLILGAGGAGKAIAYELSKIANIVVLNRTPSKAKSLEKFGVKGGSLDELPNYVGWADVLINATSVGMGTNESLVPRRLLRRELIVMDIVYKPLKTRLLRDAESVGCRVIDGLWMLIYQGAESFKLWTGIYPDVELMRRVSLERLGKG

SEQ ID NO: 22371 - DNA, 810 bp, Neisseria meningitidis
  CDS (1)..(810)
atgaccgccctcccccgctacgccgttttcggcaaccccgtcgcccacagcaaatcgccgcaaattcatcaacaatttgcccttcaggaaggcgttgacattgaatacgaacgcatttgcgccgacatcggcggtttcgcgcaggcggtttcgacattttttgaaacaggcggttgcggggcaaacgttaccgtaccgttcaaacaggaagcgtttcatctggcggacgagcattccgaacgcgcattggcggcaggtgcggtcaatacgctgattccgttgaaaaacggcaagctgcgtggcgacaacaccgacggtatcggtttgaccaacgacatcacgcaggtcaaaaatattgccatcgagggcaaaaccattttgcttttgggcgcaggcggcgcggtgcgcggcgtgattcctgttttgaaagaacaccgtcctgcccgtatcgtcattgccaaccgtacccgcgccaaagccgaggaattggcgcagcttttcggcattgaagccgtcccgatggcggacgtgaacggcggttttgatatcatcatcaacggcacgtcgggcggtctaaacggtcagattcccgatattccgcccgatatttttcaaaactgcgcgcttgcctacgatatggtgtacggctgcgcggcaaaaccgtttttagattttgcacgacaatcgggtgcgaaaaaaactgccgacggactgggtatgctagtcggtcaagcggcggcttcctacgccctctggcgcggatttacgcccgatatccgccccgttatcgaatacatgaaagccctataa

SEQ ID NO: 22372 - protein, 269 aa, Neisseria meningitidis
MTALPRYAVFGNPVAHSKSPQIHQQFALQEGVDIEYERICADIGGFAQAVSTFFETGGCGANVTVPFKQEAFHLADEHSERALAAGAVNTLIPLKNGKLRGDNTDGIGLTNDITQVKNIAIEGKTILLLGAGGAVRGVIPVLKEHRPARIVIANRTRAKAEELAQLFGIEAVPMADVNGGFDIIINGTSGGLNGQIPDIPPDIFQNCALAYDMVYGCAAKPFLDFARQSGAKKTADGLGMLVGQAAASYALWRGFTPDIRPVIEYMKAL

SEQ ID NO: 22373 - DNA, 861 bp, Lactococcus lactis subsp. lactis
  CDS (1)..(861)
atgaacattaacggctacactcgtatggctgctgttgtagcaaacccaattaaacacagcttgtcaccatttattcataatctggcttttgatttaacgaatgaaaatggtgtttatttagcatgggaagttgaggctgaaaaattgccagctattgtggataatgttcgtactttggacatgtatggacttaatatttcaatgccttataaaacagaaattactccatttatggatgaattgagtccggcagctgaattaattggagctgttaatacagtagtcaatcaatcagggaaattaattggacacaatacagatggcataggatttttcaatagtttagaaaaatatcatttcaatatccaaaataaacaaatgcttattcttggtggagggggtgcagcaattgcaattattgctcaggcagctttgtctggagctaaaaaaattgtggtcgcagcaagaaaatcggcctcatatattccgctaaaagaaaaattggaaaagctgtcagtaaaaacagggattgaaattttactgacagacttatctgaagctgatagattacaaaaagagttgaaacagaccgacttattagtaaatgcaacctcagtcggaatggacggagaatctttgccgctggaaaagagcttagttcttcctgaaaaacttttggtggtagatgctatttataaagttagagaaacaccatttttacgttgggcaaaagggcaaggagctcaaactgaaaatggacttggcatgctcattggacaggcggcggaaagcttttatttatggacaggtaaaaaaatgcctgttgcagaaattacattagaaatggagaaagaagcatga

SEQ ID NO: 22374 - protein, 286 aa, Lactococcus lactis subsp. lactis
MNINGYTRMAAVVANPIKHSLSPFIHNLAFDLTNENGVYLAWEVEAEKLPAIVDNVRTLDMYGLNISMPYKTEITPFMDELSPAAELIGAVNTVVNQSGKLIGHNTDGIGFFNSLEKYHFNIQNKQMLILGGGGAAIAIIAQAALSGAKKIVVAARKSASYIPLKEKLEKLSVKTGIEILLTDLSEADRLQKELKQTDLLVNATSVGMDGESLPLEKSLVLPEKLLVVDAIYKVRETPFLRWAKGQGAQTENGLGMLIGQAAESFYLWTGKKMPVAEITLEMEKEA

SEQ ID NO: 22375 - DNA, 810 bp, Aquifex aeolicus
  CDS (1)..(810)
atgattaacgcccaaacgcagctatacggagtaataggctttcccgtaaagcattccctatcccccgttttccagaatgcccttataagatacgctggtcttaatgcggtatacctcgcctttgagattaaccccgaagaactaaaaaaagcctttgaaggatttaaggctcttaaggttaaagggattaacgtaaccgtccccttcaaggaagaaatcattcccctccttgactacgttgaggacacagctaaggaaataggtgccgtaaacacggtaaagtttgaaaacggaaaagcttacggctacaacaccgactggataggttttttaaaatccctaaagagcttaattccagaggtaaaagaaaaaagtattctcgtccttggagctggaggagcttccagagcggttatttacgctcttgtaaaagaaggggcaaaggtatttctgtggaacaggacaaaggaaaaggcaataaagctagctcaaaagtttcccttagaggttgtaaactctcccgaagaagtaattgacaaggttcaagtaattgtaaacacgacgagcgtaggactaaaagacaaggatcccgaaattttcaattacgacttaataaagaaagaccacgtagtcgtggacataatctacaaagagacaaagcttttaaagaaggcaaaagaaaagggagctaaactctttgacgggcttcccatgcttctgtggcagggaatagaagctttcaagatatggaacggatgtgaagttccctactctgtggcagaaagatctgtaagagatctccgtgggtaa

SEQ ID NO: 22376 - protein, 269 aa, Aquifex aeolicus
MINAQTQLYGVIGFPVKHSLSPVFQNALIRYAGLNAVYLAFEINPEELKKAFEGFKALKVKGINVTVPFKEEIIPLLDYVEDTAKEIGAVNTVKFENGKAYGYNTDWIGFLKSLKSLIPEVKEKSILVLGAGGASRAVIYALVKEGAKVFLWNRTKEKAIKLAQKFPLEVVNSPEEVIDKVQVIVNTTSVGLKDKDPEIFNYDLIKKDHVVVDIIYKETKLLKKAKEKGAKLFDGLPMLLWQGIEAFKIWNGCEVPYSVAERSVRDLRG

SEQ ID NO: 22377 - DNA, 678 bp, Aeropyrum pernix
  CDS (1)..(678)
atggcgggggagctgcacggcttcaacgtcaccaaacccctgaagagggaggccctctcgctggcctcaaccctagacagccacgccagggccataggggcggttaacactatggtggctggcgaggaggggtgggaggggttcaacaccgactggaagggcttcctagactccctcaagctctacacagcatcacccccggacaccgccctcgtcataggcgcggggggcgcggggagggcggcggcctatgccctggcaacctggggggcggggagggtcctgatagcgagcaggacaggcctcacagccaggagggcggcccaggatcttgccggcctgggggccgaggtggagcccgtacccccgggtgggcttgaggatgctgcggcagcctcggacgtcgtcgtcaacgccacccccctgggctgggacggcgtctccacacccgtagagagggggttcagggaggggtgtatagcggtggacatggtgtacaggcccctcgccacacccttcctcaggcgggcggcggccagcggctgcacccccgtggacggcctctggatgctggcgatccaggccgctgagaacatagcggtctggctagggctggaggccagcccggttgagctgaggacctacgccctcgaggccatgcgtgggggtcgaggctaa

SEQ ID NO: 22378 - protein, 225 aa, Aeropyrum pernix
MAGELHGFNVTKPLKREALSLASTLDSHARAIGAVNTMVAGEEGWEGFNTDWKGFLDSLKLYTASPPDTALVIGAGGAGRAAAYALATWGAGRVLIASRTGLTARRAAQDLAGLGAEVEPVPPGGLEDAAAASDVVVNATPLGWDGVSTPVERGFREGCIAVDMVYRPLATPFLRRAAASGCTPVDGLWMLAIQAAENIAVWLGLEASPVELRTYALEAMRGGRG

SEQ ID NO: 22379 - DNA, 849 bp, Xylella fastidiosa
  CDS (1)..(849)
atgcctgtgtcccgttttgctgtgtttggtcatcccattgctcactcgctatcaccgcgcatccataccgagtttggccgtcagatgggtgtcgcgctgaactatcttgcatttgatgttgccccagatgcgtttcgtgtttcgctggagcgttttgttgcggagggtggatgtggtgcaaacgtgacgttgcctcttaaggaggctgcatttgaggtgtgcacaactttaagtgcacgtgcacgccgtgccggtgcggtcaatacgctatctcgggttgacggtgtttggcatggtgagaataccgatgggacaggtttagtacgtaacttgacggagcggcatggtttggatttgcgtggtcgccgcgctttgctgcttggcgctggtggcgctgcacgtggtgtggctcctgcattgctggatgccggcattactgagatggtgatagttaaccgctcccctgagcgtgccgatatgctgtgcgatgcgcttggtgaacctggcagagtcagtgcacgctactggggtgacttgggtgatcttggaaattttgagttgatcgttaacgcgacttcgatcggaaacacatccgatatgcggactttctctctgccgcgttcgttgttggacagtatgactgcggcggtagacctgaattacggtagtgcagcagtccccttcctggcctgggcgcatgcggttgagacccgctatgtgatcgacgggttaggtatgttggttgagcaagcggctgaaagtttctctctctggcacggtcggcgcccggatactgatccagtgtatacggtattacattcagagtatggcgctcctggtcggtcatga

SEQ ID NO: 22380 - protein, 282 aa, Xylella fastidiosa
MPVSRFAVFGHPIAHSLSPRIHTEFGRQMGVALNYLAFDVAPDAFRVSLERFVAEGGCGANVTLPLKEAAFEVCTTLSARARRAGAVNTLSRVDGVWHGENTDGTGLVRNLTERHGLDLRGRRALLLGAGGAARGVAPALLDAGITEMVIVNRSPERADMLCDALGEPGRVSARYWGDLGDLGNFELIVNATSIGNTSDMRTFSLPRSLLDSMTAAVDLNYGSAAVPFLAWAHAVETRYVIDGLGMLVEQAAESFSLWHGRRPDTDPVYTVLHSEYGAPGRS

SEQ ID NO: 22381 - DNA, 855 bp, Pseudomonas aeruginosa
  CDS (1)..(855)
atgagcgcgccgcgatcggttctcgccggcctgatcggtgccggcatccaggcgtcgcggacccctgccctgcacgagcgcgagggcgacgcccagggcatccgctatctgtaccggctgatcgatctcgacccgctgggcaagtcggcggacgacctggagttcctgctcgccgccgccagcgacctcggcttcaccgggctgaacgtcaccttcccctgcaagcaggcgatcatccccctgctcgacgacctctccgccgaggcacgcggcatcggcgcggtgaacaccgtggtgctgcgcgatggccggcgcatcggccacaacaccgactgcctgggcttcgccgagggctttcggcgcggcctggccgacgcgccgcgccagcgcgtggtgcagatgggcgcgggcggcgccggcgcggcagtggcccatgcgctgctcgccgagggcgtcgagcggctggtcctgttcgacgtcgacccggcgcgggcccaggccctcgcggacaacctcaaccagcacttcggcgcgccacgagcgctcgccggcagcgacctggccggcgccctgggcgacgcccagggattggtcaacaccaccccggtgggcatggccaagctacccggcatgccggtgccggcggaactgttgcgcgccgacctgtgggtcgccgaggtgatctactttccgctggaaaccgagctgctgcgccaggcccgcgccctcggctgccgcacactggacggcggcaccatggcggtgttccaggcggtgaaggcattcgaactgttcagcggggtgacggccgacgccgcgcgcatgcaggcgcacttcgccagcctgggcgactga

SEQ ID NO: 22382 - protein, 284 aa, Pseudomonas aeruginosa
MSAPRSVLAGLIGAGIQASRTPALHEREGDAQGIRYLYRLIDLDPLGKSADDLEFLLAAASDLGFTGLNVTFPCKQAIIPLLDDLSAEARGIGAVNTVVLRDGRRIGHNTDCLGFAEGFRRGLADAPRQRVVQMGAGGAGAAVAHALLAEGVERLVLFDVDPARAQALADNLNQHFGAPRALAGSDLAGALGDAQGLVNTTPVGMAKLPGMPVPAELLRADLWVAEVIYFPLETELLRQARALGCRTLDGGTMAVFQAVKAFELFSGVTADAARMQAHFASLGD

SEQ ID NO: 22383 - DNA, 1104 bp, Clostridium acetobutylicum
  CDS (1)..(1104)
atgaaggaacttgaagaaataagaaaagaaatagacgaggtagataaaattataacagagctttttgaaaaaagaatgaatttggttatggaagttgctgagtataaagaaaaaaatagtattccagttagtgatagcaaaagagaaaaaaaagttatagataaaaatataggttacttaaagaataaggaatattctgaggttcttaaggagttttatattaattttatgaacctaagtaaaaagttggagagaaaaagaatttataatgaagaaaaaacgagtgttaatacatcaatttatggtcttataggagaaaagttaggacacagccattcatcatatattcataagcttatttttgaaaaggtaggcattaagggaatatataatttgtttgaggttccaaaagaaaagcttaaagaatcagtagatacctttaaaattataaaatgcggtggattaaatgtaacaataccttataaggtggaggttatgaaggagctatatgaaatttcagagaaagcaagaaaaataggggctgtaaatactttgaagttttcacgagaaggcataagtgggtttaatacagattacattggatttggaaaaatgcttagtaaatttagggttgaaataaagaataatatatgtgttgttttaggaagtggtggagcagcaagagctgtgcttcagtatttaaaggacaactttgcaaaagacatatatgtggttactagaaaccctgaaaagacttctgagatttacggagaatttaaagtcataagttatgatgaactttcaaatttaaagggagatgttataattaactgtactccaaagggtatgtatccaaaagagggggaatcgcctgtagataaagaagttgtagctaagttttcttcagctgtagatctaatatataatccagtagaaactttatttttaaagtatgctagagagagtggagtaaaggctgtaaatggtctttatatgttagttagccaggctgcagcgtcagaagagatatggaatgatatttctatagatgaaatcatagttgatgaaatatttgaagttttggaggaaaaaataaaatcatga

SEQ ID NO: 22384 - protein, 367 aa, Clostridium acetobutylicum
MKELEEIRKEIDEVDKIITELFEKRMNLVMEVAEYKEKNSIPVSDSKREKKVIDKNIGYLKNKEYSEVLKEFYINFMNLSKKLERKRIYNEEKTSVNTSIYGLIGEKLGHSHSSYIHKLIFEKVGIKGIYNLFEVPKEKLKESVDTFKIIKCGGLNVTIPYKVEVMKELYEISEKARKIGAVNTLKFSREGISGFNTDYIGFGKMLSKFRVEIKNNICVVLGSGGAARAVLQYLKDNFAKDIYVVTRNPEKTSEIYGEFKVISYDELSNLKGDVIINCTPKGMYPKEGESPVDKEVVAKFSSAVDLIYNPVETLFLKYARESGVKAVNGLYMLVSQAAASEEIWNDISIDEIIVDEIFEVLEEKIKS

SEQ ID NO: 22385 - DNA, 810 bp, Archaeoglobus fulgidus
  CDS (1)..(810)
atgctctaccttggcgtcataggttaccccatcaagcactcagtctctcccgcaatgcacaatgcagctttacagcatgaggggatagaggggatttatctggcttttgaggttaagccagacaggctgagggatgcagttttcggtgctaaagccttgggattcagggggcttaacgtcacgatccccttcaaggagagcgtcgtggagttcgttgagcttgaaggtgaggcggctaagataaagacagtgaacaccatcgaccttgttgagatggtgggatacaacacggatgtttatggtgtcaaggcagccctttcgggaaccgagcttggtgggaagactgcgctggttgttggtgcaggcggggcggggaaggctgctgcattggctttgctggatatgggctcaactgttatcgttgcaaacagaaccgaggagaaggggagagaagcggttgaaatgctgagaagatatggggagtgcattttctggcctttgagcagagtagaggagctgaaagggaaggtggatgttgttgttaacgccacacctctcggaatgcggggatttaaggcagaaattccggttccgccttcaatgctcgatggagttgagctggtctttgacaccgtttacaatcctatggaaaccccgctgattcgtgaggcgaagaagaggggctgcaaggtcgtttacggcatagaaatgctcgtccatcagggggcaaaggccttcgaaatctggacgggcattgagcctgacgttggggtgatgagggaggctgctttgagggctttgaggttttga

SEQ ID NO: 22386 - protein, 269 aa, Archaeoglobus fulgidus
MLYLGVIGYPIKHSVSPAMHNAALQHEGIEGIYLAFEVKPDRLRDAVFGAKALGFRGLNVTIPFKESVVEFVELEGEAAKIKTVNTIDLVEMVGYNTDVYGVKAALSGTELGGKTALVVGAGGAGKAAALALLDMGSTVIVANRTEEKGREAVEMLRRYGECIFWPLSRVEELKGKVDVVVNATPLGMRGFKAEIPVPPSMLDGVELVFDTVYNPMETPLIREAKKRGCKVVYGIEMLVHQGAKAFEIWTGIEPDVGVMREAALRALRF

SEQ ID NO: 22387 - DNA, 837 bp, Vibrio cholerae
  CDS (1)..(837)
atggcttctcaaatcgatcagtatgccgtttttggtaaccccattaatcacagtaaatccccttttattcatacgctgtttgcacgacaaactcagcagtccatgatctataccgcacagtgcgtgccagtggatgggtttactgaggcggcgaaacatttttttgcgcaaggtggacgaggttgtaatgttaccgtgccatttaaagaggaggcgtaccgctttgccgatcgcttaacggagcgcgcgcgtttagccggtgcggtaaacacgttaaaaaagctggatgatggcgaaatactcggagacaacaccgatggtgaaggcttagtgcaagatctactcgcgcagcaagtgctactgaaaggcgcgacgattttgttgattggtgctggtggtgcggcgcgtggcgtgctcaagccgttattagatcagcagccggcctctattaccgtcacgaatcgtacctttgcgaaagcggagcagttggctgagcttgtggccgcttatggtgaggtaaaggcgcaagcgttcgaacagcttaaacaaagttatgatgtgatcatcaactcgacctctgccagtctcgatggcgaattgcctgcgattgatccggtgatcttttcatctcgctccgtctgctatgacatgatgtatggcaaaggctataccgtgtttaatcaatgggcgcgacaacatggctgcgcgcaagcgatcgatggcttaggcatgttagtgggacaagcggctgaaagttttatgctatggcgtggtttacgtccgggcacgaaacaaattttgcgtgaactgcgtaaaaatctagaaggtgcgctatga

SEQ ID NO: 22388 - protein, 278 aa, Vibrio cholerae
MASQIDQYAVFGNPINHSKSPFIHTLFARQTQQSMIYTAQCVPVDGFTEAAKHFFAQGGRGCNVTVPFKEEAYRFADRLTERARLAGAVNTLKKLDDGEILGDNTDGEGLVQDLLAQQVLLKGATILLIGAGGAARGVLKPLLDQQPASITVTNRTFAKAEQLAELVAAYGEVKAQAFEQLKQSYDVIINSTSASLDGELPAIDPVIFSSRSVCYDMMYGKGYTVFNQWARQHGCAQAIDGLGMLVGQAAESFMLWRGLRPGTKQILRELRKNLEGAL

SEQ ID NO: 22389 - DNA, 825 bp, Pseudomonas aeruginosa
  CDS (1)..(825)
atggaccgctattgcgtattcggcaaccccatcggccacagcaagtcgccgctgatccaccgcctgttcgccgagcagaccggcgaggcgctggtctatgacgcgcaactggcgccgctggacgatttccccgggttcgcccggcgcttcttcgagcagggcaagggcgccaatgtcaccgtgccgttcaaggaagaggcctatcgtctggtggacgagttgagcgagcgggccacccgggccggggcggtgaacaccctgatccgcctcgccgacggtcgcctgcgcggcgacaacaccgacggcgccggcctgctgcgggacctgacggcgaacgccggggtcgagctgcgcggcaagcgggttctcctgctcggcgccggcggtgcggtgcgtggggtgctcgaacccttcctcggcgagtgcccggcggagttgctgatcgccaaccgcacggcgcggaaggccgtggacctggccgagcggttcgccgacctcggcgcggtgcacggctgcggtttcgccgaggtcgaagggcctttcgacctgatcgtcaacggcacctcggccagtcttgccggcgacgtgccgccgctggcgcagagcgtgatcgagcccggccgtaccgtctgctacgacatgatgtatgccaaggaaccgactgccttcaaccgctgggccgccgaacgcggtgcggcgcgtaccctggatggcctgggcatgctggtggagcaggccgccgaggcattcttcctctggcgcggcgtgcgtcctgcctcggcgccagtgttggagacgctgcgccgacagttggcaactgtctga

SEQ ID NO: 22390 - protein, 274 aa, Pseudomonas aeruginosa
MDRYCVFGNPIGHSKSPLIHRLFAEQTGEALVYDAQLAPLDDFPGFARRFFEQGKGANVTVPFKEEAYRLVDELSERATRAGAVNTLIRLADGRLRGDNTDGAGLLRDLTANAGVELRGKRVLLLGAGGAVRGVLEPFLGECPAELLIANRTARKAVDLAERFADLGAVHGCGFAEVEGPFDLIVNGTSASLAGDVPPLAQSVIEPGRTVCYDMMYAKEPTAFNRWAAERGAARTLDGLGMLVEQAAEAFFLWRGVRPASAPVLETLRRQLATV

SEQ ID NO: 22391 - DNA, 816 bp, Haemophilus influenzae
  CDS (1)..(816)
atgatcaacaaagatacccaactctgcatgtctttatcaggtcgtccgagtaatttcggtactacctttcacaattatttgtacgacaagctaggattaaatttcatttataaagcattcaccacgcaagatattgagcacgccatcaaaggcgttcgtgcattaggcatccgtggttgtgctgtttcaatgccattcaaagaaacttgtatgccatttttagatgaaattcatccgtcagcacaagccattgaatccgtaaacaccatcgtgaacgataatggctttttgcgtgcatataacactgattacattgccatcgtaaaattaattgaaaaatatcatttaaataaaaatgctaaagtcattgttcatggcagtggtggtatggcaaaagccgttgtggcagcctttaaaaattcaggttttgagaaattaaaaatttacgcacgcaacgtaaaaacaggtcaatatctcgccgcactttatggctacgcatacattaattctttagaaaaccaacaggcagatattttagtcaatgttacgtcaatcggcatgaaaggcggcaaggaagaaatggatttagcctttccaaaagcgttcattgataatgctagtgtcgcgtttgatgtagtggctatgcctgttgaaacgccctttattcgttatgctcaagcacgaggaaaacaaactatttctggcgcagcagtgattgtacttcaggctgtagaacaatttgaactttatacgcatcaacgcccaagcgatgaattaatcgctgaagctgcggcgtttgctcgaacaaaattttga

SEQ ID NO: 22392 - protein, 271 aa, Haemophilus influenzae
MINKDTQLCMSLSGRPSNFGTTFHNYLYDKLGLNFIYKAFTTQDIEHAIKGVRALGIRGCAVSMPFKETCMPFLDEIHPSAQAIESVNTIVNDNGFLRAYNTDYIAIVKLIEKYHLNKNAKVIVHGSGGMAKAVVAAFKNSGFEKLKIYARNVKTGQYLAALYGYAYINSLENQQADILVNVTSIGMKGGKEEMDLAFPKAFIDNASVAFDVVAMPVETPFIRYAQARGKQTISGAAVIVLQAVEQFELYTHQRPSDELIAEAAAFARTKF

SEQ ID NO: 22393 - DNA, 819 bp, Haemophilus influenzae
  CDS (1)..(819)
atggatctttatgctgtgtggggcaatccgattgcgcaaagtaaatcgccgttaattcaaaataagttagccgcacaaacccatcaaactatggaatacattgcaaaattaggcgatcttgatgcttttgaacaacagcttttggcattttttgaggagggtgcgaaaggttgcaatattacttcgccttttaaagaacgcgcttatcagctggcagacgaatatagccaacgagcaaaactggcggaagcctgtaatacgctaaaaaaactcgatgatggaaaactttatgcggataacactgatgggattggcttagtgacggatttacaacgtttaaattggcttcgtccaaatcagcacgtattaatcttgggggcgggcggagcaacaaaaggcgtattattgccacttttacaagctcaacaaaacattgtgcttgctaaccgcactttttcgaaaaccaaagaattagctgaaagatttcagccttacggcaatattcaagctgtctctatggattcgattccgctacaaacttatgatttggtgattaatgcaacttccgctggattaagtggtggaacggcttcagttgatgctgaaattttaaaattgggctcggctttttatgatatgcaatatgcgaaaggcacagacacgccatttattgcattatgcaaaagtttaggtttaaccaatgttagcgatggctttggaatgttagtcgcacaagcagcacattctttccatttatggcgaggcgtaatgccagattttgtctcggtttatgaacagcttaaaaaggcgatgttatga

SEQ ID NO: 22394 - protein, 272 aa, Haemophilus influenzae
MDLYAVWGNPIAQSKSPLIQNKLAAQTHQTMEYIAKLGDLDAFEQQLLAFFEEGAKGCNITSPFKERAYQLADEYSQRAKLAEACNTLKKLDDGKLYADNTDGIGLVTDLQRLNWLRPNQHVLILGAGGATKGVLLPLLQAQQNIVLANRTFSKTKELAERFQPYGNIQAVSMDSIPLQTYDLVINATSAGLSGGTASVDAEILKLGSAFYDMQYAKGTDTPFIALCKSLGLTNVSDGFGMLVAQAAHSFHLWRGVMPDFVSVYEQLKKAML

SEQ ID NO: 22395 - DNA, 762 bp, Thermotoga maritima
  CDS (1)..(762)
atgaaattctgcatcatagggtatccggtgagacacagcatatcaccaaggctttacaacgagtatttcaaaagggcgggaatgaaccactcgtacggtatggaagagataccacctgaatctttcgacacggagataagaaggattctcgaagaatacgatggtttcaacgcgacaattcctcacaaagaaagagtgatgcggtacgtcgaaccatctgaagatgcgcagagaataaaagccgtgaactgtgtctttcggggaaagggatacaacaccgactgggttggcgttgtgaaatcgctcgagggtgtagaggtgaaggagcccgttgtcgttgtgggagcgggcggagccgcacgtgccgtgatctacgctctcctccagatgggcgtgaaagacatctgggtggtgaacagaacgatcgaaagggcgaaggctctcgattttcctgtgaaaattttctctctcgatcagctcgacgaggttgtgaaaaaggcgaagagtctcttcaacaccacttcggttggtatgaagggagaggaacttcccgtttctgacgattcactgaaaaacctgagccttgtttacgatgtgatctacttcgacacaccacttgttgtgaaagcaagaaaacttggtgtgaaacacatcataaagggaaacctcatgttttactaccaggcaatggagaatctgaagatatggggaatatacgacgaggaggttttcaaagaagtgttcggggaggttctgaaatga

SEQ ID NO: 22396 - protein, 253 aa, Thermotoga maritima
MKFCIIGYPVRHSISPRLYNEYFKRAGMNHSYGMEEIPPESFDTEIRRILEEYDGFNATIPHKERVMRYVEPSEDAQRIKAVNCVFRGKGYNTDWVGVVKSLEGVEVKEPVVVVGAGGAARAVIYALLQMGVKDIWVVNRTIERAKALDFPVKIFSLDQLDEVVKKAKSLFNTTSVGMKGEELPVSDDSLKNLSLVYDVIYFDTPLVVKARKLGVKHIIKGNLMFYYQAMENLKIWGIYDEEVFKEVFGEVLK

SEQ ID NO: 22397 - DNA, 801 bp, Halobacterium sp. NRC-1
  CDS (1)..(801)
atggacgtctacggactgatcgggaacccggtcgggcattcgctgtcgccgccgctgcacgcggccgcctacgacgagtgcgggctcgacgcccggtacgtgaccttcgagccggcaccggacgacgccgcggccgccatccgaggggctggcgcgctcggcgtggcggggttgaacgtcaccgcgccgttcaagcagtcggccgcgtcggcggtggcgaccgactcgatggccgcccgggtgggcgccgtcaacaccatcgacttctccggggccgcgccccgtggatacaacaccgacgttgcgggcgtgaagcgcgcgttcgcccaccacgacgtgtcgctgtcgggcgcgcaggctgtggtcgtcggcgcgggtggtgccggccgcgccgccgcgttcgcgctcgccgacgccggggcgaccgttcggatcgccaaccgaacacgggcggccgccgacgaactcgccgccgacgtgggtggcacggccgtcggcctcggtgacctgccgcggagcctcgccgacgcgacggtcctggtccacgccaccacggtggggatggacgacccggacacgtcgccggtgtccgccgacgccctccacgacgatctcgccgtcctggacgccgtgtactcgccggttgagacgcggctgctgcgggacgccgcggccgccggcgcaaccacgatcgacggcgcgtggatgctgctctatcagggtgccgaggcgttcgagcgctggaccggcctggacgcccccgtggcggcgatgcgcgccgccctccgtgcacggctttaa

SEQ ID NO: 22398 - protein, 266 aa, Halobacterium sp. NRC-1
MDVYGLIGNPVGHSLSPPLHAAAYDECGLDARYVTFEPAPDDAAAAIRGAGALGVAGLNVTAPFKQSAASAVATDSMAARVGAVNTIDFSGAAPRGYNTDVAGVKRAFAHHDVSLSGAQAVVVGAGGAGRAAAFALADAGATVRIANRTRAAADELAADVGGTAVGLGDLPRSLADATVLVHATTVGMDDPDTSPVSADALHDDLAVLDAVYSPVETRLLRDAAAAGATTIDGAWMLLYQGAEAFERWTGLDAPVAAMRAALRARL

SEQ ID NO: 22399 - DNA, 1434 bp, Chlamydophila pneumoniae, Chlamydia pneumoniae
  CDS (1)..(1434)
atgttatgcgccactgttagcggtccctcattttgtgaagcaaaacaacaaattctaaagtctctacaccttgtagatattatagaactacgactcgatctcataaacgaacttgatgatcaagaactgcataccctcattaccacagcccaaaaccccatcctcacctttagacaacacaaagagatgtcgacagcgctatggattcaaaaactatattccctagcaaaacttgaacccaagtggatggatatcgatgtgagtcttcctaagaccgcccttcaaaccatccgcaagagccatcctaaaataaagctcatcctttcctatcatacagacaaaaatgaagacctcgatgcaatctataatgagatgcttgcaactcccgctgagatctacaaaatcgtactctccccagagaactccagtgaagctctgaattatataaaaaaagctcgcctgttaccaaaaccatctacagtcctttgtatgggaacccatgggctcccctctagagttctctccccactgatcagcaacgctatgaattacgctgctggaatcagtgcgcctcaagtagccccgggacaacctaaacttgaggagctgctctcctataactactcgaagctatctgaaaaatcacacatttacggactcatcggagatcctgtagaccgtagcatcagtcacctctcccacaacttcttactctctaagctttctctcaatgcaacatatatcaaattccctgttactataggggaagtcgtcacctttttctctgcgatccgagatcttcctttttcaggacttagtgtcactatgccactaaaaaccgcaatcttcgaccatgtcgatgctcttgatgcatcggcgcaactctgcgagtctataaacaccctggtcttccgaaatcagaaaattctaggttacaatacagacggtgagggagtagccaaactcctaaaacaaaagaatatctctgttaacaacaaacacattgccattgtaggtgctggaggtgctgctaaagcaatcgctgcaacactggcgatgcaaggtgctaatctccacatcttcaatagaactctttcttcagcagctgctttagctacttgctgtaaaggcaaagcctatcccttaggctccttagagaattttaaaactatagacataatcatcaactgtctccctccggaagtgaccttcccttggagattccctcctatagtcatggacatcaataccaaaccgcatccctctccctaccttgaacgtgctcaaaaacatggctctctcattatccatggctacgaaatgttcatagaacaagccctgctacaatttgctctttggttcccagatttcctaactccagagtcttgtgactctttccgaaactatgtaaaaaacttcatggcaaaagtataa

SEQ ID NO: 22400 - protein, 477 aa, Chlamydophila pneumoniae, Chlamydia pneumoniae
MLCATVSGPSFCEAKQQILKSLHLVDIIELRLDLINELDDQELHTLITTAQNPILTFRQHKEMSTALWIQKLYSLAKLEPKWMDIDVSLPKTALQTIRKSHPKIKLILSYHTDKNEDLDAIYNEMLATPAEIYKIVLSPENSSEALNYIKKARLLPKPSTVLCMGTHGLPSRVLSPLISNAMNYAAGISAPQVAPGQPKLEELLSYNYSKLSEKSHIYGLIGDPVDRSISHLSHNFLLSKLSLNATYIKFPVTIGEVVTFFSAIRDLPFSGLSVTMPLKTAIFDHVDALDASAQLCESINTLVFRNQKILGYNTDGEGVAKLLKQKNISVNNKHIAIVGAGGAAKAIAATLAMQGANLHIFNRTLSSAAALATCCKGKAYPLGSLENFKTIDIIINCLPPEVTFPWRFPPIVMDINTKPHPSPYLERAQKHGSLIIHGYEMFIEQALLQFALWFPDFLTPESCDSFRNYVKNFMAKV

SEQ ID NO: 22401 - DNA, 861 bp, Sinorhizobium meliloti
  CDS (1)..(861)
atgaccgaaacgcttgtgagatccttgaaggcgggcctgatcggcaccggcatccaggcttcgctgacgccggccatgcatatggcggaaggcgcggcgcagggcattcgctacgactacgagctgatcgatctcaacctgctaggggcgagcgagaaggacctgccgcgcttgctcgccgacgccgagcggcgggggttcgccggactcaatatcacccatccctgcaagcaggcggtcattccctatctcgacgagctcgcctccgaggcgcggcagctcggcgccgtcaacacggtcgtcctcagaagcggacggcgctacggccacaatacggactggtggggctttgccgaaggcttccggcgcggcctgccggatgccgatctcttctccgccgtgcagctcggcgccggcggagccggggtcgccacggcctatgccgcgctctcgcttggcttgcagcggctcgtcgtgttcgaccgcgaggccggccgggcgcaggcgctcgcccggatgctctcccctctctttccgagagccgaggtggcggccggcaacgaccttccctcggaaatgagaaatgccgccggcctcatccacgcgacgccgaccggcatggcgaaatatcccggattgccgctcgacgccgagcttctttcgcgaagcctttgggtcgccgagatcgtctattttccgctggaaacggcgcttctcagggaggcccggcggcgtggttgcaaaacgctcgacggtggcggcatggcggtgtttcaggcggtcggcgcgtttcggctgttcaccgggctcgaacccgacgccgcgcggatgctcggccacttcagggcgatgaccggctag

SEQ ID NO: 22402 - protein, 286 aa, Sinorhizobium meliloti
MTETLVRSLKAGLIGTGIQASLTPAMHMAEGAAQGIRYDYELIDLNLLGASEKDLPRLLADAERRGFAGLNITHPCKQAVIPYLDELASEARQLGAVNTVVLRSGRRYGHNTDWWGFAEGFRRGLPDADLFSAVQLGAGGAGVATAYAALSLGLQRLVVFDREAGRAQALARMLSPLFPRAEVAAGNDLPSEMRNAAGLIHATPTGMAKYPGLPLDAELLSRSLWVAEIVYFPLETALLREARRRGCKTLDGGGMAVFQAVGAFRLFTGLEPDAARMLGHFRAMTG

SEQ ID NO: 22403 - DNA, 873 bp, Synechocystis sp
  CDS (1)..(873)
atgccttccatcaccggtaaaactaagctccttggtgtgatcggttatcctgttggtcattccttatcccctgtgatgcataatgcggcgctccaggccatggccagtgattatgcatatgttgcctttcccattgctccagaggatttaaccatcgccatagcagggttaggagccagtggagtccagggattaagcgtgaccattccccataagcaagtggtgatgccattgttgacccagataaccgaaaccgctcggcaagtgggggccgtgaatactctctggcgggatggccatggctggcagggaaccaatacggatgttgagggttttttggctcccttgttggagttaaagcaagattggtcagggaggacggcggtgattctcggctatggtggagccgcgcgggccgtggtggtgggtttaacccaattgggttgtccagaaattattgtggtgggtcgcagtcaagaaaaattagctcagttcgccaacagttggacggaccccaaaattaagcaagctctgcaagttctaccctgggaagctctatctaccgtgatccccaaagcaagtttattgattaacagcacccccgtgggcatggctccccaccctaagcaatcccccctggatcaatcccttgtggaaaaactaccgccaacggcgatcgcctatgatttgatttatactccccgccccaccaggtttttacaacatgctcaggagcggggtctagtgaccattgatggagcagaaatgctagtgcaacagggagccgccgccttgaaaatttggctacaacaggaagtgccggtggacgttatgcgccaagccctactccatcacttagaaaaatctgcctga

SEQ ID NO: 22404 - protein, 290 aa, Synechocystis sp
MPSITGKTKLLGVIGYPVGHSLSPVMHNAALQAMASDYAYVAFPIAPEDLTIAIAGLGASGVQGLSVTIPHKQVVMPLLTQITETARQVGAVNTLWRDGHGWQGTNTDVEGFLAPLLELKQDWSGRTAVILGYGGAARAVVVGLTQLGCPEIIVVGRSQEKLAQFANSWTDPKIKQALQVLPWEALSTVIPKASLLINSTPVGMAPHPKQSPLDQSLVEKLPPTAIAYDLIYTPRPTRFLQHAQERGLVTIDGAEMLVQQGAAALKIWLQQEVPVDVMRQALLHHLEKSA

SEQ ID NO: 22405 - DNA, 2195 bp, Lycopersicon esculentum (tomato)
  CDS (80)..(1717)
cacttggaatatttcaagctggctgctgaggctacatttctgttgtttacccatctgtgtgctctaaagttggttgccaatggagttggttgtagattctggagtgaagaagatggagggtgaagcaatgaggaagaatcaaactctaatttgtgcaccaattatggctgattcagtggatcaaatgttgattcttatgcaaaaggctaaaattagtggggctgatcttgtggaggttcgagtggatagcttgaaaagctttaatcctcgcccagatattgataccctgatcaaacaatgccctttgcctactctcttcacttacagctatgttttgggcgtggggcaggggatactgttaatacggtactataaaggcatagggcccacttgggaaggtggtcagtatgctggtgatgaaaagagtcgattggatgcacttcgattagcgatggagttgggagctgattacattgatgttgagctaaaggctattggcgagttcaacaatgccctacatggaaataaatctgcaaaatgcaaacttattgtttcttctcacaactatgaaagcacaccgtcagctgaggatctgggcaatctagtagcaagaatacaggcatctggagctgacattgtgaaatttgctacaactgcacaggatatcactgatgttgcacgtgttttccaaattactgttcattctcaagttccaataatagccatggtcatgggagagaagggtttgatgtctcggatactttgtccaaaatttggtggatacctcacgtttggtactcttgaagtgggaaaagtttcagctcctgggcaaccaacagtcgaagatcttctgaatttatacaatttcagacagttgggaccagataccaaaatatttggcattattgggaagccagttagccatagcaaatcacctttattatataatgaatccttcagatcagttgggtttaatggtgttttcatgcatttgctggtagatgatattgcaaactttttccggacttattcatcattagattttgctggattcagctgtacaattcctcacaaagaagccgctcttgactgctgtgctgaaattgatcctactgctaaggcaataggggctgtcaattgtattataaggcgacctgatgggaagttatttggttgtaatacagactatatcggtgctatttccgccattgaagaaggattgcaaggttcacaacctagtatatctgggtcacctttggctggtaaattgtttgtggtcattggtgctggtggcgctggaaaggcgattgcttatggcgcaaaggaaaagggggctagggtggtgattgctaatcgtacctatgaacgagcgcgagaacttgctattgttgttggagctgaggccttatctcttgacgagcttagcaatttccatccagaaaatgatatgattcttgcaaataccacctccataggcatgcaaccaaaggttgatgatacaccaatctctaaggaagctttgaagcactactcacttgttttcgatgctgtttatacacccaaaatcactagactcctgcgagaagctcaggagagtggagcaaaaattgtgacaggagttgaaatgtttatcgggcaggcatatgaacaatatgaaagatttacaggattgccagctcctaaggaacttttcaagaatataatgtctacatactgagaggatccctttcacttttcaatcggggctgctaattattattactcctaaatctgacatgattgtgttagagtttgctctatctaccactgtttgtacttcagaggaagtaattttgtccacgtaaatcgtactttttgcggaaacagaggatgttcagacataccagttaatctatggcaggaaaatccaccatctttctggctatgttagaactcttgattctttgacaagtattgtattttgggaggaaattcattaaacagagatgtatacattgcttcatcattgtaaaatcatacttagaaattcctcttgattatcatcatcattattaaatgttgtcacattattgtatcatactaagacaaattttgaattgagttcaatgacttttgagttgtaagcatgatgcactgccagtttgtgttttaataaatccaggttccactttactagtccatttctcgtgctttta

SEQ ID NO: 22406 - protein, 545 aa, Lycopersicon esculentum (tomato)
MELVVDSGVKKMEGEAMRKNQTLICAPIMADSVDQMLILMQKAKISGADLVEVRVDSLKSFNPRPDIDTLIKQCPLPTLFTYSYVLGVGQGILLIRYYKGIGPTWEGGQYAGDEKSRLDALRLAMELGADYIDVELKAIGEFNNALHGNKSAKCKLIVSSHNYESTPSAEDLGNLVARIQASGADIVKFATTAQDITDVARVFQITVHSQVPIIAMVMGEKGLMSRILCPKFGGYLTFGTLEVGKVSAPGQPTVEDLLNLYNFRQLGPDTKIFGIIGKPVSHSKSPLLYNESFRSVGFNGVFMHLLVDDIANFFRTYSSLDFAGFSCTIPHKEAALDCCAEIDPTAKAIGAVNCIIRRPDGKLFGCNTDYIGAISAIEEGLQGSQPSISGSPLAGKLFVVIGAGGAGKAIAYGAKEKGARVVIANRTYERARELAIVVGAEALSLDELSNFHPENDMILANTTSIGMQPKVDDTPISKEALKHYSLVFDAVYTPKITRLLREAQESGAKIVTGVEMFIGQAYEQYERFTGLPAPKELFKNIMSTY

SEQ ID NO: 22407 - DNA, 4746 bp, Pneumocystis carinii
  CDS (1)..(4746)
atgaaggaaattatcaaacttagtattttagggaaagattctattcatattgggcttcacttatggccacatataactaatgaactatttacatgtatattttctccaacatatgtaatcattacggattcaaatattgaaaccttatatattcctagtttcaaaacatatttcatttctatggcaaaacaaagatctattaattctcgtcttttattttttacaattcctcctggagaaaaatcaaaatcaagaaaaacaaaagcacttatagaggattggcttttatcagaaaaatgcacaagagatactgttataatagctatagggggcggtgttataggcgatctcgtaggttatgtctctgcaacatttatgagaggagttcgttttattcaaattcctacaactcttttagctatggtagattcatctattggagggaaaaattctataaatacatcttatggaaaaaatgcaattggtactatttggcaaccggaaagaatttttattgattttacatttcttgaaacacttacagaaaaagaatttataaatggtatagcagaactaatcaagactattattatatgggatgaatcagaatttgcatctctagaaaacatttcagaaaaaattgcgaaaacagtgagatcaatgtcattaacatctaataaacattcaaaatttaatgaaattataaaagatcttaaaagatatattatatcttcgataaaaattaaagctcacattgtttctattgatgaaaaagaaaaagatcttagaactcttttaaattttggccattctataggacatgcaatagaaacagttctagctccttatattcttcatggagaatctatttctattggaatggtcaaagaagcagagctttctaggcatttaggtatactaaatcctaatgtagtatcacgactcatcaaatgtttaaacacatggggtttacctacatcttttaaagataggcgatttaaagaagtaattttgggaaaaaaacatttaatagaagatatccttgaaattatgtctatagacaaaaaaaatgatagtaataataaaaaaatagtccttctttcagcaataggaaaaacatatgaaaaaaaagcatcctcagtatctgacgatgatattagaactattttatcacaaaatattcttttatatggtattccattaaatgcatttcaaaaacacactacaattactcttccaggatctaagtctatatccaatagagcattaattttagcttcactttctaacggaatttgttatttaaaaaattttttgcattcagatgatacatattacatgctttctgctttggaaaaactaaatgcagcagaattcaaatgggaacaagatggagatgtattagtcgttaaaggtaaatcaggatatcttgaaaaccctcaaatggaattatatctgggaaattcaggaacaacagctagatttttaaccagtatctgtacactagtacaacctaattcacgtgaaaatcatttaatactgacagggagtaatcgtatgaagcagagacctatcggccctttagtagatgctcttaaaaataatggatgttgtatagaatatcttgagttagaaaattgcttaccattattaattaaaccaaaagaaatagggctttatggggggaatatcaatctttccgctactgtctcatcccaatatgtatcatcaattttaatgtgttcaccatatgcaaaaacacaagtaactctctcattaattggaggaaaaccaatatctcaaccctatatagatatgactatttctatgatgtcatcatttggtattaaagtaaccagatctcattcaaaggaaaatacatattatattccaaaaggatgttacacctgtccctctgaatatataattgaaggcgatgcaacttcagctacttatcctttagcaattgctgcaataacgggtggaagctgcactatatctaatgttggtagtgcttcattacaaggagactctaaattttcagaatatatattaaaacctatgggatgtgaagtggtccaatcgcctacaactacatatataaagggccctccaaaagggaaactcaaatcattagggtctataaatatggaatcaatgactgatacctttttaacagcagcagttttagcctctgttgcttatgaagagtcaaaaccatatgttacaaaaatcaccgggatttctaatcaaagaattaaagaatgcaatagaatcaatgctatggtttgtgaacttaaaaaatttggaatagaagcaggtgaacttccagatggaatatatgtaaaagcattgaatacttccaatcttccatattcagtagaaggaataaattgctataatgatcacagaattgcaatgagttttagtgttttagcatgcatctcttccaaaccaactactattctagataaagcttgtgtcaataaaacctggccttattggtgggatattttaaattcaacttttaaagttcaaatgaaaggaattgaattcgatctaaaccctacaatcaattcatctatattgcatcatccatcagaatgtactatttttcttattggaatgagaggagctgggaaaacaactttaggacagcttgcagctaactttcttgggcgggaatttattgacttagactcaattattgaagaagatattaaaacaacaatcctagaattcattcaaaaatatagttgggatgtttttagaagaaaagaactacattttcttaaaactcttttaacagaaaaaaaagaaaactatattatatcttgtggaggtggcattattgaaactgaagaagctagagatctcttaatatcttatatagaagctaatggaattgttatacatattcatcgtaatattcaggatattattaaatatttaaatactgacaaaacacgtgctccttatcaagataatataatgcatgtatgggaaagacgaaaaagatggtataatttatgcagttctcatcaatttcacatgacttcaacagatcctacagaatttaaaaaaaatataccgttaaatcttaaatcctcctttaataattttttaagaacaattacaggaaaaaataatatattttctctaattttgaagaaaaaaagaagttattttttatctttagcattttctgaccttgaaaacattttttctttacttgatattataacagctggatgtgatgcaattgagataagaatcgatttatttcaaaaacctgaggaaattgacaaatatccaagcttagaatatatagcagagaaaatatttctacttcgtcaaaaaactagtcttcctttgatttatacgttgcgtacaacgaatcatggaggatcatttctttcttctgaaaaaaaattagcgaaagaatatatattacatggtgcaaaatggggattcgaatttcttgatatagaattagatatagcatctgaattatttaagaccataaataactcttggccatatacaaagataattgcatcttatcataatatagaaaaaccaatatcttgcgatgattttgaatggatacaaaagtacaaagaagctcaacactacggtcacattataaaattagtgggaacttcatcatcaattgaagataattttttcttagaagaatttaaaagcaaatttattaataaaaaagtaccttcaataataataaacacaggcataaaaggccaattatctagaataatgaatacatttatgacgcctgttactcatccatcgctaccatccaaaatagcacctggacaactatcaattaaagaaattaacactgctcttcatataatgggtcttcttccagaaaaaaaatattttctttttggaaaacctattaagcattctcaatcacctaatattcataatttaggttttgaaattttaggtcttccatataaatatcaattgtttgaaacagattctattagtgaacttaaagaaatcttacatttagaagaattcgggggagcttctgttactattccactaaaaacaaacatatcaattttattagatgaaatatcagatcatgcagcattaattggttctgttaatactataacaagaacgtataataatggacaatatattcttaaaggtgaaaatacggattggcaaggaataataaaagcaataaagaattttaacaaatttgaaaaatcctttgaaaatttctcagggtttataattggagcaggaggagcaagtagggcagctatatatgcattactttctcttggaatatctccaatttatcttataaatcgatctaaagataaactaaataaattatatcatttttttaacacaaatcacataattcccataacagaatatcatgaattaaataatataaattttgatattcgaataggaatttctacaataccaacagataatccaatagatccttctgttctagaaatagcaaaaattttctttaatttaaaaagaaaatcatcagaaggtatatttttagatatggcatatggatcaaatacaacagaccttactattattgcaaaagcgtgcaattggaaaattatacatggtttagaaattttgctagaacaaggctcagaacaatttttattatggaccgaaacatatatcccttataatcaagtgaaatatgctatattaggaccaaacaaataa

SEQ ID NO: 22408 - protein, 1581 aa, Pneumocystis carinii
MKEIIKLSILGKDSIHIGLHLWPHITNELFTCIFSPTYVIITDSNIETLYIPSFKTYFISMAKQRSINSRLLFFTIPPGEKSKSRKTKALIEDWLLSEKCTRDTVIIAIGGGVIGDLVGYVSATFMRGVRFIQIPTTLLAMVDSSIGGKNSINTSYGKNAIGTIWQPERIFIDFTFLETLTEKEFINGIAELIKTIIIWDESEFASLENISEKIAKTVRSMSLTSNKHSKFNEIIKDLKRYIISSIKIKAHIVSIDEKEKDLRTLLNFGHSIGHAIETVLAPYILHGESISIGMVKEAELSRHLGILNPNVVSRLIKCLNTWGLPTSFKDRRFKEVILGKKHLIEDILEIMSIDKKNDSNNKKIVLLSAIGKTYEKKASSVSDDDIRTILSQNILLYGIPLNAFQKHTTITLPGSKSISNRALILASLSNGICYLKNFLHSDDTYYMLSALEKLNAAEFKWEQDGDVLVVKGKSGYLENPQMELYLGNSGTTARFLTSICTLVQPNSRENHLILTGSNRMKQRPIGPLVDALKNNGCCIEYLELENCLPLLIKPKEIGLYGGNINLSATVSSQYVSSILMCSPYAKTQVTLSLIGGKPISQPYIDMTISMMSSFGIKVTRSHSKENTYYIPKGCYTCPSEYIIEGDATSATYPLAIAAITGGSCTISNVGSASLQGDSKFSEYILKPMGCEVVQSPTTTYIKGPPKGKLKSLGSINMESMTDTFLTAAVLASVAYEESKPYVTKITGISNQRIKECNRINAMVCELKKFGIEAGELPDGIYVKALNTSNLPYSVEGINCYNDHRIAMSFSVLACISSKPTTILDKACVNKTWPYWWDILNSTFKVQMKGIEFDLNPTINSSILHHPSECTIFLIGMRGAGKTTLGQLAANFLGREFIDLDSIIEEDIKTTILEFIQKYSWDVFRRKELHFLKTLLTEKKENYIISCGGGIIETEEARDLLISYIEANGIVIHIHRNIQDIIKYLNTDKTRAPYQDNIMHVWERRKRWYNLCSSHQFHMTSTDPTEFKKNIPLNLKSSFNNFLRTITGKNNIFSLILKKKRSYFLSLAFSDLENIFSLLDIITAGCDAIEIRIDLFQKPEEIDKYPSLEYIAEKIFLLRQKTSLPLIYTLRTTNHGGSFLSSEKKLAKEYILHGAKWGFEFLDIELDIASELFKTINNSWPYTKIIASYHNIEKPISCDDFEWIQKYKEAQHYGHIIKLVGTSSSIEDNFFLEEFKSKFINKKVPSIIINTGIKGQLSRIMNTFMTPVTHPSLPSKIAPGQLSIKEINTALHIMGLLPEKKYFLFGKPIKHSQSPNIHNLGFEILGLPYKYQLFETDSISELKEILHLEEFGGASVTIPLKTNISILLDEISDHAALIGSVNTITRTYNNGQYILKGENTDWQGIIKAIKNFNKFEKSFENFSGFIIGAGGASRAAIYALLSLGISPIYLINRSKDKLNKLYHFFNTNHIIPITEYHELNNINFDIRIGISTIPTDNPIDPSVLEIAKIFFNLKRKSSEGIFLDMAYGSNTTDLTIIAKACNWKIIHGLEILLEQGSEQFLLWTETYIPYNQVKYAILGPNK

SEQ ID NO: 22409 - DNA, 4722 bp, Schizosaccharomyces pombe
  CDS (1)..(4722)
atgtcaaacgaatctaatataattacagttcctatactcggaaaggatactgtgagagttggatttggtatacatcaatatatatgcactgaaattctggaaaacttcaagtcttcgacatacgtcgtaattacagattcaaatattgcacctctttacctggaaaagattgaaagtacttttaataagtctattaaagatgccaaggctgaagcaaggttgcttacttatgtgattcctcctggagaatcttcaaaatgccgagctatgaaagcggaaattgaagattggttgctcacacaatcctgtacacgagataccatccttattgctatgggaggtggagttattggtgatttagtgggatatgtagctgcttcattcatgcgtggcattcgttttattcagatgcctaccaccttgcttgctatggttgattcttctattggagggaagacaggtattgacactcccttgggaaaaaaccttgttggtgctttttggcaacctcttagagtgtatgttgatatggtctttttacataccttacctccccggcaagtcataaatggcttgtccgaaattataaaaacagctgctatgtggaacgaaaatgattttcaattacttgaaaacaattccgctgttttattggatgccttgaacaaaccttccgttccaggagaatacaagtttgatagtatcaaaccgcttttgcaaaaaattattctttcctcaattcgtactaagtgtgaagtagttacgcttgacgaacatgagggtggtctccgtaaccttttaaactttggtcattctattggtcatgcttatgaagcaattttgtacccacaaatccttcatggagagtgtgttgcaattggtatggttaaggaagcagaactcgctagataccttggtattttaaagcctaatgcagttggacgcttaacaaaatgcctcgtttcttacaacttgcctattagcgttaatgatccgaaagtaaaaaaatatgctagctttaagcactgccctgtggaaaaactgattgaatacatggctgtggataagaagaatcaaggatctaaaaaacgtatagttattttaaaggctattggtgaaacttacgaaaaacatgctacagtagtttcagatgacgatattcgctttattctttctcgggatgtaaaggtcgacgaatttactaaatcaagttgggatgttgttgttactcctcctggatctaagtcaatctccaatcgcgctcttgttttggcggctatgggcaatggtacatgccgtcttactaacatgcttcactcagacgatacccagtttatgatgtcggctctggaatcgttaggtgctgctacattttcttgggaagatggtggagaaacattggtagtcaaaggaaatggtggtaagttggccgtccctaaggaagagttatatttaggaaatgcaggaacagctgctcgttttttgactggtattgctgctttggtctcttcaaaggatggtgccaaagttgttttaactggaaatcaccgaatgaaggttagacctataggaccactggttgatgctctaagagcaaatggatgtgaaattaattatcttgaaaaacaaggctctttgcccttagatttatcatctaaaaatggtttaaaaggtggtattatagaactagctgccactgtttcctcgcagtacgtatcttctatcttgatgtgtgctccttatgcttcacaacctgttacactaaaattagtaggcggcaagcccatttctcaattgtatattgacatgaccattgctatgatggcttcatttggtgtcaatgttacgaaatctactacggaagaaaacacttataatataccttgcggaaagtatcaaaaccctccgcattacgaaattgaaagcgatgcaagttcagccacttatcctcttgctattgcggccattaccggtaccaagtgtactgttcctaatattggcagtgcttccctacaaggtgatgcccgttttgcgtgtgatgtgttaaggccaatgggctgtactgtcgagcaaactgctactagtactactgttcagggtcctccaaaaggaactctaaaaccattagagtctatagatatggaaaccatgactgatgcatttttaaccgcttctgttgttgccgcggttgcttgtaacgtttctgaaggagatccagttacacgaatcactggcattgcaaaccaaagagttaaagaatgtaaccggattgccgcaatggttcacgaacttgcaaaatttggtgttcgtaccggcgaattggaagacggcatttacattttcggcaaaaattataaagaacttaaaaaacccgaagaaggaatttatacttatgatgaccatagaattgctatgtcatttagcgttttgtcattaatttgtccctctcgcacattgattattgataaagcttgtgtcgagaagacctggccatattggtgggatgtacttcatcagtctttcggtgttaagcttactggtgcaacctctgttgcttccgatccattaaagggaagtatttcaaaaaatgcttctataattttaattggtatgcgaggtgcaggtaaaactaccattggtaaaattatagcgaagcaactaaactttaagttccttgatttggatgaattactagaagactatcttgagatgcccattgctgaagttattttcaggatgggatgggatgctttccgtcttgaagaacacaaagtattgcgaaagtttattactgaacatcctgaaggttatgttgctgctagcggtggaggggttattgaaatggacgaatcgcggaatctgcttagtaattttgttaaggagggtggaatagtgctacatgtccacagaaatttggagcatatcaagtcttacctttcagaggaccagactagacccacttataaagatcaagaaagcattgacgatgtttataagcgccgtcatgtatggtatcgcgaatgtagatctcattattttattagccctgttttaagtaaccaggtaattgacgaaaaaattcagtattcgatgtctcgtttcttagatgtcgttactggatcctcgcaagtccttcaaaaatttaaaaccaaaaaacgctctacatttttgactctaaattatcctcgtattgaggatgctttgccaactttaagagatgtgacagttggctgtgatgcaattgaagttcgtgtggattatttgaaggatcccaaaagctcaaatggaatttcttctttggactttgtagctgaacaaatttcactacttcgctgttcaactactctacccatcattttcacaattcgtaccatttcgcaaggtggtttattcccgaatgataaggaagaagaggctaaggagttaatgctgtcggcaatgagatacggttgtgactttgtagacgttgagcttggttggagttctgaaaccatcaatattctttatcaacacaagggatacacaaagttgataatgtcgtggcatgatttgtctggtacttggtcatgggcaagacctcacgaatggatgcaaaaagttgaattagcttcttcatacgctgacgttatcaaattggtaggcatggctaacaacttgaatgataatttagaattggaggaatttcgaaccagaattacgaattcaatggatattccattgattttgttcaacatgggacgtttcggacaactttcgagaatacttaacaagttcatgacccctgttacgcatccattacttccttcaaaggctgctcccggtcagttgactgttaaacaacttaatgaagctcgtgttttgataggcgaaattcttcccgagaaatttttcctttttggtaagcctattaagcattctcgctctccaattttacatagcaccgcgtatgagcttttggggctcccacatacctatgaggcattcgaaactgatacagttgacgaagtgcagaaggtgttaaacttaccagatttcggaggcgccaacgttactattccctataagttgtctgttatgaagttcatggatgaactcagtgacgaggcaagattttttggtgctgtaaacactataattccaatcagaattggagacaaacttgttttgcgaggtgacaatactgattggcgtggcatatacgatacatttgcaaatgcattggatggtgtctctcttcgtgatactaatggattagtgattggagctggtggtactagccgtgctgctatttactcattgcatcgtttgggagtatcccgaatttatttgttgaaccgcactttagccaactcttatcgtgttcaagacgttttccctcctgattataacatccatataatagattctgacaatattccttctgaagaattatctagtgttaccctttccgcggtcgtctcgacaattcctgcagatattgagcttcctgaaaaagttgcatctgttattaaagctttgcttgctaacaaagccgatggtggagtattccttgacatggcttacaagcccttgcatacacctctaatggctgttgcatctgacttggaatggaaatgttgcaacggattggaagctttagttcgtcaaggtcttgcgtcttttcatttgtggactggaatgacagcaccatttgatgctgtttatcaaaaggttattgagtaa

SEQ ID NO: 22410 - protein, 1573 aa, Schizosaccharomyces pombe
MSNESNIITVPILGKDTVRVGFGIHQYICTEILENFKSSTYVVITDSNIAPLYLEKIESTFNKSIKDAKAEARLLTYVIPPGESSKCRAMKAEIEDWLLTQSCTRDTILIAMGGGVIGDLVGYVAASFMRGIRFIQMPTTLLAMVDSSIGGKTGIDTPLGKNLVGAFWQPLRVYVDMVFLHTLPPRQVINGLSEIIKTAAMWNENDFQLLENNSAVLLDALNKPSVPGEYKFDSIKPLLQKIILSSIRTKCEVVTLDEHEGGLRNLLNFGHSIGHAYEAILYPQILHGECVAIGMVKEAELARYLGILKPNAVGRLTKCLVSYNLPISVNDPKVKKYASFKHCPVEKLIEYMAVDKKNQGSKKRIVILKAIGETYEKHATVVSDDDIRFILSRDVKVDEFTKSSWDVVVTPPGSKSISNRALVLAAMGNGTCRLTNMLHSDDTQFMMSALESLGAATFSWEDGGETLVVKGNGGKLAVPKEELYLGNAGTAARFLTGIAALVSSKDGAKVVLTGNHRMKVRPIGPLVDALRANGCEINYLEKQGSLPLDLSSKNGLKGGIIELAATVSSQYVSSILMCAPYASQPVTLKLVGGKPISQLYIDMTIAMMASFGVNVTKSTTEENTYNIPCGKYQNPPHYEIESDASSATYPLAIAAITGTKCTVPNIGSASLQGDARFACDVLRPMGCTVEQTATSTTVQGPPKGTLKPLESIDMETMTDAFLTASVVAAVACNVSEGDPVTRITGIANQRVKECNRIAAMVHELAKFGVRTGELEDGIYIFGKNYKELKKPEEGIYTYDDHRIAMSFSVLSLICPSRTLIIDKACVEKTWPYWWDVLHQSFGVKLTGATSVASDPLKGSISKNASIILIGMRGAGKTTIGKIIAKQLNFKFLDLDELLEDYLEMPIAEVIFRMGWDAFRLEEHKVLRKFITEHPEGYVAASGGGVIEMDESRNLLSNFVKEGGIVLHVHRNLEHIKSYLSEDQTRPTYKDQESIDDVYKRRHVWYRECRSHYFISPVLSNQVIDEKIQYSMSRFLDVVTGSSQVLQKFKTKKRSTFLTLNYPRIEDALPTLRDVTVGCDAIEVRVDYLKDPKSSNGISSLDFVAEQISLLRCSTTLPIIFTIRTISQGGLFPNDKEEEAKELMLSAMRYGCDFVDVELGWSSETINILYQHKGYTKLIMSWHDLSGTWSWARPHEWMQKVELASSYADVIKLVGMANNLNDNLELEEFRTRITNSMDIPLILFNMGRFGQLSRILNKFMTPVTHPLLPSKAAPGQLTVKQLNEARVLIGEILPEKFFLFGKPIKHSRSPILHSTAYELLGLPHTYEAFETDTVDEVQKVLNLPDFGGANVTIPYKLSVMKFMDELSDEARFFGAVNTIIPIRIGDKLVLRGDNTDWRGIYDTFANALDGVSLRDTNGLVIGAGGTSRAAIYSLHRLGVSRIYLLNRTLANSYRVQDVFPPDYNIHIIDSDNIPSEELSSVTLSAVVSTIPADIELPEKVASVIKALLANKADGGVFLDMAYKPLHTPLMAVASDLEWKCCNGLEALVRQGLASFHLWTGMTAPFDAVYQKVIE

SEQ ID NO: 22411 - DNA, 792 bp, Amycolatopsis mediterranei
  CDS (1)..(792)
atgccgatcagcggcaccacccgcctgtacgtcgtgctgggcgacccggtcgcccaggtccggtcgcccgggctgctgaacccgctcttcgcggacctggacgtcgacgcggtgctcgtcccggtgcacgcgccgccgccgcacctcgagcggatcgtcgccgggctgcaggccgtcgccaacctcgacggcatcttcgtcaccgtgccgcacaaggtggccgtggccgggctcgccgaccggcgcagcccgatggtggagatcaccggcagcgccaacgccttgcggcgcgaagccgacggccggtggtacgccgagaacttcgacggcaccggcttcgtcgccgggctggtcgaggccgggcacgacccgaaggcccggcgggtgtccctcgtcggcgccggtggggcgggcagcgccatcgcggccgccgtgctggcggccggcgccgaccggctggcgctgtgcgacccggacaccgcgaagctggccgccctcaagggccgcctggacgtgcactggccgggccggacgtcggtgtcggccgagccggacaccgcgggcgccgacctcgtcgtgaacgcgaccccgctcgggctgcggcccggcgacccgctgccgttccggccggaccggctggcgccgggccgcgtggtcgccgacatcatcatgaaaccccgcgaaacccgccttctccgcgaagcggcggccctcggccacgacgtccattacggcagccacatgctcgccgggcaattggactcctatcgcgatttcttcggcctgggttga

SEQ ID NO: 22412 - protein, 263 aa, Amycolatopsis mediterranei
MPISGTTRLYVVLGDPVAQVRSPGLLNPLFADLDVDAVLVPVHAPPPHLERIVAGLQAVANLDGIFVTVPHKVAVAGLADRRSPMVEITGSANALRREADGRWYAENFDGTGFVAGLVEAGHDPKARRVSLVGAGGAGSAIAAAVLAAGADRLALCDPDTAKLAALKGRLDVHWPGRTSVSAEPDTAGADLVVNATPLGLRPGDPLPFRPDRLAPGRVVADIIMKPRETRLLREAAALGHDVHYGSHMLAGQLDSYRDFFGLG

SEQ ID NO: 22413 - DNA, 810 bp, Neisseria meningitidis
  CDS (1)..(810)
atgcacgccctcccccgctacgccgtttttggcaaccccgtcgcccacagcaagtcgccgcagattcatcaacaatttgcccttcaggaaggcgttgacattgaatacgaacgcatttgcgccgacatcggcggtttcgcgcaggcggtttcgacattttttgaaacaggcggttgcggggcaaacgttaccgtaccgttcaagcaggaagcgtttcatctggcggacgagcattctgaacgcgcattggctgccggcgcggtcaacacgctgatttttctgaaaaacggaaaactgcgcggcgacaataccgacggtatcggtttggccaacgacatcacgcaggtcaaaaacattgccatcgagggcaaaaccattttgcttttgggcgcgggcggccgggtgcgcggcgtgattcctgttttgaaagaacaccgccctgcccgtatcgtcattgccaaccgcacccacgccaaagccgaagaattggcgcggcttttcggcattgaagccgtcccgatggcggatgtgaacggcggttttgatatcatcatcaacggcacgtccggcggcttgagcggtcactgtcctgccgtcagccgtgaaatttttcgcaactgccgccttgcctacgatatggtttacggcgacgcggcgcaggcgtttttgaactttgcccaaagcaacggtgcggccgaagtttcagacggcctgggcatgctggtcggtcaagctgccgcctcctaccatatttggcgcgggtttacgcctgatatccgccccattatcgaatacatgaaagccctgtaa

SEQ ID NO: 22414 - protein, 269 aa, Neisseria meningitidis
MHALPRYAVFGNPVAHSKSPQIHQQFALQEGVDIEYERICADIGGFAQAVSTFFETGGCGANVTVPFKQEAFHLADEHSERALAAGAVNTLIFLKNGKLRGDNTDGIGLANDITQVKNIAIEGKTILLLGAGGRVRGVIPVLKEHRPARIVIANRTHAKAEELARLFGIEAVPMADVNGGFDIIINGTSGGLSGHCPAVSREIFRNCRLAYDMVYGDAAQAFLNFAQSNGAAEVSDGLGMLVGQAAASYHIWRGFTPDIRPIIEYMKAL

SEQ ID NO: 22415 - DNA, 810 bp, Neisseria meningitidis
  CDS (1)..(810)
atgcacgccctcccccgctacgccgtttttggcaaccccgtcgccacaagcaagtcgccgcagattcatcaacaatttgcccttcaggaaggcgttgacattgaatacgaacgcatttgcgccgacatcggcggtttcgcgcaggcggtttcgacattttttgaaacaggcggttgcggggcaaacgttaccgtaccgttcaagcaggaagcgtttcatctggcggacgagcattctgaacgcgcattggctgccggcgcggtcaacacgctgatttttctgaaaaacggaaaactgcgcggcgacaataccgacggtatcggtttggccaacgacatcacgcaggtcaaaaacattgccatcgaaggcaaaaccatcttgcttttgggcgcgggcggccgggtgcgcggcgtgattcctgttttgaaagaacaccgtcctgcccgtatcgtcattgccaaccgcacccacgccaaagccgaagaattggcgcggcttttcggcattgaagccgtcccgatggcggatgtgaacggcggttttgatatcatcatcaacggcacgtccggcggcttgagcggtcagcttcctgccgtcagtcctgaaattttcctcggctgccgccttgcctacgatatggtttacggcgacgcggcgcaggagtttttgaactttgcccaaagcaacggtgcggccgaagtttcagacggactgggtatgctggtcggtcaagcggcggcttcctacgccctctggcgcggatttacgcccgatatccgccctgttatcgaatacatgaaagccatgtaa

SEQ ID NO: 22416 - protein, 269 aa, Neisseria meningitidis
MHALPRYAVFGNPVATSKSPQIHQQFALQEGVDIEYERICADIGGFAQAVSTFFETGGCGANVTVPFKQEAFHLADEHSERALAAGAVNTLIFLKNGKLRGDNTDGIGLANDITQVKNIAIEGKTILLLGAGGRVRGVIPVLKEHRPARIVIANRTHAKAEELARLFGIEAVPMADVNGGFDIIINGTSGGLSGQLPAVSPEIFLGCRLAYDMVYGDAAQEFLNFAQSNGAAEVSDGLGMLVGQAAASYALWRGFTPDIRPVIEYMKAM

SEQ ID NO: 22417 - DNA, 810 bp, Neisseria meningitidis
  CDS (1)..(810)
atgcacgccctcccccgctacgccgtttttggcaaccccgtcgcccacagcaagtcgccgcagattcatcaacaatttgcccttcaggaaggcgttgacattgaatacgaacgcatttgcgccgacatcggcggttttgtacaggcggtttcgacattttttgaaacaggcggttgcggggcaaacgttaccgtaccgttcaagcaggaagcttttgcgctggcggacgaacattccgaccgcgctttggcagcaggtgcggtcaatacgctgattctgttgaaaaacggcaagctgcgtggcgacaatactgacggtatcggtttggccaacgacatcacgcaggttaaaaacattgccatcgatggcaaaaacattttgcttttgggcgcaggcggccgggtgcgcggcgtgattcccgtattgctggcgcaaaatcccgcccgcatcgtcattgccaaccgtacccgcgccaaagccgaggaattggcgcagcttttcggcattgaagccgtcccgatggcggatgtgaacggcggtttcgacatcgtcatcaacggcacgtcgggcggtctgaacggtcagattcctgccgtcagccctgaaatttttcgcaactgccgccttgcctacgatatggtttacggcgacgcggcgcaggagtttttgaactttgcccaaagcaacggtgcggccgaagtttcagacgcactgggcatgctggtcggtcaggcggcggcttcctacgccctctggcgcggatttacgcccgatatccgccccgttatcgaatacatgaaagccctgtaa

SEQ ID NO: 22418 - protein, 269 aa, Neisseria meningitidis
MHALPRYAVFGNPVAHSKSPQIHQQFALQEGVDIEYERICADIGGFVQAVSTFFETGGCGANVTVPFKQEAFALADEHSDRALAAGAVNTLILLKNGKLRGDNTDGIGLANDITQVKNIAIDGKNILLLGAGGRVRGVIPVLLAQNPARIVIANRTRAKAEELAQLFGIEAVPMADVNGGFDIVINGTSGGLNGQIPAVSPEIFRNCRLAYDMVYGDAAQEFLNFAQSNGAAEVSDALGMLVGQAAASYALWRGFTPDIRPVIEYMKAL

SEQ ID NO: 22419 - DNA, 810 bp, Neisseria meningitidis
  CDS (1)..(810)
atgaccgccctcccccgttacgccgttttcggcaaccccgttgcacacagtaaatctccgcagattcatcggcaatttgcccttcaggaaggcgttgacattgaatacgaacgcatttgcgccgacatcggcggtttcgcgcaggcggtttcgacattttttggaacaggcggttgcggggcaaacgttaccgtaccgttcaaacaggaagcgtttcatctggcggacgagcattccgaccgcgctttggcagcaggtgcggtcaatacgctgattctgttgaaaaacggcaagctgcgtggcgacaataccgacggtatcggtttggccaacgacatcacgcaggtcaaaaacattgccatcgagggcaaaaccattttgcttttgggcgcaggcggccgggtgcgcggcgtgattcctgttttgaaagaacaccgtcctgcccgtatcgtcattgccaaccgtacccgcgccaaagccgaggaattgtcgcggcttttcggcattgaagccgtcccgatggcggatgtgaacggcggttttgatatcatcatcaacggcacgtcgggcggtctaaacggtcagattcccgatattccgcccgatatttttcaaaactgcgcgcttgcctacgatatggtgtacagctgcgcggcaaaaccgtttttggattttgcccggcaatcgggtgcgaaaaaaactgccgacggactgggtatgctggtcggtcaagcggcggcttcctacgccctctggcgcggatttacgcccgatatccgccccgttatcgaatacatgaaagccatgtaa

SEQ ID NO: 22420 - protein, 269 aa, Neisseria meningitidis
MTALPRYAVFGNPVAHSKSPQIHRQFALQEGVDIEYERICADIGGFAQAVSTFFGTGGCGANVTVPFKQEAFHLADEHSDRALAAGAVNTLILLKNGKLRGDNTDGIGLANDITQVKNIAIEGKTILLLGAGGRVRGVIPVLKEHRPARIVIANRTRAKAEELSRLFGIEAVPMADVNGGFDIIINGTSGGLNGQIPDIPPDIFQNCALAYDMVYSCAAKPFLDFARQSGAKKTADGLGMLVGQAAASYALWRGFTPDIRPVIEYMKAM

SEQ ID NO: 22421 - DNA, 879 bp, Burkholderia mallei ATCC 23344
  CDS (1)..(879)
atgagcacggccgtcgaatcggcagcgcgcgcgcgcgatcgctatgcggtgatcggcaatccgatcgcgcacagcaaatcgccgttcatccattcgcgtttcgccgagcagacgggcgaggcgatcgaatacacgcatctgctcgcgccgctcgacggcttttcggccacggtgcgcgcgttcatcgcgcagggcggccgcggcgtgaacgtcacggtgccgttcaagctcgaggcctatgcgcttgccgatgcgctgtcgccgcgcgcggcggcggcgggcgcggtcaacacgctgcgcttcgacgcggacggcgttttcggcgacaacaccgacggcgtcggcctcgtgcgcgacatcgaggtgaatctcggcgtgagcctcacgggcgcgcggatcctgctgctcggcgcgggcggcgcggcacgcggcgtcgtgctgccgatgctcgagcgcgggcccgcgtcgctcacgatcgtcaaccggaccgcgagcaaggcggaagaactcgtcggccagttcacgcaggcggcgcacgacgcgggctgcgtgctcgccggcggcgggcccgaacggatcgcgcgcgagccgtacgacgtgatcgtcaacgcgacggcgggcagcctcgacgcggcgctgcccgagtgcgacgcggcggccttcggcccggcgacgctcgcgtacgacatgatgtacggcgcgcgcccgaccgtgttcatggagcacgccgcggcgctcggcgcgcgcacggcggatggcctcggaatgctcgtcgagcaggccgcggaatcgttccacgtctggcgaggcgtgcggcccgacagcgcgcccgtgctcgccgcgctgcgcgccgcgctcgcggcgtcggccgcgcactga

SEQ ID NO: 22422 - protein, 292 aa, Burkholderia mallei ATCC 23344
MSTAVESAARARDRYAVIGNPIAHSKSPFIHSRFAEQTGEAIEYTHLLAPLDGFSATVRAFIAQGGRGVNVTVPFKLEAYALADALSPRAAAAGAVNTLRFDADGVFGDNTDGVGLVRDIEVNLGVSLTGARILLLGAGGAARGVVLPMLERGPASLTIVNRTASKAEELVGQFTQAAHDAGCVLAGGGPERIAREPYDVIVNATAGSLDAALPECDAAAFGPATLAYDMMYGARPTVFMEHAAALGARTADGLGMLVEQAAESFHVWRGVRPDSAPVLAALRAALAASAAH

SEQ ID NO: 22423 - DNA, 834 bp, Bacillus cereus ZK
  CDS (1)..(834)
atgaaacaattatatggtgtaatcggaaatccaattggacattcattatcacccgttatgcataacgatgcatttgaacacttgaatatggatgcccattaccatgcctttcttgttaaagaggaagtgttaggggaagcagtaagaggtttaaaagcgttaggtatttcaggatttaatgtaacaactccgcacaaggttgcgattatggattatttggatgagattgacccgctagcaaaacaaattggtgcagtaaatacggtggttcataaggatgggaaattgattggctacaatacagatggaattggttttgtccgagcactgcaatccattagtaatgaaccacttcaagagaaacgtattttattacttggcgcaggcggtgctagtcgagctatttatttttcacttgctgatgtaggggtgaaagagattgatgtagctaatcgtacagtagataaggcgaaagaacttattgctgcatgtacggctactgttcattctgttgctttatcattagaaaaagcaacaaaagaacaagggaattatgatattatcattcagacgacaacgataggtatgcatccacgcgtcgaacatacgcctttacaaatttcttcgttgaaaaagggaacaattgtatcagatataatttataatccatttgaaacgaaaattttatgtgaggcgaaagagcaaggtgcaatcattcaaaatggtattgatatgtttgtttatcaaggagcgcttgcatttgaaatgtggacaggttgcgtaccgaatatcgaacgaatgaaacaattagttataagaaagcttggaggctaa

SEQ ID NO: 22424 - protein, 277 aa, Bacillus cereus ZK
MKQLYGVIGNPIGHSLSPVMHNDAFEHLNMDAHYHAFLVKEEVLGEAVRGLKALGISGFNVTTPHKVAIMDYLDEIDPLAKQIGAVNTVVHKDGKLIGYNTDGIGFVRALQSISNEPLQEKRILLLGAGGASRAIYFSLADVGVKEIDVANRTVDKAKELIAACTATVHSVALSLEKATKEQGNYDIIIQTTTIGMHPRVEHTPLQISSLKKGTIVSDIIYNPFETKILCEAKEQGAIIQNGIDMFVYQGALAFEMWTGCVPNIERMKQLVIRKLGG

SEQ ID NO: 22425 - DNA, 855 bp, Burkholderia pseudomallei K96243
  CDS (1)..(855)
atgagcgggcgttcgtttctgatcggcctgatcggcgccgggatcggcggctcgctgtcgcccgcgatgcacgaggcggaggggtgcgggcagggtctgaactacgtgtaccggcgcatcgatctcgacgcgctggggctgacggccgacgcgctgcccgagctgctcgcggccgccgagcggatgggcttcgacgggctgaacatcacgcatccgtgcaagcagcgcgtgatcgagcatctcgacgaattgtcggcggacgcggccgcgctcggcgcggtcaacacggtgtgcttcgcgcacggccggcgcatcggccacaacaccgattggtcgggcttcgcgaaggcgttcgcgcgcgggctgccgggcgcgtcgctcgagcgcgtcgtgcagcttggcgcgggcggcgcaggcgcggccgtcgcgcacgcggcgctcacgatgggcgccgcgcaactcgcgctcttcgatgtcgaccccgtgcgcgcgcgctcgcttgccgaccagttgcaggcgcgctttccgcacgcgcggctgagcgccggcggcacgctcgccgacgcgctcgcgaacgcgaccggcctcattcacgcgacgccgacgggcatgctcgggcatccgggcctgccgctgccggcgcacctgctgcgaagcgggctctgggtggccgacatcgtctattttccgctcgagaccgagctgatccgcgcggcgcgcgcgctcggctgccgcacgctgccgggcggcggcatggcggtctatcaggcggtcgatgcgttcgagctcttcacgggccgcgcgccggatgccgagcgaatgttcgagcacttccgggcgctcgtcgcgcgctga

SEQ ID NO: 22426 - protein, 284 aa, Burkholderia pseudomallei K96243
MSGRSFLIGLIGAGIGGSLSPAMHEAEGCGQGLNYVYRRIDLDALGLTADALPELLAAAERMGFDGLNITHPCKQRVIEHLDELSADAAALGAVNTVCFAHGRRIGHNTDWSGFAKAFARGLPGASLERVVQLGAGGAGAAVAHAALTMGAAQLALFDVDPVRARSLADQLQARFPHARLSAGGTLADALANATGLIHATPTGMLGHPGLPLPAHLLRSGLWVADIVYFPLETELIRAARALGCRTLPGGGMAVYQAVDAFELFTGRAPDAERMFEHFRALVAR

SEQ ID NO: 22427 - DNA, 819 bp, uncultured archaeon GZfos34A6
  CDS (1)..(819)
atgaaaaatatatacggtattatcggcgacccggtcgcacacagcctctctccggttatgcataatgccgcatttaagaaactcggactggatgcagtctatattgcattctgtgttcctctagaagaacttggcgatgcaataagaggcgcgaaaagtctcggcatctctggtcttaacgttactataccactgaaggaaaaagcgctttcctttgtggcaacagaagaagtagcgaagaaaataggcgctatcaataccattgactttagcagtactcctactggctacaacactgatgggataggcgcgcttatggtattagaagagacagtgggagaagtaagaggtaaaaacgtgttgattattggtgcaggtggagcagcaagggctatctcattttatctcgatgcaagtggtgcgatggtgacattggcgaacaggacagaaggtagatccgcgcaattggcttctaatctccgtaatgcgaattctattagcctgggtgcagagcttaaaaatcagatcagggattctgatattttgataaatgcgacttctgtgggtatgcatccaaatgaagatgccactttgataaccgcagatctaatgcatccggaccttgtagtgttcgacatagtgtataatccaatagagacgaagttgttgaaggaagcgaagcgtgcgggcgtaaagaagacagtgaatggagtgaagatgttagtatatcaaggagcggcatcgttcaatttgtggacaaaaaaggatccaccggtagaagtgatggaaaatgcggttaaggctgctttgattcgttga

SEQ ID NO: 22428 - protein, 272 aa, uncultured archaeon GZfos34A6
MKNIYGIIGDPVAHSLSPVMHNAAFKKLGLDAVYIAFCVPLEELGDAIRGAKSLGISGLNVTIPLKEKALSFVATEEVAKKIGAINTIDFSSTPTGYNTDGIGALMVLEETVGEVRGKNVLIIGAGGAARAISFYLDASGAMVTLANRTEGRSAQLASNLRNANSISLGAELKNQIRDSDILINATSVGMHPNEDATLITADLMHPDLVVFDIVYNPIETKLLKEAKRAGVKKTVNGVKMLVYQGAASFNLWTKKDPPVEVMENAVKAALIR

SEQ ID NO: 22429 - DNA, 744 bp, Bacteroides fragilis
  CDS (1)..(744)
atgcaaaagtacggtttaattggctatccactgaaacattcgttttctatcggctttttcaatgaaaaattcaaatctgaaggcatagatgccgaatatgtaaacttcgaaattcctgaaatcaatgattttatggaggtggttgaagagaaccccaatctgtgcggactaaatgtgacaatcccttataaagagcaggtaatccccttccttgatgaattggataaagacactgcaaaaatcggtgcggtcaatgttattaaaataattcgtacccctaaaagaaaaataaagctggtgggatataattctgatattataggattcagccagtccattcagcccttgttgcaaccttatcataaaaaagccttaatcctaggtaccggcggttcgtcaaaagcgatttatcatggcctgaagaatctgggtatcgacagtgttttcgtatcacgcaccaagaaagaaggtatgctgacttacgaagaattgacaccggaagttatggcagagcatacggtgattgtaaactgtaccccggtaggtatgtatccgaaagtagacttctgtcctgccataccttatgagttgctaaccccaaaccatttactctacgatttgttatataatcctaacattactcttttcatgaagaaaggagaagagcatggggcagtaaccaaaaatgggcttgaaatgctactattacaagcgtttgccgcatgggaaatatggaataagtaa

SEQ ID NO: 22430 - protein, 247 aa, Bacteroides fragilis
MQKYGLIGYPLKHSFSIGFFNEKFKSEGIDAEYVNFEIPEINDFMEVVEENPNLCGLNVTIPYKEQVIPFLDELDKDTAKIGAVNVIKIIRTPKRKIKLVGYNSDIIGFSQSIQPLLQPYHKKALILGTGGSSKAIYHGLKNLGIDSVFVSRTKKEGMLTYEELTPEVMAEHTVIVNCTPVGMYPKVDFCPAIPYELLTPNHLLYDLLYNPNITLFMKKGEEHGAVTKNGLEMLLLQAFAAWEIWNK

SEQ ID NO: 22431 - DNA, 837 bp, Bacillus licheniformis DSM 13
  CDS (1)..(837)
atgaaaccgatatacggactgattggcaatccggtggcccattccatgtctccggacatccataatgcggctttgaaggatctttctttagaagggcattatcacgcttttcgcgtggaaaacgaagatcttgaagatgctgtgaaaggtatgcgggcccttggcattcaagggtttaatgtgaccgtcccccacaaagtatcgatcatgaagcatctcgaccgtattgatgaaagcgccgaagctctcggggcggtaaacactgtcagaagagaaaaagaagggctggtcggatataatacagatggagcagggtttcttaaatcgctgaagccatcccttgatcgtccgctttctgagctctcgatactgttgatcggagcaggcggtgcggcgagggcgatatttaccactctggcagccgagacgcccaagcggcttgatgtggcgaatcgtacgcctgaaaaggcattagcattcactcagcgttttgatggagaggcacgcgccttgtcactgcaggaagcggaagcagacttgtcagcatatgatatcgtgattcaaacgacgtcggtcgggatgcatccgaatgtcgaagctgccccgctttcattggcgaatgcgaaagaaacgtgccttgtatgcgatattatctacaatccgctgaaaacggccctgctgcatgaggctgaagcaaaaggcttgaaaacattggacggagtcggcatgttcatcggccaggcagcccttgcttttgagctgtggacaggacatgagccgaatatggaaaaaatgaaatcaattgtgttgcagcaactaggaggaaaatcatgctaa

SEQ ID NO: 22432 - protein, 278 aa, Bacillus licheniformis DSM 13
MKPIYGLIGNPVAHSMSPDIHNAALKDLSLEGHYHAFRVENEDLEDAVKGMRALGIQGFNVTVPHKVSIMKHLDRIDESAEALGAVNTVRREKEGLVGYNTDGAGFLKSLKPSLDRPLSELSILLIGAGGAARAIFTTLAAETPKRLDVANRTPEKALAFTQRFDGEARALSLQEAEADLSAYDIVIQTTSVGMHPNVEAAPLSLANAKETCLVCDIIYNPLKTALLHEAEAKGLKTLDGVGMFIGQAALAFELWTGHEPNMEKMKSIVLQQLGGKSC

SEQ ID NO: 22433 - DNA, 819 bp, Mannheimia succiniciproducens MBEL55E
  CDS (1)..(819)
atgattaataaagacacacaactttgtatatcgctttcgggcagaccgagtaatttcggcacccgttttcataactatatgtatgaaaaactcggcttaaacttcgtatataaggcgttcaccaccaacgatattgaacatgcagtaaaaggcgtacgggctttaggaattcgcggttgtgccgtatcgatgccgtttaaagagagctgtatgccgtttttagatgaaatatcgccatccgccaaagcaatcgaatcggtgaataccattgtaaataccgacggttatctaaaagcctataacaccgactatattgcaatctccaaattaattgcgaaatatcagctcaaaccgactgcttgtgtgatcatacagggtagcggcggaatggcgaaagcggtggcggcggcgtttaaaaatgccggcttcgacaatcttaaaatctatgcgcgtaatgcgactaccggcggctatttggcaaaactctacggctatcaatatatcgactctctttatggacaaaatgcggatattttggtgaatgcgacgccgatcgggatgaaaggcggcggtaaagaagagtctattatttcttttcccgaagcgatgattgaccaagcctcggttgcttttgacgtagttgcaatgccggcggaaacgccgttaatcaaatatgcccgacagcagggtaaaacggtcatttccggtgcggaggtggcggtattacaggcggtagagcagtttgaactttataccggacaacgcccaggcgatgaattaatcgctgaagccgcgtcattcgcccgcgcgaacagttga

SEQ ID NO: 22434 - protein, 272 aa, Mannheimia succiniciproducens MBEL55E
MINKDTQLCISLSGRPSNFGTRFHNYMYEKLGLNFVYKAFTTNDIEHAVKGVRALGIRGCAVSMPFKESCMPFLDEISPSAKAIESVNTIVNTDGYLKAYNTDYIAISKLIAKYQLKPTACVIIQGSGGMAKAVAAAFKNAGFDNLKIYARNATTGGYLAKLYGYQYIDSLYGQNADILVNATPIGMKGGGKEESIISFPEAMIDQASVAFDVVAMPAETPLIKYARQQGKTVISGAEVAVLQAVEQFELYTGQRPGDELIAEAASFARANS

SEQ ID NO: 22435 - DNA, 1362 bp, Mannheimia succiniciproducens MBEL55E
  CDS (1)..(1362)
atgcaactgaaatcaagtcttattgttaatcaacatttacggctggaacaaatcaccgaggatgatgcagaacccgttttccggttgatttgccggcaacgggattatctctcccgctggctgccgggcgtgggattgacttccaacgtaagcagtacccttaaattcattcgttcccttaaaccgctggagcaggtttttaccattcgccgtgacgatgaaattatcggcttggtgagctttaataaagcggattattcaaatctgaaacttgaaatcggttattggctttctcaatccgagcaaaagcagggcattatgacccaatgcgtgcaaacaatgatagattatgcttttaatcaattatattttaaccggattcaaatcaaatgtgcgataggcaataccgcaagcaaaggaatcccgcagcgtttgggttttcagctggagggtatcgaacggcagggcttgttgctgctttccggcgaattcgccgattttgaaatttacagtatgctggctcaagattggaaaaataaacaggataaacaaattatggatacatacgctgtgtggggcaacccgattgcgcaaagtaaatcacccgccattcacaaaatttttgccgaacaaaccgggcagaacatgaaatatattgccatgttaggcgatgaacaacattttgagcggcaattacaggaattttttgcgcaaggcgccaaagggtgcaacattaccgctccttttaaagagcgggcttatcggcttgccgatgaatacagtgagcgagctttaaccgccggcgcctgtaacacattgaaaaaactggaaaacggcaaactttatgcggataacaccgacggtgccggattggtgagtgatttgcagcgtttaggctggttgaagccgaatcagcagatattaattctcggtgccggtggcgctactaaaggcgtgttgttgccgttattacaggctcaacagaaaatcctgattgctaaccgcactttagcgaaagcggaggaattagcggaaaaattcagcccgtacggtgaaatccgcgcggtggaactgaagacaattccgccgtaccgatacgatgttgtcattaatgcaacgtctctcggtttaacaggtaaaaccgcagatattcagccggaaattttgcaacaagccggtgcggtttacgatatgcaatatgctaaagagactgacacgccctttattgccttagccaaatcccttggcgtaaacaatgtcagcgacggttttggcatgctggtagggcaggcggcgcattctttccgattatggcgggggataatgcccgatatagaagtgctgctgaaccgcggtatttga

SEQ ID NO: 22436 - protein, 453 aa, Mannheimia succiniciproducens MBEL55E
MQLKSSLIVNQHLRLEQITEDDAEPVFRLICRQRDYLSRWLPGVGLTSNVSSTLKFIRSLKPLEQVFTIRRDDEIIGLVSFNKADYSNLKLEIGYWLSQSEQKQGIMTQCVQTMIDYAFNQLYFNRIQIKCAIGNTASKGIPQRLGFQLEGIERQGLLLLSGEFADFEIYSMLAQDWKNKQDKQIMDTYAVWGNPIAQSKSPAIHKIFAEQTGQNMKYIAMLGDEQHFERQLQEFFAQGAKGCNITAPFKERAYRLADEYSERALTAGACNTLKKLENGKLYADNTDGAGLVSDLQRLGWLKPNQQILILGAGGATKGVLLPLLQAQQKILIANRTLAKAEELAEKFSPYGEIRAVELKTIPPYRYDVVINATSLGLTGKTADIQPEILQQAGAVYDMQYAKETDTPFIALAKSLGVNNVSDGFGMLVGQAAHSFRLWRGIMPDIEVLLNRGI

SEQ ID NO: 22437 - DNA, 819 bp, Yersinia pseudotuberculosis IP 32953
  CDS (1)..(819)
atgacccggtacttaaacaaagatacgacagtgtgtatttccctcgcggccaggcccagcaattttggtacccgttttcataactttttgtatgatgctttagatctcgattatttgtataaagcttttaccaccaacgacttggctgcggctattggtggtgtgcgagcgttgggtttccgtggctgcgcgatctcaatgccgtttaaagaggctgttattccaatggtagatgagatggatccctcggccaaagcgatcaactcagtgaatacactggttaatactggcggttatctgaaagcatacaataccgactatattgccattgccaaattgttacaggagtatcaggtcccggtagataacgtgtttgccttgcggggcagtggcggtatggcgaaagccgttgcttttgcgctgaaaaatgctggcttcaaacagggttatattatcgccaccaatgaaaagaccggcaagcaacttgcagagcaatctggttacatctatcgccctgatatgcagaatattcaggctgatatgctcattaatgcgacaccagtcggcatggctgggggggctgatgctgataaattggcttttactgaaactgaagtggaccgcgcgaaaattgtttttgatgttgtggcgttgcccgccgtcaccccgcttatccgctatgctcagactcagggaaaaacagtgatcaccggtgccgaggtttttgctattcaggctgtagagcaatttgtgttatacaccggtatccgcccaagtcaggcgctgtttgaacaagccgcagcttatgcaagaggctga

SEQ ID NO: 22438 - protein, 272 aa, Yersinia pseudotuberculosis IP 32953
MTRYLNKDTTVCISLAARPSNFGTRFHNFLYDALDLDYLYKAFTTNDLAAAIGGVRALGFRGCAISMPFKEAVIPMVDEMDPSAKAINSVNTLVNTGGYLKAYNTDYIAIAKLLQEYQVPVDNVFALRGSGGMAKAVAFALKNAGFKQGYIIATNEKTGKQLAEQSGYIYRPDMQNIQADMLINATPVGMAGGADADKLAFTETEVDRAKIVFDVVALPAVTPLIRYAQTQGKTVITGAEVFAIQAVEQFVLYTGIRPSQALFEQAAAYARG

SEQ ID NO: 22439 - DNA, 885 bp, Symbiobacterium thermophilum
  CDS (1)..(885)
atgaccaagcgtcggagcacatcgcggggtccggggcggatcctggggatcctgggccatccggtggcgcactccgcctcgcccgccatgcacaacgccgcattcgccgcgcaggggatgcacgccatgtacggggcctttgacgtcccgccttcccagctggagaaggcgatcgccgggattcgcgcgctggggctcctgggcgtcaacgtcaccattccccacaaggaggcggtcatggcctacctggacgacgtggcccccaccgcccggcaggtgggtgcggtgaacaccatcgtcaaccggggcggccggctgatcgggtacaataccgacggctggggcttcctgctcagcctggaggagcggggcgtgcgggtcgccggccggaacgccgtggtgctgggtgcgggtggcgccgcccgggcggtggccctgcacctgggcatggccggggtggcgcgcctgacgatcatcaaccgttcccgccagcgggccgagttcctggcggccgatctcgcccgggccaagaccccggtgcgggcggaggtggccgatccggggtcggaggaggcccgggccgcgctcgcggaggccggcctggtcgtcaactgcacccctctgggcatggagcccgacaccgagtcgacgccgctggaggacgtcgggctgctcccggcccactgcgtggtctacgacaccgtgtaccggccgctggagacccgcctcctgcgggaggcgcggcagcacgggctcatcaccgtcaacggcctggcgatgctggtgcaccagggcgcctgcgcctgggagtactggttcggccggcggggcccggtggacgtgatgcggacggccgcgctggcggccctggagggacagccatga

SEQ ID NO: 22440 - protein, 294 aa, Symbiobacterium thermophilum
MTKRRSTSRGPGRILGILGHPVAHSASPAMHNAAFAAQGMHAMYGAFDVPPSQLEKAIAGIRALGLLGVNVTIPHKEAVMAYLDDVAPTARQVGAVNTIVNRGGRLIGYNTDGWGFLLSLEERGVRVAGRNAVVLGAGGAARAVALHLGMAGVARLTIINRSRQRAEFLAADLARAKTPVRAEVADPGSEEARAALAEAGLVVNCTPLGMEPDTESTPLEDVGLLPAHCVVYDTVYRPLETRLLREARQHGLITVNGLAMLVHQGACAWEYWFGRRGPVDVMRTAALAALEGQP

SEQ ID NO: 22441 - DNA, 807 bp, Propionibacterium acnes
  CDS (1)..(807)
atgcgctgtgcggtgattggccatccagtggctcactccttgtccccggcaattcaccgcgccgcataccaggtcctcggcctggagtggtcctaccaggccatcgacgtcgagcctggtggtttgcgtgcttttattgaggggctcgacggttcctggcgagggctatcagtgacgatgcctcacaaggccgatctcgtcgagttgggggagaccgacgcgacggttgacatgttgggagcggcgaatacctgggtttgtcgtgacggcacgaccatcgtccgcaataccgacgtcacgggggcagaggctgcgcttcgtgccaggggagtgactgatgtcgagaaggttgtcatgctgggggcgggcgcaacagcccggtctgttcttgcggctgccattgggatgggagcgggcgaagccgtcgtgatgtcgcgctcgcgcgaacggtccacgaagatccttaaacttgctgatggcctcggcattcgtgttgcctggttgcctttcgaatcggagcctccgcggtgcaacctcatagtctcgacggttccagccggttccttgataaggcgtgctgaagatctcgctgctcgagctaatgcggtttttgacgtcgtctatgatccctggccaacccctttggccgtggctgggaagatcgctggtgcaaccgtcattgacggcttggacctgctcgctgggcaggcggtcggtcaggtgcaactcatgactggctacccggtgccgatggacgttttgaggtccacagcgcagaacggcctggctgagcacgcccgcctttga

SEQ ID NO: 22442 - protein, 268 aa, Propionibacterium acnes
MRCAVIGHPVAHSLSPAIHRAAYQVLGLEWSYQAIDVEPGGLRAFIEGLDGSWRGLSVTMPHKADLVELGETDATVDMLGAANTWVCRDGTTIVRNTDVTGAEAALRARGVTDVEKVVMLGAGATARSVLAAAIGMGAGEAVVMSRSRERSTKILKLADGLGIRVAWLPFESEPPRCNLIVSTVPAGSLIRRAEDLAARANAVFDVVYDPWPTPLAVAGKIAGATVIDGLDLLAGQAVGQVQLMTGYPVPMDVLRSTAQNGLAEHARL

SEQ ID NO: 22443 - DNA, 1086 bp, Leifsonia xyli
  CDS (1)..(1086)
atggtcttgcagcgtccgcgcctggcggtgctcggttcgccgatcggccactccaaatcccctgacctccaccgcgccgcctacgatgtgctgggtctcgactgggagtatggccgcgaagaggtcgccgaagccgaattgcccgcctacctcgacggtctcggagaggagtggcgtggactttcgctgacgatgccgcttaagaaggccgtcatcccgctgctcacggatatcgacagggtggccgcggagaccggtgctgcgaacacggtgctgttcgacggcgaagaggtccgcgggttcaacaccgatgtcggcggcatcgtgcgcgcgctgtcggcggcggggcttgaacgtgtccgctacgttcacattctgggcggaggggccacggccgcgtccgccctcgtggcggccgctgaactcggggcagagcgggtcgacttgcacgtccgcgacctggagaagagcctgtcgctcgagccgccggctcacgggctggggctgcgcatccgcatccggtccttcctgcaggccgatcgctcgctcgacgttcccgaactcgtgatcagcaccttgccgggcgatgtgtccatcccggtgctctacacagactcgacgcggcgcaaagccgtgctgctcgatgtggcctacgagccgtggccgacgaccctggcgaaggcatggcaatccgtcggcggcaccgtggtgtcggggctcgggatgctggttcatcaggcgctgctgcaggtgcgcgtgttcgtctccggtgacccgctggagccgctgcccgacgaagaggctgtgctccgggcaatgctcgcggttgcggcggtggacgctgcgggggcgccgttggacgctgcggcggcgcacacgccgggaacgccgcccgacggggccgcggtggacgccgcgggggcgccgttggacgctgcggcggcgcacacgccgggaacgccgcccgacggggccgcggtggacgccgcggggacgtcgttggacgctgcggcggcgcacacgccgggaacgccgcccgacggggccgcggggacgtcgttggatgctgcggcggcgggagcgtag

SEQ ID NO: 22444 - protein, 361 aa, Leifsonia xyli
MVLQRPRLAVLGSPIGHSKSPDLHRAAYDVLGLDWEYGREEVAEAELPAYLDGLGEEWRGLSLTMPLKKAVIPLLTDIDRVAAETGAANTVLFDGEEVRGFNTDVGGIVRALSAAGLERVRYVHILGGGATAASALVAAAELGAERVDLHVRDLEKSLSLEPPAHGLGLRIRIRSFLQADRSLDVPELVISTLPGDVSIPVLYTDSTRRKAVLLDVAYEPWPTTLAKAWQSVGGTVVSGLGMLVHQALLQVRVFVSGDPLEPLPDEEAVLRAMLAVAAVDAAGAPLDAAAAHTPGTPPDGAAVDAAGAPLDAAAAHTPGTPPDGAAVDAAGTSLDAAAAHTPGTPPDGAAGTSLDAAAAGA

SEQ ID NO: 22445 - DNA, 891 bp, Desulfotalea psychrophila
  CDS (1)..(891)
atgcccgttatccgtaaaaatatattaggtggtacttttatgatagttggtgcaacagcagtttatggaattataggcaatccagtgagccactccatgagtccccttatgcataatgcagcctttgagtcccttggcatagatgctgtttatgtgccctttcgggtggaggatgtggagagtgctgtccagggattgcgtggtttaaatatatgcggggtaagtgttaccatccctcataaagaggctgttatccctcttttggatgaggttgaccccgttgccggcaagataggggcggttaataccattgtttcatctatgcgggatggcagaccctttctcaagggctttaataccgattggattggggccaacagggccctgcaggccgtggtttctcttaagggcaagcaggtcttgcttttgggggcaggcggatctgcccgtgccattggctttggcctgttggaggctggggcggaggtgattctctgtagcagaactccatcccgtggccgccagctggcagatgagtttggttgtctttggctgagtcttgaggatattggcagcgtccgggcagatattgtggtcaacgctacctcggtgggcatggcaccacaagaggatgtcagcctgatgacggtggagcagttgagcggggttgaggcagttatggatattgtctattcaccccatagaacaaggttgctagcgaatgcagataaggcgggatgtgcaatagtttcaggtcttgaaatgttgctctatcaaggtgtccaacaatttgagctgtggcagggccgggaagcacctcttgcggtgatgcggcataccctgtatcgattgttgggctacgatgctgtattaaaggaaaaagagatatga

SEQ ID NO: 22446 - protein, 296 aa, Desulfotalea psychrophila
MPVIRKNILGGTFMIVGATAVYGIIGNPVSHSMSPLMHNAAFESLGIDAVYVPFRVEDVESAVQGLRGLNICGVSVTIPHKEAVIPLLDEVDPVAGKIGAVNTIVSSMRDGRPFLKGFNTDWIGANRALQAVVSLKGKQVLLLGAGGSARAIGFGLLEAGAEVILCSRTPSRGRQLADEFGCLWLSLEDIGSVRADIVVNATSVGMAPQEDVSLMTVEQLSGVEAVMDIVYSPHRTRLLANADKAGCAIVSGLEMLLYQGVQQFELWQGREAPLAVMRHTLYRLLGYDAVLKEKEI

SEQ ID NO: 22447 - DNA, 4713 bp, Debaryomyces hansenii CBS767
  CDS (1)..(4713)
atgtcagaagttgaaaaagtatctattttgggtgccaaaaccattcatgttgggtatggtattcaggaccacattgttgaagagaccattacgaatacggcttcttcgacatatgtgattataactgatactaatatggctagtacccagccatttataaagttggttgaaaagtttacaaaaaaattaaatgaaaagagacctgaatctcgtctacttagatataatgtatccccaggtgaaaataataagagtagagagaccaaggctgcagttgaagacttcttattgcaacaaggatgtactagagatacgatcattattgctgtaggtggaggtgttattggtgatatgattggctttgtagctgccacctttatgagaggagttagactcattcaagttcctactagtttattatcgatggtcgattcttcaattggtggtaagactgccattgatactcctttaggtaagaatttcattggtgcattttaccaaccacaatatgttttcgtcgatgtatcgttcttagaaactttaccaacaaggcaatttataaatggtatggccgaagtagtgaaaactgctgctatttggaatgagaaagagttcgtaagactagaagaatttgctgagaagttcatttctgtggtgactcaaaaggatattgagctcagtacgataagagacgatttggttaagacagttttggaatctattaaagttaaagctgatgttgtgtcgtcggacgaaaaagaggcaagtttaagaaaccttcttaatttcggacacactataggtcatgctattgaagccatcttaactccacaagccttgcatggtgaatgtgtgtctattggtatgattaaggaagcggaattagcaagatacttaggtatattatctcctgttgcagttgcaagattatctaaatgtcttgtgtcttatcaattacctgtttcactagatgataaggtattctcaaagagagttggcaacaaacgtcattatgttgtaattgatactttattagaaaaaatgcttatagataagaaaaacgatggtagtaaaatcaggtgtgttatattagaagctattggtaaatgttaccagttgaaggcacatcaaatatcaaaagaagaattgaagttcgtcttaactgatgaagtattagtacatccatttgatgcagaacaagttccaagtgccaatacaatcattccacctgggtccaaatctatttcgaatagagcgttggttttggcagccttaggttctggtaccgttagaattaaaaatttgttacattctgatgacactaagcatatgttagatgcggtatctcatttgaaaggtgcagaaataactactgaaaataacggtgaaactattgtcttaaaaggtaatggaggtaagatgataacatgtgagcaagaattatacttgggaaatgctggtacagcatcaagatttttaacaactgttgcttctttagttggcattaatcaatcttcttcgaacaaacatgttattttgacaggtaatgctagaatgcaggagagaccaatcggcccacttgttgatgcgttaagatcgaatggctcatctattgattatatgaataaagaaggttcgttaccattgaagattgaagcaggtaatggcataaagggtggtagagttgaattagctgctactatctcttctcagtatgtttcatctattttaatgtgtgccccttacgcacaagaacctgttacattatcattggtgggaggtaaacccatctcgcagttatacatcgatatgactatctctatgatgaagtcctttggtattaatgttaccaggtcaacaactgaagagcatacttatcatataccaaaaggtgcatacgtgaatccatctgaatatgttattgaatctgatgcgtcttcagctacttatccgttagcatttgcagctatgacaggcacttcatgtactgttccaaatattggatcttcgtcattacaaggagatgcaagatttgcagtcgatgttttaaaaccaatgggatgtaaagttgatcagactgctacatctactacagtaacaggtccaccaaaaggacaattgaaaccattaccgcatgttgatatggagccaatgaccgatgcatttttaacggcttcagttgttgcagccattgctaatgatccgtatcagtcgacgtcgatcactggaattgctaaccagagagttaaagaatgtaatagaattgaggctatgattactgaattagctaagtttggtgtcaaagccgacgaattacccgacggaattagaatcaacggtattgattaccataatttaactactccttctatcaaggcaagaggaataaaggcatatgatgaccatagagttgctatgtcgttctcattattagctggtatgtgtgtaaaccctgtgttgatccaagaaagatcatgtactggtaagacatggcctggatggtgggacattttgcatacgaagttcaagacaactcttgacggttatgaattaccagtcaatactgacgatccatcgttgttgattgacaagcatgcaaatggtgatagaagtataattgttattggtatgagagctgcaggtaagagtactttatccaagtggatggcctcattcatgggattcaagtttcttgatttggatgaggttcttgaggaaaaatatggtgttaagattagaccatttattaaggaaaacggttgggatgaattccgtagattggaggccattgtagctaaagaatgcttcgagactcataagaaaggatatgttctttcaacgggtggaggtattgttgaaggtaaagaagcaagagaatcattgaaagaatacgtaaaatccggaggtattgttctacacttacatcgtgatttggatgaaaccgttgtctctttatcagcagatactacaagacctgcttttgtcaatgagattaaggatgtatggatcagaagagaaggatggtaccatgagtgctcgaactatcactcttattcatcacattgttcaaatgagctagaattcaagcatttgagaaattcgtttatcagttacttgaagaccatcactggtcttcacgtcacagagattcctaaaaagagatctgcgtatgttagtttgacatatccagatttgaatgaagtggctgagtctttagaggaaatagcaactgggtgtgaggcaattgaattaagagttgatcttttgaaggattattctaagtcgttcgttgccgatcagacagcaactttaagaaagtatgtaaacctcccaatcatctacactatcaaaacagagtcacaaggtggtaaattttcagatcatgaagtggaacaaattgaagaattgagttatttgggtattaaattaggggtagagtatttggatattcaattaaattaccctaatggattgattcacaaaataatggaaagaaaggcattcaccaggataattggttcgtaccatgataagagtggtcttttgaactggaagaatgttgaatgggataacaaatacaatcaagcagtctctttacaggtcgatattattaaattgactggggtggcttcatgtttccaagacaatttagatttagaaacttttagatcatcacgcgatttaaaacctttgattgcaattaacttgggtgagagcggcaagttatcgagtgtattaaataaagttttaactccagtgacacattccttattaccaccaaatgctactagtgcgcaattgacaatcgatgaagtaaacaagtcttttgcagaaatcggtggctttgttaacaagaaattttgggtcgtcggttatccaataatgcattcgagatctccaaatttgcacaatgcggcatacaagaagttaaatcttccttatgtgtttgatagactcgaaactgatgatgcgagcgaggtatacgagaagttgatgaaacaagaaaactttggtggattagcagtgacaatgcctttgaaattggatataatgaagtatttgcatgaattatctgatgcggctaaggctattggtgctgtcaacactgttattccattggaaggtaaaccaggcaagttcttaggtgacaacactgactgggtaggaattactaactccttcaccagatacggggtcccaagtattgagaactcgaatgtcaacgggcttgttgttggtggtggaggtacatcaagagcggcggcatttgcattacacgaaatgggatgccaaaccatctacatgatgaacagaacgtcgtcgaaactctacgacatcaagaactcgcttccagctctgttcaacatcgagatcttggaatctgttgaccaagtggacgccgccaagccagtctcgttggtagtctcgtgcgtacccgctgacaagcctatcgacgacaaccttctcaatatgttggaaagaatgctccaccaaggtatcctcatcaagcacggctcttttacgccaactttgctcgaggccacctacaagccaagactcacgccggtgatgagaattgccgaggagaagttcgagtggaatgttatccctggtgttgaaatgcttgtcaaccaaggtgaaagacaattcgagcttcacacggggttcacccctccttatagtgttattcaccacgctgtggtctccgaatag

SEQ ID NO: 22448 - protein, 1570 aa, Debaryomyces hansenii CBS767
MSEVEKVSILGAKTIHVGYGIQDHIVEETITNTASSTYVIITDTNMASTQPFIKLVEKFTKKLNEKRPESRLLRYNVSPGENNKSRETKAAVEDFLLQQGCTRDTIIIAVGGGVIGDMIGFVAATFMRGVRLIQVPTSLLSMVDSSIGGKTAIDTPLGKNFIGAFYQPQYVFVDVSFLETLPTRQFINGMAEVVKTAAIWNEKEFVRLEEFAEKFISVVTQKDIELSTIRDDLVKTVLESIKVKADVVSSDEKEASLRNLLNFGHTIGHAIEAILTPQALHGECVSIGMIKEAELARYLGILSPVAVARLSKCLVSYQLPVSLDDKVFSKRVGNKRHYVVIDTLLEKMLIDKKNDGSKIRCVILEAIGKCYQLKAHQISKEELKFVLTDEVLVHPFDAEQVPSANTIIPPGSKSISNRALVLAALGSGTVRIKNLLHSDDTKHMLDAVSHLKGAEITTENNGETIVLKGNGGKMITCEQELYLGNAGTASRFLTTVASLVGINQSSSNKHVILTGNARMQERPIGPLVDALRSNGSSIDYMNKEGSLPLKIEAGNGIKGGRVELAATISSQYVSSILMCAPYAQEPVTLSLVGGKPISQLYIDMTISMMKSFGINVTRSTTEEHTYHIPKGAYVNPSEYVIESDASSATYPLAFAAMTGTSCTVPNIGSSSLQGDARFAVDVLKPMGCKVDQTATSTTVTGPPKGQLKPLPHVDMEPMTDAFLTASVVAAIANDPYQSTSITGIANQRVKECNRIEAMITELAKFGVKADELPDGIRINGIDYHNLTTPSIKARGIKAYDDHRVAMSFSLLAGMCVNPVLIQERSCTGKTWPGWWDILHTKFKTTLDGYELPVNTDDPSLLIDKHANGDRSIIVIGMRAAGKSTLSKWMASFMGFKFLDLDEVLEEKYGVKIRPFIKENGWDEFRRLEAIVAKECFETHKKGYVLSTGGGIVEGKEARESLKEYVKSGGIVLHLHRDLDETVVSLSADTTRPAFVNEIKDVWIRREGWYHECSNYHSYSSHCSNELEFKHLRNSFISYLKTITGLHVTEIPKKRSAYVSLTYPDLNEVAESLEEIATGCEAIELRVDLLKDYSKSFVADQTATLRKYVNLPIIYTIKTESQGGKFSDHEVEQIEELSYLGIKLGVEYLDIQLNYPNGLIHKIMERKAFTRIIGSYHDKSGLLNWKNVEWDNKYNQAVSLQVDIIKLTGVASCFQDNLDLETFRSSRDLKPLIAINLGESGKLSSVLNKVLTPVTHSLLPPNATSAQLTIDEVNKSFAEIGGFVNKKFWVVGYPIMHSRSPNLHNAAYKKLNLPYVFDRLETDDASEVYEKLMKQENFGGLAVTMPLKLDIMKYLHELSDAAKAIGAVNTVIPLEGKPGKFLGDNTDWVGITNSFTRYGVPSIENSNVNGLVVGGGGTSRAAAFALHEMGCQTIYMMNRTSSKLYDIKNSLPALFNIEILESVDQVDAAKPVSLVVSCVPADKPIDDNLLNMLERMLHQGILIKHGSFTPTLLEATYKPRLTPVMRIAEEKFEWNVIPGVEMLVNQGERQFELHTGFTPPYSVIHHAVVSE

SEQ ID NO: 22449 - DNA, 4671 bp, Yarrowia lipolytica CLIB99
  CDS (1)..(4671)
atgtttgccgagggtcagatccaaaaggtcccgattctgggcaaggagtccatccacattggctacaagatgcaggaccacattgtgtctgaaatcgtggccaacatcaagtcgtccacctacattctggtaaccgacaccaacattgaggatctgggctacgttgagtctcttaagacgaaattcgaggctgcgtttgccaaggacggcatcaagagccgactgctgacctacaccgttgcgcccggagaaacctccaagtccagagccaccaaggccgccattgaagactggatgctgtccaagggctgcacccgagatacggtgatcctggctgtgggaggcggagtgatcggagacatgatcggctacgtggccgccaccttcatgcgaggagtgcggtttgtccagatccccaccactctgcttgccatggttgactcgtccattggaggcaagaccgccattgatacccctctgggcaagaatctggtcggcgccttctggcagcccgtcaacattttcatcgacacttctttcctcgagactctgcccgttcgagagttcattaacggtatggcggaggtcattaagactgcggcattctacgacgccgaagagttcacacggctcgagtccgcgtcggaaatcttcctgtccactatcaagaagcgagacgccaaggacccccgacgagtcgatctgtcccccatcaccgacaccattggccgaattgttctcggttctgctagaatcaaggccgccgttgtctctgccgacgagcgagagggcggtttgcgaaacctgctcaactttggccactccattggccacgcctacgaggccattctcactccttacattctgcacggcgagtgtgtggctatcggtatggtcaaggaggccgagctgtctcgatacctgggaattctctctcccgttgctgtggctcgtctggccaagtgcatcaaggcctacgagctgcccgtgtctctggacgacgctacagtcaaggcccgaagccacggcaagaagtgccccgttgatgatctgcttcgaatcatgggcgtcgacaagaagaacgacggctccactaagaagattgtcattctgagcgccattggcaagacccacgagcagaaggcgtcttctgtggcagacaaggacattagattcgttctttccgaggaggtcattgtcggagaggctcctgttggcgacaaaaagtcctacaccgtcactccacctggatccaagtccatttccaaccgagcctttgttctgactgccctgggtaagggtccttgcaagctgcgaaacctgctgcattcggacgacacccagcacatgctcgaggccattgagctgcttggtggcgcatcgttcgagtgggaggccgacggtgagactctgcttgtcaccggaaatggcggcaagctcactgctcccgcccaggagttgtacctaggaaacgccggtactgcttctcgattccttaccaccgctgctactctggttcagaagggagacaaggaccacgtgatccttaccggaaacaagcgaatgcaggagcggcccattgggcctcttgtggacgctcttcgatccaacggagccgacattgctttccagaacgccgaaggctctctccccctcaagatcgaggccggtgttggactcaagggtggcttgattgaggtggctgctactgtttcttctcagtatgtctcttctctacttatgtgtgccccctacgcacagacacccgtcactctgtctctggttggaggcaagcccatctcgcagttctacattgacatgaccattgccatgatggccgacttcggtgtggttgtcaccaaggacgagaccaaggagcacacctaccacattcctcagggtgtgtacaccaaccctgaggagtacgtggtggagtcggatgcttcttcagccacctaccctcttgcttacgctgccatgactggccacaccgtcactgttcccaacattggcagcaagtctctgcagggagacgcccgatttgccattgatgttctcaaggctatgggctgcaccgttgagcagaccgctacctcgaccactgttactggtgtgcccaacctcaaggctatcgctgttgatatggagcctatgactgacgccttcctcaccgcctgtgtcgttgccgctgtgtccgagggcaccaccgtcatcaccggcattgccaaccagcgagtaaaggagtgcaaccgaatcgaggccatgcgagtgcaactggccaagtacggcgtcgtttgccgagagcttgaggacggcattgaggtcgacggaatttcccgatcagatctcaagacccccgtctctgtgcactcttacgatgaccaccgagttgctatgtctttctcgctgctctcttctatcatggctgctcccgtggctattgaggagcgacgatgtgtcgaaaagacctggccgggatggtgggacgtgctctccggcgtgttcaacgttcctctggagggcgtaacgctggccaagaccgtttccaaggccgagtccggactttccaagccctccatcttcattgtgggcatgcgaggtgccggaaagacccatctgggcgcccaggccgccaaccatcttggctacgagttcattgatctcgaccagctactcgaaaaggatctggataccaccattcctcagctgattgcggacaagggctgggaccatttccgtgccgaggagctgcgtctgctcaagcagtgtctcaatgacaagtccgagggctacgtcatttcctgcggtggcggagttgttgagactcctgctgctcgagacgctcttcagaccttcaagggtgttggtggtattgttctgcatgtccaccgacccgtttccagaatcctcgagtacctcaacaaggaccagtctcgacctgcatttgtggacgatctggaggcggtgtggcagcgacgaaaggagctgtaccgatctgtctcttccaatgtcttctttgctcctcactgcgactctgccgaggccactgccaaggtgcagcagatgctgggcgccttcctggaccgagtcaccggcaagtccgagtttgtgattccccacaaggaccaattcacttccttcctgtcgctaaccttccccgacgtgtctattgccgcaaccatgctcccctcgctgtctgagggttgttctgctctggagctgcgagtcgatctgctcaatgagaatgacgaggccattccctccgaagagtacgttctctctcagttggcgattctgcgacagaatgtcgacctccccattctttacacggtgcgaaccaaggctcagggaggccgtttccccgacgacaaacctgtggagctggccaacctggtcaacctgggtctcaagaccgccgttgagctgctggacgttgagctgacctaccctgccgagcttgtttcgtccgtcggagcttccagaggctacaccaagctgctgggctctcaccacgactttcccggcgctctcaactggtcttctctcgagtgggagaacatgtacgcccgagccgaggctgtgcctgtggacgtggtcaagctcgtcggtatggccaagtctttctccgacaactttgctctggagaacttccgagaggcccacacctcttctcctcttctggctatcaacatgggctcccatggtcagctgtctcgagtcaccaacactctgctgactcccgtgactcacgctgacttgcctgtggctgctgctcctggccagctttccgtggaggagatcaaccagacccggtcgaccatcggcatgttcaacaagaacctgtccttcttcattgtcggcactcccatcggccactccaagtcgcccattttgcacaacaccatgttcaagaagctgggtctgccctacgagtactcgcggttcaagactgatgatgctgctgccgtcaacgctaaggcccgtgctctgcttgcccagggcaaccttggaggtatcagtgtgaccattcctctcaagcaggacattattcctttccttgacgaggtgtctcccctcgctcagcagattggagccgtcaacaccatcattcctggacctaacgggactctcaagggcgacaacaccgatattctcggtctggtgaacgctctgactcggtttggagccaactcgctggacaagaagactgctctgattgtcggagccggtggcacatctctggctgccgtgcacggactgcgatcgctcggcttcgccaagattctcattgccaaccgaactctgtccaaggccgaggccattgctgacaagtttgataacgtggaggccgtgactttggactcgtttgtggccaacaagtacactccgtctgtgattgtgtcttgcgtgccagccaccactttctcgatgctggatgagtccaacaagctggtgtctgccgctctggctgcttctcccaagggtctggttcttgaggctgcctattctgccgaggccactcctctgctcaagcaggtgatggacgtcgagggctgggagttcatctccgggctctacatgctcaccgagcagggctttgagcagttccggctgtggaccggaattcccgcccccaaggaggttggagagaaggctgttcttggtaactaa

SEQ ID NO: 22450 - protein, 1556 aa, Yarrowia lipolytica CLIB99
MFAEGQIQKVPILGKESIHIGYKMQDHIVSEIVANIKSSTYILVTDTNIEDLGYVESLKTKFEAAFAKDGIKSRLLTYTVAPGETSKSRATKAAIEDWMLSKGCTRDTVILAVGGGVIGDMIGYVAATFMRGVRFVQIPTTLLAMVDSSIGGKTAIDTPLGKNLVGAFWQPVNIFIDTSFLETLPVREFINGMAEVIKTAAFYDAEEFTRLESASEIFLSTIKKRDAKDPRRVDLSPITDTIGRIVLGSARIKAAVVSADEREGGLRNLLNFGHSIGHAYEAILTPYILHGECVAIGMVKEAELSRYLGILSPVAVARLAKCIKAYELPVSLDDATVKARSHGKKCPVDDLLRIMGVDKKNDGSTKKIVILSAIGKTHEQKASSVADKDIRFVLSEEVIVGEAPVGDKKSYTVTPPGSKSISNRAFVLTALGKGPCKLRNLLHSDDTQHMLEAIELLGGASFEWEADGETLLVTGNGGKLTAPAQELYLGNAGTASRFLTTAATLVQKGDKDHVILTGNKRMQERPIGPLVDALRSNGADIAFQNAEGSLPLKIEAGVGLKGGLIEVAATVSSQYVSSLLMCAPYAQTPVTLSLVGGKPISQFYIDMTIAMMADFGVVVTKDETKEHTYHIPQGVYTNPEEYVVESDASSATYPLAYAAMTGHTVTVPNIGSKSLQGDARFAIDVLKAMGCTVEQTATSTTVTGVPNLKAIAVDMEPMTDAFLTACVVAAVSEGTTVITGIANQRVKECNRIEAMRVQLAKYGVVCRELEDGIEVDGISRSDLKTPVSVHSYDDHRVAMSFSLLSSIMAAPVAIEERRCVEKTWPGWWDVLSGVFNVPLEGVTLAKTVSKAESGLSKPSIFIVGMRGAGKTHLGAQAANHLGYEFIDLDQLLEKDLDTTIPQLIADKGWDHFRAEELRLLKQCLNDKSEGYVISCGGGVVETPAARDALQTFKGVGGIVLHVHRPVSRILEYLNKDQSRPAFVDDLEAVWQRRKELYRSVSSNVFFAPHCDSAEATAKVQQMLGAFLDRVTGKSEFVIPHKDQFTSFLSLTFPDVSIAATMLPSLSEGCSALELRVDLLNENDEAIPSEEYVLSQLAILRQNVDLPILYTVRTKAQGGRFPDDKPVELANLVNLGLKTAVELLDVELTYPAELVSSVGASRGYTKLLGSHHDFPGALNWSSLEWENMYARAEAVPVDVVKLVGMAKSFSDNFALENFREAHTSSPLLAINMGSHGQLSRVTNTLLTPVTHADLPVAAAPGQLSVEEINQTRSTIGMFNKNLSFFIVGTPIGHSKSPILHNTMFKKLGLPYEYSRFKTDDAAAVNAKARALLAQGNLGGISVTIPLKQDIIPFLDEVSPLAQQIGAVNTIIPGPNGTLKGDNTDILGLVNALTRFGANSLDKKTALIVGAGGTSLAAVHGLRSLGFAKILIANRTLSKAEAIADKFDNVEAVTLDSFVANKYTPSVIVSCVPATTFSMLDESNKLVSAALAASPKGLVLEAAYSAEATPLLKQVMDVEGWEFISGLYMLTEQGFEQFRLWTGIPAPKEVGEKAVLGN

SEQ ID NO: 22451 - DNA, 4737 bp, Kluyveromyces lactis NRRL Y
  CDS (1)..(4737)
atgagcgttgaacttgcaaaagtctccatcttggggaaagagtgcgtccacgttggttatcagattcatgagcacattgtgaagtccactttggaacattgtaagtcttctacatatgtgattattaatgatacaaatgtatccaaggttccatactatcatgatttggttagtttgttcgagaaatccctaccggaaggttctcgtttacttagatacgacgtgaagccaggtgaagctcacaagagccgtgaaacgaaggctgacatcgaagactatttattacttgaagggtgtacccgtgacactgttatcattgccgttggtggtggtgtgattggtgatatgatcggttttgttgcgtccacatttatgagaggtgttcgtgtcattcaagttccaacatcgttgttagctatggttgattcatccatcggtggtaagacagctgtggatactccgcttggtaagaactttgttggcgccttttggcaaccgcaattcgttttcgtagacatcaaatggttggaaactctccctcaaagagaatttatcaatggtatcgctgaagttatcaagacagcttgtatctggaatggtgaagagtttgcaagattggaggctaatgcagaaacgttcttgtctgtggtgaataactcacaaacagtatcggtgttcagtccacaccataatgaaactgtagaactcacttacaccaatattgaatcaatgcttgaacatacctacaaattggtgttagaatctattaaggttaaagctcatgtggtttcgagtgatgaaagagagtcaggattgagaaatttactaaatttcggtcacaccattggtcatgcttacgaagcgatcttaacaccccaagctttgcacggtgaatgtgtgtcaataggtatggtcaaggaggcagaactttcacgttatatgaatatactatctgcgacacaagttgcccgtatggtaaaaattctagctgcctacggtttgcccatcagtgttaatgagaaatggtttaaagagttaactttgaataaaaagacacctttggacgttttattgaagaagatgagtatcgacaaaaagaatgatggttcaaaaaagaaggttgtcatcctagaaaaaattggtaaatgttatggaacatccgctcacgtagtttcagatgaagatttgagatttgttttgtcagatgaaaccttggttcatccattcaataacatcccagaaggacaaaataaggtaatcacaccaccaggttctaaatctatttcaaaccgtgctctaattctcgcagcattaggtaaaggtacgtgtaagatcaagaacttgttgcattctgatgataccaaacatatgttaaatgcagttcaacagttgaagggggctactatctcttgggaagatgatggtgaaacagtagtagtccacggccaaggtggttccacgttaaccgccccttctgaagcattatacttaggtaatgcgggtactgcttcaaggttcttgactactgttgctgcattggccaagaaagatggtaagaatgaccatgtcatattaactggtaatgcaagaatgcaggaaagaccaatcggacctctagtcgactctctccgttccaacggtctaaaaatcgattacttgaacagacaaggatctttacctttgaaaataaacacagaaaccaatttcaaaggtggaaaaattgagttggctgccactgtctcctctcaatatgtctcttcgatcttaatgtgtgctccatacgcagaagagccagttacgttatccctcattggtggtaagccaatctcacaactttatgtcgatatgactatcaagatgatggatgctttcggtattaaagtcactacgtctactacagagcctttcacctatcacattccgaagggaaattacatcaatccagcagagtataccatcgagtcagatgcttcttctgctacctacccattatcatttgctgctatcactggaaccacggtgactgttccaaatattggatcggcctctttgcaaggtgatgccaggtttgcagttgatgttttgagaccaatgggatgtgaggttactcagactgcaacctcaactaccgtgactggtccaccaagaggtcagttaaaacctttaaagcacgtggatatggagccgatgactgatgcatttttgacggcatcagtggttgctgccatttgtaataacggtaccacaaacactactaccattgaaggtattgccaatcaaagagtcaaggaatgtaacagaatcgaagccatggttacacaattagcaaaattcggtgtgagggctaatgaattacctgatggtattcaaattcatggtgttaattctatctcggaattgagacaaccatctgatgcaggaattgagacttacgacgaccatcgagtagctatgtcattctcactgttggctggtatggttaattctgataagaaggatgatgaatcatctgttagaattttggagagacaatgtaccggtaaaacatggcctggttggtgggatgtcctacattctcaattgggtgcaagacttgacggcgctgaaccttcaacaacaaaatcatctgaagttaaaaaaagtgtagtcattataggaatgagagcggctggtaaaagtactgtcagcaagtggtgtgctgagtccttgggttacaggcttcttgatttagatgaggaatttgaaagacagtacggcaaaggtactgtgaaagactttgtagcagaatctggatgggatgagttcagaaaggaagaaactaggatattccaggaagcggtagacaaatacggtgacaagggctatgtgttatcttctggcggtggaattgttgaaagatcagaatcaagacaggctttgaagaggtttgccgaaagcggcggtatcgtcctacatcttcaccgtgatatcgaagagacaatcgttttcctaaagagcgacccaactagaccagcttacattgaagaaattcgcgatgtgtgggaaagaagagaaaagtggtaccatgaatgttcgaactttaccttctttgcggctcattgctccaatgaaattgaattcaggaatttaagacatgtgttcagcaacttcattcgtcgtgtacttggcgctgaaaagattcctgtaccttccaggagatcagctttcgtctgtttgactttcgaagacctatcggatcatttgtcaaaattggatgaaataacctatggttgtgaagcagtagaactaagagttgatcatttatcatccttttcttcagactttgtcaccaaacaaatctccttgttaagagctgcaaccaaatcgctacctattgttttcactgtgagaacagttagccaaggagggaaattccaagatgatgattatgatttacttgaatcattgttgaaggtcgctctgaagaacgctgttgaatacatcgatttagagttgacattgcctaacaacatactctacaatgttttgaacaagaaatcaaacacaaagattattggctcccatcatgattttgcagctaaattcccatgggatgatgctgaatgggaaaatagatataaccaagctctttctttagacgtggacattgtgaagttcgttggcacagcagtaagcttcgatgacaatttggctttggaaaaattcaggtccactcatactttgaagccactaattgctatcaatatgactgaaacaggtaagctatccagggtgctaaataatattttgacacctgttacctccaagttactaccatccgccgctgcccctggtcaattgacactagctgaaatcaaccaattgtatcaccaaatcggtggattaccagccaagaagttctttgttattggttctccaattggacattccagatctccgatcttgcacaacactgggtatgagctactaggcttacctcatcattttgataaattcgaaactgaagatatcgaagtagttaagaaagaacttttgaccagagaagatctcggtggcttagctgtaaccatcccattaaaactagatattattgatagtatgtttgaattgagcgaagccgcaaagaccattggcgctgtaaacactgttattcctttaggaaagaacaaattcaggggtgacaatactgattggttaggtatcaaaaactctttggtttcaaatggtgttcctagttctgttagtggttctgcaggtctgattatcggtgctggtggtacttcaagagctgctatatacgctttgaaacaaattggttgtgacaccatttatatgctcaacagaaccacggagaaactacaaaagctgaaatccgaattttccgaagaatataagattgttgtcgtcgaatctgccgaacaaacagagtcaattaaggaacaagtttctgttgctgtttcttgtgttccagctgataagcctttagatccagagttactaaacaaattggaaagacttttggcaaaaggtacaaatagctccttcaaaccaaccttgttagatgccgcatataagccttcagtgacccctatcatgaagctcgcacgtgataagttcaactggaatatcgttccgggcgctgaaatgttggttcatcaaggtgtggaacaattttctaaatggacaggtgcaaaaccaccatttaaagctatctttgatgcagttacccaagaatag

SEQ ID NO: 22452 - protein, 1578 aa, Kluyveromyces lactis NRRL Y
MSVELAKVSILGKECVHVGYQIHEHIVKSTLEHCKSSTYVIINDTNVSKVPYYHDLVSLFEKSLPEGSRLLRYDVKPGEAHKSRETKADIEDYLLLEGCTRDTVIIAVGGGVIGDMIGFVASTFMRGVRVIQVPTSLLAMVDSSIGGKTAVDTPLGKNFVGAFWQPQFVFVDIKWLETLPQREFINGIAEVIKTACIWNGEEFARLEANAETFLSVVNNSQTVSVFSPHHNETVELTYTNIESMLEHTYKLVLESIKVKAHVVSSDERESGLRNLLNFGHTIGHAYEAILTPQALHGECVSIGMVKEAELSRYMNILSATQVARMVKILAAYGLPISVNEKWFKELTLNKKTPLDVLLKKMSIDKKNDGSKKKVVILEKIGKCYGTSAHVVSDEDLRFVLSDETLVHPFNNIPEGQNKVITPPGSKSISNRALILAALGKGTCKIKNLLHSDDTKHMLNAVQQLKGATISWEDDGETVVVHGQGGSTLTAPSEALYLGNAGTASRFLTTVAALAKKDGKNDHVILTGNARMQERPIGPLVDSLRSNGLKIDYLNRQGSLPLKINTETNFKGGKIELAATVSSQYVSSILMCAPYAEEPVTLSLIGGKPISQLYVDMTIKMMDAFGIKVTTSTTEPFTYHIPKGNYINPAEYTIESDASSATYPLSFAAITGTTVTVPNIGSASLQGDARFAVDVLRPMGCEVTQTATSTTVTGPPRGQLKPLKHVDMEPMTDAFLTASVVAAICNNGTTNTTTIEGIANQRVKECNRIEAMVTQLAKFGVRANELPDGIQIHGVNSISELRQPSDAGIETYDDHRVAMSFSLLAGMVNSDKKDDESSVRILERQCTGKTWPGWWDVLHSQLGARLDGAEPSTTKSSEVKKSVVIIGMRAAGKSTVSKWCAESLGYRLLDLDEEFERQYGKGTVKDFVAESGWDEFRKEETRIFQEAVDKYGDKGYVLSSGGGIVERSESRQALKRFAESGGIVLHLHRDIEETIVFLKSDPTRPAYIEEIRDVWERREKWYHECSNFTFFAAHCSNEIEFRNLRHVFSNFIRRVLGAEKIPVPSRRSAFVCLTFEDLSDHLSKLDEITYGCEAVELRVDHLSSFSSDFVTKQISLLRAATKSLPIVFTVRTVSQGGKFQDDDYDLLESLLKVALKNAVEYIDLELTLPNNILYNVLNKKSNTKIIGSHHDFAAKFPWDDAEWENRYNQALSLDVDIVKFVGTAVSFDDNLALEKFRSTHTLKPLIAINMTETGKLSRVLNNILTPVTSKLLPSAAAPGQLTLAEINQLYHQIGGLPAKKFFVIGSPIGHSRSPILHNTGYELLGLPHHFDKFETEDIEVVKKELLTREDLGGLAVTIPLKLDIIDSMFELSEAAKTIGAVNTVIPLGKNKFRGDNTDWLGIKNSLVSNGVPSSVSGSAGLIIGAGGTSRAAIYALKQIGCDTIYMLNRTTEKLQKLKSEFSEEYKIVVVESAEQTESIKEQVSVAVSCVPADKPLDPELLNKLERLLAKGTNSSFKPTLLDAAYKPSVTPIMKLARDKFNWNIVPGAEMLVHQGVEQFSKWTGAKPPFKAIFDAVTQE

SEQ ID NO: 22453 - DNA, 828 bp, Erwinia carotovora
  CDS (1)..(828)
atgtctgaagtaacgtcttttgcggtttttggcaatccgattgcacatagtaaatcacctcgcatacacgagctatttgcggcgcaaacggggataacgttgacgtaccagcgtgtgttagcgcctttggataattttgagcagatgctgcgccagtattttcacgatggtgctggtggcgcgaatgtaactgcgccctttaaagagcgagcttttgctgaagccgatgaacgcagcgaatgtgctgcgcttgcgggggcggtcaatacattgaagaggctgagtgacggtcgcctgtatggtgataatactgatggcatcggtttgctcagcgatctgcaacgattggcgttggtaaaacctttggatcgtgttttgctcgttggtgcgggtggcgcggcgcgtggtgttatccaacccctgctggcctctggttgtactgttgtgctgaccaataggacctttttcaaggctgaagcattagctaaaatcttctgtgatattggtgatattcaagctactgctcttgacggtctgcatggtcaatctttcgatctgatcattaacgccacatcttctgggatgtacgacagcattcctaacttaccggcagaactcatttcgccggaaacgagctgttatgacatgttttacttaccgcagctaacgccctttttgtcatggtgcgtacaacagggggctatccactatgcagatggtttgggaatgctggtggggcaagcggcacatgcgtttaaactttggcatggtgtgatgccagacgtggagccagtgattgatctactgaagcaggatctcgctaaatga

SEQ ID NO: 22454 - protein, 275 aa, Erwinia carotovora
MSEVTSFAVFGNPIAHSKSPRIHELFAAQTGITLTYQRVLAPLDNFEQMLRQYFHDGAGGANVTAPFKERAFAEADERSECAALAGAVNTLKRLSDGRLYGDNTDGIGLLSDLQRLALVKPLDRVLLVGAGGAARGVIQPLLASGCTVVLTNRTFFKAEALAKIFCDIGDIQATALDGLHGQSFDLIINATSSGMYDSIPNLPAELISPETSCYDMFYLPQLTPFLSWCVQQGAIHYADGLGMLVGQAAHAFKLWHGVMPDVEPVIDLLKQDLAK

SEQ ID NO: 22455 - DNA, 789 bp, Acinetobacter sp
  CDS (1)..(789)
atgaccaagcagtttgctgtaattggtaatccaattgaacaatcccgctcaccagaacttcatcatgcttttgcagaaaagctgggaattgagctgaactacagtaaacgacttgcacctctcgatggctttgaagccaatgtcaaaactttcttcgatcaaggtggcttgggaataaatgtcactgttccatttaaggaacaggcatttgccatgtgtcatcaacttaccgaacgtgccaaaattgctaaagcggtaaatacgctctggatcgaaaacggtcaacttcatggggataataccgatggtcaaggtctagtcgatgccattcaagctctaaactggcctttacagggtactcgtattttaatccttggtgctggcggtgcaacacgtggcgtgatttatccactggttcaggcaggcgtcactgaaattgtgattgccaaccgcacacaacagcgcgctgaacaactggttcaggatcttgctggatccgtttcagaagcaacattgagggttatgacactcgatcagttacacggcaattttgatctggttattaacgcaacgtctgcgagcctcagcggcgatgcactggtattgccagaaacactacagtttaaatatgcttatgaaatggcatatggtaaaccctcttcttttctggatcaggccaaagctcgcggcgttcctacaacagaaggtttcggtatgttagtcggtcaggcgattgaagccttttcaatctggcatggggtcaaaccaaatcttaccgattttttataa

SEQ ID NO: 22456 - protein, 262 aa, Acinetobacter sp
MTKQFAVIGNPIEQSRSPELHHAFAEKLGIELNYSKRLAPLDGFEANVKTFFDQGGLGINVTVPFKEQAFAMCHQLTERAKIAKAVNTLWIENGQLHGDNTDGQGLVDAIQALNWPLQGTRILILGAGGATRGVIYPLVQAGVTEIVIANRTQQRAEQLVQDLAGSVSEATLRVMTLDQLHGNFDLVINATSASLSGDALVLPETLQFKYAYEMAYGKPSSFLDQAKARGVPTTEGFGMLVGQAIEAFSIWHGVKPNLTDFL

SEQ ID NO: 22457 - DNA, 4740 bp, Candida glabrata CBS138
  CDS (1)..(4740)
atgctggtcaaagttcctattctagggcgggagaccattcatgttggttacggtgtgcgttcgcacattgtggagacgattgtggggctgaagtcgtcgacctatgtggttatcaatgacagcaatgttgggcgtgtgccatacttccaggagcttttgagtgattttgaagcgcaattgcctgctgggtcgcggttgctgcggtatgtggtgaagcccggtgaggctaacaagactagggccaccaaggagcagatcgaggactacctgctgagcgaaggctgcacccgtgacactgtgatcgtggctgtcggtggtggtatcatcggcgatatgatcgggtatgtcgctgccaccttcatgcgtggtgtgcgtgtcgtgcaagttcccacctctctgctggcgatggtcgattcatccattggtggtaagactgcggtcgacaccccgttgggtaagaacttcatcggtgcgttctggcagcctgagtttgttctagtggacatcaagtggctgcagagcttgccaaagagagaatttattaacggtatggcagaggtcatcaagacggcgtgtatctggaacgccgacgaattccaaagattggagacccacgcagacgagtttttgcacgttgtcaacaccccaaaaatctcagagaaggaaggattccaactatacgacactgacattgaatctataaaggaacacatcttcaagctggttctagagagtatcaaagttaaagcagaagtggtctcatcagatgagcgtgaatcaagcttgagaaacctgctgaacttcggccactcaattggccatgcttacgaagctatcctaacaccacaagctctacatggtgaatgtgtatcgattggtatggttaaggaagcggaattatcacgttacttgggtattctttccgctacccaggttgcaagattgtcgaagattctggtcgcatacggcttgccagtgtccaaggatgaaaaatggttcagagaactaacactaaacaaaaagacccctctagatactttactgaagaagatgagtattgacaagaagaatgatggttctaaaaagaaggtggtattgcttgagacaattggtaaatgttatggtaagtctgcccatgtagtatctgatgaggatttgagatttgtgctaacagatgaaaccttggtttatcctttcaacaacatccccagagatcagaacaagactgtcaccccaccaggttctaagtctatctctaatagagcgctggttttggctgccctaggtaaaggtacctgtagaatcaagaacttactgcattctgatgatactaaacacatgctgacagctgttcaagaactaaagggagccaacatttcctgggaagacaatggtgaaactgttgttctagagggccaaggtggtagtaccttggtagcttgtgaaaacgatctttacttgggtaatgctggtactgcctctcgttttttgacatctgttgctgcactagtaaactccacttcacaaaaagaccatgttatattaacaggtaatgctagaatgcaacaacgtccaatcggtccattggttgattctctacgtaacaatggtattaaaatcgattatgtaaaaaatgaaggctgtctaccgttgaaagtacatactgactctgtctttaaaggtggtagaattgagcttgctgcaactgtttcatctcaatatgtttcatccattctaatgtgtgccccatatgctgaaaaccctgttactttagctcttgttggtggtaaaccaatttcaatcttatatgttgagatgactatcaagatgatggaaaaattcggtattaaggttgaaaaatcaactactgaagaatacacttacattattccaaagggccattacgttaatccagcagaatatgttattgagagtgatgcatcaagcgctacatatccattggctttcgctgcattgactggtactacagtgactgttccaaatattggttctgcttctctgcaaggtgatgctagatttgccactgacgttctacaaccaatgggctgttctgttactcaaacagccacatcaacaaccgttactggtcctccagttggccacttgaaaccattaaagcatgttgatatggagcctatgactgacgcgttcctaacagcctgtgttgtagctgcagtagctcacgacaatgaccctacatcgaagaacacaactaccattgaaggtattgctaaccagagggtaaaggaatgtaacagaattgaggcaatgtgtacacaattggctaagtttggtgtaagaactaacgaattaccagatggtattcaagttcatggcttacattctatcaatgacttgaaagtaccaagcattggtaacgaagctgttggtgtctgtacctatgatgatcaccgtgttgctatgagtttctctctactagctggcatggtcaactcagaacaaccaaattcaagtaacccaacacctgtccgtattctagaaagacactgtaccggtaagacttggcctggctggtgggatgttttacatactgagcttggtgctcaactagatggtgctgaaccacttgagttgaattcgatgaagaacgcaaagaaaagtgtggtaatcatcggtatgagagcagctggtaaaactacaattagcagatggtgtgctgcagcactgggctataaacttgtcgatctagatactctatttgaagaaagatatggacatggaatgataaaagatttcgttagccaacacggctgggaaaagttccgtgaagaggaagctagaattttcaaagaggttattgaaaactatggcgatgcaggttacgttttttcaagtggtggcggcttagttgaaagttctgaatctagacgtatattgaaatcattttccaagagcggtggttatgtacttcatctgcacagagatatcgaagagactattatgtttcttcaaaaggatcctaccaggcctgcatatgtggaagagatcagagaagtttggaatagaagggaatcttggtacaaggattgctcaaacttctcgttcttcgccccacattgtaactctgaagtagaattccaaaatctaaggagggcattcaccaaattcattagaactatcacaggtgtaacgactgtagatatccctacaagaagatcagcatttgtttgtttgacatttgaaaatttgactgaatatacaaattcattaaaagcgattacatacggttgcgatgctgtagaagttagagtagatcacttatccaatatggacgaagacttcgttagtaagcaaatttctattctcagagcttcaactgatggcctgccaattatctttactgttagaaccaaaaagcaaggtggtaagttccctgatgaggactatgaaacccttcaaaagctactgataactgctttgaaggttggtgttgattacattgatttggaactaactttgccaattggtattcaatacaaagttttgaacatgaagagaaatacgaaaattattggctctcaccatgactttgctagtgcctacccatgggatcactccgaatgggagaacaggtacaatcaagctcttgccatggatgttgatattgttaaatttgttggaatggccaaaagcttcgaagacaatttaatgttagagagattcagggactcacatacaactaaaccattaattgccatcaatatgggagcacatggtcgtgtctctcgtgttttaaatacaattttgactcctgtgacctcagaacatctttcagaagttgctgctcctggccaactaactgttgctgagatcaaccgtatctacacagaaatgggtggtatcactaagaaggatttctttgttgttggtagcccaattggccattctaggtcacctgttcttcacaacactggctactcagtgttgggcctaccacatcatttcgataaattcgaaactacctcggctgaagaagttaagaagcacttactagataacaaagctaacctaggtggtttggctgtaactattcctctaaaattggacattatcaagtatatggatgaattaacggagtctgctaaggtaattggtgctgtgaacactgtcattccattaggtaattctaaattcaaaggtgacaacactgattggctgggcattcgtaactctcttgtttcaaacggtgttcctgagtctgtctcaggcttatctggtttggttgttggtgctggtggtacctccagagccgcaatctttgccctacataagcttggctgccagaagatattcattgttaataggacaaccgaaaagttagaagaacttgtgaaatttttccctgaagagtacaacatagttccaatcaaggaagctgaagaggcagaagctgtaaatgaaactatcggcgttgcagtgaactgtgtaccagctgataaaccattagatgcaaagctagagagcttgctggaaagactactattaaaatcttctcacactcattttgtatcaactttggtggaagctgcatacaagccaagtgtgacgccagtgatgaagctggctaaggacaaatatcagtggagagttgtcccaggtgcccaaatgttggttcaccaaggtgttgcacagttcgagacctggaataactgtagagccccattcaaggctatctacgatgcagtaaccgagatatga

SEQ ID NO: 22458 - protein, 1579 aa, Candida glabrata CBS138
MLVKVPILGRETIHVGYGVRSHIVETIVGLKSSTYVVINDSNVGRVPYFQELLSDFEAQLPAGSRLLRYVVKPGEANKTRATKEQIEDYLLSEGCTRDTVIVAVGGGIIGDMIGYVAATFMRGVRVVQVPTSLLAMVDSSIGGKTAVDTPLGKNFIGAFWQPEFVLVDIKWLQSLPKREFINGMAEVIKTACIWNADEFQRLETHADEFLHVVNTPKISEKEGFQLYDTDIESIKEHIFKLVLESIKVKAEVVSSDERESSLRNLLNFGHSIGHAYEAILTPQALHGECVSIGMVKEAELSRYLGILSATQVARLSKILVAYGLPVSKDEKWFRELTLNKKTPLDTLLKKMSIDKKNDGSKKKVVLLETIGKCYGKSAHVVSDEDLRFVLTDETLVYPFNNIPRDQNKTVTPPGSKSISNRALVLAALGKGTCRIKNLLHSDDTKHMLTAVQELKGANISWEDNGETVVLEGQGGSTLVACENDLYLGNAGTASRFLTSVAALVNSTSQKDHVILTGNARMQQRPIGPLVDSLRNNGIKIDYVKNEGCLPLKVHTDSVFKGGRIELAATVSSQYVSSILMCAPYAENPVTLALVGGKPISILYVEMTIKMMEKFGIKVEKSTTEEYTYIIPKGHYVNPAEYVIESDASSATYPLAFAALTGTTVTVPNIGSASLQGDARFATDVLQPMGCSVTQTATSTTVTGPPVGHLKPLKHVDMEPMTDAFLTACVVAAVAHDNDPTSKNTTTIEGIANQRVKECNRIEAMCTQLAKFGVRTNELPDGIQVHGLHSINDLKVPSIGNEAVGVCTYDDHRVAMSFSLLAGMVNSEQPNSSNPTPVRILERHCTGKTWPGWWDVLHTELGAQLDGAEPLELNSMKNAKKSVVIIGMRAAGKTTISRWCAAALGYKLVDLDTLFEERYGHGMIKDFVSQHGWEKFREEEARIFKEVIENYGDAGYVFSSGGGLVESSESRRILKSFSKSGGYVLHLHRDIEETIMFLQKDPTRPAYVEEIREVWNRRESWYKDCSNFSFFAPHCNSEVEFQNLRRAFTKFIRTITGVTTVDIPTRRSAFVCLTFENLTEYTNSLKAITYGCDAVEVRVDHLSNMDEDFVSKQISILRASTDGLPIIFTVRTKKQGGKFPDEDYETLQKLLITALKVGVDYIDLELTLPIGIQYKVLNMKRNTKIIGSHHDFASAYPWDHSEWENRYNQALAMDVDIVKFVGMAKSFEDNLMLERFRDSHTTKPLIAINMGAHGRVSRVLNTILTPVTSEHLSEVAAPGQLTVAEINRIYTEMGGITKKDFFVVGSPIGHSRSPVLHNTGYSVLGLPHHFDKFETTSAEEVKKHLLDNKANLGGLAVTIPLKLDIIKYMDELTESAKVIGAVNTVIPLGNSKFKGDNTDWLGIRNSLVSNGVPESVSGLSGLVVGAGGTSRAAIFALHKLGCQKIFIVNRTTEKLEELVKFFPEEYNIVPIKEAEEAEAVNETIGVAVNCVPADKPLDAKLESLLERLLLKSSHTHFVSTLVEAAYKPSVTPVMKLAKDKYQWRVVPGAQMLVHQGVAQFETWNNCRAPFKAIYDAVTEI

SEQ ID NO: 22459 - DNA, 882 bp, Bartonella quintana
  CDS (1)..(882)
atgattgatttgacaataaagtgtaaagaaaaagttccttctcgtgcctttgttgttggttatcctattcaccattcaaaatcgccaaaaattcacaatttttggcttaaacagtatggtttacaaggtgaatatttggcacaagaagtaaaattggaagaatttagtgattttcttacatctacaaaaaaaagaggtttttgtggaggtaatgtcactctaccttacaaacaggaagcctttcgtttggcaaattataaagacgaggtagcaacaatgattggtgctgctaatacactctggtatgaaggagataaactttgtgccacaaatagtgatgcctatggttttagcgctaatcttgatgattctgctcctaattgggtaggagaaacagctcttatttttggtgcaggtggtgctgcacgtgctatcctatatgccttaaaaaaacggggatttgagcgtatttgcttgcttaatcgtacaagacaacgcgccgataatttagctgagcatttcggaaaacctgttgaagtccacgattggcataatgtcggcgagatactttatgaagctgatttgattgttaatacgacctctgtaggtatgacagacccacacggatggaaaactggttctttgttttgtgattttcaaaaaacaaagacaacaacgttggtgacagacatcgtttatacaccattaacaaccccttttttacagcaagcaaaagcccatggtctaagaacagttgatgggcttggcatgcttttacatcaagccgttcctggctttgaacgatggtttggaataactccacaggtaacaaaggctttacgaacgaaaattttagaagatatgggtgaagaaagaggatga

SEQ ID NO: 22460 - protein, 293 aa, Bartonella quintana
MIDLTIKCKEKVPSRAFVVGYPIHHSKSPKIHNFWLKQYGLQGEYLAQEVKLEEFSDFLTSTKKRGFCGGNVTLPYKQEAFRLANYKDEVATMIGAANTLWYEGDKLCATNSDAYGFSANLDDSAPNWVGETALIFGAGGAARAILYALKKRGFERICLLNRTRQRADNLAEHFGKPVEVHDWHNVGEILYEADLIVNTTSVGMTDPHGWKTGSLFCDFQKTKTTTLVTDIVYTPLTTPFLQQAKAHGLRTVDGLGMLLHQAVPGFERWFGITPQVTKALRTKILEDMGEERG

SEQ ID NO: 22461 - DNA, 882 bp, Bartonella henselae
  CDS (1)..(882)
atggttaatttaacaataaagcgcgaaaaaaaaaaaattccacgtgcgtttgttgttggtactcctattcatcattcaaaatcgccaaaaattcacaatttttggcttaaacaatatgatttacagggtgaatatttagcacaggaagtaacatctgaagaatttagagattttttaacatctctaaaaaggagaggattttgtggaggcaatgtcactttacctcataaacaggaagcctttcatttggcaaattataaagatgatgtagcaacgatgattggtgctgttaatacactgtggtatgaaggagataaactttgtggcacaaacagtgatgcttatggttttagtgctaaccttgatgattctgctcctgattggatgggggaaacagctcttgtttttggtgccggtggtgctgcacgcgctattctctatgctttaaaaaaacgaggatttgagcgtatttgtttagttaatcgtacaaaacaacgggcagagagtttagctgagcattttggaaaaccggttgaagtttgtgattggtataaggcgcatgaaatactttatcaggctgatttaattgtcaatacgacttctgtaggcatgataaactcaaatgagaaagaaagtacttcttttttttgtgattttcataaaacgaagacaacagcgttagtaacagatattgtttatacgcctttggtaacccctttcttacaacgagcaaaagcacacggtctaagaacagttgatggactaggaatgcttttacatcaggctgttttagggtttgaacgatggtttggaataagaccacgggtgacaaaggcattacgggcgacaattttacaggatatgggtgaaaagagaggatga

SEQ ID NO: 22462 - protein, 293 aa, Bartonella henselae
MVNLTIKREKKKIPRAFVVGTPIHHSKSPKIHNFWLKQYDLQGEYLAQEVTSEEFRDFLTSLKRRGFCGGNVTLPHKQEAFHLANYKDDVATMIGAVNTLWYEGDKLCGTNSDAYGFSANLDDSAPDWMGETALVFGAGGAARAILYALKKRGFERICLVNRTKQRAESLAEHFGKPVEVCDWYKAHEILYQADLIVNTTSVGMINSNEKESTSFFCDFHKTKTTALVTDIVYTPLVTPFLQRAKAHGLRTVDGLGMLLHQAVLGFERWFGIRPRVTKALRATILQDMGEKRG

SEQ ID NO: 22463 - DNA, 801 bp, Picrophilus torridus
  CDS (1)..(801)
atgataatctctggtcttataggcaggcctgtaacacattcaataggccagcttgtatacaacaggatctttaaagatcttaaaatggatgccatatacatgtcctttgatataataaaagaaaacctgggcatcttctgtaaatatgcagcggaaaacatggcaggtttcaacgtcacggcaccatataaaaatgatattattaaatatacaaacagcgtggattcaatatctttgaaaacaggatcagttaaccttgtaagggttcttgataacagactctatggatataattctgattacgctggctttattaaaacaatggatgaaaataatattgaattaaaaaacaaaagaatcctaatctcaggaaccggtggtatcgccagaacggttttcaatgcaataaaagacaaaaatgttaacgctgatgtatcattcttatccagatcaggaagaaagccatggatacctgaaaacataaatgtttataattataataatgtaaaggatgattatgatatacttataaactgcacacctctgggaacctatcctgataattccattgcattccctgataatataataaaaaaggtcactggcatagacgtagtttacaatcccgtaaggacaagattcctgagcattgtggaatcaaatggtggccgggcggtgaacggcgttgatctgttcacaggccagggtgttgaaactttaaagttaatatttaatatggatcttgattacaatgattttaagttatatgttctaaaagccttaagtgatatcaatgaatag

SEQ ID NO: 22464 - protein, 266 aa, Picrophilus torridus
MIISGLIGRPVTHSIGQLVYNRIFKDLKMDAIYMSFDIIKENLGIFCKYAAENMAGFNVTAPYKNDIIKYTNSVDSISLKTGSVNLVRVLDNRLYGYNSDYAGFIKTMDENNIELKNKRILISGTGGIARTVFNAIKDKNVNADVSFLSRSGRKPWIPENINVYNYNNVKDDYDILINCTPLGTYPDNSIAFPDNIIKKVTGIDVVYNPVRTRFLSIVESNGGRAVNGVDLFTGQGVETLKLIFNMDLDYNDFKLYVLKALSDINE

SEQ ID NO: 22465 - DNA, 852 bp, Photobacterium profundum
  CDS (1)..(852)
atggcttcaagttttttggataacgatcacatggataagtacgttgtttttggcaaccctatcgcacaaagtaaatcgcctttcatccatacattatttgcccgccaaacagcgcaaaagatggaatacaccgcagagctagcaccggcagatggctttaaacttgctgcggataactttttctcagcgggagggcgaggatgtaatattacagcgcctttcaaagaggacgcatatcagtatgcaactcaactttctgaacgtgcgaaattagccggtgccgtaaatacactcaaaaaactagatgatggtggtatcttaggtgataacaccgatggtgaaggtctagttcaagatttattactcaatcaagttgaattggctggtaagcgtattctattagttggggctggtggcgctgcccgcggcgtgattttacccttacttgctcaaaatcctgtcgaattagtgataaccaatcgcacattatctaaagcgcagcagttggctgacctatttgcgccttttggttctgtttcgtcggccgcaatagatacactgaatcaaccggattttgatgtgatcatcaactctacttctgcagggttaagtgggcagctgcctggcttgtcagaaagtctgatcaaacatgatatggtttgttatgacatggtttatagcgcccaaattacagcgttcaatttatgggcgcgagatttaggggctggaaaagtgattgatgggctgggtatgcttgttggtcaagctgcagaaagctttatgttatggcgagggttacgccctggagccaagcaggtactgcgagaattacgccgtatattgcaggaataa

SEQ ID NO: 22466 - protein, 283 aa, Photobacterium profundum
MASSFLDNDHMDKYVVFGNPIAQSKSPFIHTLFARQTAQKMEYTAELAPADGFKLAADNFFSAGGRGCNITAPFKEDAYQYATQLSERAKLAGAVNTLKKLDDGGILGDNTDGEGLVQDLLLNQVELAGKRILLVGAGGAARGVILPLLAQNPVELVITNRTLSKAQQLADLFAPFGSVSSAAIDTLNQPDFDVIINSTSAGLSGQLPGLSESLIKHDMVCYDMVYSAQITAFNLWARDLGAGKVIDGLGMLVGQAAESFMLWRGLRPGAKQVLRELRRILQE

SEQ ID NO: 22467 - DNA, 837 bp, Methanococcus maripaludis
  CDS (1)..(837)
atgataaactctaaaacaaaactagttggacttattggacacccggtagatcattcattttcaccgataatgcataacgctgcaataaaagaccttaaaataaattacagatactttgcatttgacgtttcagaagaaaatttaaaagacgttgtagcaggtgcaaaagcatttaattttaggggatttaacattacaattcctcacaaaatgaatatcatgaaatatcttgatgaaattgattgtgatgcagaggctatcggtgcagtcaacacagtaaaaattgaaaacggaaaagcaataggatataacactgacggaattggtgtaaaaaaagcacttgaagaaaaaacaggcattttaatcaataaaaacattttaattataggctcaggaggtgcctcaagagctgtttctttcgaacttgcaaaggataataatttaacaattgtaaatagaaatattgaaaaagcagaaaatctctcaaaagaaatttctagaaagttgaaaaaagaaaatcctctaaattacggcggccttgatataaacattgaaaattttgatataataataaatacaacacctgttggaatgtacccgcatactgaagtggagccagttataccattaaataacattaaaaaagatgctgtcgtaatggacttgatatacaacccccttgaacctgtttttttaaaagaagcaaaaaaatatggcgcaaaaaccattaatggcattggaatgttagtataccagggtgcagtttcctttgagatatggacaggaataaaaccagacatattcgtgatgaagaaaagtattatttcaaaaatttaa

SEQ ID NO: 22468 - protein, 278 aa, Methanococcus maripaludis
MINSKTKLVGLIGHPVDHSFSPIMHNAAIKDLKINYRYFAFDVSEENLKDVVAGAKAFNFRGFNITIPHKMNIMKYLDEIDCDAEAIGAVNTVKIENGKAIGYNTDGIGVKKALEEKTGILINKNILIIGSGGASRAVSFELAKDNNLTIVNRNIEKAENLSKEISRKLKKENPLNYGGLDINIENFDIIINTTPVGMYPHTEVEPVIPLNNIKKDAVVMDLIYNPLEPVFLKEAKKYGAKTINGIGMLVYQGAVSFEIWTGIKPDIFVMKKSIISKI

SEQ ID NO: 22469 - DNA, 2820 bp, Parachlamydia sp
  CDS (1)..(2820)
atgattttaattgcattgaatcttatggcacaaaagccctcttttcattcttgtcaattatgtgtctctttaattgatcttacctgcgatgcgtttatctatcaaattcaacaacttccttcgcaagtggacttaattgaaattcgattagataagctgttaaaaattgattttgcagaattagatagattaaaagagatagctcatcgtcctttaatttggacacttcgaaaaaaatcacaaggaggaaattttttaggaaatattcaaaaacagtttttaatctttaaagagttagctaaaagacagcctgactttgtcgatatagaagcggatattcctttagaatggcttcaagagcttcaaaaaatttctcctcagacacagtggattatttcttggcacgaagtgaaggagacacctcatctaaaaacctgcttagatcaattatatgccttgcctggaaattattataaattagcttgctatacccattctatcattgattctctcaaacttcttgaaatggctcagcaagaaaataaacattcgaggcgcctgtgtacaatcggcctcggaatgaaggggcagtgtacgcgaattttagctccagtaacgggtcaaccatttacatttgcttctttaaaagaaggcttagaatctgcccctggacagatttcatttcaaacgctttttcaaacttatcgctttaaaaaacttagccagcaaacggaaatttttggtttaattggacatccaatcgataaaagtttgagtcatttgacccataatgctgttttagatcatttaaatcagaatgctgtttatattaaatttgatgtcgaagagacagaattggaattgttttttcagcatatccaacgtttttctgttcgtggatttagcgtgacaatgcctcataaagaacgagtaaaaaaaattcttgctttgaatatggatgatgagagtcatttagcttgtaacactcttttgttcagctcttcaataattaacggaactaatacagatggaatcggagctttaaaagcactaaaagtcgaagacttaaaagataagaaattgattttacttggagcaggaggaacctcccaggcaattgcttatgaagcaaaaaaaagaggagcggaagttacgattttaaatcgcacagttttacgtgctaaagatgttgctgaaaagattcaggtaaagtggggaggctttgaacaacttaaagaggctaaaaaaaatgaatgtgatattctaattcagacgacttctgtggggatgtcacctcatgtggatgcactagttgtttcggctgactggattccccaacaaattactgctttagacgtgatttcacaccctttcgagactctttttttgcaaaaagcgcgtttaaaaggttgcgaaattcatcacgggatcgaactttttatccatcaagctgcctttcaatttggtttttggtttaataaacagttcgatcaaaaacttattgaacaaacaatacgagaggcacttccaatgccatttaatcaaaaaaaagttgctgttcaaaaaagcgctttagcgggagaaatttctttacctccctcaaagtctcattcaattagagctattttattaggggcaatgactcaaggcatttcacgtgttaaaaatttattagattctcccgatgtggaacatgctaagttggcggctatagcattaggagctaaaattgaacaggttcaagatgagtatttaatttcaggtgttgctggccaacctaaaaccccttcagggataattgatgttggaaattcaggtcaagttctaagatttgcgggggcatttgcagccttaaatcatggatatactgtcatcacgggcgatcattcaatttgttctaaccgtccagcacaaccacttttagatgggctaagatgtttgggagcttttgccaaatcaacaagagagaatgggtacgcccctttaattatcaaaggacctatttatgaaggaacagcagaattagaaggacaggattcgcaacccgtctccgctctattgatggcatcagcatttattcatggcacaacagaaattttcgttaaatatccaggtgaaaaaccttggattgacctcactcttcactggttgaaccgtctaggagtttcttatattaatcaaaactatgaatactttaagattgaaggcattcaacaaagacctcattttgaggtaaatattccaggcgatttgagtgctgccgcctttcctgtagcagcagctattttaactcaatcaaaaatcactttgtataacgttgatatgagtgatgtacaaggagataaacaagtaatccatgttctccaagaaatgggagctgatattcaaattgatcaggcaagtcacacgttaacagttttaccaggggctttattgaagggaacaactatcgacgtcaacccctttattgatgctgttcctattttagctgttcttgcttgttttgcaaaaggggagacccatttaatcaatgcagcaattgctcgacaaaaagaaagtaatcgattgagctgtatcactattgagttaaaaaaaatgggggcgcaaattatggaaacagatgatgggttactgattcgtaactctaacttgcgaggggctattgttgagagttatgatgatcatcgtctagcaatggctttaatcgtagctgggctggctagcgagggcattactgaagtgaaagggattgattgcatcaaaaagagttttcccaactttattcaagatttaaaaaaacttggggctcggtttacatga

SEQ ID NO: 22470 - protein, 939 aa, Parachlamydia sp
MILIALNLMAQKPSFHSCQLCVSLIDLTCDAFIYQIQQLPSQVDLIEIRLDKLLKIDFAELDRLKEIAHRPLIWTLRKKSQGGNFLGNIQKQFLIFKELAKRQPDFVDIEADIPLEWLQELQKISPQTQWIISWHEVKETPHLKTCLDQLYALPGNYYKLACYTHSIIDSLKLLEMAQQENKHSRRLCTIGLGMKGQCTRILAPVTGQPFTFASLKEGLESAPGQISFQTLFQTYRFKKLSQQTEIFGLIGHPIDKSLSHLTHNAVLDHLNQNAVYIKFDVEETELELFFQHIQRFSVRGFSVTMPHKERVKKILALNMDDESHLACNTLLFSSSIINGTNTDGIGALKALKVEDLKDKKLILLGAGGTSQAIAYEAKKRGAEVTILNRTVLRAKDVAEKIQVKWGGFEQLKEAKKNECDILIQTTSVGMSPHVDALVVSADWIPQQITALDVISHPFETLFLQKARLKGCEIHHGIELFIHQAAFQFGFWFNKQFDQKLIEQTIREALPMPFNQKKVAVQKSALAGEISLPPSKSHSIRAILLGAMTQGISRVKNLLDSPDVEHAKLAAIALGAKIEQVQDEYLISGVAGQPKTPSGIIDVGNSGQVLRFAGAFAALNHGYTVITGDHSICSNRPAQPLLDGLRCLGAFAKSTRENGYAPLIIKGPIYEGTAELEGQDSQPVSALLMASAFIHGTTEIFVKYPGEKPWIDLTLHWLNRLGVSYINQNYEYFKIEGIQQRPHFEVNIPGDLSAAAFPVAAAILTQSKITLYNVDMSDVQGDKQVIHVLQEMGADIQIDQASHTLTVLPGALLKGTTIDVNPFIDAVPILAVLACFAKGETHLINAAIARQKESNRLSCITIELKKMGAQIMETDDGLLIRNSNLRGAIVESYDDHRLAMALIVAGLASEGITEVKGIDCIKKSFPNFIQDLKKLGARFT

SEQ ID NO: 22471 - DNA, 837 bp, Rhodopseudomonas palustris
  CDS (1)..(837)
atggctgcgaccaagcgcgccgcgtgtctgatcggctgtccggcggcgcattcgcgctcgccgctgatccatcactattggctgcgccagctcggcatcgagggcggctactcgatcgaagcggtaccgccggaaggctttgccgaattcgtgctgcacctgaagacgcacggctatgtcggcgccaacgtcaccatcccgcacaaggaacgcgccctgcagctcactgagcccgacgagcgcgcttgtgccgtcggcgccgccaacacgctgtactacgacggtgatctgttgcgctcgaccaacaccgacatcgaaggcttcatcggcaatctcgacgcctcggcgccgggctgggaccgctccgcgcatgcgctggtgctcggcgccggcggctcgtcgcgggcggtggtgttcggcttgctggagcgcggcgtgcagcggatcgcacttgccaaccgttcgatcgagcgggcgcaggcgctgcgcgatctgttcggcgaacgcgtggtaccgatcgcgtggagcgacatcccggccgcgctgccgggcgcgggcctgttggtcaacaccacctcgctcggcatgaagggacagcctccgcttcagatcgacctgtcggcgctgccggcggacgcggtggtttcggacctcgtctatgtgccgctggagaccgatctgctcgccgccgccaaggcgcgcggcctgcgcaccgcggacggtctcggcatgctgctgcaccaggcggtgcgcggcttcgatctgtggttcggggcgcggccgcacgtcaccccggagctgcgggcgctggtcgaggccgatctggccccgaagtaa

SEQ ID NO: 22472 - protein, 278 aa, Rhodopseudomonas palustris
MAATKRAACLIGCPAAHSRSPLIHHYWLRQLGIEGGYSIEAVPPEGFAEFVLHLKTHGYVGANVTIPHKERALQLTEPDERACAVGAANTLYYDGDLLRSTNTDIEGFIGNLDASAPGWDRSAHALVLGAGGSSRAVVFGLLERGVQRIALANRSIERAQALRDLFGERVVPIAWSDIPAALPGAGLLVNTTSLGMKGQPPLQIDLSALPADAVVSDLVYVPLETDLLAAAKARGLRTADGLGMLLHQAVRGFDLWFGARPHVTPELRALVEADLAPK

SEQ ID NO: 22473 - DNA, 870 bp, Corynebacterium diphtheriae
  CDS (1)..(870)
atgccaggtcattttatactgaccattatgattcactttcgagcagccgtcttaggacaccccattgagcattccttatctccgttacttcataacgctggttatgcggctttaggtctttcgcaatggtcttatggacgatttgattgtgattcacagcagttatctgaattagtcgataaatgtgatccatcatttcagggtttctcagtaacaatgccgtgcaaatttgaggcgttagaatacgcaacgtcggtaagcgaacgtgcacagagaattggctctgcaaatactttggtccgagctgaaaatggctggtatgcggacaacacggatacagagggggttcgcggtgccttggagatcctttttagtgatcggggcggtgctgcggaggcactcaaaaatacaagggcaatagttgtcggtgctggaggtacgtctcggccagcaatctggacattaggtactttaggcgtcgcagaaatagttgtggtcaatagaagcgatcgtcgtgaagaattggaaccagttctagaaggggaacccaccaaaataagttttgttgggtttgattcaaatcttcggtcacacgcgcagtcagcttcagtggttatttcgactgtgccgtctgttggggtgtcagattatattgatgacctagtgcatgctccagttctcgatgtcatttatgatccgtggccgacaccattaatccaacatgctcaaaagaaaggcgtgccgtgtataggtggacacataatgcttttgcaccaagctttgagccagtttgaacaatttacgggggtaaaggcacctcgcgaagcaatgcaaaaagcactgtttgaccacctgtttggggacaattaa

SEQ ID NO: 22474 - protein, 289 aa, Corynebacterium diphtheriae
MPGHFILTIMIHFRAAVLGHPIEHSLSPLLHNAGYAALGLSQWSYGRFDCDSQQLSELVDKCDPSFQGFSVTMPCKFEALEYATSVSERAQRIGSANTLVRAENGWYADNTDTEGVRGALEILFSDRGGAAEALKNTRAIVVGAGGTSRPAIWTLGTLGVAEIVVVNRSDRREELEPVLEGEPTKISFVGFDSNLRSHAQSASVVISTVPSVGVSDYIDDLVHAPVLDVIYDPWPTPLIQHAQKKGVPCIGGHIMLLHQALSQFEQFTGVKAPREAMQKALFDHLFGDN

SEQ ID NO: 22475 - DNA, 813 bp, Corynebacterium diphtheriae
  CDS (1)..(813)
atggtaaatctcgtcgaccgaaataccgttttgtgtgtctcattggccgcacggccctcaaatcatggggtgcgctatcataattggctatatgaccagctgggattgaactttatctataaggcaatcgcaccggcagatattactgctgccgtggctggaattcgtggattgaatattcgtggcgccggtgtgtccatgccctataagcaggacgttatcccgctgatagatgcgcttcacccctcggcacaacgcattcatgctgtgaacacgattgttaatgacgacggtgtactcaccggatataacaccgattatgtcgcagttgcctcgttgcttaagtcccatgagattcccgctgatatgagcgttgcagtccgtggttcaggtggcatggccaatgcggttgtggcagcactagctgaccatggcatgacgggcactgtggttgcgcgcaatgcagaaactggttccgcattggcacagcgctatggttgggagcattccaccgaggtaccggctaaaaccagcatgttggttaatgtgactccccttggcatgtgcggcgatcatgaacatgtgcaggcgtttagcaatgccgagatcgatgctgcgcaggtgatcttcgatgtcgttgcctatccggtagaaactccactgatcaaggcagctgagtctaagggcaaaaagattattaacggtggtgaggtgatctgtttgcaggctgctgagcagtttgcgctctacaccggagtaactccttctgctgcgtttgtgcgcgcggcagaagattacgcacagcagggttaa

SEQ ID NO: 22476 - protein, 270 aa, Corynebacterium diphtheriae
MVNLVDRNTVLCVSLAARPSNHGVRYHNWLYDQLGLNFIYKAIAPADITAAVAGIRGLNIRGAGVSMPYKQDVIPLIDALHPSAQRIHAVNTIVNDDGVLTGYNTDYVAVASLLKSHEIPADMSVAVRGSGGMANAVVAALADHGMTGTVVARNAETGSALAQRYGWEHSTEVPAKTSMLVNVTPLGMCGDHEHVQAFSNAEIDAAQVIFDVVAYPVETPLIKAAESKGKKIINGGEVICLQAAEQFALYTGVTPSAAFVRAAEDYAQQG

SEQ ID NO: 22477 - DNA, 1812 bp, Arabidopsis thaliana
  CDS (1)..(1812)
atggcagcttcttcaactaatgctcgtctcaccaaccctcctcgtctactctccaaaccccgactttcacctacctccgtcgccaatctccgttttccagccgccgatttctccactcgcttctttgccgattcttcgtccccgcggctaaggagtgtaccgtttccggtggtattttccgatcaaaggcgccggcgaagcatggaacctagcaatgtctatgtggcttcaaattccacggaaatggagatcggaagtcatgatatcgtgaagaatccgagcttgatctgtgctccagtgatggcggattcaatagacaagatggtgattgaaacgagtaaagcccatgaattgggtgcagacttggttgaaattcgattagattggctaaaggacttcaatcctcttgaggatctaaaaaccattattaagaaatctcctctacccactttattcacctacagaccaaaatgggaaggtggtcagtatgaaggtgatgaaaatgagagacgggatgtgcttcgtctggccatggagttgggagctgattatattgatgttgaacttcaggtggcaagtgagttcatcaaatctattgacggaaagaagcctggaaagttcaaagtaattgtttcatcgcacaactatcagaataccccttctgttgaggaccttgatggccttgttgcaagaatacaacagactggagccgacattgttaagattgctactactgctgtggacattgcagatgttgctcgcatgttccatataacctcaaaagctcaagttcccacaattggacttgttatgggtgaaagaggtttgatgtctcggattctttgttcgaaatttggtggttatttgacctttggcaccttagattctagtaaagtttctgcgccaggtcaaccaacgatcaaggatctgttggatctttacaactttagaagaattggtcctgacacaaaggtatatggaattattggcaagcctgtcagccacagcaaatcacctattgttcacaatcaagctttcaaatcagttgattttaatggagtatatgtccacctgttagttgataatcttgtaagctttcttcaagcatactcatcctctgatttcgctggattcagctgtacaattccgcacaaagaagctgcattgcaatgttgtgatgaagttgatccattggcaaagtctataggagctgtgaacactatactaaggagaaaaagtgacggaaagttgttgggttacaacacagattgtattggttccatttctgctattgaggatggcctacgaagttcaggtgatccaagcagtgtaccttcttcttcttcgccattggccagtaaaacagtggtggttattggtgctggtggagcaggcaaggctcttgcttatggtgcaaaagaaaagggggccaaagttgtaattgctaatcgaacttacgaacgagcactagaactcgcagaagcaataggaggcaaagcgttatctctgacagatttagataactatcacccagaagatggcatggttttggcaaacacaacatctatgggtatgcaaccaaatgttgaggagactccaatttctaaggatgcattgaagcactatgcactggtctttgatgcggtatacactccgaggatcaccagacagttgagggaagcagaagaaagtggagccataactgtctcagggtcagagatgtttgtcaggcaggcttacgagcagtttgagatcttcaccggtttacccgctccaaaggaactctactggcaaataatgtcaaagtactga

SEQ ID NO: 22478 - protein, 603 aa, Arabidopsis thaliana
MAASSTNARLTNPPRLLSKPRLSPTSVANLRFPAADFSTRFFADSSSPRLRSVPFPVVFSDQRRRRSMEPSNVYVASNSTEMEIGSHDIVKNPSLICAPVMADSIDKMVIETSKAHELGADLVEIRLDWLKDFNPLEDLKTIIKKSPLPTLFTYRPKWEGGQYEGDENERRDVLRLAMELGADYIDVELQVASEFIKSIDGKKPGKFKVIVSSHNYQNTPSVEDLDGLVARIQQTGADIVKIATTAVDIADVARMFHITSKAQVPTIGLVMGERGLMSRILCSKFGGYLTFGTLDSSKVSAPGQPTIKDLLDLYNFRRIGPDTKVYGIIGKPVSHSKSPIVHNQAFKSVDFNGVYVHLLVDNLVSFLQAYSSSDFAGFSCTIPHKEAALQCCDEVDPLAKSIGAVNTILRRKSDGKLLGYNTDCIGSISAIEDGLRSSGDPSSVPSSSSPLASKTVVVIGAGGAGKALAYGAKEKGAKVVIANRTYERALELAEAIGGKALSLTDLDNYHPEDGMVLANTTSMGMQPNVEETPISKDALKHYALVFDAVYTPRITRQLREAEESGAITVSGSEMFVRQAYEQFEIFTGLPAPKELYWQIMSKY

SEQ ID NO: 22479 - DNA, 2062 bp, Nicotiana tabacum
  CDS (79)..(1788)
ggggggactttttcaagctggctgctgagcctacatttctgctgtttacccatttttgtgctctaaagttggttgctaatggagttggtagtggattcaggggtgaggaagatggagggggaggcaatgacgaggaacgaaacactaatttgtgcaccaatcatggcagacacagtggatcaaatgttgaatctaatgcaaaaggctaaaattagtggtgctgatcttgtggaagttcgattggatagcttgaaaagctttaatcctcaatcagatatcgatactattatcaaacagtcccctttgcctacccttttcacttacaggcccacttgggaagggggtcagtatgctggtgatgaagtgagtcgactggatgcacttcgagtagcaatggagttgggagctgattacattgatgttgagctaaaggctattgacgagttcaatactgctctacatggaaataaatcagcaaaatgcaaagttattgtttcttctcacaactatgataatacaccatcatctgaggagctcggcaatctagtagcaagaatacaggcatctggagctgacattgtgaagtttgcaacaactgcactggatatcatggatgttgcacgtgtattccaaattactgtacattctcaagtaccaataatagccatggtcatgggagagaagggtttgatgtctcgaatactttgtccaaaatttggtggatacctcacatttggtactcttgaagtgggaaaggtttcggctcctgggcaaccaacaattaaagatcttttgaatatatacaatttcagacagttgggaccagataccagaatatttggcattatcgggaagcctgttagccatagcaaatcacctttattgtataatgaagctttcagatcagttgggtttaatggtgtttatatgcctttgctggttgatgatgttgcaaatttctttcggacttactcatctttagattttgctggctcagctgtaacaattcctcacaaggaagccattgttgactgctgtgatgagttgaatcctaccgctaaagtaataggggctgtcaattgtgtcgtaagccgactcgatgggaagttgtttggttgcaatacagactatgtgggtgcaatctccgccattgaagaagcgttgcaaggctcacagcctagtatgtctgggtctcccttagctggtaaattatttgtggtcattggtgctggtggcgctggcaaggcacttgcttatggtgcaaaggaaaagggggctcgggtggtgattgctaaccgtacctatgaacgagcgagagaacttgctgatgtagttggaggtcaggctttgtctcttgacgagcttagcaatttccatccagaaaatgacatgattcttgcaaataccacctccattggcatgcaaccaaaggttgatgatacaccaatctttaaggaagctttgaggtactactcacttgtatttgatgctgtttatacgcccaaaatcactagactcttgcgggaagctcacgagagtggagtaaaaattgtaacaggagttgaaatgtttatcggccaggcatatgaacaatatgagagatttacagggcttgccagctccaaaggaacttttcaagaaaattatggctggatattgagagcaaggtctctttcccttttcaatgcggccctgctagttacttttcctcctaaatccctacatagttgtgtgatagcaatggtcttagattcctctgccctaccatttgtgcttcggaggaattaattcgttccaggtaaatcgtgattttcaccaaaacaaattcttgaggatgttcaggaaggcagtcagacataccagtggacaatcgccgtcattctggcttatattagactcttgtagcacttcattctttgacaactatggtatctctaattgtgctttcattaaacacagatgtatcagtgtttctcattgtgaccccatacttggaattcctcttgattatcattattattaaatcttgtcacattattgtatgatttgtatcaaaaaaaaa

SEQ ID NO: 22480 - protein, 569 aa, Nicotiana tabacum
MELVVDSGVRKMEGEAMTRNETLICAPIMADTVDQMLNLMQKAKISGADLVEVRLDSLKSFNPQSDIDTIIKQSPLPTLFTYRPTWEGGQYAGDEVSRLDALRVAMELGADYIDVELKAIDEFNTALHGNKSAKCKVIVSSHNYDNTPSSEELGNLVARIQASGADIVKFATTALDIMDVARVFQITVHSQVPIIAMVMGEKGLMSRILCPKFGGYLTFGTLEVGKVSAPGQPTIKDLLNIYNFRQLGPDTRIFGIIGKPVSHSKSPLLYNEAFRSVGFNGVYMPLLVDDVANFFRTYSSLDFAGSAVTIPHKEAIVDCCDELNPTAKVIGAVNCVVSRLDGKLFGCNTDYVGAISAIEEALQGSQPSMSGSPLAGKLFVVIGAGGAGKALAYGAKEKGARVVIANRTYERARELADVVGGQALSLDELSNFHPENDMILANTTSIGMQPKVDDTPIFKEALRYYSLVFDAVYTPKITRLLREAHESGVKIVTGVEMFIGQAYEQYERFTGLASSKGTFQENYGWILRARSLSLFNAALLVTFPPKSLHSCVIAMVLDSSALPFVLRRN

SEQ ID NO: 22481 - DNA, 1692 bp, Nicotiana tabacum
  misc_feature (1153)..(1153): n is a, c, g, or t
  CDS (136)..(1692)
gaaatagcttaaagttccattcttttcttgattcytaattcttgattcttaattctttattcttaattcttaattcttgattcttgattcttgattcttgattcttgatycttgattcttatttggtttgtggaaatgggtagtgttggattgttgaagaatcccgccatggtttgtgctccattaatggccccatcagtggaccaattggttcatggtatgcttcaggcaaaagcacaaggtgctgatttagttgagattaggctggatggtatccacaacttccaaccccagaaagatcttcaagtcctcctaaaaaataatccacttcctgttctcattgtttacaggccaatatgggaaggaaatgagtttgaagaggatgatgaccacatccacaagcagttggaagtccttcggtgggctaaagaattgggagctgattatattgagttggacctcaagatagctagtgacttcacgaaaaaagaaaagtcgaggtggagtagtggttgtaaagtaattgcatcatgctttgtggacaatgtgacctcaaaagaagacctcagccaagttgttgcacacatgcaatctactggggctgatatcctcaaaattgttacaaatgcaaatgacattacagaactagagaaaatgtttcacttgctttcacattgccaggtaccacttattgcatactctcttggggaaagaggtctcataagtcagttgttgggcccgaaatttggtagtgtcctagtatatggatctcttgattgtaatgctgtacctggtctgcctactctcggcagccttagacaagcctatggagttgattttatggatactgatactaaagtgtttgggctcatctctaaaccagtgggtcatagtaaaggacctattttgcataatcctacatttagacatgtggggtacaatggaatttatgttccaatgtttgtcgatgatcttaaggagttcttcagggtctactcaagtcctgactttgctggtttcagtgttgggatcccttacaaggaagcagtggtgagtttttgtgatgaagtcgatcctctggctaagtctataggggctggtcaaatactatcatacagaggccttgcgacgggaaagctaattggttataacncagattgtgaggcttctataacagccattgaggatgctttgaaagtaaatggagcagcttttcttccttctccactcgcgggtaaactgtttgtgctggtgggtgctggaggtgcaggaagagctttggcattcggagccaaaagcaggagagctcaaattatgatttttgacattgattttgatagagcaaaggctcttgctgctgcagtttctggtgaagctctgccatttgagaatttagcttcttttcagcctgagaaaggtgcaatccttgccaatgcaacacctatcggaatgcatccaaataaagataggatacctgtttctgaggcaaccttgaaggattatctagtggtctttgatgctgtttatacacctagaaagactactctgctgaaagacgctgaggctgctggagcaatcactgtcagtggagttgaaatgtttcttagacaggccattggccaattccaccttttcacgggaagtaaagcacccgaagaattcatgcgcgacatcgttatggcaaaattctaa

SEQ ID NO: 22482 - protein, 518 aa, Nicotiana tabacum
  misc_feature (340)..(340): Xaa can be any naturally occuring amino acid
MGSVGLLKNPAMVCAPLMAPSVDQLVHGMLQAKAQGADLVEIRLDGIHNFQPQKDLQVLLKNNPLPVLIVYRPIWEGNEFEEDDDHIHKQLEVLRWAKELGADYIELDLKIASDFTKKEKSRWSSGCKVIASCFVDNVTSKEDLSQVVAHMQSTGADILKIVTNANDITELEKMFHLLSHCQVPLIAYSLGERGLISQLLGPKFGSVLVYGSLDCNAVPGLPTLGSLRQAYGVDFMDTDTKVFGLISKPVGHSKGPILHNPTFRHVGYNGIYVPMFVDDLKEFFRVYSSPDFAGFSVGIPYKEAVVSFCDEVDPLAKSIGAGQILSYRGLATGKLIGYNXDCEASITAIEDALKVNGAAFLPSPLAGKLFVLVGAGGAGRALAFGAKSRRAQIMIFDIDFDRAKALAAAVSGEALPFENLASFQPEKGAILANATPIGMHPNKDRIPVSEATLKDYLVVFDAVYTPRKTTLLKDAEAAGAITVSGVEMFLRQAIGQFHLFTGSKAPEEFMRDIVMAKF

SEQ ID NO: 22483 - DNA, 861 bp, Rhizobium sp
  CDS (1)..(861)
atgcacgacaagaaattcctcgtgggactgatcggcgccgatatccaaatgtcaaagtccccggcgctccacgaaacggaggctcgacaccagggcgtcgactatcgttacgagcttctcgacctagccgagcgaggccttcccccttcggcgctgccggacctcctagacgagcaggagcggcgcggttttgccgggagcaacattacacatccgtgcaagcagacggtgatcgcccacctcaatcgcctttccgatgatgcagagatgctcggtgcggtcaacaccgtggtctttcgtgacggcgagaggatcggccacaacactgattggtacggtttttacgagaatttccagcgcggccttccgcacgtcgcgaagtcgcatggcgtcctgcttggcgccggcggcgccggtgtcgccgtggcgcatgccgcaatcaagcttggtattgagacattatcgatctttgaccaggattcgaaacgggcagaaaccttggctcggcagttgaaccatcggttctcaagggattgtgctcgtgccacgacggatgtcggcagcaccctgcgctccgcggacggcctcattcacgcgacgccgacgggtatgaagagccatcctggtttgccgatcgacccggaatggcttctgccacggcattgggtcgccgacatcgtctatatgccgctcgtcacagagctccttgctctcgctgaaggaaaaggctgccggacccttcgtggcggcggcatgaccgtctaccaggcagcagcggctttcgaattgttcaccgggatagcacccgacgcagagcgcatgtcccgtcactttacggatctatgccgcctgtcggcttga

SEQ ID NO: 22484 - protein, 286 aa, Rhizobium sp
MHDKKFLVGLIGADIQMSKSPALHETEARHQGVDYRYELLDLAERGLPPSALPDLLDEQERRGFAGSNITHPCKQTVIAHLNRLSDDAEMLGAVNTVVFRDGERIGHNTDWYGFYENFQRGLPHVAKSHGVLLGAGGAGVAVAHAAIKLGIETLSIFDQDSKRAETLARQLNHRFSRDCARATTDVGSTLRSADGLIHATPTGMKSHPGLPIDPEWLLPRHWVADIVYMPLVTELLALAEGKGCRTLRGGGMTVYQAAAAFELFTGIAPDAERMSRHFTDLCRLSA

SEQ ID NO: 22485 - DNA, 870 bp, Listeria monocytogenes
  CDS (1)..(870)
atggaaaatagaatttcaggaacgactaggcttcttggcttaattgggacacccgtagaccattcaaaatctccaatcatgtataattacagttttcaaaaagcggggttggattatgcttacctagcttttgacacacctattgaaaaagttgctgatactataaaagcaatcaagacatttaatctgcgtggcgcaaacgtgaccatgccttgtaaaagtgaagttttaaaacacatggatgacctttcccctgctgctcggatgattggcgctgttaacactatcgtaaatgaagacgggaagctaactgggcatataacagatggccttggttttattgcaaatttacgagatgctagtgtagatgtcaccggcaaaaaaatgactataattggtgctggtggtgcagctacagcaatccaagtccagtgtgcacttgatggggccaaggaaatcaccatttttaatattaaagacgctttttatgacaaagcaaaacaaactgctgcttccattaaacaagaagtgccaaattgcatcgtacatatttatgatttgaacgatacagaaaaactaaatgcggaaattgccactagcgatatccttgttaatgcgacactcgttggcatgcatccgaatgaacacgaaacacctattagcgatacatccgtttttagaaaagagcttatcgttgcagatattatttataaccctaaaaaaacgcaacttctactagatgctgaagctgctggttgtaagactgtaggcgggttaggaatgcttttgtggcaaggcgctgaagcatacaaattgtttactggtaaagatatgccagtttcagaagtaaagaatctatatttcaactaa

SEQ ID NO: 22486 - protein, 289 aa, Listeria monocytogenes
MENRISGTTRLLGLIGTPVDHSKSPIMYNYSFQKAGLDYAYLAFDTPIEKVADTIKAIKTFNLRGANVTMPCKSEVLKHMDDLSPAARMIGAVNTIVNEDGKLTGHITDGLGFIANLRDASVDVTGKKMTIIGAGGAATAIQVQCALDGAKEITIFNIKDAFYDKAKQTAASIKQEVPNCIVHIYDLNDTEKLNAEIATSDILVNATLVGMHPNEHETPISDTSVFRKELIVADIIYNPKKTQLLLDAEAAGCKTVGGLGMLLWQGAEAYKLFTGKDMPVSEVKNLYFN

SEQ ID NO: 22487 - DNA, 822 bp, Listeria monocytogenes
  CDS (1)..(822)
atggaaaaatatgttgttatcggaaatcctattcgtcactcgttatcaccagctatgcaaaatcggattttccaagaacttggaatgaatgcggagtataactctgttttaatagaagaagacgcttttgaaacagaaatcaaaaaattaatggattctggagtgcgtggatttaatattacaacaccatttaaagagcgtattttaccatttttagatgaattagaggatcttgcagcagcttctggcgcagtgaatactgtgctaaaaaaagaggacaaatggtacggatttaatacagatggcaaaggctacttagaaggattagaagaaatccgctcaattacagaagatgattctattttaattaccggtgcgggtggcgcaagcaaggcaatttacctagcgctttccactcacacggatgctaaaataaccgttactaatcgtacaacggaaaaagcgatagaaatgacgaaagataatgaaaatcatcacgccgtcacactagaagaagcagaaaaacaactggctgattttacggttatcattcaaacaacatctatcggtttagaagcttccaaaaacaaaagcccaatttcgctggctaatgtaaaaaaaggaacgatttgttctgatattatttataatccagccgaaacagcctttttgaaagaagcaaagaaaaatggagctattacccaaaatggcttaccgatgtttgttaatcaaggggcacttgcctttgaaatatggactgggataaaaccagagcgatcactgatgaaagaagcagtactcgaacaattaggaggaaactaa

SEQ ID NO: 22488 - protein, 273 aa, Listeria monocytogenes
MEKYVVIGNPIRHSLSPAMQNRIFQELGMNAEYNSVLIEEDAFETEIKKLMDSGVRGFNITTPFKERILPFLDELEDLAAASGAVNTVLKKEDKWYGFNTDGKGYLEGLEEIRSITEDDSILITGAGGASKAIYLALSTHTDAKITVTNRTTEKAIEMTKDNENHHAVTLEEAEKQLADFTVIIQTTSIGLEASKNKSPISLANVKKGTICSDIIYNPAETAFLKEAKKNGAITQNGLPMFVNQGALAFEIWTGIKPERSLMKEAVLEQLGGN

SEQ ID NO: 22489 - DNA, 906 bp, Desulfovibrio vulgaris
  CDS (1)..(906)
atgtctgcacccattcccacccggtcggtgaagttgtctcaatcgccctgtgcggcagattcgagcgaatcggcccatcgcgtcccgttccgtatccctgaacggctgtacggcatcgtcgggcatccgctcggccacaccctgagcccgttgctgcacaactggggcttcgccctgcacagcctgcctgcggtgtacatggcgtggcccgtgccgccggggaggttcgcgtcgttcatggaggctgtgcgcacgctgcctgtgcatggtgccagcgtcaccatcccccacaaggaggaggcattgcgcctgtgcgaccgtgtcacggacagggcgcgggcggtgggggcggtgaacacgctctttcttgaagacggggtcgtgtgcggggagaataccgatgtgacaggctttctcgccccgttgcgtgcccgtggcgtgcgcatcgacgaagccctcgtgctgggtgcgggcggtgctgcgcgcgccgtgctggcggggcttgtcgaactgggggtgcgccgggtgcgcatctccaaccgtacccacgacaaggccatggaacttgccggggcgttcggtgccgatgtcgtgccgtgggatgagcgcgggagtgccgccgcggggcttgtggtcaacaccaccccgtgcgggatgcagggcgcacgcatgggcgaatcgcctttgcccgaaggggcattctcgggccgtggcatggcctacgaccttgtgtacaaccccctcacgacgcgctttctcgccgatgcgcgtgcggcagggtgggagacgcaggacgggcttggcatgttcgtggaacaggggcgcgagcaattccgcatctggacgggactggacctgcctgccgagggtgcgcgtcgtctgattgcggaagccctcgggctgtga

SEQ ID NO: 22490 - protein, 301 aa, Desulfovibrio vulgaris
MSAPIPTRSVKLSQSPCAADSSESAHRVPFRIPERLYGIVGHPLGHTLSPLLHNWGFALHSLPAVYMAWPVPPGRFASFMEAVRTLPVHGASVTIPHKEEALRLCDRVTDRARAVGAVNTLFLEDGVVCGENTDVTGFLAPLRARGVRIDEALVLGAGGAARAVLAGLVELGVRRVRISNRTHDKAMELAGAFGADVVPWDERGSAAAGLVVNTTPCGMQGARMGESPLPEGAFSGRGMAYDLVYNPLTTRFLADARAAGWETQDGLGMFVEQGREQFRIWTGLDLPAEGARRLIAEALGL

SEQ ID NO: 22491 - DNA, 792 bp, Thermus thermophilus
  CDS (1)..(792)
atgctgcgcttcgccgtgctgggccaccccgtggcccactccctctcccccgccatgcacgccttcgccctggaaagcctggggcttgagggcagctacgaggcctgggacacccccttggaggccttgcccgggcgcctaaaggaggtgcgccgggccttccggggggtcaacctcaccctccccctgaaggaggcggctttggcgcacctggactgggtctcccccgaggcccaaaggatcggggcggtgaacacggtcctccaggtggaggggcggcttttcggcttcaacaccgacgccccgggcttcctcgaggccctgaaggcgggggggatccccctaaagggccctgccctggtgctgggggccgggggggcggggcgggccgtggccttcgccctgagggaagcggggcttgaggtctgggtctggaaccgcaccccccaaagggccctcgccctggcggaggagttcggcctcagggccgtgcccctggagaaggcccgggaggcccgcctcctcgtgaacgccacccgggtgggcctcgaggacccctccgcaagccccctcccggcggagcttctcccggaggagggggctgtggtggacctcgtctaccgccccctctggacccggtttctgcgggaggctcaggaaaggggcctgaaggtccagaccggccttcccatgctcgcctggcagggggctttggccttccgcctctggacgggcctcctcccggacccctcgggcatggaggaggcggcccgccgggccttgggggtgtaa

SEQ ID NO: 22492 - protein, 263 aa, Thermus thermophilus
MLRFAVLGHPVAHSLSPAMHAFALESLGLEGSYEAWDTPLEALPGRLKEVRRAFRGVNLTLPLKEAALAHLDWVSPEAQRIGAVNTVLQVEGRLFGFNTDAPGFLEALKAGGIPLKGPALVLGAGGAGRAVAFALREAGLEVWVWNRTPQRALALAEEFGLRAVPLEKAREARLLVNATRVGLEDPSASPLPAELLPEEGAVVDLVYRPLWTRFLREAQERGLKVQTGLPMLAWQGALAFRLWTGLLPDPSGMEEAARRALGV

SEQ ID NO: 22493 - DNA, 942 bp, Leptospira interrogans
  CDS (1)..(942)
atgcatttaacaagaaacgaatcgaaaaaattgaatcttgtttgtaaaattcacaaagagaaaattgaaatgaaaactaaaacaaatcaatctgttaaaactttcggtatagtaggatttcctctttcacattctctttctcctctaattcataattcaatttataaagatagaaatataaacgcctcttatctcgtttttgaaactcaaaacctaaatgtagaaaaaatacaagaattccgaaactctggaattttaggactttctgtaaccattcctcataaagaaaccgcttttactctcgcagataaagcagatgacacatctagaattatgaaagcttccaacacgttgttgatcggaccggattcaacttatgcatacaacaccgatggagaaggcgcctatcattctatcttagaattttctccagaatccttaaaaaccggaaaggtagtaatcttaggaagcggcggaagcgcgagaggaattgcatttagtcttgcagtttcgggtaaaattcaaaacttacttgtatgttccagaaatgaaatcactgcaaaagaaatttgtttattagttactaaaaattcaaatgtaaaagcggaaccaatttcgcaagatgtattacttactcgaaaagaagaaatttcattagtaattcatacaactcctttgggaatgaagggacaatcaccaggtccgtatcttcccgaagatttttttaactcgaacatgactcttttcgatatagtttataatcctttagaaactcctttggtaaaagccgcacaaaaagcgggagcaaaaatcattccaggatcggagatgcttttatatcaagcaatgaaacagttcgaactttttacagaaatttcgcctaacgcagaagatataatcaaaaccagggaacgtttgtctaaagcattagaaaatcgatga

SEQ ID NO: 22494 - protein, 313 aa, Leptospira interrogans
MHLTRNESKKLNLVCKIHKEKIEMKTKTNQSVKTFGIVGFPLSHSLSPLIHNSIYKDRNINASYLVFETQNLNVEKIQEFRNSGILGLSVTIPHKETAFTLADKADDTSRIMKASNTLLIGPDSTYAYNTDGEGAYHSILEFSPESLKTGKVVILGSGGSARGIAFSLAVSGKIQNLLVCSRNEITAKEICLLVTKNSNVKAEPISQDVLLTRKEEISLVIHTTPLGMKGQSPGPYLPEDFFNSNMTLFDIVYNPLETPLVKAAQKAGAKIIPGSEMLLYQAMKQFELFTEISPNAEDIIKTRERLSKALENR

SEQ ID NO: 22495 - DNA, 834 bp, Bacillus cereus
  CDS (1)..(834)
atgaaacaattatatggtgtaatcggaaatccaattggacattcattatcacccgttatgcataacgatgcatttgaacacttgaatatggatgcccattatcatgcctttcttgttaaagaggaagtgctaggggaagcagtaagaggtttaaaagcgttaggtatttcaggatttaatgtaacaactccgcacaaagttgcgattatggattatttggatgagattgacccgctagcaaaacaaattggtgcagtaaatacggtggttcataaggatgggaaattgattggctacaatacagatggaattggttttgtccgagcactgcaatccattagtagtaaaccacttcaagagaaacgtattttattacttggcgcaggcggtgctagtcgagctatttatttttcacttgctgatgtaggtgtgaaagagattgatgtagcgaatcgtacggtagataaggcgaaggaacttattactgcatgtaaggctactgtccattctgttgctttatcgctagagaaagcaacagaagaacaagggaattatgatattatcattcagacgacaacaataggtatgcatccacgcgtcgaacatacgccgttacaaatttcttcgttgaataagggaacgattgtatcagatataatttataatccatttgaaacgaaaattttatgtgaggcgaaagagcaaggtgcaatgattcaaaatggtattgatatgtttgtttatcaaggagcgcttgcatttgaaatgtggacagggcgtacgccaaatatcgaacgaatgaaacaattagttataagaaagcttggaggctaa

SEQ ID NO: 22496 - protein, 277 aa, Bacillus cereus
MKQLYGVIGNPIGHSLSPVMHNDAFEHLNMDAHYHAFLVKEEVLGEAVRGLKALGISGFNVTTPHKVAIMDYLDEIDPLAKQIGAVNTVVHKDGKLIGYNTDGIGFVRALQSISSKPLQEKRILLLGAGGASRAIYFSLADVGVKEIDVANRTVDKAKELITACKATVHSVALSLEKATEEQGNYDIIIQTTTIGMHPRVEHTPLQISSLNKGTIVSDIIYNPFETKILCEAKEQGAMIQNGIDMFVYQGALAFEMWTGRTPNIERMKQLVIRKLGG

SEQ ID NO: 22497 - DNA, 1482 bp, Treponema denticola
  CDS (1)..(1482)
atgtctacaaaggtctgtcttgttttaacggaaaaaacaatcgaaaaaaatctttccgcactggaaaagtataagaagtttattgatattgcggagcttcgtgtagattatctcaatcaaagcgaaatactctatttaaggaatttccctgaacgggccggaatcccttgtatcttaaccgttcgaagaaaatctgacggcggaaattttacgggaggcgaaggtgcaaggatgacaatctttgcacgcggccttgcctttgcaaacgccgacccgataaaaaatttttcttatatagatttggaaagcgattttgattcatccggaatcgaagaagcggcaagggcctttgatattaaaataataagaagccttcacagtaaggttccggtaaaaaatatagtaaagaccgtagaagggttaagccgttttgaaaccgacattcccaaattggcttttacggcaaattgtttaaacgatgtttccgagctttttaaagcatcaaagctgataaaaaaccaagagtacattttatcggttatggggccatacggtttaagctcccgtatcctatcaaataaattaaattcccaaatagtatataccttcactcccgaatacataaagaaaaataaacttgaacaagaacttatagatcctgaaactttagaagaattatacggattttcaaaaatcgatgaggagacaagtctttatggagttataggtaaggatgtaaacacaagtttgagcccccaaattcataataagggttttaaacgaaaaaatcttaattccgtttatatcccaatatcggcggtgtcatcaaaggaagccttggactttgccaatcttcttaagataaaaggtctttccgttacggctccttttaaaagcgaaatcattcctctgataaattccatatccgaagcctctaaatttatcggagccgtaaataccttggtaagcgaaaacaaaaaatggttcggctataatacggatgttgacggttttcagcaggctttaatggaattcttaaacgaaaaagacttacgcaaatataaggtcgctattataggggccggaggagcagccagagccgtcgcagaagtaataagctctctccatggaaaagcctgtatctttaatcgtacggccgaaaaagctaaaaacatagccgaaaaatataaatttaaatgggcactattggatcctataaatataaaacagcttcatgctttttcggaactgataattcaaaccacaaatgccggtatggagcccgacatatatatggaccctcttaatttttatacctttacaggaaaagaaaaagtatttgagttaatctacaggcctgaaaccactaagatgttaaagcgggcaaggacggcaggatgtcaggtttgtaacggctataaaatgcttgaatatcaagcctatcatcaatttaaagcttttgcaggaaaggagtatttataa

SEQ ID NO: 22498 - protein, 493 aa, Treponema denticola
MSTKVCLVLTEKTIEKNLSALEKYKKFIDIAELRVDYLNQSEILYLRNFPERAGIPCILTVRRKSDGGNFTGGEGARMTIFARGLAFANADPIKNFSYIDLESDFDSSGIEEAARAFDIKIIRSLHSKVPVKNIVKTVEGLSRFETDIPKLAFTANCLNDVSELFKASKLIKNQEYILSVMGPYGLSSRILSNKLNSQIVYTFTPEYIKKNKLEQELIDPETLEELYGFSKIDEETSLYGVIGKDVNTSLSPQIHNKGFKRKNLNSVYIPISAVSSKEALDFANLLKIKGLSVTAPFKSEIIPLINSISEASKFIGAVNTLVSENKKWFGYNTDVDGFQQALMEFLNEKDLRKYKVAIIGAGGAARAVAEVISSLHGKACIFNRTAEKAKNIAEKYKFKWALLDPINIKQLHAFSELIIQTTNAGMEPDIYMDPLNFYTFTGKEKVFELIYRPETTKMLKRARTAGCQVCNGYKMLEYQAYHQFKAFAGKEYL

SEQ ID NO: 22499 - DNA, 861 bp, Geobacter sulfurreducens
  CDS (1)..(861)
atgccgtttacgggtgctaccagagtactgggaatcatcggtcagccggtgtcccattcgctttcgcctctcatgcagaatgcggcgctgcaggccatggggctcgattatgcgtatgttccctttgccgttgaggaggactgcctggccgacgcggtgagggggttggcggccctgggtgtggtcggtttcaatgtgaccattcctcataaatcggccatcctgccgctgctggaccggctttcgccggaagccgagctgatcggcgccgccaatgtcgtaaaacgcgaagggagcgatctggtcggatacaacaccgacggcacggggtttattcagtctctgagcgaagatctcggttttactccggccgggtgtcggattctcgtcatgggggccggtggtgctgcccgagcagcagttgcatcgttggccggtgccggggcggcatcggtggttatcgccaaccggagcattgccaggggggaagagctgtcggcggcgttcaggcggcactttatcggcacacaatttgctgcaattcccctcgacccggagaacctgaatcggtgcgttcaaaattttgaccttctggtcaacacctcttccgtggggatgggggggactgctttcccgggcatggatctctcccgcatgggtccccacggtgccgtgtacgacatggtctacgttcccgccgttacccccttgctcgccgaggctgagcgttgcggcatacgctacgccaacggcatcggcatgctggcggcccagggtgagtgcgcgctggaactatggaccggagtacggcctcccgagggactcatgaaagcgtgtctcatggcggctctgatgagctaa

SEQ ID NO: 22500 - protein, 286 aa, Geobacter sulfurreducens
MPFTGATRVLGIIGQPVSHSLSPLMQNAALQAMGLDYAYVPFAVEEDCLADAVRGLAALGVVGFNVTIPHKSAILPLLDRLSPEAELIGAANVVKREGSDLVGYNTDGTGFIQSLSEDLGFTPAGCRILVMGAGGAARAAVASLAGAGAASVVIANRSIARGEELSAAFRRHFIGTQFAAIPLDPENLNRCVQNFDLLVNTSSVGMGGTAFPGMDLSRMGPHGAVYDMVYVPAVTPLLAEAERCGIRYANGIGMLAAQGECALELWTGVRPPEGLMKACLMAALMS

SEQ ID NO: 22501 - DNA, 4734 bp, Ashbya gossypii
  misc_feature (1276)..(1276): n is a, c, g, or t
  CDS (1)..(4734)
atggcttcggtagggctcgaaaaagtgaacattctcggaagggacagcatccatgtcgggtacgacctgcgggcacacattgcgcggacggtattcgagtcgtgtgtgtcgtcgacatacgtcgtggtgagcgacgcgaacgtggcgcgcgtgccataccacgaggcgctctgcgctgcgctggaggaggggctgcccgcgaggtcgcgcatgctgcggtacgtggtgcagcccggcgagacgtacaagacgcgggagacgaagggtgagatcgaggacttcatgctggcggagggctgcacgcgggacaccgtggtgctggcggtgggcggcggcgtgatcggcgacatggtggggttcgtggcggcgacgttcatgcgcggcgtgcggttcgtgcaggtgcccacgtcgctgctggcaatggtgcgctcgtccatggtcggcaagaccacggtgtacacgcgtacggtcaagatcttcattggctccttctggcagcccgagtttgtattcgtggacgtcaagtggctcaagaccttgccgcgccgcgagttcattaacggcatgtcggaggtgatcaagacagcgtgcatttggaatgccgcggagttcatgcgcctggagatgcacgctagcatgtttttgcaggtcgtgaacagcagcaagcaggtgaaggtggataccaagggcgggccgacctcgctctcctacacgaatataacacaaatcctggaccacgtcttccagctagtattggagtcgatcaaggtaaaggcgcacgttgtctcgtccgatgagcgcgaatcggggttacggaatcttctgaactttggtcatagcattggccatgcatacgaagcactcttgacgccgcaggcgctgcatggcgaatgcgtctctatcggcatggtaaaagaggcggagctgtctcgctacttgaacatcctctctcccacgcaagtggcgcggcttacaaaggttctgtccgcatacggcctgccaacatccgtgaacgaaggatggttccgcgagttgactttagggaaaaggacaccgctagaagttctgcttcgcaaaatgagtatcgacaagaagaatgacggaagcaacaaaaaagtggtactcttggagacaatagggaaatgctacggcacctcggctcatgtggtgagcgacacggatttacgttttgtgctgaccgatgaggcgctagtttacccattcaccgaggtacgttcgagcactggtcatactattgtgccgccggcatacaagnctatcgccaatcggcccttgatccttgcggcgttaggcaagggtaaatgcagaatcagaaatttactgcactctgatgataccaagcacatgctcgaggctgtgcagcagttaaacgcagccacaatatcgtgggaggataacggtgatactgttgtcatagatggccacggcggaagaaccctaactgcgtccgatttgcctttatatctgggtaatgcaggcactgcttctaggtttttggcatcagtggcatcgctggtctgccctgagggcaatagggactccgttatcttgacaggcaatgcgagaatgcaagagagaccaattgggcccttggtggaatccctacgtctcaatggcgtccgtgtggactatctaaaccgcgaaggctccttaccaataaaagtgcacgcggaatcgaagttccgtggcggtaggatcaacttggaggctagtatttcctcacagtatgtctcttctatcctgatgtgtgcaccatatgcagaagaaccggttacgttgtcgttggatggaaaacctatctccgagctatacattgagatgacaattagaatgatggaaaagtttggtatcaaggtggaaaaatctaatgatgagttatacacttatcatattccaagaggacagtatgttaacccagctgaatatgtcattgaatccgacgcttcatcagctacataccccttggcgtttgctgctctcactggaactacagtaactatacctaatatcggccatgattccttacagggtgactcccgatttgcatgtgacgtcttgaaaccgatgggatgtactgtacagcagactgccacatccacgacggttacgggtccggagcctggaactttaaaaccacttgagcatgttgacatggaacctatgactgatgcatttttaaccgcatgtgttgtggctgctgcagcacatagtcctgaatctaagtgtaaaaatatcatcaccatcaccggcattgcgaatcagcgagtaaaggaatgtaacagaatactggcaatggtcactcagttaagtaagtttggtgtgactgccgaagagctaccagatggtatacaggttcatggcgtagagcagttaagccaactgaaagtaccggatgctgttgagacttacgatgatcatcgtgtcgctatgagcttttcgctattggcgggaatggtaaattacggccaggcaccttcttcttgtagacctattaaaatactggagagaagatgtaccggtaagacatggccgggatggtgggatgttttacacagtagactgggcgcaactctagatgggaatgaaccattgcctgagaaagagaacgatataaggaaaagcgtcgtgctcataggaatgcgcgccgcagggaagtctactgtcggcaggtggtgcgctgaagcattaggctataaattactggacctagatgacgagtttcagacatactttggaatggggacagtaaaagaatttgttgcgcagaatgggtgggagagcttcagaagtaaagaaaccgacctctttggtcatgttctaaacaagtatagcaggagcgggtatgttatatctaccggaggaggaatagtcgaaactgcatcttctagaaagctactacaggatttcgcagccacaggtggggttgtgctacatctataccgtgatattgacgagacgataaaattcctgcgcactgatcctactaggccggcttatattgaggaggtgagaggggtatgggatagaagagagaagtggtaccatttatgctcaagttatagttttttctcacctcattgttcaacaacggcggagtttgagggtttaagaagggtgttctcgaaatttattaggaggataaccggtatgctagaagtggaagtacctgtaaagcgttccacgtttgtttgtttaacattccaaaacttgctgcccgaaatggaaagaatcaaagaggctgtttatggctgcgaggctgtcgaagttagagttgaccacctcgagaactactcccaagactttgtcttaaaacaattaacagccttgcgacttgccaccgattctctacccatcgttttcactattcggacaaagaaacaggggggcaagttcctggataacgactattcgacgttggaagacctgctaaccgtcggcctaaaggctggcgtagaattccttgacttagagttgacgctgccttctccaatccaccaaagaatactgaataaacgctataagacacgtattatcggttctcatcatgacttctctggtgaattttcgtgggagcatccagaatgggaacatagatatgcgcaagcgttagccatgcaagttgacgccattaagtttgtggcaacagcaaagggatttggtgataacctgtctctagaggaattcaggtcaaaacatacagacaaaccactgattgcgatcaacatgagagagtgtggaaagctctccagagtattgaatacaattttgactcctattacatcggatgtcttgcctcaagcggcggctccggggcaactgacgcttcgtcaaattaatgaactttacgcttccattggcggactccggccaaagaaaatgtttgttgttggatcgccaatcggccattcaaggtcacctatccttcacaacactggctacaactcattaggattgccctacacttttgacaagtttgaaaccgactcggctgagatcgtcaagaagtccttgctatccagagaggacttaggagggatagctgttacaattcctctgaagcaagatattatgcaatacctggacgagcttactgactcagcgaaatgcataggtgctgtgaatacaatcataccgaagaaggatgggaggtttatcggccacaacacagattggctaggtataaaaaattccctgatagcgaatggggtcccggaacatgttaacactgctggcttgatagtcggctctgggggcaccgccagggcagctgcgtatgccttccatgaaatgcaatgctcgacaatctatatgattaaccgcaccacgtcgaacttgactgagctgcagaagagtttcccacaggagttcaacattcatgttattgagtccctcgagcaaatagagcaactttctgaacctgttggcatcgccgtcagctgtgttccctcagataagccgctagatgacgcactgtcccagaaactttctgcgttcctgtccaggccatccgccacaaacttcatccctacaatcttggacgcagcgtataaacctttggttacgcccgttttaaagttggctagtgaggtacatggctggcgacccgtgtccggggcacagatgctggtgcatcagggggttgctcagtttgagatatggacaggtttcaaggcgccgtttgcaccggtgtacgacgccgtgacacaggagtaa

SEQ ID NO: 22502 - protein, 1577 aa, Ashbya gossypii
  misc_feature (426)..(426): Xaa can be any naturally occuring amino acid
MASVGLEKVNILGRDSIHVGYDLRAHIARTVFESCVSSTYVVVSDANVARVPYHEALCAALEEGLPARSRMLRYVVQPGETYKTRETKGEIEDFMLAEGCTRDTVVLAVGGGVIGDMVGFVAATFMRGVRFVQVPTSLLAMVRSSMVGKTTVYTRTVKIFIGSFWQPEFVFVDVKWLKTLPRREFINGMSEVIKTACIWNAAEFMRLEMHASMFLQVVNSSKQVKVDTKGGPTSLSYTNITQILDHVFQLVLESIKVKAHVVSSDERESGLRNLLNFGHSIGHAYEALLTPQALHGECVSIGMVKEAELSRYLNILSPTQVARLTKVLSAYGLPTSVNEGWFRELTLGKRTPLEVLLRKMSIDKKNDGSNKKVVLLETIGKCYGTSAHVVSDTDLRFVLTDEALVYPFTEVRSSTGHTIVPPAYKXIANRPLILAALGKGKCRIRNLLHSDDTKHMLEAVQQLNAATISWEDNGDTVVIDGHGGRTLTASDLPLYLGNAGTASRFLASVASLVCPEGNRDSVILTGNARMQERPIGPLVESLRLNGVRVDYLNREGSLPIKVHAESKFRGGRINLEASISSQYVSSILMCAPYAEEPVTLSLDGKPISELYIEMTIRMMEKFGIKVEKSNDELYTYHIPRGQYVNPAEYVIESDASSATYPLAFAALTGTTVTIPNIGHDSLQGDSRFACDVLKPMGCTVQQTATSTTVTGPEPGTLKPLEHVDMEPMTDAFLTACVVAAAAHSPESKCKNIITITGIANQRVKECNRILAMVTQLSKFGVTAEELPDGIQVHGVEQLSQLKVPDAVETYDDHRVAMSFSLLAGMVNYGQAPSSCRPIKILERRCTGKTWPGWWDVLHSRLGATLDGNEPLPEKENDIRKSVVLIGMRAAGKSTVGRWCAEALGYKLLDLDDEFQTYFGMGTVKEFVAQNGWESFRSKETDLFGHVLNKYSRSGYVISTGGGIVETASSRKLLQDFAATGGVVLHLYRDIDETIKFLRTDPTRPAYIEEVRGVWDRREKWYHLCSSYSFFSPHCSTTAEFEGLRRVFSKFIRRITGMLEVEVPVKRSTFVCLTFQNLLPEMERIKEAVYGCEAVEVRVDHLENYSQDFVLKQLTALRLATDSLPIVFTIRTKKQGGKFLDNDYSTLEDLLTVGLKAGVEFLDLELTLPSPIHQRILNKRYKTRIIGSHHDFSGEFSWEHPEWEHRYAQALAMQVDAIKFVATAKGFGDNLSLEEFRSKHTDKPLIAINMRECGKLSRVLNTILTPITSDVLPQAAAPGQLTLRQINELYASIGGLRPKKMFVVGSPIGHSRSPILHNTGYNSLGLPYTFDKFETDSAEIVKKSLLSREDLGGIAVTIPLKQDIMQYLDELTDSAKCIGAVNTIIPKKDGRFIGHNTDWLGIKNSLIANGVPEHVNTAGLIVGSGGTARAAAYAFHEMQCSTIYMINRTTSNLTELQKSFPQEFNIHVIESLEQIEQLSEPVGIAVSCVPSDKPLDDALSQKLSAFLSRPSATNFIPTILDAAYKPLVTPVLKLASEVHGWRPVSGAQMLVHQGVAQFEIWTGFKAPFAPVYDAVTQE

SEQ ID NO: 22503 - DNA, 792 bp, Wolinella succinogenes
  CDS (1)..(792)
atgcgccaatacgctgtctttggcgatcctatcgcccactccaaatccccccttctgcacaatcgggtctttttggagcttggagttcccgccttttatgggcgctaccacctcaaagaaccaagctctctcctagagcgttttcatgctttgggcttggagggggccaatattaccgttccttttaaagaggtggcttttgagcagtgcgatgaggtgaggggaatcgcccaaaaaattggctcggtcaatactatggtgaaagagggagagcgggtcattggctacaacaccgatgctgaaggatttttccaaaccctagagggcaagctccgcccccagaatgttctcatccttggggcgggtggcacagccaaggcgctggctatgatttttgatctccatcaaatccctgtgacgattctcaatcgcacccctgggcgcctcaaacctttggccgagcagggctttaaaactctcacccacgaggagttcgctcccgattcttatgatctcatcatcaactccaccagcgctggattgagcgatgattctctcccccttcccgccccttggctagaatcactcctccattcaggcgtgctcgcctatgatgtgatttatggcaaaaccaccccctttttacgccttgccaaagcccaaggagctcgatttcaagatggtagagagatgctcatttcccaagccgctctcagctccctgcacttcactcagcaccacttttccctctccactctccactctctcatgcgtctcgctctccctcaataa

SEQ ID NO: 22504 - protein, 263 aa, Wolinella succinogenes
MRQYAVFGDPIAHSKSPLLHNRVFLELGVPAFYGRYHLKEPSSLLERFHALGLEGANITVPFKEVAFEQCDEVRGIAQKIGSVNTMVKEGERVIGYNTDAEGFFQTLEGKLRPQNVLILGAGGTAKALAMIFDLHQIPVTILNRTPGRLKPLAEQGFKTLTHEEFAPDSYDLIINSTSAGLSDDSLPLPAPWLESLLHSGVLAYDVIYGKTTPFLRLAKAQGARFQDGREMLISQAALSSLHFTQHHFSLSTLHSLMRLALPQ

SEQ ID NO: 22505 - DNA, 834 bp, Vibrio vulnificus
  CDS (1)..(834)
atgactcaacaaatcgatcgttatgccgtgtttggtaaccctatcgaacacagtaaatcgccatttattcacaccttgtttgctcgccaaaccaaccagcctttaatctacaccgcagaaaccgcgccaaaagaggggtttgttgaggcagtgaaagcgttttttgctgaagggggaaaagggtgcaatgtgactttaccttttaaggaagaggcgtatcagtttgcgagtcgtttaacggagcgagcccaattggctggcgcagtgaatacactaaaaaaactggatgatggcgatatcattggtgacaacactgatggcgctggccttgtgcaagacttgttgcagcaccaagttgtgttagcaggtgcacgtattctagtgataggcgctggtggtgccgctcgtggcgtgcttaaaccactactcgaccagaaaccaacctctctcaccattacgaatcgtactttctctaaagctgaagaactggctgtgttgtttgctgcctatggatctgttaccgcaaaagagatgaatacagtgacggaagagtacgatgttattatcaactctacgtctgcctcattgagtggtgagttacctgccctctcttcatctatatttgccgccaacagtactagctatgacatgatgtatggcaagggcgataccaccttcaatcaatgggctaagcaacacggcgctgctcatgcctatgacgggttgggtatgttggttgggcaagctgccgaaagtttcatgctatggagagggttgcgtcccgggtctaaacaaatcttgcgcgagttaagaaaaaatcttgaagggctataa

SEQ ID NO: 22506 - protein, 277 aa, Vibrio vulnificus
MTQQIDRYAVFGNPIEHSKSPFIHTLFARQTNQPLIYTAETAPKEGFVEAVKAFFAEGGKGCNVTLPFKEEAYQFASRLTERAQLAGAVNTLKKLDDGDIIGDNTDGAGLVQDLLQHQVVLAGARILVIGAGGAARGVLKPLLDQKPTSLTITNRTFSKAEELAVLFAAYGSVTAKEMNTVTEEYDVIINSTSASLSGELPALSSSIFAANSTSYDMMYGKGDTTFNQWAKQHGAAHAYDGLGMLVGQAAESFMLWRGLRPGSKQILRELRKNLEGL

SEQ ID NO: 22507 - DNA, 750 bp, Porphyromonas gingivalis
  CDS (1)..(750)
atgaaaaagtacggtctgatcggctatccactggctcattcgctgtctgccgaattcttcaacgccaaattcaagacggagggaatcaatgccgtctacgaacttttccctctggagtcgctctcccaactgaagagtctgctttcgctccatccctctcttcaggggttcaacgtgacatcgccgtacaaagtggaggtgatgcgctatctggatcggatagacgaggaagcggaattgaccggagccgtcaatacgattcgggtagaacgtgcgcgctttcgtcgtccccatctcgtcggttataataccgatgtgaaaggctttgccgatagcctggagctgatccgaaagccgtggcatacgcaagctctcgtcttgggatcgggtggggcagctctggctgtgatgcgcgctctgaagaagatgggaatagtacatcggcaggtcagtcgcacgccttcggctcccggtgtgtatgcatattcggatctgacgccggagattatcgaacggcacaagctgatcgtcaatgccactccggtgggtatgtatccacatatagaccaatgtccgtctattccgttcgagggtataggtgcagagcatctctgttatgatctgatctataatccgcaggaaacgatcttcatgcatcgcgctcaagcacagggtgcttctgtgcagaacggattggagatgctgctcatacaggcgttgtgcagttggcgtatctggaacgaacgatag

SEQ ID NO: 22508 - protein, 249 aa, Porphyromonas gingivalis
MKKYGLIGYPLAHSLSAEFFNAKFKTEGINAVYELFPLESLSQLKSLLSLHPSLQGFNVTSPYKVEVMRYLDRIDEEAELTGAVNTIRVERARFRRPHLVGYNTDVKGFADSLELIRKPWHTQALVLGSGGAALAVMRALKKMGIVHRQVSRTPSAPGVYAYSDLTPEIIERHKLIVNATPVGMYPHIDQCPSIPFEGIGAEHLCYDLIYNPQETIFMHRAQAQGASVQNGLEMLLIQALCSWRIWNER

SEQ ID NO: 22509 - DNA, 819 bp, Photorhabdus luminescens
  CDS (1)..(819)
atggatcaatttgctgtctttggtaatcctgttgcgcatagtaaatctccgcgtatccatcagttatttgctagacagacaggtattgagcatcgttatgggaaaattctggtgccgataagtaaatttcaagaggcattggatacatttcttaaacagggaggtataggagtcaatattactgtgccatttaaagagcaggcatttattcgagcaaatgagttgactgaacgggcaagactcagcggtgcagttaatactttgaaattacttaataataatcaattgcttggtgataacacggatggtatagggttattaacagacttgatgcgacttgagtttattactcaagggcagcatattttaatcattggagctggtggagctgccagaggtgttttatttccattattagaatttggttgtaaaattacaattacaaaccgcacgtttagtcgcgctatacaggttgctaataatttttcggcaataggcagtattcggcctgctgagatgaaagtacttaatagtcctgagtttgatctcattatcaatgcgactgcatctggtattaatggtgagattcctactatatctccattcatatttaatgagaattgtgtctgttatgatatgttttaccaggctaatttgacgccctttatttcctttgctaggaagcatggtgtttctcgttatgcggatgggctggggatgttagtggggcaagctgctcattcatttaaattatggcatggtgtattgcctgaaatttcacctgtgttactaacattggaacaggagttacgttcgtga

SEQ ID NO: 22510 - protein, 272 aa, Photorhabdus luminescens
MDQFAVFGNPVAHSKSPRIHQLFARQTGIEHRYGKILVPISKFQEALDTFLKQGGIGVNITVPFKEQAFIRANELTERARLSGAVNTLKLLNNNQLLGDNTDGIGLLTDLMRLEFITQGQHILIIGAGGAARGVLFPLLEFGCKITITNRTFSRAIQVANNFSAIGSIRPAEMKVLNSPEFDLIINATASGINGEIPTISPFIFNENCVCYDMFYQANLTPFISFARKHGVSRYADGLGMLVGQAAHSFKLWHGVLPEISPVLLTLEQELRS

SEQ ID NO: 22511 - DNA, 858 bp, Gloeobacter violaceus
  CDS (1)..(858)
atgtccgactctccagctattcgcggcactacccggctgttgggcctgttggggtatccggtcggccattcgctgtccccggtgatgcacaacgccgccctcgcccgcctcggccttgatctggtctacgtgcccctgccggtggcccccgccgatttgccccaggcggtggcgggtttgcggcgcgcaggcttcgtgggcttcaacgtcaccattccccacaagcaggcgatcgtacctttgctcgacacactcacccccgaggccaagggcgccggtgcggtcaacaccgtgcgcgtcgagaccgacggaagcctcaccggcaccaacaccgatatcgaaggcttcatgggtccgatcgaaacggtgccgtttcaaggagcggccactatcctcggctgcggcggctccgccctcgcagtcgccctaggctgtgcccaactgggattcacgcgcatccacgttgtcggccgcgaccctgccaaactggctgctttcaaatcgcacctgcaccccgccgccaccgtcgaaattgatctttgggagcagctggaatcgctgctgcctgggacggggttactcatcaacaccacgcccgtcggcatgatcccggccacagaagcgagtccgctcgaagatttgggggctctgccgctaaaagcctgcgtctatgacctgatttaccggccgcgcccaacccggctgttgcagctggcggtggcgcgttcgctccaaaccttcgacggtctgggcatgctcgtagggcaggctgaagcggccttctatttctggacaggctgtaagccacccacgcagttgatgctgcagaccgcctgcaaagcgctggcgcacgattag

SEQ ID NO: 22512 - protein, 285 aa, Gloeobacter violaceus
MSDSPAIRGTTRLLGLLGYPVGHSLSPVMHNAALARLGLDLVYVPLPVAPADLPQAVAGLRRAGFVGFNVTIPHKQAIVPLLDTLTPEAKGAGAVNTVRVETDGSLTGTNTDIEGFMGPIETVPFQGAATILGCGGSALAVALGCAQLGFTRIHVVGRDPAKLAAFKSHLHPAATVEIDLWEQLESLLPGTGLLINTTPVGMIPATEASPLEDLGALPLKACVYDLIYRPRPTRLLQLAVARSLQTFDGLGMLVGQAEAAFYFWTGCKPPTQLMLQTACKALAHD

SEQ ID NO: 22513 - DNA, 822 bp, Chromobacterium violaceum
  CDS (1)..(822)
atgaccgaccgttacgccgtaatcggcaacccgatctcccacagccagtctccgttcatacacgaggagttcgcccgcgccaccgggcaggacatcagctacgagcgcctgttcgccgacatcggccgcttcaacgacgtggtgggcgagttcgtcgccagcggcggcaagggcttgaacatcacgctgccgttcaagggcgacgctttccgctacgcgtccgagctgaccgagcgcgcgcgcgcggccgaggcggtcaacacgctgactttccgcgacggcaaggtatacggcgacaacaccgacggcgtcggcctggtgcgcgacatcgtggaaaacctcgactacccgatcgttggacgacgcgtgctgatcctgggtgccggcggcgcggtgcgcggcgtgctggagcccatcctggagcagaagccggccagcctgaccatcgccaaccgcaccgtgatcaaggccgaggcgctggcccatcatttcgcccgctacggcaaagtggaggccgtcggctacgccgcgctggaaggccgcagcttcgacatcgtcatcaacgccacctccaccagcctgaacaacgagatgccgccgctgccgcacggcgtgttcacgccgcgcacgctggcctacgacatggtgtacagcaccggcctgacgccgttcctgcagcgcgcccaaggcgaaaacgccggcatgctggccgacgggctgggcatgctggtggagcaggcggcggaatcgttctccatctggcgcggcgcgcagccggaaacgcgcaaggtgaccaatatgctgagggaagtgctggcctga

SEQ ID NO: 22514 - protein, 273 aa, Chromobacterium violaceum
MTDRYAVIGNPISHSQSPFIHEEFARATGQDISYERLFADIGRFNDVVGEFVASGGKGLNITLPFKGDAFRYASELTERARAAEAVNTLTFRDGKVYGDNTDGVGLVRDIVENLDYPIVGRRVLILGAGGAVRGVLEPILEQKPASLTIANRTVIKAEALAHHFARYGKVEAVGYAALEGRSFDIVINATSTSLNNEMPPLPHGVFTPRTLAYDMVYSTGLTPFLQRAQGENAGMLADGLGMLVEQAAESFSIWRGAQPETRKVTNMLREVLA

SEQ ID NO: 22515 - DNA, 870 bp, Synechococcus sp
  CDS (1)..(870)
atgatcaacggcagcactggtttggtggggctgctcggcaacccggtgcagcactcgctctctcctgcgatgcagaacgcggcactgcaggcgctgggactgaactggcgttacctggcactgccctgtgaggagaacgctctccctcaagtgatggaggggctcagggcggtgggctgccatggcctgaatgtgaccatcccccacaaacaggcggtgaccagcctctgcagccaactcagcacagctgcccgtcggcttcaggcggtcaacacgctgatccccgatggtgagaatggctggtgcggcaccaacacagatgtggaggggtttttggcacccctcggcggcagcgaacgctggagagatcaacgggccgtggtgctcggctgcggcggttccgcccgagctgtggtggctggtttacagacccttggcttggcatcgattcaggtgatcggacgacgtccgaaggcgctgttgaacttcattgctgacctgcagctggaggacgcccctctgagcagctgcctcgaaacagatcccgccgcggctgatcttctggccacagctgatctggtggtgaacacaacgccggtgggcatggccctgcacggcgacgcctccgccatgcccctgggctctgatctctgggacaggcttgcgaagcaggccaccctttatgacctgatttacaccccacgtcccaccgcctggctgcgttggggtcaggggcgggggcaccgttgcatcgatgggctggaaatgctggtccagcagggcgccgcatctctgagactttggagcggcttcaatgacgttcccgtggacaccatgcgccacgcggctgaaaccgctttaagccattag

SEQ ID NO: 22516 - protein, 289 aa, Synechococcus sp
MINGSTGLVGLLGNPVQHSLSPAMQNAALQALGLNWRYLALPCEENALPQVMEGLRAVGCHGLNVTIPHKQAVTSLCSQLSTAARRLQAVNTLIPDGENGWCGTNTDVEGFLAPLGGSERWRDQRAVVLGCGGSARAVVAGLQTLGLASIQVIGRRPKALLNFIADLQLEDAPLSSCLETDPAAADLLATADLVVNTTPVGMALHGDASAMPLGSDLWDRLAKQATLYDLIYTPRPTAWLRWGQGRGHRCIDGLEMLVQQGAASLRLWSGFNDVPVDTMRHAAETALSH

SEQ ID NO: 22517 - DNA, 1491 bp, Rhodopirellula baltica
  CDS (1)..(1491)
atgatttgtgtcagtctcggccgcgcccgccacaaacgcatgatcgccgagcaccagtttttggtcgaacaaggtgctcagctcgtagaactgcgtctcgattacatttctcgcgccgtcgacctgaaacgattactcaatgaccgtccgggtcccgtggtcgccacggttcgcaggaaagaagacggcggtcggtgggaaagatccgaacaagatcgcttgatgctcctgcggagtgttatcgctgcgggtgccgagtacgtcgacatcgaagccgacgtcgcggcacagattccgcgttacggcaacaccaaacgaatcatcagctaccacgacttcagtggcactccggagaatttggacgaactgcacgaggccatggcggcggaagacgcagacatcgtcaaaatcgcttgcatggcgaattcattctcggacaacatccgaatgatcaacctctgcaagaacgcgaaaattccgacgatcgggatctgcatgggcgagatcggcatgctaacgcgaatcctggccaaccgtgtcggatcgccgttcacctacgcaacgttcagctctgacaaaaagcttgcacctggccagctcaactggaaagagatgaacagcgtttatcattacgagaccatcaaggaagacaccgctttattcggcgtgatcgcggatccggtcgctcatagccacagcccgttgatccacaacgctgctttcgtcgacgcgggactgaacgcacgataccttccgctgcgtgtgccgaaagatgacctgccatccttcatgcggacttgcaaggaactggggattcaaggaatcagtatcacgattccccacaaggagtcggcacttcaatactgcacacaggcggaatccagttgcaccggtatcggcgcgatcaacacgatgatcttcaacggcgatgatcgcctcggctacaacaccgactatcgcgccgcaatggattgcatcgaagaatctttcaagatcgaacggggaaccgagaattcgctgcaaggaaaaacagctctggtcctcggtgccggcggcgtctcacgtgccatcgcgtggggactacgtcaacgcaaatgcgacgtcaccatcagttcgcgaacacgtgaacgagccgagatgttggctgctgacatcggttgtcgtgtgatcgactgggaagaacggcacgaggcaaaggtccagcttttgatcaatggaacgcccattgggatgcaccccgacgtcgacaacactcccttcaatcagtcggccctcaaccagttcatggttgtattcgacacagtctacaaccctgaaaacactcttctgatcaaacaagcgacgcagaaacaatctcgtgtgatcacgggagtcgacatgtttgttcgacaagccgcgtaccagttcaagctattcaccgggcaagaggcgtcgatcgagttgatgcgaaagaaaatcaaagaggcaaccaacccagttcgtttgaactaa

SEQ ID NO: 22518 - protein, 496 aa, Rhodopirellula baltica
MICVSLGRARHKRMIAEHQFLVEQGAQLVELRLDYISRAVDLKRLLNDRPGPVVATVRRKEDGGRWERSEQDRLMLLRSVIAAGAEYVDIEADVAAQIPRYGNTKRIISYHDFSGTPENLDELHEAMAAEDADIVKIACMANSFSDNIRMINLCKNAKIPTIGICMGEIGMLTRILANRVGSPFTYATFSSDKKLAPGQLNWKEMNSVYHYETIKEDTALFGVIADPVAHSHSPLIHNAAFVDAGLNARYLPLRVPKDDLPSFMRTCKELGIQGISITIPHKESALQYCTQAESSCTGIGAINTMIFNGDDRLGYNTDYRAAMDCIEESFKIERGTENSLQGKTALVLGAGGVSRAIAWGLRQRKCDVTISSRTRERAEMLAADIGCRVIDWEERHEAKVQLLINGTPIGMHPDVDNTPFNQSALNQFMVVFDTVYNPENTLLIKQATQKQSRVITGVDMFVRQAAYQFKLFTGQEASIELMRKKIKEATNPVRLN

SEQ ID NO: 22519 - DNA, 858 bp, Prochlorococcus marinus subsp
  CDS (1)..(858)
atgattacaagtaaaacatcatttcttgctttgattggaaacccagtaagtcattctttgtctccaattatgcaaaatgcagctattcaatatttaggccttgatttaatttatatggctataccttgtaaaaatgaagacttagaaatagttgttaattctataaaaaaaatgaattgtaaaggtttgaacattacaattccttttaagcaaaaagtatttgatatgtgtagtgaaatatctccagttgcaaagaaagtgaaagctattaataccctgaaattaaacgataataaaaattggattggaacaaatactgatattgatggatttatctatcctttaaaaaatcttaatttaataaaaaagagttcattaattttaggttctggaggagcagctagatcagtaatccaaggtctaatagaattaaaattatcaaaaattacaatcatttcacgaaaaagaaattctttaaatgaattaattaccaattttaaaaatgatatcgaaataaaaggtttgcttagtactaataacgaaattaaaaatttaattcaagaaactgatttaataatcaatacaactccagtaggaatgagcaataccactaatactgatgaattaccatttggtcaaggtttttgggattccataaattccaagacgattgtttatgacctgatttacaatccttctcccactccgttcttaaaattttgcgataaaaaaggatgcatgactatagatggtactcaaatgctaattgctcaaggagcaaaatcattatcattctggacaaacggattagaagtaccttatgaggttatgcatgatgcattaaaagaatatctttaa

SEQ ID NO: 22520 - protein, 285 aa, Prochlorococcus marinus subsp
MITSKTSFLALIGNPVSHSLSPIMQNAAIQYLGLDLIYMAIPCKNEDLEIVVNSIKKMNCKGLNITIPFKQKVFDMCSEISPVAKKVKAINTLKLNDNKNWIGTNTDIDGFIYPLKNLNLIKKSSLILGSGGAARSVIQGLIELKLSKITIISRKRNSLNELITNFKNDIEIKGLLSTNNEIKNLIQETDLIINTTPVGMSNTTNTDELPFGQGFWDSINSKTIVYDLIYNPSPTPFLKFCDKKGCMTIDGTQMLIAQGAKSLSFWTNGLEVPYEVMHDALKEYL

SEQ ID NO: 22521 - DNA, 912 bp, Prochlorococcus marinus
  CDS (1)..(912)
atgattagcggcacaacctccctaataggcctgctcggccaaccagtgcaccattccctctcaccggtgatgcaaaacgcagccctcgctgcaatgaatctcgactggtgctacatggccatgccatgcgaaaccaacgatctggccaatgtgctctgcgctctgcgttcgatcaactgccttggactgaacatcaccatcccccacaaacaagacgtggccaaaacctgtcgagagctcagcccattagcaaaacgactgaaagccgtcaacactctgatccctcatgccgacggcggctggacaggcaccaacacagacgtggccggttttattgcaccccttcaagaaagcaagtgcgagtggcatgggcgtcgtgcagtcgtgctcggttgcggtggtagcgcccgagcagtcgttgcaggtctgcaagatttaaaattggctcaaatcatggtggttggccgccgatctgatgcgctgaagagatttctcgatgatctccagcccaacccagccagctccgaatctgattgccaagtgctcttgcaagggattctccaacatgaccctgctctgattgaacagctaaccaaagccgatctggtggtcaacaccacaccaataggcatgtcccaaaaccgtgcggaaacatcaactcctagagcgccaatgcccctggggaagaagatttggcaaaacttaagcccaaagacaactctctatgacctgatttacacaccaaaaccaaccgcctggctaaccttaggaactgaacatggctgccattgcatagatggcctcgaaatgcttgttcaacaaggcgctgcctctctaaggctctggagcggcaacaacaaggtgcctgtcgaagagatgagaaaagctgctctgagctggctcacggtttag

SEQ ID NO: 22522 - protein, 303 aa, Prochlorococcus marinus
MISGTTSLIGLLGQPVHHSLSPVMQNAALAAMNLDWCYMAMPCETNDLANVLCALRSINCLGLNITIPHKQDVAKTCRELSPLAKRLKAVNTLIPHADGGWTGTNTDVAGFIAPLQESKCEWHGRRAVVLGCGGSARAVVAGLQDLKLAQIMVVGRRSDALKRFLDDLQPNPASSESDCQVLLQGILQHDPALIEQLTKADLVVNTTPIGMSQNRAETSTPRAPMPLGKKIWQNLSPKTTLYDLIYTPKPTAWLTLGTEHGCHCIDGLEMLVQQGAASLRLWSGNNKVPVEEMRKAALSWLTV

SEQ ID NO: 22523 - DNA, 903 bp, Prochlorococcus marinus
  CDS (1)..(903)
atggaacaacttataaaaggaccaattaatggagagacaagcctggtaggggttcttggatgccccgtaaagcactcattatcaccaataattcaaaatgctgctctaaaagaacttggtttgaactggtgctatttagcaattccatgtaaaccccaaaattttgaattagtcatcaaagctttacgaacaattaattgcaaaggattaaatataacgattcctcataaaaatatagctcttgatgtatgtgatgaactaagtagtattgccaaacaaattggagcagtaaatacattaattccaagcaaaagaaaaaactggtttggaaccaatactgatattgaaggttttcgttcttctttattagaaagaaaaataaattatgaagggaaaaacgcaataataataggtactggaggcagtgcaaaagctgtattacatggtctggatactttaaaatttggaaaaataactattgttagccgcacaaaaaattcattaaagaaatttttaataaataataataatctttgcacagagattgatggattaattcaagaagatttaaccttagaagaatatattaaagctgctaatttaattgtaaatgcaacacccataggtatggaaaataaagcaaatagtaaaagctcttcggaaattccactaggtaaaagtatctgggaaaatcttcagccagggtcaactttatacgacttaatctatacacctaaacctacaaaatggttgcaattaagtagaaaatattcctgtcatcaaattgatgggcttgaaatgcttgttcaacaaggtgcatcctctcttagattatggagtggtatagaagagattcctattgatataatgagaaaagctgggcaaaaagcattattaaattaa

SEQ ID NO: 22524 - protein, 300 aa, Prochlorococcus marinus
MEQLIKGPINGETSLVGVLGCPVKHSLSPIIQNAALKELGLNWCYLAIPCKPQNFELVIKALRTINCKGLNITIPHKNIALDVCDELSSIAKQIGAVNTLIPSKRKNWFGTNTDIEGFRSSLLERKINYEGKNAIIIGTGGSAKAVLHGLDTLKFGKITIVSRTKNSLKKFLINNNNLCTEIDGLIQEDLTLEEYIKAANLIVNATPIGMENKANSKSSSEIPLGKSIWENLQPGSTLYDLIYTPKPTKWLQLSRKYSCHQIDGLEMLVQQGASSLRLWSGIEEIPIDIMRKAGQKALLN

SEQ ID NO: 22525 - DNA, 807 bp, Helicobacter hepaticus
  CDS (1)..(807)
atgcttggtttttttgctgtttatggcaatcctatcacgcattctaaatccccttttttgcataattacgcctttacaaaacttggcttaagtggctattatagtcgtattttgcttgataaaggtgcaaaccttcgccaaaattttctttcaaatggcttaagtggagcaaatattactttaccctttaaagaagaagcttttaatcaatgtgatgaggtgcgcggagtagcccaaaatattggcgcttgtaatacttgggtgcttgaggacaaaaatcatcttgttggttataatacagatgcgcaaggattctatgagtgcattaaagaatataagattaaaaatgcccttatcattggcgcaggtggttcagccaaggcagtagcgatgatacttcaatctcataatattccaacaacgcttattaatcgctccgtgcaaaatcttagcttttttgttcataaaggttttgaatgctatgtaaacagtgaatttaaacccacttgtagttatgatattcttattaatactacaagtgcagggcttaatgataatctattgccttgtgatgaatcacaacttaaagaactctgctcttgtggtaaatatgcatttgaccttatttatgggaaatgcacaccttttcttgctttagctcaatcattccatcttagttgtagtgatggaaaagaaatgcttataaatcaagcggctctttcatttgagcttttttgcaaacaaaaatataacaaaggcaatttagagatacaacgtattgcatcgtttatgaatgagattttatag

SEQ ID NO: 22526 - protein, 268 aa, Helicobacter hepaticus
MLGFFAVYGNPITHSKSPFLHNYAFTKLGLSGYYSRILLDKGANLRQNFLSNGLSGANITLPFKEEAFNQCDEVRGVAQNIGACNTWVLEDKNHLVGYNTDAQGFYECIKEYKIKNALIIGAGGSAKAVAMILQSHNIPTTLINRSVQNLSFFVHKGFECYVNSEFKPTCSYDILINTTSAGLNDNLLPCDESQLKELCSCGKYAFDLIYGKCTPFLALAQSFHLSCSDGKEMLINQAALSFELFCKQKYNKGNLEIQRIASFMNEIL

SEQ ID NO: 22527 - DNA, 831 bp, Haemophilus ducreyi
  CDS (1)..(831)
atggcacgtcaatatgcagtgtggggtaatcctattgcgcatagtaaatctccatatattcatcagttattcgctcaacagtcaaatcggcgtattgaatatgccgcgaaattaggggataaaattgcgtttgaaaagcaacttgtacaattttttactgatggtgcaaatggtgtaaatattacttcaccatttaaagcgcgcgcgttcagattagcggatgtatgcagtgaaagttgcttattagcaggcgcggctaatacactgaagcgtttagatgatgggcgtttgtttgcagataatacagatggcaaagggttttgtgccgatttagcgcgattagagtggctgattcctgaacagcgggtgctaattttaggcgcggggggcgtcactaaaggtgtgttacttcccttattgttagctaagcagaaggttactttatctaaccgcacacacattaaagcagttgaattagctcagcaatttgctaaatatggcgatattcaagcggtctctctatctgaaattgttcagcatccaccatttgacttaattattaatgcaacatctttaggcctacaaggcggatatatagctttgcctaatcatttatttgagaagagtgctgtctatgatatggaatatgctagcaatatgtgtactccatttttaaattatgttcgtacacaaggcgttacacgttatcaagatggtttaggtatgttagtaaatcaagctgctttttcttttcaattatgggaaggggaattgccaaaggtggaaaatgtacttaaacaactgagagcagaaatgggttatgttaaataa

SEQ ID NO: 22528 - protein, 276 aa, Haemophilus ducreyi
MARQYAVWGNPIAHSKSPYIHQLFAQQSNRRIEYAAKLGDKIAFEKQLVQFFTDGANGVNITSPFKARAFRLADVCSESCLLAGAANTLKRLDDGRLFADNTDGKGFCADLARLEWLIPEQRVLILGAGGVTKGVLLPLLLAKQKVTLSNRTHIKAVELAQQFAKYGDIQAVSLSEIVQHPPFDLIINATSLGLQGGYIALPNHLFEKSAVYDMEYASNMCTPFLNYVRTQGVTRYQDGLGMLVNQAAFSFQLWEGELPKVENVLKQLRAEMGYVK

SEQ ID NO: 22529 - DNA, 885 bp, Candidatus Blochmannia floridanus
  CDS (1)..(885)
atgagttcttttgctatttttgggaatccagtaagtcatagtaaatctccaaagatttatagtatgtttgctaatgaatttggtatgtgtggtgaatatgatttgaaagtagcttcagatgataatttttataatttgttatatcaattttttgatatgggtggttttggggcaaatattactgtcccttttaaaaaacgggcttttttattatgtgataatttaactgatagatctatattgtcaagtacagtaaatacaatcaaaaaacaacttgatggtactttattaggagataatactgatggtatagggttaattaatgatttgaagcgtttaaattggattagcatagataatgcttttatagatatgacttgtaataatattcaggaaacagctaatattttattaatcgggtctggtggagcagctcaaagtattattcctgttttattagatataaaaaaatgttgtgtgaatataattaatagaactttttttaatgctcagagattagtgcaatattatcatagtataggtcgtcagaatatatcttgtattgatttaaataatttattgtgtgaaaaaaatgcatgtaaaaagtatgatttgattattaatgcgtcatctagtagtatgaataatgatcttccttgtatttcatcgtttttaattacaccatttaccaaatgttatgatttattttatggaaatcaagatacgatatttgtgaaatggtgtaaaaaaaatggatcaaattattgtgttgatggtttgggaatgttgatagaacaagcagcatatgcgttttatttatggcatggtaaaaaaccatctgtacccatagttttaaatgcatttcgatctgaattatgtaagtaa

SEQ ID NO: 22530 - protein, 294 aa, Candidatus Blochmannia floridanus
MSSFAIFGNPVSHSKSPKIYSMFANEFGMCGEYDLKVASDDNFYNLLYQFFDMGGFGANITVPFKKRAFLLCDNLTDRSILSSTVNTIKKQLDGTLLGDNTDGIGLINDLKRLNWISIDNAFIDMTCNNIQETANILLIGSGGAAQSIIPVLLDIKKCCVNIINRTFFNAQRLVQYYHSIGRQNISCIDLNNLLCEKNACKKYDLIINASSSSMNNDLPCISSFLITPFTKCYDLFYGNQDTIFVKWCKKNGSNYCVDGLGMLIEQAAYAFYLWHGKKPSVPIVLNAFRSELCK

SEQ ID NO: 22531 - DNA, 864 bp, Bordetella parapertussis
  CDS (1)..(864)
atgaccctgccggcctctccgccccgctatgccgtcatcggcaatccgatcgcgcacagccgctcgccgcagatccacgccatgttctcggcccagaccggccgcccgctgcgctacgagcggctgctggcgcccgtggacggcttcctgcccaccgtgcaggccttccgcgagagcggcgggctgggcctgaacgtgaccgtgcccttcaagctggaagcctacgcgctggccgaggcgcgcctgtccgagcgggcgcggctggccggcgccgtcaataccttgtcgtggcgcgacggcgcctggcacggctgcaataccgacggcgtcgggctggtcaacgacctgctgcgcctgggcgtggcgctggccggcgcgcgggtgctgctggtgggcgccggcggcgccgcgcgcggcgtactgcagccgctggccgcggccggctgcgcccgcatccatatcgtcaaccgtaccgccgcgcgcgccgccgagctggcggccgcctggcgcgccgcggcgccgcgcaccggcacgcaggtcagcgccggcgccctggcccaggccgccgaacccggcggctgggacgtggccatcaacgccacggccagcagcctgcaggacgcggcgccggacctgcccggcggcctgtacgcgcccgacgccctggcctacgacatgatgtacggcgcgcggcccaccgccttcatgcgccaggccgaggccgacggcgcggcgcgctgcgccgacggcctgggcatgctggtcggccaggccgccgagagcttccatatctggcacggcgtgcggcccgaccccgggccggtgctgctggccctgcgcaccgaactgctggccgcgggctag

SEQ ID NO: 22532 - protein, 287 aa, Bordetella parapertussis
MTLPASPPRYAVIGNPIAHSRSPQIHAMFSAQTGRPLRYERLLAPVDGFLPTVQAFRESGGLGLNVTVPFKLEAYALAEARLSERARLAGAVNTLSWRDGAWHGCNTDGVGLVNDLLRLGVALAGARVLLVGAGGAARGVLQPLAAAGCARIHIVNRTAARAAELAAAWRAAAPRTGTQVSAGALAQAAEPGGWDVAINATASSLQDAAPDLPGGLYAPDALAYDMMYGARPTAFMRQAEADGAARCADGLGMLVGQAAESFHIWHGVRPDPGPVLLALRTELLAAG

SEQ ID NO: 22533 - DNA, 834 bp, Bacillus cereus
  CDS (1)..(834)
atgaaacaattatatggtgtaatcggaaatccaattggacattcattatcacccgttatgcataacgacgcatttgaacacttgaatatggatgcccattatcatgcgttccttgttgaagaggaattgctaggggaagcagtaagaggtttaaaagcattaggtatttcaggatttaatgtaacaactccgcacaaggttgctattatggagtatttggatgagattgacccattggcaaggaaaatcggtgcagtaaatacagtggttcataaggatggaagattaattggctataatacagacgggattggttttgttcgagcgttgcagtcaattagtaatgaaccacttcaagggaaacgtattttgttacttggttcaggtggtgctagccgagctatttatttttctcttgctgatgtaggtgtaaaagagattgatgtagccaatcgtacagtagataaggcaaaggaacttattgctgcacgtacggccgatgttaattctgttgctttgtcgttagaaaaagcgacagaagaacaaggaaattatgatattatcattcagacgacaacgataggtatgcatccacacgtagaacatacgccattacaaatttgttcgttaaaaaaaggaacgattgtatcagatataatttataatccatttgaaacgaaaattttatgtgaggcaaaagagcaaggtgcaatcattcaaaatggtattgatatgtttgtttatcaaggagcacttgcatttgaaatgtggacaggacgcacgccaaatatcgaaagaatgaaacaattagttatagaaaagcttggaggctaa

SEQ ID NO: 22534 - protein, 277 aa, Bacillus cereus
MKQLYGVIGNPIGHSLSPVMHNDAFEHLNMDAHYHAFLVEEELLGEAVRGLKALGISGFNVTTPHKVAIMEYLDEIDPLARKIGAVNTVVHKDGRLIGYNTDGIGFVRALQSISNEPLQGKRILLLGSGGASRAIYFSLADVGVKEIDVANRTVDKAKELIAARTADVNSVALSLEKATEEQGNYDIIIQTTTIGMHPHVEHTPLQICSLKKGTIVSDIIYNPFETKILCEAKEQGAIIQNGIDMFVYQGALAFEMWTGRTPNIERMKQLVIEKLGG

SEQ ID NO: 22535 - DNA, 1434 bp, Chlamydophila caviae
  CDS (1)..(1434)
atgttgtgtgcaacaattagtggtccctctttttttgaagcaaaacaacagcttctgcactcattgcctttcgtagatagtatagaattacgtatcgactgtcttttatctttatcatcagaccagctgaaacatttggtttgcttagctaagaaacctatcctcacgttgagaagacacgcgagtctatctgaaatcgcctgggtagaacgtactatggaattagcaaaattgcagcctgattatctggatattgataaggattttcctaaagaagctttaagaaagatccgaaaccaatatcctaatatcaagatcattttgtcatatcatagccaaacttcagaacacgtccccaccctctataatgaaatgctaaaacaacaagcgcatcattataaaattgctattacttctacaaaatctgtagatgcgctacgtcttatacagataaaaaaacatcttcctgaaaatactacagtactgtgcatgggaaatgaaggcatcgcttcgcgtatcctttcaccactaatgaagaatgctatcaattatgcttcaggaatccacgctcctaaagtcgctccggggcagctttctatagaagatctattagcttataactatgcgaatctctcttcagaagcacgtatctatggcctcatcggcaatcccatagatcgtagtatcagtcatctttcccacaataagctgttttcagaacttcatatgaagacgagctacataaaaatccttttatcctctgcagatcttaaagaatttttctctctaacacgtgatcttccttttggaggacttagcgtaactatgcctttcaaaactgacgttcttgattatatcgatgtttttgatccctctgtaaaacattgtcaatcttgcaacactcttgttttcaataagaataagatcacaggacacaatacggatggtttaggattactgaatcttttaaaacgcaaaaacattgccgttcacaatacccatgtgggtattgtaggctccggaggagccgcaaaggctatagcaacaacatttgcttattcgggagcttgtattagcatttttaaccgcacggaagaaaatggtaaaaaacttgctgagctatgtaatggcaatgcgttccccctaagctctttatcagaaaagcatgctatagatattctaattttatgccttcctccgcatgtaaaaatccctgaaatcttccctcctgtagttatcgatatcaatacattgcctaaagaatctccctatactaggaaagctaaagcccaaggatgtcatgttctttacggatatgaaatgtttgctgagcaagctctcctacaattttccctttggttccctagaagtctctcccaagacgatagcgagagattccgtattaacgtagaaaatattgttaacaccatgtaa

SEQ ID NO: 22536 - protein, 477 aa, Chlamydophila caviae
MLCATISGPSFFEAKQQLLHSLPFVDSIELRIDCLLSLSSDQLKHLVCLAKKPILTLRRHASLSEIAWVERTMELAKLQPDYLDIDKDFPKEALRKIRNQYPNIKIILSYHSQTSEHVPTLYNEMLKQQAHHYKIAITSTKSVDALRLIQIKKHLPENTTVLCMGNEGIASRILSPLMKNAINYASGIHAPKVAPGQLSIEDLLAYNYANLSSEARIYGLIGNPIDRSISHLSHNKLFSELHMKTSYIKILLSSADLKEFFSLTRDLPFGGLSVTMPFKTDVLDYIDVFDPSVKHCQSCNTLVFNKNKITGHNTDGLGLLNLLKRKNIAVHNTHVGIVGSGGAAKAIATTFAYSGACISIFNRTEENGKKLAELCNGNAFPLSSLSEKHAIDILILCLPPHVKIPEIFPPVVIDINTLPKESPYTRKAKAQGCHVLYGYEMFAEQALLQFSLWFPRSLSQDDSERFRINVENIVNTM

SEQ ID NO: 22537 - DNA, 837 bp, Streptomyces avermitilis
  CDS (1)..(837)
atgacgggcaccgacagcaagcgccgagccgccgtactcgggtcccccatcgcccactccctctccccggtgctgcaccgcgccgcgtacgccgagttgaggctgagcgactggtcgtacgaccggttcgacgtggacgaggaggcgctgcccgccttcttcgggaagctcgggcccgagtgggcggggctgtcgctgaccatgccgctgaagcgggccgtcatcccgctgctcgacgagatcaccgagaccgccgcgtcggtggaggccgtgaacaccgtggtgtgcacgcgggacgggcggcgcgtcggcgacaacaccgacatcccggggatggttgcggccctgcgtgagcggggcatcgagcaggtcgactccgccgcgatcctcggcgcgggcgccaccgcctcgtccgcgctggccgcgctcgcccggatctgcaccggtgaggtcgtcgcgtacgtccgcagcgaggcgcgcgccgccgagatgcggcagtggggcgaacggctcgacgtcgaggtgcgtaccgaggactgggcgcaggcggccgaggcactgcgggccccgctggtcgtcgccaccaccccggccggtgcgacggacgcgctggccgccgccgttccggagcggcccgccacgctgttcgacgtgctgtacgacccctggcccaccgacctggccgcgcgctggtccgcgtacggcggcgccgtcgtcagcgggctggacctcctggtccaccaggcggtgctccaggtcgagcagatgacggggcgctcgccggctccgctggacgccatgcggcgggcgggggagcacgcgctggcggcccggtag

SEQ ID NO: 22538 - protein, 278 aa, Streptomyces avermitilis
MTGTDSKRRAAVLGSPIAHSLSPVLHRAAYAELRLSDWSYDRFDVDEEALPAFFGKLGPEWAGLSLTMPLKRAVIPLLDEITETAASVEAVNTVVCTRDGRRVGDNTDIPGMVAALRERGIEQVDSAAILGAGATASSALAALARICTGEVVAYVRSEARAAEMRQWGERLDVEVRTEDWAQAAEALRAPLVVATTPAGATDALAAAVPERPATLFDVLYDPWPTDLAARWSAYGGAVVSGLDLLVHQAVLQVEQMTGRSPAPLDAMRRAGEHALAAR

SEQ ID NO: 22539 - DNA, 876 bp, Streptomyces avermitilis
  CDS (1)..(876)
atgacccaggactcgtatctcgtcggcctgatcggttccggcatcggcccctcgctcagccccgccctgcacgaacgcgaggccggccggcagggactgcgctatcactaccggctgatcgacatcgacaggctcggggtcggacccgaagccgtgggcggcctggtacgcgcggcccgggacctcggtttcgacgggctcaacatcacgcacccctgcaagcagctcgtcatcagccacctggacacgctcgccccgcaggccgaggcgctcggcgcggtcaacaccgtcgtcttcgaggacggccgcgccgtcggtcacaacacggacgtcaccgggttcgccgcctccttcgcgcgcggactgcccgacgcccggctcgaacgggtcgtacagctgggcgcgggcggcgcgggcgcggccgtggcgcacgccctgctgacactcggcgccgggcacgtcaccgtcgtcgacgcgctgccggagcgggccgccgccctcgccgtggcactgaaccggcacttcggcgacggccgcgccgccgcggcgagcccggacacgctgcccaagctgctgacggacgccgacggcatcgtgcacgccacccccaccggtatggccgcccaccccggaatcccgctcccggccgagctgctgcaccccggtctgtgggtcgccgaggtggtctaccgccccctggagaccgaactgctgcgcaccgcccgcgcgctcggctgcgccacgctcgacggcggcggcatggccgtcttccaggcggtggacgcgttccggctcttcaccgggcgggaacccgacagcatgcgcatgctcgccgacatcgccgaactggccggcaccgcggccgtccggcactga

SEQ ID NO: 22540 - protein, 291 aa, Streptomyces avermitilis
MTQDSYLVGLIGSGIGPSLSPALHEREAGRQGLRYHYRLIDIDRLGVGPEAVGGLVRAARDLGFDGLNITHPCKQLVISHLDTLAPQAEALGAVNTVVFEDGRAVGHNTDVTGFAASFARGLPDARLERVVQLGAGGAGAAVAHALLTLGAGHVTVVDALPERAAALAVALNRHFGDGRAAAASPDTLPKLLTDADGIVHATPTGMAAHPGIPLPAELLHPGLWVAEVVYRPLETELLRTARALGCATLDGGGMAVFQAVDAFRLFTGREPDSMRMLADIAELAGTAAVRH

SEQ ID NO: 22541 - DNA, 831 bp, Nitrosomonas europaea
  CDS (1)..(831)
atggatacctacgcagtcatcggcaacccggttgcgcacagcaaatcgcccttcattcatgcccggtttgcacaacagaccggccggatcatccattacaccgccctgctcgcaccactggacaggttcgagcagactgttctggatttccggaaaaccggcggcaaaggcatgaatatcactgttcccttcaaattcgaagcctttacactcgccagccggctgaccgatcgcgccagtgctgcacgtgcagtcaacactttccggtttgaagaaacaggagaaatactcggcgacaacaccgatggtgtcggattgatacgtgatatcgaggttaatctgaatttcccgctggcaggcaagcgcattctgctgatgggtgcaggtggtgccgcaagtggcgtcatcctgccactgttgcagcagcagcctgacctgctggccatcgccaaccgcacgccagataaagcagtgtcattacaacgccaattcgccagttacagcaatatcacaaccgggcattaccatgattttgccgggcagcatttcgatctcatcatcaatgccacttcagccagcctgcacaacgaactcccccccgtaccggcagatctgttccgtaacgcttttgcctacgacatgctgtacagcagcaggctgacaccgtttctggagcttgccagggtgcagggagctggatatctggcagatggtgccggcatgctggtagaacaggctgcagaatcctttctgctatggcacgggatccgcccggaaacgcagaccgtcatcagacagctcagggataatctgcgccaccctacctcgtga

SEQ ID NO: 22542 - protein, 276 aa, Nitrosomonas europaea
MDTYAVIGNPVAHSKSPFIHARFAQQTGRIIHYTALLAPLDRFEQTVLDFRKTGGKGMNITVPFKFEAFTLASRLTDRASAARAVNTFRFEETGEILGDNTDGVGLIRDIEVNLNFPLAGKRILLMGAGGAASGVILPLLQQQPDLLAIANRTPDKAVSLQRQFASYSNITTGHYHDFAGQHFDLIINATSASLHNELPPVPADLFRNAFAYDMLYSSRLTPFLELARVQGAGYLADGAGMLVEQAAESFLLWHGIRPETQTVIRQLRDNLRHPTS

SEQ ID NO: 22543 - DNA, 819 bp, Coxiella burnetii
  CDS (1)..(819)
atggataaatacgccgtcattggcaaccctgttgaacacagtttatcacctgttatttttcaagcgtttgaaaagcaaacgaatcactccttcgattatttaaaaataaaagcgccagtgaatggatttgctgccgccgtaaaaaaattccacgacgaaggagggaaaggcgctaatattactttgcctttcaaagaagaagcataccaattagctgataaacgcagtcaagaagccaatgaagcccacgtggccagcgctttgcaatttcgagaagacggtactatttatgctgtgaattatgatggactggggttagtgcaggatctcactcgcaatcacaatatcacactgactcaaaaatccattttaattgtcggcgcaggcggagcaacgcgcggtattttagggccgctactaaatgcagcaccggaaaaaatagttattgtcaatcgtacgccttctaaagcacacgcattagcgaaaatttttcatttgcgcggtgaaattcaaggcggcgggttcgatgaattagaacctatgcgatatgacgtcattattcatgccaccagcttagggcatcaaggaaaatttcctccacttcccgatggtctcattggctcgcagagttgttgctatgatctttcttatggcaaaattgcttcaccctttctacaatgggcaaaagatcaaggcgcaaaatataattttgatggccttggtatgctggtagaacacaacgccgcggttttttatttatggttcggcatttatcctgataccaatcctgttatcgaaatgcttcaagctcatttgtaa

SEQ ID NO: 22544 - protein, 272 aa, Coxiella burnetii
MDKYAVIGNPVEHSLSPVIFQAFEKQTNHSFDYLKIKAPVNGFAAAVKKFHDEGGKGANITLPFKEEAYQLADKRSQEANEAHVASALQFREDGTIYAVNYDGLGLVQDLTRNHNITLTQKSILIVGAGGATRGILGPLLNAAPEKIVIVNRTPSKAHALAKIFHLRGEIQGGGFDELEPMRYDVIIHATSLGHQGKFPPLPDGLIGSQSCCYDLSYGKIASPFLQWAKDQGAKYNFDGLGMLVEHNAAVFYLWFGIYPDTNPVIEMLQAHL

SEQ ID NO: 22545 - DNA, 2697 bp, Podospora anserina
  CDS (1)..(2697)
atggcttctactaccgtccccggtatgaagcgttcatacgcggccatggtctcgacttgtgagagcgactcgtccgagtcccgaccattgtcccgaggctggtcctcggacagccaaaatatggcttatgttcctggtcccggggctctcttccaggtgattggtgatcctatacctagagtgccacgctcagcaacccactcgccattggagcatgagattgtccaaacagcccgtccctacgacccagatgcctccattatcatcgtcggtatcaggggctcggggaaatccactttggccgtcatggcctcgaccgccatgaaccgaaaggtcgtcgagttggagcatgtttttcacgagaaaaccgggctatcgagtccagcttacaagagaaagcatggcgccactgactgtcaacgccgccaggcctctatccttcagcatgtatttgataaacataagcgaaacactatcgtggtcagctcatggatggataggagtgtgcaagtcatcctcgaagaccttggaagaacaaatcccgtcatatatgtccttcgagattcagaagccatcaggacccatttgaaggtcaacgatgcccgcaagttctgcgagcttttggatgccagcagtgcctttttccggagatgcacccgctttgagtttttcaatgcgtcagaagagcaaagcacagccaaagagaccatgggtgggagttctgatgaaattgctgccccctatctcaccctgaaacgagctgaacgacacttcctcaagtttctctccttgatactcccaaggggaaccatacccttcatcgaatcggccttcccgctggcttgcataccggcagaagaacggcggttcacctacgcaatctcactgcccctttcgtcgctcataaaagacaacctcgacgtccaggacctcgagacaggagcggatgcgattgagattgtgttggatgacctcgtcacagactttgccgctcacttacggcaactcggtcagctacccccagatagagccagagaaatcagccgcgtcgtggcccaagtaaggcgagacaccgtgattcctatcttcctccatgtagcgtttccggaggctgcgctgtctgacgagacttggcgatctatgtacagttcatatgtctcgcatgcccttcgtcttgccccggagtacatgactgttgatctacgactcgacagcgtgacgcttgccggcattctcaacatcaagggctcctgcaagatagtcgggaacgttcagttatcagatccccacccgccgtcttggaatgactccagctggcagtcctactaccagaaagcacagaattacggctgcgacatggtccgattcaccaggacagctgccagcatcgatgataactttggcatacatcgggtgcacgccatggttgagtcagcgcctagttcgagactgcccctgatcgcttacaatactggcgttcttggaaagcactcggcgtgcttcaacaggatactatcctctgttaaacccgaaggcatgagcaaagaccccggtggtgttgactcacatagcctggccatccgtccatttctcacggccaaacaagccaccgaagctctctactcagcctttctctacgatcacatgagactgtatgtttttggcgccaacgtggactacagtttatccccagcaatgcacaatgccgctctcaaagcttgcggcattccccaccactacgagccacattcgacaagcaacatatcaagtctcgagaagctcgtcagtgacccgcactttgctggtgcctcggtcggactgcctttcaaagtcgagataatcagcttgacgcattccctgagccgacatgctcgggctatcggcgcagtcaacactctgattccggttcggcacctcaacccggatggcagtattggcgatgacgtggctttgttcaatgacagaaatagggccgggcccgtcaaggctttgtacggggagaatacagactgggtgggaatccgggcatgtatccgccgaggtctctcgcccgccaacgccgtccgatccaccagtagcggactcgtgatcggagctggtggcatggctagggcagccgtgtacgccatgctgcagcttggagtcaagcagattgccatcttaaaccggaccgttgccaatgccgagaagcttgtttctcacttcgaaaggctcttggctcgcaatgacctaccttggttgagcgctggctccagaacccacgaaggcaccagattccacatccttcgctcccgagacgacacttggcccgagagcttcagacaccctaccatgatcgtatcttgcataccaacgcacagcattggagaccaccccgctcctgactttaccgtcccagcgtcgtggctgcaaagctcgacaggcggtgtcgtagtagagcttgcctacaagacccttatcacccctctgctggaacaagttcgccgtgaagctcatagagggtgggttacaatggatggcctggatctgctaccagaacaaggttttgcacagtttgaattgttcactggtcggcgcgcaccacgtcgattgatgaggagggaggtgttcagatcgtatcctgatgaccaagggcgtctgaactttgcgcggctgttgcagccgcggctcgacaacataactgcacaagaaccttga

SEQ ID NO: 22546 - protein, 898 aa, Podospora anserina
MASTTVPGMKRSYAAMVSTCESDSSESRPLSRGWSSDSQNMAYVPGPGALFQVIGDPIPRVPRSATHSPLEHEIVQTARPYDPDASIIIVGIRGSGKSTLAVMASTAMNRKVVELEHVFHEKTGLSSPAYKRKHGATDCQRRQASILQHVFDKHKRNTIVVSSWMDRSVQVILEDLGRTNPVIYVLRDSEAIRTHLKVNDARKFCELLDASSAFFRRCTRFEFFNASEEQSTAKETMGGSSDEIAAPYLTLKRAERHFLKFLSLILPRGTIPFIESAFPLACIPAEERRFTYAISLPLSSLIKDNLDVQDLETGADAIEIVLDDLVTDFAAHLRQLGQLPPDRAREISRVVAQVRRDTVIPIFLHVAFPEAALSDETWRSMYSSYVSHALRLAPEYMTVDLRLDSVTLAGILNIKGSCKIVGNVQLSDPHPPSWNDSSWQSYYQKAQNYGCDMVRFTRTAASIDDNFGIHRVHAMVESAPSSRLPLIAYNTGVLGKHSACFNRILSSVKPEGMSKDPGGVDSHSLAIRPFLTAKQATEALYSAFLYDHMRLYVFGANVDYSLSPAMHNAALKACGIPHHYEPHSTSNISSLEKLVSDPHFAGASVGLPFKVEIISLTHSLSRHARAIGAVNTLIPVRHLNPDGSIGDDVALFNDRNRAGPVKALYGENTDWVGIRACIRRGLSPANAVRSTSSGLVIGAGGMARAAVYAMLQLGVKQIAILNRTVANAEKLVSHFERLLARNDLPWLSAGSRTHEGTRFHILRSRDDTWPESFRHPTMIVSCIPTHSIGDHPAPDFTVPASWLQSSTGGVVVELAYKTLITPLLEQVRREAHRGWVTMDGLDLLPEQGFAQFELFTGRRAPRRLMRREVFRSYPDDQGRLNFARLLQPRLDNITAQEP

SEQ ID NO: 22547 - DNA, 777 bp, Pseudomonas syringae
  CDS (1)..(777)
atgcccgttatcgccaacagggatacgcagctgtgtatgtcgatggccgcacgtcccggaaacttcggcgtacgttttcataatcacctttttcagcagttggacctcaacttctattacaaaacattttcgcccaatgacctgacggcagctgttgccggtatacgctcactgggaatacgcggcagcgcggtgtcgatgccgttcaaagaagcctgcatcgagctggtcgacgagctggacgtatcagcggccgcgatccagtcgatcaataccatcgtcaataccgacgggcacttgaaggcgttcaacacggactacattgccgtggcgcaactgatggaaagccatgccgtgccacacagcgcatttgccctgcgcggcagcggcggaatggccaaagcggtggcgtttgccctgcgcgatgcaggtttcaccgacgggttgatcgtggcgcgtaaccagcaggccgggcagcgcctggcagaggcgtgtggttttcgctggcaggctgacctgggaagcgcgcgcccaccgttgctggtcaatgtcacgccgctgggtatgcaaggcccgcagggcgatgaactggcgtttgatatgcaggcaatcgaagccgctgacacgattttcgatgtggtcgccacgcccgccgatacaccgttgattcaggctgcacgtcgtctgggcaagcggctcgtgagcggcgatgaggtggccgctatccaggcgcttgagcagttcgtgctgtacaccggccattcgcccgaccgatga

SEQ ID NO: 22548 - protein, 258 aa, Pseudomonas syringae
MPVIANRDTQLCMSMAARPGNFGVRFHNHLFQQLDLNFYYKTFSPNDLTAAVAGIRSLGIRGSAVSMPFKEACIELVDELDVSAAAIQSINTIVNTDGHLKAFNTDYIAVAQLMESHAVPHSAFALRGSGGMAKAVAFALRDAGFTDGLIVARNQQAGQRLAEACGFRWQADLGSARPPLLVNVTPLGMQGPQGDELAFDMQAIEAADTIFDVVATPADTPLIQAARRLGKRLVSGDEVAAIQALEQFVLYTGHSPDR

SEQ ID NO: 22549 - DNA, 855 bp, Pseudomonas syringae
  CDS (1)..(855)
atgacccatgctgaacacacctccgtactcgccggcctgatcggctccggcatccaggcttcgcgaacgcccgccatgcatgagcacgaaggcgatgcacagggcctgcgctacctgtaccggctgatcgatatcgacgcgctgcaactggacatcaacgccctgccccggcttgtcgaaagcgcgcagaactgcggttttaccggcctgaatatcacctttccctgcaaacaggcggtcatcccgttgctggacgaactgtccgacgaagcgcgcggcatcggtgcggtcaacaccgtggttttcaaggacggaaaacgcatcgggcataacaccgactgtctgggttttgccgaaggtttccagcgcgggctggacaaagcgccacgtcagcatgtggtgcaaatgggcgcaggtggtgcgggcgctgccgtggctcatgcgctgctgagcgcaggcgtcgagcgcctcaccgtgttcgaggtcgagccgcagcgtgcgcaaggcctggtggacaacctcaatgagcatttcggtgccggacgcgcgcaggtcggtcttgacttgcctgcggcaatggccgaagccgacgggctggtcaataccacgccggtgggcatggccaagctgccgggcacgccgttgccggttgaactgctgcggcccgcgctgtgggtggctgaaatcatttacttcccgctggaaaccgagctgctcaagcacgcccgcacactgggctgccgtacgctggatggcagcactatggcggtgtttcaggcggtcaaggcgttcgagctgttcagtggccggtccgctgatgcgcaacggatgatggcgcacttccacaccctgtaa

SEQ ID NO: 22550 - protein, 284 aa, Pseudomonas syringae
MTHAEHTSVLAGLIGSGIQASRTPAMHEHEGDAQGLRYLYRLIDIDALQLDINALPRLVESAQNCGFTGLNITFPCKQAVIPLLDELSDEARGIGAVNTVVFKDGKRIGHNTDCLGFAEGFQRGLDKAPRQHVVQMGAGGAGAAVAHALLSAGVERLTVFEVEPQRAQGLVDNLNEHFGAGRAQVGLDLPAAMAEADGLVNTTPVGMAKLPGTPLPVELLRPALWVAEIIYFPLETELLKHARTLGCRTLDGSTMAVFQAVKAFELFSGRSADAQRMMAHFHTL

SEQ ID NO: 22551 - DNA, 825 bp, Pseudomonas syringae
  CDS (1)..(825)
atggaccagtatgtcgtcttcggtaaccccattggtcatagcaagtcgccgctgattcatcgcctgttcgccgagcaaaccggccaggcactgaattaccagaccgcgctggcaccgctggacgatttcacggcgtttgcccaggcgtttttccagaccgggcgtggtgccaacgtgacggtgccgttcaaggaggaggcgtttcgcctggccgacagcctgaccgagcgcgggcagcgtgcgggggccgtcaacaccctgagcaagctcgatgacgggacgctgctgggcgacaacaccgacggtgccgggctggtgcgcgacctgacggtcaattgcgcatgcagcttgcgcggtcagcgcgtgttgttgctgggcgcgggcggtgcggtgcgtggcgcgctggaaccgctgctggcagaaaagcccgccgtactggtgatcgccaatcgtacggtcgaaaaagccgaacgactggctcaggaatttgccgatctcggcccggtgtttgccagcagcttcgactggcttgaagagccggtggacctgatcatcaacgccacgtctgccagcctggccggggagctgccgcccatctccccgagcctgatccagcctggtgcgaccttttgctacgacatgatgtacagcaaagcgcccactgctttctgccgctgggccacagaacagggtgcggcgcagtcggttgatggcctggggatgctggtcgagcaggcggcagaagccttcctgttgtggcgcggcgtgcgcccggattcagcgcctgtattggcggagttgcgcagattgctggctgcgggttga

SEQ ID NO: 22552 - protein, 274 aa, Pseudomonas syringae
MDQYVVFGNPIGHSKSPLIHRLFAEQTGQALNYQTALAPLDDFTAFAQAFFQTGRGANVTVPFKEEAFRLADSLTERGQRAGAVNTLSKLDDGTLLGDNTDGAGLVRDLTVNCACSLRGQRVLLLGAGGAVRGALEPLLAEKPAVLVIANRTVEKAERLAQEFADLGPVFASSFDWLEEPVDLIINATSASLAGELPPISPSLIQPGATFCYDMMYSKAPTAFCRWATEQGAAQSVDGLGMLVEQAAEAFLLWRGVRPDSAPVLAELRRLLAAG

SEQ ID NO: 22553 - DNA, 840 bp, Pseudomonas putida
  CDS (1)..(840)
atgaccaaggagcctgttatgccgacaactcccagccgggacaccgtgctttgcatctctctggccggtcgccccggcaccttcggcgtgcgctttcacaaccacctgtaccagcagttgggcctggacttctactacaaggccatgcgcaccgatgacctgccggcggcggtggcagggatccgcgccctgggtattcgcggctgcggggtgtcgatgccgtacaaggaagcctgcatggccttggtcgacgaaatcgatccctcggcggcggccatcgagtcggtcaatacccttgtcaattgcaatggccacctcaaggcgtacaacaccgattacctggccgtgcgccaattgctggctcagcatcaggtcgatccgggcacggcctttgccctgcgaggcagcggtggcatggccaaggccgtggccagcgccttgcgcgatgccgggtttgccgaaggcatcatcgttgcacgcaacgagcaggccgggcgtcagttggcggatgtctgtggttatcgctgggtgcctgagccaggcgacatttgcccgcccatgctggtgaacgtgacgccgatcggtatggcaggcgggctggaggcagaagagctggcgtttcccgagcacgccatcgcggcggcggaacgggtgttcgatgtggtggcgatgccggcgcagacgccgttgattcgccgggctcaggcgttgggcaagccggtgatcactgggctggaggtcattgcgctgcaggcgctggaacagttcgtgttgtacaccggggtaaggccgacgcgggagcaggtggatgcggcggtggcatacgcgcgggctacctag

SEQ ID NO: 22554 - protein, 279 aa, Pseudomonas putida
MTKEPVMPTTPSRDTVLCISLAGRPGTFGVRFHNHLYQQLGLDFYYKAMRTDDLPAAVAGIRALGIRGCGVSMPYKEACMALVDEIDPSAAAIESVNTLVNCNGHLKAYNTDYLAVRQLLAQHQVDPGTAFALRGSGGMAKAVASALRDAGFAEGIIVARNEQAGRQLADVCGYRWVPEPGDICPPMLVNVTPIGMAGGLEAEELAFPEHAIAAAERVFDVVAMPAQTPLIRRAQALGKPVITGLEVIALQALEQFVLYTGVRPTREQVDAAVAYARAT

SEQ ID NO: 22555 - DNA, 819 bp, Pseudomonas putida
  CDS (1)..(819)
atgagcgaccgctacgcagtgatcggccgaccgatcaaccacaccaagtccccgctgattcatggcctgttcgcccaggccagcaaccagcagctggaatacggggctatcgaaggctcgctggacgacttcgaagcccaggtactgcagtttcgtagcgaaggcgggaagggcatgaacatcaccgccccgttcaagctgcgtgccttcgagctggccgaccggcgcagcgagcgggcgcaattggcacgggcggccaatgcgctgaagttcgaggatggccgcatcgtcgccgaaaacttcgatggcatcggtttgctgcgggacatcgaggagaaccttggcgagccgctgcgcaaccgccgtgtgctgctgctgggtgctggcggcgcggtgcgcggggcgttgctgccgttcctgcaggcggggcctagcgagctggtgatcgccaaccgggacatggccaaggcgctggcgctgcgtaacgagctcgatcactcgcgtctgcgcatcagccgctacgaagcgctggaagggcaatcgttcgacatcgtcgtcaacgccacctcggcgagcctgaccgcggacttgccgcccctgccggctgatgtgctgggcgaggcggccttggcctacgagctggcctatggcaaaggcctcacgcctttcctgcgcctggctcgcgagcagggccaggcgcgcctggccgatggcgtcggcatgctggtggagcaggccgccgaggcgtttgcctggtggcgcggggtgcggcccgacacacgtgcggtgatcaatcagctgacgattcccttggagtag

SEQ ID NO: 22556 - protein, 272 aa, Pseudomonas putida
MSDRYAVIGRPINHTKSPLIHGLFAQASNQQLEYGAIEGSLDDFEAQVLQFRSEGGKGMNITAPFKLRAFELADRRSERAQLARAANALKFEDGRIVAENFDGIGLLRDIEENLGEPLRNRRVLLLGAGGAVRGALLPFLQAGPSELVIANRDMAKALALRNELDHSRLRISRYEALEGQSFDIVVNATSASLTADLPPLPADVLGEAALAYELAYGKGLTPFLRLAREQGQARLADGVGMLVEQAAEAFAWWRGVRPDTRAVINQLTIPLE

SEQ ID NO: 22557 - DNA, 810 bp, Pseudomonas putida
  CDS (1)..(810)
atgattcgaggttccactgaactggtcgccatcgtcggttcgcccatcgcccaggtgaagtccccgcaaaacttcaacacctggttcaaccacaacaactgcaacctcgccatgctgcccatcgacctgcacgaggcggcgctggacagctttgcggataccctgcgtggctggcagaacctgcgcggttgcgtggtcaccgtgccttacaagcaggcgctggccaaccgcgtggacggcctgagcgagcgcgcggctgccctgggctcgatcaatgtgatacgtcgcgagcgcgacggacgcctgctgggcgacaatgtggacggcgccggcttcctcggcgctgcgcacaagcatggcttcgagccggcgggcaaacgggcactggtgatcggttgcggcggtgttggcagtgccattgcctatgcactggctgaggcagggatcgccagcataaccctctgcgaccccagcaccgcacgcatgggtgcggtatgcgaactgctcggcaacggcttccccgggcttacggtcagcacacagttcagtgggctggaagacttcgacctggtggccaacgcgtccccagtcggcatgggcacccgcgcagagctgccgttgtccgccgccctgctggctaccctgcagccagacaccctggtcgccgacgtggtcacctcacccgagatcaccccgctgctgaaccgcgcgcggcaagtaggttgcaggatccagactggcccggaaatggccttcgcccaactgggccaccttggcgccttcatgggcgtcacaccgttggagatctga

SEQ ID NO: 22558 - protein, 269 aa, Pseudomonas putida
MIRGSTELVAIVGSPIAQVKSPQNFNTWFNHNNCNLAMLPIDLHEAALDSFADTLRGWQNLRGCVVTVPYKQALANRVDGLSERAAALGSINVIRRERDGRLLGDNVDGAGFLGAAHKHGFEPAGKRALVIGCGGVGSAIAYALAEAGIASITLCDPSTARMGAVCELLGNGFPGLTVSTQFSGLEDFDLVANASPVGMGTRAELPLSAALLATLQPDTLVADVVTSPEITPLLNRARQVGCRIQTGPEMAFAQLGHLGAFMGVTPLEI

SEQ ID NO: 22559 - DNA, 849 bp, Pseudomonas putida
  CDS (1)..(849)
atgagccagcaagccatcctcgccggcctgatcggccgcggcatccaactgtcacgtaccccggccctgcacgaacacgaaggcgacgcccaggccctgcgctacctgtaccggctgatcgacgccgaccagttgcaactggacgacagcgccctgcccggcctgctcgaagccgcgcaacataccggtttcaccgggctgaacattacctacccgttcaagcaggcgatcctgccgttgctcgacgagctgtccgacgaggcccgtggtatcggcgcggtaaacaccgtggtgctcaaggacggcaagcgcgtcggccacaacaccgattgcctgggctttgccgaaggcttgcgccgtggcctgcccgacgttgcacggcgccaggtggtgcagatgggtgccggtggcgctggctcggccgtggcccatgccctgctgggtgaaggggtagaacggctggtgctgttcgaagtggatgcgacccgtgcgcaggcgttggtggacaacctgaacacccatttcggcgcggagcgcgccgtgcttggcaccgacctggccacagccttggccgaagcggacgggctggtcaacaccacgccggtgggcatggccaagctaccgggcacgccactgccggtggagttgttgcatccccgcctgtgggtggcagagatcatctacttcccgctggagaccgaactgctgcgcgcggcccgggcactgggctgccgcacgctggatggcagcaacatggcggtgttccaggcggtgaaggcattcgagctgttcagcgggcggcaggcggatgcggcgcggatgcaggcgcactttgccagtttcacctga

SEQ ID NO: 22560 - protein, 282 aa, Pseudomonas putida
MSQQAILAGLIGRGIQLSRTPALHEHEGDAQALRYLYRLIDADQLQLDDSALPGLLEAAQHTGFTGLNITYPFKQAILPLLDELSDEARGIGAVNTVVLKDGKRVGHNTDCLGFAEGLRRGLPDVARRQVVQMGAGGAGSAVAHALLGEGVERLVLFEVDATRAQALVDNLNTHFGAERAVLGTDLATALAEADGLVNTTPVGMAKLPGTPLPVELLHPRLWVAEIIYFPLETELLRAARALGCRTLDGSNMAVFQAVKAFELFSGRQADAARMQAHFASFT

SEQ ID NO: 22561 - DNA, 825 bp, Pseudomonas putida
  CDS (1)..(825)
atggaccagtacgtcgtttttggtaaccccatcggccacagcaagtcgccgctgatccaccgcctgttcgccgagcagaccggtcaggacctggaatatgccacgctgctggcgccgctggacgagttcagcgactgcgcgcgcggcttcttcaagcaaggcagtggcggcaatgtcaccgtgccgttcaaggaagaggccttccgcctgtgcgacagcctgaccccacgtgcccggcgcgcaggcgcagtgaacacgctgagcaagctggctgatggcaccctgcagggcgacaacaccgacggcgctggcctggtgcgcgacctgacggtgaatgccggggtcgagctggcgggcaagcgcattctcatcctcggtgccggtggcgccgtgcgcggcgtgctggagcctattctggcgcacaagccgcagtcgctggtgattgccaaccgtaccgtggaaaaggccgaacagctggcgcgcgagttcgatgaactggggccggttgtggccagcgggtttgcctggttgcaggagcctgtggatgtaatcatcaacgccacctcggcgagcctggccggggagttgccaccgattgccgacagcctggtcgaggcgggtcgtacggtttgctacgacatgatgtatggcaaggagccgacgccgttttgccagtgggctaccaagctgggggctgccaaggtactggatgggttggggatgctggctgagcaggcagctgaagccttctttatctggcgtggcgtgaggccggatacggcgccggtgttggctgaactgcgccggcaactcgctcggggctga

SEQ ID NO: 22562 - protein, 274 aa, Pseudomonas putida
MDQYVVFGNPIGHSKSPLIHRLFAEQTGQDLEYATLLAPLDEFSDCARGFFKQGSGGNVTVPFKEEAFRLCDSLTPRARRAGAVNTLSKLADGTLQGDNTDGAGLVRDLTVNAGVELAGKRILILGAGGAVRGVLEPILAHKPQSLVIANRTVEKAEQLAREFDELGPVVASGFAWLQEPVDVIINATSASLAGELPPIADSLVEAGRTVCYDMMYGKEPTPFCQWATKLGAAKVLDGLGMLAEQAAEAFFIWRGVRPDTAPVLAELRRQLARG

SEQ ID NO: 22563 - DNA, 885 bp, Lactobacillus plantarum
  CDS (1)..(885)
atggaaaaacgaatttcaggtaccactggtttatttaccttactcggctctccagtaggtcattcaggttcaccggcaatgtataactttagctttcaagagcaaggattagactatgcatatttagcttttgatgttaaaaaagcacaaatgccagaagcgattgatgcaatacgattatttaaggttcgcggtagcaacgtaacgatgccatgtaagggcgttgccgcaacacttgttgatgagttgtcaccggccgcaaagattgtgggggctattaatgtcattgttaacgataatggtaagttgacaggtcatattacggatggcattggttttgtacgcaatctgaaagagaacggtgtagatattgctggtaaaaagctagtcgtgattggtgctggtggtgctgctacggcgctacaagttcaatgtgcattagatggtgctaaatcattggctatttttaaccgtgaggacgacttttatgcgaatgccgaaaacactcaaaagaagattaaggaagcaaagccagaagtcgacgttaacgtctatcatctagaagaccaagacaagttaaaagctgagattgagaaggctgatattctggttaacgctactattgttggtatgaagccgctggacggtcaatcattagtcgatccaagctatttacgttcagacttggttgttgcggatactgtttacaaccccctaaagaccaagttaattgaagacgccgaggcattaggatgcacggtagcgccggggaaaggcatgttattgtggcaaggtgatgcagcatacacactctttacaggtaaggctatgccaacggccgaatatcaagcctacgaagcacgtcaagcagctaagcggcattag

SEQ ID NO: 22564 - protein, 294 aa, Lactobacillus plantarum
MEKRISGTTGLFTLLGSPVGHSGSPAMYNFSFQEQGLDYAYLAFDVKKAQMPEAIDAIRLFKVRGSNVTMPCKGVAATLVDELSPAAKIVGAINVIVNDNGKLTGHITDGIGFVRNLKENGVDIAGKKLVVIGAGGAATALQVQCALDGAKSLAIFNREDDFYANAENTQKKIKEAKPEVDVNVYHLEDQDKLKAEIEKADILVNATIVGMKPLDGQSLVDPSYLRSDLVVADTVYNPLKTKLIEDAEALGCTVAPGKGMLLWQGDAAYTLFTGKAMPTAEYQAYEARQAAKRH

SEQ ID NO: 22565 - DNA, 885 bp, Lactobacillus plantarum
  CDS (1)..(885)
atggaagcacgaattgatggacacacaactatgctaggccttttcggctcgccggttggccattcaggctcaccagcaatgtataactacagttttgaaaaggcaggtattaatgatgcatacctggcttttgacattcaggctgatgaaatggccagtgcgttaactaaaatgcgcgttttaaatatgcgtggtgctaacgtaacgatgccttgtaaaaaggttgctgcagaattagttgatgaattgtcaccagctgcagaattaatcggtgctgtgaatacgattgtcaataatgatggcgtgttagttggtcataatacggacggtgcgggctatgttgaaaatctacgccagcatggtgttgacccacagggaaagcgccttacggtgttaggtgctggtggtgctgctacagcaattgccgttcaaatggcactagatggcgctcaggcgattcatatctttaatcctaaggactcgttttatcaaaatgctgagttaacggctcaaaagatcatggataaagttcccgcatgccaagttactgtaggcgatattaatgaccaggaagtcttgacacaagcaattgcacaaagtgatattttggctaacgcaaccaaggccggtatggcaccgaatgttgaacaaactaatattaaggatatgaccgtttttcgttctgatttagttgtgacagatactgtttataatcctgctaccacaaaaatgttagcagatgcagctgaacatggaagcaaaacaattggcggtaaggggatgctggtttggcaaggtgccgcagcgttcaaattgtacacaggccaagaaatgcccgttgaagaagtaacgcaacggttcttctcagatgatgggggacgttaa

SEQ ID NO: 22566 - protein, 294 aa, Lactobacillus plantarum
MEARIDGHTTMLGLFGSPVGHSGSPAMYNYSFEKAGINDAYLAFDIQADEMASALTKMRVLNMRGANVTMPCKKVAAELVDELSPAAELIGAVNTIVNNDGVLVGHNTDGAGYVENLRQHGVDPQGKRLTVLGAGGAATAIAVQMALDGAQAIHIFNPKDSFYQNAELTAQKIMDKVPACQVTVGDINDQEVLTQAIAQSDILANATKAGMAPNVEQTNIKDMTVFRSDLVVTDTVYNPATTKMLADAAEHGSKTIGGKGMLVWQGAAAFKLYTGQEMPVEEVTQRFFSDDGGR

SEQ ID NO: 22567 - DNA, 885 bp, Lactobacillus plantarum
  CDS (1)..(885)
atggcagaacgaattgatgggcatactttactgattggtttaatggcgtatccaattcgtcattcaatgtccccaactatgcataacaatgcttttgctaaattaggactaaattacgcttacttagcatttgaagtgacgaatgaaacgctgccaagtgcaattgagtcaatcagaacacttgatatgcgtggctccaatatttcaatgccaaacaagcaaaaagtgattccattgcttgataagcttgatccagcagctaaaatggtgggtgcggttaatacaattgttaatgatgatggtgttttaacaggttatacgactgatggcatcggatttatgaaagcgctcgcggatgaaggcttggatattcgcgaacataaaatgacgctagctggtgctggtggtgccgggactgcgatcgcagtgcaggctgcattggatggtgtcaaagaaatatctatttttaatatgcacgatgcaacatgggcaaatgccgaacggaacgttaaactaattaatgagcagaccgactgtcacgccactttacactcattagaagatcgtgatgatttcaaacgggaaatccaaagctcttatatctatactgattcgacaggtgttggaatgaaaccacttgaagataagacgcttgtggacgatcctagttggttcagctcagaccaaattgtgtttgatacagtatatgcaccacgaacgactaaattaatgaaggtagctcgtcaagcaggattgaagcatgtttacaatggtttaggtatgatgcttgaacaaggtgcagcagcctttaagctgtggactggcgaagacatgccagttgattacattcatcagattctgtttagtgatgatcaggataaataa

SEQ ID NO: 22568 - protein, 294 aa, Lactobacillus plantarum
MAERIDGHTLLIGLMAYPIRHSMSPTMHNNAFAKLGLNYAYLAFEVTNETLPSAIESIRTLDMRGSNISMPNKQKVIPLLDKLDPAAKMVGAVNTIVNDDGVLTGYTTDGIGFMKALADEGLDIREHKMTLAGAGGAGTAIAVQAALDGVKEISIFNMHDATWANAERNVKLINEQTDCHATLHSLEDRDDFKREIQSSYIYTDSTGVGMKPLEDKTLVDDPSWFSSDQIVFDTVYAPRTTKLMKVARQAGLKHVYNGLGMMLEQGAAAFKLWTGEDMPVDYIHQILFSDDQDK

SEQ ID NO: 22569 - DNA, 894 bp, Lactobacillus plantarum
  CDS (1)..(894)
atgattgatggacaaacggcactctttggatttatcgcgcaccccgcgcggcacagtcgctcaccgcgaatgcataatttgagttttgactactgggggctaaatgcgcgctacttggcgtttgatgtggcaccggatggattggctggtacgcttgctggaattcgtagcatgggtatcgcgggggtgaacctttcaatgccattcaaacaaaccgttgtaccgctactagatggtttgacagtgcgagcgcaacggattcaagcggtcaatacgattaagaatgaagctggcaagctgattggtgacagcacggacggcgctggagtttttcaggatctcttacatcaaggtctgaacttggttgataagcacgtcatggttttaggcgcgggaggcgcaggtaaggcaatcattgcggcggctttagattatggtgtcgcgagtgtaacggtctttaaacgcaacaacgaacgctacgccggtgttcagcactggttggagcaactcagtaccacgacttcggtaccactccggctctgtgcctatgaagaccaagtacggatgcagcaagttgctcgtaccagcaatttgatcattaacgcgaccaatatcggcatgacgactgctggaacgccattaccaatctcaattatccagcaattagtcccacaacagacggtctatgatgtgatttaccaaccgctagaaacgacctttttgcgcttagcgcgtcagcaggggtgcgccacatataatggtttggggatgttgatttggcaaggtgccttggcttttgagttttggactggtaagcagatgccagttcaacaggtccgccaagatatgttagccagtattcaagcgactccgccgattacggcgcaggcttag

SEQ ID NO: 22570 - protein, 297 aa, Lactobacillus plantarum
MIDGQTALFGFIAHPARHSRSPRMHNLSFDYWGLNARYLAFDVAPDGLAGTLAGIRSMGIAGVNLSMPFKQTVVPLLDGLTVRAQRIQAVNTIKNEAGKLIGDSTDGAGVFQDLLHQGLNLVDKHVMVLGAGGAGKAIIAAALDYGVASVTVFKRNNERYAGVQHWLEQLSTTTSVPLRLCAYEDQVRMQQVARTSNLIINATNIGMTTAGTPLPISIIQQLVPQQTVYDVIYQPLETTFLRLARQQGCATYNGLGMLIWQGALAFEFWTGKQMPVQQVRQDMLASIQATPPITAQA

SEQ ID NO: 22571 - DNA, 771 bp, Clostridium tetani
  CDS (1)..(771)
atgaagtacacaggattattaggaaaaaatatatcttactcacaatcacctaagattcataatgaatattatgaaaaaaacaatattccatttaaatataaaatatttgatgtaaatgaagatgagctattttactttatagatacattatacagaaaaaacatagtaggatttaatgtaactataccttacaaaactaagattttaaaatatatagaaaagcttgtatacccagctgataaaataggagcagtcaatacggttgtagtgctaaaagacaaattaattggatttaatactgattactatggctttactgaaagtctaaaaagaagaaatgttgaattaagagataagaatgcattaattataggaaatggcggttcagctctttgtgtttattatgcattaatggacatagggtgtaaaaatttagatgttttatgtagaaataaagataaaaacatagaaaaattgaaagaaataagatgtttttacgatttttatgatattataaaatatgaacagtatgatataataataaattgtactcctttgggaggaaacaactatataaaaaatcttccaataaatttagaaaaaattaaattaaaaaaagatgtgataatatacgatttaaattataagacacaagatactatttttataaatcaggcaaaaagtatgaatataatggcaattaatggagaagatatgttaagactccaggcttataaggctattgatatatggggaatatatatatattaa

SEQ ID NO: 22572 - protein, 256 aa, Clostridium tetani
MKYTGLLGKNISYSQSPKIHNEYYEKNNIPFKYKIFDVNEDELFYFIDTLYRKNIVGFNVTIPYKTKILKYIEKLVYPADKIGAVNTVVVLKDKLIGFNTDYYGFTESLKRRNVELRDKNALIIGNGGSALCVYYALMDIGCKNLDVLCRNKDKNIEKLKEIRCFYDFYDIIKYEQYDIIINCTPLGGNNYIKNLPINLEKIKLKKDVIIYDLNYKTQDTIFINQAKSMNIMAINGEDMLRLQAYKAIDIWGIYIY

SEQ ID NO: 22573 - DNA, 990 bp, Bradyrhizobium japonicum
  CDS (1)..(990)
atgatatggccgcgacctgacggcgcgcaccttctcaagccggcgccgcatcacggccttgcggaagcgctgtgcgggaatcgtgcccgcgcgcttgacagagcccgcgggacgcgaaatggatcgcctccgatacgatccggggagaagatgaccgtgaccaaggctcccgcagcctgtttgatcggatggcccgccgcgcattcgcgctcgccgctgatccatcattattggctgcgcacgctcggtatcgccggcggctatgtcatcgaggccgtcccgcccgaggatctccgcgatttcgtgctgcggctgtcgctgcgcggcttcgtcggcgccaacgtcaccatcccgcacaaggagggcgtgctggcgctgtcgacgccagatgcgcgcgccaaggccgtcggcgccgccaacacgctgtggttcgaggacggcgagctgcgctcgaccaacaccgacgtcgagggcttcatcaacaatctcgatgccagcgcgcccggctgggacacggccgaggaggcgctggtgctcggggccggcggctccgcgcgcgcggtcgtgttcggcctgcgcgagcgcggcatcaaacgcatccatctcgccaatcgcaccatcgcgcgggccgagacgctggcgaagcagttcgggccgaacgtgcagcccgttacgtgggacgggatcgacgacgtgctgccgcgtgcaaaacttctcgtgaacacgacctcgctcggcatgcgcggtcagccttcactcgatgttgatgttgcacgcctgccgcaggcggccgtcgtcgccgatctcgtctatgtccccctggtgacgccgctgctcgccgcagcaaaggcacgcggcctcaggaccgccgacggtctcggcatgctgctgcaccaggccgtgcgcggcttcgagctgtggttcggccggcggccgcgggtcacggacgagctgcgcgcattggtcgaggccgatctcacaaagtcttga

SEQ ID NO: 22574 - protein, 329 aa, Bradyrhizobium japonicum
MIWPRPDGAHLLKPAPHHGLAEALCGNRARALDRARGTRNGSPPIRSGEKMTVTKAPAACLIGWPAAHSRSPLIHHYWLRTLGIAGGYVIEAVPPEDLRDFVLRLSLRGFVGANVTIPHKEGVLALSTPDARAKAVGAANTLWFEDGELRSTNTDVEGFINNLDASAPGWDTAEEALVLGAGGSARAVVFGLRERGIKRIHLANRTIARAETLAKQFGPNVQPVTWDGIDDVLPRAKLLVNTTSLGMRGQPSLDVDVARLPQAAVVADLVYVPLVTPLLAAAKARGLRTADGLGMLLHQAVRGFELWFGRRPRVTDELRALVEADLTKS

SEQ ID NO: 22575 - DNA, 828 bp, Bradyrhizobium japonicum
  CDS (1)..(828)
atgagcgatcgttacgcggtgatcggcaatccgatcggcttcagcaaatcgcccctcatccatggcactttcgccaagatgacgggacaggaccttgtctatgaggcgatcgaggccccactcgatggcttcaacgcacgagttgatcaattccggagagagggcgccaaggggctgaacatcacggccccgttcaagctcgatgctttcgcctacgcaaacgagctttcagagagcgccgaccgagctggcgccgcaaactgcttgaagttcgacggcgataggatcattgccgagaatttcgacgggatcggccttgtgcgcgacatcacggtcaatctcggggtcaagatggccggccggcgcgtcctgatgctcggtgccgggggcgcagcgcgtggcgcgctgctgccgttcctgcgtcaggagccatccgagctggttctcgtcaaccgaacgctgtcaaaagcggtggcactggccgaagagtttgccggttgtggacccctgatcgtcagcggctatactgaactggccgatcttgccgaaggctatgacgtcgtgatcaacgcgacatcggccagcctgcggggtgagatgccgccgcttccaggcaatgtcttccgcggtgcggagctggcgtacgagctcgcctacggcaaggggctcactccctttttgcaagcggcccgcgccgaaggcgtagccaagctggcggacggcgtcggcatgctggtggagcaggcggcggaagcttttgcctggtggcgcggcgttcgaccgagcacggctcaggtcatcgccgaactgactgtccccttgagctga

SEQ ID NO: 22576 - protein, 275 aa, Bradyrhizobium japonicum
MSDRYAVIGNPIGFSKSPLIHGTFAKMTGQDLVYEAIEAPLDGFNARVDQFRREGAKGLNITAPFKLDAFAYANELSESADRAGAANCLKFDGDRIIAENFDGIGLVRDITVNLGVKMAGRRVLMLGAGGAARGALLPFLRQEPSELVLVNRTLSKAVALAEEFAGCGPLIVSGYTELADLAEGYDVVINATSASLRGEMPPLPGNVFRGAELAYELAYGKGLTPFLQAARAEGVAKLADGVGMLVEQAAEAFAWWRGVRPSTAQVIAELTVPLS

SEQ ID NO: 22577 - DNA, 855 bp, Bradyrhizobium japonicum
  CDS (1)..(855)
atgcatcccaaatccagctttctcgtcggtctgatcggcagcggcatcgctgcgtctcgcaccccgcccatgcatgaagcggctgctgacgccgcgggcatccgctatctctacaagaagatcgatctgaccgagttgaagcttggtgccgaagcgctgccggacttgctcacggctgcaaggcggatgggcttcgacgggctgaacgtgacccatccctgcaagcaggcgattcttccgctcctggacgagctttcgcccgacgcggaggcgcttggcgccgtgaacaccgtggtcatcaggaacggtcgaatgaccggccacaacaccgactggttcggcttcgccgagaactttcgtcgcaacatgcaaggtgcaccactcggtcgggtcgttcaattcggcgccggcggagcgggcgccgcggtcgctttcgcgctgatgaagctcggcctgcaggaactgaccattatcgacgtcgacttggccaaggcacagagtttggtggatagcttgtccccccgatttgccgaagggcgcttaagggccggccgggatatcgctgcggacgtggctgccgcagacgggattgtaaatgcgacgccgatcggcatggacaaatatccaggcacgccgctgtcgacggctctgctgcgtcccgatctgtgggtcgccgagatcgtctacttcccgctggaaaccgccctgctgcgcgcggcgcgtgccctcggctgccgcaccgtcgatggtggtggcatggcgatcttccagggcaccgaagcattccgcctattcacgggcatctcacctgatccagacgtcttcttcgccacttttgcatccctgggagggtga

SEQ ID NO: 22578 - protein, 284 aa, Bradyrhizobium japonicum
MHPKSSFLVGLIGSGIAASRTPPMHEAAADAAGIRYLYKKIDLTELKLGAEALPDLLTAARRMGFDGLNVTHPCKQAILPLLDELSPDAEALGAVNTVVIRNGRMTGHNTDWFGFAENFRRNMQGAPLGRVVQFGAGGAGAAVAFALMKLGLQELTIIDVDLAKAQSLVDSLSPRFAEGRLRAGRDIAADVAAADGIVNATPIGMDKYPGTPLSTALLRPDLWVAEIVYFPLETALLRAARALGCRTVDGGGMAIFQGTEAFRLFTGISPDPDVFFATFASLGG

SEQ ID NO: 22579 - DNA, 804 bp, Bradyrhizobium japonicum
  CDS (1)..(804)
atgatcccggccccgtcaggcgccacgcggctccacgtcatcgtcggtgatcccatcgcgcaggtgcgctcgcccgcgggcgtgtcagccgccttcgccgcacgggggcacgacggtattctcgtgcccgttcaggtcgccccgggggatttgcccgacttcctctcggtggcggcgcgattgaaaaatctcgacggcatcgtcgttaccatcccgcacaaatttgcctgctaccaggcctgcacgagtgcgaccgatcgggcgcacttcctgcgcaccgtgaacctgatgcgccggcgcgccgacggctcatggcatggcgatatggtggatggcctcggcttcgtcggcgcagcgcgggcaaaggggatcgatcccggcggcatgcgcgcccttctggtcggcgccggcggcgccggctcggcgatcgcgctcgcgctggtcgaggccggcgtcggtgagctcgccattcacgacagcatggccgagcgccgcgacgcgctgatcggccggctcaatgggctcggcaaagcgccggtgcggaccggcaccatggaccccgccggcttcgacttcgtcgccaatgcgacgcccgccgggatgaaggacggcgacccgctgccggtcgacgtcgcgcgccttgcgccagccgcctattgcggctgcgtcatcaccaggccccaagtctcccccttcatcgccgcggctcgcaagatcggctgtgtcaccgggaccggtaccgacatgtaccagcagcaccagagcatcatggtggatttcctgctgggagcggaggctgggtga

SEQ ID NO: 22580 - protein, 267 aa, Bradyrhizobium japonicum
MIPAPSGATRLHVIVGDPIAQVRSPAGVSAAFAARGHDGILVPVQVAPGDLPDFLSVAARLKNLDGIVVTIPHKFACYQACTSATDRAHFLRTVNLMRRRADGSWHGDMVDGLGFVGAARAKGIDPGGMRALLVGAGGAGSAIALALVEAGVGELAIHDSMAERRDALIGRLNGLGKAPVRTGTMDPAGFDFVANATPAGMKDGDPLPVDVARLAPAAYCGCVITRPQVSPFIAAARKIGCVTGTGTDMYQQHQSIMVDFLLGAEAG

SEQ ID NO: 22581 - DNA, 810 bp, Bradyrhizobium japonicum
  CDS (1)..(810)
atgatcaacctcaacctgaccggcgccacgcgcctcaacatcatcgtcggcgaccccatcgcccaggtgaaatcgccggccggcgtcacgcaggccttcatcgaccgcggctatgacggcatcctggtgccggtgcagatcaacggcgcccgtctcaagacgttcctggcggccgcgaccgatgtccgcaatctcgacggcatcatcgtcacggtcccgcacaaatttgcctgctacgaattctgcgcaacctcgaccgaccgcgcccgtctactcggctcggtcaatatcatgcgccgacgccgcgaaggcggctggcatggcgaccacgtcgacgggctcggctttgtcggagctgtacgcgccaacggctacgacccgaccggtaagtgcgcgctgctggtcggcgcgggtggcgccggatcggcgatcgccatggcgctggtcgaagccggcgttcgctcgctggccattcacgacaatgaagctgcccgccgggaccagctgatcgcgaagctggccacactcggcaaggctgggatcgggccaggctcggccgatccgtccggcttcgaactcgtcgccaacgcaacgccgctcggcatgaaggccggagacccgcttccgctcgacgcatcgaagctcaaagccagcacgttcgtcggctgcgtcatcaccagcccggcggtctcgccgctcgtcgaggcggcgcggcgcctcggctgcaagacgtcgacgggcactgaaatgtacaacgcactgcagagctcgatggtcgacttcctgctcgcgcacgacggatcgaggtga

SEQ ID NO: 22582 - protein, 269 aa, Bradyrhizobium japonicum
MINLNLTGATRLNIIVGDPIAQVKSPAGVTQAFIDRGYDGILVPVQINGARLKTFLAAATDVRNLDGIIVTVPHKFACYEFCATSTDRARLLGSVNIMRRRREGGWHGDHVDGLGFVGAVRANGYDPTGKCALLVGAGGAGSAIAMALVEAGVRSLAIHDNEAARRDQLIAKLATLGKAGIGPGSADPSGFELVANATPLGMKAGDPLPLDASKLKASTFVGCVITSPAVSPLVEAARRLGCKTSTGTEMYNALQSSMVDFLLAHDGSR

SEQ ID NO: 22583 - DNA, 789 bp, Bradyrhizobium japonicum
  CDS (1)..(789)
atggagatcaccggcaagaccaagatcatgttcgtgctggcgcacccggtcgaccatgttcgcgcaagcgctgtcttgaacacctattttcagtccatcgacgacgacgtggcggtatcgccgcttcatgtgctgccggccgatctgggggcagttctcgcgagcgtcaggctgatgcgcaatgtcgtcggctttggtgtcacgatcccgcacaagacaggcgtgatcgaacatctggatgagacgacgccaacggcggcgctcatcggcgccgtcaatttcgtcaagcgaacggctgacggacgcctcatcggcgacaatctggacgcgcggggttttgtcgccagccttgcgcagcatcagattgcggttcgtggccggaaagtgctccaggtcggagcaggcggtgcggggcgcgcaaccgcattcggcctggccgaggccggcgcacgcgagctgaccatcatgaatcgggatggagcgaaggcgcatgcgctcgccgaggcggtgtcacggcgctatccggagacgaaggtcaatgccgggcgcgctgaggcacgcgcgttcgacctcatcgtcaatacgacgtcgctcggcatgaagacggatgaccctctgccgctcgatatcgagggagtgggtcccgcgaccgccgtcagcgacatcatcgtcacccccgaggtgacccggcttctggaacaggccgcagctcagggcgcgagaaccatcggcggcaagccgatgctcgacgcgcaaatggcccttgtcgcgcgctttattgcgcgatag

SEQ ID NO: 22584 - protein, 262 aa, Bradyrhizobium japonicum
MEITGKTKIMFVLAHPVDHVRASAVLNTYFQSIDDDVAVSPLHVLPADLGAVLASVRLMRNVVGFGVTIPHKTGVIEHLDETTPTAALIGAVNFVKRTADGRLIGDNLDARGFVASLAQHQIAVRGRKVLQVGAGGAGRATAFGLAEAGARELTIMNRDGAKAHALAEAVSRRYPETKVNAGRAEARAFDLIVNTTSLGMKTDDPLPLDIEGVGPATAVSDIIVTPEVTRLLEQAAAQGARTIGGKPMLDAQMALVARFIAR

SEQ ID NO: 22585 - DNA, 840 bp, Bradyrhizobium japonicum
  CDS (1)..(840)
atgtcgcaggacggatttggactggcgggtgtcatgggcatgccggtcgcgcattcgcgctcgcccatcattcataattattggctgaaggcgcacggcatccgcggcagctatgtcccgctggcggtgaagccggagcggctggaggatgcgcttgacgggctgattgcgctcgggttccgcggctgcaatgtcaccatgccgcacaagcagacggcgatgccgctgctgacccgcgtcaacgagaccgcgaagcgcatcggcgccgtcaacaccatcgtcgtcgaggcggacggcacgctctccggcttcaacaatgacggcaacggttttgtgcagagcctgcgcgacgccaaggctgactggcgcggcgatgccgggccgatcctgctgctcggggcaggcggcgcctcgcgcgccgtggtggtggcgctgctcgaaaatggcgcgcgcgagatccgcatcgccaaccgcacggccgagaaggcgcaggcgctcgccagggatttcggctccgccgtcagcaccattgcgtgggacgaccgcggcgctgcgctcggcgatgtcgccctgctcgtcaactgcaccgatcgcggcatggtcggcaaggccgcgctggagatcgacctgtcgcgcctgcggccggaaacgctcaccgccgatctcatctacacgccgctggaaacgccgttcctcgccgaagcccgcgcgcgcggctgcgtcacggtcaacgggctgggcctgctgctgaaccaggctaggctcgccttcaaggcttggttcggtgtcatgcccgacgtgacgccagagctgatcaaggccatcgaagcgacgttctga

SEQ ID NO: 22586 - protein, 279 aa, Bradyrhizobium japonicum
MSQDGFGLAGVMGMPVAHSRSPIIHNYWLKAHGIRGSYVPLAVKPERLEDALDGLIALGFRGCNVTMPHKQTAMPLLTRVNETAKRIGAVNTIVVEADGTLSGFNNDGNGFVQSLRDAKADWRGDAGPILLLGAGGASRAVVVALLENGAREIRIANRTAEKAQALARDFGSAVSTIAWDDRGAALGDVALLVNCTDRGMVGKAALEIDLSRLRPETLTADLIYTPLETPFLAEARARGCVTVNGLGLLLNQARLAFKAWFGVMPDVTPELIKAIEATF

SEQ ID NO: 22587 - DNA, 879 bp, Bradyrhizobium japonicum
  CDS (1)..(879)
atgtcgaagcgcggatacgccgccagcaagaaactcctcaccggcctgatcggcgcgccgatcgcgcattccgcttcccccgccatgcatgagcgcgccgccgaggcgctcggcctgcgcggtcactaccagctgatcgaggtcgcaggcgccgacgcggccggactgaggctgatgctcgaaggcgtgcggcggctcggctttgccggcgtcaacgtgacctatccttacaaggaagcggtggtcccactgctcgacgcactggcgccgggcgccgccgcgatgggcgcggtcaacaccgtcgttgtcagggacggccgcctgaccggccacaacaccgacaccaccggctttgcgcgcgcggtggcgccgctgctggcgccgtctggaaatgcggttgccgtgatcggcacgggcggcgtcggcaaggcgatcgccttcgcactggcgagccttgaggtcgccgacctccgcatcttcgactccgaaccggcgcgggccgaaaaacttgccgcactgcttgccaagcatggcggcgccagggtcgcgaaaagcgtcgaggacgcgctcgacggcgcgaccggcctcgtcaacggcacgccggtcggcatgctgccgaaccgcggcatgcctgttccggctgcgctgctgcacgagaagctctgggtggccgacgccgtctattcgccgctgatcacgccgctgctggccgcggcgcaggagcgcggcgcgaagatcatgaccgggcgggagcttgcgatctaccaggccgccgacgctttcgaactgttcaccggccttgccccatcgaccgaagtcatgggagaggcttttgacgaggtgatggcggcacgaagctcagcctatcacgcagcgtaa

SEQ ID NO: 22588 - protein, 292 aa, Bradyrhizobium japonicum
MSKRGYAASKKLLTGLIGAPIAHSASPAMHERAAEALGLRGHYQLIEVAGADAAGLRLMLEGVRRLGFAGVNVTYPYKEAVVPLLDALAPGAAAMGAVNTVVVRDGRLTGHNTDTTGFARAVAPLLAPSGNAVAVIGTGGVGKAIAFALASLEVADLRIFDSEPARAEKLAALLAKHGGARVAKSVEDALDGATGLVNGTPVGMLPNRGMPVPAALLHEKLWVADAVYSPLITPLLAAAQERGAKIMTGRELAIYQAADAFELFTGLAPSTEVMGEAFDEVMAARSSAYHAA

SEQ ID NO: 22589 - DNA, 747 bp, Bacteroides thetaiotaomicron
  CDS (1)..(747)
atggaaaaatacggtttaatcggctaccccttgcgacattcgttttcaatcggctactttaacgaaaagtttaggtccgaaggcatcaatgcggaatatgtgaatttcgagattcccaatatcaatgattttatggaagttattgaagagaatcccaacttgtgcgggctcaatgtcaccatcccctacaaagagcaagtgattccttttctgaacgaactcgatcgggatacagctaaaattggcgctgtaaacgtcattaagattatccgccaaccgaaaggaaaagtaaaactggtcggctacaattccgacatcatcggttttacacaatctattcagccgctgctacaacctcagcacaaaaaagcactgatcctcggcaccggaggtgcttccaaagctgtttatcacggactcaagaatctgggtatcgaaagcgtgtttgtatcgcggacacacaagaccgacgatatgctgacttacgaagaactgactccggaaatcatggaggaatacaccgtaatcgtcaactgtactccggtaggaatgtaccccaaagtagatttctgccccaacattccttacgaactgctcactccaaaccatttgctttacgatttgttatataatccgaacgtcactcttttcatgaaaaagggagaagcacaaggtgctgttacgaaaaacggtttggaaatgctacttttacaggcatttgccgcttgggaaatatggcaccgataa

SEQ ID NO: 22590 - protein, 248 aa, Bacteroides thetaiotaomicron
MEKYGLIGYPLRHSFSIGYFNEKFRSEGINAEYVNFEIPNINDFMEVIEENPNLCGLNVTIPYKEQVIPFLNELDRDTAKIGAVNVIKIIRQPKGKVKLVGYNSDIIGFTQSIQPLLQPQHKKALILGTGGASKAVYHGLKNLGIESVFVSRTHKTDDMLTYEELTPEIMEEYTVIVNCTPVGMYPKVDFCPNIPYELLTPNHLLYDLLYNPNVTLFMKKGEAQGAVTKNGLEMLLLQAFAAWEIWHR

SEQ ID NO: 22591 - DNA, 870 bp, Streptococcus mutans
  CDS (1)..(870)
atgcaaattgatggttatacacgtttagcagctgttgtcgcgacaccaattaaacattctatctcaccttttattcacaactacgcttttgaaaaaactggtatcaatggtgtttatgttgcttgggatattccagagtcagaactgcaagtaactttaaaaaatatcatgcgttatgatatgtttggcattaacatctccatgccttacaagcaggcagttattccttatcttgatgaagtaacgaaagcagcagatttaattggggctgttaatactattgttaatcgtgatggcagattgatcggttacaatacagatggttttggtttctttaagagtttgggaacctttgcagatttcgatgttgcagataaggttataaccatacttggtggcggaggagctgcaactgccattattgcacaagcagctatcaatggtgctaagaaaattaatatttttaatcaaacagcctttcttgaagaaacaaaagaaaaagctaaacaaatatcaagtaaaacaggcgctgctattgaagtgtttcctgttgaggacttaaacatgattcaaaaaaaggtattagtatctgatttatttgttaatgcgaccaatgttggtatggatggcaaatcaatgattattaatgatagttttgaatttccaccaaaccttatggttgcagatgtcatttatcaaccttttgaaacaccatttttacgcttagtacgcagtcgtgggttaaaggctgtgaatggtttgggcatgcttctttttcaggcggctgcagcttttgaactttggactggtaaagaaatgccgagtcaggaaatctggcaggctctagaaaaaaaatacaagtctaaataa

SEQ ID NO: 22592 - protein, 289 aa, Streptococcus mutans
MQIDGYTRLAAVVATPIKHSISPFIHNYAFEKTGINGVYVAWDIPESELQVTLKNIMRYDMFGINISMPYKQAVIPYLDEVTKAADLIGAVNTIVNRDGRLIGYNTDGFGFFKSLGTFADFDVADKVITILGGGGAATAIIAQAAINGAKKINIFNQTAFLEETKEKAKQISSKTGAAIEVFPVEDLNMIQKKVLVSDLFVNATNVGMDGKSMIINDSFEFPPNLMVADVIYQPFETPFLRLVRSRGLKAVNGLGMLLFQAAAAFELWTGKEMPSQEIWQALEKKYKSK

SEQ ID NO: 22593 - DNA, 879 bp, Streptococcus agalactiae
  CDS (1)..(879)
atgaattcattaaatggggaaactttactaactggtctaattgccaatcctgcacgccactctctatccccgttaatgtggaatacctcttttcaagaaaaaaacatgaattatgcctatctgacatttgaagtagaagagggtaaattaacagaagctgttcgaggtgtcagggcattgggtattcgtggtgttaatgtttcaatgccatttaaacagagtgttatccctttgctagatgatttatctcctcaagctaaattagtgggtgctgtaaatactatcgttaatcaaggtggaaccggacgtttagtaggccatatgacagatggcattggttgttttaaagctttagcagctcaaggtttcagtgctaaaaataaaataattacaatagctggtattggtggttcaggtaaagcagttgcagttcaagcagctatggagggagttgcggaaattagattatttaatcgtaacagctcaaattacgataaggtcattgacttatcagataaaattaaaaaacagtttcaaataaaggtagtcgttgattatctagaaaataagacagcatttaaagacgctattagaactagtcatttttatattgatgctactagtttaggaatgaggccattagataattatagtttaattaacgatccagaaattttaacaccgaatttagtagttgtcgacttggtttacaagcctaaagaaacagcattgttacgatttgttagacaaaatggagtgaaacatgcttataatggtctagggatgctgatttatcaaggagcagaagcatttcaattaataacgaatcaagaaatgcctattagcagtgttgagagagtattacaaactgaaaattaa

SEQ ID NO: 22594 - protein, 292 aa, Streptococcus agalactiae
MNSLNGETLLTGLIANPARHSLSPLMWNTSFQEKNMNYAYLTFEVEEGKLTEAVRGVRALGIRGVNVSMPFKQSVIPLLDDLSPQAKLVGAVNTIVNQGGTGRLVGHMTDGIGCFKALAAQGFSAKNKIITIAGIGGSGKAVAVQAAMEGVAEIRLFNRNSSNYDKVIDLSDKIKKQFQIKVVVDYLENKTAFKDAIRTSHFYIDATSLGMRPLDNYSLINDPEILTPNLVVVDLVYKPKETALLRFVRQNGVKHAYNGLGMLIYQGAEAFQLITNQEMPISSVERVLQTEN

SEQ ID NO: 22595 - DNA, 864 bp, Shewanella oneidensis
  CDS (1)..(864)
atgacagttacatccccaatagttgatcgctatgccgtatttggtcatccaatcggccacagtaaatccccctttattcatggccagtttgcggccttaacacaggaatctttgacctatgaagcgattctggcgcctattgatggttttgaagctagcttaaaaagctttttcagtagcggaggtaaaggtgccaatgtgacagttccctttaaagaacaagcttttgctctatgtgatagtttaagtgctgaggctgcactagcaggtgctgttaataccttaagcctgttggctgatggttcgatccgtggcgataacaccgatggtttagggttagttgccgaccttataagtcacctgggcagtttgcagcataagcgagtcttattagttggtgcaggcggcgcggcgcgtggatgtatcttgcctctgctcaacgccggagttggccagttggttatcacaaatcgcacccaaactaaggctaaggatttagtggatatttttagccaattagaagaggggatttacaaagataaacttcaagctttatctatgtctgagcttacgggggagtttgaattagtgatcaactcaacctcggccagtcttgcaggtgaattaccacccttgccccaatcaattatcggtagcactaccgtttgctacgatatgatgtatggcgcaatgcctacggcatttaaccaatgggcattacagcagggggctgctaaggtgattgatgggcttggaatgcttgtcggccaagcagctaagagctttgcgctctggcgcactgtcgagcctgacaccgctgtcgtgcttaaactgctcagggaaaaactacagttggacatctaa

SEQ ID NO: 22596 - protein, 287 aa, Shewanella oneidensis
MTVTSPIVDRYAVFGHPIGHSKSPFIHGQFAALTQESLTYEAILAPIDGFEASLKSFFSSGGKGANVTVPFKEQAFALCDSLSAEAALAGAVNTLSLLADGSIRGDNTDGLGLVADLISHLGSLQHKRVLLVGAGGAARGCILPLLNAGVGQLVITNRTQTKAKDLVDIFSQLEEGIYKDKLQALSMSELTGEFELVINSTSASLAGELPPLPQSIIGSTTVCYDMMYGAMPTAFNQWALQQGAAKVIDGLGMLVGQAAKSFALWRTVEPDTAVVLKLLREKLQLDI

SEQ ID NO: 22597 - DNA, 831 bp, Oceanobacillus iheyensis
  CDS (1)..(831)
atgacgttatctttaaaattgattggttatccaatagaacattcaatgtcaccatggattcataatgaatttctaaaacgttcaaatcttgaaggtacgtatgaactttttgaaataagcccggaagaaagctttgaagataatgtaacaacactcaaaaaatctgtcttgacgggttttaatgttacggtaccttataaacaaaagattatgcaattcttagatgaagttgatgatacagcaaatttaatgggggcagtaaatacggtatctattagagacgggaaatggattggatataatacagatggtataggttatttacgatctttatatgcagcatatcctttcttaaagggagtaacgaataagcgtgtattaatccttggagctggtggagcggcgcgtggtattttccatgccctagtaaatgaaggctataataatattaaaattgctaaccggactttaagccgagctgaatcaataattggaacaaataaacaagctttagcaatcagtttggaagaagctgcagaagagttacatcaatttgatttagttattcaaacgtctgccgttggaatgaatgaaccacgctcgattattatattagacaggattaatgaagatacggttgttagtgatatcgtatatcaaccgttagaaacccattttctgcaattagcaaaacaacgcactccctatattcaccatggacacactatgttgttatatcaagcacaagcagcttttgaaatatggacaggaacaaatgtcaatgtatccggaatggatatgcaaatcgaacaaatattgaaaggaagataa

SEQ ID NO: 22598 - protein, 276 aa, Oceanobacillus iheyensis
MTLSLKLIGYPIEHSMSPWIHNEFLKRSNLEGTYELFEISPEESFEDNVTTLKKSVLTGFNVTVPYKQKIMQFLDEVDDTANLMGAVNTVSIRDGKWIGYNTDGIGYLRSLYAAYPFLKGVTNKRVLILGAGGAARGIFHALVNEGYNNIKIANRTLSRAESIIGTNKQALAISLEEAAEELHQFDLVIQTSAVGMNEPRSIIILDRINEDTVVSDIVYQPLETHFLQLAKQRTPYIHHGHTMLLYQAQAAFEIWTGTNVNVSGMDMQIEQILKGR

SEQ ID NO: 22599 - DNA, 810 bp, Corynebacterium efficiens
  CDS (1)..(810)
atggtcaaccacgtcgacagggacaccaccctgtgtatttctcttgctgcacgtccgtccaaccacggggtccgcttccacaactggctctatgctgagctgggcctgaatttcctctacaaggccatcgccccggcggatatcaccgcggcggtggccggtatccgcgggttgaacatccggggtgcgggggtgtccatgccgtacaagggtgatgtgatcccgctgatcgatgcgcttgatccgagtgcggagcggatccggtcggtcaacaccattgtcaatgatgacggtcacctgaccggctacaacaccgattacaccgcggtgctcaacctgctcagggcccaccaggtcaacccggatctgcatgtggccctgcgtggttccggcgggatggccaacgccgtcatcgccgccctgaccgatcacgggatgcgcggcaccgtggtggcgcgcaatcacaccaccggtgcggccctggcccagcggtacggctgggagtactccgcgcaggtcccggagcacgcccaggttctggtcaatgtgaccccattgggaatgaatggacccgacgaggatgttgtagctttcgacagggatgagatcgaccgcgctgaggtcatcttcgactgtgtcgccttccccgtggagacccccctcatcaggctcgcgaggtcccagggtaagaagacgatcgacggtggagaggttgccgccctgcaggcagccgagcagttccacctgtacacgggcgtccgccccaccgatgagcagatcatcgccgctgaggagtacgcagcaccttaa

SEQ ID NO: 22600 - protein, 269 aa, Corynebacterium efficiens
MVNHVDRDTTLCISLAARPSNHGVRFHNWLYAELGLNFLYKAIAPADITAAVAGIRGLNIRGAGVSMPYKGDVIPLIDALDPSAERIRSVNTIVNDDGHLTGYNTDYTAVLNLLRAHQVNPDLHVALRGSGGMANAVIAALTDHGMRGTVVARNHTTGAALAQRYGWEYSAQVPEHAQVLVNVTPLGMNGPDEDVVAFDRDEIDRAEVIFDCVAFPVETPLIRLARSQGKKTIDGGEVAALQAAEQFHLYTGVRPTDEQIIAAEEYAAP

SEQ ID NO: 22601 - DNA, 855 bp, Corynebacterium efficiens
  CDS (1)..(855)
atgaaccacgacagtattctcctcggactgatcggcgaggacatctccctctcccgtaccccggccatgcacgaggcggagggcctcgcccagggcgcggcgaccgtctaccgacgcatcgacaccctcaccgaccgtgcccggggtcgctccctccaggagcttctcgacgccgcccgctccaccggtttcaacggcctcaacatcacccacccctacaagcaggcggtcctgccgctgctggatgaggtctccgagcaggccgcccagctgggtgcggtcaacaccgtcgtcatcggtgaggacggtcgcacgagcgggcacaacaccgatgtcaccgggttcgcccgcggactggaggagggcctgcccgacgccaccatgaccaccgtggtgcaggtcggcgccggcggcgtgggtaatgccgtggcctactccctggtcacccacggggtggaacagctgcaggtggcggacctggatccggcccgtgcgcaggcgctcgccgacgccatcaactctgccatcggtcgcgaggccgtccacggcatcgacgcccgtggtgtggaggaggccatcgccgccgcggacggcgtggtcaacgccaccccgatgggcatgctcgcccacccgggcaccgccttcgacacctcgtgcctgaccccacaccactgggtgggggatgtcgtgtacatgcccattgagactcagctgctcaaggacgcccgtgcgctgggttgccgcaccctggatggcacccgcatggcgatccaccaggcggtggatgccttccgcctgttcaccgggctggagcccgatgtggagcggatgcgcgcaacgttcctgtccctctag

SEQ ID NO: 22602 - protein, 284 aa, Corynebacterium efficiens
MNHDSILLGLIGEDISLSRTPAMHEAEGLAQGAATVYRRIDTLTDRARGRSLQELLDAARSTGFNGLNITHPYKQAVLPLLDEVSEQAAQLGAVNTVVIGEDGRTSGHNTDVTGFARGLEEGLPDATMTTVVQVGAGGVGNAVAYSLVTHGVEQLQVADLDPARAQALADAINSAIGREAVHGIDARGVEEAIAAADGVVNATPMGMLAHPGTAFDTSCLTPHHWVGDVVYMPIETQLLKDARALGCRTLDGTRMAIHQAVDAFRLFTGLEPDVERMRATFLSL

SEQ ID NO: 22603 - DNA, 831 bp, Corynebacterium efficiens
  CDS (1)..(831)
atgactgacaaacccacccaccgcgcggctgtactcggccaaccgatcggccattcacgctcgccggtgctccacaacgcgggttatgccgccctcggactggatgactgggcctatgatcgtttcgactgtgacgcggatgccctgcccggactggtaggtggtgcagatctgtcctaccgtggattctcggtaaccatgccggccaagttcgccgccctcgccttcgccgatgaggccaccgaacgagcccgtcgcatcggttccgccaacacgctggtgcgcaccgccaccgggtggcgtgccgacaacaccgatgtggacggcatccggggcgcgctggtcgaattgctcggcggtggggaactcgtcgacaagcgtgccgttgtggtcggtggtggcgggaccgcccggccggccatctgggcgctgctcgaagcgggcgtttcccacatcaccgtgatcaaccgcagcgaccgcaccggggagctgagcgagcttgtcgacgccttccccgccaccttgtcctacctcccgctggaggggggtgtggaggccgagaccacggccgcggcggtggtcatctccaccgtcccatcggcggccatcgaggggctggaggggaaactggcccacgcgccagtgctggatgtgatctatgatccctggccgaccccgttggtgactgtggcccggtcccggaacatccccgcagtgggcgggcatgtcatgctggcgcaccaggcctatggccagttcgagcagttcaccgggcaccccgccccgcgtgacgccatgcgcgcggccctggaggcctcactgggtatgtga

SEQ ID NO: 22604 - protein, 276 aa, Corynebacterium efficiens
MTDKPTHRAAVLGQPIGHSRSPVLHNAGYAALGLDDWAYDRFDCDADALPGLVGGADLSYRGFSVTMPAKFAALAFADEATERARRIGSANTLVRTATGWRADNTDVDGIRGALVELLGGGELVDKRAVVVGGGGTARPAIWALLEAGVSHITVINRSDRTGELSELVDAFPATLSYLPLEGGVEAETTAAAVVISTVPSAAIEGLEGKLAHAPVLDVIYDPWPTPLVTVARSRNIPAVGGHVMLAHQAYGQFEQFTGHPAPRDAMRAALEASLGM

SEQ ID NO: 22605 - DNA, 4857 bp, Thanatephorus cucumeris
  CDS (1)..(4857)
atggccactgccagcgtcgaacaacccgatcttaccaaggtttctatcctcggcaaggattccattcactgcggcttccacttgagcccgtacattgccgatacagtcctcactaatctccctgcatctacttatgttcttattaccgacacgcgcgttgccaagttccatctcgagtcgttcgaggccgcatttaccgacgctttggcggctaggcccaatacctctgctcgcttcttgacccatgtgattccccctggcgagaccagcaaaagccgcgagggcaaggccgaaatcgaagactttttgctcgacaactcgtgcacgcgtgatacggtcgttcttgccctgggtggtggagttatcggagacctcgttgggtttgtggccgcgaccttcatgcgtggtgtgcgctttgttcagatcccaacgactctattggccatggtcgactcgtcggttgggggcaagactgcgattgatacgcctcatggcaagaacctgatcggaagcttctggcagccatcctatgtgttcatcgacgccgcattcctcgagacacttccccagcgcgagtttgtaaacggtatggccgaagtgattaaaacggccgcgatctggaacgaagacgagttttcgatgctcgaggcttcggcgcctgcgctatttgccgccattggatcctcctcgtccacgacctctgcgggccgcactaccgccacccggtcagaggcccagtctcttctgttgcacgtgattaccgagagcattggagtcaaggcacacattgtgaccctcgacgaacgcgaaacgggtctgcgcaatctggtcaactttggacacactatcggtcatgcgatcgaggccgtgctcaccccgactattctccacggcgaatgtgttgccattggcatggttctcgaaggcgaagttgcccgacaactcggcgtactcagccaagtcggtgttggccgtattacccgtgccctcaaggcatacgggcttcctacatcgaccaaggacccgcggatcgccgctgtgccagcatcgcgtctcttgaccatcgataggttgcttgacattatgaagatcgacaagaagaactctggccccgaaaagaagattgtgctcctttcgcgaattggcaagacctatgaggagcgtgctacgggcgtcaaggatgaagtcattcgccgtgtgttggccgaagcttgccgtgtaatcccaggaatccctcggggcaaccctgttcgcatgagcacccccggcagcaagagcatctccaaccgtgcgctcgtactagccgctctcggcaatggcacctgtcgtcttcgaaatcttctccacagtgacgacactcaagtgatgatgagtgccctgattgaactcaagggtgccaaatttgcttgggaagatggtggtgaaacactcgtggttagtggtggcggaggtgcctttacaatccctcccgccggaaaggaactctatcttgggaacgctgggacggctgctcgcttcctcaccactgtctgcacgctcgtcggtcccgactcgtcatcggcaactgcttcttccgagttccccgaaggttacacgttcatcaccggcaatgctcgcatgaagcagcgcccgtgcggtccccttgtcgatgctctccgcgccaacggaagcaaggtcaagtatatcgagagcgagggctgcttgccgctgcacattggtgctggcggtctcaagggcggcacaattcagctcgcggccagtgtctccagccaatacgtatcgagtattcttctatgcgctccgtatgcccgggatgaagacgtcgtactcgagctcgtgggcggccaagtcatcagccagccgtacattgacatgaccctcgcgatgatgaagacctttggtgttgaagttacccgccgcaaggccgaggacggtacccttcttgatatctacgacattccacgcgcccaatataccaaccccgaaaagtatgccatcgagagtgacgcgagcagcgccacctaccctcttgccgtcgctgctatcaccggaactacttgcactattgaaaacatcggtacctcttcgctgcaaggtgatgccgggttcgcggtcaacgtcctcaagcgcatgggctgcaaggtcgagcaaagcgagaacgagacgactgtgaccggccctcccatcggccagctcaaggcgatcggattggtcgatatggaaaccatgaccgacgcattcttgactgcagtcgttgtagccgcagtttgcggagaaggaagtgcagaaggtctcgaatccgacgtgcccaagaataccactcgcattttgggtattgccaaccaacgtgtcaaggaatgcaaccgtattcgtgccatgatcgacgagctcgccaagtttggtgtcaagaccaaggaattggacgacggtctggaagtctacggtcagccgatcgagaccttgaacaagaacgtgtcggtgcactgctacgacgatcaccgcgtggcgatggcgttctccgttctggccactgtcgttcccggtactattctggaagagaagcgttgcgtcgaaaagacctggccaaactggtgggacgacctgaccaacaagattggtattgatgtcgaaggtatcgagctcgctcaccaaagcccagcggtcgccaagtacaacccagaggccacgatcattatcgttggtatgcgcggagctggcaagactcacattggaggcattgccgccgcgtctcttggatggaagtttatcgatgcagatcatgtgtttgaaggccgcacgggcgagctcgtctcgcagtacgtacgcagcaagggttggactgcgttccgccaagccgaatctcaaatcatccaagaccttttggctgaaaaccccacacgcacgatcatttcaactggaggcgggatcgtcgagtcgccactcaaccgcgcgctcttgtccggttacggtcgtgccacaggccctgtcgtgtacgtgatgcgagacgtgaacgaaattctaagctacctcggctcggagacggcgcgtcctgcttatggcgaagagatcgcagatgtctattggcgtcgcgaaccctggttccgagaagtctccacccacgagtatatatcttataccggaggattccatgccgcgaatggagcgactccgggcgaaatcgcttcggcatgccgcgacgagactgcacgattcttccgccagattaccggtatcaagcctaacctctccgaggcactcgcgcaaggcgaacgatcctttttcctgtcactcacctatcccgaccttctccctgccgtcccttcgatcccgctcctcactgccggcgccgatgccatcgaacttcgcgttgatttgctcaaccctagcggtgatccggttaccggtccccccaacattccctctttggactttgttgccacccagttgtcggctttgcgccacacctcgtctctccccgtcgtctttaccgtccgcactgcgtcccagggcggcgcctttcctgacacagctgaaaaggaagcattcgcgttgtacaaccttgcgctcaggcacggtgtcgagtacattgatgtcgaaatctcatggagcgacaagaagattcaggacctcgctgcgcgcaagggcgcttctcagatcatcgcatcgtggcacgactggagcggaaacatgaagtggaacggagccgtcgtcaaggaaaagtatgctttggccgagcgagtaggagacattgtcaagatcgtcggcaaagcgctctcgatcgaggacaactttgcgctccgggcatttgcggccgctcacacctccaagccgtttattggtatcaacatgggcgccgaaggccagctctcgcgtgtgcttaatactgcgtttactcccgtttcgcacccgcttttgccgactcgcgctgccccgggccagatgtctgtgcaagatattcacacggcattgcacctcaatggccaacttgcgcctcaaaagttctacctgttcggctcaccgatcgctcattcgatgtcgccccatctccacaacacagggttcgagaagctcggcttgccccacaagtatcatatcttcgagacggcgacgatcaccgacgaggtcaaggccgtgatccgggctcctgaatttggcggcgcgagcgtgacgattcccctcaagcttgatattatcccgctcctcgacgaagtttcgcccgaagccaaggccattggcgcggtcaacaccatcatcccacgcaagcgcgccgacgggtccacgagtctgtttggtaccaacaccgattggcgggcgatccacgacttggcgcgcaacaacctggtggtcggcattaccaacgagacgaccgcgcttgttctcggtgccggcggaacggcgcgtgcggctctgtatgcgatccatgcgctcggcatcaagacgatctacttgttcaaccgtacacgggcagcggcgcaagcgcttgccgatacgttccccacctttggtattattcctctcgactcgctcaactcgttccccaaggctgctcccaccgttgtcgtctctgctattcccgcaacaggtaccacgaccgaaaaagcgagcgacagtgccggagtatacctccccccaagcctgtttgaagctccatccggtgtagtggtcgagatggcctacaagcccgcggtgacgcctgtgctcggactcgcggccaagtcttctggctgggtgggcgtacgtggggtggatattttgtgcgaacaagggttctaccagtacgaggcttggactgggcgcaaggctcctcgggcggcgatgaaagccaaggtgatttcgttgtatgatagtcagcagtga

SEQ ID NO: 22606 - protein, 1618 aa, Thanatephorus cucumeris
MATASVEQPDLTKVSILGKDSIHCGFHLSPYIADTVLTNLPASTYVLITDTRVAKFHLESFEAAFTDALAARPNTSARFLTHVIPPGETSKSREGKAEIEDFLLDNSCTRDTVVLALGGGVIGDLVGFVAATFMRGVRFVQIPTTLLAMVDSSVGGKTAIDTPHGKNLIGSFWQPSYVFIDAAFLETLPQREFVNGMAEVIKTAAIWNEDEFSMLEASAPALFAAIGSSSSTTSAGRTTATRSEAQSLLLHVITESIGVKAHIVTLDERETGLRNLVNFGHTIGHAIEAVLTPTILHGECVAIGMVLEGEVARQLGVLSQVGVGRITRALKAYGLPTSTKDPRIAAVPASRLLTIDRLLDIMKIDKKNSGPEKKIVLLSRIGKTYEERATGVKDEVIRRVLAEACRVIPGIPRGNPVRMSTPGSKSISNRALVLAALGNGTCRLRNLLHSDDTQVMMSALIELKGAKFAWEDGGETLVVSGGGGAFTIPPAGKELYLGNAGTAARFLTTVCTLVGPDSSSATASSEFPEGYTFITGNARMKQRPCGPLVDALRANGSKVKYIESEGCLPLHIGAGGLKGGTIQLAASVSSQYVSSILLCAPYARDEDVVLELVGGQVISQPYIDMTLAMMKTFGVEVTRRKAEDGTLLDIYDIPRAQYTNPEKYAIESDASSATYPLAVAAITGTTCTIENIGTSSLQGDAGFAVNVLKRMGCKVEQSENETTVTGPPIGQLKAIGLVDMETMTDAFLTAVVVAAVCGEGSAEGLESDVPKNTTRILGIANQRVKECNRIRAMIDELAKFGVKTKELDDGLEVYGQPIETLNKNVSVHCYDDHRVAMAFSVLATVVPGTILEEKRCVEKTWPNWWDDLTNKIGIDVEGIELAHQSPAVAKYNPEATIIIVGMRGAGKTHIGGIAAASLGWKFIDADHVFEGRTGELVSQYVRSKGWTAFRQAESQIIQDLLAENPTRTIISTGGGIVESPLNRALLSGYGRATGPVVYVMRDVNEILSYLGSETARPAYGEEIADVYWRREPWFREVSTHEYISYTGGFHAANGATPGEIASACRDETARFFRQITGIKPNLSEALAQGERSFFLSLTYPDLLPAVPSIPLLTAGADAIELRVDLLNPSGDPVTGPPNIPSLDFVATQLSALRHTSSLPVVFTVRTASQGGAFPDTAEKEAFALYNLALRHGVEYIDVEISWSDKKIQDLAARKGASQIIASWHDWSGNMKWNGAVVKEKYALAERVGDIVKIVGKALSIEDNFALRAFAAAHTSKPFIGINMGAEGQLSRVLNTAFTPVSHPLLPTRAAPGQMSVQDIHTALHLNGQLAPQKFYLFGSPIAHSMSPHLHNTGFEKLGLPHKYHIFETATITDEVKAVIRAPEFGGASVTIPLKLDIIPLLDEVSPEAKAIGAVNTIIPRKRADGSTSLFGTNTDWRAIHDLARNNLVVGITNETTALVLGAGGTARAALYAIHALGIKTIYLFNRTRAAAQALADTFPTFGIIPLDSLNSFPKAAPTVVVSAIPATGTTTEKASDSAGVYLPPSLFEAPSGVVVEMAYKPAVTPVLGLAAKSSGWVGVRGVDILCEQGFYQYEAWTGRKAPRAAMKAKVISLYDSQQ

SEQ ID NO: 22607 - DNA, 1494 bp, uncultured proteobacterium
  CDS (1)..(1494)
atgtatttgcataaatccgcaattacccccacagttcaatcacaggtcacacaaaacatatccacaggtttatctcacatggatctcatcctcgcgtctcaatctgccacgcgccgtcgcattttaaactctgcacgaataagcgctcagtttatgtcaccgcaaattgatgaagaaaacattacgaaatctctgattgcagaacaggccctgccccgcgacattgccgacactctagccgaacataaagcgctaaaaatatcccgaaagaatccagatagttgggtgattggatgtgatcaaatactggtttttgagggcgaaattttcggaaagcccgcctcacccgaggcgctcaaaacctctctatctcgcctttctggaaaaacgcatcgtttgattactgctaatgtcatctacaaggatagcaaacctcaatggcgacatatttcaatcagccatatgtctatgcgttttatgagtgcggctgagatagacgcctatatagaagcttattgggaggatgtgaaacattcagccgggggctatcactttgaaaaaaagccagatctttttgccgatgttcgtggcaattggtttgatattatggggctttctatcgggccaatcatcagttttttgaaccaggccaatacaaccgccccgtttcaaacccctaaacttgcggcggttttgggtcatccgatagcgcagagcaaatcgcccctgatgcatgggcactggcttaagaaacatcaaatatcaggcgattatttcgccatcgacattccccccgcgcgctttagtgaaacggtgcgtatgctgtttgacctaggcttttcaggtttcaatgttaccattccgcataaggagcaagcattggcatttgcggatgacgccacccctccggcgcaacgcattggcgcatccaacactttgataaaaaaggacaacggcaatattactgccgataatacagacggttatggatttatgaccaatctgatctctcaaagcacgacgtggcagccaagcgctggtccgtctttggtgttgggcgcaggtggcgctgcgcgggcgattttggttgctcttttggacgctggcgcccccgagatttacctttgtaatcgtacccgtgcacgggcagaagatttggctgctgagatttcagatctcattgaagtgattgagtggcaggacaaagaggatattttgccaaaggtgttcaccgtggtgaacagcacctcgcttggtatgattggaaaacctgccttagatttcgatttgacccatgtgaatccgcgcgccctggttgctgatctcatttacgcccccctcgaaacccagcttttgaagggtgcgcgggcgcgtggatgtgaggtggtgggcggtattggtatgttattgcaccaaggtgtcccagggtttgaggcatggtttggcacccggcctgtggtggatcaagagctagagacattggtgctcacatga

SEQ ID NO: 22608 - protein, 497 aa, uncultured proteobacterium
MYLHKSAITPTVQSQVTQNISTGLSHMDLILASQSATRRRILNSARISAQFMSPQIDEENITKSLIAEQALPRDIADTLAEHKALKISRKNPDSWVIGCDQILVFEGEIFGKPASPEALKTSLSRLSGKTHRLITANVIYKDSKPQWRHISISHMSMRFMSAAEIDAYIEAYWEDVKHSAGGYHFEKKPDLFADVRGNWFDIMGLSIGPIISFLNQANTTAPFQTPKLAAVLGHPIAQSKSPLMHGHWLKKHQISGDYFAIDIPPARFSETVRMLFDLGFSGFNVTIPHKEQALAFADDATPPAQRIGASNTLIKKDNGNITADNTDGYGFMTNLISQSTTWQPSAGPSLVLGAGGAARAILVALLDAGAPEIYLCNRTRARAEDLAAEISDLIEVIEWQDKEDILPKVFTVVNSTSLGMIGKPALDFDLTHVNPRALVADLIYAPLETQLLKGARARGCEVVGGIGMLLHQGVPGFEAWFGTRPVVDQELETLVLT

SEQ ID NO: 22609 - DNA, 831 bp, Corynebacterium glutamicum
  CDS (1)..(831)
atgggttctcacatcactcaccgggcggccgtactcggctcacccatcgagcattccaaatccccagtcctccacaacaccggctataaagccctcggactggaccaatgggaatacgaccgctttgagtgcaccggcgacatgctccccggcatcgtctccggcgctgatgaaacctactgcggattctccgtcaccatgccgtctaaattcgcagctcttgaattcgccgacgaagtaaccgaacgcgcctgcgccatcggctccgcaaacaccttgctgcgcacggccaccggatggcgcgccgacaacaccgacgtcgacggcatcaggggagctctcggtgaactcctcggcggcgcatcactggccggcaaacacgccatcgtcatcggctccggcggcaccgcacgccccgccatctgggcactcatcgaagccggggtcgcccggatcacggtgctcaaccgctccgatcgcaccgccgaactgcaaacgcttttcgacgaaacccccaccaccttggcctacgccccgctcgagcatctccacatcgaagccgacgtcgtagtctctacagtgccctccgcagcaatcgcaggcctcgaagacacccttgcgatcgccccagtcctcgacgtcatctacgacccctggccaacaccactcgtagaagtcacacgagccaaaggcctcaaagctgtcggaggccacgtcatgctggcacaccagtcctacggacagtttgaacaattcaccggaatggatgcaccccgcgatgccatgcgtgaggctttggaagagtctttaggcatctcagaagaacactaa

SEQ ID NO: 22610 - protein, 276 aa, Corynebacterium glutamicum
MGSHITHRAAVLGSPIEHSKSPVLHNTGYKALGLDQWEYDRFECTGDMLPGIVSGADETYCGFSVTMPSKFAALEFADEVTERACAIGSANTLLRTATGWRADNTDVDGIRGALGELLGGASLAGKHAIVIGSGGTARPAIWALIEAGVARITVLNRSDRTAELQTLFDETPTTLAYAPLEHLHIEADVVVSTVPSAAIAGLEDTLAIAPVLDVIYDPWPTPLVEVTRAKGLKAVGGHVMLAHQSYGQFEQFTGMDAPRDAMREALEESLGISEEH

SEQ ID NO: 22611 - DNA, 807 bp, Corynebacterium glutamicum
  CDS (1)..(807)
atggtcaactacgtcgacagggaaacaaccctgtgcatctctctcgctgctcgtccatccaaccatggtgttcgtttccacaactggctttacgctgaacttggattgaactacctgtacaaggctgttgccccagcagatatcaccgctgcagtcgcaggtatccgtggtctgaacattcgcggcgcaggtgtctccatgccatacaagagcgatgtcatcccactcatcgatgagttgcatccttccgcagagcgcatacgttctgttaacaccatcgtcaacaatgacggacaccttgtcggatacaacaccgactacactgcggtgtaccacctccttgaagaacaccgcgtgaaccccaatgcacgagtagctatcaagggatccggcggcatggccaatgctgttgttgcagctcttgctgagtatggtctgagtggcaccgtcgttgcccgcaaccacaccaccggttctgcgctagcttcccgttacggttgggaatactccgcaactgttccggaagacgcaaaaattttggttaatgtaaccccaatgggaatgaatggacctgaccaagacgttgtatcttttggtgaggatgaagtagaccgagccgacgtaatctttgactgcgtagcattccccgtcgagaccccactgattaagttggccaaggaaaagggtaagcaaaccatcgacggcggagaagttgccgctcttcaggcagcagagcagttccacctctacaccggagttcttccaaccaacgaccagatcattgctgcggaggagttctccaagtaa

SEQ ID NO: 22612 - protein, 268 aa, Corynebacterium glutamicum
MVNYVDRETTLCISLAARPSNHGVRFHNWLYAELGLNYLYKAVAPADITAAVAGIRGLNIRGAGVSMPYKSDVIPLIDELHPSAERIRSVNTIVNNDGHLVGYNTDYTAVYHLLEEHRVNPNARVAIKGSGGMANAVVAALAEYGLSGTVVARNHTTGSALASRYGWEYSATVPEDAKILVNVTPMGMNGPDQDVVSFGEDEVDRADVIFDCVAFPVETPLIKLAKEKGKQTIDGGEVAALQAAEQFHLYTGVLPTNDQIIAAEEFSK

SEQ ID NO: 22613 - DNA, 750 bp, Fusobacterium nucleatum
  CDS (1)..(750)
atgcataaaactttttttgaagatatagggcttaaagatgaatataagttatatgaagttgacgagactgaaatagataattttaaaaactatatgcttgagaattctattgaaggagtgaatataactgttccctacaaaaaaatctttttagataaattaaattttataagtgatgaggcaaaagatataggagctataaatcttctctatataaaagataataaattctatggagataacactgattactatggttttaaatatacactgacaaaaaatgatatagatgtaaaaaataaaaagatagctattattggtaaaggtggagcaagtgcaagtgtggataaagtattaaaagatatgggagcaaaagatataactttctattttagaagggacaagttaagtaagatagaattcccagaaaatatggaaggggatataataattaatacaactcctgttggaatgtatcctaatatacacgataaccttgtaaatgaagaaattttaaagaattttaagatagcaatagatttaatttataatcctttggaaacagaatttttaaaaattgcaagaaaaaatggattaaaaactataaatggtatggatatgttgattgaacaagctttaaagactgatgaaattctatatgatattctattgtcaactcaacttagaaagaaaattagaaaaaaaatgaaaaagaaggtagaagaattctatgaaaataatggtgattaa

SEQ ID NO: 22614 - protein, 249 aa, Fusobacterium nucleatum
MHKTFFEDIGLKDEYKLYEVDETEIDNFKNYMLENSIEGVNITVPYKKIFLDKLNFISDEAKDIGAINLLYIKDNKFYGDNTDYYGFKYTLTKNDIDVKNKKIAIIGKGGASASVDKVLKDMGAKDITFYFRRDKLSKIEFPENMEGDIIINTTPVGMYPNIHDNLVNEEILKNFKIAIDLIYNPLETEFLKIARKNGLKTINGMDMLIEQALKTDEILYDILLSTQLRKKIRKKMKKKVEEFYENNGD

SEQ ID NO: 22615 - DNA, 4692 bp, Neurospora crassa
  CDS (1)..(4692)
atggctgagcccatctctaatcctacccggatcaacatcctgggcaaggacaacatcatcattgaccacggcatctggctgaactttgtcgcccaggacctcctccagaacatcaagtcctccacctacatcctcatcaccgacacgaacctctacaagacctacgtgccccctttccagtccgttttcgagaaggctgctccccaagatgtccgccttcttacctatgccatccctcccggcgagtactccaagggccgcgacaccaaggccgagatcgaggactggatgctctcgcaccaatgcactcgcgacaccgtcatcattgccctcggtggcggcgtcattggcgacatgatcggctacgtcgccgctaccttcatgcgcggcgtccgcttcgtccagtgcccgaccaccctcctcgccatggtcgactcctccatcggcggcaagactgccattgacgtgcccatgggcaagaacctgattggcgccttctggcagcccgagcgcatctacatcgacctcaccttcctcaacacactgcccgtgcgcgagttcatcaacggcatggccgaggtcatcaagaccgccgccatttgggacgagaacgagttcaccgccctcgaagagaacgcaaaggccatcctcgaggccgtccgctccaagaacaagtcggccgaccgtctggcccccatccgcgacatcctcaagcgcatcgttctcggttcggcccgcgtcaaggccgaggttgtctcgtcggacgagagagaaggcggactccgcaacttgctcaactttggacactccattggtcatgcttatgaggcgatcctgactcctcaggtcctccacggcgaagcggttgccattggcatggtcaaggaagctgagcttgcccgcttcctcggcgtcctccgccccagcgccgtcgctcgtctttccaagtgcattgccagctacgacctgcctacctctctgcaggacaagcgcatcgtcaagcttactgccggaaaggagtgcccagttgatgtgcttctccagaagatggccgttgacaagaagaacgagggccgcaagaagaagattgtcctactttccgccatcggaaagacctatgagcccaaggccagcgtcgtcgaggaccgcgccattcgcattgttctctcgccttgcatcagggtctttgctggtgtacccaaggatctcaacgtcagcgtcactccccctggatccaagagtatctccaaccgtgcccttattctggctgctctcggtgagggtaccacccgcattcataacttgctccattccgacgacacccaggtcatgctcaacgccgtcgcgcagctccagggtgcctccttctcttgggaagagggcgatgtgctcgtcgtcaagggcaacggtggcaagttgcaggctacctcgacccctctgtatctgggcaatgcgggaaccgcttctcggttcttgacctccgtggcggctctttgcaacccttccgacgtcaactctactgttttgactggcaatgcccgcatgaagcagagacccatcggtgctctcgttgatgccctgcgtgccaacggcgtcggtgtcaagtaccttgagaaggaacacagtttgcccgtgcaagttgatgctgctggcggccttgccggcggtgttatggagcttgctgccaccatctcgtcccagtacgtctcctcgctcttgatggccgccccctacgcccgcgagcccgtcacccttcgcctggttggcggtaagcccatctctcagccctacatcgacatgaccatcgctatgatggcttcgtttggtgtgcaagttcagcgatctgctgaggatcccaacacctactatatcccccagggcacctacaagaaccccgagacctatgtcgtcgagagcgatgccagctctgccacctaccctctcgccattgccgccatcactggcactacctgcaccgtccccaacattggctccaagtcgctccagggtgatgctcgcttcgccattgaggttctccgtcccatgggctgcaccgtcgagcagactgacgtctctaccaccgtgactggccctccaatcggcactctcaaggccatcccgcacgtcgatatggagcccatgactgatgctttcctcactgcgtccgtgctcgctgctgttgcctctggcaccactcagattactggcattgccaaccagagagtcaaggagtgcaaccgcatcttggcgatgaaggaccagcttgccaagttcggcgtgcactgcaatgagctcgaggacggtatcgaagtgattggcatcccttacactgagctgaagaacccaacggagggcatctactgctacgacgatcaccgtgtggccatgagcttcagtgtcctctccaccatctcgccccacccggtacttatccttgagcgtgagtgtactggcaagacatggcctggatggtgggataccatgtccaactacttcaaggtccatctcgaaggcgaggaggagccacacagcagccacgtatcccacgagaagcctcggaagggtaaccccaagtctatcttcatcatcggtatgcgtggcgctggcaagtccaccgctggcaagtggatgtccgaggttctcaaccgacctctcatcgatctcgatcatgagctcgagaggagagagggccaaacgattcccgagatcatccgcagcgagcggggctgggaaggcttcagaaaggctgagctcgaactccttgaggatgtgatcaagaacaaccctaccggacacatcttctcctgcggtggcggtattgtggagacagaggctgcccgaaagatgttgctttcctacagccaaaatggtggtattgtccttctagtccatcgtgataccgaccaagttgtcgagtacctcatgagggacaagtcccgccccgcctactccgagaacatccgggaggtctactatcgtcgcaagcccttctttgaggaatgcagcaacttccgctactacagccctcatcctgatgggtcaaaggctctgaccgaaccacccttcgacttcagccagttcctctccgtcatctgtgggcacagcaaccacctcgaggaagtgaagaagaagcctcattctttcttcgtctccctcacagtccccaacgtatccaaggcattggacatcatccccaaggtggttgtgggctccgatgccgtagagctgcgtgtagacttgctggaggattacgatccggaatttgtggccaagcaggttgcgctgcttcggtcggccgcgaggattcctatcgtctacactgtccgcactgtcagccaaggcggcaagttccccgatgacgattatgagttggccctcaagctttaccgcactggtctgcaggctggtgtggaatatctcgatctggagatgaccatgccagacgaggtcattgaagctgtgacgaatgaaaagggctatacccatatcattgcctctcaccatgaccccaaggcaacgctctcctggaagaacggcggttggatccagtactacaacaaagccctgcaacatggtgatgttgtcaagctcgttggtgtcgcccgcgaacttgctgacaattttgccctagcacgtttcaaggccagcctcgctgctgctcatgacaagcctctcattgccttgaacatgggtgcagctggcaagctgagccgcgtactaaatggcttcctgactccagtttcccacccagccctgccgtccaaggctgctccaggtcagctctcggcggctgaaatccgtcaggcgctggctcttatcggcgagctcgagcctcggtctttccaccttttcggaaaccccatctcggcttcgcggtcacccgcccttcacaatgctctcttccgcgacaacggcctgcctcatcagtattccctcttcgagactgataacgctgctgacgtcaaagacctgatccgggctcctgggtttggtggagcgtcggtaaccatccctctcaagcttgacatcatgcctttgctggacgaggtgtctgatgctgccaaggtcattggcgcggtcaataccatcattcctgttcgcaacggcgacaaggtaactcttcgcggtgacaacactgactggatgggcatggtgtatgcgctccgcaacgccggcgtcgtcaagtgcaccaaggagtctccgaccgccggtatggttgtcggagctggcggaactacccgagcggctgtccatgctttgcatgacctaggctttgccccaatctacgtcgttgctagaaacgccgaccgcgtcaaggctcttgcggagtcattccctgccgagtacgacatccgctcgttgagcacgccggaagaggtcgcggccgagtccactgcccagccttcggttgtgatcagcaccatccccgccgacaaacccattgaccagagcatgcgtgaggtcattgttgcttctcttcgtcacccgtcggtcgcggatggcaagcatgtcctgctggagatggcctacaccccgcgccacacccctctcatgcagctggcggaggatgcgcactggcagacgattcccggacttgaggttctcgccgctcagggctggtatcagttccaactctggaccggaatcaccccgatctacaccgatgcgcaggcggctgtcatgggtaactag

SEQ ID NO: 22616 - protein, 1563 aa, Neurospora crassa
MAEPISNPTRINILGKDNIIIDHGIWLNFVAQDLLQNIKSSTYILITDTNLYKTYVPPFQSVFEKAAPQDVRLLTYAIPPGEYSKGRDTKAEIEDWMLSHQCTRDTVIIALGGGVIGDMIGYVAATFMRGVRFVQCPTTLLAMVDSSIGGKTAIDVPMGKNLIGAFWQPERIYIDLTFLNTLPVREFINGMAEVIKTAAIWDENEFTALEENAKAILEAVRSKNKSADRLAPIRDILKRIVLGSARVKAEVVSSDEREGGLRNLLNFGHSIGHAYEAILTPQVLHGEAVAIGMVKEAELARFLGVLRPSAVARLSKCIASYDLPTSLQDKRIVKLTAGKECPVDVLLQKMAVDKKNEGRKKKIVLLSAIGKTYEPKASVVEDRAIRIVLSPCIRVFAGVPKDLNVSVTPPGSKSISNRALILAALGEGTTRIHNLLHSDDTQVMLNAVAQLQGASFSWEEGDVLVVKGNGGKLQATSTPLYLGNAGTASRFLTSVAALCNPSDVNSTVLTGNARMKQRPIGALVDALRANGVGVKYLEKEHSLPVQVDAAGGLAGGVMELAATISSQYVSSLLMAAPYAREPVTLRLVGGKPISQPYIDMTIAMMASFGVQVQRSAEDPNTYYIPQGTYKNPETYVVESDASSATYPLAIAAITGTTCTVPNIGSKSLQGDARFAIEVLRPMGCTVEQTDVSTTVTGPPIGTLKAIPHVDMEPMTDAFLTASVLAAVASGTTQITGIANQRVKECNRILAMKDQLAKFGVHCNELEDGIEVIGIPYTELKNPTEGIYCYDDHRVAMSFSVLSTISPHPVLILERECTGKTWPGWWDTMSNYFKVHLEGEEEPHSSHVSHEKPRKGNPKSIFIIGMRGAGKSTAGKWMSEVLNRPLIDLDHELERREGQTIPEIIRSERGWEGFRKAELELLEDVIKNNPTGHIFSCGGGIVETEAARKMLLSYSQNGGIVLLVHRDTDQVVEYLMRDKSRPAYSENIREVYYRRKPFFEECSNFRYYSPHPDGSKALTEPPFDFSQFLSVICGHSNHLEEVKKKPHSFFVSLTVPNVSKALDIIPKVVVGSDAVELRVDLLEDYDPEFVAKQVALLRSAARIPIVYTVRTVSQGGKFPDDDYELALKLYRTGLQAGVEYLDLEMTMPDEVIEAVTNEKGYTHIIASHHDPKATLSWKNGGWIQYYNKALQHGDVVKLVGVARELADNFALARFKASLAAAHDKPLIALNMGAAGKLSRVLNGFLTPVSHPALPSKAAPGQLSAAEIRQALALIGELEPRSFHLFGNPISASRSPALHNALFRDNGLPHQYSLFETDNAADVKDLIRAPGFGGASVTIPLKLDIMPLLDEVSDAAKVIGAVNTIIPVRNGDKVTLRGDNTDWMGMVYALRNAGVVKCTKESPTAGMVVGAGGTTRAAVHALHDLGFAPIYVVARNADRVKALAESFPAEYDIRSLSTPEEVAAESTAQPSVVISTIPADKPIDQSMREVIVASLRHPSVADGKHVLLEMAYTPRHTPLMQLAEDAHWQTIPGLEVLAAQGWYQFQLWTGITPIYTDAQAAVMGN

SEQ ID NO: 22617 - DNA, 948 bp, Ralstonia solanacearum
  CDS (1)..(948)
atgcatgacgacctccgcccctcgctgctggccgggctgatcggcgcgggcatccagcgctcgctgtcgccggccatgcaccagcaggaaggcgacgcgcaggggctgcgctacgtgtacaagcgcatcgacctggaggcgctgggcctgacgcccgatgcgctgccggaactgctcacggccgccgagcgcttcggcttcgccgggctcaacgtcacgcacccgtgcaagcagcgtgtgctgcactatctcgatgacctgtcggacgatgcccgcgcgctgggcgccgtcaacaccgtggtcttcgacaacggccgccgcatcggccacaacaccgactggtggggctttgccgagagcttcaagcgcggcctgcccggtgcgccgatggggcaggtggtgcagctcggcgcgggcggcgccggcgcggcggtggcgcacgcgatgctgacgctgggcgcgcagtcgctgacgctgttcgatgtggagccggagcgcgcgcggcaactggccgcgtcgctgtgcgggcgcttcggcccgggccgcgcgcaggccggcaccgacctggccgcggcgatggcggcggccgacggcctggtccacgcaacgcccaccggcatggccggccaccccggcctgccgctgccgcccgatctgctgcagtcgcggcactgggtggccgagatcgtctactttccgctggagaccgaactgctgcgccgcgcgcgcgcgctcggctgccgcacgctcgacggcggcggcatggccgtgttccaggcggtgggcgcgttcgagctgttcaccggcatcgcgccgaatgcgcaccggatgctggcccactttgccgcgctgcaggatgccgaggcaacggcgcatgccggcgccacagaccctcacggcgtcgcgcgaccgggcatcggtctcgctgccgttgcgctcggacgctga

SEQ ID NO: 22618 - protein, 315 aa, Ralstonia solanacearum
MHDDLRPSLLAGLIGAGIQRSLSPAMHQQEGDAQGLRYVYKRIDLEALGLTPDALPELLTAAERFGFAGLNVTHPCKQRVLHYLDDLSDDARALGAVNTVVFDNGRRIGHNTDWWGFAESFKRGLPGAPMGQVVQLGAGGAGAAVAHAMLTLGAQSLTLFDVEPERARQLAASLCGRFGPGRAQAGTDLAAAMAAADGLVHATPTGMAGHPGLPLPPDLLQSRHWVAEIVYFPLETELLRRARALGCRTLDGGGMAVFQAVGAFELFTGIAPNAHRMLAHFAALQDAEATAHAGATDPHGVARPGIGLAAVALGR

SEQ ID NO: 22619 - DNA, 921 bp, Ralstonia solanacearum
  CDS (1)..(921)
atgatatcgtttgaacaggcggccattctcgcggccgccagcgccccgccagtcgatcgctacggtgtgatcggcaatccgatctcgcacagcaagtcgccggccatccatgccgcctttgcgcagcagaccggccagctgatgcgctatgagcgcatctatgccgagctgattgcctttgacgagaccgtgttctcgttcatccgtgagggcgggcgggggctcaatgtgacggtgccgttcaagctcgatgcgtacgcactggcgacctcgctgtcgctgcgtgcggagtcggccggcgccgtcaacaccctcaagttcgacggcgatgcgattttcggcgacaacaccgatggcgtcggcctgatgcgcgatatcacgcacaacatcggcaacccgctggcgggtgagcgcgtgctgctgctcggcgcgggcggcgcggcgcgcggcatcctgctgccgctgctggagcacaagccgtcgcgcgtgttcatcgccaatcgcacagccgatcgcgccatcgggctggtgcagcgcttcgaggcagcggccaagctgcacgaggtcgagctggtgggcggcggcttcgacgacctggccgtcagcgacgtcttcgatgtcgtcatcaacgcgaccgcgggcagcctgcaggcccaggtgccgcccatcgagccgaccgtgttcggccccaacgcgctggcctacgacatgatgtacggctcgcagccgacggtgttcatgcagttcgccaagcggcatggtgcccgcgcgtgggacggcctgggcatgctggtggagcaggcggcggaatcgttcctggtctggcgcggcatgcgccccgacaccgcccccgtgctacaagccatgcgcgaggggctgcagggcgaggcggccgtggccgcgcgcgcgcatcagcgctga

SEQ ID NO: 22620 - protein, 306 aa, Ralstonia solanacearum
MISFEQAAILAAASAPPVDRYGVIGNPISHSKSPAIHAAFAQQTGQLMRYERIYAELIAFDETVFSFIREGGRGLNVTVPFKLDAYALATSLSLRAESAGAVNTLKFDGDAIFGDNTDGVGLMRDITHNIGNPLAGERVLLLGAGGAARGILLPLLEHKPSRVFIANRTADRAIGLVQRFEAAAKLHEVELVGGGFDDLAVSDVFDVVINATAGSLQAQVPPIEPTVFGPNALAYDMMYGSQPTVFMQFAKRHGARAWDGLGMLVEQAAESFLVWRGMRPDTAPVLQAMREGLQGEAAVAARAHQR

SEQ ID NO: 22621 - DNA, 819 bp, Salmonella typhimurium
  CDS (1)..(819)
atgacaaagcgcattaataaagacactcaggtctgcatgtccctggcggcacgcccaagtaacttcggtacacgctttcacaactatctgtacgaagcgctggatctcaattatctctacaaagctttttcgccgaccgatcttacgcaggccattagcggcgtgcgcgggttggggatccgtggatgcgcgatctctatgccgtttaaagaagcctgcattccgctggtggatgaactggatgcttccgctcaggccattcactcagttaataccattgtgaataccaatggccatctgaaggcgtacaacaccgattacattgcaatagctcgcttgctggcgaattacaaggtctctcccgacctggtgtttgctttgcgtggcagcggtggtatggcaaaggcggtggcctgcgcgctgaaggatgcggggtttacccgtggttatattgtcgcgattgatgaagcgtcaggtaaacaactggccgaactctatggctatgaatggcgcccggataccgacggtattgaagctgatttgttaattaacgccacgcctatcggaatggctggcggtaatgatgccgacaaactttcttattccgaacaggaagtggataaggcgagcgttatctttgatgtggtggcgctaccgcccgtcacgccgctaatccgctacgcccgtgaacgcggtaaaaccgtgattaccggttccgaagtgtttgctattcaggccgtggagcaatttgtcctttataccgggattcgcccggatgacgcgctgttccagaaagcagcggcctggtcacgcctgtaa

SEQ ID NO: 22622 - protein, 272 aa, Salmonella typhimurium
MTKRINKDTQVCMSLAARPSNFGTRFHNYLYEALDLNYLYKAFSPTDLTQAISGVRGLGIRGCAISMPFKEACIPLVDELDASAQAIHSVNTIVNTNGHLKAYNTDYIAIARLLANYKVSPDLVFALRGSGGMAKAVACALKDAGFTRGYIVAIDEASGKQLAELYGYEWRPDTDGIEADLLINATPIGMAGGNDADKLSYSEQEVDKASVIFDVVALPPVTPLIRYARERGKTVITGSEVFAIQAVEQFVLYTGIRPDDALFQKAAAWSRL

SEQ ID NO: 22623 - DNA, 789 bp, Pyrobaculum aerophilum
  CDS (1)..(789)
atgtacttcgctgtgattggggcgcacgtgaggggcaaatcggcgagtccggcgatgcacacagcctctttcaaggcgctgggcataaacgcagtttatatagccgtagacgtgcctaaagaggaattgggctgtttcgcccaaatagcgaggttgaatttcagaggctttaacgtgacaattccgcataaggaagaggtcgtaaagtttttagacgccctctcagcggaggcaagggcaattggcgcggtcaacacggtgttggtggagaggaatttaatggtgggctataacacagacgcccacgccgtgtataaactggcggggggacacatggagggcgcagaggtgttaatcctgggggcagggggagcagcgagggccgccctcttcgccgccataaaggcgggggctaaaaagatatacgtcaaaaaccgcacggcggagagggctgaggcgcttgcccgggagttccgggagaagttcgaaaggcctattgaggcaattccgtggagcggcgccgttaaggcggatgtcgtaataaacgccactcctatacacgacgcagtaattgcggatctcaccggcgcgtctctatacgtggagttcgtctacacgcctacgccgaggactaaaatggtggaagaggccgagaggcttggcgtaaaggtcgtagacggcgtggatctcttggtagagcagggcgcccaggccgagaaaatatggctgggtgtggagcccgacagggctgtgatgaaaaaagcagttttagagttcctaggcctatga

SEQ ID NO: 22624 - protein, 262 aa, Pyrobaculum aerophilum
MYFAVIGAHVRGKSASPAMHTASFKALGINAVYIAVDVPKEELGCFAQIARLNFRGFNVTIPHKEEVVKFLDALSAEARAIGAVNTVLVERNLMVGYNTDAHAVYKLAGGHMEGAEVLILGAGGAARAALFAAIKAGAKKIYVKNRTAERAEALAREFREKFERPIEAIPWSGAVKADVVINATPIHDAVIADLTGASLYVEFVYTPTPRTKMVEEAERLGVKVVDGVDLLVEQGAQAEKIWLGVEPDRAVMKKAVLEFLGL

SEQ ID NO: 22625 - DNA, 1503 bp, Oryza sativa
  CDS (1)..(1503)
atgacgctcctgtgcgtgccgctggtggcccgcacggtggaggcgatgcgggccgacgcggccgcggccgctgccgccggcgccgacctcgtcgagatccggctcgacttcatcggcagcaagttccgcccgcgggaggatctcccgcgcctgctccgcggctgcccgctccccgccatcgtcacctacagacccaattgggaaggaggccaatatgaaggtgatgatgctacaagatttgaagcactccgtttagcaatggagctaggagtaaattatgtcgatattgaattgaaggttgctgacaaatttatcagctttatttatgggagtaagccagagaagtgcaaacttattgtctcggcacataattatgaaagtactccatcctgtgaggagcttgcagatcttgtggctagaatacaagcagttggagctgatatagtgaaaatcgcaacaacagctaatgacattgttgatgtgtcacagatgttccaagtgatggtgcactgccaagtgcctatgattggactagttatgggcgaaaaaggtttaatgtcaagggtgttatcccccaagtttgggggatatctaacctttgggagtcttgatgctacaaaggtatcagcacctgggcagccaaccgtcgaagagctgatagacatttatgatataaggcgcataggacctgatacaaaggttctcggtgttatagccaacccagtaaaacagagcaagagcccagttttgcacaatacatgtcttcaatctgttggatacaatgctgtttatcttccacttttggcagacaacattgctagatttcttagcacatattcgtctccggatttttcaggattcagttgttctcttccttttaaagttgatgccgtacagtgttgtcatgaacatgatccagttgctaagtcaataggtgccataagcactataattaggaggccagatggcaaactactgggctacaataatgactacattggagcaatttgtgccattgaggatggcataggaggtccaggatcaaagaatgctgccgtcacacctttggctggcaggcttcttgttgttgtaggtgctggtggagctggcaaggcaattgcttacggggcaaaggagaagggtgcaagaattgtagtagcaaatcgtacctacgaaaaagcagtaagtcttgctgccgcggttggtggtcatgccctgagattagccgagcttgaaactttcaggcctgaagaagggatgatccttgctaatgcaacatcgttgggaatgtaccccaatgtggatggcacccctattccaaagcaagcactaagcttctacgatgttgtgttcgatgcggtatatgctccgaaagtcacccggcttctacgagaagcagaagaatgtggggttaaagttgtcagcggtgtggagatgtttctcagacaagccttgggtcagttcgagcgtttcacaaatggtattgaaggatttgattcttag

SEQ ID NO: 22626 - protein, 500 aa, Oryza sativa
MTLLCVPLVARTVEAMRADAAAAAAAGADLVEIRLDFIGSKFRPREDLPRLLRGCPLPAIVTYRPNWEGGQYEGDDATRFEALRLAMELGVNYVDIELKVADKFISFIYGSKPEKCKLIVSAHNYESTPSCEELADLVARIQAVGADIVKIATTANDIVDVSQMFQVMVHCQVPMIGLVMGEKGLMSRVLSPKFGGYLTFGSLDATKVSAPGQPTVEELIDIYDIRRIGPDTKVLGVIANPVKQSKSPVLHNTCLQSVGYNAVYLPLLADNIARFLSTYSSPDFSGFSCSLPFKVDAVQCCHEHDPVAKSIGAISTIIRRPDGKLLGYNNDYIGAICAIEDGIGGPGSKNAAVTPLAGRLLVVVGAGGAGKAIAYGAKEKGARIVVANRTYEKAVSLAAAVGGHALRLAELETFRPEEGMILANATSLGMYPNVDGTPIPKQALSFYDVVFDAVYAPKVTRLLREAEECGVKVVSGVEMFLRQALGQFERFTNGIEGFDS

SEQ ID NO: 22627 - DNA, 1596 bp, Oryza sativa
  CDS (1)..(1596)
atgacgctcctgtgcgtgccgctggtgtcgcgcacggtggaggcgatgcaggccgacgcggcggcggccgcggccgccggcgccgacctcgtcgagatccggctcgacttcatcgaggggttccgcccgcgggagcacctcccgagcctgctccgtggctgccctctccctgccctcgtcacctaccggaggcgggctccagattctgcgtccatttcccggtatatccgcagcgcgtgcgcagatgctttcacacccaattgggaaggaggccagtacgatggtgatgatgctacaagatttgaagcactccgtttagcaatggagttaggcgtagactatgttgatattgaattgaaggttgctgacaaatttatcagctttatttctggcagtaagccagagaagtgtaaacttattgtctcatcacacaattatgaaagtactccgtcctgcgaggagcttgcagatcttgtggctagaatacaagcagttggatctgacatagtgaaaatcgcaacaactgctagtgacattgctgatgtgtcacgaatgttccaagtgatggtgcactgccaagtgcctatgattggactagtgatgggcgaaaaaggtttaatgtcaagggtgttatcccccaagtttggaggatatctaacctttgggactcttgatgctacaaagatatcagcacctgggcagccaaccgtcaaagaactgttggacatttataatataaggcgtataggacctgatacaaaggttcttggtcttattgccaacccagtaaaacagagcaagagcccaattttgcacaataaatgtcttcaatctattggatacaatgctgtttatcttccacttttggcagatgaccttgctcgatttctcagcacatattcatctccggatttttcaggattcagttgctctcttcctttcaaagtggacgctgtacagtgttgccatgaacatgacccagttgctaagtcaatcggtgccataaacaccataattaggagaccagatggcaaactagtgggctacaatactgactacattggagcaatttctgctattgaggatggcataggaggcccaggatcaaaggatgctgccatctcacctttggctggcaggcttgttgttgttgtaggtgctggtggagctggtaaggcaattgcttatggggcaaaggagaagggtgcaagagttgtagtagcaaatcgtacctacgaaaaagcagtaagtcttgctgctgcagtgggtggtcatgccctgagattagccgagcttgaaactttcaggcctgaagaagggatgatccttgctaatgcgacatcattgggaatgtaccccaatgtggacggcacccctatcccaaagaaagcattaagcttctatgatgttgtatttgatgcggtatatgccccgaaagttacccggcttctacgagaagcagaagaatgtgggattaaagttgtcagcggtgtagagatgtttgtcagacaagccatgggtcagtttgagcatttcacaggtggtattgaagctcctgaaagcctgatgcgtgagatagctgccaaatacacataa

SEQ ID NO: 22628 - protein, 531 aa, Oryza sativa
MTLLCVPLVSRTVEAMQADAAAAAAAGADLVEIRLDFIEGFRPREHLPSLLRGCPLPALVTYRRRAPDSASISRYIRSACADAFTPNWEGGQYDGDDATRFEALRLAMELGVDYVDIELKVADKFISFISGSKPEKCKLIVSSHNYESTPSCEELADLVARIQAVGSDIVKIATTASDIADVSRMFQVMVHCQVPMIGLVMGEKGLMSRVLSPKFGGYLTFGTLDATKISAPGQPTVKELLDIYNIRRIGPDTKVLGLIANPVKQSKSPILHNKCLQSIGYNAVYLPLLADDLARFLSTYSSPDFSGFSCSLPFKVDAVQCCHEHDPVAKSIGAINTIIRRPDGKLVGYNTDYIGAISAIEDGIGGPGSKDAAISPLAGRLVVVVGAGGAGKAIAYGAKEKGARVVVANRTYEKAVSLAAAVGGHALRLAELETFRPEEGMILANATSLGMYPNVDGTPIPKKALSFYDVVFDAVYAPKVTRLLREAEECGIKVVSGVEMFVRQAMGQFEHFTGGIEAPESLMREIAAKYT

SEQ ID NO: 22629 - DNA, 783 bp, Sulfolobus tokodaii
  CDS (1)..(783)
atgcttgagataaattatgatacgaaacttttaggtgtagttggcgaaaatatatcatatacattatcaccagcgatacacaattattcttttcaagaattaggtattaatgctgtttatttagcatttgatataaaaagtgatgaatttaaagaaatattccctgggttagtcaaaatagcatatggtttgaatattactataccttataaggaaattgcaataaaatatgtagaagctcagagtgaagcaaaaagaattggtgcaataaatactatttttaatggcaaaggatataacacagattatattgcaattaagagtttggtacaagagagaatagataaatttgaaacgtgtactatattcggtgctggtggggcagctagggcagctatttttgctttacatgatttagattgctcaattaatgttataaataggagtaaagagaaagctgaaaaattaatagaagaaatgaggaataaaaatatagaaataaaaattacatataattgcaaaagtgatataatagttaattcgactcctaatccagattttgttccagatgagtgtgttaatggtaaattagtaatcgattttgtctataaaccagtcataacttcattgatcaagagggctcagaataagaatataaaaacaataaacggtatcgaaatccttgtaaggcaagcaatggaagctgaaaaaatttggtttggaaaatcattagaagatgaagaagtggtgaattatctttatgccaggaaactcatttggtga

SEQ ID NO: 22630 - protein, 260 aa, Sulfolobus tokodaii
MLEINYDTKLLGVVGENISYTLSPAIHNYSFQELGINAVYLAFDIKSDEFKEIFPGLVKIAYGLNITIPYKEIAIKYVEAQSEAKRIGAINTIFNGKGYNTDYIAIKSLVQERIDKFETCTIFGAGGAARAAIFALHDLDCSINVINRSKEKAEKLIEEMRNKNIEIKITYNCKSDIIVNSTPNPDFVPDECVNGKLVIDFVYKPVITSLIKRAQNKNIKTINGIEILVRQAMEAEKIWFGKSLEDEEVVNYLYARKLIW

SEQ ID NO: 22631 - DNA, 804 bp, Thermoplasma volcanium
  CDS (1)..(804)
atgatgcctcctgattatgtatttgggctcataggccatcccgtatcccactcaatagggcagattgtctacaacaggtatttccagaaaaagggattaaatgccatttatctatctattgatatatttccagagacgctaaaatatttcatgtcttatgcatccaagatggatgggttcaacgttacgatacctcataaaataagtataatggattacctagaccaaatagattgggaggcccgttcaataggatctgtcaacttagtaaaaactgaggatggattattaaagggcttcaacacagactactatggcatagaatatatgttcaaaaaaggcggcgtcgatgtaagcggaaagagcatagtcgtagcagggtctggagggatagctagaactgttatacactatttaattaagaacaatgctaaaagtgtgacagtaaaagccagagatgtcaaacttgcgaagaataaacttaatgcgtacgatgtagatataaaagaatatgccaataatgattatgacatatacatcaactgcacaccgctaggcacagaggccgtcggggatccattccctgaggttcaatttggcaaagggaaaatagcagtagatgtggtctataatcctccagttactccattccttaaaagagcaggcatttcgggatcaaaaacattgtctggtcttgatctttacattggccaggctattaaaacactggatatactaacatcaggatgcgacatcgataccttaattaattccgtaagggtggccgtaaatgaagttcgctga

SEQ ID NO: 22632 - protein, 267 aa, Thermoplasma volcanium
MMPPDYVFGLIGHPVSHSIGQIVYNRYFQKKGLNAIYLSIDIFPETLKYFMSYASKMDGFNVTIPHKISIMDYLDQIDWEARSIGSVNLVKTEDGLLKGFNTDYYGIEYMFKKGGVDVSGKSIVVAGSGGIARTVIHYLIKNNAKSVTVKARDVKLAKNKLNAYDVDIKEYANNDYDIYINCTPLGTEAVGDPFPEVQFGKGKIAVDVVYNPPVTPFLKRAGISGSKTLSGLDLYIGQAIKTLDILTSGCDIDTLINSVRVAVNEVR

SEQ ID NO: 22633 - DNA, 927 bp, Streptococcus pyogenes
  CDS (1)..(927)
atgcttgtactttatgttagtagtaaactaattaaacgtaggaggatgaaatttatgtattctgcattgcttggtaatccagttgaacattctatatcagatgaattatttgaatatctaaatcacaacataggagttctggatgaatataaacataaaaaaattttggtagactcagtgtgtttagaagataaaatcaaacatctgataaatgatccaaaatgtattggattaaatataactttaccttataaaagagaggtaatgaggtatattgacaatttagacagagtagcagagataactggatctgttaacaatatttataaatctggaaatataattacaggaactaatactgattggaaaggtatttataatacattagttttctttaatattagccatataacaaaatgttgtgttttaggtactggcggtactgctagagctgctattttcgctttacaaaaactacaaatctcaccaacagttgtatacagggagccaattagtgagaatacaagaagtttgataaagagtttccctgatttaaagtatattacatataaggaattggctgatcaacaaattttaaatgatatggaaatcataataaatactacaccagttggtatgataaattatgaagaaagtttacctataaattttgatcatttggacaatgttaattataaagataaatactttatggatgtagttttcaatcctttacatacgaaacttcatgaatattttggtaaaaaaggagcaaaaataattgatggtttatgggttttgatttttcagggaattgaagcattttcattgtggagtgataaaattaatgatggtaaatattttttttcaaaagatgatgttgtcctaattcatacatttctagaagggaagataaaaggaaaatga

SEQ ID NO: 22634 - protein, 308 aa, Streptococcus pyogenes
MLVLYVSSKLIKRRRMKFMYSALLGNPVEHSISDELFEYLNHNIGVLDEYKHKKILVDSVCLEDKIKHLINDPKCIGLNITLPYKREVMRYIDNLDRVAEITGSVNNIYKSGNIITGTNTDWKGIYNTLVFFNISHITKCCVLGTGGTARAAIFALQKLQISPTVVYREPISENTRSLIKSFPDLKYITYKELADQQILNDMEIIINTTPVGMINYEESLPINFDHLDNVNYKDKYFMDVVFNPLHTKLHEYFGKKGAKIIDGLWVLIFQGIEAFSLWSDKINDGKYFFSKDDVVLIHTFLEGKIKGK

SEQ ID NO: 22635 - DNA, 867 bp, Enterococcus faecalis
  CDS (1)..(867)
atgaaagaaataactggagccactcgtttagctgggctattcgcgaaacccagccaacacagtatttcaccgttgattcataatacagcatttcaaaatttaggagttgatgctcggtatctggcgtttgacgttggacaagagacattgccacaagcaattgaagcgattcgaacgtttcacatgttaggggccaacttatcaatgcccaataaagtggcggctgtaagttatatggatgaactaagtcctaccgctcaactggttggcgcaattaatacgattgtcaacaaagatggaaaactttacggagacagcacggatggtactggttttatgtggagtttgaaagagaaaaaggttgacgtttttcagaataaaatgaccatcttaggaacaggtggtgcagccttatcaatcattgcccaagctgctttagatggcgtgaaagaaatcgccgtttacaacaggaaaagcgcgggctttaacgacagtcaaaaaaaactggcaaatttcactgaacgaaccaactgtgtaattcatttaaacgatttagcggatactgaaaaactagcaaaagatgttgctgaaagcgtcttgttagttaatgcaacgagtgtgggtatgcatccacatgcgcatagtagtcctatagaaaattatgcaatgattcaaccgaagttatttgtgtatgatgctatttataatcccagagaaacacagttattaaaagaagcccgtttacgtggtgcagaaacaagcaacggcttggacatgctactttatcaaggcgctgctgcttttgaacaatggacaggacaaaaaatgcctgtatcagtcgtaaaacgtaaaattgaaaatagataa

SEQ ID NO: 22636 - protein, 288 aa, Enterococcus faecalis
MKEITGATRLAGLFAKPSQHSISPLIHNTAFQNLGVDARYLAFDVGQETLPQAIEAIRTFHMLGANLSMPNKVAAVSYMDELSPTAQLVGAINTIVNKDGKLYGDSTDGTGFMWSLKEKKVDVFQNKMTILGTGGAALSIIAQAALDGVKEIAVYNRKSAGFNDSQKKLANFTERTNCVIHLNDLADTEKLAKDVAESVLLVNATSVGMHPHAHSSPIENYAMIQPKLFVYDAIYNPRETQLLKEARLRGAETSNGLDMLLYQGAAAFEQWTGQKMPVSVVKRKIENR

SEQ ID NO: 22637 - DNA, 813 bp, Pasteurella multocida
  CDS (1)..(813)
atgattaataaagaaacgcagctttgtatttcactggcgggtaaaccgggtaattttggcacggcgttccataattacttatatcaaaagctagggctaaactatatttataaagcgttcaccacctccgatattgaacatgcggtaaaaggtgttcgtgcgctcggcattcggggctgtgcggtatccatgccctttaaagaaagctgtatgccgtttctcgatgaaatatcggcatcagctaaagccattgagtcggtgaatacgatagtgaatgaagatggctatttaaaagcctataacaccgattacattgcgatcagcaaattgattcaacagtatcaacttgataaacatcacaaggtgattgtgcaggggagcggtggcatggcgaaagccgttgttgcagcatttaaaaatgcgggctttcacgatttgagtgtgtatgcacgtaatgcaaccacaggacagtatttagcgaatctatatggatatcaatatatcaatcatttagaaggcaatgaagcatcgattttagtgaatgcaaccccgatggggatgtctggtggagaggaaaatacgctcgctttccctgaaagtctgattgagcaagccagcagcatatttgatgttgttgctttgcccgcagaaacaccattaattcaatatgcgaaacagcaaaataagcagaccatttcaggtgcggaagtgattgtcttgcaagcggtcgaacaattcgaactctacacgcatcaacgaccaagcgaaactttgattgccgaagccgctgagtttgcgcgttcaatccgttaa

SEQ ID NO: 22638 - protein, 270 aa, Pasteurella multocida
MINKETQLCISLAGKPGNFGTAFHNYLYQKLGLNYIYKAFTTSDIEHAVKGVRALGIRGCAVSMPFKESCMPFLDEISASAKAIESVNTIVNEDGYLKAYNTDYIAISKLIQQYQLDKHHKVIVQGSGGMAKAVVAAFKNAGFHDLSVYARNATTGQYLANLYGYQYINHLEGNEASILVNATPMGMSGGEENTLAFPESLIEQASSIFDVVALPAETPLIQYAKQQNKQTISGAEVIVLQAVEQFELYTHQRPSETLIAEAAEFARSIR

SEQ ID NO: 22639 - DNA, 852 bp, Xanthomonas oryzae
  CDS (1)..(852)
atgcccgtatcccgttatgccgtgttcggtcaccccgtcgcccattccctgtcgccggctatccatgccgacttcgggaagcagaccggcattgtgctggactacaccgccatcgatgcgccgccggaggacttcagtgccgcgctgcaacgcttcgccgatggaggcggcaagggtgcgaacgtcaccctgccgttgaaagaagcggcctgtgcgctggccagtagcctcagcgatcgcgcgcggctggccggggcggtgaacaccctggtgcgtcacgagggccagtggcagggcgagaacaccgacggtattggcctggtacgtgatctcaccgatcgtcatggcctggatctgcgcggtcgccgcgtcctgctgctgggcgccggcggcgctgcacgcggcgtggcgccggcactgctgcaagccggcattaccgaaatggtggtggtgaaccgctcgcccgagcgcgccgatgcgttgtgcgatacattgggcgaacccgggcgcgtggtgtcgcgttacatcgaagacctgcgcgatctgggcgacttcgagctgatcgtcaacgccaccgccgctggccgcgaccgcgacgctggggcattcgcgatgccgctggggctggtcaacagtcttaccgctgcggtcgatctgaactatggcgccactgccatcgcgttcctggcgtgggcgcgttcggcgcaatgccggtacgccatcgacggcttgggcatgctggtagagcatgccgccgaaagcttcgcgctgtggcatggcgtgcgcccagataccgacccggtctacgccgcgctgcgcgcgcgcgaggccgtgctggtcagtgccgactga

SEQ ID NO: 22640 - protein, 283 aa, Xanthomonas oryzae
MPVSRYAVFGHPVAHSLSPAIHADFGKQTGIVLDYTAIDAPPEDFSAALQRFADGGGKGANVTLPLKEAACALASSLSDRARLAGAVNTLVRHEGQWQGENTDGIGLVRDLTDRHGLDLRGRRVLLLGAGGAARGVAPALLQAGITEMVVVNRSPERADALCDTLGEPGRVVSRYIEDLRDLGDFELIVNATAAGRDRDAGAFAMPLGLVNSLTAAVDLNYGATAIAFLAWARSAQCRYAIDGLGMLVEHAAESFALWHGVRPDTDPVYAALRAREAVLVSAD

SEQ ID NO: 22641 - DNA, 813 bp, Streptomyces lavendulae
  CDS (1)..(813)
atggaattcctcgggccggcggccggtgtctcgggcgccacgcggctgtacgcggtgctgggtgatcccgtcgcccaggtcaaggcgcccggtctgctcaaccccctgctgagcgaaagcggtctggacgccgtggtggtgccggtgcacgtccgggcgcgggatctcgccgaggtggtcgaggggctcaagcggatcggcaatctggacggtctgctggtcaccgtgccgcacaaggcggccctgtgcgggctcgcggacgggctcgggccggcggccgccctcatcgggacggccaacgcgatgcggcgcgaacccgacggccgctggtacgccgagaacttcgacgggctcgggttcgtccagggtcttcaggcggccgggcacacggtgcgcgacaggcatgtggcactggtcggcgccggaggggcgggcagcgcgatcgccacggcgctgctgatggccgacgccgcgcgggtgtccgtgcacgacaccgaccgcgcccagctcgacgcgctgctgctgcggctcgggtcccgccggccggacgggatccgggcgctggggcccggcgatctggaggcggccgatttcgccgtcaacgcgacgcctctgggcatgcgttccgaggacccgctgcccttcgaccccgcgagggtgcgaccggatgccgtggtggtcgacgtcgtcatgaagccgcacgagacggcgctgctgagcgcggccgccaccgccgggcgccgtgtgcaccacggcatccatatgctggagcagcaggttccgtgctaccgcgcgttcttcgggtggccgtga

SEQ ID NO: 22642 - protein, 270 aa, Streptomyces lavendulae
MEFLGPAAGVSGATRLYAVLGDPVAQVKAPGLLNPLLSESGLDAVVVPVHVRARDLAEVVEGLKRIGNLDGLLVTVPHKAALCGLADGLGPAAALIGTANAMRREPDGRWYAENFDGLGFVQGLQAAGHTVRDRHVALVGAGGAGSAIATALLMADAARVSVHDTDRAQLDALLLRLGSRRPDGIRALGPGDLEAADFAVNATPLGMRSEDPLPFDPARVRPDAVVVDVVMKPHETALLSAAATAGRRVHHGIHMLEQQVPCYRAFFGWP

SEQ ID NO: 22643 - DNA, 843 bp, Streptomyces collinus
  CDS (1)..(843)
atgaccgacaccccgcagcaggcccccgccggcaccccccggcagaccctggtcagcggaaccacccggctctacgccgtcctcggcgacccggtcggccaggtccagtcgcccggactgctcaacccgctcttcgcccgcctcggcatcgacgccgtactcgttcccgtgcacgtccgccccgccgacctggagccggtcgtccgcgggctccagcgcgtcggcaacctcgacggcctgttcgtcaccgtcccgcacaagacggccgccgccctgctcgccgaccggcgcagccccaccgtcgagatcaccggcagcgccaacgcgctgcgccgtgaacccgacggtacgtggctcgccgagaatttcgacggctccggcttcgtcgcgggcctcgcccaggccggtcaccagccgaagggcgcccgcgtggcacttgtcggcgcgggcggggccggcagcgccatcgcggcggccctgctcgccgccggagcggaccggttgaccctcaccgaccccgacaccccacggctgaccgccctcgtcgaccggctggccgcccactggcccggccgcgtccgggccgccggcgaaccgcccctggccgacagcgaaatcgccgtcaacgccaccccgctcggcctgcgcccccgacgacccgctgcccttcccgccgcaagggctgccaccgggcgccgttgttgccgaattatcatgaaaccccgcgagacccggctgctgggcgaggccgacgcccacggaatccacacgcaccacggacggcacatgctcaccggacagatcgactcctaccgcgcgtttttcggactgcacacgccctga

SEQ ID NO: 22644 - protein, 280 aa, Streptomyces collinus
MTDTPQQAPAGTPRQTLVSGTTRLYAVLGDPVGQVQSPGLLNPLFARLGIDAVLVPVHVRPADLEPVVRGLQRVGNLDGLFVTVPHKTAAALLADRRSPTVEITGSANALRREPDGTWLAENFDGSGFVAGLAQAGHQPKGARVALVGAGGAGSAIAAALLAAGADRLTLTDPDTPRLTALVDRLAAHWPGRVRAAGEPPLADSEIAVNATPLGLRPRRPAALPAARAATGRRCCRIIMKPRETRLLGEADAHGIHTHHGRHMLTGQIDSYRAFFGLHTP

SEQ ID NO: 22645 - DNA, 4761 bp, Emericella nidulans
  CDS (1)..(4761)
atgtcgaaccctacaaaaatcagcatccttggccgggaaagcatcatcgctgatttcgggctttggcgaaactatgtggctaaagacctgatcagtgactgctcctctaccacctacgtccttgtcactgatacgaatatcggatcgatctacacccccagctttgaagaagcttttcgaaaacgtgccgccgagattactccctccccacgcctccttatttataatcgtccccccggagaagtttccaagtcccgacagacgaaggccgatattgaggattggatgttgagtcagaaccctccatgtggccgcgataccgttgtaattgcattgggtggaggagtcatcggagatctgacaggattcgtcgcttccacctacatgcgcggtgtccgttatgtgcaggttcccactactcttctggccatggtagattcatcgatcggcgggaaaactgccatcgacactccgctgggtaagaacctgatcggcgcaatctggcaaccgacgaaaatctacattgaccttgagttcttggagacgctgccggtgagagagttcatcaatggtatggcagaggtcatcaagacggcagcaatctctagcgaagaagagtttacagctttagaagagaacgcggagacaatcttgaaggcggtccgtcgcgaggtcacgccaggagaacatcggtttgagggcacagaagagattctgaaggcccgaattctggcatctgcgcggcacaaggcgtatgttgtctcagcagacgaacgtgaggggggtctccggaaccttttgaactggggtcactctattggccatgccattgaagccattctgacgccgcaaattctccacggagagtgtgtcgcaatcggcatggtgaaggaagcagaactggcccgtcatctcggtatcctgaagggcgttgcagtctcccgcattgtcaaatgtctcgctgcttacggactgcccacctcgctgaaggacgctcgcatccggaaattgaccgccggcaagcactgctcggtcgaccagttgatgtttaacatggctcttgacaagaagaacgatggtcccaagaagaaaattgtcctcctttccgccattggaactccatatgagacccgcgccagcgttgttgccaatgaggatattcgcgtggtccttgctcccagcattgaggtacacccaggtgttgcacactcctcgaatgtcatctgtgcacctcctggatccaaaagtatttcgaaccgggccttggtcttggccgccctcggctcaggtacttgccgcatcaaaaacctgctgcactccgatgatacagaagtgatgctaaatgccctggaaaggcttggtgctgcgaccttttcctgggaagaggaaggtgaagttctggtggtgaacgggaaagggggaaatctacaagcatcttcctcgccattgtaccttggaaacgctggtacagcttcccgattcctcacaaccgtcgctacccttgccaactcaagcactgttgattccagcgtccttactggtaataaccgcatgaagcaacgtcctattggggacttggtggatgcattgaccgccaacgtccttccattgaatacgtcgaaaggacgggccagtttgcctctcaagatcgctgcttcgggcggatttgccggagggaacatcaacctggccgccaaagtgtcgtcgcagtacgtctcttcactgctcatgtgtgctccttacgccaaggaacctgtcactctgaggttggtcggcgggaagcctatctcccaaccgtacattgatatgacaacggcaatgatgcgttcgtttggcattgatgtacaaaagtcgacaaccgaagagcacacctaccacattccccagggccgttacgtgaaccctgcggaatacgttatcgaaagtgacgccagctgtgccacttacccactcgccgttgcagccgtcactggcactacctgcaccgttcccaacattggctcggcttcgctgcaaggagatgctcgtttcgctgtcgaggttttgaggcctatggggtgtactgtggagcagactgaaacttctactactgttactggaccgtcggacggcatcttacgggccacttccaaacgtggatatggaaccaatgaccgatgcgttcctcggtgcttccgtactggcagccatcgcccgatggaaaagagtcaaaccacaccacccgtatctagcggtattgccaaccagcgtgtcaaagaatgcaaccgcattaaggccatgaaggatgagcttgccaagtttggagttatctgccgcgagcacgacgacggtctcgagattgacggtattgaccgctcaaacctgcgccagcccgttggcggtgttttctgctatgatgatcaccgagttgcattcagctttagtgtactctctctcgtgacaccccagccgacacttattctcgaaaaggaatgtgttgggaagacatggcccggctggtgggataccctccgtcagctattcaaggtgaagcttgagggcaaggaattagaagaagagcctgtggctgccagcgggcccgatcgcggtaacgcttcaatttacattattggcatgcgtggtgctggaaagtcgacagctggcaactgggtttctaaggctctcaaccggccattcgttgatttggatacagagcttgagactgttgagggcatgactattccggacatcatcaagacccgcggttggcaaggctttagaaatgcggagctggaaatcctgaaacgtaccttgaaggaacgctcgagaggatacgtttttgcttgtggtggcggtgtagttgagatgcctgaagctcggaaattgctgactgactaccataagaccaagggcaacgttctgctcctcatgcgtgacatcaagaagattatggactttttgtcaatcgacaagtcccgtcctgcttacgtcgaggatatgatgggcgtgtggcttcgacggaagccatggttccaggaatgcagtaatattcaatattacagccgagatgcttctcccagtgggctggctcgcgcgtccgaggactttaaccggttcctgcaggtagctaccgggcagattgacagcctcagtattatcaaggagaaagagcactctttctttgcgtcgctgactctaccggatctgcgtgaagctggcgacatcctcgaggaagtgtgtgtcggatctgacgctgtggagctacgggtcgatcttcttaaggatcccgcctcgaacaacgacattccgtctgttgactatgtcgtagagcagctctcttttctgcgaagtcgtgtcacactccctatcatcttcaccatccgtacccagagccagggcggtcgtttccccgataacgcccacgacgctgcgttggagctgtaccgtcttgcattcaggtccgggtgtgaatttgtcgatctcgatatcgctttccctgaagacatgctgcgggccgttacagagatgaagggcttctctaagatcattgcgtcgcaccacgaccccaagggcgagctttcttgggccaacatgtcctggatcaagttctacaataaagcgcttgaatatggtgacattatcaaacttgtgggtgttgcacgaaacatcgacgacaacacagccctgcggaagttcaagaactgggctgctgaagctcacgatgtccctctcatcgccataaacatgggtgaccaggggcagctgagccgcatcctcaacggcttcatgacacccgtgtctcaccctagcttgccattcaaggcagctcccggccaactctccgcaaccgagatccgcaagggcctgtctctcatgggtgaaatcaagcccaagaagttcgccatcttcggcagtcccatatcccaatcccgctccccagctctccacaacaccctatttgcccaggtcggcctcccccataactacacccgcctggagactacgaacgcccaagatgtgcaggagttcatccgctctcctgacttcggcggcgccttccgtaacaattcgctcaagctcgacatcatgccccttctcgacgaagttgccgcggaagccgagatcatcggagctgttaacacaatcattcccgtgtcgactggcaagaacactccatcacgcctagtcggccgcaacaccgactggcagggaatgattctgtccctccgcaaagcgggagtctacggacccaagagaaaggatcaagagcagtctgccctcgtcgtcggcggcggcggcacggcccgtgcagccatctacgccctgcacaacatgggctactctcccatctacatcgttggccgcaccccgtctaagctggaaaacatggtctctactttccccagcagctacaacatccgcatcgttgagagcccttcaagcttcgagtccgttccgcacgtcgcgattggtacaatccccgccgatcaaccaattgacccgactatgcgtgagacactgtgccacatgttcgagcgcgcgcaggaggcagacgctgaagctgtgaaggccattgagcatgcgccgcgtatcctgcttgagatggcgtacaagcctcaggtgaccgcactgatgaggctggcgtctgattcaggctggaagactattcctggtttggaggtgctagttggtcaagggtggtatcatagtttaaatactggactgggatctcgccgctatatgagagtgccagggcatgtagctcccccctcatttaactaa

SEQ ID NO: 22646 - protein, 1586 aa, Emericella nidulans
MSNPTKISILGRESIIADFGLWRNYVAKDLISDCSSTTYVLVTDTNIGSIYTPSFEEAFRKRAAEITPSPRLLIYNRPPGEVSKSRQTKADIEDWMLSQNPPCGRDTVVIALGGGVIGDLTGFVASTYMRGVRYVQVPTTLLAMVDSSIGGKTAIDTPLGKNLIGAIWQPTKIYIDLEFLETLPVREFINGMAEVIKTAAISSEEEFTALEENAETILKAVRREVTPGEHRFEGTEEILKARILASARHKAYVVSADEREGGLRNLLNWGHSIGHAIEAILTPQILHGECVAIGMVKEAELARHLGILKGVAVSRIVKCLAAYGLPTSLKDARIRKLTAGKHCSVDQLMFNMALDKKNDGPKKKIVLLSAIGTPYETRASVVANEDIRVVLAPSIEVHPGVAHSSNVICAPPGSKSISNRALVLAALGSGTCRIKNLLHSDDTEVMLNALERLGAATFSWEEEGEVLVVNGKGGNLQASSSPLYLGNAGTASRFLTTVATLANSSTVDSSVLTGNNRMKQRPIGDLVDALTANVLPLNTSKGRASLPLKIAASGGFAGGNINLAAKVSSQYVSSLLMCAPYAKEPVTLRLVGGKPISQPYIDMTTAMMRSFGIDVQKSTTEEHTYHIPQGRYVNPAEYVIESDASCATYPLAVAAVTGTTCTVPNIGSASLQGDARFAVEVLRPMGCTVEQTETSTTVTGPSDGILRATSKRGYGTNDRCVPRCFRTGSHRPMEKSQTTPPVSSGIANQRVKECNRIKAMKDELAKFGVICREHDDGLEIDGIDRSNLRQPVGGVFCYDDHRVAFSFSVLSLVTPQPTLILEKECVGKTWPGWWDTLRQLFKVKLEGKELEEEPVAASGPDRGNASIYIIGMRGAGKSTAGNWVSKALNRPFVDLDTELETVEGMTIPDIIKTRGWQGFRNAELEILKRTLKERSRGYVFACGGGVVEMPEARKLLTDYHKTKGNVLLLMRDIKKIMDFLSIDKSRPAYVEDMMGVWLRRKPWFQECSNIQYYSRDASPSGLARASEDFNRFLQVATGQIDSLSIIKEKEHSFFASLTLPDLREAGDILEEVCVGSDAVELRVDLLKDPASNNDIPSVDYVVEQLSFLRSRVTLPIIFTIRTQSQGGRFPDNAHDAALELYRLAFRSGCEFVDLDIAFPEDMLRAVTEMKGFSKIIASHHDPKGELSWANMSWIKFYNKALEYGDIIKLVGVARNIDDNTALRKFKNWAAEAHDVPLIAINMGDQGQLSRILNGFMTPVSHPSLPFKAAPGQLSATEIRKGLSLMGEIKPKKFAIFGSPISQSRSPALHNTLFAQVGLPHNYTRLETTNAQDVQEFIRSPDFGGAFRNNSLKLDIMPLLDEVAAEAEIIGAVNTIIPVSTGKNTPSRLVGRNTDWQGMILSLRKAGVYGPKRKDQEQSALVVGGGGTARAAIYALHNMGYSPIYIVGRTPSKLENMVSTFPSSYNIRIVESPSSFESVPHVAIGTIPADQPIDPTMRETLCHMFERAQEADAEAVKAIEHAPRILLEMAYKPQVTALMRLASDSGWKTIPGLEVLVGQGWYHSLNTGLGSRRYMRVPGHVAPPSFN

SEQ ID NO: 22647 - DNA, 822 bp, Buchnera aphidicola
  CDS (1)..(822)
atgtgtaaacttgaaaagtttaattacgctttgtttggaaatcctattgatcacagtcaatctcctaaaattcataatttttttgctacacaaacaggtattttgcatatttataaagctattaacattccattagatcaattttcttcagtagtttcagatttttttaaaaaaaatattaaaggtgctaatgtaacagcaccttttaaaaaagaagcgtattttttttctgataagttaactgaaagagcgaagattgcacaatctgtaaatactttaaagaaaataagcgataaatgtattttaggagataatactgacggtataggattattatctgatttagttagattaaattttataaaaaaaaatttttctatattaatacttggtgcaggaggtgctgtgaaaggtgttcttttgccacttttatctttgggatgttcagtttacattttaaatcgaactattttaaatgctaaaattttagttaaacaatttaataaatatggaaaaatttttgtttttgatagacaaaattttaaacaacaaaattttgatttagttatcaatgctatgtcaagaaatactgagaaaaaaaattttttacccttatctttaattacttctaaaacttttttttacgatatgaattatagtacacgcaatacaccctttattaattggtgttctaaagcaggaggaagctttatttctaatggaatagggatgctggtttttcaagcagcttattcttttttagaatggcacaatgtacttccagaaataaattatattattaatattttaaatataaaataa

SEQ ID NO: 22648 - protein, 273 aa, Buchnera aphidicola
MCKLEKFNYALFGNPIDHSQSPKIHNFFATQTGILHIYKAINIPLDQFSSVVSDFFKKNIKGANVTAPFKKEAYFFSDKLTERAKIAQSVNTLKKISDKCILGDNTDGIGLLSDLVRLNFIKKNFSILILGAGGAVKGVLLPLLSLGCSVYILNRTILNAKILVKQFNKYGKIFVFDRQNFKQQNFDLVINAMSRNTEKKNFLPLSLITSKTFFYDMNYSTRNTPFINWCSKAGGSFISNGIGMLVFQAAYSFLEWHNVLPEINYIINILNIK

SEQ ID NO: 22649 - DNA, 888 bp, Chlorobium tepidum
  CDS (1)..(888)
atgtcaaactctcagtccaaaaagattttcggactcatcggcaaacacgtcgattactcctggtcgccactgattcacaataccggattcgaggcactcgggcttccctgcgtctacaccattttcaacatcccttcgcccgaaatgatcggcgatgcactcaaaggaagccgtgctctcggcattgcgggattcagcgtaaccattccgtacaagaaaaccgtcgtgccattccttgacgaactctcacctgaagcgctctccatcggggcggtcaacaccatcgtcaacgacaacggacggctgctcggctacaatacggacatcgacggtttcgctgctccgctccttccgatggcggagtcgatccggaacaggccggtctgcatcttcggcaacggcggagccgcgctggccgccgtcgaagctttcaggctccgcttcaacccttcatcggtgctcctcgtggtgcgggatacgcagaaagccgaagatatgctcgaagagtacgcataccgcgacctcgtcaccatccatgcgggccgggagatcgaccagcccgcgtgcagcaaactgatccgcgattgccgcgtactggtcaacgcaacgccggtcggcactgccggaagaaacgatcacatccacagcatcctgccgaccggacacgggctcctgcacgatggccagatcgtttacgacatggtctacaatccgcccgaaacacccctgctcgccgaagcccgcgccgcaggagcaactgtcattgcgggcatcgagatgctcatcgcccaggccgcccgtgccttctccatctggacaggacaggaacttccggtcgatctggtcagaaaaaccgtactcgctgcaatcgaaaagagcgaaggctga

SEQ ID NO: 22650 - protein, 295 aa, Chlorobium tepidum
MSNSQSKKIFGLIGKHVDYSWSPLIHNTGFEALGLPCVYTIFNIPSPEMIGDALKGSRALGIAGFSVTIPYKKTVVPFLDELSPEALSIGAVNTIVNDNGRLLGYNTDIDGFAAPLLPMAESIRNRPVCIFGNGGAALAAVEAFRLRFNPSSVLLVVRDTQKAEDMLEEYAYRDLVTIHAGREIDQPACSKLIRDCRVLVNATPVGTAGRNDHIHSILPTGHGLLHDGQIVYDMVYNPPETPLLAEARAAGATVIAGIEMLIAQAARAFSIWTGQELPVDLVRKTVLAAIEKSEG

SEQ ID NO: 22651 - DNA, 816 bp, Clostridium perfringens
  CDS (1)..(816)
atgaagttatttggattaataggtgagaagttaggacatagtttatctccagagatacataataaagtttttaaagataataatatagatggattatataatcttttttctgtaaaaaaagattttgaaaataatattgtagaaagtctaaaatgcttaggagtaaagggagccaatgttacaataccatataaagagaaggttatggatcagctagatattatttcacatgaggccaaagttataggagcagtaaatactattttaataaaagatgggaaatcctatggttataacactgattattatggatttggtaaaatgctagaaagagcaaaggttaatattgaaggaaatagcttttttgttttaggagcagggggagcagctagaagtattttaaaatatttagaggatagcaaagctaaaaaaatagttttggtttctagggacaaagagaaagcttttaaaaaatttaaagatttcaatattaattttatgagttatggtgagcttgaagaaattaatgaagagtttgcgttaatcaatacaactccctgtggaatgtatcctaatacaaattcagtagctgtttcagaaaaggtaattaaaaagtttaaggttgctgtggatatagtctataatcctttagaaactaagtttttaaaaatggctaaggataatggtcttaaaacagtggatggattatttatgttagttggacaaggggttaaagctgaagagatttggaatggaataaaagtagataagtctacagaagaagagatatatgaagaattgaaatgtagattttaa

SEQ ID NO: 22652 - protein, 271 aa, Clostridium perfringens
MKLFGLIGEKLGHSLSPEIHNKVFKDNNIDGLYNLFSVKKDFENNIVESLKCLGVKGANVTIPYKEKVMDQLDIISHEAKVIGAVNTILIKDGKSYGYNTDYYGFGKMLERAKVNIEGNSFFVLGAGGAARSILKYLEDSKAKKIVLVSRDKEKAFKKFKDFNINFMSYGELEEINEEFALINTTPCGMYPNTNSVAVSEKVIKKFKVAVDIVYNPLETKFLKMAKDNGLKTVDGLFMLVGQGVKAEEIWNGIKVDKSTEEEIYEELKCRF

SEQ ID NO: 22653 - DNA, 852 bp, Corynebacterium glutamicum
  CDS (1)..(852)
atgaacgacagtattctcctcggcctaatcggccagggcctcgacctatcgcgcacccccgcaatgcacgaggcggaaggcctcgcgcagggacgtgcgacggtgtacaggcgcatcgacacgcttgggtcgcgtgcttccgggcaagatttaaagacgcttctcgacgccgccctctaccttggcttcaacggcctgaacatcactcacccgtacaaacaagcagtattacccctgcttgacgaagtctccgaacaagccacccaactcggcgcagtgaatactgtcgttatcgacgccaccggccacaccaccggccacaacaccgacgtctccggatttggccgcggaatggaagaaggcctccccaacgccaagctcgattccgtcgtgcaggtcggcgccggcggcgtaggaaacgcagtggcatacgccctggtcacccacggtgtgcagaaacttcaggtcgctgacctcgacacttcccgcgcgcaggcactggcagatgtcatcaacaacgcagtcggccgtgaagccgtcgtgggagtagacgcccgcggcatcgaagacgtcatcgccgccgccgacggagtagtcaacgcaacccccatgggaatgccagcacaccccggcaccgcctttgatgtcagctgcctcaccaaggatcactgggttggcgacgtcgtgtacatgcccatcgaaactgaacttctcaaagccgcccgtgccctcggctgcgaaaccctcgacggaacccgcatggcaatccaccaagccgtcgatgccttccgactgttcaccggcctcgaacccgacgtctcccgcatgcgggaaactttcctgtccctctaa

SEQ ID NO: 22654 - protein, 283 aa, Corynebacterium glutamicum
MNDSILLGLIGQGLDLSRTPAMHEAEGLAQGRATVYRRIDTLGSRASGQDLKTLLDAALYLGFNGLNITHPYKQAVLPLLDEVSEQATQLGAVNTVVIDATGHTTGHNTDVSGFGRGMEEGLPNAKLDSVVQVGAGGVGNAVAYALVTHGVQKLQVADLDTSRAQALADVINNAVGREAVVGVDARGIEDVIAAADGVVNATPMGMPAHPGTAFDVSCLTKDHWVGDVVYMPIETELLKAARALGCETLDGTRMAIHQAVDAFRLFTGLEPDVSRMRETFLSL

SEQ ID NO: 22655 - DNA, 819 bp, Escherichia coli O6
  CDS (1)..(819)
atggaaacctatgctgtttttggtaatccgatagcccacagcaaatcgccattcattcatcagcaatttgctcagcaactgaatattgaacatccctatgggcgtgtgttggcacccatcaatgatttcatcaacacactgaacactttctttagtgctggtggtaaaggtgcgaatgtgacggtaccttttaaagaagaggcttttgccagagcggatgagcttactgaacgggcagcgttggctggtgctgttaataccctcaagcggttagaagatggacgcctgctgggtgacaataccgatggtataggtttgttaagcgatctggaacgtctgtcttttatccgtcctggtttacgtattctgctcattggcgctggtggagcatctcgcggcgtactactgccactcctttccctggactgtgcggtgacaatcactaatcggacggtatcccgcgcggaagagttggctaaattgtttgcgcacactggcagtattcacgcgttgggtatggacgaactggaaggtcatgagtttgatctcattattaatgcaacatccagtggcatcagtggtgatattccggcgatcccgccatcgctcattcatccaggcatttattgctatgacatgttctatcagaaaggaaaaactccttttctggcatggtgtgagcagcgaggctcaaaacgtactgctgatggtttaggaatgctggtggcacaagcggctcatgccttccttctttggcatggcgttctgcctgatgtagaaccggtcatcaaactattgcaacaggagttgtcagcgtga

SEQ ID NO: 22656 - protein, 272 aa, Escherichia coli O6
METYAVFGNPIAHSKSPFIHQQFAQQLNIEHPYGRVLAPINDFINTLNTFFSAGGKGANVTVPFKEEAFARADELTERAALAGAVNTLKRLEDGRLLGDNTDGIGLLSDLERLSFIRPGLRILLIGAGGASRGVLLPLLSLDCAVTITNRTVSRAEELAKLFAHTGSIHALGMDELEGHEFDLIINATSSGISGDIPAIPPSLIHPGIYCYDMFYQKGKTPFLAWCEQRGSKRTADGLGMLVAQAAHAFLLWHGVLPDVEPVIKLLQQELSA

SEQ ID NO: 22657 - DNA, 843 bp, Methanosarcina acetivorans
  CDS (1)..(843)
atgaagcgagtttttggtgtatttggagaccctgtaggtcattctctttcccctgccatgcataattcagcgttttccgcacttggcatggactgcatctaccatgctttcagggtcaggccggaaaacctgagaaaagcaatcctgggagccgaagccatgggatttggagggcttaacctgacagtcccgttaaaagaagaagctctgaaactggatttcatcaggcctgacccccttgccgagagaatcggagcagtaaataccgtagttttcagtgaaacaggagaaatccggggatacaacaccgacggactcggagcaaggcaggctcttctcgaagctgcagtggaaataagggggtctaaagtggtggttgcaggggcaggaggagcagcaagagcagttgctttccagcttgcagccgacggtgccgagatcaccgtagtaaaccggaccgaagaaagggcagtcgaacttgcaaaagatgtcgcagctgcgtccctgccgggaaaaataaacggaaccgggctttcggggctaaaggaactgctgcgagatgcagacatcctgatcaataccacgactctcgggatgcatccgaacacggatacaacgattgcgacagcagaagaacttcacagcggccttactgtttttgatattgtctataaccctcttgagaccaggcttttaaaggaagcaaaggttgcaggggcaaaaaccgtaagcggggttttaatgctcgtctaccagggagcagaagctttcaaactctggacaggagtcgaagctccggccgaactcatgaaaaaaaccgtcctggaggctctgcaggcttga

SEQ ID NO: 22658 - protein, 280 aa, Methanosarcina acetivorans
MKRVFGVFGDPVGHSLSPAMHNSAFSALGMDCIYHAFRVRPENLRKAILGAEAMGFGGLNLTVPLKEEALKLDFIRPDPLAERIGAVNTVVFSETGEIRGYNTDGLGARQALLEAAVEIRGSKVVVAGAGGAARAVAFQLAADGAEITVVNRTEERAVELAKDVAAASLPGKINGTGLSGLKELLRDADILINTTTLGMHPNTDTTIATAEELHSGLTVFDIVYNPLETRLLKEAKVAGAKTVSGVLMLVYQGAEAFKLWTGVEAPAELMKKTVLEALQA

SEQ ID NO: 22659 - DNA, 873 bp, Methanopyrus kandleri
  CDS (1)..(873)
atgagcgtgtccgtatcggtcgacgctgaaaccaacgtcgtgggactcatcggacatcccgtcgagcactccctgtctccggccatgcacaacgccgcgttcaaggagctcggactgaactacgtgtacctggccttcgacgtgccaccggagaggctcgagggcgccgtccgaggtgccgccgatctggggatcgtcggccttaacgtgacgatacctcacaaagaagcggtcatggagctgtgcgatgagctagatcgcgacgccgaactgatcggggccgtgaacaccgtcaggttctcacggggtaaaatcgagggattcaacaccgacggcgaggggttcctgcgggcgctgcgggaagagacctacttcgatcctcgaggtaccaagtccgtgatcctcggtgcaggaggcgcggcccgcgccgtctccttcaagctcgccacggaaggggccgacgagatcgtcatcgccaaccgtacggtagaccgggcagagaggctcgcggaggagctgaaggagaaagtgggggtaaaggcacgcgccatagggctggacggggacgaaatcgagagggagcttcgggacgccgacctgctggttgacgccacgccggtcggtatgtacccgaacgaggacgaaccacccctcgttaccgctgaccaaatgcacgaggacttgatcgtgaacgacctcgtgtacaacccaccgaggacgcggctgctcgaggaggccgagaaggcgggagccaccccggtgagcggtgttggcatgttagtgtaccagggggcactggcgttcgagctgtggacgggggaagaggcaccggtggaggtcatgagggaagccgtcctggaacacctccgatga

SEQ ID NO: 22660 - protein, 290 aa, Methanopyrus kandleri
MSVSVSVDAETNVVGLIGHPVEHSLSPAMHNAAFKELGLNYVYLAFDVPPERLEGAVRGAADLGIVGLNVTIPHKEAVMELCDELDRDAELIGAVNTVRFSRGKIEGFNTDGEGFLRALREETYFDPRGTKSVILGAGGAARAVSFKLATEGADEIVIANRTVDRAERLAEELKEKVGVKARAIGLDGDEIERELRDADLLVDATPVGMYPNEDEPPLVTADQMHEDLIVNDLVYNPPRTRLLEEAEKAGATPVSGVGMLVYQGALAFELWTGEEAPVEVMREAVLEHLR

SEQ ID NO: 22661 - DNA, 843 bp, Methanosarcina mazei
  CDS (1)..(843)
atgaagcaggtttttggtgtatttggagaccctgtaggtcattccctttccccagccatgcataatgcagctttttcagcacttggcatggactgtatctatcacgctttcagggtcactccagaaaagctggaaaaagcgatccttggagctgaagctatgggatttggagggattaaccttacagttcccttgaaagaaaaggctttaaaacttgacttcgtcaagcctgacccccttgcaaagagaattggagcagtgaatactctggtattcgggaaaaagggagatatccagggatataacactgacgggcctggggcaaagcaggcgcttctggacactggagtggaaattagggggtccagaatggtggtcgcaggagcaggaggagcagcaagggcagttgcttttcagcttgcagccgacggtgcagatatcacagtaataaacaggacagaagaaagggcagtaggacttgcaagagaaatctcggctgcagaccttccgggaaaaatcagaggtaccgggctttcaggattaaaagaactgttaagggatgccgatgtcctgataaataccacaactctcggaatgcacccgaacacggacgcaactattgtaacagcagaagagcttcacagcggccttacagtttttgatatcgtatataacccacttgagacaaggcttttaagggaagccaggacatcaggagcaaaaacgataagcggggttttaatgctcgtctatcagggagcagaagctttcaggctctggacaggggttgagcctccgctggagcttatgaaaaagaccgtactggaggctctgcaagcttga

SEQ ID NO: 22662 - protein, 280 aa, Methanosarcina mazei
MKQVFGVFGDPVGHSLSPAMHNAAFSALGMDCIYHAFRVTPEKLEKAILGAEAMGFGGINLTVPLKEKALKLDFVKPDPLAKRIGAVNTLVFGKKGDIQGYNTDGPGAKQALLDTGVEIRGSRMVVAGAGGAARAVAFQLAADGADITVINRTEERAVGLAREISAADLPGKIRGTGLSGLKELLRDADVLINTTTLGMHPNTDATIVTAEELHSGLTVFDIVYNPLETRLLREARTSGAKTISGVLMLVYQGAEAFRLWTGVEPPLELMKKTVLEALQA

SEQ ID NO: 22663 - DNA, 810 bp, Neisseria mucosa
  CDS (1)..(810)
atgaacactgttccccgttatgccgttttcggcaaccccgtcgcgcacagcaaatcgccgcaaatccatcggcagtttgccttgcaggaaggcgtcgaaatcgaatatgagcgcatttgcgccgacaccggcggtttcgcgcaggcggtcgaagcgttttttgccgacggcgggcgcggggcgaatgttaccgtaccgttcaagcaggaagcgtttgccttgtcggacgaacattccgaacgcgcgttggcagcgggtgcggtcaatacgctgattttgctggaaaacggtaaaatacgcggcgacaataccgacggaatcggactgacggacgatatttcaaagaggctgggcgtggaactgtcaggtaaaaccgtcttgctgctcggcgcgggcggcgcggtgcgcggcgtgattcccgtattgaaagaataccgccccgcgcgcatcgttatcgccaaccggacccacaccaaagcggcggaaatggcggcgcatttcggtattgaagccatacctttggatgaactggaaggcggcttcgacatcatcatcaacggcacatccggcggcttaagcggacagcttcccgccgtatcgcccaaagtctttgaacattgcactttggcttacgatatggtttacggcgaagcggcagagccgtttttagcgttcgcccgccaatcaggcgcaaaacaaaccgccgacggattgggcatgctggtcggacaggcggcagcttcctaccggctttggcgcggtttcgcgcccgatgtcctgcccgtcgtccaatatatgagagagttataa

SEQ ID NO: 22664 - protein, 269 aa, Neisseria mucosa
MNTVPRYAVFGNPVAHSKSPQIHRQFALQEGVEIEYERICADTGGFAQAVEAFFADGGRGANVTVPFKQEAFALSDEHSERALAAGAVNTLILLENGKIRGDNTDGIGLTDDISKRLGVELSGKTVLLLGAGGAVRGVIPVLKEYRPARIVIANRTHTKAAEMAAHFGIEAIPLDELEGGFDIIINGTSGGLSGQLPAVSPKVFEHCTLAYDMVYGEAAEPFLAFARQSGAKQTADGLGMLVGQAAASYRLWRGFAPDVLPVVQYMREL

SEQ ID NO: 22665 - DNA, 810 bp, Neisseria pharyngis
  CDS (1)..(810)
atgaacactattccccgttatgccgttttcggcaaccccgtcgcgcacagcaaatcgccgcaaatccatcggcagtttgccttgcaggaaggcgtcgaaatcgaatacgaacgcatttgcgccgacatcggcggtttcgcgcaggcggttgaagcgttttttgccaacggcgggcgcggggcaaatgttaccgtaccgttcaaacaggaagcgtttgccttgtcggacgaacattcggaacgcgctttggcggcgggtgcggtcaatacgctgattttgctggaaaacggtaaaatacgcggcgacaataccgacggactcggactgacggacgatattgcaaagaggttgggcgtagagatttccgacaaaaccgtcttgctgctcggcgcgggcggcgcggtgcgcggcgtcattcccgtattaaaagaataccaccccgctcgcatcgttatcgccaaccgaacccatgccaaagcagcggaaatggcggtgcatttcgatatagatgccgtccctttggatgaactggaaggcggcttcgacatcatcatcaacggcacatccggcggcttaagcggacagcttcccgccgtttcgccgaaaatttttgaacattgcactttggcttacgatatggtttacggcgaagcggcagaaccgtttttagcgttcgcccgccaatcaggcgcaaaacaaaccgccgacggattgggcatgctggtcggacaggcggcggcttcctaccgtctctggcgcggctttgcgcccgatgtcctgcccgtcgtccaatatatgagagagttataa

SEQ ID NO: 22666 - protein, 269 aa, Neisseria pharyngis
MNTIPRYAVFGNPVAHSKSPQIHRQFALQEGVEIEYERICADIGGFAQAVEAFFANGGRGANVTVPFKQEAFALSDEHSERALAAGAVNTLILLENGKIRGDNTDGLGLTDDIAKRLGVEISDKTVLLLGAGGAVRGVIPVLKEYHPARIVIANRTHAKAAEMAVHFDIDAVPLDELEGGFDIIINGTSGGLSGQLPAVSPKIFEHCTLAYDMVYGEAAEPFLAFARQSGAKQTADGLGMLVGQAAASYRLWRGFAPDVLPVVQYMREL

SEQ ID NO: 22667 - DNA, 810 bp, Neisseria polysaccharea
  CDS (1)..(810)
atgaccgccctcccccgctacgccgttttcggcaatcccgtcgcacacagcaagtcgccgcagattcatcagcaatttacccttcaggaaggcgttgacatcgaatacggacgcatttgcgccgacatcgacggttttgcacaggcggtttcgacattttttgaaacaggcggctgcggtgcaaacgtaaccgtgccgttcaaacaagaagcttttgcgctggcggacgagcattccgaccgcgctttggcagcaggtgcggtcaatacgctgattctgttgaaaaacggcaagctgcgtggcgacaacaccgacggtatcggtttggtcaacgacatcacgcaggtcaaaaacattgccattgagggcaaaaccattttgcttttgggcgcgggcggcgcggtgcgcggcgtgattccggtattgaaagaacaccgccctgcccgtatcgtcattgccaaccgtacccacgccaaagccgaggaattggcgcggcttttcggcattgaagccgtcccgatggcagatttgaacggcggtttcgatatcatcatcaacggcacgtccggcggcttgagtggtcagcttcctgccgtcaatcctgaaattttccgcagctgccgccttgcctacgatatggtttacggcgacgcagcgcagacgtttttaaactttgcccaaagcaacggtgctgccgaagtttcagacggcctgggcatgctggtcggtcaggctgccgcctcctaccatatttggcgcgggtttacgcctgatatccgccccgtcatcgaatacatgaaagccctgtaa

SEQ ID NO: 22668 - protein, 269 aa, Neisseria polysaccharea
MTALPRYAVFGNPVAHSKSPQIHQQFTLQEGVDIEYGRICADIDGFAQAVSTFFETGGCGANVTVPFKQEAFALADEHSDRALAAGAVNTLILLKNGKLRGDNTDGIGLVNDITQVKNIAIEGKTILLLGAGGAVRGVIPVLKEHRPARIVIANRTHAKAEELARLFGIEAVPMADLNGGFDIIINGTSGGLSGQLPAVNPEIFRSCRLAYDMVYGDAAQTFLNFAQSNGAAEVSDGLGMLVGQAAASYHIWRGFTPDIRPVIEYMKAL

SEQ ID NO: 22669 - DNA, 810 bp, Pasteurella multocida
  CDS (1)..(810)
atggataaatacgcggtatggggcaatccaatcgcccaaagtaaatcaccacaaattcatcaaatctttgccaatcaaactcagcaacagatggaatacgtggcaatgttaggtgatgaacaagattttgaacagcaattacgcgtcttctttgaaaaaggcgccaaaggttgcaacattaccgcgccgtttaaagagcgggcgtttcagttagcggatcttcacagcgagcgttgtttgacggcggaagcctgtaataccttgaaaaaattagacgacgggcgtctctatggcgataacaccgatggagcaggtttagtcagtgatttacaacgcttaggttggcttaagccagaacaaaccattttgattttgggcgcaggtggcgcgacaaaaggtgtgttgttaccgttattacaagccaagcaacatattgtgttggctaaccgtaccttaagtaaggcagaggatttggcacaaaaatttgcgcaatatgggcaaatccaagcagttgagctggataatatccccgtgcaatccttcgatttaatcatcaacgccacctcatcaggcttgcacgggcaaacggtacagatgaaccctgaaattttgcaaaacgctaccgcactttacgatatgcaatatgctaaacaagccgatacgccgtttgtggcgttatgcaaacaattaggcaagcaaaacgtcagcgatggctttggtatgttggtggcacaagccgctcacgcttttcatttatggcgaggggtgatgccagaatttgaggcgttgctagaacaagagtggctttaa

SEQ ID NO: 22670 - protein, 269 aa, Pasteurella multocida
MDKYAVWGNPIAQSKSPQIHQIFANQTQQQMEYVAMLGDEQDFEQQLRVFFEKGAKGCNITAPFKERAFQLADLHSERCLTAEACNTLKKLDDGRLYGDNTDGAGLVSDLQRLGWLKPEQTILILGAGGATKGVLLPLLQAKQHIVLANRTLSKAEDLAQKFAQYGQIQAVELDNIPVQSFDLIINATSSGLHGQTVQMNPEILQNATALYDMQYAKQADTPFVALCKQLGKQNVSDGFGMLVAQAAHAFHLWRGVMPEFEALLEQEWL

SEQ ID NO: 22671 - DNA, 816 bp, Pyrococcus furiosus
  CDS (1)..(816)
atgataaacggagaaacaaaaatttatggaataattggcaatccagtaaaacactccttgagcccaataatgcacaacgccctattcaaaaaatttggaataaatgccatttacgtcccattcgaagtgaaaaaagatctaaagaatgcaataaacggtgttaaggcacttgacattcagggagtaaacgttacaatgccctacaaagaagaagttataaaattccttgatgagctctccgaagactctcaaaatataggaagcgtaaacactgttgtgaaccttgaaggaaagctagtggggtatacaacggatggaataggagccagaagagcattggagcgatttactcaggtagatggggccaacattttaattctaggagcaggaggtgctggaaaagcaattgcatatgaactctcaaaagttgcaaatgtcgtagtcttaaacagaaccatagagaaagccaagaggttagaaaagtttggaatagtgggagactccctagaagccctcccatattatgtcgagtgggcagatatactgattaatgcaacctcagttggaatgaatgaagaaaaaagtctagtaccaaagaatctcctaagacctgggctagttgttatggatatagtctacaaaccactaaacaccctacttcttagatatgctcaggaaaagggatgtatagctattgatggactttggatgctagtctatcaaggagcagagagttttagactttggactggagaggagggagacgtagaacttatgaggagggtcgcccttgcgtggcttagggaaaggaagtag

SEQ ID NO: 22672 - protein, 271 aa, Pyrococcus furiosus
MINGETKIYGIIGNPVKHSLSPIMHNALFKKFGINAIYVPFEVKKDLKNAINGVKALDIQGVNVTMPYKEEVIKFLDELSEDSQNIGSVNTVVNLEGKLVGYTTDGIGARRALERFTQVDGANILILGAGGAGKAIAYELSKVANVVVLNRTIEKAKRLEKFGIVGDSLEALPYYVEWADILINATSVGMNEEKSLVPKNLLRPGLVVMDIVYKPLNTLLLRYAQEKGCIAIDGLWMLVYQGAESFRLWTGEEGDVELMRRVALAWLRERK

SEQ ID NO: 22673 - DNA, 843 bp, Rhizobium loti
  CDS (1)..(843)
atggttgaggcaacgaagaaggccttcgtcaccgggcatccgatcaagcattcgcgctcgccgaagatccacggccactggctggcccagcacggcatcgacggcagctacgaggcgatcgacgtggcgccgcaggattttgccgaattcatcgcggcattgcaggcaaacgggtttcgcggcggcaatgtcaccattccgcacaaggaagccgccttcgctgttgcccagcgccgcgaccaggcggctgaagagatcggcgccgtcaacacgctgtggttcgaggacggcgtcctgcggggcggcaacaccgatggtcacggctttgccgccaatctcgatgactgcgcgccgggctgggcgaacaccggccccgcggtcgtgctcggcgccggcggcgcgtcgcgcgccgtcatccaggcgctgaagcaacgcggtttttccgacatccgcatcgtcaaccgcacgctcgcccgggcgcaggaattgcgggatcgtttcggcgccggcgtttcggcgcatggcacggcggcgaccgacgaattgctggccgacgccggcctgctggtcaacaccacggcacttggcatggtcggcaatgaaggcctcgccgccgatccggccttgctgccggaccatgccatcgtcaccgaccttgtctatgtgccgctcgaaacacccttgctcgccgccgcgcgcgccagggggctgaagacggtcgacggcctcggcatgctgctcaaccaggccgtgcccggcttcgaacattggttcggcgtcaggcctcaggtcacggctgagctgcgcgcactcatcgttgccgatctggtgccgaagccatga

SEQ ID NO: 22674 - protein, 280 aa, Rhizobium loti
MVEATKKAFVTGHPIKHSRSPKIHGHWLAQHGIDGSYEAIDVAPQDFAEFIAALQANGFRGGNVTIPHKEAAFAVAQRRDQAAEEIGAVNTLWFEDGVLRGGNTDGHGFAANLDDCAPGWANTGPAVVLGAGGASRAVIQALKQRGFSDIRIVNRTLARAQELRDRFGAGVSAHGTAATDELLADAGLLVNTTALGMVGNEGLAADPALLPDHAIVTDLVYVPLETPLLAAARARGLKTVDGLGMLLNQAVPGFEHWFGVRPQVTAELRALIVADLVPKP

SEQ ID NO: 22675 - DNA, 861 bp, Rhizobium meliloti
  CDS (1)..(861)
atgcatgattcacgtgaaacatttgttaaccatgcctttgtcaccggctatccggtgaagcattcgcgatcgccgctcattcatggccattggctgaaacagttcggaattcgggggagctaccgggcccacgaagttacgcccgaggcctttcccgatttcatgcggcagatcaaggaaggaagaaccgacttctgcggcggcaatgtcacgattccgcataaggaggccgccttccggctggccgatcggccggacgaactgagcgccgaactcggagcggccaacacgctctggctcgagaatggaaaaatccgcgcgacgaacaccgacgggcgtggcttcgtcgccaatctggacgagcgcgccaaaggatgggaccgaatctcggccgcggtgattctcggtgccggcggcgccagccgggccgtgatacaggcgatccgcgaccgcggggtcaagacgatccatgtggtgaaccgcacgcccgagagggcgagggaactggccgatcgcttcggcacggcggtgcacgcacattcgatggcggcgcttcccgaagtcgtttccggcgccggcctcttcgtcaacacgacgtcgctcggcatggacggcgagccggcgccggcgatcgacttttcgggcctggcacccgacgccgtcgtcaccgacatcgtctatgtgccattgaagacgccgctgttgcggcaggcggaagagcagggcttccgcatcgtcgacggacttggcatgcttctccatcaggcagtgcccggatttgaaaaatggttcggtctgaggccggtcgtcgacgaaacgctaagacagatcatcatcagcgatatggacaggcacgcatga

SEQ ID NO: 22676 - protein, 286 aa, Rhizobium meliloti
MHDSRETFVNHAFVTGYPVKHSRSPLIHGHWLKQFGIRGSYRAHEVTPEAFPDFMRQIKEGRTDFCGGNVTIPHKEAAFRLADRPDELSAELGAANTLWLENGKIRATNTDGRGFVANLDERAKGWDRISAAVILGAGGASRAVIQAIRDRGVKTIHVVNRTPERARELADRFGTAVHAHSMAALPEVVSGAGLFVNTTSLGMDGEPAPAIDFSGLAPDAVVTDIVYVPLKTPLLRQAEEQGFRIVDGLGMLLHQAVPGFEKWFGLRPVVDETLRQIIISDMDRHA

SEQ ID NO: 22677 - DNA, 819 bp, Salmonella typhimurium
  CDS (1)..(819)
atggaaacctatgctgtttttggaaatccgattgcgcacagcaaatcgccatttattcatcagcaatttgctcagcagctagatattgttcacccctatggtcgcgtgctggcccctattaataatttcattaatacgcttgatgcctttttcgcggcagggggaaaaggcgcaaacatcacagtaccttttaaagaggaggcgtttgcgcgttcggatgagttaacggaacgagcatcgctggcgggagccgtcaatacattaaaacggctggaagatggtcgtttgcttggcgacaatactgacggtatcggtttattaggcgatctcgaacgtttaaattttatccgcccaggattgcgtattttgctgattggcgcgggcggcgcatcccggggcgtgctgttacctctgctttctttggattgcgcggtcactatcaccaaccgtacagcttcacgtgccgaagcgttggcgaaaatctttgctcataccggcagcgttcatgccacggatatggacaagctggatggttgtgagtttgacctaattattaatgcgacctccagcggcatacggggcgaaatcccggcgataccagcgtcacttattcacccttccctctgttgctatgacatgttctatcaaaaagggaatacgccatttctctcctggtgtgtacaacagggcgcaaaacgctacgcagatgggctgggaatgctggtggggcaggctgcacatgccgttttgctttggcacggtgtattaccgcaggtcgagccagtgattgagcagctacagcaggaattattagcgtga

SEQ ID NO: 22678 - protein, 272 aa, Salmonella typhimurium
METYAVFGNPIAHSKSPFIHQQFAQQLDIVHPYGRVLAPINNFINTLDAFFAAGGKGANITVPFKEEAFARSDELTERASLAGAVNTLKRLEDGRLLGDNTDGIGLLGDLERLNFIRPGLRILLIGAGGASRGVLLPLLSLDCAVTITNRTASRAEALAKIFAHTGSVHATDMDKLDGCEFDLIINATSSGIRGEIPAIPASLIHPSLCCYDMFYQKGNTPFLSWCVQQGAKRYADGLGMLVGQAAHAVLLWHGVLPQVEPVIEQLQQELLA

SEQ ID NO: 22679 - DNA, 807 bp, Staphylococcus aureus
  CDS (1)..(807)
atgaaatttgcagttatcggaaatcctatttcacattccttgtcgcccgttatgcatagagcaaattttaattctttaggattagatgatacttatgaagctttaaatattccaattgaagattttcatttaattaaagaaattatttcgaaaaaagaattagatggctttaatatcacaattcctcataaagaacgtatcataccgtatttagatcatgttgatgaacaagcgattaatgcaggtgcagttaacactgttttgataaaagatgacaagtggatagggtataatacagatggtattggttatgttaaaggattgcacagcgtttatccagatttagaaaatgcatacattttaattttgggcgcaggtggtgcaagtaaaggtattgcttatgaattagcaaaatttgtaaagcccaaattaactgttgcgaatagaacgatggctcgttttgaatcttggaatttaaatataaaccaaatttcattagcagatgctgaaaagtatttagctgaattcgatatcgttattaatacaacaccagcgggtatggctggaaataacgaaagtattattaatttaaagcatctttctcccaatactttaatgagtgatattgtttatataccgtataaaacacctattttagaggaagcagagcgcaagggaaaccatatttataatggcttagatatgtttgtttaccaaggtgcggaaagctttaaaatttggactaataaagatgctgatattaattctatgaaaacagcagttttacaacaattaaaaggagaataa

SEQ ID NO: 22680 - protein, 268 aa, Staphylococcus aureus
MKFAVIGNPISHSLSPVMHRANFNSLGLDDTYEALNIPIEDFHLIKEIISKKELDGFNITIPHKERIIPYLDHVDEQAINAGAVNTVLIKDDKWIGYNTDGIGYVKGLHSVYPDLENAYILILGAGGASKGIAYELAKFVKPKLTVANRTMARFESWNLNINQISLADAEKYLAEFDIVINTTPAGMAGNNESIINLKHLSPNTLMSDIVYIPYKTPILEEAERKGNHIYNGLDMFVYQGAESFKIWTNKDADINSMKTAVLQQLKGE

SEQ ID NO: 22681 - DNA, 819 bp, Staphylococcus epidermidis
  CDS (1)..(819)
atgataaaagtgaaatttgcagtaattggaaaccccatttctcattcattatcgccattgatgcatcatgctaattttcaatctttaaatttggaaaacacgtatgaagcgataaatgtaccagttaatcaatttcaagacattaaaaaaataatttcagaaaagagcattgatggattcaatgttactattccacataaagaacgtattattccgtacctagatgatattaatgaacaagcgaaatctgttggggcggtaaatacagttttagttaaagatggtaagtggattggttataatactgatggaattggttatgttaatggtttaaaacaaatatatgaaggtatagaagacgcttatatattaattttaggtgcaggtggagcaagtaaaggtatagcaaatgaattatataaaatcgttcgtccgactttaacagttgcaaatagaacgatgtctcgttttaataattggtcgttaaatattaacaaaataaatttaagccatgcagaaagccatttagatgaatttgatattataataaacactacacctgctggtatgaacggcaatacagattctgtaatttctttaaatcgtttagcttcacatactttagtaagtgatattgtttataatccatataaaacaccaatactaatagaagctgaacaaagaggtaatccaatctataatggtcttgatatgttcgttcatcaaggtgctgaaagttttaaaatttggactaatctagaaccagatataaaagcaatgaaaaacatagtaattcaaaaattgaaaggagaattatga

SEQ ID NO: 22682 - protein, 272 aa, Staphylococcus epidermidis
MIKVKFAVIGNPISHSLSPLMHHANFQSLNLENTYEAINVPVNQFQDIKKIISEKSIDGFNVTIPHKERIIPYLDDINEQAKSVGAVNTVLVKDGKWIGYNTDGIGYVNGLKQIYEGIEDAYILILGAGGASKGIANELYKIVRPTLTVANRTMSRFNNWSLNINKINLSHAESHLDEFDIIINTTPAGMNGNTDSVISLNRLASHTLVSDIVYNPYKTPILIEAEQRGNPIYNGLDMFVHQGAESFKIWTNLEPDIKAMKNIVIQKLKGEL

SEQ ID NO: 22683 - DNA, 879 bp, Streptococcus pyogenes
  CDS (1)..(879)
atgtcagaacgtttatcaggccacaccctgttggtctctttgcttgctacccctattcgtcatagtttgtctcccaaaatgcacaatgaagcctatgctaaactggggctggattatgcctaccttgcttttgaagtagggacagagcaattagcagatgccgtgcaagggattcgtgccttaggaattcgtggctccaatgtgtctatgccaaataaagaagctattttacccttattggatgacttgtccccagctgctgagttggtcggtgcagtcaatacggttgtcaataaggatggtaaaggacatctcgtggggcatattacagacggtataggagcgctcagagccttggctgacgaaggagtgtcggtaaagaacaaaatcattaccctagcaggagttggtggggctgggaaagctatcgctgtccagctcgcttttgacggcgccaaagaggttcgtttgtttaaccgacaagctacacgtctaagtagcgttcaaaagcttgtgacaaaactgaaccagctaacaaggactaaagtaacccttcaagacttggaagatcagactgcctttaaggaggccatcagggaatctcatctatttattgatgctacaagtgtaggaatgaagcctttagaaaatctaagtttgattaccgaccccgagctcattcgcccagacttggtggtctttgacatcgtgtacagcccagcagaaaccaagttactagcctttgcccgtcaacatggcgcccaaaaagtcattaatgggctaggaatggtgctttatcaaggagcagaagcttttaaattaatcactggtcaagacatgccagttgacgctattaaacctcttttaggtgatgagtaa

SEQ ID NO: 22684 - protein, 292 aa, Streptococcus pyogenes
MSERLSGHTLLVSLLATPIRHSLSPKMHNEAYAKLGLDYAYLAFEVGTEQLADAVQGIRALGIRGSNVSMPNKEAILPLLDDLSPAAELVGAVNTVVNKDGKGHLVGHITDGIGALRALADEGVSVKNKIITLAGVGGAGKAIAVQLAFDGAKEVRLFNRQATRLSSVQKLVTKLNQLTRTKVTLQDLEDQTAFKEAIRESHLFIDATSVGMKPLENLSLITDPELIRPDLVVFDIVYSPAETKLLAFARQHGAQKVINGLGMVLYQGAEAFKLITGQDMPVDAIKPLLGDE

SEQ ID NO: 22685 - DNA, 861 bp, Synechococcus elongatus
  CDS (1)..(861)
atgccgaagatctctggccaaacccagcttctgggagtcattggtgacccgattgaacacaccctctcaccggcaatgcacaatgccgcgctggagtatttggggttgaactatgtctatgtgcccttttgggtcaagccacagcagttgggggtggcgatcgctggcctagaggccctgaacgtcgttggctttaatgtcaccattccccacaaggaaaccattcttccctatttagcggatgtcagcgacctcgcccagcaggtgggagcagtcaacaccgtctatcgcagtgaaaaaggatgggtgggtactaataccgatgtgcatggcttcttggcacccctgcggcaacaatcctgcctctggtcggaaattgctgttttagtcttgggctatggcggtgcggcgcgagccgtggtcaccgcctgttatgacttgggctgccggcagatctatatcagtggtcgccaaagggaacggctaggggcctttgttgccagttggccacagatcaccctccatccccttttatggtcagagcgagccacctgtttggcaaaaatcagccttgtggtcaataccactcccattggtatgagtccccatacgggcgccacccccctaacagccgaagacttggcaaaattacccgccactgccattgtctatgacctcatctacaagcctcgccccaccctgcttttgcaattggcgatggcacggggactgcaaaccttcgacggccttgccatgcttctccatcaaggagcggcagccttggagtactggcttggccaacccgcccccactgccatcatggccactgcccttgaaactgccctagggacggagaaataa

SEQ ID NO: 22686 - protein, 286 aa, Synechococcus elongatus
MPKISGQTQLLGVIGDPIEHTLSPAMHNAALEYLGLNYVYVPFWVKPQQLGVAIAGLEALNVVGFNVTIPHKETILPYLADVSDLAQQVGAVNTVYRSEKGWVGTNTDVHGFLAPLRQQSCLWSEIAVLVLGYGGAARAVVTACYDLGCRQIYISGRQRERLGAFVASWPQITLHPLLWSERATCLAKISLVVNTTPIGMSPHTGATPLTAEDLAKLPATAIVYDLIYKPRPTLLLQLAMARGLQTFDGLAMLLHQGAAALEYWLGQPAPTAIMATALETALGTEK

SEQ ID NO: 22687 - DNA, 807 bp, Thermoplasma acidophilum
  CDS (1)..(807)
atgaacggaaatagcattatcgggctgatcgggcatcccgtatcgcattccataggccagatactttacaacaggatctttcaggacatgggcatagacgccttttacttggcgatggatgttcacatgaacgttcttccagcattcctgaagaattctttttttctaaaagcgttcaacgtgacgataccgcacaaggtatctataattccattccttgatgatctggatgaaatagcatcacaaacacgttctgttaacctcgtgataagggaacagagccgcatgaagggatacaacaccgattactacggtctggactacgcactatcttttaatcaagttgagattgaggaaaaaagaatcgtgatagccggttccggcggcattgcaagaacagtaatcagatacatgctggatcatggcgcgcatagagttgacgttctgacgaggaatgcacagaatgccagaagaaatctggatattccaggcataggcctgcatgaaaatatcgatgaggactacgacatctacgtgaactgcacacccctgggcacacttggagacggcgatcccttctcgactgtcgatttccgcagcgggcgtacgggcatagatctcgtctacaatccacctgacactcccttcctgaagagaatgcggaatgcgggcggccgaacggtctccggcctggatgtcttcatagggcagggactccggacgctggaacttgtgttcgggatcaggccagacagtatcttcagagaatatgcagtggaggctctgaatgaaatacgcaagggttag

SEQ ID NO: 22688 - protein, 268 aa, Thermoplasma acidophilum
MNGNSIIGLIGHPVSHSIGQILYNRIFQDMGIDAFYLAMDVHMNVLPAFLKNSFFLKAFNVTIPHKVSIIPFLDDLDEIASQTRSVNLVIREQSRMKGYNTDYYGLDYALSFNQVEIEEKRIVIAGSGGIARTVIRYMLDHGAHRVDVLTRNAQNARRNLDIPGIGLHENIDEDYDIYVNCTPLGTLGDGDPFSTVDFRSGRTGIDLVYNPPDTPFLKRMRNAGGRTVSGLDVFIGQGLRTLELVFGIRPDSIFREYAVEALNEIRKG

SEQ ID NO: 22689 - DNA, 843 bp, Thermoanaerobacter tengcongensis
  CDS (1)..(843)
atgaaaattgacagcaccacaaaggtctttggacttattgggcatccagtcaaacacagtctttcacctttgatacataactcttcttttgaaaagctcaatttcaatggagtgtacgtggtctttgatgtagcccctgagttattagaaaatgctgtaaaaggactaaaagctttaggtataaagggatttaatgtgactgtccctcataaagagagcgtaatgaattatttggattttgtcacggaagaggcagaaaaaattggagctgtgaatacagttgtcaatgaaaatgggattttaaaaggctacaatacagacgtacagggattcatagattccttaaaagagttgaaagaggatgtaagaggaagaaaagcctttgtactgggggcaggaggagcatcaaaagctatatgttttgcccttgcaagggaaggagtagaatcaattgtaatagccaataggactttaaataaagcgaaagcgctggcagaatacataagggaagaatttaagatgaaatgcgattactgcagtatagaagaagtggaaaaatttaatgaaattgatattctcataaacacaacttctgtggggatgcatcctgaagtggggaactctccagtttctgaggaggtagtggcaaaggcaaattttgtgtatgatttaatatacaatccttctgagacgctttttttaaagtacgcaagaaaaaacggtgtaaaaagcgcaaatggcctctcaatgcttgtgaatcaggctagctatgctttttacctctggacaggagagttttttgacaaagactttgtgtatgagaaaataaggggagaaatgtag

SEQ ID NO: 22690 - protein, 280 aa, Thermoanaerobacter tengcongensis
MKIDSTTKVFGLIGHPVKHSLSPLIHNSSFEKLNFNGVYVVFDVAPELLENAVKGLKALGIKGFNVTVPHKESVMNYLDFVTEEAEKIGAVNTVVNENGILKGYNTDVQGFIDSLKELKEDVRGRKAFVLGAGGASKAICFALAREGVESIVIANRTLNKAKALAEYIREEFKMKCDYCSIEEVEKFNEIDILINTTSVGMHPEVGNSPVSEEVVAKANFVYDLIYNPSETLFLKYARKNGVKSANGLSMLVNQASYAFYLWTGEFFDKDFVYEKIRGEM

SEQ ID NO: 22691 - DNA, 834 bp, Vibrio parahaemolyticus
  CDS (1)..(834)
atgaccccgcaaatcgatcgttacgccgtgtttggtaaccctatcgggcacagcaagtcgccatttatccatacactctttgctcgtcaaactaatcagtccctaacatacaccgcagagtgtgcgcctgtgggtggatttatcgaggcggcgaaagcattttttgctgacggcggcaaaggctgtaacgtgaccttgccttttaaagaagatgcctatcaatttgctagccgtttgaccgagcgtgctcagcttgctggagcagtgaatacacttaagaagcttgatgatggtgaaatcattggtgataacactgatggtgcaggcttagtgcaggacttgttgcaacatcaagtcgttttagaaggcgcacgtatcctgatcataggagctggtggtgccgctcgaggagtgattaaaccattgctcgatcaaaaaccaacatctctaacgataactaatcgtacattttccaaagccgaagaattggcagaattgttttctgtgtatggccctgttacagcaaaagagatgaatatcgttgctgaagagttcgatatcataatcaactctacgtctgcatcattgagtggtgagttacctgcgatctcttcctcggtgttcgccgccaatagtacaagctacgacatgatgtatggcaaaggtgataccacatttaaccaatgggctaagcaacacggtgcggcacatgcttatgatggtttaggtatgttagttggccaagctgctgagagttttatgttatggcgcggtcttcgtcctggagccaaacagattttgcgtgaattaagaaagaaccttgaaggtcaataa

SEQ ID NO: 22692 - protein, 277 aa, Vibrio parahaemolyticus
MTPQIDRYAVFGNPIGHSKSPFIHTLFARQTNQSLTYTAECAPVGGFIEAAKAFFADGGKGCNVTLPFKEDAYQFASRLTERAQLAGAVNTLKKLDDGEIIGDNTDGAGLVQDLLQHQVVLEGARILIIGAGGAARGVIKPLLDQKPTSLTITNRTFSKAEELAELFSVYGPVTAKEMNIVAEEFDIIINSTSASLSGELPAISSSVFAANSTSYDMMYGKGDTTFNQWAKQHGAAHAYDGLGMLVGQAAESFMLWRGLRPGAKQILRELRKNLEGQ

SEQ ID NO: 22693 - DNA, 852 bp, Xanthomonas axonopodis
  CDS (1)..(852)
atgcccgtctcccgttatgccgtattcggtcaccccgtcgcccattcgctgtcgccggccatccatgccgacttcgggaagcagaccggcattgcgctggactacaccgccatcgacgcgtcgctggaagacttcagcgccgcgctgcaacgcttcgccgatgaaggcggcaaaggcgcgaacgtcaccctgccgttgaaggaagccgcctatgcgctggccagcagcctgagcgatcgcgcgcggctggccggggcggtgaacacgttggtgcgtaacgacggccagtggcagggcgacaacaccgacggcgccggcctggtgcgcgacctcaccgagcgccagggcctggatctgcgtggccgccgcgtgctgctgctgggcgccggcggcgctgctcgcggcgtggcgccggcgctgctggaggcgggcatcaccgcaatggtggtggtgaaccgctcgcccgagcgcgccgatgccttgtgcgatgcgctgggcgagccggcgcgggtgacgtcgcgttacatcgaggacctgcgcgagctcggcgatttcgaactgatcgtcaatgccactgccgccggccgcgaccgcgatgccggcgcgttcgcattgccactgggcctggtcaacagcctgactgccgcggtcgatctgaattacggcgataccgcgattgcgttccttgcctgggcgcgtgcggcgcaatgccggtacgccatcgacgggctgggcatgctggtggagcaggccgccgagagcttcgcgctgtggcatggcgtgcgcccggataccgacccggtctacgccgcgctgcgcgcgcgcgaggccgtgctgatcagtgccgactga

SEQ ID NO: 22694 - protein, 283 aa, Xanthomonas axonopodis
MPVSRYAVFGHPVAHSLSPAIHADFGKQTGIALDYTAIDASLEDFSAALQRFADEGGKGANVTLPLKEAAYALASSLSDRARLAGAVNTLVRNDGQWQGDNTDGAGLVRDLTERQGLDLRGRRVLLLGAGGAARGVAPALLEAGITAMVVVNRSPERADALCDALGEPARVTSRYIEDLRELGDFELIVNATAAGRDRDAGAFALPLGLVNSLTAAVDLNYGDTAIAFLAWARAAQCRYAIDGLGMLVEQAAESFALWHGVRPDTDPVYAALRAREAVLISAD

SEQ ID NO: 22695 - DNA, 852 bp, Xanthomonas campestris
  CDS (1)..(852)
atgcccgtatcccgttatgccgtgttcggacaccccgtcgcccattcgctgtcgccggccatccatgccgacttcgggaagcagaccggcatcgcgctggactacaccgccatcgacgccgcgccggaggaattcaccgccgcgctggagcgcttcgcggccgacggtggcaagggcgccaacgtgaccctgccgctgaaggaagccgcgttcgccctgtcggcgagcctgagcgaccgcgcgcgcgtggctggtgcggtgaacacgctggtgcgcaacgacggccagtggcagggcgacaacaccgatggcgccggcctggtgcgtgacctcaccgagcggcacggcctagatctgcgcggccgccgcgtgctgctgctgggcgccggcggtgccgcacgcggcgttgcgccggcgctgctggaggccggcatcaccgagatggtggtggtgaaccgctcgcccgagcgcgccgatgcgctgtgcgatgcgctgggcgaacccgggcgcgtggtgtcgcgctatctggaagacctgcgcgagctgggcgacttcgagctgatcgtcaatgccaccgctgccggccgcgatcgcgacgccggtgcgttcgcgctgccgctgggcctggtcaacagcctcactgcggcggtggacctcaattacggcgccaccgccatcgccttccttgcctgggcacgttcggcgcagtgccgctacgccatcgacggcctgggcatgctggtcgagcaggccgcggaaagctttgcgctgtggcacggcgtgcgcccgcagaccgacccggtgtacgacgcgctgcgtgcgcgcgacgccgtgttggtcagcgccgactga

SEQ ID NO: 22696 - protein, 283 aa, Xanthomonas campestris
MPVSRYAVFGHPVAHSLSPAIHADFGKQTGIALDYTAIDAAPEEFTAALERFAADGGKGANVTLPLKEAAFALSASLSDRARVAGAVNTLVRNDGQWQGDNTDGAGLVRDLTERHGLDLRGRRVLLLGAGGAARGVAPALLEAGITEMVVVNRSPERADALCDALGEPGRVVSRYLEDLRELGDFELIVNATAAGRDRDAGAFALPLGLVNSLTAAVDLNYGATAIAFLAWARSAQCRYAIDGLGMLVEQAAESFALWHGVRPQTDPVYDALRARDAVLVSAD

SEQ ID NO: 22697 - DNA, 867 bp, Salmonella typhimurium
  CDS (1)..(867)
atggatgttaccgcaaaatatgaattaattggtcttatggcgtatcctatccgtcatagcttatcgcccgaaatgcaaaacaaagcgttagaaaaagcggggctaccgtatacctatatggctttcgaagtggataacacgacgtttgccagcgccattgaaggactgaaagcattaaaaatgcgcggtacgggcgtctccatgccaaacaaacagctcgcgtgtgagtatgtcgatgaattaacgccagcagcaaaactggttggcgctatcaacaccattgttaacgatgacggctatctacgcggctacaacacggatggtacgggccatattcgggcaattaaagaaagcggtttcgatatgcggggaaaaaccatggtgctgctcggcgcgggaggcgcggctaccgccattggcgcccaggcagctattgaaggcattaaggaaattaaactgtttaaccgtaaagatgactttttcgaaaaagcggttgcctttgcgaagcgggtgaatgaaaacactgattgtgtcgttaccgtcaccgatcttgccgatcagcacgcttttactgaagcgcttgccagcgcagatattctgacgaacggcaccaaagttggcatgaaaccattggagaacgaatccctgatcggcgatgtttccctgctccgccctgaattgctggtcaccgaatgtgtttataatccgcatatgacaaagttattgcagcaggcgcaacaagctggttgcaaaacaattgatggttacggcatgttgttatggcaaggagccgaacagtttgaactgtggacaggaaaagcgtttccattggactatgtaaagcaggtgatgggattcacagcctga

SEQ ID NO: 22698 - protein, 288 aa, Salmonella typhimurium
MDVTAKYELIGLMAYPIRHSLSPEMQNKALEKAGLPYTYMAFEVDNTTFASAIEGLKALKMRGTGVSMPNKQLACEYVDELTPAAKLVGAINTIVNDDGYLRGYNTDGTGHIRAIKESGFDMRGKTMVLLGAGGAATAIGAQAAIEGIKEIKLFNRKDDFFEKAVAFAKRVNENTDCVVTVTDLADQHAFTEALASADILTNGTKVGMKPLENESLIGDVSLLRPELLVTECVYNPHMTKLLQQAQQAGCKTIDGYGMLLWQGAEQFELWTGKAFPLDYVKQVMGFTA

SEQ ID NO: 22699 - DNA, 25 bp, Artificial sequence
  Primer sequence
atggaaacctatgctgtttttggta

SEQ ID NO: 22700 - DNA, 24 bp, Artificial sequence
  Primer sequence
ttacgcggacaattcctcctgcaa

SEQ ID NO: 22701 - protein, 326 aa, Artificial sequence
  Consensus
  Variant (2)..(2): Xaa in position 2 is any amino acid
  Variant (4)..(4): Xaa in position 4 is any amino acid
  Variant (7)..(8): Xaa in position 7 to 8 is any amino acid
  Variant (10)..(10): Xaa in position 10 is any amino acid
  Variant (13)..(13): Xaa in position 13 is any amino acid
  Variant (16)..(26): Xaa in position 16 to 26 is any amino acid
  Variant (27)..(31): Xaa in position 27 to 31 is any or no amino acid
  Variant (33)..(53): Xaa in position 33 to 53 is any amino acid
  Variant (54)..(60): Xaa in position 54 to 60 is any or no amino acid
  Variant (62)..(63): Xaa in position 62 to 63 is any amino acid
  Variant (68)..(68): Xaa in position 68 is any amino acid
  Variant (70)..(81): Xaa in position 70 to 81 is any amino acid
  Variant (82)..(83): Xaa in position 82 to 83 is any or no amino acid
  Variant (85)..(87): Xaa in position 85 to 87 is any or no amino acid
  Variant (94)..(94): Xaa in position 94 is any amino acid
  Variant (95)..(125): Xaa in position 95 to 125 is any or no amino acid
  Variant (127)..(127): Xaa in position 127 is any or no amino acid
  Variant (131)..(131): Xaa in position 131 is any amino acid
  Variant (132)..(132): Xaa in position 132 is any or no amino acid
  Variant (134)..(137): Xaa in position 134 to 137 is any amino acid
  Variant (139)..(146): Xaa in position 139 to 146 is any amino acid
  Variant (147)..(165): Xaa in position 147 to 165 is any or no amino acid
  Variant (172)..(174): Xaa in position 172 to 174 is any amino acid
  Variant (176)..(185): Xaa in position 176 to 185 is any amino acid
  Variant (186)..(188): Xaa in position 186 to 188 is any or no amino acid
  Variant (190)..(190): Xaa in position 190 is any amino acid
  Variant (192)..(193): Xaa in position 192 to 193 is any amino acid
  Variant (195)..(210): Xaa in position 195 to 210 is any amino acid
  Variant (211)..(242): Xaa in position 211 to 242 is any or no amino acid
  Variant (247)..(247): Xaa in position 247 is any or no amino acid
  Variant (249)..(251): Xaa in position 249 to 251 is any or no amino acid
  Variant (253)..(256): Xaa in position 253 to 256 is any amino acid
  Variant (257)..(283): Xaa in position 257 to 283 is any or no amino acid
  Variant (286)..(286): Xaa in position 286 is any amino acid
  Variant (288)..(291): Xaa in position 288 to 291 is any amino acid
  Variant (292)..(292): Xaa in position 292 is any or no amino acid
  Variant (294)..(294): Xaa in position 294 is any amino acid
  Variant (295)..(295): Xaa in position 295 is any or no amino acid
  Variant (297)..(298): Xaa in position 297 to 298 is any amino acid
  Variant (300)..(302): Xaa in position 300 to 302 is any amino acid
  Variant (304)..(308): Xaa in position 304 to 308 is any amino acid
  Variant (309)..(310): Xaa in position 309 to 310 is any or no amino acid
  Variant (312)..(313): Xaa in position 312 to 313 is any amino acid
  Variant (315)..(315): Xaa in position 315 is any amino acid
  Variant (317)..(317): Xaa in position 317 is any amino acid
  Variant (320)..(322): Xaa in position 320 to 322 is any amino acid
  Variant (324)..(325): Xaa in position 324 to 325 is any amino acid
VXGXPIXXSXSPXIHXXXXXXXXXXXXXXXXYXXXXXXXXXXXXXXXXXXXXXXXXXXXXGXXVTIPXKXXXXXXXXXXXXXXAXXXGAVNTLXXXXXXXXXXXXXXXXXXXXXXXXXXXXXXXXGXNTDXXGXXXXLXXXXXXXXXXXXXXXXXXXXXXXXXXXILGAGGXXXAXXXXXXXXXXXXXIXIXXRXXXXXXXXXXXXXXXXXXXXXXXXXXXXXXXXXXXXXXXXXXXXXXXXLIINXTXXXMXXXXXXXXXXXXXXXXXXXXXXXXXXXXXXXDMXYXXXXXTXXLXXAXXXGXXXXXXXGXXMXVXQAXXXFXXW

SEQ ID NO: 22702 - protein, 13 aa, Artificial sequence
  Consensus
  Variant (2)..(8): Xaa in position 2 to 8 is any amino acid
  Variant (9)..(9): Xaa in position 9 is any or no amino acid
  Variant (11)..(12): Xaa in position 11 to 12 is any or no amino acid
GXXXXXXXXSXXP

SEQ ID NO: 22703 - protein, 31 aa, Artificial sequence
  Consensus
  Variant (2)..(4): Xaa in position 2 to 4 is any amino acid
  Variant (5)..(5): Xaa in position 5 is Gly, Asn, Ser or Thr
  Variant (6)..(6): Xaa in position 6 is any amino acid
  Variant (7)..(7): Xaa in position 7 is Pro or Ser
  Variant (8)..(8): Xaa in position 8 is any amino acid
  Variant (10)..(22): Xaa in position 10 to 22 is any amino acid
  Variant (23)..(23): Xaa in position 23 is Ala, Cys, Gly, Ser or Val
  Variant (24)..(27): Xaa in position 24 to 27 is any amino acid
  Variant (28)..(28): Xaa in position 28 is Ala, Ser or Thr
  Variant (29)..(29): Xaa in position 29 is any amino acid
GXXXXXXXKXXXXXXXXXXXXXXXXXXXXNT

SEQ ID NO: 22704 - protein, 11 aa, Artificial sequence
  Consensus
  Variant (4)..(5): Xaa in position 4 to 5 is any amino acid
  Variant (6)..(6): Xaa in position 6 is Ala or Gly
  Variant (7)..(10): Xaa in position 7 to 10 is any amino acid
  Variant (11)..(11): Xaa in position 11 is Phe, Ile, Leu or Met
NTDXXXXXXXX

SEQ ID NO: 22705 - protein, 9 aa, Artificial sequence
  Consensus
  Variant (2)..(2): Xaa in position 2 is Ala, Gly, Ser or Thr
  Variant (5)..(5): Xaa in position 5 is any or no amino acid
  Variant (7)..(8): Xaa in position 7 to 8 is any amino acid
  Variant (9)..(9): Xaa in position 9 is Ala, Gly, Ile, Leu or Val
GXGGXAXXX

SEQ ID NO: 22706 - protein, 34 aa, Artificial sequence
  Consensus
  Variant (2)..(20): Xaa in position 2 to 20 is any amino acid
  Variant (21)..(22): Xaa in position 21 to 22 is any or no amino acid
  Variant (24)..(25): Xaa in position 24 to 25 is any amino acid
  Variant (26)..(26): Xaa in position 26 is Ile, Leu, Met or Val
  Variant (27)..(29): Xaa in position 27 to 29 is any amino acid
  Variant (31)..(31): Xaa in position 31 is Ala or Gly
  Variant (32)..(33): Xaa in position 32 to 33 is any amino acid
  Variant (34)..(34): Xaa in position 34 is Ala, Gly, Asn, Gln, Ser or Thr
YXXXXXXXXXXXXXXXXXXXXXGXXXXXXQXXXX

SEQ ID NO: 22707 - DNA, 723 bp, Escherichia coli K12; identical to SEQ ID NO: 2001
  CDS (1)..(723)

SEQ ID NO: 22708 - protein, 240 aa, Escherichia coli K12; identical to SEQ ID NO: 2002

SEQ ID NO: 22709 - DNA, 507 bp, Aquifex aeolicus; identical to SEQ ID NO: 2003
  CDS (1)..(507)

SEQ ID NO: 22710 - protein, 168 aa, Aquifex aeolicus; identical to SEQ ID NO: 2004

SEQ ID NO: 22711 - DNA, 717 bp, Deinococcus radiodurans; identical to SEQ ID NO: 2005
  CDS (1)..(717)

SEQ ID NO: 22712 - protein, 238 aa, Deinococcus radiodurans; identical to SEQ ID NO: 2006

SEQ ID NO: 22713 - DNA, 498 bp, Campylobacter jejuni; identical to SEQ ID NO: 2007
  CDS (1)..(498)

SEQ ID NO: 22714 - protein, 165 aa, Campylobacter jejuni; identical to SEQ ID NO: 2008

SEQ ID NO: 22715 - DNA, 546 bp, Salmonella enterica subsp. enterica serovar Typhi; identical to SEQ ID NO: 2009
  CDS (1)..(546)

SEQ ID NO: 22716 - protein, 181 aa, Salmonella enterica subsp. enterica serovar Typhi; identical to SEQ ID NO: 2010

SEQ ID NO: 22717 - DNA, 522 bp, Salmonella enterica subsp. enterica serovar Typhi; identical to SEQ ID NO: 2011
  CDS (1)..(522)

SEQ ID NO: 22718 - protein, 173 aa, Salmonella enterica subsp. enterica serovar Typhi; identical to SEQ ID NO: 2012

SEQ ID NO: 22719 - DNA, 474 bp, Listeria innocua; identical to SEQ ID NO: 2013
  CDS (1)..(474)

SEQ ID NO: 22720 - protein, 157 aa, Listeria innocua; identical to SEQ ID NO: 2014

SEQ ID NO: 22721 - DNA, 474 bp, Listeria monocytogenes; identical to SEQ ID NO: 2015
  CDS (1)..(474)

SEQ ID NO: 22722 - protein, 157 aa, Listeria monocytogenes; identical to SEQ ID NO: 2016

SEQ ID NO: 22723 - DNA, 525 bp, Yersinia pestis; identical to SEQ ID NO: 2017
  CDS (1)..(525)

SEQ ID NO: 22724 - protein, 174 aa, Yersinia pestis; identical to SEQ ID NO: 2018

SEQ ID NO: 22725 - DNA, 546 bp, Nostoc sp. PCC 7120; identical to SEQ ID NO: 2019
  CDS (1)..(546)

SEQ ID NO: 22726 - protein, 181 aa, Nostoc sp. PCC 7120; identical to SEQ ID NO: 2020

SEQ ID NO: 22727 - DNA, 1479 bp, Thermotoga maritima; identical to SEQ ID NO: 2021
  CDS (1)..(1479)

SEQ ID NO: 22728 - protein, 492 aa, Thermotoga maritima; identical to SEQ ID NO: 2022

SEQ ID NO: 22729 - DNA, 525 bp, Vibrio cholerae; identical to SEQ ID NO: 2023
  CDS (1)..(525)

SEQ ID NO: 22730 - protein, 174 aa, Vibrio cholerae; identical to SEQ ID NO: 2024

SEQ ID NO: 22731 - DNA, 531 bp, Chlamydophila pneumoniae, Chlamydia pneumoniae; identical to SEQ ID NO: 2025
  CDS (1)..(531)

SEQ ID NO: 22732 - protein, 176 aa, Chlamydophila pneumoniae, Chlamydia pneumoniae; identical to SEQ ID NO: 2026

SEQ ID NO: 22733 - DNA, 477 bp, Streptococcus pneumoniae; identical to SEQ ID NO: 2027
  CDS (1)..(477)

SEQ ID NO: 22734 - protein, 158 aa, Streptococcus pneumoniae; identical to SEQ ID NO: 2028

SEQ ID NO: 22735 - DNA, 477 bp, Streptococcus pneumoniae; identical to SEQ ID NO: 2029
  CDS (1)..(477)

SEQ ID NO: 22736 - protein, 158 aa, Streptococcus pneumoniae; identical to SEQ ID NO: 2030

SEQ ID NO: 22737 - DNA, 543 bp, Xylella fastidiosa; identical to SEQ ID NO: 2031
  CDS (1)..(543)

SEQ ID NO: 22738 - protein, 180 aa, Xylella fastidiosa; identical to SEQ ID NO: 2032

SEQ ID NO: 22739 - DNA, 552 bp, Bacillus halodurans; identical to SEQ ID NO: 2033
  CDS (1)..(552)

SEQ ID NO: 22740 - protein, 183 aa, Bacillus halodurans; identical to SEQ ID NO: 2034

SEQ ID NO: 22741 - DNA, 489 bp, Helicobacter pylori; identical to SEQ ID NO: 2035
  CDS (1)..(489)

SEQ ID NO: 22742 - protein, 162 aa, Helicobacter pylori; identical to SEQ ID NO: 2036

SEQ ID NO: 22743 - DNA, 600 bp, Mycobacterium leprae; identical to SEQ ID NO: 2037
  CDS (1)..(600)

SEQ ID NO: 22744 - protein, 199 aa, Mycobacterium leprae; identical to SEQ ID NO: 2038

SEQ ID NO: 22745 - DNA, 543 bp, Haemophilus influenzae; identical to SEQ ID NO: 2039
  CDS (1)..(543)

SEQ ID NO: 22746 - protein, 180 aa, Haemophilus influenzae; identical to SEQ ID NO: 2040

SEQ ID NO: 22747 - DNA, 513 bp, Neisseria meningitidis; identical to SEQ ID NO: 2041
  CDS (1)..(513)

SEQ ID NO: 22748 - protein, 170 aa, Neisseria meningitidis; identical to SEQ ID NO: 2042

SEQ ID NO: 22749 - DNA, 603 bp, Caulobacter crescentus; identical to SEQ ID NO: 2043
  CDS (1)..(603)

SEQ ID NO: 22750 - protein, 200 aa, Caulobacter crescentus; identical to SEQ ID NO: 2044

SEQ ID NO: 22751 - DNA, 531 bp, Mycobacterium tuberculosis; identical to SEQ ID NO: 2045
  CDS (1)..(531)

SEQ ID NO: 22752 - protein, 176 aa, Mycobacterium tuberculosis; identical to SEQ ID NO: 2046

SEQ ID NO: 22753 - DNA, 489 bp, Lactococcus lactis subsp. lactis; identical to SEQ ID NO: 2047
  CDS (1)..(489)

SEQ ID NO: 22754 - protein, 162 aa, Lactococcus lactis subsp. lactis; identical to SEQ ID NO: 2048

SEQ ID NO: 22755 - DNA, 498 bp, Clostridium acetobutylicum; identical to SEQ ID NO: 2049
  CDS (1)..(498)

SEQ ID NO: 22756 - protein, 165 aa, Clostridium acetobutylicum; identical to SEQ ID NO: 2050

SEQ ID NO: 22757 - DNA, 519 bp, Pseudomonas aeruginosa; identical to SEQ ID NO: 2051
  CDS (1)..(519)

SEQ ID NO: 22758 - protein, 172 aa, Pseudomonas aeruginosa; identical to SEQ ID NO: 2052

SEQ ID NO: 22759 - DNA, 522 bp, Buchnera sp; identical to SEQ ID NO: 2053
  CDS (1)..(522)

SEQ ID NO: 22760 - protein, 173 aa, Buchnera sp; identical to SEQ ID NO: 2054

SEQ ID NO: 22761 - DNA, 501 bp, Agrobacterium tumefaciens; identical to SEQ ID NO: 2055
  CDS (1)..(501)

SEQ ID NO: 22762 - protein, 166 aa, Agrobacterium tumefaciens; identical to SEQ ID NO: 2056

SEQ ID NO: 22763 - DNA, 561 bp, Bacillus subtilis; identical to SEQ ID NO: 2057
  CDS (1)..(561)

SEQ ID NO: 22764 - protein, 186 aa, Bacillus subtilis; identical to SEQ ID NO: 2058

SEQ ID NO: 22765 - DNA, 810 bp, Escherichia coli; identical to SEQ ID NO: 2059
  CDS (286)..(810)

SEQ ID NO: 22766 - protein, 174 aa, Escherichia coli; identical to SEQ ID NO: 2060

SEQ ID NO: 22767 - DNA, 522 bp, Erwinia chrysanthemi; identical to SEQ ID NO: 2061
  CDS (1)..(522)

SEQ ID NO: 22768 - protein, 173 aa, Erwinia chrysanthemi; identical to SEQ ID NO: 2062

SEQ ID NO: 22769 - DNA, 1293 bp, Lycopersicon esculentum (tomato); identical to SEQ ID NO: 2063
  CDS (123)..(1025)

SEQ ID NO: 22770 - protein, 300 aa, Lycopersicon esculentum (tomato); identical to SEQ ID NO: 2064

SEQ ID NO: 22771 - DNA, 489 bp, Lactococcus lactis; identical to SEQ ID NO: 2065
  CDS (1)..(489)

SEQ ID NO: 22772 - protein, 162 aa, Lactococcus lactis; identical to SEQ ID NO: 2066

SEQ ID NO: 22773 - DNA, 570 bp, Synechocystis sp; identical to SEQ ID NO: 2067
  CDS (1)..(570)

SEQ ID NO: 22774 - protein, 189 aa, Synechocystis sp; identical to SEQ ID NO: 2068

SEQ ID NO: 22775 - DNA, 693 bp, Corynebacterium glutamicum; identical to SEQ ID NO: 2069
  CDS (101)..(673)

SEQ ID NO: 22776 - protein, 190 aa, Corynebacterium glutamicum; identical to SEQ ID NO: 2070

SEQ ID NO: 22777 - DNA, 522 bp, Erwinia carotovora subsp; identical to SEQ ID NO: 2071
  CDS (1)..(522)

SEQ ID NO: 22778 - protein, 173 aa, Erwinia carotovora subsp; identical to SEQ ID NO: 2072

SEQ ID NO: 22779 - DNA, 522 bp, Erwinia carotovora subsp; identical to SEQ ID NO: 2073
  CDS (1)..(522)

SEQ ID NO: 22780 - protein, 173 aa, Erwinia carotovora subsp; identical to SEQ ID NO: 2074

SEQ ID NO: 22781 - DNA, 543 bp, Acinetobacter sp; identical to SEQ ID NO: 2075
  CDS (1)..(543)

SEQ ID NO: 22782 - protein, 180 aa, Acinetobacter sp; identical to SEQ ID NO: 2076

SEQ ID NO: 22783 - DNA, 633 bp, Bartonella quintana; identical to SEQ ID NO: 2077
  CDS (1)..(633)

SEQ ID NO: 22784 - protein, 210 aa, Bartonella quintana; identical to SEQ ID NO: 2078

SEQ ID NO: 22785 - DNA, 633 bp, Bartonella henselae; identical to SEQ ID NO: 2079
  CDS (1)..(633)

SEQ ID NO: 22786 - protein, 210 aa, Bartonella henselae; identical to SEQ ID NO: 2080

SEQ ID NO: 22787 - DNA, 525 bp, Staphylococcus aureus subsp; identical to SEQ ID NO: 2081
  CDS (1)..(525)

SEQ ID NO: 22788 - protein, 174 aa, Staphylococcus aureus subsp; identical to SEQ ID NO: 2082

SEQ ID NO: 22789 - DNA, 528 bp, Photobacterium profundum; identical to SEQ ID NO: 2083
  CDS (1)..(528)

SEQ ID NO: 22790 - protein, 175 aa, Photobacterium profundum; identical to SEQ ID NO: 2084

SEQ ID NO: 22791 - DNA, 612 bp, Parachlamydia sp; identical to SEQ ID NO: 2085
  CDS (1)..(612)

SEQ ID NO: 22792 - protein, 203 aa, Parachlamydia sp; identical to SEQ ID NO: 2086

SEQ ID NO: 22793 - DNA, 918 bp, Rhodopseudomonas palustris; identical to SEQ ID NO: 2087
  CDS (1)..(918)

SEQ ID NO: 22794 - protein, 305 aa, Rhodopseudomonas palustris; identical to SEQ ID NO: 2088

SEQ ID NO: 22795 - DNA, 612 bp, Rhodopseudomonas palustris; identical to SEQ ID NO: 2089
  CDS (1)..(612)

SEQ ID NO: 22796 - protein, 203 aa, Rhodopseudomonas palustris; identical to SEQ ID NO: 2090

SEQ ID NO: 22797 - DNA, 522 bp, Corynebacterium diphtheriae; identical to SEQ ID NO: 2091
  CDS (1)..(522)

SEQ ID NO: 22798 - protein, 173 aa, Corynebacterium diphtheriae; identical to SEQ ID NO: 2092

SEQ ID NO: 22799 - DNA, 543 bp, Desulfovibrio vulgaris; identical to SEQ ID NO: 2093
  CDS (1)..(543)

SEQ ID NO: 22800 - protein, 180 aa, Desulfovibrio vulgaris; identical to SEQ ID NO: 2094

SEQ ID NO: 22801 - DNA, 528 bp, Desulfovibrio vulgaris; identical to SEQ ID NO: 2095
  CDS (1)..(528)

SEQ ID NO: 22802 - protein, 175 aa, Desulfovibrio vulgaris; identical to SEQ ID NO: 2096

SEQ ID NO: 22803 - DNA, 555 bp, Thermus thermophilus; identical to SEQ ID NO: 2097
  CDS (1)..(555)

SEQ ID NO: 22804 - protein, 184 aa, Thermus thermophilus; identical to SEQ ID NO: 2098

SEQ ID NO: 22805 - DNA, 513 bp, Bacillus cereus; identical to SEQ ID NO: 2099
  CDS (1)..(513)

SEQ ID NO: 22806 - protein, 170 aa, Bacillus cereus; identical to SEQ ID NO: 2100

SEQ ID NO: 22807 - DNA, 531 bp, Mycobacterium paratuberculosis; identical to SEQ ID NO: 2101
  CDS (1)..(531)

SEQ ID NO: 22808 - protein, 176 aa, Mycobacterium paratuberculosis; identical to SEQ ID NO: 2102

SEQ ID NO: 22809 - DNA, 528 bp, Geobacter sulfurreducens; identical to SEQ ID NO: 2103
  CDS (1)..(528)

SEQ ID NO: 22810 - protein, 175 aa, Geobacter sulfurreducens; identical to SEQ ID NO: 2104

SEQ ID NO: 22811 - DNA, 540 bp, Leptospira interrogans; identical to SEQ ID NO: 2105
  CDS (1)..(540)

SEQ ID NO: 22812 - protein, 179 aa, Leptospira interrogans; identical to SEQ ID NO: 2106

SEQ ID NO: 22813 - DNA, 501 bp, Wolinella succinogenes; identical to SEQ ID NO: 2107
  CDS (1)..(501)

SEQ ID NO: 22814 - protein, 166 aa, Wolinella succinogenes; identical to SEQ ID NO: 2108

SEQ ID NO: 22815 - DNA, 561 bp, Porphyromonas gingivalis; identical to SEQ ID NO: 2109
  CDS (1)..(561)

SEQ ID NO: 22816 - protein, 186 aa, Porphyromonas gingivalis; identical to SEQ ID NO: 2110

SEQ ID NO: 22817 - DNA, 525 bp, Photorhabdus luminescens; identical to SEQ ID NO: 2111
  CDS (1)..(525)

SEQ ID NO: 22818 - protein, 174 aa, Photorhabdus luminescens; identical to SEQ ID NO: 2112

SEQ ID NO: 22819 - DNA, 534 bp, Gloeobacter violaceus; identical to SEQ ID NO: 2113
  CDS (1)..(534)

SEQ ID NO: 22820 - protein, 177 aa, Gloeobacter violaceus; identical to SEQ ID NO: 2114

SEQ ID NO: 22821 - DNA, 555 bp, Chromobacterium violaceum; identical to SEQ ID NO: 2115
  CDS (1)..(555)

SEQ ID NO: 22822 - protein, 184 aa, Chromobacterium violaceum; identical to SEQ ID NO: 2116

SEQ ID NO: 22823 - DNA, 576 bp, Synechococcus sp; identical to SEQ ID NO: 2117
  CDS (1)..(576)

SEQ ID NO: 22824 - protein, 191 aa, Synechococcus sp; identical to SEQ ID NO: 2118

SEQ ID NO: 22825 - DNA, 564 bp, Rhodopirellula baltica; identical to SEQ ID NO: 2119
  CDS (1)..(564)

SEQ ID NO: 22826 - protein, 187 aa, Rhodopirellula baltica; identical to SEQ ID NO: 2120

SEQ ID NO: 22827 - DNA, 558 bp, Prochlorococcus marinus subsp; identical to SEQ ID NO: 2121
  CDS (1)..(558)

SEQ ID NO: 22828 - protein, 185 aa, Prochlorococcus marinus subsp; identical to SEQ ID NO: 2122

SEQ ID NO: 22829 - DNA, 579 bp, Prochlorococcus marinus; identical to SEQ ID NO: 2123
  CDS (1)..(579)

SEQ ID NO: 22830 - protein, 192 aa, Prochlorococcus marinus; identical to SEQ ID NO: 2124

SEQ ID NO: 22831 - DNA, 573 bp, Prochlorococcus marinus; identical to SEQ ID NO: 2125
  CDS (1)..(573)

SEQ ID NO: 22832 - protein, 190 aa, Prochlorococcus marinus; identical to SEQ ID NO: 2126

SEQ ID NO: 22833 - DNA, 558 bp, Candidatus Blochmannia floridanus; identical to SEQ ID NO: 2127
  CDS (1)..(558)

SEQ ID NO: 22834 - protein, 185 aa, Candidatus Blochmannia floridanus; identical to SEQ ID NO: 2128

SEQ ID NO: 22835 - DNA, 636 bp, Bordetella bronchiseptica; identical to SEQ ID NO: 2129
  CDS (1)..(636)

SEQ ID NO: 22836 - protein, 211 aa, Bordetella bronchiseptica; identical to SEQ ID NO: 2130

SEQ ID NO: 22837 - DNA, 864 bp, Oryza sativa; identical to SEQ ID NO: 2131
  CDS (1)..(864)

SEQ ID NO: 22838 - protein, 287 aa, Oryza sativa; identical to SEQ ID NO: 2132

SEQ ID NO: 22839 - DNA, 471 bp, Bacillus cereus; identical to SEQ ID NO: 2133
  CDS (1)..(471)

SEQ ID NO: 22840 - protein, 156 aa, Bacillus cereus; identical to SEQ ID NO: 2134

SEQ ID NO: 22841 - DNA, 498 bp, Bacillus anthracis; identical to SEQ ID NO: 2135
  CDS (1)..(498)

SEQ ID NO: 22842 - protein, 165 aa, Bacillus anthracis; identical to SEQ ID NO: 2136

SEQ ID NO: 22843 - DNA, 522 bp, Chlamydophila caviae; identical to SEQ ID NO: 2137
  CDS (1)..(522)

SEQ ID NO: 22844 - protein, 173 aa, Chlamydophila caviae; identical to SEQ ID NO: 2138

SEQ ID NO: 22845 - DNA, 516 bp, Streptomyces avermitilis; identical to SEQ ID NO: 2139
  CDS (1)..(516)

SEQ ID NO: 22846 - protein, 171 aa, Streptomyces avermitilis; identical to SEQ ID NO: 2140

SEQ ID NO: 22847 - DNA, 636 bp, Nitrosomonas europaea; identical to SEQ ID NO: 2141
  CDS (1)..(636)

SEQ ID NO: 22848 - protein, 211 aa, Nitrosomonas europaea; identical to SEQ ID NO: 2142

SEQ ID NO: 22849 - DNA, 507 bp, Enterococcus faecalis; identical to SEQ ID NO: 2143
  CDS (1)..(507)

SEQ ID NO: 22850 - protein, 168 aa, Enterococcus faecalis; identical to SEQ ID NO: 2144

SEQ ID NO: 22851 - DNA, 540 bp, Coxiella burnetii; identical to SEQ ID NO: 2145
  CDS (1)..(540)

SEQ ID NO: 22852 - protein, 179 aa, Coxiella burnetii; identical to SEQ ID NO: 2146

SEQ ID NO: 22853 - DNA, 510 bp, Tropheryma whipplei; identical to SEQ ID NO: 2147
  CDS (1)..(510)

SEQ ID NO: 22854 - protein, 169 aa, Tropheryma whipplei; identical to SEQ ID NO: 2148

SEQ ID NO: 22855 - DNA, 468 bp, Shigella flexneri; identical to SEQ ID NO: 2149
  CDS (1)..(468)

SEQ ID NO: 22856 - protein, 155 aa, Shigella flexneri; identical to SEQ ID NO: 2150

SEQ ID NO: 22857 - DNA, 903 bp, Azoarcus evansii; identical to SEQ ID NO: 2151
  CDS (1)..(903)

SEQ ID NO: 22858 - protein, 300 aa, Azoarcus evansii; identical to SEQ ID NO: 2152

SEQ ID NO: 22859 - DNA, 522 bp, Lactobacillus plantarum; identical to SEQ ID NO: 2153
  CDS (1)..(522)

SEQ ID NO: 22860 - protein, 173 aa, Lactobacillus plantarum; identical to SEQ ID NO: 2154

SEQ ID NO: 22861 - DNA, 504 bp, Clostridium tetani; identical to SEQ ID NO: 2155
  CDS (1)..(504)

SEQ ID NO: 22862 - protein, 167 aa, Clostridium tetani; identical to SEQ ID NO: 2156

SEQ ID NO: 22863 - DNA, 909 bp, Bradyrhizobium japonicum; identical to SEQ ID NO: 2157
  CDS (1)..(909)

SEQ ID NO: 22864 - protein, 302 aa, Bradyrhizobium japonicum; identical to SEQ ID NO: 2158

SEQ ID NO: 22865 - DNA, 735 bp, Bradyrhizobium japonicum; identical to SEQ ID NO: 2159
  CDS (1)..(735)

SEQ ID NO: 22866 - protein, 244 aa, Bradyrhizobium japonicum; identical to SEQ ID NO: 2160

SEQ ID NO: 22867 - DNA, 528 bp, Bacteroides thetaiotaomicron; identical to SEQ ID NO: 2161
  CDS (1)..(528)

SEQ ID NO: 22868 - protein, 175 aa, Bacteroides thetaiotaomicron; identical to SEQ ID NO: 2162

SEQ ID NO: 22869 - DNA, 477 bp, Streptococcus mutans; identical to SEQ ID NO: 2163
  CDS (1)..(477)

SEQ ID NO: 22870 - protein, 158 aa, Streptococcus mutans; identical to SEQ ID NO: 2164

SEQ ID NO: 22871 - DNA, 513 bp, Streptococcus agalactiae; identical to SEQ ID NO: 2165
  CDS (1)..(513)

SEQ ID NO: 22872 - protein, 170 aa, Streptococcus agalactiae; identical to SEQ ID NO: 2166

SEQ ID NO: 22873 - DNA, 603 bp, Brucella suis; identical to SEQ ID NO: 2167
  CDS (1)..(603)

SEQ ID NO: 22874 - protein, 200 aa, Brucella suis; identical to SEQ ID NO: 2168

SEQ ID NO: 22875 - DNA, 912 bp, Thauera aromatica; identical to SEQ ID NO: 2169
  CDS (1)..(912)

SEQ ID NO: 22876 - protein, 303 aa, Thauera aromatica; identical to SEQ ID NO: 2170

SEQ ID NO: 22877 - DNA, 1300 bp, Arabidopsis thaliana; identical to SEQ ID NO: 2171
  CDS (113)..(1024)

SEQ ID NO: 22878 - protein, 303 aa, Arabidopsis thaliana; identical to SEQ ID NO: 2172

SEQ ID NO: 22879 - DNA, 903 bp, Arabidopsis thaliana; identical to SEQ ID NO: 2173
  CDS (1)..(903)

SEQ ID NO: 22880 - protein, 300 aa, Arabidopsis thaliana; identical to SEQ ID NO: 2174

SEQ ID NO: 22881 - DNA, 576 bp, Chlorobium tepidum; identical to SEQ ID NO: 2175
  CDS (1)..(576)

SEQ ID NO: 22882 - protein, 191 aa, Chlorobium tepidum; identical to SEQ ID NO: 2176

SEQ ID NO: 22883 - DNA, 492 bp, Streptococcus pyogenes; identical to SEQ ID NO: 2177
  CDS (1)..(492)

SEQ ID NO: 22884 - protein, 163 aa, Streptococcus pyogenes; identical to SEQ ID NO: 2178

SEQ ID NO: 22885 - DNA, 543 bp, Xanthomonas campestris; identical to SEQ ID NO: 2179
  CDS (1)..(543)

SEQ ID NO: 22886 - protein, 180 aa, Xanthomonas campestris; identical to SEQ ID NO: 2180

SEQ ID NO: 22887 - DNA, 543 bp, Xanthomonas axonopodis; identical to SEQ ID NO: 2181
  CDS (1)..(543)

SEQ ID NO: 22888 - protein, 180 aa, Xanthomonas axonopodis; identical to SEQ ID NO: 2182

SEQ ID NO: 22889 - DNA, 531 bp, Methanosarcina mazei; identical to SEQ ID NO: 2183
  CDS (1)..(531)

SEQ ID NO: 22890 - protein, 176 aa, Methanosarcina mazei; identical to SEQ ID NO: 2184

SEQ ID NO: 22891 - DNA, 516 bp, Thermoanaerobacter tengcongensis; identical to SEQ ID NO: 2185
  CDS (1)..(516)

SEQ ID NO: 22892 - protein, 171 aa, Thermoanaerobacter tengcongensis; identical to SEQ ID NO: 2186

SEQ ID NO: 22893 - DNA, 519 bp, Fusobacterium nucleatum; identical to SEQ ID NO: 2187
  CDS (1)..(519)

SEQ ID NO: 22894 - protein, 172 aa, Fusobacterium nucleatum; identical to SEQ ID NO: 2188

SEQ ID NO: 22895 - DNA, 528 bp, Methanosarcina acetivorans; identical to SEQ ID NO: 2189
  CDS (1)..(528)

SEQ ID NO: 22896 - protein, 175 aa, Methanosarcina acetivorans; identical to SEQ ID NO: 2190

SEQ ID NO: 22897 - DNA, 516 bp, Clostridium perfringens; identical to SEQ ID NO: 2191
  CDS (1)..(516)

SEQ ID NO: 22898 - protein, 171 aa, Clostridium perfringens; identical to SEQ ID NO: 2192

SEQ ID NO: 22899 - DNA, 573 bp, Ralstonia solanacearum; identical to SEQ ID NO: 2193
  CDS (1)..(573)

SEQ ID NO: 22900 - protein, 190 aa, Ralstonia solanacearum; identical to SEQ ID NO: 2194

SEQ ID NO: 22901 - DNA, 579 bp, Rhizobium meliloti; identical to SEQ ID NO: 2195
  CDS (1)..(579)

SEQ ID NO: 22902 - protein, 192 aa, Rhizobium meliloti; identical to SEQ ID NO: 2196

SEQ ID NO: 22903 - DNA, 7122 bp, Rhizobium loti; identical to SEQ ID NO: 2197
  CDS (1)..(7122)

SEQ ID NO: 22904 - protein, 2373 aa, Rhizobium loti; identical to SEQ ID NO: 2198

SEQ ID NO: 22905 - DNA, 612 bp, Rhizobium loti; identical to SEQ ID NO: 2199
  CDS (1)..(612)

SEQ ID NO: 22906 - protein, 203 aa, Rhizobium loti; identical to SEQ ID NO: 2200

SEQ ID NO: 22907 - DNA, 516 bp, Streptomyces coelicolor; identical to SEQ ID NO: 2201
  CDS (1)..(516)

SEQ ID NO: 22908 - protein, 171 aa, Streptomyces coelicolor; identical to SEQ ID NO: 2202

SEQ ID NO: 22909 - DNA, 843 bp, Arabidopsis thaliana; identical to SEQ ID NO: 2203
  CDS (1)..(843)

SEQ ID NO: 22910 - protein, 280 aa, Arabidopsis thaliana; identical to SEQ ID NO: 2204

SEQ ID NO: 22911 - DNA, 1623 bp, Bifidobacterium longum; identical to SEQ ID NO: 2205
  CDS (1)..(1623)

SEQ ID NO: 22912 - protein, 540 aa, Bifidobacterium longum; identical to SEQ ID NO: 2206

SEQ ID NO: 22913 - DNA, 525 bp, Buchnera aphidicola; identical to SEQ ID NO: 2207
  CDS (1)..(525)

SEQ ID NO: 22914 - protein, 174 aa, Buchnera aphidicola; identical to SEQ ID NO: 2208

SEQ ID NO: 22915 - DNA, 510 bp, Corynebacterium efficiens; identical to SEQ ID NO: 2209
  CDS (1)..(510)

SEQ ID NO: 22916 - protein, 169 aa, Corynebacterium efficiens; identical to SEQ ID NO: 2210

SEQ ID NO: 22917 - DNA, 525 bp, Haemophilus ducreyi; identical to SEQ ID NO: 2211
  CDS (1)..(525)

SEQ ID NO: 22918 - protein, 174 aa, Haemophilus ducreyi; identical to SEQ ID NO: 2212

SEQ ID NO: 22919 - DNA, 504 bp, Helicobacter hepaticus; identical to SEQ ID NO: 2213
  CDS (1)..(504)

SEQ ID NO: 22920 - protein, 167 aa, Helicobacter hepaticus; identical to SEQ ID NO: 2214

SEQ ID NO: 22921 - DNA, 552 bp, Oceanobacillus iheyensis; identical to SEQ ID NO: 2215
  CDS (1)..(552)

SEQ ID NO: 22922 - protein, 183 aa, Oceanobacillus iheyensis; identical to SEQ ID NO: 2216

SEQ ID NO: 22923 - DNA, 528 bp, Pasteurella multocida; identical to SEQ ID NO: 2217
  CDS (1)..(528)

SEQ ID NO: 22924 - protein, 175 aa, Pasteurella multocida; identical to SEQ ID NO: 2218

SEQ ID NO: 22925 - DNA, 522 bp, Photorhabdus luminescens; identical to SEQ ID NO: 2219
  CDS (1)..(522)

SEQ ID NO: 22926 - protein, 173 aa, Photorhabdus luminescens; identical to SEQ ID NO: 2220

SEQ ID NO: 22927 - DNA, 519 bp, Pseudomonas putida; identical to SEQ ID NO: 2221
  CDS (1)..(519)

SEQ ID NO: 22928 - protein, 172 aa, Pseudomonas putida; identical to SEQ ID NO: 2222

SEQ ID NO: 22929 - DNA, 519 bp, Pseudomonas syringae; identical to SEQ ID NO: 2223
  CDS (1)..(519)

SEQ ID NO: 22930 - protein, 172 aa, Pseudomonas syringae; identical to SEQ ID NO: 2224

SEQ ID NO: 22931 - DNA, 516 bp, Shewanella oneidensis; identical to SEQ ID NO: 2225
  CDS (1)..(516)

SEQ ID NO: 22932 - protein, 171 aa, Shewanella oneidensis; identical to SEQ ID NO: 2226

SEQ ID NO: 22933 - DNA, 519 bp, Staphylococcus epidermidis; identical to SEQ ID NO: 2227
  CDS (7)..(519)

SEQ ID NO: 22934 - protein, 170 aa, Staphylococcus epidermidis; identical to SEQ ID NO: 2228

SEQ ID NO: 22935 - DNA, 552 bp, Synechococcus elongatus; identical to SEQ ID NO: 2229
  CDS (1)..(552)

SEQ ID NO: 22936 - protein, 183 aa, Synechococcus elongatus; identical to SEQ ID NO: 2230

SEQ ID NO: 22937 - DNA, 519 bp, Vibrio parahaemolyticus; identical to SEQ ID NO: 2231
  CDS (1)..(519)

SEQ ID NO: 22938 - protein, 172 aa, Vibrio parahaemolyticus; identical to SEQ ID NO: 2232

SEQ ID NO: 22939 - DNA, 519 bp, Vibrio vulnificus; identical to SEQ ID NO: 2233
  CDS (1)..(519)

SEQ ID NO: 22940 - protein, 172 aa, Vibrio vulnificus; identical to SEQ ID NO: 2234

SEQ ID NO: 22941 - DNA, 522 bp, Wigglesworthia glossinidia brevipalpis; identical to SEQ ID NO: 2235
  CDS (1)..(522)

SEQ ID NO: 22942 - protein, 173 aa, Wigglesworthia glossinidia brevipalpis; identical to SEQ ID NO: 2236

SEQ ID NO: 22943 - DNA, 543 bp, Xylella fastidiosa; identical to SEQ ID NO: 2237
  CDS (1)..(543)

SEQ ID NO: 22944 - protein, 180 aa, Xylella fastidiosa; identical to SEQ ID NO: 2238

SEQ ID NO: 22945 - DNA, 22 bp, Artificial sequence
  Primer sequence
atggtagcaaggcagcgcgctt

SEQ ID NO: 22946 - DNA, 25 bp, Artificial sequence
  Primer sequence
ttagttgctttccagcatgtgaata

SEQ ID NO: 22947 - protein, 160 aa, Artificial sequence; identical to SEQ ID NO: 2905
  Consensus
  Variant (2)..(2): Xaa in position 2 is any amino acid
  Variant (4)..(5): Xaa in position 4 to 5 is any amino acid
  Variant (7)..(7): Xaa in position 7 is any amino acid
  Variant (10)..(12): Xaa in position 10 to 12 is any amino acid
  Variant (14)..(16): Xaa in position 14 to 16 is any amino acid
  Variant (18)..(25): Xaa in position 18 to 25 is any amino acid
  Variant (27)..(27): Xaa in position 27 is any amino acid
  Variant (29)..(30): Xaa in position 29 to 30 is any amino acid
  Variant (32)..(46): Xaa in position 32 to 46 is any amino acid
  Variant (48)..(50): Xaa in position 48 to 50 is any amino acid
  Variant (53)..(54): Xaa in position 53 to 54 is any amino acid
  Variant (57)..(58): Xaa in position 57 to 58 is any amino acid
  Variant (60)..(78): Xaa in position 60 to 78 is any amino acid
  Variant (82)..(104): Xaa in position 82 to 104 is any amino acid
  Variant (106)..(114): Xaa in position 106 to 114 is any amino acid
  Variant (116)..(124): Xaa in position 116 to 124 is any amino acid
  Variant (127)..(155): Xaa in position 127 to 155 is any amino acid
  Variant (157)..(159): Xaa in position 157 to 159 is any amino acid

SEQ ID NO: 22948 - protein, 26 aa, Artificial sequence
  Consensus
  Variant (2)..(2): Xaa in position 2 is any amino acid
  Variant (3)..(3): Xaa in position 3 is Met, Arg, Pro or Ala
  Variant (4)..(4): Xaa in position 4 is Gly or Ala
  Variant (5)..(5): Xaa in position 5 is Ala, Ser, Val, Cys or Thr
  Variant (8)..(8): Xaa in position 8 is Ser or Thr
  Variant (9)..(9): Xaa in position 9 is any amino acid
  Variant (10)..(10): Xaa in position 10 is Ile, Val, Leu or Thr
  Variant (11)..(11): Xaa in position 11 is Gly, Ala or Ser
  Variant (12)..(13): Xaa in position 12 to 13 is any amino acid
  Variant (14)..(14): Xaa in position 14 is Leu, Val, Ile or Met
  Variant (15)..(15): Xaa in position 15 is Ala, Ser or Asp
  Variant (16)..(19): Xaa in position 16 to 19 is any amino acid
  Variant (20)..(23): Xaa in position 20 to 23 is any or no amino acid
  Variant (24)..(24): Xaa in position 24 is Asp or Glu
  Variant (25)..(25): Xaa in position 25 is any amino acid
  Variant (26)..(26): Xaa in position 26 is Asp or Asn
GXXXXGKXXXXXXXXXXXXXXXXXXX

SEQ ID NO: 22949 - protein, 75 aa, Artificial sequence; identical to SEQ ID NO: 2904
  Consensus
  Variant (1)..(1): Xaa in position 1 is Glu, Trp, Gln or Asp
  Variant (2)..(3): Xaa in position 2 to 3 is any amino acid
  Variant (4)..(4): Xaa in position 4 is Phe, Leu or Tyr
  Variant (5)..(5): Xaa in position 5 is Arg or Leu
  Variant (6)..(7): Xaa in position 6 to 7 is any amino acid
  Variant (9)..(11): Xaa in position 9 to 11 is any amino acid
  Variant (12)..(12): Xaa in position 12 is Leu, Ile, Val, Ala, Phe or Thr
  Variant (13)..(20): Xaa in position 13 to 20 is any amino acid
  Variant (21)..(23): Xaa in position 21 to 23 is any or no amino acid
  Variant (24)..(24): Xaa in position 24 is Val, Ile, Leu or Thr
  Variant (25)..(25): Xaa in position 25 is Leu, Ile or Val
  Variant (26)..(26): Xaa in position 26 is Ala, Ser or Thr
  Variant (27)..(27): Xaa in position 27 is Thr, Leu, Ala, Ser or Pro
  Variant (30)..(30): Xaa in position 30 is Gly or Ser
  Variant (31)..(31): Xaa in position 31 is any amino acid
  Variant (32)..(32): Xaa in position 32 is Val, Ile, Phe, Pro, Tyr or Leu
  Variant (33)..(45): Xaa in position 33 to 45 is any amino acid
  Variant (46)..(53): Xaa in position 46 to 53 is any or no amino acid
  Variant (54)..(54): Xaa in position 54 is Leu, Ile or Val
  Variant (55)..(63): Xaa in position 55 to 63 is any amino acid
  Variant (64)..(64): Xaa in position 64 is Arg, Asn or Asp
  Variant (65)..(69): Xaa in position 65 to 69 is any amino acid
  Variant (70)..(73): Xaa in position 70 to 73 is any or no amino acid
  Variant (74)..(74): Xaa in position 74 is Arg, Lys or Leu
  Variant (75)..(75): Xaa in position 75 is Pro or Gly

SEQ ID NO: 22950 - DNA, 1242 bp, Escherichia coli K12; identical to SEQ ID NO: 19626
  CDS (1)..(1242): transl_table=11

SEQ ID NO: 22951 - protein, 413 aa, Escherichia coli K12; identical to SEQ ID NO: 19627

SEQ ID NO: 22952 - DNA, 1212 bp, Caenorhabditis elegans; identical to SEQ ID NO: 19628
  CDS (1)..(1212)

SEQ ID NO: 22953 - protein, 403 aa, Caenorhabditis elegans; identical to SEQ ID NO: 19629

SEQ ID NO: 22954 - DNA, 1329 bp, Saccharomyces cerevisiae; identical to SEQ ID NO: 19630
  CDS (1)..(1329)

SEQ ID NO: 22955 - protein, 442 aa, Saccharomyces cerevisiae; identical to SEQ ID NO: 19631

SEQ ID NO: 22956 - DNA, 1380 bp, Homo sapiens; identical to SEQ ID NO: 19632
  CDS (1)..(1380)

SEQ ID NO: 22957 - protein, 459 aa, Homo sapiens; identical to SEQ ID NO: 19633

SEQ ID NO: 22958 - DNA, 1380 bp, Mus musculus; identical to SEQ ID NO: 19634
  CDS (1)..(1380)

SEQ ID NO: 22959 - protein, 459 aa, Mus musculus [sequence omitted]

SEQ ID NO: 22960 - DNA, 1302 bp, Mesorhizobium loti MAFF303099; identical to SEQ ID NO: 19636
  CDS (1)..(1302): transl_table=11

SEQ ID NO: 22961 - protein, 433 aa, Mesorhizobium loti MAFF303099; identical to SEQ ID NO: 19637

SEQ ID NO: 22962 - DNA, 1263 bp, Mesorhizobium loti MAFF303099; identical to SEQ ID NO: 19638
  CDS (1)..(1263): transl_table=11

SEQ ID NO: 22963 - protein, 420 aa, Mesorhizobium loti MAFF303099; identical to SEQ ID NO: 19639

SEQ ID NO: 22964 - DNA, 1245 bp, Clostridium acetobutylicum ATCC 824; identical to SEQ ID NO: 19640
  CDS (1)..(1245): transl_table=11

SEQ ID NO: 22965 - protein, 414 aa, Clostridium acetobutylicum ATCC 824; identical to SEQ ID NO: 19641

SEQ ID NO: 22966 - DNA, 1239 bp, Helicobacter pylori 26695; identical to SEQ ID NO: 19642
  CDS (1)..(1239): transl_table=11

SEQ ID NO: 22967 - protein, 412 aa, Helicobacter pylori 26695; identical to SEQ ID NO: 19643

SEQ ID NO: 22968 - DNA, 1248 bp, Aquifex aeolicus VF5; identical to SEQ ID NO: 19644
  CDS (1)..(1248): transl_table=11

SEQ ID NO: 22969 - protein, 415 aa, Aquifex aeolicus VF5; identical to SEQ ID NO: 19645

SEQ ID NO: 22970 - DNA, 1257 bp, Chlamydia trachomatis D/UW-3/CX; identical to SEQ ID NO: 19646
  CDS (1)..(1257): transl_table=11

SEQ ID NO: 22971 - protein, 418 aa, Chlamydia trachomatis D/UW-3/CX; identical to SEQ ID NO: 19647

SEQ ID NO: 22972 - DNA, 1281 bp, Rickettsia prowazekii str. Madrid E; identical to SEQ ID NO: 19648
  CDS (1)..(1281): transl_table=11

SEQ ID NO: 22973 - protein, 426 aa, Rickettsia prowazekii str. Madrid E; identical to SEQ ID NO: 19649

SEQ ID NO: 22974 - DNA, 1239 bp, Helicobacter pylori J99; identical to SEQ ID NO: 19650
  CDS (1)..(1239): transl_table=11

SEQ ID NO: 22975 - protein, 412 aa, Helicobacter pylori J99; identical to SEQ ID NO: 19651

SEQ ID NO: 22976 - DNA, 1239 bp, Thermotoga maritima MSB8; identical to SEQ ID NO: 19652
  CDS (1)..(1239): transl_table=11

SEQ ID NO: 22977 - protein, 412 aa, Thermotoga maritima MSB8; identical to SEQ ID NO: 19653

SEQ ID NO: 22978 - DNA, 1245 bp, Vibrio cholerae O1 biovar eltor str. N16961; identical to SEQ ID NO: 19654
  CDS (1)..(1245): transl_table=11

SEQ ID NO: 22979 - protein, 414 aa, Vibrio cholerae O1 biovar eltor str. N16961; identical to SEQ ID NO: 19655

SEQ ID NO: 22980 - DNA, 1236 bp, Bacillus halodurans C-125; identical to SEQ ID NO: 19656
  CDS (1)..(1236): transl_table=11

SEQ ID NO: 22981 - protein, 411 aa, Bacillus halodurans C-125; identical to SEQ ID NO: 19657

SEQ ID NO: 22982 - DNA, 1221 bp, Pasteurella multocida subsp. multocida str. Pm70; identical to SEQ ID NO: 19658
  CDS (1)..(1221): transl_table=11

SEQ ID NO: 22983 - protein, 406 aa, Pasteurella multocida subsp. multocida str. Pm70; identical to SEQ ID NO: 19659

SEQ ID NO: 22984 - DNA, 1269 bp, Pseudomonas aeruginosa PAO1; identical to SEQ ID NO: 19660
  CDS (1)..(1269): transl_table=11

SEQ ID NO: 22985 - protein, 422 aa, Pseudomonas aeruginosa PAO1; identical to SEQ ID NO: 19661

SEQ ID NO: 22986 - DNA, 1245 bp, Pseudomonas aeruginosa PAO1; identical to SEQ ID NO: 19662
  CDS (1)..(1245): transl_table=11

SEQ ID NO: 22987 - protein, 414 aa, Pseudomonas aeruginosa PAO1; identical to SEQ ID NO: 19663

SEQ ID NO: 22988 - DNA, 1230 bp, Lactococcus lactis subsp. lactis Il1403; identical to SEQ ID NO: 19664
  CDS (1)..(1230): transl_table=11

SEQ ID NO: 22989 - protein, 409 aa, Lactococcus lactis subsp. lactis Il1403; identical to SEQ ID NO: 19665

SEQ ID NO: 22990 - DNA, 1248 bp, Neisseria meningitidis MC58; identical to SEQ ID NO: 19666
  CDS (1)..(1248): transl_table=11

SEQ ID NO: 22991 - protein, 415 aa, Neisseria meningitidis MC58; identical to SEQ ID NO: 19667

SEQ ID NO: 22992 - DNA, 1215 bp, Campylobacter jejuni subsp. jejuni NCTC 11168; identical to SEQ ID NO: 19668
  CDS (1)..(1215): transl_table=11

SEQ ID NO: 22993 - protein, 404 aa, Campylobacter jejuni subsp. jejuni NCTC 11168; identical to SEQ ID NO: 19669

SEQ ID NO: 22994 - DNA, 1248 bp, Neisseria meningitidis Z2491; identical to SEQ ID NO: 19670
  CDS (1)..(1248): transl_table=11

SEQ ID NO: 22995 - protein, 415 aa, Neisseria meningitidis Z2491; identical to SEQ ID NO: 19671

SEQ ID NO: 22996 - DNA, 1287 bp, Deinococcus radiodurans R1; identical to SEQ ID NO: 19672
  CDS (1)..(1287): transl_table=11

SEQ ID NO: 22997 - protein, 428 aa, Deinococcus radiodurans R1; identical to SEQ ID NO: 19673

SEQ ID NO: 22998 - DNA, 1257 bp, Chlamydia muridarum Nigg; identical to SEQ ID NO: 19674
  CDS (1)..(1257): transl_table=11

SEQ ID NO: 22999 - protein, 418 aa, Chlamydia muridarum Nigg; identical to SEQ ID NO: 19675

SEQ ID NO: 23000 - DNA, 1236 bp, Xylella fastidiosa 9a5c; identical to SEQ ID NO: 19676
  CDS (1)..(1236): transl_table=11

SEQ ID NO: 23001 - protein, 411 aa, Xylella fastidiosa 9a5c; identical to SEQ ID NO: 19677

SEQ ID NO: 23002 - DNA, 1236 bp, Streptococcus pneumoniae TIGR4; identical to SEQ ID NO: 19678
  CDS (1)..(1236): transl_table=11

SEQ ID NO: 23003 - protein, 411 aa, Streptococcus pneumoniae TIGR4; identical to SEQ ID NO: 19679

SEQ ID NO: 23004 - DNA, 1236 bp, Clostridium acetobutylicum ATCC 824; identical to SEQ ID NO: 19680
  CDS (1)..(1236): transl_table=11

SEQ ID NO: 23005 - protein, 411 aa, Clostridium acetobutylicum ATCC 824; identical to SEQ ID NO: 19681

SEQ ID NO: 23006 - DNA, 1329 bp, Agrobacterium tumefaciens str. C58; identical to SEQ ID NO: 19682
  CDS (1)..(1329): transl_table=11

SEQ ID NO: 23007 - protein, 442 aa, Agrobacterium tumefaciens str. C58; identical to SEQ ID NO: 19683

SEQ ID NO: 23008 - DNA, 1383 bp, Agrobacterium tumefaciens str. C58; identical to SEQ ID NO: 19684
  CDS (1)..(1383): transl_table=11

SEQ ID NO: 23009 - protein, 460 aa, Agrobacterium tumefaciens str. C58; identical to SEQ ID NO: 19685

SEQ ID NO: 23010 - DNA, 1245 bp, Streptococcus pneumoniae R6; identical to SEQ ID NO: 19686
  CDS (1)..(1245): transl_table=11

SEQ ID NO: 23011 - protein, 414 aa, Streptococcus pneumoniae R6; identical to SEQ ID NO: 19687

SEQ ID NO: 23012 - DNA, 1287 bp, Rickettsia conorii str. Malish 7; identical to SEQ ID NO: 19688
  CDS (1)..(1287): transl_table=11

SEQ ID NO: 23013 - protein, 428 aa, Rickettsia conorii str. Malish 7; identical to SEQ ID NO: 19689

SEQ ID NO: 23014 - DNA, 1245 bp, Staphylococcus aureus subsp. aureus Mu50; identical to SEQ ID NO: 19690
  CDS (1)..(1245): transl_table=11

SEQ ID NO: 23015 - protein, 414 aa, Staphylococcus aureus subsp. aureus Mu50; identical to SEQ ID NO: 19691

SEQ ID NO: 23016 - DNA, 1242 bp, Bacillus subtilis subsp. subtilis str. 168; identical to SEQ ID NO: 19692
  CDS (1)..(1242): transl_table=11

SEQ ID NO: 23017 - protein, 413 aa, Bacillus subtilis subsp. subtilis str. 168; identical to SEQ ID NO: 19693

SEQ ID NO: 23018 - DNA, 1281 bp, Caulobacter crescentus CB15; identical to SEQ ID NO: 19694
  CDS (1)..(1281): transl_table=11

SEQ ID NO: 23019 - protein, 426 aa, Caulobacter crescentus CB15; identical to SEQ ID NO: 19695

SEQ ID NO: 23020 - DNA, 1251 bp, Chlamydophila pneumoniae AR39; identical to SEQ ID NO: 19696
  CDS (1)..(1251): transl_table=11

SEQ ID NO: 23021 - protein, 416 aa, Chlamydophila pneumoniae AR39; identical to SEQ ID NO: 19697

SEQ ID NO: 23022 - DNA, 1242 bp, Listeria monocytogenes EGD-e; identical to SEQ ID NO: 19698
  CDS (1)..(1242): transl_table=11

SEQ ID NO: 23023 - protein, 413 aa, Listeria monocytogenes EGD-e; identical to SEQ ID NO: 19699

SEQ ID NO: 23024 - DNA, 1242 bp, Listeria innocua Clip11262; identical to SEQ ID NO: 19700
  CDS (1)..(1242): transl_table=11

SEQ ID NO: 23025 - protein, 413 aa, Listeria innocua Clip11262; identical to SEQ ID NO: 19701

SEQ ID NO: 23026 - DNA, 1251 bp, Nostoc sp. PCC 7120; identical to SEQ ID NO: 19702
  CDS (1)..(1251): transl_table=11

SEQ ID NO: 23027 - protein, 416 aa, Nostoc sp. PCC 7120; identical to SEQ ID NO: 19703

SEQ ID NO: 23028 - DNA, 1233 bp, Ralstonia solanacearum GMI1000; identical to SEQ ID NO: 19704
  CDS (1)..(1233): transl_table=11

SEQ ID NO: 23029 - protein, 410 aa, Ralstonia solanacearum GMI1000; identical to SEQ ID NO: 19705

SEQ ID NO: 23030 - DNA, 1263 bp, Agrobacterium tumefaciens str. C58; identical to SEQ ID NO: 19706
  CDS (1)..(1263): transl_table=11

SEQ ID NO: 23031 - protein, 420 aa, Agrobacterium tumefaciens str. C58; identical to SEQ ID NO: 19707

SEQ ID NO: 23032 - DNA, 1299 bp, Agrobacterium tumefaciens str. C58; identical to SEQ ID NO: 19708
  CDS (1)..(1299): transl_table=11

SEQ ID NO: 23033 - protein, 432 aa, Agrobacterium tumefaciens str. C58; identical to SEQ ID NO: 19709

SEQ ID NO: 23034 - DNA, 1242 bp, Clostridium perfringens str. 13; identical to SEQ ID NO: 19710
  CDS (1)..(1242): transl_table=11

SEQ ID NO: 23035 - protein, 413 aa, Clostridium perfringens str. 13; identical to SEQ ID NO: 19711

SEQ ID NO: 23036 - DNA, 1281 bp, Schizosaccharomyces pombe 972h-; identical to SEQ ID NO: 19712
  CDS (1)..(1281)

SEQ ID NO: 23037 - protein, 426 aa, Schizosaccharomyces pombe 972h-; identical to SEQ ID NO: 19713

SEQ ID NO: 23038 - DNA, 1242 bp, Fusobacterium nucleatum subsp. nucleatum ATCC 25586; identical to SEQ ID NO: 19714
  CDS (1)..(1242): transl_table=11

SEQ ID NO: 23039 - protein, 413 aa, Fusobacterium nucleatum subsp. nucleatum ATCC 25586; identical to SEQ ID NO: 19715

SEQ ID NO: 23040 - DNA, 1230 bp, Thermoanaerobacter tengcongensis MB4; identical to SEQ ID NO: 19716
  CDS (1)..(1230): transl_table=11

SEQ ID NO: 23041 - protein, 409 aa, Thermoanaerobacter tengcongensis MB4; identical to SEQ ID NO: 19717

SEQ ID NO: 23042 - DNA, 1287 bp, Streptomyces coelicolor A3(2); identical to SEQ ID NO: 19718
  CDS (1)..(1287): transl_table=11

SEQ ID NO: 23043 - protein, 428 aa, Streptomyces coelicolor A3(2); identical to SEQ ID NO: 19719

SEQ ID NO: 23044 - DNA, 1269 bp, Streptomyces coelicolor A3(2); identical to SEQ ID NO: 19720
  CDS (1)..(1269): transl_table=11

SEQ ID NO: 23045 - protein, 422 aa, Streptomyces coelicolor A3(2); identical to SEQ ID NO: 19721

SEQ ID NO: 23046 - DNA, 1290 bp, Streptomyces coelicolor A3(2); identical to SEQ ID NO: 19722
  CDS (1)..(1290): transl_table=11

SEQ ID NO: 23047 - protein, 429 aa, Streptomyces coelicolor A3(2); identical to SEQ ID NO: 19723

SEQ ID NO: 23048 - DNA, 1224 bp, Streptomyces coelicolor A3(2); identical to SEQ ID NO: 19724
  CDS (1)..(1224): transl_table=11

SEQ ID NO: 23049 - protein, 407 aa, Streptomyces coelicolor A3(2); identical to SEQ ID NO: 19725

SEQ ID NO: 23050 - DNA, 1236 bp, Xanthomonas axonopodis pv. citri str. 306; identical to SEQ ID NO: 19726
  CDS (1)..(1236): transl_table=11

SEQ ID NO: 23051 - protein, 411 aa, Xanthomonas axonopodis pv. citri str. 306; identical to SEQ ID NO: 19727

SEQ ID NO: 23052 - DNA, 1317 bp, Drosophila melanogaster; identical to SEQ ID NO: 19728
  CDS (1)..(1317)

SEQ ID NO: 23053 - protein, 438 aa, Drosophila melanogaster; identical to SEQ ID NO: 19729

SEQ ID NO: 23054 - DNA, 1242 bp, Chlorobium tepidum TLS; identical to SEQ ID NO: 19730
  CDS (1)..(1242): transl_table=11

SEQ ID NO: 23055 - protein, 413 aa, Chlorobium tepidum TLS; identical to SEQ ID NO: 19731

SEQ ID NO: 23056 - DNA, 1029 bp, Yersinia pestis KIM; identical to SEQ ID NO: 19732
  CDS (1)..(1029): transl_table=11

SEQ ID NO: 23057 - protein, 342 aa, Yersinia pestis KIM; identical to SEQ ID NO: 19733

SEQ ID NO: 23058 - DNA, 1263 bp, Thermosynechococcus elongatus BP-1; identical to SEQ ID NO: 19734
  CDS (1)..(1263): transl_table=11

SEQ ID NO: 23059 - protein, 420 aa, Thermosynechococcus elongatus BP-1; identical to SEQ ID NO: 19735

SEQ ID NO: 23060 - DNA, 1233 bp, Streptococcus agalactiae 2603V/R; identical to SEQ ID NO: 19736
  CDS (1)..(1233): transl_table=11

SEQ ID NO: 23061 - protein, 410 aa, Streptococcus agalactiae 2603V/R; identical to SEQ ID NO: 19737

SEQ ID NO: 23062 - DNA, 1239 bp, Oceanobacillus iheyensis HTE831; identical to SEQ ID NO: 19738
  CDS (1)..(1239): transl_table=11

SEQ ID NO: 23063 - protein, 412 aa, Oceanobacillus iheyensis HTE831; identical to SEQ ID NO: 19739

SEQ ID NO: 23064 - DNA, 1263 bp, Brucella suis 1330; identical to SEQ ID NO: 19740
  CDS (1)..(1263): transl_table=11

SEQ ID NO: 23065 - protein, 420 aa, Brucella suis 1330; identical to SEQ ID NO: 19741

SEQ ID NO: 23066 - DNA, 1425 bp, Plasmodium falciparum 3D7; identical to SEQ ID NO: 19742
  CDS (1)..(1425)

SEQ ID NO: 23067 - protein, 474 aa, Plasmodium falciparum 3D7; identical to SEQ ID NO: 19743

SEQ ID NO: 23068 - DNA, 1239 bp, Shewanella oneidensis MR-1; identical to SEQ ID NO: 19744
  CDS (1)..(1239): transl_table=11

SEQ ID NO: 23069 - protein, 412 aa, Shewanella oneidensis MR-1; identical to SEQ ID NO: 19745

SEQ ID NO: 23070 - DNA, 1233 bp, Streptococcus mutans UA159; identical to SEQ ID NO: 19746
  CDS (1)..(1233): transl_table=11

SEQ ID NO: 23071 - protein, 410 aa, Streptococcus mutans UA159; identical to SEQ ID NO: 19747

SEQ ID NO: 23072 - DNA, 1245 bp, Pseudomonas putida KT2440; identical to SEQ ID NO: 19748
  CDS (1)..(1245): transl_table=11

SEQ ID NO: 23073 - protein, 414 aa, Pseudomonas putida KT2440; identical to SEQ ID NO: 19749

SEQ ID NO: 23074 - DNA, 1314 bp, Pseudomonas putida KT2440; identical to SEQ ID NO: 19750
  CDS (1)..(1314): transl_table=11

SEQ ID NO: 23075 - protein, 437 aa, Pseudomonas putida KT2440; identical to SEQ ID NO: 19751

SEQ ID NO: 23076 - DNA, 1263 bp, Vibrio vulnificus CMCP6; identical to SEQ ID NO: 19752
  CDS (1)..(1263): transl_table=11

SEQ ID NO: 23077 - protein, 420 aa, Vibrio vulnificus CMCP6; identical to SEQ ID NO: 19753

SEQ ID NO: 23078 - DNA, 1263 bp, Bradyrhizobium japonicum USDA 110; identical to SEQ ID NO: 19754
  CDS (1)..(1263): transl_table=11

SEQ ID NO: 23079 - protein, 420 aa, Bradyrhizobium japonicum USDA 110; identical to SEQ ID NO: 19755

SEQ ID NO: 23080 - DNA, 1266 bp, Bradyrhizobium japonicum USDA 110; identical to SEQ ID NO: 19756
  CDS (1)..(1266): transl_table=11

SEQ ID NO: 23081 - protein, 421 aa, Bradyrhizobium japonicum USDA 110; identical to SEQ ID NO: 19757

SEQ ID NO: 23082 - DNA, 1236 bp, Xylella fastidiosa Temecula1; identical to SEQ ID NO: 19758
  CDS (1)..(1236): transl_table=11

SEQ ID NO: 23083 - protein, 411 aa, Xylella fastidiosa Temecula1; identical to SEQ ID NO: 19759

SEQ ID NO: 23084 - DNA, 1245 bp, Clostridium tetani E88; identical to SEQ ID NO: 19760
  CDS (1)..(1245): transl_table=11

SEQ ID NO: 23085 - protein, 414 aa, Clostridium tetani E88; identical to SEQ ID NO: 19761

SEQ ID NO: 23086 - DNA, 1233 bp, Lactobacillus plantarum WCFS1; identical to SEQ ID NO: 19762
  CDS (1)..(1233): transl_table=11

SEQ ID NO: 23087 - protein, 410 aa, Lactobacillus plantarum WCFS1; identical to SEQ ID NO: 19763

SEQ ID NO: 23088 - DNA, 1245 bp, Pseudomonas syringae pv. tomato str. DC3000; identical to SEQ ID NO: 19764
  CDS (1)..(1245): transl_table=11

SEQ ID NO: 23089 - protein, 414 aa, Pseudomonas syringae pv. tomato str. DC3000; identical to SEQ ID NO: 19765

SEQ ID NO: 23090 - DNA, 1251 bp, Vibrio parahaemolyticus RIMD 2210633; identical to SEQ ID NO: 19766
  CDS (1)..(1251): transl_table=11

SEQ ID NO: 23091 - protein, 416 aa, Vibrio parahaemolyticus RIMD 2210633; identical to SEQ ID NO: 19767

SEQ ID NO: 23092 - DNA, 1212 bp, Vibrio parahaemolyticus RIMD 2210633; identical to SEQ ID NO: 19768
  CDS (1)..(1212): transl_table=11

SEQ ID NO: 23093 - protein, 403 aa, Vibrio parahaemolyticus RIMD 2210633; identical to SEQ ID NO: 19769

SEQ ID NO: 23094 - DNA, 1233 bp, Streptococcus pyogenes SSI-1; identical to SEQ ID NO: 19770
  CDS (1)..(1233): transl_table=11

SEQ ID NO: 23095 - protein, 410 aa, Streptococcus pyogenes SSI-1; identical to SEQ ID NO: 19771

SEQ ID NO: 23096 - DNA, 1242 bp, Salmonella enterica subsp. enterica serovar Typhi Ty2; identical to SEQ ID NO: 19772
  CDS (1)..(1242): transl_table=11

SEQ ID NO: 23097 - protein, 413 aa, Salmonella enterica subsp. enterica serovar Typhi Ty2; identical to SEQ ID NO: 19773

SEQ ID NO: 23098 - DNA, 1263 bp, Bacteroides thetaiotaomicron VPI-5482; identical to SEQ ID NO: 19774
  CDS (1)..(1263): transl_table=11

SEQ ID NO: 23099 - protein, 420 aa, Bacteroides thetaiotaomicron VPI-5482; identical to SEQ ID NO: 19775

SEQ ID NO: 23100 - DNA, 1239 bp, Enterococcus faecalis V583; identical to SEQ ID NO: 19776
  CDS (1)..(1239): transl_table=11

SEQ ID NO: 23101 - protein, 412 aa, Enterococcus faecalis V583; identical to SEQ ID NO: 19777

SEQ ID NO: 23102 - DNA, 1236 bp, Enterococcus faecalis V583; identical to SEQ ID NO: 19778
  CDS (1)..(1236): transl_table=11

SEQ ID NO: 23103 - protein, 411 aa, Enterococcus faecalis V583; identical to SEQ ID NO: 19779

SEQ ID NO: 23104 - DNA, 1245 bp, Coxiella burnetii RSA 493; identical to SEQ ID NO: 19780
  CDS (1)..(1245): transl_table=11

SEQ ID NO: 23105 - protein, 414 aa, Coxiella burnetii RSA 493; identical to SEQ ID NO: 19781

SEQ ID NO: 23106 - DNA, 1221 bp, Streptomyces avermitilis MA-4680; identical to SEQ ID NO: 19782
  CDS (1)..(1221): transl_table=11

SEQ ID NO: 23107 - protein, 406 aa, Streptomyces avermitilis MA-4680; identical to SEQ ID NO: 19783

SEQ ID NO: 23108 - DNA, 1251 bp, Streptomyces avermitilis MA-4680; identical to SEQ ID NO: 19784
  CDS (1)..(1251): transl_table=11

SEQ ID NO: 23109 - protein, 416 aa, Streptomyces avermitilis MA-4680; identical to SEQ ID NO: 19785

SEQ ID NO: 23110 - DNA, 1272 bp, Streptomyces avermitilis MA-4680; identical to SEQ ID NO: 19786
  CDS (1)..(1272): transl_table=11

SEQ ID NO: 23111 - protein, 423 aa, Streptomyces avermitilis MA-4680; identical to SEQ ID NO: 19787

SEQ ID NO: 23112 - DNA, 1251 bp, Chlamydophila caviae GPIC; identical to SEQ ID NO: 19788
  CDS (1)..(1251): transl_table=11

SEQ ID NO: 23113 - protein, 416 aa, Chlamydophila caviae GPIC; identical to SEQ ID NO: 19789

SEQ ID NO: 23114 - DNA, 1239 bp, Bacillus cereus ATCC 14579; identical to SEQ ID NO: 19790
  CDS (1)..(1239): transl_table=11

SEQ ID NO: 23115 - protein, 412 aa, Bacillus cereus ATCC 14579; identical to SEQ ID NO: 19791

SEQ ID NO: 23116 - DNA, 1242 bp, Nitrosomonas europaea ATCC 19718; identical to SEQ ID NO: 19792
  CDS (1)..(1242): transl_table=11

SEQ ID NO: 23117 - protein, 413 aa, Nitrosomonas europaea ATCC 19718; identical to SEQ ID NO: 19793

SEQ ID NO: 23118 - DNA, 1626 bp, Arabidopsis thaliana; identical to SEQ ID NO: 19794
  CDS (1)..(1626)

SEQ ID NO: 23119 - protein, 541 aa, Arabidopsis thaliana; identical to SEQ ID NO: 19795

SEQ ID NO: 23120 - DNA, 1266 bp, Streptomyces rochei; identical to SEQ ID NO: 19796
  CDS (1)..(1266): transl_table=11

SEQ ID NO: 23121 - protein, 421 aa, Streptomyces rochei; identical to SEQ ID NO: 19797

SEQ ID NO: 23122 - DNA, 1236 bp, Helicobacter hepaticus ATCC 51449; identical to SEQ ID NO: 19798
  CDS (1)..(1236): transl_table=11

SEQ ID NO: 23123 - protein, 411 aa, Helicobacter hepaticus ATCC 51449; identical to SEQ ID NO: 19799

SEQ ID NO: 23124 - DNA, 1290 bp, Rhodopirellula baltica SH 1; identical to SEQ ID NO: 19800
  CDS (1)..(1290): transl_table=11

SEQ ID NO: 23125 - protein, 429 aa, Rhodopirellula baltica SH 1; identical to SEQ ID NO: 19801

SEQ ID NO: 23126 - DNA, 1290 bp, Rhodopirellula baltica SH 1; identical to SEQ ID NO: 19802
  CDS (1)..(1290): transl_table=11

SEQ ID NO: 23127 - protein, 429 aa, Rhodopirellula baltica SH 1; identical to SEQ ID NO: 19803

SEQ ID NO: 23128 - DNA, 1248 bp, Prochlorococcus marinus subsp. marinus str. CCMP1375; identical to SEQ ID NO: 19804
  CDS (1)..(1248): transl_table=11

SEQ ID NO: 23129 - protein, 415 aa, Prochlorococcus marinus subsp. marinus str. CCMP1375; identical to SEQ ID NO: 19805

SEQ ID NO: 23130 - DNA, 1230 bp, Bordetella bronchiseptica RB50; identical to SEQ ID NO: 19806
  CDS (1)..(1230): transl_table=11

SEQ ID NO: 23131 - protein, 409 aa, Bordetella bronchiseptica RB50; identical to SEQ ID NO: 19807

SEQ ID NO: 23132 - DNA, 1245 bp, Prochlorococcus marinus subsp. pastoris str. CCMP1986; identical to SEQ ID NO: 19808
  CDS (1)..(1245): transl_table=11

SEQ ID NO: 23133 - protein, 414 aa, Prochlorococcus marinus subsp. pastoris str. CCMP1986; identical to SEQ ID NO: 19809

SEQ ID NO: 23134 - DNA, 1248 bp, Prochlorococcus marinus str. MIT 9313; identical to SEQ ID NO: 19810
  CDS (1)..(1248): transl_table=11

SEQ ID NO: 23135 - protein, 415 aa, Prochlorococcus marinus str. MIT 9313; identical to SEQ ID NO: 19811

SEQ ID NO: 23136 - DNA, 1248 bp, Synechococcus sp. WH 8102; identical to SEQ ID NO: 19812
  CDS (1)..(1248): transl_table=11

SEQ ID NO: 23137 - protein, 415 aa, Synechococcus sp. WH 8102; identical to SEQ ID NO: 19813

SEQ ID NO: 23138 - DNA, 1242 bp, Chromobacterium violaceum ATCC 12472; identical to SEQ ID NO: 19814
  CDS (1)..(1242): transl_table=11

SEQ ID NO: 23139 - protein, 413 aa, Chromobacterium violaceum ATCC 12472; identical to SEQ ID NO: 19815

SEQ ID NO: 23140 - DNA, 1257 bp, Porphyromonas gingivalis W83; identical to SEQ ID NO: 19816
  CDS (1)..(1257): transl_table=11

SEQ ID NO: 23141 - protein, 418 aa, Porphyromonas gingivalis W83; identical to SEQ ID NO: 19817

SEQ ID NO: 23142 - DNA, 1242 bp, Wolinella succinogenes DSM 1740; identical to SEQ ID NO: 19818
  CDS (1)..(1242): transl_table=11

SEQ ID NO: 23143 - protein, 413 aa, Wolinella succinogenes DSM 1740; identical to SEQ ID NO: 19819

SEQ ID NO: 23144 - DNA, 1272 bp, Gloeobacter violaceus PCC 7421; identical to SEQ ID NO: 19820
  CDS (1)..(1272): transl_table=11

SEQ ID NO: 23145 - protein, 423 aa, Gloeobacter violaceus PCC 7421; identical to SEQ ID NO: 19821

SEQ ID NO: 23146 - DNA, 1248 bp, Gloeobacter violaceus PCC 7421; identical to SEQ ID NO: 19822
  CDS (1)..(1248): transl_table=11

SEQ ID NO: 23147 - protein, 415 aa, Gloeobacter violaceus PCC 7421; identical to SEQ ID NO: 19823

SEQ ID NO: 23148 - DNA, 1251 bp, Photorhabdus luminescens subsp. laumondii TTO1; identical to SEQ ID NO: 19824
  CDS (1)..(1251): transl_table=11

SEQ ID NO: 23149 - protein, 416 aa, Photorhabdus luminescens subsp. laumondii TTO1; identical to SEQ ID NO: 19825

SEQ ID NO: 23150 - DNA, 1242 bp, Vibrio vulnificus YJ016; identical to SEQ ID NO: 19826
  CDS (1)..(1242): transl_table=11

SEQ ID NO: 23151 - protein, 413 aa, Vibrio vulnificus YJ016; identical to SEQ ID NO: 19827

SEQ ID NO: 23152 - DNA, 1266 bp, Rhodopseudomonas palustris CGA009; identical to SEQ ID NO: 19828
  CDS (1)..(1266): transl_table=11

SEQ ID NO: 23153 - protein, 421 aa, Rhodopseudomonas palustris CGA009; identical to SEQ ID NO: 19829

SEQ ID NO: 23154 - DNA, 1233 bp, Geobacter sulfurreducens PCA; identical to SEQ ID NO: 19830
  CDS (1)..(1233): transl_table=11

SEQ ID NO: 23155 - protein, 410 aa, Geobacter sulfurreducens PCA; identical to SEQ ID NO: 19831

SEQ ID NO: 23156 - DNA, 1251 bp, Mycobacterium avium subsp. paratuberculosis K-10; identical to SEQ ID NO: 19832
  CDS (1)..(1251): transl_table=11

SEQ ID NO: 23157 - protein, 416 aa, Mycobacterium avium subsp. paratuberculosis K-10; identical to SEQ ID NO: 19833

SEQ ID NO: 23158 - DNA, 1272 bp, Wolbachia endosymbiont of Drosophila melanogaster; identical to SEQ ID NO: 19834
  CDS (1)..(1272): transl_table=11

SEQ ID NO: 23159 - protein, 423 aa, Wolbachia endosymbiont of Drosophila melanogaster; identical to SEQ ID NO: 19835

SEQ ID NO: 23160 - DNA, 1272 bp, Bdellovibrio bacteriovorus HD100; identical to SEQ ID NO: 19836
  CDS (1)..(1272): transl_table=11

SEQ ID NO: 23161 - protein, 423 aa, Bdellovibrio bacteriovorus HD100; identical to SEQ ID NO: 19837

SEQ ID NO: 23162 - DNA, 1236 bp, Treponema denticola ATCC 35405; identical to SEQ ID NO: 19838
  CDS (1)..(1236): transl_table=11

SEQ ID NO: 23163 - protein, 411 aa, Treponema denticola ATCC 35405; identical to SEQ ID NO: 19839

SEQ ID NO: 23164 - DNA, 1239 bp, Bacillus cereus ATCC 10987; identical to SEQ ID NO: 19840
  CDS (1)..(1239): transl_table=11

SEQ ID NO: 23165 - protein, 412 aa, Bacillus cereus ATCC 10987; identical to SEQ ID NO: 19841

SEQ ID NO: 23166 - DNA, 1302 bp, Eremothecium gossypii; identical to SEQ ID NO: 19842
  CDS (1)..(1302)

SEQ ID NO: 23167 - protein, 433 aa, Eremothecium gossypii; identical to SEQ ID NO: 19843

SEQ ID NO: 23168 - DNA, 1335 bp, Anopheles gambiae str. PEST; identical to SEQ ID NO: 19844
  CDS (1)..(1335)

SEQ ID NO: 23169 - protein, 444 aa, Anopheles gambiae str. PEST; identical to SEQ ID NO: 19845

SEQ ID NO: 23170 - DNA, 1524 bp, Oryza sativa (japonica cultivar-group); identical to SEQ ID NO: 19846
  CDS (1)..(1524)

SEQ ID NO: 23171 - protein, 507 aa, Oryza sativa (japonica cultivar-group); identical to SEQ ID NO: 19847

SEQ ID NO: 23172 - DNA, 1245 bp, Anopheles gambiae str. PEST; identical to SEQ ID NO: 19848
  CDS (1)..(1245)

SEQ ID NO: 23173 - protein, 414 aa, Anopheles gambiae str. PEST; identical to SEQ ID NO: 19849

SEQ ID NO: 23174 - DNA, 1227 bp, Thermus thermophilus HB27; identical to SEQ ID NO: 19850
  CDS (1)..(1227): transl_table=11

SEQ ID NO: 23175 - protein, 408 aa, Thermus thermophilus HB27; identical to SEQ ID NO: 19851

SEQ ID NO: 23176 - DNA, 1257 bp, Parachlamydia sp. UWE25; identical to SEQ ID NO: 19852
  CDS (1)..(1257): transl_table=11

SEQ ID NO: 23177 - protein, 418 aa, Parachlamydia sp. UWE25; identical to SEQ ID NO: 19853

SEQ ID NO: 23178 - DNA, 1248 bp, Desulfovibrio vulgaris subsp. vulgaris str. Hildenborough; identical to SEQ ID NO: 19854
  CDS (1)..(1248): transl_table=11

SEQ ID NO: 23179 - protein, 415 aa, Desulfovibrio vulgaris subsp. vulgaris str. Hildenborough; identical to SEQ ID NO: 19855

SEQ ID NO: 23180 - DNA, 1242 bp, Listeria monocytogenes str. 4b F2365; identical to SEQ ID NO: 19856
  CDS (1)..(1242): transl_table=11

SEQ ID NO: 23181 - protein, 413 aa, Listeria monocytogenes str. 4b F2365; identical to SEQ ID NO: 19857

SEQ ID NO: 23182 - DNA, 1239 bp, Bacillus anthracis str. Sterne; identical to SEQ ID NO: 19858
  CDS (1)..(1239): transl_table=11

SEQ ID NO: 23183 - protein, 412 aa, Bacillus anthracis str. Sterne; identical to SEQ ID NO: 19859

SEQ ID NO: 23184 - DNA, 1263 bp, Bartonella quintana str. Toulouse; identical to SEQ ID NO: 19860
  CDS (1)..(1263): transl_table=11

SEQ ID NO: 23185 - protein, 420 aa, Bartonella quintana str. Toulouse; identical to SEQ ID NO: 19861

SEQ ID NO: 23186 - DNA, 1263 bp, Bartonella henselae str. Houston-1; identical to SEQ ID NO: 19862
  CDS (1)..(1263): transl_table=11

SEQ ID NO: 23187 - protein, 420 aa, Bartonella henselae str. Houston-1; identical to SEQ ID NO: 19863

SEQ ID NO: 23188 - DNA, 1245 bp, Staphylococcus aureus subsp. aureus MRSA252; identical to SEQ ID NO: 19864
  CDS (1)..(1245): transl_table=11

SEQ ID NO: 23189 - protein, 414 aa, Staphylococcus aureus subsp. aureus MRSA252; identical to SEQ ID NO: 19865

SEQ ID NO: 23190 - DNA, 1245 bp, Staphylococcus aureus subsp. aureus MSSA476; identical to SEQ ID NO: 19866
  CDS (1)..(1245): transl_table=11

SEQ ID NO: 23191 - protein, 414 aa, Staphylococcus aureus subsp. aureus MSSA476; identical to SEQ ID NO: 19867

SEQ ID NO: 23192 - DNA, 1242 bp, Erwinia carotovora subsp. atroseptica SCRI1043; identical to SEQ ID NO: 19868
  CDS (1)..(1242): transl_table=11

SEQ ID NO: 23193 - protein, 413 aa, Erwinia carotovora subsp. atroseptica SCRI1043; identical to SEQ ID NO: 19869

SEQ ID NO: 23194 - DNA, 1290 bp, Erwinia carotovora subsp. atroseptica SCRI1043; identical to SEQ ID NO: 19870
  CDS (1)..(1290): transl_table=11

SEQ ID NO: 23195 - protein, 429 aa, Erwinia carotovora subsp. atroseptica SCRI1043; identical to SEQ ID NO: 19871

SEQ ID NO: 23196 - DNA, 1272 bp, Propionibacterium acnes KPA171202; identical to SEQ ID NO: 19872
  CDS (1)..(1272): transl_table=11

SEQ ID NO: 23197 - protein, 423 aa, Propionibacterium acnes KPA171202; identical to SEQ ID NO: 19873

SEQ ID NO: 23198 - DNA, 1233 bp, Streptococcus pyogenes MGAS10394; identical to SEQ ID NO: 19874
  CDS (1)..(1233): transl_table=11

SEQ ID NO: 23199 - protein, 410 aa, Streptococcus pyogenes MGAS10394; identical to SEQ ID NO: 19875

SEQ ID NO: 23200 - DNA, 1263 bp, Leifsonia xyli subsp. xyli str. CTCB07; identical to SEQ ID NO: 19876
  CDS (1)..(1263): transl_table=11

SEQ ID NO: 23201 - protein, 420 aa, Leifsonia xyli subsp. xyli str. CTCB07; identical to SEQ ID NO: 19877

SEQ ID NO: 23202 - DNA, 1245 bp, Desulfotalea psychrophila LSv54; identical to SEQ ID NO: 19878
  CDS (1)..(1245): transl_table=11

SEQ ID NO: 23203 - protein, 414 aa, Desulfotalea psychrophila LSv54; identical to SEQ ID NO: 19879

SEQ ID NO: 23204 - DNA, 1281 bp, Rickettsia typhi str. Wilmington; identical to SEQ ID NO: 19880
  CDS (1)..(1281): transl_table=11

SEQ ID NO: 23205 - protein, 426 aa, Rickettsia typhi str. Wilmington; identical to SEQ ID NO: 19881

SEQ ID NO: 23206 - DNA, 1275 bp, Yersinia pseudotuberculosis IP 32953; identical to SEQ ID NO: 19882
  CDS (1)..(1275): transl_table=11

SEQ ID NO: 23207 - protein, 424 aa, Yersinia pseudotuberculosis IP 32953; identical to SEQ ID NO: 19883

SEQ ID NO: 23208 - DNA, 1242 bp, Yersinia pseudotuberculosis IP 32953; identical to SEQ ID NO: 19884
  CDS (1)..(1242): transl_table=11

SEQ ID NO: 23209 - protein, 413 aa, Yersinia pseudotuberculosis IP 32953; identical to SEQ ID NO: 19885

SEQ ID NO: 23210 - DNA, 1242 bp, Symbiobacterium thermophilum IAM 14863; identical to SEQ ID NO: 19886
  CDS (1)..(1242): transl_table=11

SEQ ID NO: 23211 - protein, 413 aa, Symbiobacterium thermophilum IAM 14863; identical to SEQ ID NO: 19887

SEQ ID NO: 23212 - DNA, 1239 bp, Bacillus licheniformis ATCC 14580; identical to SEQ ID NO: 19888
  CDS (1)..(1239): transl_table=11

SEQ ID NO: 23213 - protein, 412 aa, Bacillus licheniformis ATCC 14580; identical to SEQ ID NO: 19889

SEQ ID NO: 23214 - DNA, 1221 bp, Mannheimia succiniciproducens MBEL55E; identical to SEQ ID NO: 19890
  CDS (1)..(1221): transl_table=11

SEQ ID NO: 23215 - protein, 406 aa, Mannheimia succiniciproducens MBEL55E; identical to SEQ ID NO: 19891

SEQ ID NO: 23216 - DNA, 1230 bp, Legionella pneumophila subsp. pneumophila str. Philadelphia 1; identical to SEQ ID NO: 19892
  CDS (1)..(1230): transl_table=11

SEQ ID NO: 23217 - protein, 409 aa, Legionella pneumophila subsp. pneumophila str. Philadelphia 1; identical to SEQ ID NO: 19893

SEQ ID NO: 23218 - DNA, 1293 bp, Legionella pneumophila subsp. pneumophila str. Philadelphia 1; identical to SEQ ID NO: 19894
  CDS (1)..(1293): transl_table=11

SEQ ID NO: 23219 - protein, 430 aa, Legionella pneumophila subsp. pneumophila str. Philadelphia 1; identical to SEQ ID NO: 19895

SEQ ID NO: 23220 - DNA, 1239 bp, Legionella pneumophila subsp. pneumophila str. Philadelphia 1; identical to SEQ ID NO: 19896
  CDS (1)..(1239): transl_table=11

SEQ ID NO: 23221 - protein, 412 aa, Legionella pneumophila subsp. pneumophila str. Philadelphia 1; identical to SEQ ID NO: 19897

SEQ ID NO: 23222 - DNA, 1263 bp, Bacteroides fragilis YCH46; identical to SEQ ID NO: 19898
  CDS (1)..(1263): transl_table=11

SEQ ID NO: 23223 - protein, 420 aa, Bacteroides fragilis YCH46; identical to SEQ ID NO: 19899

SEQ ID NO: 23224 - DNA, 1239 bp, Burkholderia mallei ATCC 23344; identical to SEQ ID NO: 19900
  CDS (1)..(1239): transl_table=11

SEQ ID NO: 23225 - protein, 412 aa, Burkholderia mallei ATCC 23344; identical to SEQ ID NO: 19901

SEQ ID NO: 23226 - DNA, 1206 bp, Methylococcus capsulatus str. Bath; identical to SEQ ID NO: 19902
  CDS (1)..(1206): transl_table=11

SEQ ID NO: 23227 - protein, 401 aa, Methylococcus capsulatus str. Bath; identical to SEQ ID NO: 19903

SEQ ID NO: 23228 - DNA, 1251 bp, Nocardia farcinica IFM 10152; identical to SEQ ID NO: 19904
  CDS (1)..(1251): transl_table=11

SEQ ID NO: 23229 - protein, 416 aa, Nocardia farcinica IFM 10152; identical to SEQ ID NO: 19905

SEQ ID NO: 23230 - DNA, 1230 bp, Legionella pneumophila str. Paris; identical to SEQ ID NO: 19906
  CDS (1)..(1230): transl_table=11

SEQ ID NO: 23231 - protein, 409 aa, Legionella pneumophila str. Paris; identical to SEQ ID NO: 19907

SEQ ID NO: 23232 - DNA, 1293 bp, Legionella pneumophila str. Paris; identical to SEQ ID NO: 19908
  CDS (1)..(1293): transl_table=11

SEQ ID NO: 23233 - protein, 430 aa, Legionella pneumophila str. Paris; identical to SEQ ID NO: 19909

SEQ ID NO: 23234 - DNA, 1239 bp, Legionella pneumophila str. Paris; identical to SEQ ID NO: 19910
  CDS (1)..(1239): transl_table=11

SEQ ID NO: 23235 - protein, 412 aa, Legionella pneumophila str. Paris; identical to SEQ ID NO: 19911

SEQ ID NO: 23236 - DNA, 1239 bp, Legionella pneumophila str. Lens; identical to SEQ ID NO: 19912
  CDS (1)..(1239): transl_table=11

SEQ ID NO: 23237 - protein, 412 aa, Legionella pneumophila str. Lens; identical to SEQ ID NO: 19913

SEQ ID NO: 23238 - DNA, 1242 bp, Photobacterium profundum SS9; identical to SEQ ID NO: 19914
  CDS (1)..(1242): transl_table=11

SEQ ID NO: 23239 - protein, 413 aa, Photobacterium profundum SS9; identical to SEQ ID NO: 19915

SEQ ID NO: 23240 - DNA, 1233 bp, Streptococcus thermophilus LMG 18311; identical to SEQ ID NO: 19916
  CDS (1)..(1233): transl_table=11

SEQ ID NO: 23241 - protein, 410 aa, Streptococcus thermophilus LMG 18311; identical to SEQ ID NO: 19917

SEQ ID NO: 23242 - DNA, 1227 bp, Thermus thermophilus HB8; identical to SEQ ID NO: 19918
  CDS (1)..(1227): transl_table=11

SEQ ID NO: 23243 - protein, 408 aa, Thermus thermophilus HB8; identical to SEQ ID NO: 19919

SEQ ID NO: 23244 - DNA, 1239 bp, Geobacillus kaustophilus HTA426; identical to SEQ ID NO: 19920
  CDS (1)..(1239): transl_table=11

SEQ ID NO: 23245 - protein, 412 aa, Geobacillus kaustophilus HTA426; identical to SEQ ID NO: 19921

SEQ ID NO: 23246 - DNA, 1242 bp, Salmonella enterica subsp. enterica serovar Paratyphi A str. ATCC; identical to SEQ ID NO: 19922
  CDS (1)..(1242): transl_table=11

SEQ ID NO: 23247 - protein, 413 aa, Salmonella enterica subsp. enterica serovar Paratyphi A str. ATCC; identical to SEQ ID NO: 19923

SEQ ID NO: 23248 - DNA, 1284 bp, Anaplasma marginale str. St. Maries; identical to SEQ ID NO: 19924
  CDS (1)..(1284): transl_table=11

SEQ ID NO: 23249 - protein, 427 aa, Anaplasma marginale str. St. Maries; identical to SEQ ID NO: 19925

SEQ ID NO: 23250 - DNA, 1239 bp, Azoarcus sp. EbN1; identical to SEQ ID NO: 19926
  CDS (1)..(1239): transl_table=11

SEQ ID NO: 23251 - protein, 412 aa, Azoarcus sp. EbN1; identical to SEQ ID NO: 19927

SEQ ID NO: 23252 - DNA, 1299 bp, Zymomonas mobilis subsp. mobilis ZM4; identical to SEQ ID NO: 19928
  CDS (1)..(1299): transl_table=11

SEQ ID NO: 23253 - protein, 432 aa, Zymomonas mobilis subsp. mobilis ZM4; identical to SEQ ID NO: 19929

SEQ ID NO: 23254 - DNA, 1209 bp, Silicibacter pomeroyi DSS-3; identical to SEQ ID NO: 19930
  CDS (1)..(1209): transl_table=11

SEQ ID NO: 23255 - protein, 402 aa, Silicibacter pomeroyi DSS-3; identical to SEQ ID NO: 19931

SEQ ID NO: 23256 - DNA, 1266 bp, Silicibacter pomeroyi DSS-3; identical to SEQ ID NO: 19932
  CDS (1)..(1266): transl_table=11

SEQ ID NO: 23257 - protein, 421 aa, Silicibacter pomeroyi DSS-3; identical to SEQ ID NO: 19933

SEQ ID NO: 23258 - DNA, 1260 bp, Francisella tularensis subsp. tularensis SCHU S4; identical to SEQ ID NO: 19934
  CDS (1)..(1260): transl_table=11

SEQ ID NO: 23259 - protein, 419 aa, Francisella tularensis subsp. tularensis SCHU S4; identical to SEQ ID NO: 19935

SEQ ID NO: 23260 - DNA, 1254 bp, Synechococcus elongatus PCC 6301; identical to SEQ ID NO: 19936
  CDS (1)..(1254): transl_table=11

SEQ ID NO: 23261 - protein, 417 aa, Synechococcus elongatus PCC 6301; identical to SEQ ID NO: 19937

SEQ ID NO: 23262 - DNA, 1242 bp, Bacillus clausii KSM-K16; identical to SEQ ID NO: 19938
  CDS (1)..(1242): transl_table=11

SEQ ID NO: 23263 - protein, 413 aa, Bacillus clausii KSM-K16; identical to SEQ ID NO: 19939

SEQ ID NO: 23264 - DNA, 1215 bp, Campylobacter jejuni RM1221; identical to SEQ ID NO: 19940
  CDS (1)..(1215): transl_table=11

SEQ ID NO: 23265 - protein, 404 aa, Campylobacter jejuni RM1221; identical to SEQ ID NO: 19941

SEQ ID NO: 23266 - DNA, 1272 bp, Ehrlichia ruminantium str. Welgevonden; identical to SEQ ID NO: 19942
  CDS (1)..(1272): transl_table=11

SEQ ID NO: 23267 - protein, 423 aa, Ehrlichia ruminantium str. Welgevonden; identical to SEQ ID NO: 19943

SEQ ID NO: 23268 - DNA, 1269 bp, Dehalococcoides ethenogenes 195; identical to SEQ ID NO: 19944
  CDS (1)..(1269): transl_table=11

SEQ ID NO: 23269 - protein, 422 aa, Dehalococcoides ethenogenes 195; identical to SEQ ID NO: 19945

SEQ ID NO: 23270 - DNA, 1245 bp, Staphylococcus epidermidis RP62A; identical to SEQ ID NO: 19946
  CDS (1)..(1245): transl_table=11

SEQ ID NO: 23271 - protein, 414 aa, Staphylococcus epidermidis RP62A; identical to SEQ ID NO: 19947

SEQ ID NO: 23272 - DNA, 1287 bp, Gluconobacter oxydans 621H; identical to SEQ ID NO: 19948
  CDS (1)..(1287): transl_table=11

SEQ ID NO: 23273 - protein, 428 aa, Gluconobacter oxydans 621H; identical to SEQ ID NO: 19949

SEQ ID NO: 23274 - DNA, 1272 bp, Ehrlichia ruminantium str. Gardel; identical to SEQ ID NO: 19950
  CDS (1)..(1272): transl_table=11

SEQ ID NO: 23275 - protein, 423 aa, Ehrlichia ruminantium str. Gardel; identical to SEQ ID NO: 19951

SEQ ID NO: 23276 - DNA, 1269 bp, Wolbachia endosymbiont strain TRS of Brugia malayi; identical to SEQ ID NO: 19952
  CDS (1)..(1269): transl_table=11

SEQ ID NO: 23277 - protein, 422 aa, Wolbachia endosymbiont strain TRS of Brugia malayi; identical to SEQ ID NO: 19953

SEQ ID NO: 23278 - DNA, 1299 bp, Xanthomonas oryzae pv. oryzae KACC10331; identical to SEQ ID NO: 19954
  CDS (1)..(1299): transl_table=11

SEQ ID NO: 23279 - protein, 432 aa, Xanthomonas oryzae pv. oryzae KACC10331; identical to SEQ ID NO: 19955

SEQ ID NO: 23280 - DNA, 1245 bp, Vibrio fischeri ES114; identical to SEQ ID NO: 19956
  CDS (1)..(1245): transl_table=11

SEQ ID NO: 23281 - protein, 414 aa, Vibrio fischeri ES114; identical to SEQ ID NO: 19957

SEQ ID NO: 23282 - DNA, 1248 bp, Neisseria gonorrhoeae FA 1090; identical to SEQ ID NO: 19958
  CDS (1)..(1248): transl_table=11

SEQ ID NO: 23283 - protein, 415 aa, Neisseria gonorrhoeae FA 1090; identical to SEQ ID NO: 19959

SEQ ID NO: 23284 - DNA, 1263 bp, Bacteroides fragilis NCTC 9343; identical to SEQ ID NO: 19960
  CDS (1)..(1263): transl_table=11

SEQ ID NO: 23285 - protein, 420 aa, Bacteroides fragilis NCTC 9343; identical to SEQ ID NO: 19961

SEQ ID NO: 23286 - DNA, 1251 bp, Chlamydophila abortus S26/3; identical to SEQ ID NO: 19962
  CDS (1)..(1251): transl_table=11

SEQ ID NO: 23287 - protein, 416 aa, Chlamydophila abortus S26/3; identical to SEQ ID NO: 19963

SEQ ID NO: 23288 - DNA, 1263 bp, Brucella abortus biovar 1 str. 9-941; identical to SEQ ID NO: 19964
  CDS (1)..(1263): transl_table=11

SEQ ID NO: 23289 - protein, 420 aa, Brucella abortus biovar 1 str. 9-941; identical to SEQ ID NO: 19965

SEQ ID NO: 23290 - DNA, 1236 bp, Xanthomonas campestris pv. campestris str. 8004; identical to SEQ ID NO: 19966
  CDS (1)..(1236): transl_table=11

SEQ ID NO: 23291 - protein, 411 aa, Xanthomonas campestris pv. campestris str. 8004; identical to SEQ ID NO: 19967

SEQ ID NO: 23292 - DNA, 1281 bp, Rickettsia felis URRWXCal2; identical to SEQ ID NO: 19968
  CDS (1)..(1281): transl_table=11

SEQ ID NO: 23293 - protein, 426 aa, Rickettsia felis URRWXCal2; identical to SEQ ID NO: 19969

SEQ ID NO: 23294 - DNA, 1245 bp, Staphylococcus haemolyticus JCSC1435; identical to SEQ ID NO: 19970
  CDS (1)..(1245): transl_table=11

SEQ ID NO: 23295 - protein, 414 aa, Staphylococcus haemolyticus JCSC1435; identical to SEQ ID NO: 19971

SEQ ID NO: 23296 - DNA, 1245 bp, Pseudomonas fluorescens Pf-5; identical to SEQ ID NO: 19972
  CDS (1)..(1245): transl_table=11

SEQ ID NO: 23297 - protein, 414 aa, Pseudomonas fluorescens Pf-5; identical to SEQ ID NO: 19973

SEQ ID NO: 23298 - DNA, 1269 bp, Pseudomonas fluorescens Pf-5; identical to SEQ ID NO: 19974
  CDS (1)..(1269): transl_table=11

SEQ ID NO: 23299 - protein, 422 aa, Pseudomonas fluorescens Pf-5; identical to SEQ ID NO: 19975

SEQ ID NO: 23300 - DNA, 1416 bp, Psychrobacter arcticum 273-4; identical to SEQ ID NO: 19976
  CDS (1)..(1416): transl_table=11

SEQ ID NO: 23301 - protein, 471 aa, Psychrobacter arcticum 273-4; identical to SEQ ID NO: 19977

SEQ ID NO: 23302 - DNA, 1239 bp, Colwellia psychrerythraea 34H; identical to SEQ ID NO: 19978
  CDS (1)..(1239): transl_table=11

SEQ ID NO: 23303 - protein, 412 aa, Colwellia psychrerythraea 34H; identical to SEQ ID NO: 19979

SEQ ID NO: 23304 - DNA, 1212 bp, Colwellia psychrerythraea 34H; identical to SEQ ID NO: 19980
  CDS (1)..(1212): transl_table=11

SEQ ID NO: 23305 - protein, 403 aa, Colwellia psychrerythraea 34H; identical to SEQ ID NO: 19981

SEQ ID NO: 23306 - DNA, 1245 bp, Pseudomonas syringae pv. phaseolicola 1448A; identical to SEQ ID NO: 19982
  CDS (1)..(1245): transl_table=11

SEQ ID NO: 23307 - protein, 414 aa, Pseudomonas syringae pv. phaseolicola 1448A; identical to SEQ ID NO: 19983

SEQ ID NO: 23308 - DNA, 1233 bp, Streptococcus pyogenes MGAS5005; identical to SEQ ID NO: 19984
  CDS (1)..(1233): transl_table=11

SEQ ID NO: 23309 - protein, 410 aa, Streptococcus pyogenes MGAS5005; identical to SEQ ID NO: 19985

SEQ ID NO: 23310 - DNA, 1236 bp, Dechloromonas aromatica RCB; identical to SEQ ID NO: 19986
  CDS (1)..(1236): transl_table=11

SEQ ID NO: 23311 - protein, 411 aa, Dechloromonas aromatica RCB; identical to SEQ ID NO: 19987

SEQ ID NO: 23312 - DNA, 1263 bp, Thermobifida fusca YX; identical to SEQ ID NO: 19988
  CDS (1)..(1263): transl_table=11

SEQ ID NO: 23313 - protein, 420 aa, Thermobifida fusca YX; identical to SEQ ID NO: 19989

SEQ ID NO: 23314 - DNA, 1239 bp, Thermobifida fusca YX; identical to SEQ ID NO: 19990
  CDS (1)..(1239): transl_table=11

SEQ ID NO: 23315 - protein, 412 aa, Thermobifida fusca YX; identical to SEQ ID NO: 19991

SEQ ID NO: 23316 - DNA, 1248 bp, Prochlorococcus marinus str. NATL2A; identical to SEQ ID NO: 19992
  CDS (1)..(1248): transl_table=11

SEQ ID NO: 23317 - protein, 415 aa, Prochlorococcus marinus str. NATL2A; identical to SEQ ID NO: 19993

SEQ ID NO: 23318 - DNA, 1233 bp, Ralstonia eutropha JMP134; identical to SEQ ID NO: 19994
  CDS (1)..(1233): transl_table=11

SEQ ID NO: 23319 - protein, 410 aa, Ralstonia eutropha JMP134; identical to SEQ ID NO: 19995

SEQ ID NO: 23320 - DNA, 1245 bp, Staphylococcus saprophyticus subsp. saprophyticus ATCC 15305; identical to SEQ ID NO: 19996
  CDS (1)..(1245): transl_table=11

SEQ ID NO: 23321 - protein, 414 aa, Staphylococcus saprophyticus subsp. saprophyticus ATCC 15305; identical to SEQ ID NO: 19997

SEQ ID NO: 23322 - DNA, 1269 bp, Ehrlichia canis str. Jake; identical to SEQ ID NO: 19998
  CDS (1)..(1269): transl_table=11

SEQ ID NO: 23323 - protein, 422 aa, Ehrlichia canis str. Jake; identical to SEQ ID NO: 19999

SEQ ID NO: 23324 - DNA, 1269 bp, Dehalococcoides sp. CBDB1; identical to SEQ ID NO: 20000
  CDS (1)..(1269): transl_table=11

SEQ ID NO: 23325 - protein, 422 aa, Dehalococcoides sp. CBDB1; identical to SEQ ID NO: 20001

SEQ ID NO: 23326 - DNA, 1233 bp, Thiobacillus denitrificans ATCC 25259; identical to SEQ ID NO: 20002
  CDS (1)..(1233): transl_table=11

SEQ ID NO: 23327 - protein, 410 aa, Thiobacillus denitrificans ATCC 25259; identical to SEQ ID NO: 20003

SEQ ID NO: 23328 - DNA, 1215 bp, Pseudomonas syringae pv. syringae B728a; identical to SEQ ID NO: 20004
  CDS (1)..(1215)

SEQ ID NO: 23329 - protein, 404 aa, Pseudomonas syringae pv. syringae B728a; identical to SEQ ID NO: 20005

SEQ ID NO: 23330 - DNA, 1215 bp, Pseudomonas aeruginosa UCBPP-PA14; identical to SEQ ID NO: 20006
  CDS (1)..(1215)

SEQ ID NO: 23331 - protein, 404 aa, Pseudomonas aeruginosa UCBPP-PA14; identical to SEQ ID NO: 20007

SEQ ID NO: 23332 - DNA, 1215 bp, Pseudomonas fluorescens PfO-1; identical to SEQ ID NO: 20008
  CDS (1)..(1215)

SEQ ID NO: 23333 - protein, 404 aa, Pseudomonas fluorescens PfO-1; identical to SEQ ID NO: 20009

SEQ ID NO: 23334 - DNA, 1236 bp, Enterococcus faecium DO; identical to SEQ ID NO: 20010
  CDS (1)..(1236): transl_table=11

SEQ ID NO: 23335 - protein, 411 aa, Enterococcus faecium DO; identical to SEQ ID NO: 20011

SEQ ID NO: 23336 - DNA, 1308 bp, Neurospora crassa; identical to SEQ ID NO: 20012
  misc_feature (251)..(251): n is a, c, g, or t
  misc_feature (463)..(463): n is a, c, g, or t
  misc_feature (522)..(522): n is a, c, g, or t
  misc_feature (669)..(669): n is a, c, g, or t
  misc_feature (677)..(677): n is a, c, g, or t
  misc_feature (908)..(908): n is a, c, g, or t
  misc_feature (982)..(982): n is a, c, g, or t
  misc_feature (996)..(996): n is a, c, g, or t
  misc_feature (1033)..(1033): n is a, c, g, or t
  misc_feature (1036)..(1036): n is a, c, g, or t
  misc_feature (1047)..(1047): n is a, c, g, or t
  misc_feature (1067)..(1067): n is a, c, g, or t
  misc_feature (1150)..(1150): n is a, c, g, or t
  misc_feature (1263)..(1263): n is a, c, g, or t
  misc_feature (1266)..(1266): n is a, c, g, or t
  misc_feature (1302)..(1302): n is a, c, g, or t
  CDS (1)..(1308)

SEQ ID NO: 23337 - protein, 435 aa, Neurospora crassa; identical to SEQ ID NO: 20013
  misc_feature (84)..(84): Xaa can be any naturally occuring amino acid
  misc_feature (155)..(155): Xaa can be any naturally occuring amino acid
  misc_feature (174)..(174): Xaa can be any naturally occuring amino acid
  misc_feature (226)..(226): Xaa can be any naturally occuring amino acid
  misc_feature (303)..(303): Xaa can be any naturally occuring amino acid
  misc_feature (328)..(328): Xaa can be any naturally occuring amino acid
  misc_feature (332)..(332): Xaa can be any naturally occuring amino acid
  misc_feature (345)..(346): Xaa can be any naturally occuring amino acid
  misc_feature (349)..(349): Xaa can be any naturally occuring amino acid
  misc_feature (356)..(356): Xaa can be any naturally occuring amino acid
  misc_feature (384)..(384): Xaa can be any naturally occuring amino acid
  misc_feature (422)..(422): Xaa can be any naturally occuring amino acid
  misc_feature (434)..(434): Xaa can be any naturally occuring amino acid

SEQ ID NO: 23338 - DNA, 1425 bp, Perilla frutescens; identical to SEQ ID NO: 20014
  CDS (1)..(1425)

SEQ ID NO: 23339 - protein, 474 aa, Perilla frutescens; identical to SEQ ID NO: 20015

SEQ ID NO: 23340 - DNA, 1593 bp, Perilla frutescens; identical to SEQ ID NO: 20016
  CDS (1)..(1593)

SEQ ID NO: 23341 - protein, 530 aa, Perilla frutescens; identical to SEQ ID NO: 20017

SEQ ID NO: 23342 - DNA, 1278 bp, Streptomyces roseofulvus; identical to SEQ ID NO: 20018
  CDS (1)..(1278): transl_table=11

SEQ ID NO: 23343 - protein, 425 aa, Streptomyces roseofulvus; identical to SEQ ID NO: 20019

SEQ ID NO: 23344 - DNA, 1467 bp, Capsicum chinense; identical to SEQ ID NO: 20020
  CDS (1)..(1467)

SEQ ID NO: 23345 - protein, 488 aa, Capsicum chinense; identical to SEQ ID NO: 20021

SEQ ID NO: 23346 - DNA, 1554 bp, Cuphea wrightii; identical to SEQ ID NO: 20022
  CDS (1)..(1554)

SEQ ID NO: 23347 - protein, 517 aa, Cuphea wrightii; identical to SEQ ID NO: 20023

SEQ ID NO: 23348 - DNA, 1623 bp, Cuphea wrightii; identical to SEQ ID NO: 20024
  CDS (1)..(1623)

SEQ ID NO: 23349 - protein, 540 aa, Cuphea wrightii; identical to SEQ ID NO: 20025

SEQ ID NO: 23350 - DNA, 1488 bp, Hordeum vulgare; identical to SEQ ID NO: 20026
  CDS (1)..(1488)

SEQ ID NO: 23351 - protein, 495 aa, Hordeum vulgare; identical to SEQ ID NO: 20027

SEQ ID NO: 23352 - DNA, 1470 bp, Hordeum vulgare; identical to SEQ ID NO: 20028
  CDS (1)..(1470)

SEQ ID NO: 23353 - protein, 489 aa, Hordeum vulgare; identical to SEQ ID NO: 20029

SEQ ID NO: 23354 - DNA, 1608 bp, Ricinus communis; identical to SEQ ID NO: 20030
  CDS (1)..(1608)

SEQ ID NO: 23355 - protein, 535 aa, Ricinus communis; identical to SEQ ID NO: 20031

SEQ ID NO: 23356 - DNA, 1410 bp, Ricinus communis; identical to SEQ ID NO: 20032
  CDS (1)..(1410)

SEQ ID NO: 23357 - protein, 469 aa, Ricinus communis; identical to SEQ ID NO: 20033

SEQ ID NO: 23358 - DNA, 1269 bp, Pseudomonas syringae pv; identical to SEQ ID NO: 20034
  CDS (1)..(1269): transl_table=11

SEQ ID NO: 23359 - protein, 422 aa, Pseudomonas syringae pv; identical to SEQ ID NO: 20035

SEQ ID NO: 23360 - DNA, 1272 bp, Streptomyces glaucescens; identical to SEQ ID NO: 20036
  CDS (1)..(1272): transl_table=11

SEQ ID NO: 23361 - protein, 423 aa, Streptomyces glaucescens; identical to SEQ ID NO: 20037

SEQ ID NO: 23362 - DNA, 1269 bp, Streptomyces griseus; identical to SEQ ID NO: 20038
  CDS (1)..(1269): transl_table=11

SEQ ID NO: 23363 - protein, 422 aa, Streptomyces griseus; identical to SEQ ID NO: 20039

SEQ ID NO: 23364 - DNA, 1293 bp, Streptomyces nogalater; identical to SEQ ID NO: 20040
  CDS (1)..(1293): transl_table=11

SEQ ID NO: 23365 - protein, 430 aa, Streptomyces nogalater; identical to SEQ ID NO: 20041

SEQ ID NO: 23366 - DNA, 1260 bp, Streptomyces peucetius; identical to SEQ ID NO: 20042
  CDS (1)..(1260): transl_table=11

SEQ ID NO: 23367 - protein, 419 aa, Streptomyces peucetius; identical to SEQ ID NO: 20043

SEQ ID NO: 23368 - DNA, 1278 bp, Streptomyces roseofulvus; identical to SEQ ID NO: 20044
  CDS (1)..(1278): transl_table=11

SEQ ID NO: 23369 - protein, 425 aa, Streptomyces roseofulvus; identical to SEQ ID NO: 20045

SEQ ID NO: 23370 - DNA, 1467 bp, Glycine max; identical to SEQ ID NO: 20046
  CDS (1)..(1467)

SEQ ID NO: 23371 - protein, 488 aa, Glycine max; identical to SEQ ID NO: 20047

SEQ ID NO: 23372 - DNA, 1470 bp, Glycine max; identical to SEQ ID NO: 20048
  CDS (1)..(1470)

SEQ ID NO: 23373 - protein, 489 aa, Glycine max; identical to SEQ ID NO: 20049

SEQ ID NO: 23374 - DNA, 1299 bp, Streptomyces spiramyceticus; identical to SEQ ID NO: 20050
  CDS (1)..(1299): transl_table=11

SEQ ID NO: 23375 - protein, 432 aa, Streptomyces spiramyceticus; identical to SEQ ID NO: 20051

SEQ ID NO: 23376 - DNA, 1218 bp, Saccharopolyspora erythraea; identical to SEQ ID NO: 20052
  CDS (1)..(1218): transl_table=11

SEQ ID NO: 23377 - protein, 405 aa, Saccharopolyspora erythraea; identical to SEQ ID NO: 20053

SEQ ID NO: 23378 - DNA, 1269 bp, Streptomyces griseoruber; identical to SEQ ID NO: 20054
  CDS (1)..(1269): transl_table=11

SEQ ID NO: 23379 - protein, 422 aa, Streptomyces griseoruber; identical to SEQ ID NO: 20055

SEQ ID NO: 23380 - DNA, 1398 bp, Oryza sativa; identical to SEQ ID NO: 20056
  CDS (1)..(1398)

SEQ ID NO: 23381 - protein, 465 aa, Oryza sativa; identical to SEQ ID NO: 20057

SEQ ID NO: 23382 - DNA, 1254 bp, Treponema hyodysenteriae; identical to SEQ ID NO: 20058
  CDS (1)..(1254): transl_table=11

SEQ ID NO: 23383 - protein, 417 aa, Treponema hyodysenteriae; identical to SEQ ID NO: 20059

SEQ ID NO: 23384 - DNA, 1269 bp, Rhizobium sp; identical to SEQ ID NO: 20060
  CDS (1)..(1269): transl_table=11

SEQ ID NO: 23385 - protein, 422 aa, Rhizobium sp; identical to SEQ ID NO: 20061

SEQ ID NO: 23386 - DNA, 1305 bp, Plasmodium yoelii yoelii; identical to SEQ ID NO: 20062
  CDS (1)..(1305)

SEQ ID NO: 23387 - protein, 434 aa, Plasmodium yoelii yoelii; identical to SEQ ID NO: 20063

SEQ ID NO: 23388 - DNA, 1275 bp, Streptomyces murayamaensis; identical to SEQ ID NO: 20064
  CDS (1)..(1275): transl_table=11

SEQ ID NO: 23389 - protein, 424 aa, Streptomyces murayamaensis; identical to SEQ ID NO: 20065

SEQ ID NO: 23390 - DNA, 1446 bp, Dictyostelium discoideum; identical to SEQ ID NO: 20066
  CDS (1)..(1446)

SEQ ID NO: 23391 - protein, 481 aa, Dictyostelium discoideum; identical to SEQ ID NO: 20067

SEQ ID NO: 23392 - DNA, 1248 bp, Heliobacillus mobilis; identical to SEQ ID NO: 20068
  CDS (1)..(1248): transl_table=11

SEQ ID NO: 23393 - protein, 415 aa, Heliobacillus mobilis; identical to SEQ ID NO: 20069

SEQ ID NO: 23394 - DNA, 1626 bp, Arabidopsis thaliana; identical to SEQ ID NO: 20070
  CDS (1)..(1626)

SEQ ID NO: 23395 - protein, 541 aa, Arabidopsis thaliana; identical to SEQ ID NO: 20071

SEQ ID NO: 23396 - DNA, 1272 bp, Streptomyces galilaeus; identical to SEQ ID NO: 20072
  CDS (1)..(1272): transl_table=11

SEQ ID NO: 23397 - protein, 423 aa, Streptomyces galilaeus; identical to SEQ ID NO: 20073

SEQ ID NO: 23398 - DNA, 1617 bp, Cuphea lanceolata; identical to SEQ ID NO: 20074
  CDS (1)..(1617)

SEQ ID NO: 23399 - protein, 538 aa, Cuphea lanceolata; identical to SEQ ID NO: 20075

SEQ ID NO: 23400 - DNA, 1371 bp, Coriandrum sativum; identical to SEQ ID NO: 20076
  CDS (1)..(1371)

SEQ ID NO: 23401 - protein, 456 aa, Coriandrum sativum; identical to SEQ ID NO: 20077

SEQ ID NO: 23402 - DNA, 1236 bp, Xanthomonas albilineans; identical to SEQ ID NO: 20078
  CDS (1)..(1236): transl_table=11

SEQ ID NO: 23403 - protein, 411 aa, Xanthomonas albilineans; identical to SEQ ID NO: 20079

SEQ ID NO: 23404 - DNA, 1272 bp, Streptomyces maritimus; identical to SEQ ID NO: 20080
  CDS (1)..(1272): transl_table=11

SEQ ID NO: 23405 - protein, 423 aa, Streptomyces maritimus; identical to SEQ ID NO: 20081

SEQ ID NO: 23406 - DNA, 1272 bp, Streptomyces galilaeus; identical to SEQ ID NO: 20082
  CDS (1)..(1272): transl_table=11

SEQ ID NO: 23407 - protein, 423 aa, Streptomyces galilaeus; identical to SEQ ID NO: 20083

SEQ ID NO: 23408 - DNA, 1635 bp, Brassica napus; identical to SEQ ID NO: 20084
  CDS (1)..(1635)

SEQ ID NO: 23409 - protein, 544 aa, Brassica napus; identical to SEQ ID NO: 20085

SEQ ID NO: 23410 - DNA, 1302 bp, Brassica napus; identical to SEQ ID NO: 20086
  CDS (1)..(1302)

SEQ ID NO: 23411 - protein, 433 aa, Brassica napus; identical to SEQ ID NO: 20087

SEQ ID NO: 23412 - DNA, 1467 bp, Glycine max; identical to SEQ ID NO: 20088
  CDS (1)..(1467)

SEQ ID NO: 23413 - protein, 488 aa, Glycine max; identical to SEQ ID NO: 20089

SEQ ID NO: 23414 - DNA, 1410 bp, Glycine max; identical to SEQ ID NO: 20090
  CDS (1)..(1410)

SEQ ID NO: 23415 - protein, 469 aa, Glycine max; identical to SEQ ID NO: 20091

SEQ ID NO: 23416 - DNA, 1410 bp, Glycine max; identical to SEQ ID NO: 20092
  CDS (1)..(1410)

SEQ ID NO: 23417 - protein, 469 aa, Glycine max; identical to SEQ ID NO: 20093

SEQ ID NO: 23418 - DNA, 1722 bp, Elaeis guineensis var; identical to SEQ ID NO: 20094
  CDS (1)..(1722)

SEQ ID NO: 23419 - protein, 573 aa, Elaeis guineensis var; identical to SEQ ID NO: 20095

SEQ ID NO: 23420 - DNA, 1248 bp, Vibrio marinus; identical to SEQ ID NO: 20096
  CDS (1)..(1248): transl_table=11

SEQ ID NO: 23421 - protein, 415 aa, Vibrio marinus; identical to SEQ ID NO: 20097

SEQ ID NO: 23422 - DNA, 1260 bp, Streptomyces rochei; identical to SEQ ID NO: 20098
  CDS (1)..(1260): transl_table=11

SEQ ID NO: 23423 - protein, 419 aa, Streptomyces rochei; identical to SEQ ID NO: 20099

SEQ ID NO: 23424 - DNA, 1689 bp, Arabidopsis thaliana; identical to SEQ ID NO: 20100
  CDS (1)..(1689)

SEQ ID NO: 23425 - protein, 562 aa, Arabidopsis thaliana; identical to SEQ ID NO: 20101

SEQ ID NO: 23426 - DNA, 1605 bp, Cuphea hookeriana; identical to SEQ ID NO: 20102
  CDS (1)..(1605)

SEQ ID NO: 23427 - protein, 534 aa, Cuphea hookeriana; identical to SEQ ID NO: 20103

SEQ ID NO: 23428 - DNA, 1641 bp, Cuphea pulcherrima; identical to SEQ ID NO: 20104
  CDS (1)..(1641)

SEQ ID NO: 23429 - protein, 546 aa, Cuphea pulcherrima; identical to SEQ ID NO: 20105

SEQ ID NO: 23430 - DNA, 1329 bp, Saccharomyces cerevisiae; identical to SEQ ID NO: 20106
  CDS (1)..(1329)

SEQ ID NO: 23431 - protein, 442 aa, Saccharomyces cerevisiae; identical to SEQ ID NO: 20107

SEQ ID NO: 23432 - DNA, 1251 bp, Mycobacterium leprae; identical to SEQ ID NO: 20108
  CDS (1)..(1251): transl_table=11

SEQ ID NO: 23433 - protein, 416 aa, Mycobacterium leprae; identical to SEQ ID NO: 20109

SEQ ID NO: 23434 - DNA, 1221 bp, Haemophilus influenzae; identical to SEQ ID NO: 20110
  CDS (1)..(1221): transl_table=11

SEQ ID NO: 23435 - protein, 406 aa, Haemophilus influenzae; identical to SEQ ID NO: 20111

SEQ ID NO: 23436 - DNA, 1266 bp, Rhizobium meliloti; identical to SEQ ID NO: 20112
  CDS (1)..(1266): transl_table=11

SEQ ID NO: 23437 - protein, 421 aa, Rhizobium meliloti; identical to SEQ ID NO: 20113

SEQ ID NO: 23438 - DNA, 1251 bp, Synechocystis sp; identical to SEQ ID NO: 20114
  CDS (1)..(1251): transl_table=11

SEQ ID NO: 23439 - protein, 416 aa, Synechocystis sp; identical to SEQ ID NO: 20115

SEQ ID NO: 23440 - DNA, 1245 bp, Vibrio cholerae; identical to SEQ ID NO: 20116
  CDS (1)..(1245)

SEQ ID NO: 23441 - protein, 414 aa, Vibrio cholerae; identical to SEQ ID NO: 19655

SEQ ID NO: 23442 - DNA, 1248 bp, Vibrio harveyi; identical to SEQ ID NO: 20118
  CDS (1)..(1248)

SEQ ID NO: 23443 - protein, 415 aa, Vibrio harveyi; identical to SEQ ID NO: 20119

SEQ ID NO: 23444 - DNA, 1272 bp, Streptomyces coelicolor; identical to SEQ ID NO: 20120
  CDS (1)..(1272): transl_table=11

SEQ ID NO: 23445 - protein, 423 aa, Streptomyces coelicolor; identical to SEQ ID NO: 20121

SEQ ID NO: 23446 - DNA, 1269 bp, Streptomyces halstedii; identical to SEQ ID NO: 20122
  CDS (1)..(1269): transl_table=11

SEQ ID NO: 23447 - protein, 422 aa, Streptomyces halstedii; identical to SEQ ID NO: 20123

SEQ ID NO: 23448 - DNA, 1422 bp, Arabidopsis thaliana; identical to SEQ ID NO: 20124
  CDS (1)..(1422)

SEQ ID NO: 23449 - protein, 473 aa, Arabidopsis thaliana; identical to SEQ ID NO: 20125

SEQ ID NO: 23450 - DNA, 1389 bp, Hordeum vulgare; identical to SEQ ID NO: 20126
  CDS (1)..(1389)

SEQ ID NO: 23451 - protein, 462 aa, Hordeum vulgare; identical to SEQ ID NO: 20127

SEQ ID NO: 23452 - DNA, 1386 bp, Arabidopsis thaliana; identical to SEQ ID NO: 20128
  CDS (1)..(1386)

SEQ ID NO: 23453 - protein, 461 aa, Arabidopsis thaliana; identical to SEQ ID NO: 20129

SEQ ID NO: 23454 - DNA, 24 bp, Artificial sequence
  Primer sequence
atgtctaagcgtcgtgtagttgtg

SEQ ID NO: 23455 - DNA, 27 bp, Artificial sequence
  Primer sequence
ttagatctttttaaagatcaaagaacc

SEQ ID NO: 23456 - protein, 494 aa, Artificial sequence; identical to SEQ ID NO: 20132
  Consensus
  Variant (10)..(10): Xaa in position 10 is any amino acid
  Variant (16)..(21): Xaa in position 16 to 21 is any amino acid
  Variant (23)..(24): Xaa in position 23 to 24 is any amino acid
  Variant (26)..(27): Xaa in position 26 to 27 is any amino acid
  Variant (29)..(30): Xaa in position 29 to 30 is any amino acid
  Variant (33)..(34): Xaa in position 33 to 34 is any amino acid
  Variant (36)..(45): Xaa in position 36 to 45 is any amino acid
  Variant (46)..(57): Xaa in position 46 to 57 is any or no amino acid
  Variant (60)..(60): Xaa in position 60 is any amino acid
  Variant (62)..(69): Xaa in position 62 to 69 is any amino acid
  Variant (70)..(86): Xaa in position 70 to 86 is any or no amino acid
  Variant (88)..(89): Xaa in position 88 to 89 is any amino acid
  Variant (94)..(97): Xaa in position 94 to 97 is any amino acid
  Variant (101)..(101): Xaa in position 101 is any amino acid
  Variant (104)..(105): Xaa in position 104 to 105 is any amino acid
  Variant (108)..(109): Xaa in position 108 to 109 is any amino acid
  Variant (111)..(117): Xaa in position 111 to 117 is any amino acid
  Variant (118)..(131): Xaa in position 118 to 131 is any or no amino acid
  Variant (133)..(133): Xaa in position 133 is any amino acid
  Variant (136)..(136): Xaa in position 136 is any amino acid
  Variant (145)..(157): Xaa in position 145 to 157 is any amino acid
  Variant (158)..(172): Xaa in position 158 to 172 is any or no amino acid
  Variant (174)..(179): Xaa in position 174 to 179 is any or no amino acid
  Variant (181)..(181): Xaa in position 181 is any amino acid
  Variant (183)..(184): Xaa in position 183 to 184 is any amino acid
  Variant (187)..(188): Xaa in position 187 to 188 is any amino acid
  Variant (190)..(191): Xaa in position 190 to 191 is any amino acid
  Variant (193)..(193): Xaa in position 193 is any amino acid
  Variant (196)..(196): Xaa in position 196 is any amino acid
  Variant (200)..(201): Xaa in position 200 to 201 is any amino acid
  Variant (203)..(204): Xaa in position 203 to 204 is any amino acid
  Variant (206)..(211): Xaa in position 206 to 211 is any amino acid
  Variant (215)..(215): Xaa in position 215 is any amino acid
  Variant (217)..(220): Xaa in position 217 to 220 is any amino acid
  Variant (223)..(223): Xaa in position 223 is any amino acid
  Variant (225)..(227): Xaa in position 225 to 227 is any amino acid
  Variant (229)..(230): Xaa in position 229 to 230 is any amino acid
  Variant (232)..(232): Xaa in position 232 is any amino acid
  Variant (234)..(244): Xaa in position 234 to 244 is any or no amino acid
  Variant (246)..(246): Xaa in position 246 is any amino acid
  Variant (249)..(249): Xaa in position 249 is any amino acid
  Variant (252)..(252): Xaa in position 252 is any amino acid
  Variant (254)..(254): Xaa in position 254 is any amino acid
  Variant (255)..(255): Xaa in position 255 is any or no amino acid
  Variant (257)..(258): Xaa in position 257 to 258 is any amino acid
  Variant (260)..(260): Xaa in position 260 is any amino acid
  Variant (265)..(265): Xaa in position 265 is any amino acid
  Variant (267)..(267): Xaa in position 267 is any amino acid
  Variant (272)..(272): Xaa in position 272 is any amino acid
  Variant (273)..(274): Xaa in position 273 to 274 is any or no amino acid
  Variant (276)..(277): Xaa in position 276 to 277 is any or no amino acid
  Variant (279)..(279): Xaa in position 279 is any or no amino acid
  Variant (281)..(282): Xaa in position 281 to 282 is any or no amino acid
  Variant (289)..(290): Xaa in position 289 to 290 is any amino acid
  Variant (292)..(292): Xaa in position 292 is any amino acid
  Variant (307)..(308): Xaa in position 307 to 308 is any amino acid
  Variant (312)..(313): Xaa in position 312 to 313 is any amino acid
  Variant (317)..(317): Xaa in position 317 is any amino acid
  Variant (319)..(319): Xaa in position 319 is any amino acid
  Variant (323)..(323): Xaa in position 323 is any amino acid
  Variant (325)..(325): Xaa in position 325 is any amino acid
  Variant (327)..(327): Xaa in position 327 is any amino acid
  Variant (329)..(329): Xaa in position 329 is any amino acid
  Variant (332)..(332): Xaa in position 332 is any amino acid
  Variant (336)..(336): Xaa in position 336 is any amino acid
  Variant (338)..(338): Xaa in position 338 is any amino acid
  Variant (339)..(340): Xaa in position 339 to 340 is any or no amino acid
  Variant (342)..(342): Xaa in position 342 is any amino acid
  Variant (344)..(346): Xaa in position 344 to 346 is any amino acid
  Variant (347)..(347): Xaa in position 347 is any or no amino acid
  Variant (349)..(350): Xaa in position 349 to 350 is any amino acid
  Variant (353)..(354): Xaa in position 353 to 354 is any amino acid
  Variant (356)..(356): Xaa in position 356 is any amino acid
  Variant (358)..(363): Xaa in position 358 to 363 is any or no amino acid
  Variant (365)..(365): Xaa in position 365 is any amino acid
  Variant (375)..(376): Xaa in position 375 to 376 is any amino acid
  Variant (377)..(377): Xaa in position 377 is any or no amino acid
  Variant (379)..(380): Xaa in position 379 to 380 is any amino acid
  Variant (382)..(383): Xaa in position 382 to 383 is any amino acid
  Variant (386)..(389): Xaa in position 386 to 389 is any amino acid
  Variant (391)..(392): Xaa in position 391 to 392 is any amino acid
  Variant (393)..(406): Xaa in position 393 to 406 is any or no amino acid
  Variant (408)..(408): Xaa in position 408 is any or no amino acid
  Variant (410)..(410): Xaa in position 410 is any amino acid
  Variant (415)..(416): Xaa in position 415 to 416 is any amino acid
  Variant (419)..(419): Xaa in position 419 is any amino acid
  Variant (430)..(431): Xaa in position 430 to 431 is any amino acid
  Variant (433)..(433): Xaa in position 433 is any amino acid
  Variant (436)..(441): Xaa in position 436 to 441 is any amino acid
  Variant (446)..(452): Xaa in position 446 to 452 is any amino acid
  Variant (453)..(459): Xaa in position 453 to 459 is any or no amino acid
  Variant (461)..(462): Xaa in position 461 to 462 is any amino acid
  Variant (464)..(473): Xaa in position 464 to 473 is any amino acid
  Variant (474)..(480): Xaa in position 474 to 480 is any or no amino acid
  Variant (484)..(484): Xaa in position 484 is any amino acid
  Variant (490)..(490): Xaa in position 490 is any amino acid
  Variant (492)..(493): Xaa in position 492 to 493 is any amino acid

SEQ ID NO: 23457 - protein, 31 aa, Artificial sequence; identical to SEQ ID NO: 20133
  Consensus
  Variant (2)..(2): Xaa in position 2 is any amino acid
  Variant (3)..(3): Xaa in position 3 is any or no amino acid
  Variant (5)..(5): Xaa in position 5 is Ile or Val
  Variant (8)..(8): Xaa in position 8 is any amino acid
  Variant (10)..(11): Xaa in position 10 to 11 is any amino acid
  Variant (12)..(12): Xaa in position 12 is Ala, Ser or Thr
  Variant (13)..(14): Xaa in position 13 to 14 is any amino acid
  Variant (15)..(15): Xaa in position 15 is Ala or Gly
  Variant (16)..(16): Xaa in position 16 is any amino acid
  Variant (17)..(17): Xaa in position 17 is Asp, Glu, Gly, Asn, Ser or Thr
  Variant (18)..(27): Xaa in position 18 to 27 is any amino acid
  Variant (29)..(30): Xaa in position 29 to 30 is any amino acid
  Variant (31)..(31): Xaa in position 31 is Ala or Gly

SEQ ID NO: 23458 - protein, 10 aa, Artificial sequence
  Consensus
  Variant (2)..(4): Xaa in position 2 to 4 is any amino acid
  Variant (6)..(6): Xaa in position 6 is Ala, Cys, Asn, Ser, Thr or Val
  Variant (7)..(8): Xaa in position 7 to 8 is any amino acid
  Variant (10)..(10): Xaa in position 10 is Ala, Cys, Asp, Gly, Asn or Ser
GXXXGXXXGX

SEQ ID NO: 23459 - protein, 45 aa, Artificial sequence; identical to SEQ ID NO: 20135
  Consensus
  Variant (2)..(5): Xaa in position 2 to 5 is any amino acid
  Variant (6)..(6): Xaa in position 6 is Asp or Asn
  Variant (7)..(7): Xaa in position 7 is any amino acid
  Variant (8)..(8): Xaa in position 8 is Ala, Gly, Ile, Leu, Pro or Val
  Variant (9)..(9): Xaa in position 9 is Ala, Gly, Pro, Ser or Thr
  Variant (10)..(10): Xaa in position 10 is Ala or Gly
  Variant (11)..(12): Xaa in position 11 to 12 is any amino acid
  Variant (13)..(13): Xaa in position 13 is Ala, Gly, Ser or Thr
  Variant (14)..(14): Xaa in position 14 is Ile, Leu, Met or Val
  Variant (15)..(19): Xaa in position 15 to 19 is any amino acid
  Variant (21)..(25): Xaa in position 21 to 25 is any amino acid
  Variant (26)..(27): Xaa in position 26 to 27 is any or no amino acid
  Variant (29)..(30): Xaa in position 29 to 30 is any or no amino acid
  Variant (32)..(33): Xaa in position 32 to 33 is Ala, Ser or Thr
  Variant (34)..(34): Xaa in position 34 is Ala, Gly or Ser
  Variant (35)..(36): Xaa in position 35 to 36 is any amino acid
  Variant (37)..(37): Xaa in position 37 is Ala, Cys, Asn, Ser or Thr
  Variant (38)..(38): Xaa in position 38 is Phe, Ile, Leu, Met or Val
  Variant (39)..(40): Xaa in position 39 to 40 is any amino acid
  Variant (41)..(41): Xaa in position 41 is Ala, Gly or Ser
  Variant (42)..(44): Xaa in position 42 to 44 is any amino acid
  Variant (45)..(45): Xaa in position 45 is Ile, Leu or Val

SEQ ID NO: 23460 - protein, 37 aa, Artificial sequence; identical to SEQ ID NO: 20136
  Consensus
  Variant (2)..(6): Xaa in position 2 to 6 is any amino acid
  Variant (8)..(8): Xaa in position 8 is Asp, Asn or Ser
  Variant (12)..(12): Xaa in position 12 is Ile, Leu or Met
  Variant (13)..(13): Xaa in position 13 is Ala, Gly or Ser
  Variant (14)..(14): Xaa in position 14 is Asp, Glu or Gly
  Variant (16)..(16): Xaa in position 16 is Ala, Cys, Gly or Ser
  Variant (17)..(17): Xaa in position 17 is Ala or Gly
  Variant (18)..(18): Xaa in position 18 is any amino acid
  Variant (19)..(19): Xaa in position 19 is Phe, Ile, Leu, Met or Val
  Variant (20)..(20): Xaa in position 20 is Ile, Leu, Met or Val
  Variant (21)..(21): Xaa in position 21 is Phe, Ile, Leu, Met or Val
  Variant (23)..(23): Xaa in position 23 is Ala, Asp, Glu, Ser or Thr
  Variant (24)..(26): Xaa in position 24 to 26 is any amino acid
  Variant (28)..(29): Xaa in position 28 to 29 is any amino acid
  Variant (31)..(31): Xaa in position 31 is any amino acid
  Variant (33)..(33): Xaa in position 33 is any amino acid
  Variant (34)..(34): Xaa in position 34 is Ile, Pro or Val
  Variant (35)..(36): Xaa in position 35 to 36 is any amino acid

SEQ ID NO: 23461 - protein, 23 aa, Artificial sequence
  Consensus
  Variant (2)..(2): Xaa in position 2 is Ile, Leu or Val
  Variant (3)..(3): Xaa in position 3 is Asn or Ser
  Variant (4)..(4): Xaa in position 4 is Ala, Cys, Thr or Val
  Variant (6)..(6): Xaa in position 6 is Ala or Gly
  Variant (7)..(7): Xaa in position 7 is Ser or Thr
  Variant (8)..(8): Xaa in position 8 is Ala, Gly or Ser
  Variant (10)..(11): Xaa in position 10 to 11 is any amino acid
  Variant (12)..(12): Xaa in position 12 is any or no amino acid
  Variant (14)..(15): Xaa in position 14 to 15 is any amino acid
  Variant (17)..(18): Xaa in position 17 to 18 is any amino acid
  Variant (19)..(22): Xaa in position 19 to 22 is any or no amino acid
YXXXHXXXTXXXDXXEXXXXXXA

SEQ ID NO: 23462 - protein, 32 aa, Artificial sequence; identical to SEQ ID NO: 20138
  Consensus
  Variant (3)..(3): Xaa in position 3 is Gly or Ser
  Variant (4)..(5): Xaa in position 4 to 5 is any amino acid
  Variant (8)..(8): Xaa in position 8 is any or no amino acid
  Variant (10)..(10): Xaa in position 10 is any or no amino acid
  Variant (12)..(12): Xaa in position 12 is Ala or Gly
  Variant (13)..(13): Xaa in position 13 is Ala, Ser or Thr
  Variant (15)..(15): Xaa in position 15 is Ala, Gly, Asn, Ser or Val
  Variant (16)..(16): Xaa in position 16 is any amino acid
  Variant (18)..(30): Xaa in position 18 to 30 is any amino acid
  Variant (31)..(31): Xaa in position 31 is any or no amino acid

SEQ ID NO: 23463 - DNA, 1071 bp, Escherichia coli K12
  CDS (1)..(1071)
atgatgagtcagaagtatctttttatcgatcgcgatggaaccctgattagcgaaccgccgagtgattttcaggtggaccgttttgataaactcgcctttgaaccgggcgtgatcccggaactgctgaagctgcaaaaagcgggctacaagctggtgatgatcactaatcaggatggtcttggaacacaaagtttcccacaggcggatttcgatggcccgcacaacctgatgatgcagatcttcacctcgcaaggcgtacagtttgatgaagtgctgatttgtccgcacctgcccgccgatgagtgcgactgccgtaagccgaaagtaaaactggtggaacgttatctggctgagcaagcgatggatcgcgctaacagttatgtgattggcgatcgcgcgaccgacattcaactggcggaaaacatgggcattactggtttacgctacgaccgcgaaaccctgaactggccaatgattggcgagcaactcaccagacgtgaccgttacgctcacgtagtgcgtaataccaaagagacgcagattgacgttcaggtgtggctggatcgtgaaggtggcagcaagattaacaccggcgttggcttctttgatcatatgctggatcagatcgctacccacggcggtttccgcatggaaatcaacgtcaaaggcgacctctatatcgacgatcaccacaccgtcgaagataccggcctggcgctgggcgaagcgctaaaaatcgccctcggagacaaacgcggtatttgccgctttggttttgtgctaccgatggacgaatgccttgcccgctgcgcgctggatatctctggtcgcccgcacctggaatataaagccgagtttacctaccagcgcgtgggcgatctcagcaccgaaatgatcgagcacttcttccgttcgctctcatacaccatgggcgtgacgctacacctgaaaaccaaaggtaaaaacgatcatcaccgtgtagagagtctgttcaaagcctttggtcgcaccctgcgccaggccatccgcgtggaaggcgataccctgccctcgtcgaaaggagtgctgtaa

SEQ ID NO: 23464 - protein, 356 aa, Escherichia coli K12
MMSQKYLFIDRDGTLISEPPSDFQVDRFDKLAFEPGVIPELLKLQKAGYKLVMITNQDGLGTQSFPQADFDGPHNLMMQIFTSQGVQFDEVLICPHLPADECDCRKPKVKLVERYLAEQAMDRANSYVIGDRATDIQLAENMGITGLRYDRETLNWPMIGEQLTRRDRYAHVVRNTKETQIDVQVWLDREGGSKINTGVGFFDHMLDQIATHGGFRMEINVKGDLYIDDHHTVEDTGLALGEALKIALGDKRGICRFGFVLPMDECLARCALDISGRPHLEYKAEFTYQRVGDLSTEMIEHFFRSLSYTMGVTLHLKTKGKNDHHRVESLFKAFGRTLRQAIRVEGDTLPSSKGVL

SEQ ID NO: 23465 - DNA, 1068 bp, Yersinia pestis
  CDS (1)..(1068)
atgagccagaaatttctttttattgaccgcgacggcaccatcattgccgagccaccaactgattatcaggttgaccggttggataaactggcgctggagcctgatgtcattcccgcattactggcgttgcaaaaagcagactacaaactggtgatgatcactaatcaggatggcctcggcaccagcagtttcccgcaggaaaccttcgatccgccacataacctgatgatgcaaatcctgacgtctcaggggatcaattttgaacagatactgatttgcccacatctgccagaggataactgcacctgtcgcaaaccgaaaaccgcgctggtagaaagctatctggcagatggcgtgatgaacagcaccaatagctatgtcatcggtgaccgtgaaactgacctacaactggccgagaacatgggcatcagcgggttacgttatcagcgtgatggcttgaactggacgcaaattgccaaacaactgacccagcgcgaccgccacgcctatgttaatcgcgtgaccaaagaaaccgccattgacgttaatgtttggctggatcgcgaagggggaagcaaaattaaaaccggcgtgggcttcttcgaccatatgctggatcaaatcgccacccacggcggttttcgcatggatattcaggtcagcggcgatctgtatatcgatgatcaccacacagtggaagataccgcgctggcactgggcgaagcgatcaacatcgcactgggtgacaaacggggtattggccgctttggttttgtattgccgatggatgagtgcctggcacgctgtgccttggatatttctggtcgcccgcatttggaatacaaagctgaatttaactaccagcgtgtcggcgatctaagcaccgagatggtcgagcacttcttccgctccctttcgtatgccatggcctgtaccttgcacctgaaaaccaaaggtcgcaacgatcatcaccgagtagaaagcctgtttaaagtatttggtcgtaccttgcgtcaagccattcgcgttgaaggcaataccctgccaagttcaaaaggagtgctgtaa

SEQ ID NO: 23466 - protein, 355 aa, Yersinia pestis
MSQKFLFIDRDGTIIAEPPTDYQVDRLDKLALEPDVIPALLALQKADYKLVMITNQDGLGTSSFPQETFDPPHNLMMQILTSQGINFEQILICPHLPEDNCTCRKPKTALVESYLADGVMNSTNSYVIGDRETDLQLAENMGISGLRYQRDGLNWTQIAKQLTQRDRHAYVNRVTKETAIDVNVWLDREGGSKIKTGVGFFDHMLDQIATHGGFRMDIQVSGDLYIDDHHTVEDTALALGEAINIALGDKRGIGRFGFVLPMDECLARCALDISGRPHLEYKAEFNYQRVGDLSTEMVEHFFRSLSYAMACTLHLKTKGRNDHHRVESLFKVFGRTLRQAIRVEGNTLPSSKGVL

SEQ ID NO: 23467 - DNA, 1068 bp, Salmonella enterica subsp. enterica serovar Typhi
  CDS (1)..(1068)
atgagtcagaagtatcttttcatcgaccgggacggaaccttaatttccgaaccgccgagcgattttcaggtagaccactttgataaactggcctttgagccagaggtgattcccgtattgctgaagctgcaaaaagccggttttaagctggtgatgatcactaaccaggatggacttggcacgcaaagcttcccgcaggcggacttcgacggaccgcacaacctgatgatgcagattttcacttctcagggcgtatgctttgatgaggtgctgatctgccctcacctgcccgcagacgactgcgactgccgcaagcccaaagtgaagctggtggagcgttatcttgcggaacaagcgatggatagcgccaacagctatgtgattggcgatcgtgcaaccgatatccaactcgctgataatatgggcattactggtttacgctatcaccgtgaaacgttgaactggacgatgattggcgaacagctaacgaaacgcgatcgctatgcgcatgtggtccgcaacaccaaagagacacagattgatgtcagcgtctggctggatcgcgaaggcaacagcaagattaataccggcgtcggcttctttgaccatatgctcgatcaaatcgccacccacggcggctttcgcatggagattaccgttaagggcgatctctatatcgacgatcaccacacggtagaagataccgggctggcgctcggtgaggcgttaaaactggcactcggcgacaagcgcggtatctgccgttttggctttgtactaccgatggatgaatgtctggcgcgctgcgcgctggatatttccggtcgtccgcatctggaatataaagctgaatttacctaccagcgtgtgggcgatttgagcacagagatgattgaacactttttccgctcactctcttacacgatgggcgtcactctgcatctcaagactaaaggtaagaacgatcaccaccgtgtcgaaagtttgtttaaagcctttggtcggacgctacgccaggctattcgcgtggagggcgatacattaccgtcctcgaaaggagtgctgtga

SEQ ID NO: 23468 - protein, 355 aa, Salmonella enterica subsp. enterica serovar Typhi
MSQKYLFIDRDGTLISEPPSDFQVDHFDKLAFEPEVIPVLLKLQKAGFKLVMITNQDGLGTQSFPQADFDGPHNLMMQIFTSQGVCFDEVLICPHLPADDCDCRKPKVKLVERYLAEQAMDSANSYVIGDRATDIQLADNMGITGLRYHRETLNWTMIGEQLTKRDRYAHVVRNTKETQIDVSVWLDREGNSKINTGVGFFDHMLDQIATHGGFRMEITVKGDLYIDDHHTVEDTGLALGEALKLALGDKRGICRFGFVLPMDECLARCALDISGRPHLEYKAEFTYQRVGDLSTEMIEHFFRSLSYTMGVTLHLKTKGKNDHHRVESLFKAFGRTLRQAIRVEGDTLPSSKGVL

SEQ ID NO: 23469 - DNA, 1074 bp, Vibrio cholerae
  CDS (1)..(1074)
atgagcaaacaacaaaaaattctttttatcgaccgcgacggcaccttaattgttgagccgccagtggattttcaagttgaccgtttggacaaactcaaacttgagccttatgtgatcccaagcctgctcaagctacaagaggcgggttatcgtttggtgatggtgaccaatcaggatggtttaggcacttcaagctacccgcaagcggatttcgatgcgccgcataacatgatgatggacatttttgaatcgcaaggcgtgaagtttaatgatgtgctgatttgcccgcactttgagcgtgataactgttcgtgccgcaaaccgaaacttggcttggtcaaagagtatctgcaaggtggcaaagtcgatttcaaatcgtcagccgtgattggcgatcgcatgaccgatctgcaactggctgaaaatatggcgattcgcggtattcaataccacccacaaaccatggggtggctggatatcgttaaagatctcaccaccaagccacgtgttgcccaagtggtgcgtaaaaccaaagagaccgatattcaggttctagtcaatcttgaccaaactggcggtaatcagattgaaactggattgggcttttttgatcacatgctagatcaaatcgcgacccacggcggtttccaactgcaactgaaagtggtgggcgatctgcacattgatgatcaccacacggtggaagataccgccttggcactagggcaagcactgcgtgaagcactgggtgacaaacgtggtattggacgctttggtttcacattgcccatggatgagtgtttggcacagtgcgcgttggatctctcgggccgcccgtatctgaaatttgatgcgagctttagccgcccgcaagtgggcgatctgtcgactgagatggtgtatcacttctttcgctcattgaccgatactttggcgtgtactctgcacctctcttccagtggcgataacgatcaccacatcattgagagcctgtttaaagcgtttggccgcacgctgcgtcaagccatcacggtgcaaggtaacgatctgccgagcagtaaaggggtgctctga

SEQ ID NO: 23470 - protein, 357 aa, Vibrio cholerae
MSKQQKILFIDRDGTLIVEPPVDFQVDRLDKLKLEPYVIPSLLKLQEAGYRLVMVTNQDGLGTSSYPQADFDAPHNMMMDIFESQGVKFNDVLICPHFERDNCSCRKPKLGLVKEYLQGGKVDFKSSAVIGDRMTDLQLAENMAIRGIQYHPQTMGWLDIVKDLTTKPRVAQVVRKTKETDIQVLVNLDQTGGNQIETGLGFFDHMLDQIATHGGFQLQLKVVGDLHIDDHHTVEDTALALGQALREALGDKRGIGRFGFTLPMDECLAQCALDLSGRPYLKFDASFSRPQVGDLSTEMVYHFFRSLTDTLACTLHLSSSGDNDHHIIESLFKAFGRTLRQAITVQGNDLPSSKGVL

SEQ ID NO: 23471 - DNA, 1128 bp, Xylella fastidiosa
  CDS (1)..(1128)
atgacccccatcgtgtttattgaccgtgacggcacgctcattgaagagccgcctgattttcagattgatgcctacgaaaaactgcgccttgtcaacggcgtgatcccggcattgctgaagctccgtgatgccggctatcactttgtgatcgtcaccaaccaagatggattgggcagccctgcgtatccccaagccagctttgatggccccaatgcgttgatgctgcagattttcagtagccaaggcatcgtcttccgcgatgtgctgatcgatcgtagctggccgaccgacaacgcgcccacccgtaaaccaggcatcggcttgatggtcgcctaccttcaagatcgcgacattgattgggcgcgctcggcaatggtgggcgaccgccccacagatctgcaatttgccgagaatctcaacattcgcggattccaattgcgtaccccgcaatttggtggtgattgggattgggacggcattgctcacaccttggccgatgcgccgcgccgcgccgtggtacagcgtcacaccaaggagacaaccatccgtgtcgagattgatttggatggcgcaccccaggcgcggatcaccaccggattaccgttttttgatcatatgctcgaacagatcgccaaacatgccggcatttccttacagatcagtgctgttggggatctgcatatcgacgaacatcacacgatagaagataccggcttggcgctaggtcaggcagtgcgccaagccttgggggacaaacgcggtattggccgctatggattcgatccgccccagctgccgtggcaggtgagcggcgcggcggcacacggtggctttaccctaccgatggatgagacccaagccagcgctgtgttggacttcagcggccgcccgtattgtgtctttgaaggaaccttcgtccgtgagcgcgtcggcgatatgcccaccgaactggtaccgcactttttccgctccctgtgcgatgcctccgggatgaacttgcacttgagcgtgcatggcgacaacgaccatcacaaagtagaagcgtgtttcaaggcgctggcgcgtgccttgcgtcaggcgttacaacgccacggccacgtgcttccttctaccaagggggcgttatga

SEQ ID NO: 23472 - protein, 375 aa, Xylella fastidiosa
MTPIVFIDRDGTLIEEPPDFQIDAYEKLRLVNGVIPALLKLRDAGYHFVIVTNQDGLGSPAYPQASFDGPNALMLQIFSSQGIVFRDVLIDRSWPTDNAPTRKPGIGLMVAYLQDRDIDWARSAMVGDRPTDLQFAENLNIRGFQLRTPQFGGDWDWDGIAHTLADAPRRAVVQRHTKETTIRVEIDLDGAPQARITTGLPFFDHMLEQIAKHAGISLQISAVGDLHIDEHHTIEDTGLALGQAVRQALGDKRGIGRYGFDPPQLPWQVSGAAAHGGFTLPMDETQASAVLDFSGRPYCVFEGTFVRERVGDMPTELVPHFFRSLCDASGMNLHLSVHGDNDHHKVEACFKALARALRQALQRHGHVLPSTKGAL

SEQ ID NO: 23473 - DNA, 1065 bp, Salmonella typhimurium
  CDS (1)..(1065)
atgagtcagaagtatcttttgatcgaccgggacggaaccttaatttccgaaccgccgagcgattttcaggtagaccgctttgataaactggcctttgagccagaggtgattcccgtattgctgaagctgcaaaaagccggttttaagctggtgatgatcactaatcaggatggacttggcacgcaaagcttcccgcaggcggacttcgacggaccgcacaacctgatgatgcagattttcacctctcagggcgtatcgtttgatgaggtgctgatctgccctcacctgcccgcagacgactgcgactgccgcaagcccaaagtgaagctggtggagcgttatcttgcggaacaagcgatggatagcgccaacagctatgtgattggcgatcgtgcgaccgatatccagctcgctgatagcatgggcattactggtttacgctatcaccgtgaaacgctgaactggacgatgattggcgaacagctaacgaaacgcgatcgttatgcgcatgtggtccgcaacaccaaagaaacacagattgatgtcagcgtctggctggatcgcgaaggcaacagcaagattaataccggcgtcggcttctttgaccatatgctcgatcaaatcgccacccacggcggctttcgcatggagattaccgttaagggcgatctctatatcgacgatcaccacacggtagaagataccggactggcgctgcgtgaggcattaaaactggcactgcgcgacaagcgcggtatctgccgttttggctttgtactaccgatggatgaatgtcttgcctgcgcgctggatatttccggtcgtccgcatctggaatataaagctgaatttacctaccagcgtgtgggcaatttgagcacagagatgattgaacactttttccgctcactctcttacacgatgggcgtcactctgcatctcaagactaaaggtaagaacgatcaccaccgtgtcgaaagtttgtttaaagcctttggtcggaccgtacgccaggctattcgcgtggagggcgatacattaccgtcctcgaaaggagtgctgtga

SEQ ID NO: 23474 - protein, 354 aa, Salmonella typhimurium
MSQKYLLIDRDGTLISEPPSDFQVDRFDKLAFEPEVIPVLLKLQKAGFKLVMITNQDGLGTQSFPQADFDGPHNLMMQIFTSQGVSFDEVLICPHLPADDCDCRKPKVKLVERYLAEQAMDSANSYVIGDRATDIQLADSMGITGLRYHRETLNWTMIGEQLTKRDRYAHVVRNTKETQIDVSVWLDREGNSKINTGVGFFDHMLDQIATHGGFRMEITVKGDLYIDDHHTVEDTGLALREALKLALRDKRGICRFGFVLPMDECLACALDISGRPHLEYKAEFTYQRVGNLSTEMIEHFFRSLSYTMGVTLHLKTKGKNDHHRVESLFKAFGRTVRQAIRVEGDTLPSSKGVL

SEQ ID NO: 23475 - DNA, 1059 bp, Campylobacter jejuni
  CDS (1)..(1059)
atgagtcaaaaaatcctttttatagatagagatggcactttaatagaggagccaaaaagcgattttcaaatcgatactcttgaaaaattgcgttttgaaaaagatgctattcccactcttttaaaactaaaaaaatttggatttaaatttgttatggtaagcaatcaagacggtcttggaacaccaagttttccaaaggaaaattttgaaatcgctcatgaaaaaatgcttgatattttaaaaagttgcggtatagaatttcaagatatttttatttgtccgcattttgaaaatgaaaattgtgcttgcagaaaacctaaaaccgctatgttagaagagtatatcaaacacgaactttatgataaggaacaaagttttgttataggagatcgtgagagtgatatgatcttggcttcaaatttaggcgtgcgtggtttaaaatacggcgaactttcttggaaagaaatagaaaatgaaattttaagttcttttagaagcgcgagttatcaaagaactactaaagaaacagatataaaagtaaaggtatgcttaaatgggggtaaggttagcattaaaacaggtattgatttttttgatcacatgttagagcaaatcgctgtacatggaggtatagggcttgaaatttcttgtaaaggagatttggaaatcgatgagcatcatagcgttgaagatgtagccttagcacttggagcttgtatcaaaaaagctttaggggataaaatcggcattgcaagatatggttttgctttacctatggatgagtgtttggcaagttgtgcaatggatttttgcaatcgtccccatttagtctataaagccaaatttaaaaaatctcatttaggggctttaagcacagaaatgatcgagcactttttttattctttaagctatgctatgggcgtgagtttgcatttaaaagttaaaggcaaaaacgatcatcataaagccgaagggctttttaaagcctttgcaaaagctttgaaaatggcagtaaaaatagaaagtgaaaatttagccagctctaaaggagtgatatga

SEQ ID NO: 23476 - protein, 352 aa, Campylobacter jejuni
MSQKILFIDRDGTLIEEPKSDFQIDTLEKLRFEKDAIPTLLKLKKFGFKFVMVSNQDGLGTPSFPKENFEIAHEKMLDILKSCGIEFQDIFICPHFENENCACRKPKTAMLEEYIKHELYDKEQSFVIGDRESDMILASNLGVRGLKYGELSWKEIENEILSSFRSASYQRTTKETDIKVKVCLNGGKVSIKTGIDFFDHMLEQIAVHGGIGLEISCKGDLEIDEHHSVEDVALALGACIKKALGDKIGIARYGFALPMDECLASCAMDFCNRPHLVYKAKFKKSHLGALSTEMIEHFFYSLSYAMGVSLHLKVKGKNDHHKAEGLFKAFAKALKMAVKIESENLASSKGVI

SEQ ID NO: 23477 - DNA, 1089 bp, Haemophilus influenzae
  CDS (1)..(1089)
atgcaacctactctttttatcgaccgagacggcacattaattgatgaaccaaaaactgatttccaaattgacagtttagagaaactaaaattagaaccgaaagtgattcccgcactcctcagactgaaagcgaaataccgttttgtgatagtttctaatcaagatgggcttggtacggatgcttttccgcaaacagattttgataagccccacaatgtaatgatggcattatttgaatctcagggcattacctttgatgaagtactcatttgcccgcataagcccgaagaaaattgtctatgtcgcaaaccaaaaattaagttgcttgatcactatattcgtaaaaatttattcgatattgaccgctcttttgtcattggtgaccgagagaccgatgtgcaattagcagaaaatctaggtattcgagctattcaatacgatccacagaaaatgaattgggatctgattgcagaaaaattgttgggggaaacggtcacaaactgtggcaaacgtccgccacgttttgcagaagtaattcgtcaaactaaagagaccgatattaaagtgcaggtttggctagatgaagctggtgtaaatgaaatcaaaaccggcgttggtttttttgaccatatgctcgatcaaatcgccacacacggtgggtttagaatgaacgtgcagtgtaaaggcgatttatggattgacgaacatcacacggtggaggacaccgctctcgcccttggacaagcactgaaacaagccgttggtgacaaacgtggtattgcccgtttcggctttgtgcttccaatggacgaatgtaaagcagaatgtgctttagatttatcgggcagaccttggatcaaattcaatgcctgctttaaacgcgataaagtgggcgattttagtacggaactcactgaacatttctttcaatctttggcattttcaatgcttgccacgcttcatttaaatgtcacaggtaataacgatcatcataaaatagagagcttatttaaagcctttgggagaacattaagacaggcgattcggattgaaggaaatgaaatgccaagttcaaaaggagttttatag

SEQ ID NO: 23478 - protein, 362 aa, Haemophilus influenzae
MQPTLFIDRDGTLIDEPKTDFQIDSLEKLKLEPKVIPALLRLKAKYRFVIVSNQDGLGTDAFPQTDFDKPHNVMMALFESQGITFDEVLICPHKPEENCLCRKPKIKLLDHYIRKNLFDIDRSFVIGDRETDVQLAENLGIRAIQYDPQKMNWDLIAEKLLGETVTNCGKRPPRFAEVIRQTKETDIKVQVWLDEAGVNEIKTGVGFFDHMLDQIATHGGFRMNVQCKGDLWIDEHHTVEDTALALGQALKQAVGDKRGIARFGFVLPMDECKAECALDLSGRPWIKFNACFKRDKVGDFSTELTEHFFQSLAFSMLATLHLNVTGNNDHHKIESLFKAFGRTLRQAIRIEGNEMPSSKGVL

SEQ ID NO: 23479 - DNA, 1125 bp, Bacteroides fragilis
  CDS (1)..(1125)
atgaaaaagaaagtactttttattgaccgtgatggcacgcttgtcattgagccgcctgtcgactatcagctcgattcactggagaagcttgaattctatcctaaagttttccgcaatttgggctttattcgcagtaaacttgattttgagtttgtcatggtgaccaatcaggatggtttgggcacctcttctttcccggaagaaactttttggccggcgcacaatctgatgttgaaaactctggccggagaaggtattacgttcgatgatatcctgatagatcgtagtatgcccgaagattgtgcttctacgaggaagccgcgtacaggaatgttgactaagtatatttccaatccggaatatgatctggagggcagctttgtcattggagatcgtccgacagatgtagaattggccaaaaatataggttgccgtgccatttaccttcaggaatccattgatttgctgaaagaaaagggactggaaacttattgtgctcttgccactactgattgggatcgggtggctgagttcctttttgcaggagagcggagagcagaaatacgcaggacaacgaaagaaaccgatatcctagtagctctcaatctggatggtaagggtacttgtgacatttctaccgggttaggtttctttgaccatatgcttgagcagattggtaaacattccggtatggatttaacgatccgggtgaagggggacctcgaggtagacgaacatcataccatcgaagatacggctatcgcattgggtgagtgtatctatcaggcgctgggtagtaaaagaggaattgaacgttacggttatgctttgcccatggatgattgcctttgcagggtatgcctggatttcggaggacgtccgtggttggtatgggatgccgagtttaagcgtgaaaagataggagaaatgcctaccgagatgtttttacacttttttaagtctctgagtgatgcagccaagatgaacctcaatattaaggctgaggggcagaatgagcatcacaagatagagggaatattcaaagcgctggcccgtgcgttgaagatggcgttgaagagggatatctatcatttcgaattgccgtccagtaaaggagttttgtaa

SEQ ID NO: 23480 - protein, 374 aa, Bacteroides fragilis
MKKKVLFIDRDGTLVIEPPVDYQLDSLEKLEFYPKVFRNLGFIRSKLDFEFVMVTNQDGLGTSSFPEETFWPAHNLMLKTLAGEGITFDDILIDRSMPEDCASTRKPRTGMLTKYISNPEYDLEGSFVIGDRPTDVELAKNIGCRAIYLQESIDLLKEKGLETYCALATTDWDRVAEFLFAGERRAEIRRTTKETDILVALNLDGKGTCDISTGLGFFDHMLEQIGKHSGMDLTIRVKGDLEVDEHHTIEDTAIALGECIYQALGSKRGIERYGYALPMDDCLCRVCLDFGGRPWLVWDAEFKREKIGEMPTEMFLHFFKSLSDAAKMNLNIKAEGQNEHHKIEGIFKALARALKMALKRDIYHFELPSSKGVL

SEQ ID NO: 23481 - DNA, 1098 bp, Mannheimia succiniciproducens MBEL55E
  CDS (1)..(1098)
atgactcaacaaccaaccctattcatcgaccgtgacggcacgttaatcgacgagccgaaaaccgattttcaaattgacagtttagaaaagctcaaattcgaacgtaatgtgattccggcgttgctcaaattaaaaaatcgttatcgttttgtgatggtatcgaatcaagacggcctgggaacggattcatttccgcaggaagattttgataagccgcataatgccatgttagctgtttttcgttcgcaaggcattgaatttgatgatattttaatctgcccacataagccggaagacaactgtgattgccgtaaaccgaaaatcaaattgttgaaaaagtacatcgataaaaaattatttgatcccgcagacagctttgttatcggcgatcggccgacagacgttcaactggctgaaaatctgggtattcgcgcattgcagtatcatccggaaaatttagactgggatatgatcgccgaaaaattattacgggaaccggtagcggatccgaaaggtttaggtcaaccgcgtcatgccgttgtggctcgcaaaaccaaagaaaccgacatcaaagtggaagtctggttggatgaagccggggtgaatcaaattaataccggtatcggtttttttgatcatatgcttgatcaaatcgctactcatggcgggtttcgcatgaatgtcagctgcaaaggcgatttgcatattgacgatcatcataccatcgaagatgtcgcattggcactgggcgcggcgttaaaagaggctatcggcaataagcgcggtattcagcgatttggttttgtgctgcctatggacgaatgcaaagcggaatgcgccctggatttatccggtcgcccgtatttcaaattcaaagcgaaattcaatcgtgacaaagtgggcgatttcagcaccgaaatgacggagcattttttccagtctattgcctataccttgcttgcaaccttgcatttatccgttaaaggcgacaatgctcaccatcaaatcgaagccttgtttaaagctttcggcagaactttgcgccaggcgattaaaatcgaaggaaatgaaatgccgagcagtaagggcgtgttgtaa

SEQ ID NO: 23482 - protein, 365 aa, Mannheimia succiniciproducens MBEL55E
MTQQPTLFIDRDGTLIDEPKTDFQIDSLEKLKFERNVIPALLKLKNRYRFVMVSNQDGLGTDSFPQEDFDKPHNAMLAVFRSQGIEFDDILICPHKPEDNCDCRKPKIKLLKKYIDKKLFDPADSFVIGDRPTDVQLAENLGIRALQYHPENLDWDMIAEKLLREPVADPKGLGQPRHAVVARKTKETDIKVEVWLDEAGVNQINTGIGFFDHMLDQIATHGGFRMNVSCKGDLHIDDHHTIEDVALALGAALKEAIGNKRGIQRFGFVLPMDECKAECALDLSGRPYFKFKAKFNRDKVGDFSTEMTEHFFQSIAYTLLATLHLSVKGDNAHHQIEALFKAFGRTLRQAIKIEGNEMPSSKGVL

SEQ ID NO: 23483 - DNA, 1068 bp, Erwinia carotovora
  CDS (1)..(1068)
atgggccagaaatacctctttatcgaccgtgacggaacattgattgctgaaccgcctgaggattttcaggttgaccgtttggataaactggcgctggaaccagatgtcattccgtcgctgctggcactgcaaaaggccggttatacgctggtgatgattaccaatcaggatgggctaggaaccgatagctttccgcaggaaaccttcgatccaccgcacaacctgatgatgcagattctgacatcgcagggcatccattttgagcacgtgctgatctgtccgcatttaccggcagataactgcacctgtcgcaaacccaagaccgaactggtaacggcctatttgaacggcggcctgatggatgtggcaaatagctacgtcatcggcgaccgccaaaccgatattcagttggcgcaaaatatgggcattaccggcctgctctaccagcgtggcgggctgaactggcaagcaattactgaccagctaaccaagcgtaaccgccatgcacacgtcaaccgagttacgcgtgaaaccgcgattgatgtaaacgtctggctggatcaggaaggcggcagcaaaattaacaccggtgttggcttcttcgatcacatgttggatcaaatcgccacccacggcggtttccgcatgaacattgaagtgaaaggcgatctgtacattgacgatcaccacacggtggaagataccggtctggcgctgggcgaagccctgaataacgcgctgggcgacaaacgcggcattggccgttttggcttcattctgccgatggatgagtgtctggcacgctgtgcgctggatatttcagggcgtccgcatctggaatataaagccgaattcaactatcagcgcgttggcgatctgagtacggaaatggtcgaacacttcttccgctcactgtcttattccatggcctgtacgctgcacctgaaaaccaaagggcgtaacgatcatcaccgtgtggaaagcctgtttaaagtcttcggacgcacgctacgtcaggcaattcgcgtcgagggtgacacgttgccgagctcgaaaggggtgctctga

SEQ ID NO: 23484 - protein, 355 aa, Erwinia carotovora
MGQKYLFIDRDGTLIAEPPEDFQVDRLDKLALEPDVIPSLLALQKAGYTLVMITNQDGLGTDSFPQETFDPPHNLMMQILTSQGIHFEHVLICPHLPADNCTCRKPKTELVTAYLNGGLMDVANSYVIGDRQTDIQLAQNMGITGLLYQRGGLNWQAITDQLTKRNRHAHVNRVTRETAIDVNVWLDQEGGSKINTGVGFFDHMLDQIATHGGFRMNIEVKGDLYIDDHHTVEDTGLALGEALNNALGDKRGIGRFGFILPMDECLARCALDISGRPHLEYKAEFNYQRVGDLSTEMVEHFFRSLSYSMACTLHLKTKGRNDHHRVESLFKVFGRTLRQAIRVEGDTLPSSKGVL

SEQ ID NO: 23485 - DNA, 1125 bp, Bacteroides thetaiotaomicron
  CDS (1)..(1125)
atgaagaagaaaatattgtttatagatagggacgggacattggtcattgaacctcccattgattatcagcttgattcactggaaaagctggaattttatccgagagtcttccgtaatttgggctttatccgtagcaagcttgattttgaatttgtgatggttaccaatcaggacgggctgggtacatcttcgtttccggaagacactttctggcctgctcacaacttgatgctgaaaacattggccggagaaggcattacctttgatgatattctgatcgaccgtagttttccggaagataatgcgccgactcgcaaaccgcgtacaggaatgttgacgaagtatattgataatccggaatatgatcttgcggaaagctttgtaatcggtgatcgtcctactgatgtggagctggcaaagaatcttggttgccgtgctatttatctgcaagaagcaacagatgatttgaaagagaaaggtctggaagaagtttgtgcacttgcaacaacagactgggatcaggtggcagagtttctttttgccggtgagcggaaagcagaagttcgccgtacaacgaaggagactgatatttatgtgtctctcaatcttgatggaaatggaggctgtgatatttctaccggtcttggcttcttcgatcatatgcttgaacaaataggcaagcattccggaatggatctgaccattcgggtaaaaggcgacctggaagtggatgaacatcacaccattgaggatactgccatcgctttgggagaatgtatttatcaggctttgggcagtaagcgcggaatcgaacgttatggttatgctttgcctatggatgattgcctttgtcaggtttgccttgatttcggaggtcgtccttggttagtatgggatgcagagttcaatcgtgaaaaaataggggagatgccgacggagatgttcctgcatttctttaaatcattgagtgatgctgcaaaaatgaatctgaacatcaaggctgaaggacagaatgagcatcacaagatagaaggtatctttaaagcgcttgcacgtgccctgaaaatggcattgaaaagagatatctatcattttgagcttccttcgagcaaaggagtactataa

SEQ ID NO: 23486 - protein, 374 aa, Bacteroides thetaiotaomicron
MKKKILFIDRDGTLVIEPPIDYQLDSLEKLEFYPRVFRNLGFIRSKLDFEFVMVTNQDGLGTSSFPEDTFWPAHNLMLKTLAGEGITFDDILIDRSFPEDNAPTRKPRTGMLTKYIDNPEYDLAESFVIGDRPTDVELAKNLGCRAIYLQEATDDLKEKGLEEVCALATTDWDQVAEFLFAGERKAEVRRTTKETDIYVSLNLDGNGGCDISTGLGFFDHMLEQIGKHSGMDLTIRVKGDLEVDEHHTIEDTAIALGECIYQALGSKRGIERYGYALPMDDCLCQVCLDFGGRPWLVWDAEFNREKIGEMPTEMFLHFFKSLSDAAKMNLNIKAEGQNEHHKIEGIFKALARALKMALKRDIYHFELPSSKGVL

SEQ ID NO: 23487 - DNA, 1068 bp, Buchnera aphidicola
  CDS (1)..(1068)
atgaaacaaaaaatattatttattgatcgagatggaacattaattcatgaaccatctaatgattgtcaagtggatgcaattaataaacttgaatttaaaaaatatattatttcttcactatgtcaattaatgaattttggttataaatttgttatggtgacaaaccaagatggtcttggcagtaaatcatttcctcgggaaaattttaatattccacatttttttatgttaaacatttttcgttcagaaggaataatatttgaagatgttttaatttgtcctcattttttagatgataattgtgattgtcgtaaacctcaaactaaactgttaaaaccttggttgaaaaaaaataagatagataaacaacgcagttatgtaattggtgatcgagaaactgatatggaattagcaaaaaatataaatttaacaggtatacaatacaaggagaaagaatttaattggatagatattacaaaagaaattataaaaagaaatagatatagagaagtgattcgagaaacaaaagaaacttatatacatataaagttatggttggatttagaacatcatagttgtatccaaactggtattaatttttttgatcatatgttagaacaattatctattcatagcggaatttcaatgtatattttagcaaaaggagatttgcaaattgatgaccatcatactatagaagatactggaattgtcttaggagaggcattatctcaagcattaaacaataaaaatggtttatctagatatggttttgttttgcctatggatgaaagtcaagcaaaatgcattatagatttatcaaatcgtccatatttatcttttaatgctcactttaaacataaaatggttggtgatatgaatactgatatggttgaacattttttttattctctttgttgttctatgaaaatcaccttacatatagatgttaaaggaaaaaatgatcatcattgtattgaaagtttgtttaaagcatttggacgtgcactccgcaaggcagtaaaaatagaaggaaatacactgccaacatctaaagggattttataa

SEQ ID NO: 23488 - protein, 355 aa, Buchnera aphidicola
MKQKILFIDRDGTLIHEPSNDCQVDAINKLEFKKYIISSLCQLMNFGYKFVMVTNQDGLGSKSFPRENFNIPHFFMLNIFRSEGIIFEDVLICPHFLDDNCDCRKPQTKLLKPWLKKNKIDKQRSYVIGDRETDMELAKNINLTGIQYKEKEFNWIDITKEIIKRNRYREVIRETKETYIHIKLWLDLEHHSCIQTGINFFDHMLEQLSIHSGISMYILAKGDLQIDDHHTIEDTGIVLGEALSQALNNKNGLSRYGFVLPMDESQAKCIIDLSNRPYLSFNAHFKHKMVGDMNTDMVEHFFYSLCCSMKITLHIDVKGKNDHHCIESLFKAFGRALRKAVKIEGNTLPTSKGIL

SEQ ID NO: 23489 - DNA, 1074 bp, Buchnera aphidicola
  CDS (1)..(1074)
atgtctgaaaaagttttattcattgatcgtgatggtacgttaatttctgaacccttagataattttcaagtagacagttttgataaattagaatttaaacaagatgttatttcttcattaattacattaaaaaaatttaattacaaatttgttatggttactaatcaagatggtttaggatcaaaaaatttcccttataaaagttttataagacctcatgaatttatgatagatgtatttttatctcaaggtataaaatttgaagaagtgttgatttgtccacatgagttaaagagtggttgccaatgtagaaaacctaatttaggaatggttcagcattggttattgaatgatatgttagataagcagcattcttgtgttataggtgatagaaaaactgacatgattttagctaataatatggggattttgggaatacgctatggaacaaagcaaggtaattcatggagtgatattgtatttaagttaacaaaaaaacatgatagacatgccaaagtagttcgtaatactaaagaaactaatgtaagtatagaagtatggttagacaagcaaggaggtagtttaataaacactggattgaatatgtttaatcatatgttagatcaaatagcagtacatagttgtattcgaatgaaaattatttcgagtggtgatatttgtgttgatgatcatcatacagtagaagatgtaggaattgttttaggtaaagctattttaaaagctttaggtaataaactaggtattaataggtttggttttgcattgcctatggatgatagttctagttattgtttgttagatatttccggtcggccttttctaaaatttcgttcatatttcaaacatcaatatataggagatatgagttcggaaatggttagacatttttttcaatctttagcctttgctatgaaatgcactttgcatttacgaagcatgggaattaatgatcatcatcgtttagaaagtttatttaaagtttttggaaaaacgttaaaacaagcgattgttgttagtggaaaaaatttaccgagttctaagggattgctataa

SEQ ID NO: 23490 - protein, 357 aa, Buchnera aphidicola
MSEKVLFIDRDGTLISEPLDNFQVDSFDKLEFKQDVISSLITLKKFNYKFVMVTNQDGLGSKNFPYKSFIRPHEFMIDVFLSQGIKFEEVLICPHELKSGCQCRKPNLGMVQHWLLNDMLDKQHSCVIGDRKTDMILANNMGILGIRYGTKQGNSWSDIVFKLTKKHDRHAKVVRNTKETNVSIEVWLDKQGGSLINTGLNMFNHMLDQIAVHSCIRMKIISSGDICVDDHHTVEDVGIVLGKAILKALGNKLGINRFGFALPMDDSSSYCLLDISGRPFLKFRSYFKHQYIGDMSSEMVRHFFQSLAFAMKCTLHLRSMGINDHHRLESLFKVFGKTLKQAIVVSGKNLPSSKGLL

SEQ ID NO: 23491 - DNA, 1074 bp, Candidatus Blochmannia floridanus
  CDS (1)..(1074)
atgaatgacaaaattttatttatagatcgagacggtactttaattcacgaaccaaaagataattttcagattgattcattagataaattactattagaaccatatgttattcccactctcatagctctaaaaaatattaaatttaaatttattatagtaacaaatcaaaatggattaggtactgacttatttcctaaaaccaaatttaataaacctcatcagtttatgatccaaatatttaaatcacaaggaataaaatttgatcaaatactaatttgcccacacttacctgaagatcaatgtaattgtcgtaaaccaaaaactggtttaatatcctgttggttaaaaaataaatcattagatatgccgaatagctatgtcataggagatcgagatactgacatacaattcgctcacaatataggcattcaaggaataaaatatcatcaaatacattttaattggaaaaaaattcacaaatatttaatgcaaaatagtcatagagtagcgcacatccaacgtataaccaatgaaactaatgtagatgtaaaaatatggcttaatcaatgcgatcaaaataaaatcaatactggtattcatttctttgatcatatgttagaacaaatagctattcatgcaaaaattcgtatgcatatcatcacaaaaggtgatttacatattgatgatcatcatacaattgaagataccgcattatctttaggagaagcattaaatcaagcgttaggagacaaacgaggaattggtcgttttggatttactctacccatggacgaaagcattgcgcaatgtatattagatttatctggtcgtacatattttgattatcaagcagagtattctcttcaaaaaataggaaattttagtactcatatgatagaacacttttttagatcattatcttcaaaaatgcactgtacgttacatctcaaagtaataggcaataacgatcaccacaaagcagaaagtttatttaaatcttttggaaaatcattaaatcaagctatttatatacaacacaatcaaatccctagctctaaaggtattttactatga

SEQ ID NO: 23492 - protein, 357 aa, Candidatus Blochmannia floridanus
MNDKILFIDRDGTLIHEPKDNFQIDSLDKLLLEPYVIPTLIALKNIKFKFIIVTNQNGLGTDLFPKTKFNKPHQFMIQIFKSQGIKFDQILICPHLPEDQCNCRKPKTGLISCWLKNKSLDMPNSYVIGDRDTDIQFAHNIGIQGIKYHQIHFNWKKIHKYLMQNSHRVAHIQRITNETNVDVKIWLNQCDQNKINTGIHFFDHMLEQIAIHAKIRMHIITKGDLHIDDHHTIEDTALSLGEALNQALGDKRGIGRFGFTLPMDESIAQCILDLSGRTYFDYQAEYSLQKIGNFSTHMIEHFFRSLSSKMHCTLHLKVIGNNDHHKAESLFKSFGKSLNQAIYIQHNQIPSSKGILL

SEQ ID NO: 23493 - DNA, 1092 bp, Pasteurella multocida
  CDS (1)..(1092)
atgacacaacaatctattctttttatcgaccgtgacgggactttaattgatgaacccaaaaccgattttcaaattgacagtttggaaaaattacaatttgagccgaatgttatccccgcgttattaaagctcaaaccctattaccgtttcgtaatggtcagtaaccaagacgggctaggtacggcatctttcccacaggaaaattttgataaaccgcacaatgcgatgatggcgttatttaaatcacaaggtatcgagtttgatgaggtgttaatttgccctcataaacctgaagacgagtgcgattgtcgtaagccgaaaattaaattattgaaaaaatacattgataaaaaattgtttgaccctaccaccagctttgtaattggcgatcgtgccactgacgtgcaactggcagaaaatctcggtattcgagccttgcaatatgatcgtgaaaagctcaattgggatctgattgtggaaaaattgttgccaaaacagaccgcacttttagaccgtaaaccacgctatgcggaagtggttcgcaccaccaaagaaacggacattaaagtgcaagtgtggttggacgaaacagggatgaacgacatcaaaacgggtgtgggctttttcgaccatatgcttgatcaaatcgccacccacggtggctttagaatgaatgtgtactgcaaaggcgatttgtggattgacgaacatcacaccgtcgaagacactgccctcgccctcggtaccgcattaaaacaagcccttggcgataaacgaggcattcaacgctttggctttgtgttaccaatggacgaatgcaaggcagaatgtacgatggatctgtctggtcgcccgtatttcaaattcaaagccaaatttaaacgcgataaagtgggtgatttcagcaccgaaatgaccgagcattttttccaatctctcgcttataccttaatggcaaccttacatctcaaaaccaaaggcgataacgaccaccacaaaatcgaaagcctgtttaaagtgtttgggcgtacgttaagacagtgtattaaggttgaagggaatgagttgccgagtagtaagggggttttgtga

SEQ ID NO: 23494 - protein, 363 aa, Pasteurella multocida
MTQQSILFIDRDGTLIDEPKTDFQIDSLEKLQFEPNVIPALLKLKPYYRFVMVSNQDGLGTASFPQENFDKPHNAMMALFKSQGIEFDEVLICPHKPEDECDCRKPKIKLLKKYIDKKLFDPTTSFVIGDRATDVQLAENLGIRALQYDREKLNWDLIVEKLLPKQTALLDRKPRYAEVVRTTKETDIKVQVWLDETGMNDIKTGVGFFDHMLDQIATHGGFRMNVYCKGDLWIDEHHTVEDTALALGTALKQALGDKRGIQRFGFVLPMDECKAECTMDLSGRPYFKFKAKFKRDKVGDFSTEMTEHFFQSLAYTLMATLHLKTKGDNDHHKIESLFKVFGRTLRQCIKVEGNELPSSKGVL

SEQ ID NO: 23495 - DNA, 1068 bp, Photorhabdus luminescens
  CDS (1)..(1068)
atgaaccagaaactcctgtttattgatcgggacggtacgctgatcactgaaccgccaacagattttcaagttgatcgtctggataaactggcactggaaaccgaggttattcctgctctgcttgccctgcaaaaatcggggttcaggctgattatgatcactaatcaggatggtcttggcacagatagttttccattagaacaatttgaaccgccacataacctgatgatgcagattttcagttctcaaggcatccattttgatgaagttttaatctgccctcacaagccagaagagaactgtcattgccgtaagccaaaaataaaactggtggaaaaatatctaacagaaggcttgatggataccgcgaacagctatgtgattggtgaccgggaaaccgatctgcaactggccaaaaatatgggcattcaggggttacattatcatccgaaaaaccttggctggttcgctatctgtgaacaactaacccgtcaagaccgtcacgctcatgttcaacgtatcactaaagagacatccatcaacattgacgtttggcttgatcatgaaggtagcagcgatatcaataccggtgtcgggttctttgaccatatgttggatcagattgctacccacggtggtttccgcatgcatgttcaggttaaaggcgatctctgtattgatgatcaccataccgttgaggataccggtctggcattgggggaagcattgaaactggcgttgggagataaacggggcatttgccgttttggttttgtgttgccaatggatgaatgccttgcccgctgtgctctcgatatttctggtcgccctcatctggaatataaagctgaattcaaacaccagcgggtgggtgatctgagcactgaaatgattgagcacttctttcgttcactctcttatgcaatggcctgtacactacatctgaaaacgaaaggcagcaacgatcatcacagagcagaaagcctatttaaagcctttggccgaacactacgtcaggcaattcgggtagaaggcgatacattgccaagttccaaaggggttctgtga

SEQ ID NO: 23496 - protein, 355 aa, Photorhabdus luminescens
MNQKLLFIDRDGTLITEPPTDFQVDRLDKLALETEVIPALLALQKSGFRLIMITNQDGLGTDSFPLEQFEPPHNLMMQIFSSQGIHFDEVLICPHKPEENCHCRKPKIKLVEKYLTEGLMDTANSYVIGDRETDLQLAKNMGIQGLHYHPKNLGWFAICEQLTRQDRHAHVQRITKETSINIDVWLDHEGSSDINTGVGFFDHMLDQIATHGGFRMHVQVKGDLCIDDHHTVEDTGLALGEALKLALGDKRGICRFGFVLPMDECLARCALDISGRPHLEYKAEFKHQRVGDLSTEMIEHFFRSLSYAMACTLHLKTKGSNDHHRAESLFKAFGRTLRQAIRVEGDTLPSSKGVL

SEQ ID NO: 23497 - DNA, 1086 bp, Photobacterium profundum
  CDS (1)..(1086)
atgagcaaagaaaaaattctatttattgatcgtgatggcaccttaattgttgagccacccgttgattttcaagttgatcgattagataaactcaagctagaaccgtttgttatacctgcgctgttaacactgcaagatgcagggtacaagcttgtgatggtgacaaaccaagacggtttaggaacagatagctacccacaagcggatttcgatgcaccgcaaaatatgatgatggaaatcttcgagtcgcaaggcgtgaagtttgatgatgtattaatttgcccacacttcaatgaagacaactgcagctgccgaaaaccaaagttaggtttagtgaaaagttacctgcagcaaggtcgggttgatttcgcaacctcagcagtgattggtgatcgtcaaactgatcttcagttagctgaaaatatggcgattaaaggtattcaatacaatccacttcctaccgataagagcagcttgaactggcaacagattgtaaaagacctaacaacaaaccctcgcattgctgaagttgtacgtaccaccaaagaaactgacattcgcgttaaagtgaatttagatgaaacgggcggtaactctattgagacgggcttggggttctttgaccacatgctcgatcaaattgcgacacacggtggctttcaaatgcaggttaatgtgaaaggtgacttacacatcgatgatcaccacagcattgaagatacagccctcgcattaggccaagcactcaaagaagcactgggtgataagcgcggtattggtcgttttggctttagcttgccaatggatgaatgcttagcgcaatgtgcattagatttatcgggtcgcccttatttaaagtttgaagcagagtttggacgcgatcaggttggcgatctttcaactgaaatggtatcgcacttcttccgctctcttactgatacgctggcgtgtaccttgcacctttcatcgacaggccataacgatcaccacattgtagaaagcttgttcaaagcatttggtcgcacattacgccaagcaattcgtgttgacggtaatgagctaccaagcagtaaaggagtgctgtaa

SEQ ID NO: 23498 - protein, 361 aa, Photobacterium profundum
MSKEKILFIDRDGTLIVEPPVDFQVDRLDKLKLEPFVIPALLTLQDAGYKLVMVTNQDGLGTDSYPQADFDAPQNMMMEIFESQGVKFDDVLICPHFNEDNCSCRKPKLGLVKSYLQQGRVDFATSAVIGDRQTDLQLAENMAIKGIQYNPLPTDKSSLNWQQIVKDLTTNPRIAEVVRTTKETDIRVKVNLDETGGNSIETGLGFFDHMLDQIATHGGFQMQVNVKGDLHIDDHHSIEDTALALGQALKEALGDKRGIGRFGFSLPMDECLAQCALDLSGRPYLKFEAEFGRDQVGDLSTEMVSHFFRSLTDTLACTLHLSSTGHNDHHIVESLFKAFGRTLRQAIRVDGNELPSSKGVL

SEQ ID NO: 23499 - DNA, 1092 bp, Shewanella oneidensis
  CDS (1)..(1092)
atgaacccagtatttacccctaatgtcgcgcaaaaaatactttttatcgatcgcgatggcaccttgattgaagagccggttacagataagcaagtcgataaccttgccaagctggtattcgagccccaagtgatccccgccttactgcgcctgcaaaaagccggttttcgtttggtgatggtcagcaatcaggatggactcggtaccccgtccttcccgcaggaagatttcgatgcgccgcacaatatgatgatgcaaatcctctccagccaaggggttaagtttgaagatgtgctaatttgcccacactttaacgatgagaattgtagctgccgcaaacccaagctgggactggtgaaagactttttgacccaaggctttatcgattttacccagtccgcggtgattggtgacagacacacagatgtggaactgggcaatgccatggggattatcagctttcaatatcagcgaggcagtctaggttggaacgccattgccgatgcattactcaacaagggccgcagcgcgactgtggtgcgtaccaccaaggaaaccgatattcgcgtgacagtcgatctcgacaatgccagcaaaggcacgattaacactggcattggctttttcgaccatatgctggatcaaatcgccacccacgggaatttcaaaatggaggtgaatgtcgatggagatctcgagatagacgatcaccacagcgttgaagataccgcattggcgattggggatgcactgcgccaagcgcttggcgataaacgcggtattgcccgttttggttttagtttgcctatggatgaggccaagggcgaatgcttactcgatctttccggcaggccttttattaaatttgctgcccaatttgaacgggaaaaagtcggtgaaatggccaccgaaatggtgccgcactttttccgctcctttgccgatggtttgcgctgcaccctgcatgtggccgccgagggagacaacgatcaccacaaggtagaagcactctttaaggtgctgggccgcgcactgcgtcaagcagtaaaagtggaaggtgatgtattgccctcgagtaaaggcgttctctaa

SEQ ID NO: 23500 - protein, 363 aa, Shewanella oneidensis
MNPVFTPNVAQKILFIDRDGTLIEEPVTDKQVDNLAKLVFEPQVIPALLRLQKAGFRLVMVSNQDGLGTPSFPQEDFDAPHNMMMQILSSQGVKFEDVLICPHFNDENCSCRKPKLGLVKDFLTQGFIDFTQSAVIGDRHTDVELGNAMGIISFQYQRGSLGWNAIADALLNKGRSATVVRTTKETDIRVTVDLDNASKGTINTGIGFFDHMLDQIATHGNFKMEVNVDGDLEIDDHHSVEDTALAIGDALRQALGDKRGIARFGFSLPMDEAKGECLLDLSGRPFIKFAAQFEREKVGEMATEMVPHFFRSFADGLRCTLHVAAEGDNDHHKVEALFKVLGRALRQAVKVEGDVLPSSKGVL

SEQ ID NO: 23501 - DNA, 1074 bp, Vibrio vulnificus
  CDS (1)..(1074)
atgagcaaacaacaaaaaatcctttttatcgaccgtgacggcactttgatcgtggaaccacctgtcgattttcaagtagaccgtttagataagctaaaactagagccatttgttatcccaagcctgttgtcgttacaagatgcaggataccgtctagtgatggtcaccaaccaagacggccttggaacagacagctatccgcaagaagattttgatgctccacacaatatgatgatggagatctttgaatctcaaggtgtgaaatttgatgatgttctgatctgtcctcactttgaaaaagacaattgctcttgtcgcaaaccgaaattgggcttagtaaaagagtaccttcaagcgggtaaagtggatttccagaactcgttcgtgattggcgatcgtcaaaccgatcttcaacttgcagagaacatggccattcgtggcattcaatacaacccagaaatcatgggttggaaacggatcctgaaagatctgacggtgaaagcgcgtgttgctgaagtggttcgcaccacgaaagaaacggacatcaaagtattcgttaatcttgatgaacaaggcggtaacgcgatatcaaccggtcttggtttcttcgaccacatgttagatcaaatcgccactcacggtggcttccagatggtgtgcaaagtggaaggtgacttgcatattgatgatcaccacacggtagaagataccgctctcgcgctggggcaagcattgaaagaagcactgggtgacaagcgtggtattggccgctttggcttcagcctgccaatggacgagtgcttggcacaatgtgcactagacctatctggtcgtccttaccttaagtttgacgcgcagttcagccgtgagcaggtcggtgacttatccactgagatggtggttcacttcttccgttctttgacggataccctagcgtgtacgctgcacctttcttctgcgggcaacaatgatcaccacatcattgaaagtctattcaaagcgtttggtcgtactctgcgccaagcaatcaaagtagaaggcactgagctaccaagtagtaaaggcgtgctgtaa

SEQ ID NO: 23502 - protein, 357 aa, Vibrio vulnificus
MSKQQKILFIDRDGTLIVEPPVDFQVDRLDKLKLEPFVIPSLLSLQDAGYRLVMVTNQDGLGTDSYPQEDFDAPHNMMMEIFESQGVKFDDVLICPHFEKDNCSCRKPKLGLVKEYLQAGKVDFQNSFVIGDRQTDLQLAENMAIRGIQYNPEIMGWKRILKDLTVKARVAEVVRTTKETDIKVFVNLDEQGGNAISTGLGFFDHMLDQIATHGGFQMVCKVEGDLHIDDHHTVEDTALALGQALKEALGDKRGIGRFGFSLPMDECLAQCALDLSGRPYLKFDAQFSREQVGDLSTEMVVHFFRSLTDTLACTLHLSSAGNNDHHIIESLFKAFGRTLRQAIKVEGTELPSSKGVL

SEQ ID NO: 23503 - DNA, 1128 bp, Xanthomonas campestris
  CDS (1)..(1128)
atgaccccgattcttttcgtcgaccgcgatggcacgctgattaccgagccggccgatttccagatcgacgcctacgaaaagctgcgctttgtcgacggcgtgattccggccatgctcaagctgcgcgatgccggctaccagttcgtcatcgtcagcaaccaggacggtctgggcagcgagagctatccgcaggcatccttcgacggccccaacaacctgatgctgcagatcttcgccagccagggcatcgtgttccgcgaagtgctgatcgactgcagctggccggccgacaacgcgccgacgcgcaagccgggcgttggcctgatggtgccgtacctgcaggaccgcaccatcgactggagccgttcggcgatggtgggcgaccgcatcaccgacatccagttcgcgcagaacctcaacatccgcgggttccagctgcgcaccgagcagttcggcggcgattgggactgggccggcatcgcacacgaactggccgatgccccgcgccgcgcggtggtccagcgcaataccaaggaaacccgcatccgcgtggagctcgacctggaccgcgtggccgaaccgcacaccgccaccgggctgccgttcttcgatcacatgctcgagcagatcggcaagcacggcgggtttgcgctggatatccgcgccgaaggcgacctgcacatcgatgagcaccacaccatcgaagacactggcttggcgctggggcaggccttgcgcgaagccttgggcgacaagcgcggtattggccgctatggctttgatccggacgacagcccatggcgcgtagcgggcgacaccacacagcacggctttaccttgccgatggacgaaaccatcgccagtgctgcgctggatttcagcggccggccatacttcgtgttcgacggcgacttcaaacgcgagcgcgttggcgacatgcccaccgagctggtgccgcacttcttccgttcggtgtgcgatgcatccggattgaatctgcatctgcacgtgcgcggcgagaacgatcaccacaaggtggaaggctgcttcaaggcattggcgcgtgcactgcgccaggcgatccgccgcgagggcaccgcgttgccatccaccaagggggcgctatga

SEQ ID NO: 23504 - protein, 375 aa, Xanthomonas campestris
MTPILFVDRDGTLITEPADFQIDAYEKLRFVDGVIPAMLKLRDAGYQFVIVSNQDGLGSESYPQASFDGPNNLMLQIFASQGIVFREVLIDCSWPADNAPTRKPGVGLMVPYLQDRTIDWSRSAMVGDRITDIQFAQNLNIRGFQLRTEQFGGDWDWAGIAHELADAPRRAVVQRNTKETRIRVELDLDRVAEPHTATGLPFFDHMLEQIGKHGGFALDIRAEGDLHIDEHHTIEDTGLALGQALREALGDKRGIGRYGFDPDDSPWRVAGDTTQHGFTLPMDETIASAALDFSGRPYFVFDGDFKRERVGDMPTELVPHFFRSVCDASGLNLHLHVRGENDHHKVEGCFKALARALRQAIRREGTALPSTKGAL

SEQ ID NO: 23505 - DNA, 27 bp, Artificial sequence
  Primer sequence
atgatgagtcagaagtatctttttatc

SEQ ID NO: 23506 - DNA, 23 bp, Artificial sequence
  Primer sequence
ttacagcactcctttcgacgagg

SEQ ID NO: 23507 - protein, 392 aa, Artificial sequence
  Consensus
  Variant (6)..(8): Xaa in position 6 to 8 is any amino acid
  Variant (11)..(14): Xaa in position 11 to 14 is any amino acid
  Variant (16)..(16): Xaa in position 16 is any amino acid
  Variant (18)..(20): Xaa in position 18 to 20 is any amino acid
  Variant (23)..(47): Xaa in position 23 to 47 is any amino acid
  Variant (50)..(50): Xaa in position 50 is any amino acid
  Variant (54)..(57): Xaa in position 54 to 57 is any amino acid
  Variant (59)..(61): Xaa in position 59 to 61 is any amino acid
  Variant (63)..(68): Xaa in position 63 to 68 is any amino acid
  Variant (70)..(76): Xaa in position 70 to 76 is any amino acid
  Variant (78)..(79): Xaa in position 78 to 79 is any amino acid
  Variant (81)..(84): Xaa in position 81 to 84 is any amino acid
  Variant (86)..(96): Xaa in position 86 to 96 is any amino acid
  Variant (100)..(117): Xaa in position 100 to 117 is any amino acid
  Variant (119)..(121): Xaa in position 119 to 121 is any amino acid
  Variant (125)..(126): Xaa in position 125 to 126 is any amino acid
  Variant (128)..(163): Xaa in position 128 to 163 is any amino acid
  Variant (165)..(185): Xaa in position 165 to 185 is any amino acid
  Variant (187)..(191): Xaa in position 187 to 191 is any amino acid
  Variant (193)..(193): Xaa in position 193 is any amino acid
  Variant (195)..(195): Xaa in position 195 is any amino acid
  Variant (198)..(204): Xaa in position 198 to 204 is any amino acid
  Variant (206)..(214): Xaa in position 206 to 214 is any amino acid
  Variant (217)..(219): Xaa in position 217 to 219 is any amino acid
  Variant (221)..(221): Xaa in position 221 is any amino acid
  Variant (225)..(225): Xaa in position 225 is any amino acid
  Variant (227)..(229): Xaa in position 227 to 229 is any amino acid
  Variant (231)..(240): Xaa in position 231 to 240 is any amino acid
  Variant (243)..(245): Xaa in position 243 to 245 is any amino acid
  Variant (247)..(247): Xaa in position 247 is any amino acid
  Variant (250)..(251): Xaa in position 250 to 251 is any amino acid
  Variant (254)..(264): Xaa in position 254 to 264 is any amino acid
  Variant (266)..(268): Xaa in position 266 to 268 is any amino acid
  Variant (270)..(270): Xaa in position 270 is any amino acid
  Variant (272)..(273): Xaa in position 272 to 273 is any amino acid
  Variant (275)..(293): Xaa in position 275 to 293 is any amino acid
  Variant (295)..(296): Xaa in position 295 to 296 is any amino acid
  Variant (301)..(308): Xaa in position 301 to 308 is any amino acid
  Variant (310)..(312): Xaa in position 310 to 312 is any amino acid
  Variant (314)..(327): Xaa in position 314 to 327 is any amino acid
  Variant (329)..(336): Xaa in position 329 to 336 is any amino acid
  Variant (340)..(340): Xaa in position 340 is any amino acid
  Variant (342)..(349): Xaa in position 342 to 349 is any amino acid
  Variant (351)..(355): Xaa in position 351 to 355 is any amino acid
  Variant (357)..(357): Xaa in position 357 is any amino acid
  Variant (359)..(359): Xaa in position 359 is any amino acid
  Variant (362)..(363): Xaa in position 362 to 363 is any amino acid
  Variant (365)..(366): Xaa in position 365 to 366 is any amino acid
  Variant (369)..(390): Xaa in position 369 to 390 is any amino acid
DRDGTXXXEPXXXXQXDXXXKLXXXXXXXXXXXXXXXXXXXXXXXXXNQXGLGXXXXPXXXFXXXXXXMXXXXXXXGXXFXXXXIXXXXXXXXXXXRKPXXXXXXXXXXXXXXXXXXSXXXGDRXXDXXXXXXXXXXXXXXXXXXXXXXXXXXXXXXXXXXXXWXXXXXXXXXXXXXXXXXXXXXRXXXXXRXTXETXXXXXXXLXXXXXXXXXTGXXXFXHMLXQXXXHXXXXXXXXXXGDXXXDXHHXXEDXXXXXXXXXXXAXXXKXGXXRXXXXXXXXXXXXXXXXXXXGXXLPMDXXXXXXXXDXXXRXXXXXXXXXXXXXXGXXXXXXXXHFFXSXXXXXXXXLXXXXXGXNXHHXXEXXFKXXXXXXXXXXXXXXXXXXXXXXKG

SEQ ID NO: 23508 - protein, 397 aa, Artificial sequence
  Consensus
  Variant (11)..(11): Xaa in position 11 is any amino acid
  Variant (14)..(15): Xaa in position 14 to 15 is any amino acid
  Variant (17)..(17): Xaa in position 17 is any amino acid
  Variant (19)..(19): Xaa in position 19 is any amino acid
  Variant (21)..(23): Xaa in position 21 to 23 is any amino acid
  Variant (26)..(30): Xaa in position 26 to 30 is any amino acid
  Variant (34)..(34): Xaa in position 34 is any amino acid
  Variant (36)..(37): Xaa in position 36 to 37 is any amino acid
  Variant (39)..(46): Xaa in position 39 to 46 is any amino acid
  Variant (49)..(50): Xaa in position 49 to 50 is any amino acid
  Variant (58)..(58): Xaa in position 58 is any amino acid
  Variant (60)..(60): Xaa in position 60 is any amino acid
  Variant (62)..(64): Xaa in position 62 to 64 is any amino acid
  Variant (66)..(67): Xaa in position 66 to 67 is any amino acid
  Variant (70)..(71): Xaa in position 70 to 71 is any amino acid
  Variant (73)..(77): Xaa in position 73 to 77 is any amino acid
  Variant (81)..(82): Xaa in position 81 to 82 is any amino acid
  Variant (84)..(86): Xaa in position 84 to 86 is any amino acid
  Variant (92)..(96): Xaa in position 92 to 96 is any amino acid
  Variant (98)..(98): Xaa in position 98 is any amino acid
  Variant (103)..(105): Xaa in position 103 to 105 is any amino acid
  Variant (107)..(109): Xaa in position 107 to 109 is any amino acid
  Variant (111)..(116): Xaa in position 111 to 116 is any amino acid
  Variant (118)..(120): Xaa in position 118 to 120 is any amino acid
  Variant (122)..(122): Xaa in position 122 is any amino acid
  Variant (128)..(128): Xaa in position 128 is any amino acid
  Variant (131)..(132): Xaa in position 131 to 132 is any amino acid
  Variant (135)..(135): Xaa in position 135 is any amino acid
  Variant (137)..(138): Xaa in position 137 to 138 is any amino acid
  Variant (140)..(143): Xaa in position 140 to 143 is any amino acid
  Variant (145)..(166): Xaa in position 145 to 166 is any amino acid
  Variant (168)..(169): Xaa in position 168 to 169 is any amino acid
  Variant (171)..(173): Xaa in position 171 to 173 is any amino acid
  Variant (175)..(188): Xaa in position 175 to 188 is any amino acid
  Variant (190)..(190): Xaa in position 190 is any amino acid
  Variant (192)..(192): Xaa in position 192 is any amino acid
  Variant (194)..(194): Xaa in position 194 is any amino acid
  Variant (196)..(196): Xaa in position 196 is any amino acid
  Variant (201)..(201): Xaa in position 201 is any amino acid
  Variant (203)..(203): Xaa in position 203 is any amino acid
  Variant (205)..(207): Xaa in position 205 to 207 is any amino acid
  Variant (210)..(215): Xaa in position 210 to 215 is any amino acid
  Variant (217)..(217): Xaa in position 217 is any amino acid
  Variant (220)..(221): Xaa in position 220 to 221 is any amino acid
  Variant (228)..(228): Xaa in position 228 is any amino acid
  Variant (232)..(232): Xaa in position 232 is any amino acid
  Variant (234)..(234): Xaa in position 234 is any amino acid
  Variant (236)..(243): Xaa in position 236 to 243 is any amino acid
  Variant (247)..(247): Xaa in position 247 is any amino acid
  Variant (250)..(250): Xaa in position 250 is any amino acid
  Variant (254)..(254): Xaa in position 254 is any amino acid
  Variant (258)..(258): Xaa in position 258 is any amino acid
  Variant (263)..(263): Xaa in position 263 is any amino acid
  Variant (265)..(267): Xaa in position 265 to 267 is any amino acid
  Variant (271)..(271): Xaa in position 271 is any amino acid
  Variant (276)..(276): Xaa in position 276 is any amino acid
  Variant (278)..(296): Xaa in position 278 to 296 is any amino acid
  Variant (299)..(299): Xaa in position 299 is any amino acid
  Variant (305)..(306): Xaa in position 305 to 306 is any amino acid
  Variant (308)..(308): Xaa in position 308 is any amino acid
  Variant (310)..(310): Xaa in position 310 is any amino acid
  Variant (313)..(313): Xaa in position 313 is any amino acid
  Variant (318)..(322): Xaa in position 318 to 322 is any amino acid
  Variant (324)..(324): Xaa in position 324 is any amino acid
  Variant (326)..(330): Xaa in position 326 to 330 is any amino acid
  Variant (332)..(334): Xaa in position 332 to 334 is any amino acid
  Variant (338)..(339): Xaa in position 338 to 339 is any amino acid
  Variant (343)..(343): Xaa in position 343 is any amino acid
  Variant (346)..(352): Xaa in position 346 to 352 is any amino acid
  Variant (356)..(358): Xaa in position 356 to 358 is any amino acid
  Variant (360)..(360): Xaa in position 360 is any amino acid
  Variant (365)..(366): Xaa in position 365 to 366 is any amino acid
  Variant (368)..(368): Xaa in position 368 is any amino acid
  Variant (372)..(374): Xaa in position 372 to 374 is any amino acid
  Variant (376)..(376): Xaa in position 376 is any amino acid
  Variant (378)..(378): Xaa in position 378 is any amino acid
  Variant (381)..(386): Xaa in position 381 to 386 is any amino acid
  Variant (388)..(389): Xaa in position 388 to 389 is any amino acid
  Variant (396)..(396): Xaa in position 396 is any amino acid
LFIDRDGTLIXEPXXDXQXDXXXKLXXXXXVIPXLXXLXXXXXXXXVMXXNQDGLGTXSXPXXXFXXPHXXMXXXXXSQGXXFXXXLICPHXXXXXCXCRKPXXXLXXXYXXXXXXDXXXSXVIGDRXTDXXLAXNXXIXXXXYXXXXXXXXXXXXXXXXXXXXXXWXXIXXXLXXXXXXXXXXXXXXRXAXVXRXTKETXIXVXXXLDXXXXXXIXTGXXFFDHMLXQIAXHXGXXXXXXXXGDLXIDXHHTXEDTXLALGXAXXXALGXKRGIXRXXXXXXXXXXXXXXXXXXXGFXLPMDEXXAXCXLDXSGRPXXXXXAXFXXXXXGXXXTEMXXHFFXSLXXXXXXXLHLXXXGXNDHHXXEXLFKXXXRXLXQAXXXXXXGXXLPSSKGXL

SEQ ID NO: 23509 - protein, 25 aa, Artificial sequence
  Consensus
  Variant (1)..(1): Xaa in position 1 is Leu or Val
  Variant (2)..(2): Xaa in position 2 is Phe or Leu
  Variant (3)..(3): Xaa in position 3 is Ile or Val
  Variant (9)..(9): Xaa in position 9 is Leu or Ile
  Variant (10)..(10): Xaa in position 10 is Ile or Val
  Variant (11)..(11): Xaa in position 11 is any amino acid
  Variant (14)..(14): Xaa in position 14 is any amino acid
  Variant (15)..(15): Xaa in position 15 is any or no amino acid
  Variant (16)..(16): Xaa in position 16 is Asp or Asn
  Variant (17)..(17): Xaa in position 17 is any amino acid
  Variant (19)..(19): Xaa in position 19 is Val, Ile or Leu
  Variant (21)..(22): Xaa in position 21 to 22 is any amino acid
  Variant (23)..(23): Xaa in position 23 is Asp, Glu, Ala or Asn
XXXDRDGTXXXEPXXXXQXDXXXKL

SEQ ID NO: 23510 - protein, 22 aa, Artificial sequence
  Consensus
  Variant (1)..(1): Xaa in position 1 is Tyr or Phe
  Variant (2)..(2): Xaa in position 2 is any amino acid
  Variant (3)..(3): Xaa in position 3 is Phe or Leu
  Variant (4)..(4): Xaa in position 4 is Val or Ile
  Variant (5)..(5): Xaa in position 5 is Met or Ile
  Variant (6)..(6): Xaa in position 6 is Val or Ile
  Variant (7)..(7): Xaa in position 7 is Thr or Ser
  Variant (10)..(10): Xaa in position 10 is Asp or Asn
  Variant (14)..(14): Xaa in position 14 is Thr or Ser
  Variant (15)..(15): Xaa in position 15 is any amino acid
  Variant (16)..(16): Xaa in position 16 is Ser, Ala, Asn or Leu
  Variant (17)..(17): Xaa in position 17 is Phe or Tyr
  Variant (19)..(21): Xaa in position 19 to 21 is any amino acid
XXXXXXXNQXGLGXXXXPXXXF

SEQ ID NO: 23511 - protein, 42 aa, Artificial sequence
  Consensus
  Variant (4)..(6): Xaa in position 4 to 6 is any amino acid
  Variant (7)..(7): Xaa in position 7 is Leu or Met
  Variant (8)..(8): Xaa in position 8 is Val, Ile, Leu or Met
  Variant (9)..(10): Xaa in position 9 to 10 is any amino acid
  Variant (11)..(11): Xaa in position 11 is Tyr, Trp or Phe
  Variant (12)..(12): Xaa in position 12 is Leu or Ile
  Variant (13)..(17): Xaa in position 13 to 17 is any amino acid
  Variant (18)..(18): Xaa in position 18 is Asp or Asn
  Variant (19)..(21): Xaa in position 19 to 21 is any amino acid
  Variant (23)..(23): Xaa in position 23 is any amino acid
  Variant (24)..(24): Xaa in position 24 is Val or Met
  Variant (25)..(25): Xaa in position 25 is Ile or Val
  Variant (29)..(29): Xaa in position 29 is any amino acid
  Variant (30)..(30): Xaa in position 30 is Thr or Ser
  Variant (32)..(32): Xaa in position 32 is Ile, Val, Leu or Met
  Variant (33)..(33): Xaa in position 33 is any amino acid
  Variant (34)..(34): Xaa in position 34 is Leu or Phe
  Variant (35)..(35): Xaa in position 35 is Ala or Gly
  Variant (36)..(36): Xaa in position 36 is any amino acid
  Variant (37)..(37): Xaa in position 37 is Asn, Ala or Ser
  Variant (38)..(38): Xaa in position 38 is Met, Leu or Ile
  Variant (39)..(39): Xaa in position 39 is Gly, Ala or Asn
  Variant (40)..(40): Xaa in position 40 is Ile, Leu, Val or Cys
  Variant (41)..(41): Xaa in position 41 is any amino acid
  Variant (42)..(42): Xaa in position 42 is Gly, Ala or Ser
RKPXXXXXXXXXXXXXXXXXXSXXXGDRXXDXXXXXXXXXXX

SEQ ID NO: 23512 - protein, 45 aa, Artificial sequence
  Consensus
  Variant (2)..(2): Xaa in position 2 is any amino acid
  Variant (3)..(3): Xaa in position 3 is Ala or Arg
  Variant (4)..(4): Xaa in position 4 is any amino acid
  Variant (5)..(5): Xaa in position 5 is Val, Ile or Tyr
  Variant (6)..(6): Xaa in position 6 is any amino acid
  Variant (8)..(8): Xaa in position 8 is any amino acid
  Variant (10)..(10): Xaa in position 10 is Lys, Asn or Arg
  Variant (13)..(13): Xaa in position 13 is any amino acid
  Variant (14)..(14): Xaa in position 14 is Ile or Val
  Variant (15)..(15): Xaa in position 15 is any amino acid
  Variant (16)..(16): Xaa in position 16 is Val or Ile
  Variant (17)..(17): Xaa in position 17 is any amino acid
  Variant (18)..(18): Xaa in position 18 is Val, Leu or Ile
  Variant (19)..(19): Xaa in position 19 is any amino acid
  Variant (21)..(21): Xaa in position 21 is Asp or Asn
  Variant (22)..(26): Xaa in position 22 to 26 is any amino acid
  Variant (27)..(27): Xaa in position 27 is any or no amino acid
  Variant (28)..(28): Xaa in position 28 is Ile or Thr
  Variant (29)..(29): Xaa in position 29 is any amino acid
  Variant (32)..(32): Xaa in position 32 is Leu, Val or Ile
  Variant (33)..(33): Xaa in position 33 is any amino acid
  Variant (34)..(34): Xaa in position 34 is Phe or Met
  Variant (36)..(36): Xaa in position 36 is Asp or Asn
  Variant (40)..(40): Xaa in position 40 is Asp or Glu
  Variant (42)..(42): Xaa in position 42 is Ile or Leu
  Variant (43)..(43): Xaa in position 43 is Ala, Gly or Ser
  Variant (44)..(44): Xaa in position 44 is any amino acid
RXXXXXRXTXETXXXXXXXLXXXXXXXXXTGXXXFXHMLXQXXXH

SEQ ID NO: 23513 - protein, 61 aa, Artificial sequence
  Consensus
  Variant (3)..(3): Xaa in position 3 is Leu or Ile
  Variant (4)..(4): Xaa in position 4 is any amino acid
  Variant (5)..(5): Xaa in position 5 is Ile or Val
  Variant (7)..(7): Xaa in position 7 is Asp or Glu
  Variant (10)..(10): Xaa in position 10 is Thr or Ser
  Variant (11)..(11): Xaa in position 11 is Val or Ile
  Variant (14)..(14): Xaa in position 14 is Thr or Val
  Variant (15)..(15): Xaa in position 15 is Ala or Gly
  Variant (16)..(16): Xaa in position 16 is Leu or Ile
  Variant (17)..(17): Xaa in position 17 is Ala, Val or Ser
  Variant (18)..(18): Xaa in position 18 is Leu or Ile
  Variant (19)..(19): Xaa in position 19 is Gly or Arg
  Variant (20)..(20): Xaa in position 20 is any amino acid
  Variant (21)..(21): Xaa in position 21 is Ala or Cys
  Variant (22)..(22): Xaa in position 22 is Leu, Ile or Val
  Variant (23)..(24): Xaa in position 23 to 24 is any amino acid
  Variant (26)..(26): Xaa in position 26 is Leu, Ile or Val
  Variant (27)..(27): Xaa in position 27 is Gly, Asn or Arg
  Variant (28)..(28): Xaa in position 28 is Asp, Asn or Ser
  Variant (30)..(30): Xaa in position 30 is any amino acid
  Variant (32)..(32): Xaa in position 32 is Ile or Leu
  Variant (33)..(33): Xaa in position 33 is any amino acid
  Variant (35)..(35): Xaa in position 35 is Phe or Tyr
  Variant (36)..(53): Xaa in position 36 to 53 is any or no amino acid
  Variant (55)..(55): Xaa in position 55 is Phe or Tyr
  Variant (56)..(56): Xaa in position 56 is any amino acid
  Variant (61)..(61): Xaa in position 61 is Glu or Asp
GDXXXDXHHXXEDXXXXXXXXXXXAXXXKXGXXRXXXXXXXXXXXXXXXXXXXGXXLPMDX

SEQ ID NO: 23514 - protein, 68 aa, Artificial sequence
  Consensus
  Variant (1)..(1): Xaa in position 1 is Val, Ile or Leu
  Variant (3)..(3): Xaa in position 3 is any amino acid
  Variant (4)..(4): Xaa in position 4 is Leu, Met or Phe
  Variant (5)..(5): Xaa in position 5 is any amino acid
  Variant (6)..(6): Xaa in position 6 is Thr or Ser
  Variant (7)..(7): Xaa in position 7 is Glu, His or Asp
  Variant (8)..(8): Xaa in position 8 is Met or Leu
  Variant (9)..(10): Xaa in position 9 to 10 is any amino acid
  Variant (14)..(14): Xaa in position 14 is any amino acid
  Variant (16)..(16): Xaa in position 16 is Leu, Ile, Val or Phe
  Variant (17)..(22): Xaa in position 17 to 22 is any amino acid
  Variant (23)..(23): Xaa in position 23 is Thr, Asn or Ser
  Variant (25)..(25): Xaa in position 25 is His or Asn
  Variant (26)..(26): Xaa in position 26 is Leu, Ile or Val
  Variant (27)..(29): Xaa in position 27 to 29 is any amino acid
  Variant (31)..(31): Xaa in position 31 is any amino acid
  Variant (33)..(33): Xaa in position 33 is Asp, Glu or Ala
  Variant (36)..(37): Xaa in position 36 to 37 is any amino acid
  Variant (39)..(39): Xaa in position 39 is Ser, Gly or Ala
  Variant (40)..(40): Xaa in position 40 is Leu, Cys or Ile
  Variant (43)..(43): Xaa in position 43 is Ala, Val or Ser
  Variant (44)..(44): Xaa in position 44 is Phe or Leu
  Variant (45)..(45): Xaa in position 45 is Gly or Ala
  Variant (46)..(46): Xaa in position 46 is Arg or Lys
  Variant (47)..(47): Xaa in position 47 is Thr, Ala or Ser
  Variant (48)..(48): Xaa in position 48 is Leu or Val
  Variant (49)..(49): Xaa in position 49 is Arg, Lys or Asn
  Variant (50)..(50): Xaa in position 50 is Gln, Met or Lys
  Variant (51)..(51): Xaa in position 51 is Ala or Cys
  Variant (52)..(52): Xaa in position 52 is Ile, Leu or Val
  Variant (53)..(53): Xaa in position 53 is any amino acid
  Variant (54)..(55): Xaa in position 54 to 55 is any or no amino acid
  Variant (56)..(56): Xaa in position 56 is Val, Ile or Arg
  Variant (57)..(57): Xaa in position 57 is any amino acid
  Variant (58)..(58): Xaa in position 58 is Gly, His or Ser
  Variant (59)..(60): Xaa in position 59 to 60 is any amino acid
  Variant (61)..(61): Xaa in position 61 is Leu, Met or Ile
  Variant (62)..(62): Xaa in position 62 is Pro or Ala
  Variant (63)..(64): Xaa in position 63 to 64 is Ser or Thr
  Variant (67)..(67): Xaa in position 67 is any amino acid
  Variant (68)..(68): Xaa in position 68 is Leu or Ile
XGXXXXXXXXHFFXSXXXXXXXXLXXXXXGXNXHHXXEXXFKXXXXXXXXXXXXXXXXXXXXXXKGXX

SEQ ID NO: 23515 - DNA, 1347 bp, Escherichia coli
  CDS (1)..(1347)
atggtcatgagccagaaaaccctgtttacaaagtctgctctcgcagtcgcagtggcacttatctccacccaggcctggtcggcaggctttcagttaaacgaattttcttcctctggcctgggccgggcttattcaggggaaggcgcaattgccgatgatgcaggtaacgtcagccgtaaccccgcattgattactatgtttgaccgcccgacattttctgcgggtgcggtttatattgacccggatgtaaatatcagcggaacgtctccatctggtcgtagcctgaaagccgataacatcgcgcctacggcatgggttccgaacatgcactttgttgcaccgattaacgaccaatttggttggggcgcttctattacctctaactatggtctggctacagagtttaacgatacttatgcaggcggctctgtcgggggtacaaccgaccttgaaaccatgaacctgaacttaagcggtgcgtatcgcttaaataatgcatggagctttggtcttggtttcaacgccgtctacgctcgcgcgaaaattgaacgtttcgcaggcgatctggggcagttggttgctggccaaattatgcaatctcctgctggccaaactcagcaagggcaagcattggcagctaccgccaacggtattgacagtaataccaaaatcgctcatctgaacggtaaccagtggggctttggctggaacgccggaatcctgtatgaactggataaaaataaccgctatgcactgacctaccgttctgaagtgaaaattgacttcaaaggtaactacagcagcgatcttaatcgtgcgtttaataactacggtttgccaattcctaccgcgacaggtggcgcaacgcaatcgggttatctgacgctgaacctgcctgaaatgtgggaagtgtcaggttataaccgtgttgatccacagtgggcgattcactatagcctggcttacaccagctggagtcagttccagcagctgaaagcgacctcaaccagtggcgacacgctgttccagaaacatgaaggctttaaagatgcttaccgcatcgcgttgggtaccacttattactacgatgataactggaccttccgtaccggtatcgcctttgatgacagcccagttcctgcacagaatcgttctatctccattccggaccaggaccgtttctggctgagtgcaggtacgacttacgcatttaataaagatgcttcagtcgacgttggtgtttcttatatgcacggtcagagcgtgaaaattaacgaaggcccataccagttcgagtctgaaggtaaagcctggctgttcggtactaactttaactacgcgttctga

SEQ ID NO: 23516 - protein, 448 aa, Escherichia coli
MVMSQKTLFTKSALAVAVALISTQAWSAGFQLNEFSSSGLGRAYSGEGAIADDAGNVSRNPALITMFDRPTFSAGAVYIDPDVNISGTSPSGRSLKADNIAPTAWVPNMHFVAPINDQFGWGASITSNYGLATEFNDTYAGGSVGGTTDLETMNLNLSGAYRLNNAWSFGLGFNAVYARAKIERFAGDLGQLVAGQIMQSPAGQTQQGQALAATANGIDSNTKIAHLNGNQWGFGWNAGILYELDKNNRYALTYRSEVKIDFKGNYSSDLNRAFNNYGLPIPTATGGATQSGYLTLNLPEMWEVSGYNRVDPQWAIHYSLAYTSWSQFQQLKATSTSGDTLFQKHEGFKDAYRIALGTTYYYDDNWTFRTGIAFDDSPVPAQNRSISIPDQDRFWLSAGTTYAFNKDASVDVGVSYMHGQSVKINEGPYQFESEGKAWLFGTNFNYAF

SEQ ID NO: 23517 - DNA, 1212 bp, Aquifex aeolicus VF5
  CDS (1)..(1212): transl_table=11
gtgaaaagattagccctttctgcacttctgatcccggctatttccttagcggttggatatagagttcctgaacagtccattcgttccactggaaccgcagcttcttacacctcaactgtggagcacgccgattctgtacacttcaaccctgcaaacatgtcatttctgaaggacaggtggtactttgaactgggaagcagattaatatatctgcccaaaataaagtttaagggaaacgttcttgaccctgttcaaaaacgctacgtttacgtggatacgcgttccgaggacgaaacacacttcgtcccgtacttccacatggtattccctgaggttaaaaatttcaggttcggtatttcctttgttacacctgcaggtctctccaagaggtgggacgatgttccggtgagtgcctacgctaagaggtttacactaaaggtttacgaacttgactttgccctgtcgtacagggtaaacgaaaagttctccgtaggtggaggtttgaggggagtttacgcaagcggaaaagtgaaactctattatccgaatgtttacaacttaaaacttgatggggatacagatgtaaagcccggttactacctctccttcactttcaagcccactgagaactttaacatatccgcggtatacaggtcaaaagttgatttggatatagagggtgatgcgaagggaaatataggattacatagagtgaatacttcgggagatgtcagcgttcctcttccggcagaattgagaatttcaggttcatacgtgtggaataacactacctttgagcttactctcgagagaacgttctggtcctcctacgactacctcgacttcaattacaaggatcctgtcgcagaaaaccagttcggaaaacccatagagaaggattgggaagatgtgaacacatacaggttcggattacagcacaaatttggcgatagctttaagggactgctcggtatagcgtacagtgaatctccgataccttcaaaaagcttagggtttgaattgccggagcccaaaagcgtatggattctttccctcggagggatatacaaccttacgaaaaactgggaagtaggattctcttacctataccttgcaaaggacagcagaaaggttgataaccagaggataaagggagagttttcggatataagcgctcacctctttacgctttcagttggggcaaagttttag

SEQ ID NO: 23518 - protein, 403 aa, Aquifex aeolicus VF5
MKRLALSALLIPAISLAVGYRVPEQSIRSTGTAASYTSTVEHADSVHFNPANMSFLKDRWYFELGSRLIYLPKIKFKGNVLDPVQKRYVYVDTRSEDETHFVPYFHMVFPEVKNFRFGISFVTPAGLSKRWDDVPVSAYAKRFTLKVYELDFALSYRVNEKFSVGGGLRGVYASGKVKLYYPNVYNLKLDGDTDVKPGYYLSFTFKPTENFNISAVYRSKVDLDIEGDAKGNIGLHRVNTSGDVSVPLPAELRISGSYVWNNTTFELTLERTFWSSYDYLDFNYKDPVAENQFGKPIEKDWEDVNTYRFGLQHKFGDSFKGLLGIAYSESPIPSKSLGFELPEPKSVWILSLGGIYNLTKNWEVGFSYLYLAKDSRKVDNQRIKGEFSDISAHLFTLSVGAKF

SEQ ID NO: 23519 - DNA, 1299 bp, Vibrio cholerae O1 biovar eltor str. N16961
  CDS (1)..(1299): transl_table=11
atgaaaaccaataagactctcctctcctgtgctgtggctttcggtttagccagcgtttctacctttactcaagcggcaggtttccagcttgctgaatattcagcaacgggtcttggccgtgcttacgccggtgaagccgcgatggcagacaatgccagcgcacaatggcgcaaccctgcaatgctgacctatttagaaggcactcaagtttctgccggcgcaatttacgtgaatccaaacgtggatgttgagggtacagtaaaccacgcacaactaggtaaaactcacgcatcttcaaacgattttgcccacgatgcagtgattccgaatttctatctgtcacaccagttaaacgaacaaatggcactgggttttgctcttggtactaactacggtatggaaaccgatctgggtactgagtttgcagcctctcactttggcaaccaagcgagcgtgatcagcaaagaagcgaacctcaatattgcttaccaaatcttgcctcaattgagcattggtggtggtgtgcgttatgtgatgggtgaaggtcatttcggtgcaactgcgccagcaaaaaatctgattcgtcatcctgttactaacaacgtcatgactttacctaaaggtacaaccttaaaatatatggaaggtgaagataactcttggggttggcaagtaggcagtgcatggcaaatcaatcaagatcaccgcgtaggtttcgcctataaatcggaagtggtgatggattttgaaggccatgcagaaggagtcagttacggtagttataaacctggcatgatgtctgtgactctaccagcgacggctgaactggcaagcttccaccaactcaatgaccaatgggcgattcacgctagcattaactggacagattggagttcattcaaagagttgacggctgtgttcccagaaaaatctgacctcatcaaatcagaaaactgggaagacaactaccgctttgctttgggcacaacgtatcaatacgatgctaaactcgctctgcgtgcgggcgtcgcatacgacacatcagcggtagacgataaaaaccgcacagcaaccatcccggaaacagaccgtacttgggtaagtgtcggcggtagttatgttgctacgccacaactgactctcgatgccggttttacctatatctttgcgaaagatgccaccatcaacgaacctcgtgacgcttcagaccaaactgcagccgcaatcggtggtgcatttacaggtaatgtatcaggcaatgtatggctgatcggtgttcaagcgaactaccgcttctaa

SEQ ID NO: 23520 - protein, 432 aa, Vibrio cholerae O1 biovar eltor str. N16961
MKTNKTLLSCAVAFGLASVSTFTQAAGFQLAEYSATGLGRAYAGEAAMADNASAQWRNPAMLTYLEGTQVSAGAIYVNPNVDVEGTVNHAQLGKTHASSNDFAHDAVIPNFYLSHQLNEQMALGFALGTNYGMETDLGTEFAASHFGNQASVISKEANLNIAYQILPQLSIGGGVRYVMGEGHFGATAPAKNLIRHPVTNNVMTLPKGTTLKYMEGEDNSWGWQVGSAWQINQDHRVGFAYKSEVVMDFEGHAEGVSYGSYKPGMMSVTLPATAELASFHQLNDQWAIHASINWTDWSSFKELTAVFPEKSDLIKSENWEDNYRFALGTTYQYDAKLALRAGVAYDTSAVDDKNRTATIPETDRTWVSVGGSYVATPQLTLDAGFTYIFAKDATINEPRDASDQTAAAIGGAFTGNVSGNVWLIGVQANYRF

SEQ ID NO: 23521 - DNA, 1287 bp, Vibrio cholerae O1 biovar eltor str. N16961
  CDS (1)..(1287): transl_table=11
atgaacaacatgcgtctgtttaaaaaatctctgcttgccgtgacggtaacgctagccacacaacaagcgtttgcagcaggtttccagctcaacgcacaatctgctaccggcctaggtcgcgcttttgcgggtgatgccgttatcgccgataacgcagccgtaatgtctcgcaacccagcggcgatggcactgtttgatgagatggcgctctctcttggttttgaaaccattaccaccatgattgacgttaaaaatgtctcttatcgaggtgttctcggtaactcagtttctgttcaagacacggatgacgtaggtggtacttccgttgcacctaatattcatttgatcgttccagtcaatgaacagtttgcttggggggttaatgcttattcaaactttggtacaaaaactgagttttctgattcttatccagcctctgaatacggtggcttaacagacgttaaaagctttaacttaggcctagcaggttcttatcgcgtcaacaaagaatggagttttggtgctggtttagacctgatttatgggcaaggcaccatgaaacgtattgccggaaccagtttcccagcaagtacaattgtggtgaacccgacgaccgttatcccagctcgaggcacatcactactcaacgtcgataaagcggatggttgggcagtaggttttaacttgggtacagtttacgaaatggatgagaataaccgctttggtttgtcttaccgctatagcccagaatttaaagctaaagacgattacggacaagagatcacgctaccactaccggatatcgctgagttctctggcttccacaaaattgagaatactcagtttgccgtacactatagcgtacagtggattggctggagtgctttcgacaaaattgagttccgcaaccttgtaacgtctcgctcttctgttggcgctctaaccaaaggcagctacgataagatgtatgagtggcaagatggctggcactactctatcggtggcacatactacttaaatagtgattggacactgcgtgcaggctatatgtacgatactagcgcacaagattcacgtacttctatctctgttcctgattcagatcgccagtggttatcagcaggctttacctataacatcgatgacaaatcaaacgtagactttggatttacttacttaatgggtaaagatgtcgcagtttccgaaaatgatgcgggttctaagctaaccgcaacaacccacgcagacgcaatcctgttgggcttacaatacagccgtacgttttaa

SEQ ID NO: 23522 - protein, 428 aa, Vibrio cholerae O1 biovar eltor str. N16961
MNNMRLFKKSLLAVTVTLATQQAFAAGFQLNAQSATGLGRAFAGDAVIADNAAVMSRNPAAMALFDEMALSLGFETITTMIDVKNVSYRGVLGNSVSVQDTDDVGGTSVAPNIHLIVPVNEQFAWGVNAYSNFGTKTEFSDSYPASEYGGLTDVKSFNLGLAGSYRVNKEWSFGAGLDLIYGQGTMKRIAGTSFPASTIVVNPTTVIPARGTSLLNVDKADGWAVGFNLGTVYEMDENNRFGLSYRYSPEFKAKDDYGQEITLPLPDIAEFSGFHKIENTQFAVHYSVQWIGWSAFDKIEFRNLVTSRSSVGALTKGSYDKMYEWQDGWHYSIGGTYYLNSDWTLRAGYMYDTSAQDSRTSISVPDSDRQWLSAGFTYNIDDKSNVDFGFTYLMGKDVAVSENDAGSKLTATTHADAILLGLQYSRTF

SEQ ID NO: 23523 - DNA, 1332 bp, Pasteurella multocida subsp. multocida str. Pm70
  CDS (1)..(1332): transl_table=11
atgttttattatacaaataacttaaataacaaaggtctcataattatggcgaaaactagcaaatttactcaaactcttcttgcttccgcgttagcggtggtcgcgggtagcgcttctgctgccgctttccaactagcagaagtgtcaacatccggtttagggcgtgcttatgcgggggaagccgcgattgcagataatgcggcagtggttgccacgaacccagcattaatgagcttattgaaacaacctgaaatttctgttggggcaatttatgtggacccaaatattaatttaacctcaccaatgccaggattcgcctataaaaatattgcgccgaatgcgttagttccgacagtgtatggtgtgtatccaattaacgaaaaattcgctgtgggcggtggattgaatgttaactatggtttagccaccgagtttgatgacaaatatgcgggcggctttttaggcggtaaaaccgatttgaccgcaattaactttaacttaagcggtgcctatcgtgttacggagaagttcagcgttggcttaggcttaaacgcagtgcatgcgaaagcgaaacttgagcgttatgcaggtgtggctttgaaattaaaagtaccaaatgtagctcaacttgcagcattaccagcgaataccgtaatttcaaagctacaaggtgataaatggggctttggctggaatgccggtttggtatatgaatttaatgaacgtaaccgcattggtatcgcctatcattcacaagtggatattaactttaaagggcagtattcaaatcacttcccattagccgctgcagctttgctccagaccaagggcattaccgcgacaggtggcaaagaaatcccgggtaccttacatttaccgctaccagcttactgggaaatttctggttatcataaaatgaccgatcgttttgcaatgcactatagctataaatatacgcaatggagcaaatttaaagagttacgtgcaaaaggtacggacggtaagaccttatttagcaaaacagaagagtttcgtgattcttcacgtattgcccttggtgcgagctatgatgtaaccgatgcattaacggtacgtacgggtattgcgtatgatgaaagtgctgcagatgagcataacaccatttctattccagatacggatcgtacttggtttagtgtgggggccacttaccgctttacgccaaatgtatctattgatgccggttttgcacatttaaaaggcaagaagaatacctttaaagaagaaggggttccatttactagcaaagccagtgcgaacctttatggtttaaacgtgaattaccgtttctaa

SEQ ID NO: 23524 - protein, 443 aa, Pasteurella multocida subsp. multocida str. Pm70
MFYYTNNLNNKGLIIMAKTSKFTQTLLASALAVVAGSASAAAFQLAEVSTSGLGRAYAGEAAIADNAAVVATNPALMSLLKQPEISVGAIYVDPNINLTSPMPGFAYKNIAPNALVPTVYGVYPINEKFAVGGGLNVNYGLATEFDDKYAGGFLGGKTDLTAINFNLSGAYRVTEKFSVGLGLNAVHAKAKLERYAGVALKLKVPNVAQLAALPANTVISKLQGDKWGFGWNAGLVYEFNERNRIGIAYHSQVDINFKGQYSNHFPLAAAALLQTKGITATGGKEIPGTLHLPLPAYWEISGYHKMTDRFAMHYSYKYTQWSKFKELRAKGTDGKTLFSKTEEFRDSSRIALGASYDVTDALTVRTGIAYDESAADEHNTISIPDTDRTWFSVGATYRFTPNVSIDAGFAHLKGKKNTFKEEGVPFTSKASANLYGLNVNYRF

SEQ ID NO: 23525 - DNA, 1275 bp, Pseudomonas aeruginosa PAO1
  CDS (1)..(1275): transl_table=11
atgaaaacaatatggtttaaaacctctctcgcactgaccattagcgctgtctccacctacaccctcgccaacggcatcgccatcaacgaacagagcgccagcggcgccggcaccgcctacgccggccgcgcctcgtccgcgctcgatgccagcaccatctacggcaacccggccggcctgtccaagctgaaacgcaccgaagtcagcggcggtctggccatcgtcaaggccaaggacgacatcagccaggcccacagcaccgcccagggcagcaacaagggcgactcggtaccgctggccgccgtaccgttcggctacttctccacgccgatcaacgaagatttcactttcggcctgggcatctacgtgccctacggcatcatcaacgattacgaaaacggcttcatgggcagctcccacggctcctatagcaaggtgcaggtgatcaccgtgcagccgaccatcgcctggaagatcaacgacaaggtttccgtcggcttcggtccgaccttcaaccgcatcgacggccagttgaagaacaccctggccaccaatggcctgctcggcagcaacggcgataccaagatcaacatcaagggcgacgacaccgccatcggctacaacgtcggcgtgatggtcgacctgaccgacgacaccacctggggcctgacctaccactccaaggtcaagtaccacctgggcggcaacaccgaagtgaagaacgctccgggtgccctgggcctgaacggcaagtacgatgccaagctggacatcaccctgccggaatcggtggatacctccatcacccacaagttcgacgacaagtggacgggctacctgggcgccgtctggacccgctggagccgcctggagaagatcgaggtgcgcaacagcggcgtaccggcgctcggccaggccctgggcttcaacaccatcggcgaagacctgaactggcgcgacacctggtccttctcggtaggtacctcctaccaggccaccccggagtgggtgctgcgcaccggctttgcctacgagccgtcgccgacctccaacgaggaccgcaacgtgcgcatcccggtgggcgaccgcaaggtcttcaccgtcggtgccggctggtcgccgaaccaggacctgaccgtcgacgtggcctacgcctacctgtgggaaaccaccgccggcgtcaaccaggaaggcagcgccctgcagccggcctacagcgccaagtacgacaacagcgcgcatggcctgaccgcccaggtcacctatcgcttctga

SEQ ID NO: 23526 - protein, 424 aa, Pseudomonas aeruginosa PAO1
MKTIWFKTSLALTISAVSTYTLANGIAINEQSASGAGTAYAGRASSALDASTIYGNPAGLSKLKRTEVSGGLAIVKAKDDISQAHSTAQGSNKGDSVPLAAVPFGYFSTPINEDFTFGLGIYVPYGIINDYENGFMGSSHGSYSKVQVITVQPTIAWKINDKVSVGFGPTFNRIDGQLKNTLATNGLLGSNGDTKINIKGDDTAIGYNVGVMVDLTDDTTWGLTYHSKVKYHLGGNTEVKNAPGALGLNGKYDAKLDITLPESVDTSITHKFDDKWTGYLGAVWTRWSRLEKIEVRNSGVPALGQALGFNTIGEDLNWRDTWSFSVGTSYQATPEWVLRTGFAYEPSPTSNEDRNVRIPVGDRKVFTVGAGWSPNQDLTVDVAYAYLWETTAGVNQEGSALQPAYSAKYDNSAHGLTAQVTYRF

SEQ ID NO: 23527 - DNA, 1392 bp, Pseudomonas aeruginosa PAO1
  CDS (1)..(1392): transl_table=11
ttgccattgctctgcgccctgatcgtcggcggattgttcggcacgtcccaggcgcaagccggcggcttcatggtgccgaccaccaacacggcgggctggggccgtgcgatggcaggcggctcgctgtttcccaacgatccgagcgccgcgttcaacaacccggcggccatggcgttcatcgacaagcggatcgcccagttgacggtcaactacgccgatatcgacatcaagtacaacggcgatgcctacgactaccagggtaatcccatgaccggcggctaccaggacgggccgggcacccccgagctgggtaccaacgatggtggccaggctggattcggcgcgtggctgccgaccggcttcctggtcgtaccgatcaacgaccgcttcgccttcggtctgagccaggtcgttccgatgggaatgcgcagcacctgggacccgaactggaaaggccgcgatttcgcggtggacaccaagatcgagacgatcggcctgaccggctccctgtcgttcaaggtcaacgacaacttctccctgggcgccggggtgatcatccagcgcacctccggcttcgtcagccagaacctcgatctctatgcctcggccgccaactccccgggcatgggcgggattccgttcccggcctcgaactcgtccgcgctgatgcgggtcaaggtggacaacacctcgcccggcttcttcgccggcgcggtttggaagccgaccgaccgcgacaccctgggcttcgcctaccacgcgaagatccgcaacaagctgaaggggcactacaacctctacgaccacgacggtggactgaccgagggcgccatcgagggcggcaccccgggcctggcctatccgggcctggacctgcgcatgggcgcttccgcctcggcgcgcctggatatccccgcctacgcctcactggattgggtacaccagttcaacgaccgtctgagcctgggcgccagcgccacctggaccgagtggtcgtcgttccaggacctgaccctcaaatcccacggcaacacgatcgtctccattccctacacctaccggaacacctggaccctggcggtgggcggcgactacaaggtgaccgaccagtggaccatgcgcgccggggtcgcctacgaccagacgccgacccacaatgccacccgcgacccgcggattcccgacggcgatcgctacttcgcctccctgggcgccggctatcgcttccagtcgatgccggagttgtcgatcgacgcggcctactcgcggcagttcgtcaaggaggtgccgttgaagacggtcaaccaggatcgcctgggcggcggacgcctggatggcagggcaaccagcaagggacaggtgttcagcctgtccgcgacctacgacttctag

SEQ ID NO: 23528 - protein, 463 aa, Pseudomonas aeruginosa PAO1
MPLLCALIVGGLFGTSQAQAGGFMVPTTNTAGWGRAMAGGSLFPNDPSAAFNNPAAMAFIDKRIAQLTVNYADIDIKYNGDAYDYQGNPMTGGYQDGPGTPELGTNDGGQAGFGAWLPTGFLVVPINDRFAFGLSQVVPMGMRSTWDPNWKGRDFAVDTKIETIGLTGSLSFKVNDNFSLGAGVIIQRTSGFVSQNLDLYASAANSPGMGGIPFPASNSSALMRVKVDNTSPGFFAGAVWKPTDRDTLGFAYHAKIRNKLKGHYNLYDHDGGLTEGAIEGGTPGLAYPGLDLRMGASASARLDIPAYASLDWVHQFNDRLSLGASATWTEWSSFQDLTLKSHGNTIVSIPYTYRNTWTLAVGGDYKVTDQWTMRAGVAYDQTPTHNATRDPRIPDGDRYFASLGAGYRFQSMPELSIDAAYSRQFVKEVPLKTVNQDRLGGGRLDGRATSKGQVFSLSATYDF

SEQ ID NO: 23529 - DNA, 1401 bp, Neisseria meningitidis MC58
  CDS (1)..(1401): transl_table=11
atgaccccttccgcactgaaaaaaaccgtcctgctgctcggcactgcctttgccgccgcatccgtccacgcatccggctaccacttcggcacacagtcggtcaacgcgcaaagcacggcaaatgccgccgccgcagaagccgccgacgcatcgaccatcttctacaaccctgccggcctgaccaaactcgacagcagccagatttccgtcaacgccaacatcgtgctgcccagcattcattatgaggcggattccgccaccgactttaccgggcttcccgtccaaggttcgaaaagcggcaaaatcaccaaaaccacggtcgcgccccacatctacggcgcatacaaagtcaacgacaatctgaccgtgggcttgggcgtgtacgtccccttcggctctgccaccgaatacgaaaaagattccgtgttgcgccacaacatcaacaaactcggtctgaccagcatcgccgtcgaacctgtcgccgcgtggaaactcaacgaccgccattccttcggcgcaggcatcatcgcccaacatacttccgccgaactgcgcaaatatgccgactgggggattaagagtaaagcagagatattgacggcaaaaccgcccaaacctaacggtgtagccgaagctgcaaaaattcaggccgacggacacgccgatgtcaaaggcagcgattggggcttcggctaccaactggcgtggatgtgggacatcaacgaccgtgcgcgcgtgggcgtgaactaccgttccaaagtctcgcacacgctcaaaggcgatgccgaatgggcggcagacggcgcggcggcgaaagcaatgtggagtacgatgcttgcagcaaacggctacacggcgaatgaaaaagcccgcgttaaaatcgttacgcctgagtctttgtccgtacacggtatgtacaaagtgtccgataaagccgacctgttcggcgacgtaacttggacgcgccacagccgcttcgataaggcggaactggtttttgaaaaagaaaaaaccgtcgtcaaaggcaaatccgaccgcaccaccatcacccccaactggcgcaacacctacaaagtcggcttcggcggttcttatcaaatcagcgaaccgctgcaactgcgcgccggcatcgcttttgacaaatcgcccgtccgcaacgccgactaccgcatgaacagcctacccgacggcaaccgcatctggttctccgccggtatgaaataccatatcggtaaaaaccacgtcgtcgatgccgcctacacccacatccacatcaacgacaccagctaccgcacggcgaaggcaagcggcaacgatgtggacagcaaaggcgcgtcttccgcacgtttcaaaaaccacgccgacatcatcggtctgcaatacacctacaaattcaaataa

SEQ ID NO: 23530 - protein, 466 aa, Neisseria meningitidis MC58
MTPSALKKTVLLLGTAFAAASVHASGYHFGTQSVNAQSTANAAAAEAADASTIFYNPAGLTKLDSSQISVNANIVLPSIHYEADSATDFTGLPVQGSKSGKITKTTVAPHIYGAYKVNDNLTVGLGVYVPFGSATEYEKDSVLRHNINKLGLTSIAVEPVAAWKLNDRHSFGAGIIAQHTSAELRKYADWGIKSKAEILTAKPPKPNGVAEAAKIQADGHADVKGSDWGFGYQLAWMWDINDRARVGVNYRSKVSHTLKGDAEWAADGAAAKAMWSTMLAANGYTANEKARVKIVTPESLSVHGMYKVSDKADLFGDVTWTRHSRFDKAELVFEKEKTVVKGKSDRTTITPNWRNTYKVGFGGSYQISEPLQLRAGIAFDKSPVRNADYRMNSLPDGNRIWFSAGMKYHIGKNHVVDAAYTHIHINDTSYRTAKASGNDVDSKGASSARFKNHADIIGLQYTYKFK

SEQ ID NO: 23531 - DNA, 1344 bp, Xylella fastidiosa 9a5c
  CDS (1)..(1344): transl_table=11
atgattagacatgttttcaccttagtcaacgttactgcactaacgctaagcatcactggtgtgctctacatcggtaatgcgcacgctgctgctttccaattaaaggagaacagcgctaaagctctgggtcggtcattcgcaggcgcggcaagcgcccaagacgacgccgccatcattgtcaacaaccctgccggcatgcgccaactcgacggacgacaattccaggccgatctgagcacggtcagattttccgccgaatatcgtgggaatccaggaatttatcgcaatggcaacacaatcggtggcggcaatggtggtgatgccggcatggtggcactgctgcctgactcctatttccacatgcctttgggcgataacaacaacgtgcatttaggggcaacgctcaacgcaccattcggtttcagtacaaaatacgatcgcaactggacaggacgctatcacggcatctatagcaagttacaggcaatcgatctaggcatagccgtttcctatgacgttaacccgtacgtgtcgttcggcggtgcagtgtttgctgaacgcttgaacgtggacctgagtaatgcgatcgacttcgggagcattctaaatgcacgtcacgtaccaaacttctccccgggtagtgccgatggttactcacacatcgaaggtcacgataccagcaggggcttcacactggggggcttgttcagtcccgatgaaaagacccatcttggcttcagctaccggtctcaggttgaacacaacgtcaacaatggaaacgctcactttgctgtgcctgagaacgctgctgcagtgctggcagtggctgcaacggggacattcatcaatacaaaaatcaagtccacgatccgcctacctgccagcgcaacaaccagcttcactcatgccattgatgaccgatggtccataatggctgaagtcactcggactgcctggagcaagttcgacaaaatcaccattcatttcgcatcctctcagcccaacaacgcactgaatttttcctatcgagataccacttttgttgctctcgggaccgaatatcggttcagcgacatgctgacgctgcgtggtggcttgggttatgaccagacaccgaccaccgccgaataccgcagcgtacgggtgcccgacaacaaccgcacctggatctcactcggtatgacttggaaaccatcaaagcaaaccgattacaacatcgggtatgcacatctgtttatcggtcatccaactatcacgcaaatcaacgcaacagctagcaccttggtgggtgattacaacatcaataccgacttacttgcaatttcaatcaaccacaagttctaa

SEQ ID NO: 23532 - protein, 447 aa, Xylella fastidiosa 9a5c
MIRHVFTLVNVTALTLSITGVLYIGNAHAAAFQLKENSAKALGRSFAGAASAQDDAAIIVNNPAGMRQLDGRQFQADLSTVRFSAEYRGNPGIYRNGNTIGGGNGGDAGMVALLPDSYFHMPLGDNNNVHLGATLNAPFGFSTKYDRNWTGRYHGIYSKLQAIDLGIAVSYDVNPYVSFGGAVFAERLNVDLSNAIDFGSILNARHVPNFSPGSADGYSHIEGHDTSRGFTLGGLFSPDEKTHLGFSYRSQVEHNVNNGNAHFAVPENAAAVLAVAATGTFINTKIKSTIRLPASATTSFTHAIDDRWSIMAEVTRTAWSKFDKITIHFASSQPNNALNFSYRDTTFVALGTEYRFSDMLTLRGGLGYDQTPTTAEYRSVRVPDNNRTWISLGMTWKPSKQTDYNIGYAHLFIGHPTITQINATASTLVGDYNINTDLLAISINHKF

SEQ ID NO: 23533 - DNA, 1299 bp, Caulobacter crescentus CB15
  CDS (1)..(1299): transl_table=11
atgtctcttacgcgtacccgcctcgccgtcggcgtggctttcgtggcgctcgtcgccgcctcccaggcctccgcttcggccttctatctgcaggaacaatcggttcgcggcacgggccgcgcctattcgggcgaagtcgccgacaagggcgtcggcagcctgtggtggaacccggcgtcgatcgccggcatcgcccgcagcgaagcccacttcggcctgaaccagatcctggtgaactccgaggtcaccaacaccggctccagcatcacccgcccggtccccccggccggcctgaccactgcggtcggcggcgccgacgccgccttcgacccgatcaacaacggcatcgtgccgaacttcggcgccgcctggaagatcaacgacaagctctcgctgggcctgtcggtcgccgcgccctacaacttcaccaccgagtacaccgccaacagctggacccgctacgacgcgctgaagtcgcagctgcggaccgtcaatgtcgagggcgtggtcgcctatcgcgtcaatgacatgctggacctgggccttggcgtgacggcgatgtacgccgacgccgaactgaccaacgccctgcccaacatctcgccgctgcaagccgatggcctgcaatcgctgaagggtgacggcttcgcctatggctacagcgtcggcgcgcaactgcacccgtccaagagcctgacgatcggcgccagctatcgcagcaaactcgaccacaagctggacggcacggtgaaggtctcgggcctgctggctccgatccccgccgccagcaacttcacggtcgacggccaggccaagatcaccctgccctggatcgccaacctcggcgcgcgctgggcggtgaatgaccagtggaccctgaacggttcggtcagccgcgtgggctggagcgagttcgacgccatccgcgtcagcttcgccggcggcggctcgaccagcccccaggactataaggacgtcaccacctacgcggccggcgtcgactaccaggcctcgcctcgtctgacgctgcgggccggcgtccagtatgacccgaccccgaccccggagatcggccgcaccgcccgcgtgccggacggcgaccgcatgatgtacgccaccggcgcgacctgggctgcgaccgagaccctgcagctcgacgccgcgatcagctacatcgcgttcgacaagagccagatcaatcgcaccgacgtcaccgccaccagctcgaccgtccgcctgcgcggcgatgtcgagggttcggccgtcgtgctcgcggccggcgcgcgcttcagcttctaa

SEQ ID NO: 23534 - protein, 432 aa, Caulobacter crescentus CB15
MSLTRTRLAVGVAFVALVAASQASASAFYLQEQSVRGTGRAYSGEVADKGVGSLWWNPASIAGIARSEAHFGLNQILVNSEVTNTGSSITRPVPPAGLTTAVGGADAAFDPINNGIVPNFGAAWKINDKLSLGLSVAAPYNFTTEYTANSWTRYDALKSQLRTVNVEGVVAYRVNDMLDLGLGVTAMYADAELTNALPNISPLQADGLQSLKGDGFAYGYSVGAQLHPSKSLTIGASYRSKLDHKLDGTVKVSGLLAPIPAASNFTVDGQAKITLPWIANLGARWAVNDQWTLNGSVSRVGWSEFDAIRVSFAGGGSTSPQDYKDVTTYAAGVDYQASPRLTLRAGVQYDPTPTPEIGRTARVPDGDRMMYATGATWAATETLQLDAAISYIAFDKSQINRTDVTATSSTVRLRGDVEGSAVVLAAGARFSF

SEQ ID NO: 23535 - DNA, 1341 bp, Xanthomonas axonopodis pv. citri str. 306
  CDS (1)..(1341): transl_table=11
atgtctaccgcttccactctcagccgcgccaccctcttggccgtcggtatcgctggcgtgctggccgttggtcaggcgcacggcgccgcgttccagctgaaggaaaacagcgccaagggccttggccgcgcattcgcaggttcgggcagcgccccggatgatgcctccatcatcgccaccaacccggccggcatgcgccagctggacggccgcctgttccaggccgacgtcagcgccatcagcttctcggccaagttccagcccgacaccgcggcctacgccaacggcgcgccggtgtccggcggcaacggcggcgacgccggcatgatcgcgccggtcccggcgatgtacttccacgtgccgttcggcgagaacgacaacatgcacctgggcacctcgctgaccgtgccgttcggcttcaagaccgaatacgaccgcgactgggtcggccgctaccacggcaccaagaccgagctgcaggcgatcgacttcaacgtcgcgttctcctatgacgtgaacccgtacgtgtccttcggtgcctcggtgttcgccgagcgtctggatatcgacctggccaacgcggtggatttcggcagcgtgctggctgcgcgccgcgtgccgggcttcgcgccgggcagcgccgatggctactcgcgcatcaagggcgacagcaccgaagtgggcttcaccctgggcggcttgttcagcatcgatgagaacacccacatcggcttcagctaccgctcgcaggtggaacacaagatcaccgacggcaccgccgacttcaccgtgccgggcagtgctgccgccgtgctgagcgtggccgcaccgggtaccttcgtggataccaagggccgcgccaccgtcaagctgccggccagcgccaccgccagcttcacgcataacgtgaacgagcagtggtcgatcatggccgacgtcacccgcaccgcctggagcaagttcgaccaggtgaccgtggacttcgcttccaaccagcccgacagcgtgctggacttctcctaccgcgacaccaccttcgcctcgatcggtgccgactaccgcctgagcgatacggtgaccctgcgcggcggcctggcgtacgaccaaaccccgaccacggccgaacaccgcgacgtgcgcgtgccggacgcgagccgcaagtgggtttcgctgggtatgagctggcgtccgtcggcgcagaccgagtacaacttcggctacacccacctgttcaccagcgacccgaccagcgacacccgcagcgccacgggcgaccgtcttgccggcagctacgacgtgaagggcgacgtgctggccgcgtcgatcaactacaagttctga

SEQ ID NO: 23536 - protein, 446 aa, Xanthomonas axonopodis pv. citri str. 306
MSTASTLSRATLLAVGIAGVLAVGQAHGAAFQLKENSAKGLGRAFAGSGSAPDDASIIATNPAGMRQLDGRLFQADVSAISFSAKFQPDTAAYANGAPVSGGNGGDAGMIAPVPAMYFHVPFGENDNMHLGTSLTVPFGFKTEYDRDWVGRYHGTKTELQAIDFNVAFSYDVNPYVSFGASVFAERLDIDLANAVDFGSVLAARRVPGFAPGSADGYSRIKGDSTEVGFTLGGLFSIDENTHIGFSYRSQVEHKITDGTADFTVPGSAAAVLSVAAPGTFVDTKGRATVKLPASATASFTHNVNEQWSIMADVTRTAWSKFDQVTVDFASNQPDSVLDFSYRDTTFASIGADYRLSDTVTLRGGLAYDQTPTTAEHRDVRVPDASRKWVSLGMSWRPSAQTEYNFGYTHLFTSDPTSDTRSATGDRLAGSYDVKGDVLAASINYKF

SEQ ID NO: 23537 - DNA, 1272 bp, Yersinia pestis KIM
  CDS (1)..(1272): transl_table=11
ttggtcatgaaccagaaaaacctgtttacccgctcagctctggcagcagctatcgctcttatttcatcgaacgtttctgcagccggttttcagttgaatgaatattcagccgccgctctagggcgtgctttctctggtgaaggcgcagtggctgataatgcttccgttggtagccgcaatcctgcagcaatgactttattcgaccgcccttctttctccggtggtgtgatttatattgatccaagtgttgatatcacggggacgtcgccaagtggcaaaagtacggatgccagtaacattgcgccatcagcgtgggttccgaatctccactttattatgccattggatgaacagtgggcaatcggtgcttctgcgacctctaactacggtttagccactgaatttaatgatgattatgtggcaggcatgttaggcggccaaaccgatctgaaaacggctaacctcaacctaagtgccgcgtaccgcctgaatgataacttcagttttggcctggggtttgatgcagtctatgctgatgcgaaaattgtgcgccatctcggtgaagctggcgggggtctattgcctgctaacactgaagccgccaggttggaaggtaccaaatggggttacggctggaatacgggtattttgtatgaaatcgataaagaaaaccgctacagcttcacttatcgttctgaagtcaatatcgattttgacggtgattacagtaaccaactacctgttattttcggtggtctgggtggaaaaacggtccctggttccctaactctgaacctgcccgccgtgtgggaagtctccggctacaataaagtcgcgccacaatgggccattcactacagcatggcttacaccacctggagcagtttcaaggagttaaaagcaaccgcgtctaatggcgatgtgctgtttgataaacatgaaggcttcagagatgcctaccgtattgcgttagggaccacctattactacgatgataactggacattccgcaccggtattgcctttgatgatagcccgatccccgcaggaaaccgttcaatttccatcccggaccaagatcgtttctggctcagtgcaggtaccacctacgccttcaacaaaaatgcctctgttgatgtcggtattgcttatatgaaaagccagaatgtcagtattaccgaaaagaccccggccccatctaacaccacatatgagttcaactcgaaaggttccgcgatgctatacggtgtgaacttcaactacacattctaa

SEQ ID NO: 23538 - protein, 423 aa, Yersinia pestis KIM
MVMNQKNLFTRSALAAAIALISSNVSAAGFQLNEYSAAALGRAFSGEGAVADNASVGSRNPAAMTLFDRPSFSGGVIYIDPSVDITGTSPSGKSTDASNIAPSAWVPNLHFIMPLDEQWAIGASATSNYGLATEFNDDYVAGMLGGQTDLKTANLNLSAAYRLNDNFSFGLGFDAVYADAKIVRHLGEAGGGLLPANTEAARLEGTKWGYGWNTGILYEIDKENRYSFTYRSEVNIDFDGDYSNQLPVIFGGLGGKTVPGSLTLNLPAVWEVSGYNKVAPQWAIHYSMAYTTWSSFKELKATASNGDVLFDKHEGFRDAYRIALGTTYYYDDNWTFRTGIAFDDSPIPAGNRSISIPDQDRFWLSAGTTYAFNKNASVDVGIAYMKSQNVSITEKTPAPSNTTYEFNSKGSAMLYGVNFNYTF

SEQ ID NO: 23539 - DNA, 1227 bp, Vibrio vulnificus CMCP6
  CDS (1)..(1227): transl_table=11
atgactcagaacatgcgtctgtttaaaaagtctctcctagcagtgactgttgcattggcttcaggccaaacaatggcagcaggtttccaacttaatgcacaatctgcaacaggtatcggccgcgcattcgccggtgatgcagtcattgcagataacgccgccgttatggcacgtaacccagccgctatggcgctttttgatgaaaaagccctatcgcttggttttgaaagcatcacttcaatgattgaagtgaaggatgcaaggtaccaaggcttaacagctccagcgggtaaagaatcgaactatgatgacgctggtgatacttctattgcgccaaatattcactttatcatgccagtaaacgataagtttgcttggggtgttaatgcttattcaaactttggtactaaaactgagtttgatgacagtttcgttgcgcgtgaatacggcggcttgacggatgtgaaaagcgccaactttggcttagcaggttcatatcgccttaacgagcaatggagcttcggtgctggtttagacatcatctacggccaaggcacaatgaaacgtgaacatgctctaatcggcactttagtcgacgtagacaaagcagacggctgggctgttggtttcaatgtgggtactgtatttgaactagatgaaaacaaccgttttggtttctcttaccgctacagcccagaaatggaagcggaagatgacaaaggccaaaagatcactctaccactaccagatatggcggagttttcgggttaccacaaaattaccgacaccaagtttgcggttcactactctatccaatacattggctggggcacgtttgataaaattgagttccgtaacttaaaagacaattcaccagcaatcggtgcaagctacgacaaagcttatgaatggcaagatggttggcactacgctattggtggtacttactacctaaacaaagactggacgctacgtgcgggttatatgtatgacactagtgcacaagattcactaacatcagtttcagtgcctgactcagatcgtcaatggctatctactggttttacttaccacattgatactaagtctaacattgactttggttttacctacctgatgggtgacgatgttaaggttaatgaatctactgctggcgtgtcatcactaacggctacaactcacgcagacgctatcttgttcggcttacaatatagccgtactttctaa

SEQ ID NO: 23540 - protein, 408 aa, Vibrio vulnificus CMCP6
MTQNMRLFKKSLLAVTVALASGQTMAAGFQLNAQSATGIGRAFAGDAVIADNAAVMARNPAAMALFDEKALSLGFESITSMIEVKDARYQGLTAPAGKESNYDDAGDTSIAPNIHFIMPVNDKFAWGVNAYSNFGTKTEFDDSFVAREYGGLTDVKSANFGLAGSYRLNEQWSFGAGLDIIYGQGTMKREHALIGTLVDVDKADGWAVGFNVGTVFELDENNRFGFSYRYSPEMEAEDDKGQKITLPLPDMAEFSGYHKITDTKFAVHYSIQYIGWGTFDKIEFRNLKDNSPAIGASYDKAYEWQDGWHYAIGGTYYLNKDWTLRAGYMYDTSAQDSLTSVSVPDSDRQWLSTGFTYHIDTKSNIDFGFTYLMGDDVKVNESTAGVSSLTATTHADAILFGLQYSRTF

SEQ ID NO: 23541 - DNA, 1248 bp, Vibrio vulnificus CMCP6
  CDS (1)..(1248): transl_table=11
atgaacaagaagaactgctctctgctgacgatatcgatattgtttgcctgccatgctaatgccgctggttttcaagttgcggaacattcagcgtctggtcttggtcgagcgttttccggtgaaggggctgttgctgacaacgcttcggtattggcgagaaacccagctgcgatgacactatttgaaaacgcacagttttctggtgccctgtctatcgtagatccagaggtcaatgtttacgacaaaacgaatggcgaacaatctgatgacgttgcgcctttgcaacttgttccagcagcctattacatcagccctattaatgagaagtgggcatggggtattggtatgtttaccaactacggtgtggcgactgactacccagacgacatttcagctggcgacatggctggtgatacggcgttagtttcagtggggatcaaccccaatatcgcctatcgcgttaacgaagcgttgagcgtgggtgcgggtgtgaattttgtttatgcgcacgcagagttgactcgtcacaagggttctctcgcacctctgtttggatcgaccgataaatcagaaaacttgatcggtatgactggcacgacctttggttacggctggaacgttggcgcactatacgaactcagtgaaaagacgcgctttggtttgggttatcgttccaaagtcgatctggatttcgatgatggtgaattcagcagctacgactcaggcatcgccacagcccctaaagtcgatggccgtttacagatcagcctaccttccatcattgaagtctcggcataccatgaatttaacgaacaatgggcgatgcacgccggttggcaacaaaccgaatggagcacattcaccgagctaaaggcaacgtctccacagtgtaacgatggtaccgctggtcaatgcttctataaaccagagcattacgaaaacaacaatcgttattcacttggtgcaacctatcaaatgaacgaaagctggactcttcgcgcaggcttagcatttgatgaacaagccggtgaagcaaccctcagcattcctgacagcgaccgtttctggtacagcgcaggcttaacttacttgatgagcgacaacatgacgatcgacgcgggctttgcactggttaagagccgttctggttcattcaaagaaaccaacgcagcagatgaagtgcttgaattcgaagcagaaggcacggcttacatcagcgcgattcaaatgaactacacctttaagtaa

SEQ ID NO: 23542 - protein, 415 aa, Vibrio vulnificus CMCP6
MNKKNCSLLTISILFACHANAAGFQVAEHSASGLGRAFSGEGAVADNASVLARNPAAMTLFENAQFSGALSIVDPEVNVYDKTNGEQSDDVAPLQLVPAAYYISPINEKWAWGIGMFTNYGVATDYPDDISAGDMAGDTALVSVGINPNIAYRVNEALSVGAGVNFVYAHAELTRHKGSLAPLFGSTDKSENLIGMTGTTFGYGWNVGALYELSEKTRFGLGYRSKVDLDFDDGEFSSYDSGIATAPKVDGRLQISLPSIIEVSAYHEFNEQWAMHAGWQQTEWSTFTELKATSPQCNDGTAGQCFYKPEHYENNNRYSLGATYQMNESWTLRAGLAFDEQAGEATLSIPDSDRFWYSAGLTYLMSDNMTIDAGFALVKSRSGSFKETNAADEVLEFEAEGTAYISAIQMNYTFK

SEQ ID NO: 23543 - DNA, 1224 bp, Vibrio vulnificus CMCP6
  CDS (1)..(1224): transl_table=11
atgccctcgtttgcgtctttgaacaccttttgtctttcttctttgagcctcaaacgaacactattcagcctctctctgttggcctccgctcacgccagtgccagtggtatttttctgcaagaggccgtgattgctaacgcaggaacggtgggagcgggcgatggtgtgtatacacaatcggcggcggcaatgtgggcaaacccagcgacaatgccgtggatgggtgagacgttgacgacagtgaatgccacggcgtttgacttgaaaatggactatcacgatcaatcgggtgtgggccatgggcaagctgcgtctttgatgccttctgttggcctgtttcatgttcgtcaactcaatgaagacgtgcactttggcattgcgttgggtacggtgggcggttccagcctagattacggttctgagtggcaaggtgccgcactgatgaccgacattgcgttggcggcagtgcaaatcaacccggctctgggttttagagtaactgaccagctttcttgggggatcggtgcacaaatcagctgggcttctctggaaatgggcatggcgaatgcgcgacggcttgagcagtcttctgattgggcgtatggctttaatgctggcgtgatgtatcagtttgatgagcaatgggatctgggtgtaagttttcgctccaaagtgaatcatgagttttcaacggagcttagtggtgggcaacgtgcgcttcctgtaggcacggatctggttgtacccgcgattgtggatgtgagtagcagctacgcagtgaatccgaagctcaagttacttgcttctatccaattacaccgctggagtgaatgggatacgacggtgtttgattttggccgtttagattcaaatcctctcggtctgaattcgatagatcgtcagtgggaggatgtgtggaaatttgccgttgcgacggattaccaactcaatgcggattggcgcttaaaagcaggcttctcgtacgaaacgtcgccacaagatgaccctagcaagcaatgggtggatctgcccgttggtcagcaatatcgttactctgttggcgccacgacgcagtgggacagctatgtccttgatgtttactatgagtatgccgacttaggggaagtggacatcgcgacgcggaaaatagcgaatcaggatgtgggcattaatggcacgtttgaagggcgtatccactttgttggtctgagcgtcagcttttaa

SEQ ID NO: 23544 - protein, 407 aa, Vibrio vulnificus CMCP6
MPSFASLNTFCLSSLSLKRTLFSLSLLASAHASASGIFLQEAVIANAGTVGAGDGVYTQSAAAMWANPATMPWMGETLTTVNATAFDLKMDYHDQSGVGHGQAASLMPSVGLFHVRQLNEDVHFGIALGTVGGSSLDYGSEWQGAALMTDIALAAVQINPALGFRVTDQLSWGIGAQISWASLEMGMANARRLEQSSDWAYGFNAGVMYQFDEQWDLGVSFRSKVNHEFSTELSGGQRALPVGTDLVVPAIVDVSSSYAVNPKLKLLASIQLHRWSEWDTTVFDFGRLDSNPLGLNSIDRQWEDVWKFAVATDYQLNADWRLKAGFSYETSPQDDPSKQWVDLPVGQQYRYSVGATTQWDSYVLDVYYEYADLGEVDIATRKIANQDVGINGTFEGRIHFVGLSVSF

SEQ ID NO: 23545 - DNA, 1344 bp, Xylella fastidiosa Temecula1
  CDS (1)..(1344): transl_table=11
atgattagacgtgttttcaccttagtcaacgttactacactaacgctaagcatcactggtgtgctctacatcagtaatgcgcacgctgctgctttccaattaaaggagaacagcgctaaagctctgggtcggtcattcgcaggcgcggcaagcgcccaagacgacgccgccatcattgtcaacaaccctgccggcatgcgccaactcgacggacgacaattccaggccgatctgagcacggtcagattttccgccgaatatcgtgggaatccaggaatttatcgcaatggcaacccaatcggtggcggcaatggtggggatgccggcatggtggcactgctgcctgactcctatttccacatgccttttggcgataacaacaacgtgcatttaggggcaactctcaacgcaccattcggtttcagtacaaaatacgatcgcaactggacaggacgctatcacggcatctatagcaagttacaggcaatcgatctaggcatagccgtttcctatgacgttaacccgtacgtgtcgttcggcggtgcagtgtttgctgaacgcttgaacgtgaacctgagtaatgcgatcgacttcgggagcattctaaatgcgcgtcgcgtaccaagcttctccccgggtagtgccgatggttactcacacatcgaaggtcacgataccagcatgggcttcacactgggggggttgttcagtcccgatgaaaagacccatattggcttcagctaccgatctgaggttaaacacaacgcaaacaatggaaatgctcactttactgtacctgagaacgctgctgcagtgctggcggttgctgcaccgggaacattcatcaatacaaaaattaagtccacgatccgcttacctgccagcgcaacaaccagcttcactcatgccattgatgaccgatggtccataatggctgaagtcactcggactgcctggagcaagttagacaaaatcaccattcatttcgcatcctctcagcccaaaaacgtactgaatttttcctatcgagataccacttttgttgctctcgggaccgaatatcggttcaacgacatgctaacgctgcgtggtggcttggcttatgaccagacgccgaccaccgccgaatatcgcagcgtacgggtgccagacaacagccgcacctggatctcattcggtatgacttggaaaccatcaaagcaaaccgattacaacatcggatatgcacatttgtttatcggtcatccgactatcacacaaatcagcgcaacaggtagcaccttagccggtgcttacaacatcaatgccgacttacttgcaacttcgatcaactacaagttctga

SEQ ID NO: 23546 - protein, 447 aa, Xylella fastidiosa Temecula1
MIRRVFTLVNVTTLTLSITGVLYISNAHAAAFQLKENSAKALGRSFAGAASAQDDAAIIVNNPAGMRQLDGRQFQADLSTVRFSAEYRGNPGIYRNGNPIGGGNGGDAGMVALLPDSYFHMPFGDNNNVHLGATLNAPFGFSTKYDRNWTGRYHGIYSKLQAIDLGIAVSYDVNPYVSFGGAVFAERLNVNLSNAIDFGSILNARRVPSFSPGSADGYSHIEGHDTSMGFTLGGLFSPDEKTHIGFSYRSEVKHNANNGNAHFTVPENAAAVLAVAAPGTFINTKIKSTIRLPASATTSFTHAIDDRWSIMAEVTRTAWSKLDKITIHFASSQPKNVLNFSYRDTTFVALGTEYRFNDMLTLRGGLAYDQTPTTAEYRSVRVPDNSRTWISFGMTWKPSKQTDYNIGYAHLFIGHPTITQISATGSTLAGAYNINADLLATSINYKF

SEQ ID NO: 23547 - DNA, 1269 bp, Pseudomonas syringae pv. tomato str. DC3000
  CDS (1)..(1269): transl_table=11
atgctcaagagaacacttggcctcacggctgcgctggcatcctcccaaattcttgctggcggttttgcgcgcaccgagcagagcatcagcggcatgggcgtcggtcaggccggacgcgcttcaatggcgcaggacgccagcacggtctatggcaacccggcgggtatggcgcgtcttgagggcaggcaaatcacggcaggtgtcacgttcgttgatgcatcgaccgacatcagccatgcagccggtcgttcacgaggcagcaatgacggcgacatggtgccgttcagctcggttccattcgggttttacacccagaaactcgatgagcactgggcgtttggcctgggtatctatgcaccttttggtttgtcgactgactatgaaaatggctttcaggggcgcatgtttgccagcaagagcgacctcaaggtggtgacagtgcagcccacggtcagctacgccttcaacgacaggttgtcgattggcgcaggccccacgttcaatcgaattgccgggacgctggagtcggatatcacgctcaatcccgccatcgccgacacgcgcgtaaaagtcagcggtgatgacacggcggtaggcttcaacatcggcgtgctgttcaatgcgaccgacaccacgcgtgtggggctgacgtaccattccaaagtcgattacaaacttggctgccatacgcaggtctcgaccggtgccgggacgccaccgcagttgctcgccagcaatcgctatgactgtacgttgaaagtggccacgccagagtcatacgatctttccgttactcagaaactgagtgacgcctggacgctttatgccagtgctacccgaaccggctggagcagcatgcaggacctgagccttcgtaatcagcccgtttctgctgcgcagggaggctccctggcatcagcactgacggggtctattcaggaaggcctgaactggcacgacacatgggcttatgccatcggcacggcctaccggctggatcaacagtgggtactgcgtgcaggcgtgctgttcgatcagtcgccgaccagcaacactgatcgatcaccacgcacacccacaggggatcgcgaggtattcagcgtcggggctggctatgaggtcaccccgcaactgactcttgatgtggcttactcttatcttcaggaagaaagtgtcgatgtcagccgcgccaatgcgctaggcagttacagtgcgacgtatcagagccatgcgaatttactcggcgttggcgcgacctatcgtttctga

SEQ ID NO: 23548 - protein, 422 aa, Pseudomonas syringae pv. tomato str. DC3000
MLKRTLGLTAALASSQILAGGFARTEQSISGMGVGQAGRASMAQDASTVYGNPAGMARLEGRQITAGVTFVDASTDISHAAGRSRGSNDGDMVPFSSVPFGFYTQKLDEHWAFGLGIYAPFGLSTDYENGFQGRMFASKSDLKVVTVQPTVSYAFNDRLSIGAGPTFNRIAGTLESDITLNPAIADTRVKVSGDDTAVGFNIGVLFNATDTTRVGLTYHSKVDYKLGCHTQVSTGAGTPPQLLASNRYDCTLKVATPESYDLSVTQKLSDAWTLYASATRTGWSSMQDLSLRNQPVSAAQGGSLASALTGSIQEGLNWHDTWAYAIGTAYRLDQQWVLRAGVLFDQSPTSNTDRSPRTPTGDREVFSVGAGYEVTPQLTLDVAYSYLQEESVDVSRANALGSYSATYQSHANLLGVGATYRF

SEQ ID NO: 23549 - DNA, 1275 bp, Pseudomonas syringae pv. tomato str. DC3000
  CDS (1)..(1275): transl_table=11
atgaaaataatgacaaaagcacttaaccggacaactcttggactcgccctgggtctggcttcttctcaactgctcgctgccggcttcgccctcaacgaacaaagcatcagcggcatgggcaccggctttgcaggtcgctcctcctccgccgacgatgccagcaccgtgttcggcaaccctgccggcatgtcgcgtatcaaacgcgaacaaatcagcgtaggcgccgcagccgtgatcgccaagaccgacatcgacaatggtcgtggcacgttcggcggcagcaacgacggtgacatggttcccgtggttggtgtgccaatgggctactacgtcaaacctatcgatgatcactgggcatttggtctgggcgtgtacgttccgttcggcctggtcactgattacgagaaaggctttgccggccgttactggggtgacaagagccacgtacagatcgtgacctttcagccgaccgtcagctacgcattcaatgacaaggtttctatcggttttggcccgaccatcaaccgtatcgacggtgaattgacatcggctgtccctaaccgagcgtccctcggcaccaacgatggcaaggtgaagatcaagggcgatgacactgcaatcggcttcaatgccggtattctggtgcaggctactgacaccacgcgcctgggtctgacttaccattccaaagtcgattacaagctcgaaggcaagaccaaggtagaaggctctggttttggtcctttcggcggtcagaagtatgacgcctcgctggatatctccacgcctgagtcggtggacttctccatcactcagcagcttgatgaaaactggaccgtttatgcaggcagcacctggactcgctggagccgcctgaaagacatcacggtcgaaaacagcggcgtgcccacagcattggcctcaagcattggcaccattacggaagaacaggactggcacgacacttgggcacacgccatcggtgcttcgtacaaggtcaataaggagtggacgctgcgcactggtttctctgttgatcagtcgccgaccaacaacgttaatcgatcccctcgcatcccgactggcgatcgcaagatcatcagcttcggtgctggctggagcccgaccgacgacctgaccattgacgtggcgtactcgtacctgcgtgaagatgaaaccaagatccgcgacagcagcgcgaccaaaggctcgtacagcgccgattaccgcaatacggcgcatggccttggcacttcagttacctatcgtttctga

SEQ ID NO: 23550 - protein, 424 aa, Pseudomonas syringae pv. tomato str. DC3000
MKIMTKALNRTTLGLALGLASSQLLAAGFALNEQSISGMGTGFAGRSSSADDASTVFGNPAGMSRIKREQISVGAAAVIAKTDIDNGRGTFGGSNDGDMVPVVGVPMGYYVKPIDDHWAFGLGVYVPFGLVTDYEKGFAGRYWGDKSHVQIVTFQPTVSYAFNDKVSIGFGPTINRIDGELTSAVPNRASLGTNDGKVKIKGDDTAIGFNAGILVQATDTTRLGLTYHSKVDYKLEGKTKVEGSGFGPFGGQKYDASLDISTPESVDFSITQQLDENWTVYAGSTWTRWSRLKDITVENSGVPTALASSIGTITEEQDWHDTWAHAIGASYKVNKEWTLRTGFSVDQSPTNNVNRSPRIPTGDRKIISFGAGWSPTDDLTIDVAYSYLREDETKIRDSSATKGSYSADYRNTAHGLGTSVTYRF

SEQ ID NO: 23551 - DNA, 1251 bp, Vibrio parahaemolyticus RIMD 2210633
  CDS (1)..(1251): transl_table=11
atgactcagaatacgcgtctgtttaaaaagactctcctagcagtaacggtagcttttgcctcaggtcaatcgatggcagcaggtttccaaattaacgctcaatcagcaactggtatcggccgtgcgtttgctggtgatgcagtaatcgccgataacgcgtcagtaatggctcgtaacccagcggcaatggctctttttgataaaatggagctgtcacttggttttgaaagcattacttcaatgattgaagtgaaagatgcgaaatacagaaatttcatgggtcagagcgttgatgttgctgacacagatgatgtgggcgacacgtcaatcgcgccaaacattcacctaatcgttccagtaaacgacaagtttgcttggggcgtaaatgcttactcaaacttcggtactaaaactgagttttcagataactacacagcaactgaatacggcggcttaactgacgttaagagcgcaaactttggtcttgctggctcttaccgcttaaatgaacaatggagctttggtgcaggtgttgatttaatctacggtcaaggcacgatgaaacgtacaacaagctcttctattccacttgttggcggcaaaaaaatactagatgtagataaagctgatggttgggctgttggtttcaacgttggtaccgtgtacgaactggatgaaaacaaccgttttggtctagcgtatcgttatagcccagaatttacggcaaaagacgataaaggtcaggaaatcactctacctctaccagatatggctgaattttctggcttccacaaaatccaagataccaagtttgccgtacattacagcatccaatacattggttggaaagatttcgaccaaattgattttgaaaacctaaatcaagggttacttaaaggtggttactcgaaagactatcaatggcaagatggctggcactacgcaattggtggtacttactacctaaacaataactggacacttcgtgctggttacatgtacgacaccagcgctcaagataaggtaacatctatctcggtaccagattcagatcgtcagtggttctcaacaggtttctcttaccatatcgacaacagctcaaacattgattttggcttcacatacttgctaggtgacgatgtaaaagtcaatgagaatactcaattggcccctggtctttctacaggtgtaacagctacaacgcacgcagacgctatcctgtttggcttacaatacagccgtagcttctaa

SEQ ID NO: 23552 - protein, 416 aa, Vibrio parahaemolyticus RIMD 2210633
MTQNTRLFKKTLLAVTVAFASGQSMAAGFQINAQSATGIGRAFAGDAVIADNASVMARNPAAMALFDKMELSLGFESITSMIEVKDAKYRNFMGQSVDVADTDDVGDTSIAPNIHLIVPVNDKFAWGVNAYSNFGTKTEFSDNYTATEYGGLTDVKSANFGLAGSYRLNEQWSFGAGVDLIYGQGTMKRTTSSSIPLVGGKKILDVDKADGWAVGFNVGTVYELDENNRFGLAYRYSPEFTAKDDKGQEITLPLPDMAEFSGFHKIQDTKFAVHYSIQYIGWKDFDQIDFENLNQGLLKGGYSKDYQWQDGWHYAIGGTYYLNNNWTLRAGYMYDTSAQDKVTSISVPDSDRQWFSTGFSYHIDNSSNIDFGFTYLLGDDVKVNENTQLAPGLSTGVTATTHADAILFGLQYSRSF

SEQ ID NO: 23553 - DNA, 1320 bp, Vibrio parahaemolyticus RIMD 2210633
  CDS (1)..(1320): transl_table=11
atgaaaaccaacaagactttcctatcaacagcagtagcacttagcctacttggcacttcaggcatggcaaatgcagcaggcttccaattagctgaatattctgcaacaggtctaggtcgtgcttacgctggtgaagcagcaatggctgacaacgcaagttctcaatggcgtaacccagcaatgcttacttacctagagggcactcaagtgtctgttggtgccatctatgtaaatccaaacattgatatcaatggtcaaaccacacttaagcatccagtaaatcagagtgtaattaactcctcttcaacctcttcagatgacttcgcacatgatgcgatcattccaaacttctacctatcacatcaatacaacgaacaattcgcaatcggcctagcgttcggtacgaactacggtatggaaacggatctaggcaaaggctttgccgcctctcattttggtaacgaagcaagcgtaaccacaatggaagcaaacctaaacgcagcatacaaaattaatgatgcggtaagtattggtggtggtattcgttacatcatcggtgaaggaagttttggcgctacgactcctaaagtaaacgtattacaaaaacctcaaggtacgactcttaagtacatggaaggtgacgatacggcttggggttggcaattgggtacagcgtggcagatcaatgaaaacaaccgcatcggtttcacgtacaaatctgaggttgagctaaagcttgaaggtcatgctgagggccttggttttggcttcggtactcctaagcttccacagctgcgtgacaatggctacatgtacctaaacctaccagcaacggctgaactagcgagcttccaccaagtaacagaccaacttgcgctacacgcaagtttcaactggactgactggagttctttcgagaagctagaagctcacctagaaaccgctggtacacacatggtgaaagtggaaaactgggaagataactaccgctttgcagttggtgcgacttaccaacttcaacctaaggtagccctacgtactggtattgcatacgatacgtctgctgtaagtgataagaaccgcacgatcactattccagaaacagaccgtacttggttaagcatcggtgcaacttatgactggacgaaagacttcagcctagacgctggcttcacttacattatcgcgaaagacgcaccaatcgttgagtctcgtggctacaagtcagacgattcagctgaagtagttggcggtcaattcgttggtgaaacaacgggtaacgtttggctaatcggtgttcaagcgaactaccgtttctaa

SEQ ID NO: 23554 - protein, 439 aa, Vibrio parahaemolyticus RIMD 2210633
MKTNKTFLSTAVALSLLGTSGMANAAGFQLAEYSATGLGRAYAGEAAMADNASSQWRNPAMLTYLEGTQVSVGAIYVNPNIDINGQTTLKHPVNQSVINSSSTSSDDFAHDAIIPNFYLSHQYNEQFAIGLAFGTNYGMETDLGKGFAASHFGNEASVTTMEANLNAAYKINDAVSIGGGIRYIIGEGSFGATTPKVNVLQKPQGTTLKYMEGDDTAWGWQLGTAWQINENNRIGFTYKSEVELKLEGHAEGLGFGFGTPKLPQLRDNGYMYLNLPATAELASFHQVTDQLALHASFNWTDWSSFEKLEAHLETAGTHMVKVENWEDNYRFAVGATYQLQPKVALRTGIAYDTSAVSDKNRTITIPETDRTWLSIGATYDWTKDFSLDAGFTYIIAKDAPIVESRGYKSDDSAEVVGGQFVGETTGNVWLIGVQANYRF

SEQ ID NO: 23555 - DNA, 1362 bp, Vibrio parahaemolyticus RIMD 2210633
  CDS (1)..(1362): transl_table=11
atgagaaaaaacatgcagcgacaattcactctttcaccgatttatttattaatcggtttagcctcatcgacggcgtatgccggtggttttcaaattaacgaacattcggcgacgggtcttggtcgtgcttttgctggtgatgccgtcattggtgataatgcgtctgtagtcagccgcaacgccgcagcgatgacgctgtttaaacaaaatgccttatcgttcggtgtcacttacgtcaaacctgacgttaccgttaaaaatgcacaatatcatcgagctaatattaatgcggatgtcgatgttagcatgggaggtggattgatacccaaccttcaaccaccaagtgtaagtgttaccccatcagagaccgtggccgacattgatgacgtcgatggcgttggtcaaccagccgttgtacccaatttttactttattcaccctatcaacgacgactggtatctaggcttatcgacatactccaacttcggaaccgacatggagtttaaaccaaactatggcgcacctgtttttggcggtgtcaccagcgtagcgagtgtcaaccttggcgcaagcttggcatacaaggtgaacgatcgttttagtatcggtggtggtattgatgtgatttacggctctggtgagctgtaccgcgatatggacgtgggtgtttgcgttggtgggaacatacttggaaacgaactagaacaacgttgcggagccgtaaaaggcaacgcacttgatgtggaagctggcggcattgggcttggtgcgaatattggcatgatgtacgagtttaacgagcgtcatcgcttaggtttaagctacaagcacagccctaacattgatgccaagggtgacatccactttgctggcgaatcgtacgactcacttgcgatgccgctaccggatattgcggagttttccggttatcaccgcgtcttacctaaatttgccctgcactattctgtgcagtggattggttggtcagcatttgacagcttgaaagctgatgatcagttgctaaaagattttcagtggcaagactccgcgcactactccatcggtgcgacttggtacgccaatgaacgttggacacttcgcacgggttacatgttcgacaaaacacctgtcgatgagctgacttcgctttctatcccagattcgaaccgtcactggttatctgcgggggcctcttaccagtggtcatcagataccacggttgacatcggcatgacgtacttgattggtgaagatgtcaacgtagaagagtacgcgtatgaaggtgttcctgcaccgatggtaacgggcgtgacccattcaaatgcgttcctaattggtgcccaactcagccaccgtttctaa

SEQ ID NO: 23556 - protein, 453 aa, Vibrio parahaemolyticus RIMD 2210633
MRKNMQRQFTLSPIYLLIGLASSTAYAGGFQINEHSATGLGRAFAGDAVIGDNASVVSRNAAAMTLFKQNALSFGVTYVKPDVTVKNAQYHRANINADVDVSMGGGLIPNLQPPSVSVTPSETVADIDDVDGVGQPAVVPNFYFIHPINDDWYLGLSTYSNFGTDMEFKPNYGAPVFGGVTSVASVNLGASLAYKVNDRFSIGGGIDVIYGSGELYRDMDVGVCVGGNILGNELEQRCGAVKGNALDVEAGGIGLGANIGMMYEFNERHRLGLSYKHSPNIDAKGDIHFAGESYDSLAMPLPDIAEFSGYHRVLPKFALHYSVQWIGWSAFDSLKADDQLLKDFQWQDSAHYSIGATWYANERWTLRTGYMFDKTPVDELTSLSIPDSNRHWLSAGASYQWSSDTTVDIGMTYLIGEDVNVEEYAYEGVPAPMVTGVTHSNAFLIGAQLSHRF

SEQ ID NO: 23557 - DNA, 1104 bp, Vibrio parahaemolyticus RIMD 2210633
  CDS (1)..(1104): transl_table=11
atgaaaaatctttcaaaaatcgtcgtagcgagctctctactgacgtgtgctgctgcgcaagcgggtgggttatacctttacgaaactacagcatcggatattggtttggcatccgctggtatggcggctcgtgcgcaagatgcctcagtaatggcagcaaacccggctggtctggcgaatgtttctggtaaatctttctctggtaacctgattggcctttacggtgacgcgcaactagacacgatgactggcgatgcgggcaacgtgattggttttgttcctatggcgtcggcattttacagccaacaagtaaacgacaaatggacgctgggtattggtctgtatggcaactacggtcttggcctcgagtacgaaggtcttttgaataatcatttagatattcctacagcaacgacgcaagccttaaccattcaaccttccgcttcttaccgcatcaatgatcactggtctgtgggtgcggcgcttggcattcagtacggtatgtatgaagtggaaacgaagggagccttgaacttcaatgacgaagaccaagatactcagctcaacggccgagtaggtgtactgtatgaggcaacaccaggcacgcgtcttggcctgtcttactcttctgaaaccgaatttgaattcgacaatagtaactccattgctccgcaacaactgatcttcagtgcttaccatgaagtgaatgatgacctagcggtgatgtggaacgtgaactggcaagactggagcgaatacacaaccacgcttaaggctgcagatttggtcgatgtagagacacaagacacttaccaaatcgcattgggtactcagtacaaactgaatgaaaaaatgatgtggaatgcaggttttgcattcgataccagcatgtatgaaagccaatcaaacggtgacattaccgttcctactggcaaggcgtaccgcattggtacaggcattgattacaaattggattcagaaaactcaattggtttcgcgtttgaagcggtcttgatggaatcgtcagaaacgccacgcttacaagctggctttgatgagcctgctctgtacttcatgagcatgagctacaattggaaaaactaa

SEQ ID NO: 23558 - protein, 367 aa, Vibrio parahaemolyticus RIMD 2210633
MKNLSKIVVASSLLTCAAAQAGGLYLYETTASDIGLASAGMAARAQDASVMAANPAGLANVSGKSFSGNLIGLYGDAQLDTMTGDAGNVIGFVPMASAFYSQQVNDKWTLGIGLYGNYGLGLEYEGLLNNHLDIPTATTQALTIQPSASYRINDHWSVGAALGIQYGMYEVETKGALNFNDEDQDTQLNGRVGVLYEATPGTRLGLSYSSETEFEFDNSNSIAPQQLIFSAYHEVNDDLAVMWNVNWQDWSEYTTTLKAADLVDVETQDTYQIALGTQYKLNEKMMWNAGFAFDTSMYESQSNGDITVPTGKAYRIGTGIDYKLDSENSIGFAFEAVLMESSETPRLQAGFDEPALYFMSMSYNWKN

SEQ ID NO: 23559 - DNA, 1242 bp, Vibrio parahaemolyticus RIMD 2210633
  CDS (1)..(1242): transl_table=11
atgaacaagaagcactgctctctgctgacaatttcaatattgtttgcgtgtaatgcccattcagcgggctttcaggttgctgaacactcggcatctggtcttggtcgagcattctcaggtgaaggggctgtagcagacaatgccagcgttcttgcacgtaacccagcagcaatgactcttttcaaagaagctcagttttctggcgcactttctatcgttgatcctgaagtcaacgtttacgatacgcttcataaagagcaatctgatgacgtagcaccactgcaagtggttcctgcgggttattacatcagcccaatcaatgacaactgggcttggggtatcggtatgttcaccacttacggtgttgcaacagattatccagatgatatttctgcgggtgatatggctggcgacacctcgctactttcggtcaacatcaacccaaacattgcttaccgtatcaacgaaaaatttagtgttggtggcggcatcaacttagtttatgcagaagctgaactgacacgtcataaaggtgcgttggcgccgctatttggttctggtagcagtaaatccgataacctaattggcatggaaggtgagactttcgcatggggttggaacgtcggtgccctatttgaacttaacgaaaacaaccgttttggctttggctaccgttctaaagtcgatctagattttgatgatggtgaattcagcagctacgactctggcatcgcaaccgcagcaaaagttgatggtcgcttgaagatttcgcttccttctattatcgaactttctgcattccatcaacttaatgaccaatgggcgattcattacggttggcaacaaactgactggagcacttttaaagagctaaaagcgaccagtaatgaatgtaaaggcggcgtatgtttcttcaaaccagaaaagtatgaagacaacaaccgttactctgtaggtgcaacttacacgctaaacacagagtggacattccgcgcaggcttggcttatgacgagcaagcgggtgaagcaacattgagtatccctgatagtgaccgtatgtggtacagcgcgggtctaacgtatgcaatgaatgaaaacctatcgtttgatgctggttttgcattggtacaaagtgagtcgggctctttcactgagactaacgctgcaggtcaagaaattaagtttgattcagaaggtacggcatacatcagtgcagtacagatgaactacaccttcaaataa

SEQ ID NO: 23560 - protein, 413 aa, Vibrio parahaemolyticus RIMD 2210633
MNKKHCSLLTISILFACNAHSAGFQVAEHSASGLGRAFSGEGAVADNASVLARNPAAMTLFKEAQFSGALSIVDPEVNVYDTLHKEQSDDVAPLQVVPAGYYISPINDNWAWGIGMFTTYGVATDYPDDISAGDMAGDTSLLSVNINPNIAYRINEKFSVGGGINLVYAEAELTRHKGALAPLFGSGSSKSDNLIGMEGETFAWGWNVGALFELNENNRFGFGYRSKVDLDFDDGEFSSYDSGIATAAKVDGRLKISLPSIIELSAFHQLNDQWAIHYGWQQTDWSTFKELKATSNECKGGVCFFKPEKYEDNNRYSVGATYTLNTEWTFRAGLAYDEQAGEATLSIPDSDRMWYSAGLTYAMNENLSFDAGFALVQSESGSFTETNAAGQEIKFDSEGTAYISAVQMNYTFK

SEQ ID NO: 23561 - DNA, 1308 bp, Haemophilus ducreyi 35000HP
  CDS (1)..(1308): transl_table=11
ctgttagcttgtttaattactgttagcggaactagttcgcaagcagcttctttccaattagctgaaatttcaacttctggtttattaggtatggcttatgcgggtaacgctgcagtagcagataatgcttcggtcgttgcaactaaccctgcattaatgacagaattcaaacacccacaaatttcagttgggggtattttagtggacgcaaatgtagatgtgtcaggtaaaatcaatggttcagttgacgcgcctcacaaagatattattccgaatgcaatagtgcctaatatttactttgttacgcctattaattcacaatttagtttaggcggtggtttaaacgttaattacggcttgaaatcacaatataacgataaatttaatgggggaatgttcggtggtagcactaaactaaccgcattaaactttaatttaagcggcgcttataatttaggtaatggcattagcttgggcttaggcttaaatgctatccattcagatgcagaaattaaccgctatttaggtgcgggcaaacaaatccttatagaggcaggcaaacaagcacaaaatatcataccaagcctatctgaaaacactagtattgctcatattaaaggcaaaaaatggagcttaggttggaatgttggtcttgcttatcaactggatgaaaatcaccgttggggtgtagcatatcatgcaccggtcgatgtaaaatttagcggtcagtattctaatcagttaccggaagccttgaatccgcttttacaagcgcactcttccctcaaattaccaattagccaagccactggcggtaaagcaattccagggaatttaacccttaatttacccgcttattgggaattatctggcttccataaactcactgatcaattagcaatgcaatatagctataaatacaccggatggaaacgcttaaaaagtttagatgcttatgctaatgacggtaaattattattccaaaaaattgaaaactttagcaattcttcacgttatgcgatcggtttctcttatgatgtggctcaagatttaaccttgcgcactggttttgcttacgataaaaatgctagtgtaaaacatccttcgatctcaattccagatacaacacgtacttggtattcaatcggtgcaacttatcgctttacaccgaatgtgtcttttgatgttggtttagcacatttacgcggtaaaaagaaccaatttactgaaggcacacttgttaaaggtgcatttgaagttgccgcaagagccaatctttacggcttgagtataagttatggtttttaa

SEQ ID NO: 23562 - protein, 435 aa, Haemophilus ducreyi 35000HP
MLACLITVSGTSSQAASFQLAEISTSGLLGMAYAGNAAVADNASVVATNPALMTEFKHPQISVGGILVDANVDVSGKINGSVDAPHKDIIPNAIVPNIYFVTPINSQFSLGGGLNVNYGLKSQYNDKFNGGMFGGSTKLTALNFNLSGAYNLGNGISLGLGLNAIHSDAEINRYLGAGKQILIEAGKQAQNIIPSLSENTSIAHIKGKKWSLGWNVGLAYQLDENHRWGVAYHAPVDVKFSGQYSNQLPEALNPLLQAHSSLKLPISQATGGKAIPGNLTLNLPAYWELSGFHKLTDQLAMQYSYKYTGWKRLKSLDAYANDGKLLFQKIENFSNSSRYAIGFSYDVAQDLTLRTGFAYDKNASVKHPSISIPDTTRTWYSIGATYRFTPNVSFDVGLAHLRGKKNQFTEGTLVKGAFEVAARANLYGLSISYGF

SEQ ID NO: 23563 - DNA, 1458 bp, Chromobacterium violaceum ATCC 12472
  CDS (1)..(1458): transl_table=11
atgaagctcaagcatctcagcctgtccgtgatgatcatgggcaccgcgctcggtctggcatcgactcaggccgcggcctcgggttatcagttcggctcgcagagcgtctccggccagggcaccgcgcacgcgaacggcgccgaagccaatgatccttccaccatcttcaccaacccggccggcctgtcccggctggacggcacccagctcgtgatcggcggcaccctggtggtgccgcattccgaatacaccgacaacggctccaggaacgtgctgggccagcccaccggcggcggcaacggcggcaccttcgcgcctaaggccgtggccgcgccgactttctacctgtcgcacaagatcaacgacaagatcaccgccggcatcggcatgtacgtgccttacggcgccaagctggactacggcttcgactgggccggccgctacgcactgaagagcgtcaacctgcagtcgctgaacatcaacccgtccatttccttcaagctggatgagcgccactccttcggcttcggcgtgtccgcccagtatatggatgcgacgctggagcagatggcggatgcaacgtctgggttggcattgagtgttgcaaagggcctgcctggcggagttactcccggcaacatcgctactgctatgggcatgctgaaggccgcaggagtaaggggggatggcctcgcgcacgtagagggtaatgattggggctttggctggaatgtcggttatatgttccaactggacgaaaatacccgctttggtttggcttaccgttccagtatcaagcagaagttgacgggtagttcgacttggacttttaacaatgtgaccggcagcatggttccattcggcattccactgtctgccgccgccgctgccaaggcaaagcacccgaatgcatctgcctctgttgatgtgaccaccccggaaaccgtgtccgccaacttcttccatcagttgaacccgaaagtggcgctgatggccgacgccacctgggtgcgcaactcgcagctgcagcagatcgacatcaagcaatacagcacgccggctcagggcgatctgatactgcaccagaactggaaggacacctggcgcctgtcgttcggctccaactaccagctgaacgatgcctggatgctgcgcggcggcgtggcctgggagcagtcgccggtgcagtcggacgaccagcgccatccggctctgccggacagcgaccgcctctggctgtcgttgggcgccaactacaagatcaacaagcagagctcgatcgacctggcctacagcttcatcgacttcaagaacgccaacgtcaactacaccgattcctgcaatccgaccggtcaaaaggctgatggctctctgtgcaccggcaacggcggcacggtcaagggcagctacaagacttatctgcagctgatcggcgtgcaatacaactaccgtttctaa

SEQ ID NO: 23564 - protein, 485 aa, Chromobacterium violaceum ATCC 12472
MKLKHLSLSVMIMGTALGLASTQAAASGYQFGSQSVSGQGTAHANGAEANDPSTIFTNPAGLSRLDGTQLVIGGTLVVPHSEYTDNGSRNVLGQPTGGGNGGTFAPKAVAAPTFYLSHKINDKITAGIGMYVPYGAKLDYGFDWAGRYALKSVNLQSLNINPSISFKLDERHSFGFGVSAQYMDATLEQMADATSGLALSVAKGLPGGVTPGNIATAMGMLKAAGVRGDGLAHVEGNDWGFGWNVGYMFQLDENTRFGLAYRSSIKQKLTGSSTWTFNNVTGSMVPFGIPLSAAAAAKAKHPNASASVDVTTPETVSANFFHQLNPKVALMADATWVRNSQLQQIDIKQYSTPAQGDLILHQNWKDTWRLSFGSNYQLNDAWMLRGGVAWEQSPVQSDDQRHPALPDSDRLWLSLGANYKINKQSSIDLAYSFIDFKNANVNYTDSCNPTGQKADGSLCTGNGGTVKGSYKTYLQLIGVQYNYRF

SEQ ID NO: 23565 - DNA, 1338 bp, Chromobacterium violaceum ATCC 12472
  CDS (1)..(1338): transl_table=11
atgcaagccgcaccccgctccctgagcctgttgtccgtttccctcgccgccctgttcgccgccgcgcccgccgcgcaggccgccggtttccaactgaccgagcaaagcgtcactggcatgggccgcgcctacgccggcgccggcatggccggcgacgacctgtccgccgtgttctacaacccagccggcatgaccctgctgtccggcacccgcgtgcaaggcggcctgacctacgcggaaatcgacgcgccgttcagcggccgcaataccagcgtcagccatctgcctggcacgcctcccgccaccgtgacgacttctgccaacgacaatggccgcggcgcgggcgaagtgattccgaacggttacctgacccaccaggtcaacgaccagctgttcctgggcctgggcgtgaccacgccgttcggcctgggcgcaagctatagcgacaactggggcggccgcgacaacggcatctccagcagcatcatgacggtggacatcaatccgtcgctggcttacaagctgaacgacaagtggagctttggcggcggcgtgtctgcgcaatacgcgaaggcggacctgaagcagggcgcctatctgcccggcgccagcggcgagctcaaggccgacagctggggcttcggctacaacctgggcgtgatgtactcctacagcgccgatacccgcgtcggcctgtcctatcgctccaagatccatcacgacgccaagggcgattacaccaatgccggttttcccgcgccgctgggcggcctgctcaatggcacgtattccggctcggccgaggtgaccacgccggaatggctgatgctgagcggctacagcaagctgaacagcaagttcgcagtcggcgccaccgcgcgctggacgcgctggagccgcttcgaccagctggtggtcaagggcagccccgtggtgcctaagttgccgggcctgacgcccgcgccgatcgacaccaccaccaccatcgacaaccactggaagaacagctggctgttctcggtgggcggcgactacttctacagcgaagcgctgaccctgcgcgcgggcctgggctacgagaccacgccggtgccgaacccgcagcaccgcaacgtgttgattccggacgccgaccgcatgtggctgaccctgggcgccggctaccggatcagcaagcaggcgagcgtggacgtgagctacgcctatctgcgcgcggtgggcgacaccaagatcgacaatacttcgcatagcccgttcggcaccaccagccgtctgcagggcgattactcctcgatcagcggccacctgctgggcgtgcagatgcagtaccgcttctga

SEQ ID NO: 23566 - protein, 445 aa, Chromobacterium violaceum ATCC 12472
MQAAPRSLSLLSVSLAALFAAAPAAQAAGFQLTEQSVTGMGRAYAGAGMAGDDLSAVFYNPAGMTLLSGTRVQGGLTYAEIDAPFSGRNTSVSHLPGTPPATVTTSANDNGRGAGEVIPNGYLTHQVNDQLFLGLGVTTPFGLGASYSDNWGGRDNGISSSIMTVDINPSLAYKLNDKWSFGGGVSAQYAKADLKQGAYLPGASGELKADSWGFGYNLGVMYSYSADTRVGLSYRSKIHHDAKGDYTNAGFPAPLGGLLNGTYSGSAEVTTPEWLMLSGYSKLNSKFAVGATARWTRWSRFDQLVVKGSPVVPKLPGLTPAPIDTTTTIDNHWKNSWLFSVGGDYFYSEALTLRAGLGYETTPVPNPQHRNVLIPDADRMWLTLGAGYRISKQASVDVSYAYLRAVGDTKIDNTSHSPFGTTSRLQGDYSSISGHLLGVQMQYRF

SEQ ID NO: 23567 - DNA, 1185 bp, Wolinella succinogenes DSM 1740
  CDS (1)..(1185): transl_table=11
atggcaaaaaagctctttttaaccctcctctctcttttctctttcgcctgtgcctcaggctacaaaatccccgaacaatctcttgattccacggctctctctggcgctcatgtcgcggggagctatggggcagatgccagttattacaaccctgccaacatggcttttgcctctttagaagctgagatggagagtgcgctcacctatattcatctcacctcggttcactttgagcaaggcgcctacaaagaggattcaaagcgagagaatttccttgttcctaagtttttttaccgaagccctgcgatgggggattggcgtatggggctctcctttaccaccccagcaggactctctaagcgctgggaagagggggttagagggcaaagtaatgccaatgagttcacgctagaggtctttgagctcaacccttctctctcttataaaatttccgattcgctagcgcttggcttgggaatccgtggggtctatagcaaaggaatcgtgaaaaacgatatggtcactttgggctcctatcaagagctcaaaggcgattctttagactttggctggaacgctgctttggcgtttaagcccgtggagagcaccaatttaagcattgcctatcgctctaaagtcaatcttagtattgagggtgatgcgggaattcgcaccccctttggaaatatcaatcctgaggctagagtcacgattcctcttcctgcaactctaagcctagcgcttgccaagcagtgggatgacttcttggtggagtttgtatgggatagggtctattggtcggcctacaaagagcttgattttgactatgaccacgacatgacctccaatccaatcctaagagccctagacgcttccaaggccaaaaattggaaggataccaacacctatcgcctaggactctcttatcagatgaatgaggcgtggaagctcatggcgggctttggaattgataagaatcccatccctgatgacaggctaggttttgagctccccgatagtgacgccaagatctactctcttggagctcgttataagatcaactctcgccatgaggtgggagcagcctttttggtgagcgacaaagaggacaggacgacctctattggcacttttagccatacgcaggcccaccttttaacctttggatacacctatcgctactaa

SEQ ID NO: 23568 - protein, 394 aa, Wolinella succinogenes DSM 1740
MAKKLFLTLLSLFSFACASGYKIPEQSLDSTALSGAHVAGSYGADASYYNPANMAFASLEAEMESALTYIHLTSVHFEQGAYKEDSKRENFLVPKFFYRSPAMGDWRMGLSFTTPAGLSKRWEEGVRGQSNANEFTLEVFELNPSLSYKISDSLALGLGIRGVYSKGIVKNDMVTLGSYQELKGDSLDFGWNAALAFKPVESTNLSIAYRSKVNLSIEGDAGIRTPFGNINPEARVTIPLPATLSLALAKQWDDFLVEFVWDRVYWSAYKELDFDYDHDMTSNPILRALDASKAKNWKDTNTYRLGLSYQMNEAWKLMAGFGIDKNPIPDDRLGFELPDSDAKIYSLGARYKINSRHEVGAAFLVSDKEDRTTSIGTFSHTQAHLLTFGYTYRY

SEQ ID NO: 23569 - DNA, 1344 bp, Photorhabdus luminescens subsp. laumondii TTO1
  CDS (1)..(1344): transl_table=11
ttggttatgaaccagaaaaacctgttcacccgttcagcattagcggttgcagtggcaataatttcatcgaatgctggcgctgctggtttccagttaaatgaattttctacttcggctttgggccgcgctttttccggggaaggcgttgttgctgataacgcagcggtaggaagccgtaacccagcagcaatgacactgtttgatcgcccatcattctctattggcgccgtctatatcaacccagatgttgatattaccggtaaatccccagtaacaggcaaaagtactaacgctaaaaatattgctcctaccgcttggatacctaacatacatttcattatgccaatcgatgatcaatggtttgttggtacctcggtcaccaccaatttcggcctggcaaccgattttagcaataactatgaagcaggccctatcggcggtaaaactgacctgacaacgttgaacttcaatctgagcggagcttatcgcctgaacgatcactttagctttggtttaggactgaacgctgtttatgcggatgcaaaaattgtccgtcatgcgggcgctctgtcatacatgctggatcagcaccccaagatgccaaaaggtctcgtaaaaccaacagatgaggttgctaatctggaaggtaaagattggggctatggctggaacgcaggcattatgtatgaagtggatgaaaataaccgttacagcctgacttaccgctctaaagttaaaattaagtttaaagacggtgactataaaaatgacgtacctgttcagctaggtcaaatgctgcaaaaagcgggagtgaatttacctgctactggaggccaaaccattggcggtagattggatctcaatttgccagatatctgggaggtttccggttacaaccgcgtagcacctaaatgggctattcactatagcttggcatatgcaggctggagtgaatttaatgaactgaaagggaccagaaaaaaagacggtgcagttttgtttagtaaacatgaaggcttcaaagatgcctaccgtattgctttaggtacaacgtattatcacgatgacaattggacattccgtacaggtatcgcctttgacgatagcccgattcctgctgaaaaccgttctatctccattccagatcaagatcgtttctggttgagtgcaggtgcaacctacgcatttaacaaagatgcttccgttgatgtaggcgtttcatatatgcatggtcagaaagtcactgttaaagagaaattgtctgaagcgttacctaacgcatacgaattcgaagctaagggttctgcctggttgtatggtgtgaacttcaactacgcattctaa

SEQ ID NO: 23570 - protein, 447 aa, Photorhabdus luminescens subsp. laumondii TTO1
MVMNQKNLFTRSALAVAVAIISSNAGAAGFQLNEFSTSALGRAFSGEGVVADNAAVGSRNPAAMTLFDRPSFSIGAVYINPDVDITGKSPVTGKSTNAKNIAPTAWIPNIHFIMPIDDQWFVGTSVTTNFGLATDFSNNYEAGPIGGKTDLTTLNFNLSGAYRLNDHFSFGLGLNAVYADAKIVRHAGALSYMLDQHPKMPKGLVKPTDEVANLEGKDWGYGWNAGIMYEVDENNRYSLTYRSKVKIKFKDGDYKNDVPVQLGQMLQKAGVNLPATGGQTIGGRLDLNLPDIWEVSGYNRVAPKWAIHYSLAYAGWSEFNELKGTRKKDGAVLFSKHEGFKDAYRIALGTTYYHDDNWTFRTGIAFDDSPIPAENRSISIPDQDRFWLSAGATYAFNKDASVDVGVSYMHGQKVTVKEKLSEALPNAYEFEAKGSAWLYGVNFNYAF

SEQ ID NO: 23571 - DNA, 1389 bp, Vibrio vulnificus YJ016
  CDS (1)..(1389): transl_table=11
ttggtttttaaagcttttgctctagatctacaattcgtccccacatattcacttattcagcgaacaaacataatgaaaaccaacaagactcttctatcaacagcagtcgcttttggcctactttctagtgcaaatcttgcaaatgcagcaggcttccagctagcagaatactcggcaacaggccttggccgcgcatacgctggtgaagcagcgatggcagacaacgcaagcgcacaatggcgtaacccagcgatgctgacctacctagagggtacacaagtatctgttggcgcgatttatgtaaacccaaatattgatgttaaaggcaccactacgcttcaacacccagcaaccggacaaactgttgcagtcactgattctgcatctgatgacttcgcgcacgacgcagttattccaaacctttacatctcacatcgttacaatgaccaacttgcgattggttttgcactaggcaccaactacggtatggaaactgacctaggcaaagatttcgctgcctctcatttcggcaatgaagccagcgtaatcagtaaagaagcgaacttaaacctagcttaccaactgaatgaacagttcagtattggtggcggtattcgctacattattgctgaaggtagctttggcgctacagcaccaaaaacgaacatcctcaacctaccacaaggcaccacgttaaaatacatggaaggtgacgataccacatggggttggcaagtaggttctgcgtggcagatcaataagaatcaccgtgttggctttacctacaaatctgaagttgaactgaaattagaaggtcatgcagaaggtgttgggtttgggtttggtacgactatccctaaatcacgcgataatggttacatgtaccttactttgccagcaacagcagagctagcaagtttccaccagttgacagaaaaaatcgctatgcatgcaagtttcaactggacagactggagctctttcgagaaattggaagcccatatggaaacagctgggactcagatggtgaaagtagaaaactgggaagacaactaccgctttgctgttggtgcgacataccaattacagcctaagttagcactaagaaccggtattgcttatgacacctcagccgtgagcgataaaaaccgtaccatcaccattccagaaacggatcgtacttggttgagcatcggtgcgacatacgactggacgcaagatttcacactagacgcaggctttacttacatcatagccaaagatgcgccaattaaggaatcacgtggttacgaatcggatgacaaagcacaagctattggcggtcagtttgtcggtgaaaccacgggtaacgtgtggctaattggtgttcaagcgaactaccacttctaa

SEQ ID NO: 23572 - protein, 462 aa, Vibrio vulnificus YJ016
MVFKAFALDLQFVPTYSLIQRTNIMKTNKTLLSTAVAFGLLSSANLANAAGFQLAEYSATGLGRAYAGEAAMADNASAQWRNPAMLTYLEGTQVSVGAIYVNPNIDVKGTTTLQHPATGQTVAVTDSASDDFAHDAVIPNLYISHRYNDQLAIGFALGTNYGMETDLGKDFAASHFGNEASVISKEANLNLAYQLNEQFSIGGGIRYIIAEGSFGATAPKTNILNLPQGTTLKYMEGDDTTWGWQVGSAWQINKNHRVGFTYKSEVELKLEGHAEGVGFGFGTTIPKSRDNGYMYLTLPATAELASFHQLTEKIAMHASFNWTDWSSFEKLEAHMETAGTQMVKVENWEDNYRFAVGATYQLQPKLALRTGIAYDTSAVSDKNRTITIPETDRTWLSIGATYDWTQDFTLDAGFTYIIAKDAPIKESRGYESDDKAQAIGGQFVGETTGNVWLIGVQANYHF

SEQ ID NO: 23573 - DNA, 1215 bp, Desulfovibrio vulgaris subsp. vulgaris str. Hildenborough
  CDS (1)..(1215): transl_table=11
atgcggaaagttcttctcgtgttgtgtctggccttgtgtccgttgcaggcatgggctgccggctacggcgtctatgagtggagtgcacgtggcaacgcgcttggcggtgccatggtcgcccgggacgccgacccctcgtctgtcgcctacaaccctgccgccatcaccgaccttgagggtgcgcagatccagatgggggccacagccatcgcccctacggcgaagatgacctccaatacgcccggcaagcgtgatgccgagttctccgactccatctgggggctgcccaccttctactacacgcagcagctttcggataactactggttcggtttcggcatgttctcgcgtgttggcctcggcaccgactacaaggacaccgatacatggccggggcgctataactgttcatacgccgccatccattcggtgtcgctcaaccccaaccttgccatgaaactcactgatgagctttccgtggcattcggccttgatgcgacctacctgcgattcatgtacgacaccactatttctcctgtcgatgtcatgcagcagatagacgccgacggttgggcctacggcctcaacctcggtgcccgctacaagccctacgactggctggctttcggtgtggcgtggcgtagcgagatgcaactcacggtcaacggcaacgtcgacttcacgcaaaagggcgctgttcccgctcctgccgctcgcgacgtacgcggtacggaacccatacccgaaagcatcacctttggtgtgatggtgaagcctttcgacaagctgagccttgaagtcgacgccgtgtggacgcgctggagtgcctacaacacactcgtcatcaattatgatcccgccctgtacggcaaatcgagtgtttcggcggagaagaactggaagaacacatggcgtttgcagttcggtgccgaatatgccctcaccgacagcatcgacctgcgcgcaggctacgtgtacgaccagacccctgtcgatgacgcgcatgaggattacgccgtgccctgttccgacaggcagattgccaccaccggtatcggctggaagatcaacgaagcatgggtgctcgacgcctcctacagctatctctggatgaccgaccgagagtacgaggcccgttccggtggcatctacgactccacccgcgaggatgcgcatgcgcacatggcggggttgagccttacctacaagttctag

SEQ ID NO: 23574 - protein, 404 aa, Desulfovibrio vulgaris subsp. vulgaris str. Hildenborough
MRKVLLVLCLALCPLQAWAAGYGVYEWSARGNALGGAMVARDADPSSVAYNPAAITDLEGAQIQMGATAIAPTAKMTSNTPGKRDAEFSDSIWGLPTFYYTQQLSDNYWFGFGMFSRVGLGTDYKDTDTWPGRYNCSYAAIHSVSLNPNLAMKLTDELSVAFGLDATYLRFMYDTTISPVDVMQQIDADGWAYGLNLGARYKPYDWLAFGVAWRSEMQLTVNGNVDFTQKGAVPAPAARDVRGTEPIPESITFGVMVKPFDKLSLEVDAVWTRWSAYNTLVINYDPALYGKSSVSAEKNWKNTWRLQFGAEYALTDSIDLRAGYVYDQTPVDDAHEDYAVPCSDRQIATTGIGWKINEAWVLDASYSYLWMTDREYEARSGGIYDSTREDAHAHMAGLSLTYKF

SEQ ID NO: 23575 - DNA, 1206 bp, Desulfovibrio vulgaris subsp. vulgaris str. Hildenborough
  CDS (1)..(1206): transl_table=11
gtgtaccgtttcatcattgccgtggcgctgtgcgccgtctgggcggcatcggcccatgcggcaggtttcgccatgcatgaattcggggcgaggggcaacgcccttggcggtgccatggtggcgcgacccgccaccgacccgtcttctatcgcattcaaccccgccctcgtcacgcatcttgatacgccgcaggtgcttgccggcgtcaccatggtgcagcccgaggtgaccatagacacacccggtgaatcgacgaccaccgaggccaacgtgtgggccatcccccatgcctacgccacgacgcccctcaccgacaccatgtatttcggcgtaggggcgttcccccgcttcggcctcggcaacgagtactcgaagacgtggcccatggcttctgaactcacctacgtgggcatccagtcggtgtcggtgaacccggtgcttggcttcagaccgacgaaggacttcgccttcggcttcggcgtggaggccatgtacttcgacttcgaggaaaagatgcgcccgttgggcatggatgcccgcatcaagggcgacagcaccggttttggcctgaatggtggcatgtggtggcaggcattcgaagatatcgccctcggtgccagcttccgcacaccggtgaagcagcacgtcaaggggcgcgccacgttcgacaacgtccccgccggatacggcccgctgttcagggacaccgacgccgaaggcgacatcacgctgcccggcgaggtgcgtttcggcgtctattggcaggccaccgagcgccttggtgtcgaggtgggggccatgcgcaccttctggagcagttatgacgagttgcgcatcgactacggttcacccgtgggcggaaagcctgcctccatcaagcagacggagtgggaggacgtgtggcgtctgagcgccggtgccgagtaccgtctcaccgacaacgtcgacttgcgcgcgggctatgtctatgacgaggaaccggtcaattcggcgcatctcgacttcatggtccctgccaacgaccgtcacctcatgagccttggcgtgggctaccacgaagggccgtggcgcgttgatctttcgtacacctacctgctcatcaccgaccgtgagggcgaggtgcatacggcgggcggcaacgtgcccgtgcgcttccacgacggctatgcccatctgctgggcatgagcgcggcgtgggagttctga

SEQ ID NO: 23576 - protein, 401 aa, Desulfovibrio vulgaris subsp. vulgaris str. Hildenborough
MYRFIIAVALCAVWAASAHAAGFAMHEFGARGNALGGAMVARPATDPSSIAFNPALVTHLDTPQVLAGVTMVQPEVTIDTPGESTTTEANVWAIPHAYATTPLTDTMYFGVGAFPRFGLGNEYSKTWPMASELTYVGIQSVSVNPVLGFRPTKDFAFGFGVEAMYFDFEEKMRPLGMDARIKGDSTGFGLNGGMWWQAFEDIALGASFRTPVKQHVKGRATFDNVPAGYGPLFRDTDAEGDITLPGEVRFGVYWQATERLGVEVGAMRTFWSSYDELRIDYGSPVGGKPASIKQTEWEDVWRLSAGAEYRLTDNVDLRAGYVYDEEPVNSAHLDFMVPANDRHLMSLGVGYHEGPWRVDLSYTYLLITDREGEVHTAGGNVPVRFHDGYAHLLGMSAAWEF

SEQ ID NO: 23577 - DNA, 1287 bp, Erwinia carotovora subsp. atroseptica SCRI1043
  CDS (1)..(1287)
atggtcatgagccagaaaaacctgttcaaacaatccacaattgctgttgcggtggccctgttttcagcaaatgtgtccgcagctggtttccagcttaatgaatactcatcatcgggtctgggacgcgcgttttctggtgaaggtgccgtagccgacaatgcgacctccggtagccgtaacccggcgaccatgaccatgtttgaccgcccatcgttctctggtggtgtcacctatatcaacccagatattgatatcagtggttcaagttcatctgggcaaaatgctgatgcgaaaaatatcgcaccacatgcctgggtgccgaacctgcattttattatgccgcttaacgaacagtgggcgattggtgcttctgcggtaaccaactatggtctggcgactgagtttaatgacaactatgtagctggctctatcggcggtcaaaccgatctgctgacctcgaacctgaacctgagcgccgcctatcgcctgaaccagcatttcagctttggtttaggtgttaacgccgtctatgccgatgccaagtttgtgcgtcatgcaggggaactgtccgctgcatttcctcctgctctaggggtgaccccccgtacagaaatatcacgtatggaaggtaaagagtggggctacggctggaacgccggcatcctgtacgaagtagatgaaaacaatcgcatcggcctaacctaccgctctaaagtcgatatcgactttaatggtgactacagtaaccaactgcctgcaggagcaggagcgcttaatggcgcaacagtgcctggtaaactgacgctaaatctgccggaaatgtgggaagcatcggcctatcaccgcgtagcgccgaaatgggcggtacactacagcctgacctacaccagttggagccagttccaggaattgaaagcaacgggtagcaatggacaaaccttgttccagaaagaagaaaacttccgtgatgcttaccgtatcgcactcggtaccacctactatcacgacgataactggacgttccgtagtggtatcgcgtttgatgacagcccggtaccggccgacagacgttctatctccatccccgatcaggaccgtttctggttgagcgcaggtactacctatgcgtttaacaaagatgcctctgttgatgttggcgtgtcctacatgcatggtaaaaaagttaccatcaccgaaaaaggcccaactgcaacgtctccaacgtacaacttcagctctgaaggtaaagcctggctgtacggcgtgaacttcaactatgcgttctaa

SEQ ID NO: 23578 - protein, 428 aa, Erwinia carotovora subsp. atroseptica SCRI1043
MVMSQKNLFKQSTIAVAVALFSANVSAAGFQLNEYSSSGLGRAFSGEGAVADNATSGSRNPATMTMFDRPSFSGGVTYINPDIDISGSSSSGQNADAKNIAPHAWVPNLHFIMPLNEQWAIGASAVTNYGLATEFNDNYVAGSIGGQTDLLTSNLNLSAAYRLNQHFSFGLGVNAVYADAKFVRHAGELSAAFPPALGVTPRTEISRMEGKEWGYGWNAGILYEVDENNRIGLTYRSKVDIDFNGDYSNQLPAGAGALNGATVPGKLTLNLPEMWEASAYHRVAPKWAVHYSLTYTSWSQFQELKATGSNGQTLFQKEENFRDAYRIALGTTYYHDDNWTFRSGIAFDDSPVPADRRSISIPDQDRFWLSAGTTYAFNKDASVDVGVSYMHGKKVTITEKGPTATSPTYNFSSEGKAWLYGVNFNYAF

SEQ ID NO: 23579 - DNA, 1191 bp, Desulfotalea psychrophila LSv54
  CDS (1)..(1191): transl_table=11
atgaaaaagaagatttctgcactggccctgataagccttatggtggcggcaaacgcctctgcctcaggttttagaattccagagcaatctgttgattccacggctaaggccggtgccaatatagcctcgtctacccgggccgatgccacctattttaaccctgccaatatgtcatggctggaagatgggaccatgattcagggtaacctgacctatatccatctcaccaagaatgagtaccatggagctgatggatattcgtctaatgcagaggatgaaaattttgtgatgcccaccggttttatcgtctccccgtattttggagattttcgctttggtatctccaatacctctccctatggccttgccaagagatggaagaataatgccggaactggctctgcccgcgagttttccatggagaccttcgagctgaaccccaccctctcctatcgtattaacgataaggtctctctggccggtggagtacggatgatgtacgccaatgccaccataaaaaatgtattgtacgatatggagggggatactatcgagtggggctataatctggccctctctgttcgtcctgtggagagttggaatatctcggccacctatcgttccaagattgatctgaacttttctgagagcgatgtacgctttaatcctacagctagtggtctcttgcccccatcggctataatatcggcgtccactagtgtgccagcacctgcagtcttagccctcagtacctcgtttcaaccccttgaaaatctgaccgtagaactgaccgtagatagaacattttggtcagcatacgatcagcttaatattgtaacaaatccagcaggttattcaaaatcttttctgaaagattgggatgatggcaatgcctaccgtcttggccttagctatgatcttaacgatgccctgaccctgatggctggttttgcctacgatgagtgtccgtcccccaatagcaccgtgggctttgagctcccagacgcacctgcctggctctactccgttggctttcagtatgccatgaccgagaacctcgatgtaggtatggctgtcctctatgactacaaagaagaaagagatgttaatcatccaggcattggcgctgttggtgaatttaccaatggtggtgccttcttggttagcactggcctgaattatcgtttttag

SEQ ID NO: 23580 - protein, 396 aa, Desulfotalea psychrophila LSv54
MKKKISALALISLMVAANASASGFRIPEQSVDSTAKAGANIASSTRADATYFNPANMSWLEDGTMIQGNLTYIHLTKNEYHGADGYSSNAEDENFVMPTGFIVSPYFGDFRFGISNTSPYGLAKRWKNNAGTGSAREFSMETFELNPTLSYRINDKVSLAGGVRMMYANATIKNVLYDMEGDTIEWGYNLALSVRPVESWNISATYRSKIDLNFSESDVRFNPTASGLLPPSAIISASTSVPAPAVLALSTSFQPLENLTVELTVDRTFWSAYDQLNIVTNPAGYSKSFLKDWDDGNAYRLGLSYDLNDALTLMAGFAYDECPSPNSTVGFELPDAPAWLYSVGFQYAMTENLDVGMAVLYDYKEERDVNHPGIGAVGEFTNGGAFLVSTGLNYRF

SEQ ID NO: 23581 - DNA, 1266 bp, Yersinia pseudotuberculosis IP 32953
  CDS (1)..(1266): transl_table=11
atgaaccagaaaaacctgtttacccgctcagctctggcagcagctatcgctcttatttcatcgaacgtttctgcagccggttttcagttgaatgaatattcagccgccgctctagggcgtgctttctctggtgaaggcgcagtggctgataatgcttccgttggtagccgcaatcctgcagcaatgactttattcgaccgcccttctttctccggtggtgtgatttatattgatccaagtgttgatatcacggggacgtcgccaagtggcaaaagtacggatgccagtaacattgcgccatcagcgtgggttccgaatctccactttattatgccattggatgaacagtgggcaatcggtgcttctgcgacctctaactacggtttagccactgaatttaatgatgattatgtggcaggcatgttaggcggccaaaccgatctgaaaacggctaacctcaacctaagtgccgcgtaccgcctgaatgataacttcagttttggcctggggtttgatgcagtctatgctgatgcgaaaattgtgcgccatctcggtgaagctggcgggggtctattgcctgctaacactgaagccgccaggttggaaggtaccaaatggggttacggctggaatgcgggtattttgtatgaaatcgataaagaaaaccgctacagcttcacttatcgttctgaagtcaatatcgattttgacggtgattacagtaaccaactacctgttattttcggtggtctgggtggaaaaacggtccctggttccctaactctgaacctgcccgccgtgtgggaagtctccggctacaataaagtcgcgccacaatgggccattcactacagcatggcttacaccacctggagcagtttcaaggagttaaaagcaaccgcgtctaatggcgatgtgctgtttgataaacatgaaggcttcagagatgcctaccgtattgcgttagggaccacctattactacgatgataactggacattccgcaccggtattgcctttgatgatagcccgatccccgcaggaaaccgttcaatttccatcccggaccaagatcgtttctggctcagtgcaggtaccacctacgccttcaacaaaaatgcctctgttgatgtcggtattgcttatatgaaaggccagaatgtcagtattaccgaaaagaccccggccccatctaacaccacatatgagttcaactcgaaaggttccgcgatgctatacggtgtgaacttcaactacacattctaa

SEQ ID NO: 23582 - protein, 421 aa, Yersinia pseudotuberculosis IP 32953
MNQKNLFTRSALAAAIALISSNVSAAGFQLNEYSAAALGRAFSGEGAVADNASVGSRNPAAMTLFDRPSFSGGVIYIDPSVDITGTSPSGKSTDASNIAPSAWVPNLHFIMPLDEQWAIGASATSNYGLATEFNDDYVAGMLGGQTDLKTANLNLSAAYRLNDNFSFGLGFDAVYADAKIVRHLGEAGGGLLPANTEAARLEGTKWGYGWNAGILYEIDKENRYSFTYRSEVNIDFDGDYSNQLPVIFGGLGGKTVPGSLTLNLPAVWEVSGYNKVAPQWAIHYSMAYTTWSSFKELKATASNGDVLFDKHEGFRDAYRIALGTTYYYDDNWTFRTGIAFDDSPIPAGNRSISIPDQDRFWLSAGTTYAFNKNASVDVGIAYMKGQNVSITEKTPAPSNTTYEFNSKGSAMLYGVNFNYTF

SEQ ID NO: 23583 - DNA, 1404 bp, Mannheimia succiniciproducens MBEL55E
  CDS (1)..(1404): transl_table=11
atgaaaaaggcaataaataaaaccttcctggcaagttgtattttatgcgccgccggtcaggcttctgccgccgcattccaattagctgaaatttcaacttccggtctgggtcgttcttatgcgggcgaagctgcaattgccgacaacgctgccgtaattgcaaccaacccggcattaatgtctcaatttaaaaccaatcaattctctgccggcggcatttatgtggattcccaaatccgcatgaacggtacggtaagcgccaatcttgcggggcaaaccgttgcacaagcgccagcatcaaaaaccagcgttgtgccggggtcattaattccgaatatgtatttcgtctcgccgcttaacgataaatttgccgtcggtgccggcatgaacgtaaatttcggcttaaaaagcgaatatgaagacgactacgcggccggcgtattcggcgggaagaccgagttaaccgcactgaaccttaacctgagcggttcatatcgggtaactgaaaaattaagcgccggtgtgggtttaaatgcactttatgcaaaagccgaagtatcccgtaacgccggtattttagcggatgccgtcggcaatgttgcaagcaatccgcaagcattaagcgctatcgttgcgcaacgacccgatctggcaagcaaaatgggggcgctgagcggtttggcaagcggtctgcaaagagataccctattaacgcatttacaggataaaacggcttgggcgttcggttataatcttggtctggcttatgatctcaacgaaagaaaccgtttcggtatcgcctatcattcaaaaattgatattgattttaaagaccgtaacgcggtcagttatcttccgtacggcacaacgccttacataggtgaaggcggcttggtgctacatttgccaagttattgggaattttccggttatcataaattaaccgataaattcgccatgcattacagctataaatataccgaatggagccgtttgaagaatcttcacgccacttacgcggatagatcactcagaaatgacggtttagccttccataaagatgaagaatacaaagacaattcccgcattgcattaggtgcaacctacgaagtggatgaaaaattaacgctacgcgccggtgtcgcttatgacgagtccgccgcacctcgtactcacgcaagcgcttccattccggatactaaccgtacctggtacagccttggcgcgacctataaatttactccggcactttccgttgatttcggtttcgcccatttacgcggcagaaaacttgacttcagcgaagaacaaagtttagccggcggtttagttactgtgaaagccgattataaatctaaagcgacggctaacctttacggactgaacataaattatagtttctaa

SEQ ID NO: 23584 - protein, 467 aa, Mannheimia succiniciproducens MBEL55E
MKKAINKTFLASCILCAAGQASAAAFQLAEISTSGLGRSYAGEAAIADNAAVIATNPALMSQFKTNQFSAGGIYVDSQIRMNGTVSANLAGQTVAQAPASKTSVVPGSLIPNMYFVSPLNDKFAVGAGMNVNFGLKSEYEDDYAAGVFGGKTELTALNLNLSGSYRVTEKLSAGVGLNALYAKAEVSRNAGILADAVGNVASNPQALSAIVAQRPDLASKMGALSGLASGLQRDTLLTHLQDKTAWAFGYNLGLAYDLNERNRFGIAYHSKIDIDFKDRNAVSYLPYGTTPYIGEGGLVLHLPSYWEFSGYHKLTDKFAMHYSYKYTEWSRLKNLHATYADRSLRNDGLAFHKDEEYKDNSRIALGATYEVDEKLTLRAGVAYDESAAPRTHASASIPDTNRTWYSLGATYKFTPALSVDFGFAHLRGRKLDFSEEQSLAGGLVTVKADYKSKATANLYGLNINYSF

SEQ ID NO: 23585 - DNA, 1437 bp, Legionella pneumophila str. Paris
  CDS (1)..(1437): transl_table=11
gtgaaaattaggcacaaacccttaagaacgctggtgagtactgctgttctcggagttctagctactggtacattaaacgcaggtggattttctttgtataccgaaggagctggatatacaacaggtaacttcgctgccggtgtggctgctgaagcggccgatgcgtctacaggttggtacaacccagcaggtttggtattaatccgcgatcagcaagctgtatttgccggtgtcggggtatttccgactgccaagctaagcgggattagtacttattcaacgattaatccgcctcctgcgccttcttttatttattctgaagttttcaataatatcaacggggctgaggatgcttttgttccttcgtttcattatgccttgccactgggtgaaaatgctacgtttgggttaagtgtagtatcaccatttggattggcaacagattggggtcccgattctccagtgcgctatcaagccacttttactgagttaattaccaccaatatctcacctgaaattgggggtagattaacagagcacgttgctttaggtgctggcttggatttgcaatatgcccgggttaaatacaatcgtatacttggcgcacctaatataatgaatgctttggatcttaatcccatgttagctgattcactgacttacaataaaggacactcttttggagtaggttttcatgtaggcgttctgggtatgtttaacgataatcatactcgtcttggagtaaactatcagtcagagatgagacatgaattctatggctatagccggctgacaggaccattggcaattccgggcaatatatttgcacctacatttccacaactgggcgtatttcaaagcgatgatttattcagtaatgccattgatttacctgatgtagtgactattagtgcttatcatgatgtcaatgacaaatttgcattgttaggctctttggtttataccgcatggagcagctttaaaacggtacaacttactaatgtagctgccccaagattggctgcaaatggaggtgtttcgcaagtcaaggcgataagtgtatcaccacagaattatactgatactttgcgggtggcgattggtgccaattatcatgttaatgacaaattaatgctccgtgtgggtggtggttatgatccaactcctacgaatgatattgacagagacgtacgtttaccggatacagatcgatgggctttatctgctggcgctcattatcaggcaactaataacattggtgtcgatatcggatatacccatttattcacttcaagtgatccagtgattaatagaaccgatgtgttaacggcaacaacaagctataacgttacagcatctggaaccgcaggtgccaatttagtaggtgtgcaagcgacttggacaattgataaagaacctccagcaccgactaaataa

SEQ ID NO: 23586 - protein, 478 aa, Legionella pneumophila str. Paris
MKIRHKPLRTLVSTAVLGVLATGTLNAGGFSLYTEGAGYTTGNFAAGVAAEAADASTGWYNPAGLVLIRDQQAVFAGVGVFPTAKLSGISTYSTINPPPAPSFIYSEVFNNINGAEDAFVPSFHYALPLGENATFGLSVVSPFGLATDWGPDSPVRYQATFTELITTNISPEIGGRLTEHVALGAGLDLQYARVKYNRILGAPNIMNALDLNPMLADSLTYNKGHSFGVGFHVGVLGMFNDNHTRLGVNYQSEMRHEFYGYSRLTGPLAIPGNIFAPTFPQLGVFQSDDLFSNAIDLPDVVTISAYHDVNDKFALLGSLVYTAWSSFKTVQLTNVAAPRLAANGGVSQVKAISVSPQNYTDTLRVAIGANYHVNDKLMLRVGGGYDPTPTNDIDRDVRLPDTDRWALSAGAHYQATNNIGVDIGYTHLFTSSDPVINRTDVLTATTSYNVTASGTAGANLVGVQATWTIDKEPPAPTK

SEQ ID NO: 23587 - DNA, 1443 bp, Legionella pneumophila str. Lens
  CDS (1)..(1443): transl_table=11
gtgaaaattaggcacaaacccttaagaacgttagtgagtactgctgtcctcggagttctggctactggtacattaaacgcaggtggattttctttgtataccgaaggagctggatatacaataggtaacttcgctgccggtgtggctgctgaagcagcggatgcctctacaggttggtataacccagcaggtttggtattaatccgcgatcagcaagctgtatttgcaggtgtcggtgtattcccaactgccaagttaagcggagttagtacttactcaacaattaatccgccccctttcccttcttttgtttattctgaggttttcaataatatcaatggggctgaggatgcttttgtgccctcgtttcattatgccttgccattgggtgaaaatgctacgttcgggttaagtgttgtatcaccatttggattggcaacagattggggcccagattctccagtgcgctatcaagccacttttactgagttaattaccaccaatatatcacccgaaattggtggtagattaacagagcacgttgctttgggggctggtttggatttgcaatatgctagagttaaatacaatcgtatacttggagtacctaacatactgaatgttttgccaccttttaaccccatgttagccgattcactgacttacaataaaggacactcttttggagtaggttttcatgtgggtgttctgggcatgtttaacgataatcatactcgtctcggtgcaaactatcagtcatcaatgcggcatgaattctatggctacagtcgtctaacagggccattggcaagtccaggtaatatattagcgccatttttgttcccggcacctggcatatttcaaagcgatgatttatttagtaactcaattgattttcctgatgtagtgactattagtgcttatcatgatgtcaatgacaaacttgcactgttaggctctttagtttatactgcatggagtagttataaaacagtacaactctataatgcagctgccggaagaccagcggataatggaaatgtttcccaagccaaggcgataagcatatcaccgcagaattataacgatactttgcgggtagcgattggtgccaattatcatgttaatgataaattaatgcttcgtgtgggtggtggttatgatccaacacctaccaatgatattgacagagacgtgcgtttaccggatacagatcgttgggctttatctgctggcgctcattatcaggcaacgaataatatcggtctcgatatcggatatacccatttatttacttcaagtgatccagttattaacaagactgatgcgtttactgcaacaaccagatataacgttacagcatctggaactgcaggtgccaatttagtaggtgtgcaagcaacttggactattgataaagaacctccagcaccgactaaataa

SEQ ID NO: 23588 - protein, 480 aa, Legionella pneumophila str. Lens
MKIRHKPLRTLVSTAVLGVLATGTLNAGGFSLYTEGAGYTIGNFAAGVAAEAADASTGWYNPAGLVLIRDQQAVFAGVGVFPTAKLSGVSTYSTINPPPFPSFVYSEVFNNINGAEDAFVPSFHYALPLGENATFGLSVVSPFGLATDWGPDSPVRYQATFTELITTNISPEIGGRLTEHVALGAGLDLQYARVKYNRILGVPNILNVLPPFNPMLADSLTYNKGHSFGVGFHVGVLGMFNDNHTRLGANYQSSMRHEFYGYSRLTGPLASPGNILAPFLFPAPGIFQSDDLFSNSIDFPDVVTISAYHDVNDKLALLGSLVYTAWSSYKTVQLYNAAAGRPADNGNVSQAKAISISPQNYNDTLRVAIGANYHVNDKLMLRVGGGYDPTPTNDIDRDVRLPDTDRWALSAGAHYQATNNIGLDIGYTHLFTSSDPVINKTDAFTATTRYNVTASGTAGANLVGVQATWTIDKEPPAPTK

SEQ ID NO: 23589 - DNA, 1293 bp, Photobacterium profundum SS9
  CDS (1)..(1293): transl_table=11
atgaataagaataagaataaaataacattatctttagcagcagcgttaatactgggcatgagtgccaatacaatggccgccggttttcaacttgcagaatattcagcaacgggcttaggccgtgcgtttgctggtgaagcggcaatggcagacaatgccggagcacaatttcgaaacccagcaatgctgacttaccttgaaggtacacaagtatcaatgggggctatttatgttgatccaaatattgatgttgaaggttcggtaaacggtacacaaaccaaagccagcgatattgcaaactcagccgttattcctaacttctacctatctcaccaacttaacgacaaggtatttttaggtttagcgttcggtactaactacggcatggaaactgaactagcgggtgattatcttgctacgcaatttggtaaccaagcgaaagtaatgtcgattgaaattaacccaaacattgcttacaaaatcaatgagcagtttagtgttggtggtggtatccgttacgttatgggagagggtcactttggtgcagctgcatcttctgacatgccacttgctccaggagttacagtacctaaaggcgcagacctgaagtacatggaaggtgatgatacagcgtggggttggcaggcgggtgccgcatggcaaatcaatgaaaataaccgcattggtttcaactaccgttctgaagttgagttgaacttaacaggtagtgcttctggggctatttacgacctcgaagcactaaaaaaaggtaaaaagccaagcgcaagttacgcgggtagcatggcattaactttacctgcaacagcagaaattgcgagctttcaccaattaacgaataagattgcggtacacgctagtttcaactggacagattggagcagcttcgacaagttggaagctaaaatcccatcgctatacggtaatgatcctgatctgattaaagaagaaaactgggaagacaactaccgcttagctgtgggtacaacttaccaatacacgaacaagctcgtgctgcgctcaggtattgcttacgatacatcagcagtaagtgatgagcaccgtacacaaacgattccagaaactgaccgcctatggctaagtatgggtgctggctacaactggtcacaaaacctaacacttgatgcaggcttcacgtacatatttgccaaagatgcaccaatgaacgaagtggatccaagccttggacaatttaaaggtgaaaccactggcagcatatggcttgttggtgtacaagcaagctaccgcttctaa

SEQ ID NO: 23590 - protein, 430 aa, Photobacterium profundum SS9
MNKNKNKITLSLAAALILGMSANTMAAGFQLAEYSATGLGRAFAGEAAMADNAGAQFRNPAMLTYLEGTQVSMGAIYVDPNIDVEGSVNGTQTKASDIANSAVIPNFYLSHQLNDKVFLGLAFGTNYGMETELAGDYLATQFGNQAKVMSIEINPNIAYKINEQFSVGGGIRYVMGEGHFGAAASSDMPLAPGVTVPKGADLKYMEGDDTAWGWQAGAAWQINENNRIGFNYRSEVELNLTGSASGAIYDLEALKKGKKPSASYAGSMALTLPATAEIASFHQLTNKIAVHASFNWTDWSSFDKLEAKIPSLYGNDPDLIKEENWEDNYRLAVGTTYQYTNKLVLRSGIAYDTSAVSDEHRTQTIPETDRLWLSMGAGYNWSQNLTLDAGFTYIFAKDAPMNEVDPSLGQFKGETTGSIWLVGVQASYRF

SEQ ID NO: 23591 - DNA, 1251 bp, Photobacterium profundum SS9
  CDS (1)..(1251): transl_table=11
atgaacaagaagcgtctgtttactaaaacgatgattgctgcagcaatcacactaacatctcagcaagctctttctgctggtttccaacttaacgcacaatcagcaactggccttggtcgcgcatttgctggtgacgccgttattgctgataacgcatcagtaatgtcacgtaacgccgcggcaatgtctttattcgatgcgcctgcaatctcgttaggtcttaacgttattgatacggacattaatattaaaaatgcccagtattcaaatccccgctctgcaaattcaggttcactggatgatcagtctgttggtgattcaactttagttccgaatatttattatattcacccaataaatgaccaatgggcagtaggtgctggaatttactctaattttggtacaaaaactgaatttagtgatgactatgctgccaatgaatttggtgggttaactgatgttaagagtgtaaactttgcattaagcgcttcataccgtatcaaccaacaatggagcgttggtggtggattagatattgtctatggttcaggaaaattgaagcgctctgttaaagttggtccaccaacagctgaacagaaaataaatctacttgatgttgatgctgacggtgttggtgtgggttggaacgtaggtacggtatttgagctagatgaccgcaaccgtttcggtctatcataccgctatagcccagagctagaaactgaaggtgacatgtcctttgcaggctcaacaagcggcaacccagatatcagtaacgacaaattaaaaatgccactacctgatatggcagagttctctggtttccacaaattaaacgacaaatttgcagtccactatagcgtacaatggattggttggagcgcatttgacaaactagcaacaactggtggcgataccctcaacacttacgaatggcaagacggctggcactatgcgttaggtggcacttactacctaaataacgattggactttacgtactggttatatgtatgacaccagcgcacaagatcaaaaaacatcgatttctgtaccagattccgatcgtcaatggttctcaggtggctttacttaccacctagatgccaaatctaacattgatttcggtctaacctacctaatgggtaaagacgttgatgtaaatgaagtatcaccagtcggaacaactatttcggcaacgactcgtgcaaacgcattgctatacggtattcagtacagccgttcgttctaa

SEQ ID NO: 23592 - protein, 416 aa, Photobacterium profundum SS9
MNKKRLFTKTMIAAAITLTSQQALSAGFQLNAQSATGLGRAFAGDAVIADNASVMSRNAAAMSLFDAPAISLGLNVIDTDINIKNAQYSNPRSANSGSLDDQSVGDSTLVPNIYYIHPINDQWAVGAGIYSNFGTKTEFSDDYAANEFGGLTDVKSVNFALSASYRINQQWSVGGGLDIVYGSGKLKRSVKVGPPTAEQKINLLDVDADGVGVGWNVGTVFELDDRNRFGLSYRYSPELETEGDMSFAGSTSGNPDISNDKLKMPLPDMAEFSGFHKLNDKFAVHYSVQWIGWSAFDKLATTGGDTLNTYEWQDGWHYALGGTYYLNNDWTLRTGYMYDTSAQDQKTSISVPDSDRQWFSGGFTYHLDAKSNIDFGLTYLMGKDVDVNEVSPVGTTISATTRANALLYGIQYSRSF

SEQ ID NO: 23593 - DNA, 1248 bp, Photobacterium profundum SS9
  CDS (1)..(1248): transl_table=11
atgtccaaaaatataaaattcagtgctattgccgtaacagccgctttcatgtcacttaatgtaaatgcagcgggcttccaagttaatgaacactctgcatctggccttggccgagcattcgcaggtgatgctgctattgccgataacgccgccgtactttcacgtaaccccgccgcaatgacccttttcaaaacagctgaaatttcaggcggattcagtattgttgaccctagtattgatgttgaagataaaagctttggccaaacagctaaagatgtagcgcccgtcgcttttgtaccagcaggttactacattcaaccaatcaatgaccgctttgctgttggcttggcactcttttccaactatggcgtgaccaccgagtatccagccgattttaatgcgggatcttccgccggtgaaacatcactgattaccgttaacttcaacccaaacatcgcttaccgtatcaatgacaatttcagtattgggggtggcgtaagcttggtgtatggcgaggccgaattaaaccgtcaccttggctctctttctgctgcagttcctgactctagccccagtgataaaacaatcaccatgaaaggggatacctttgattggggttggaacattggtgcgttatacgaatacaacgaaaacaaccgtttcggtcttagctaccgttcacaagtcgacctcgactttgaaggtgacttcactgactaccttggtgccatcactggtacacccaataacaccataaccggtaagctgccggtagtattacccgccattgctgagttctcaggcttccaccagttaaacaatcaatgggccgtgcactacagcgttcaatggacgcaatacagcaaatttgaagaattaaaagcaacaagtaacgaatgttcaccaggttacaacggggaatcaggcacttgtttgctaaaagaagaagattacgacgacagtttccgctatgcattaggtgctacatacaccatcaatacaacatgggcagtacgtgctggttttgcgtttgacgaacaagccggtcaagcaaccttaagtattcctgataccgaccgttactggtattcagcaggagctacttacacctacaaccaaaatatgtcatttgatctcggcctgacttatctatacggaaaagaaggcaccttcgaagaagatggcagcactttcacttcatccggtggcgccattattagtgccgcacaaatgaactacacattctag

SEQ ID NO: 23594 - protein, 415 aa, Photobacterium profundum SS9
MSKNIKFSAIAVTAAFMSLNVNAAGFQVNEHSASGLGRAFAGDAAIADNAAVLSRNPAAMTLFKTAEISGGFSIVDPSIDVEDKSFGQTAKDVAPVAFVPAGYYIQPINDRFAVGLALFSNYGVTTEYPADFNAGSSAGETSLITVNFNPNIAYRINDNFSIGGGVSLVYGEAELNRHLGSLSAAVPDSSPSDKTITMKGDTFDWGWNIGALYEYNENNRFGLSYRSQVDLDFEGDFTDYLGAITGTPNNTITGKLPVVLPAIAEFSGFHQLNNQWAVHYSVQWTQYSKFEELKATSNECSPGYNGESGTCLLKEEDYDDSFRYALGATYTINTTWAVRAGFAFDEQAGQATLSIPDTDRYWYSAGATYTYNQNMSFDLGLTYLYGKEGTFEEDGSTFTSSGGAIISAAQMNYTF

SEQ ID NO: 23595 - DNA, 1314 bp, Salmonella enterica subsp. enterica serovar Paratyphi A str. ATCC
  CDS (1)..(1314): transl_table=11
atggtcatgagccagaaaaccctgtttacaaagtctgctctcgcagtcgcagtggcaatcatctccacccaggcctggtctgcaggctttcagttaaacgaattttcttcctctggccttggccgggcctattcgggtgaaggcgcaatcgcagatgatgcgggtaacgttagccgcaacccggcgttaattaccatgtttgaccgcccgacgttttcagcgggcgcagtttatattgatcctgatgttaatattagcgggacatcgccatctcgtcggacgttagatgcggataacatcgcgccgacggcctgggtgccgaacgtccattttgtcgccccgattaacgaccagtttggctggggggcttctattacctctaactatggtctggcgacagagtttaacgacacatacgccggcggctcggttggcggtacgaccgatcttgaaaccatgaacctgaatttaagcggcgcttatcgcttaaatgaggcctggagcttcggcctcggctttgatgcggtatacgcacgtgcgaaaatcgaacgttttgcgggcgatttaggccagttggtcgcggcacagaatccggcgctggcgccggtcgcgggtcggattcccagcgacaccaagattgcccacctgaacggtaatcagtggggctttggctggaatgccggtatcctttatgaactggataaaaataaccgctacgcgctgacctaccgctcggaagtcaaaattgactttaaaggcaactacagtagcgatcttcccatcgctataaaccaatttaatctgcctatcccaacggcaaccggcggcgcgacgcagtcaggctacctgacgctgaatctgccggaaatgtgggaagtgtccggttataaccgtgtggcgccacagtgggccatccactatagcctggcctataccagctggagtcagttccaggaattgaaggcaaaatcgaccgctggcgatacgctctttgagaagcatgaaggctttaaagacgcttatcgcattgcgttaggtaccacctattactacgatgacaactggacgttccgtaccggtatcgccttcgatgacagcccggtaccagcgcaaaaccgttctatctctattccggaccaggaccgtttctggctgagcgccggtacgacttacgcctttaacaaagatgcgtctgtcgacgttggcgtctcttatatgcatggtcagagcgtgaaaattaatgaaggcccttatcagtttgaatctgaagggaaagcctggctgttcggtactaactttaactacgcgttctaa

SEQ ID NO: 23596 - protein, 437 aa, Salmonella enterica subsp. enterica serovar Paratyphi A str. ATCC
MVMSQKTLFTKSALAVAVAIISTQAWSAGFQLNEFSSSGLGRAYSGEGAIADDAGNVSRNPALITMFDRPTFSAGAVYIDPDVNISGTSPSRRTLDADNIAPTAWVPNVHFVAPINDQFGWGASITSNYGLATEFNDTYAGGSVGGTTDLETMNLNLSGAYRLNEAWSFGLGFDAVYARAKIERFAGDLGQLVAAQNPALAPVAGRIPSDTKIAHLNGNQWGFGWNAGILYELDKNNRYALTYRSEVKIDFKGNYSSDLPIAINQFNLPIPTATGGATQSGYLTLNLPEMWEVSGYNRVAPQWAIHYSLAYTSWSQFQELKAKSTAGDTLFEKHEGFKDAYRIALGTTYYYDDNWTFRTGIAFDDSPVPAQNRSISIPDQDRFWLSAGTTYAFNKDASVDVGVSYMHGQSVKINEGPYQFESEGKAWLFGTNFNYAF

SEQ ID NO: 23597 - DNA, 1272 bp, Azoarcus sp. EbN1
  CDS (1)..(1272): transl_table=11
atgcatacgacgatgattgcccgggcagtcccggcggcgctgctgacgatggcgtccggcctggcctcggctgccggtttccagctgatggagcagaacgccagcggactcggcaacgcctacgcgggctccgcggcggtcgccgagaacgccgcgacgatcttcttcaatccggccggcatgacgcagctgcaggcgcgcgaagcgtcgttcggcgtgacggcggtgcggccgagcttcgagttcagcgacaagggctcgcaaagcggtgtgctcaggggcgaaggcgacgacgcgggcgggtgggaggcgttgccgaacgcctacctgtcgtgggcgctgaacaaggacctgtatgtcggtgtcggcctcggtgccccgttcggcctcgtcacggattacgacgagtcgtgggtcggtggcgcccagtcgctgaacttcgagatcaagacttacaacatcaacccgtcgatcgcgtaccgcgtcaatgacaagctttcgctcggtgccggcctgaactggcagcgcgccgaagccgagtacgagcgcatcgccgcggtcgcgcccggcctcgccacgacattcgcgacgctcgacgtcgactccgatgcgtggggctggaacatcggcgtgctgttcacgccgtcgccgtcgatgaaaatcggtgtctcgtaccgatcgagaatcgagcacgagctcgaaggcgacctgaagctcaaggggacgctcgcgggccgggtgccgcagacgagcaacggcaaggcccgcgccgatgtcgatctgcccgacacgctgatcatgagcgtcgcgcagaagatcgacgagcgctgggaaatgctcggcgacctgtcgtggacgggctggagcagcatcaggaaagtcgatatcgaccgccgctcggggccgctgtcgggcgtcacggtgcagacgctcgacaccgattatcgcgacagctggcgcgtcgcgctcggcgcgaactacaagctcaacgacgcatggaagctgaagttcggcgtcgcctacgaccaggcgccggtgaggagccgggaccgccggctcgtcgcgctgccggacaacgatcgcacctggtatgcgctcggcgcgcagtggaaagcgacgaagacgacgacgctcgatgtcggcggcgcttatctctacgtgcgcgacacgaagatcgacaacgaccagagcgcggcaggacgcgggcgcgtgaccggcgaatacgagaccgacgtctggctcttcggcgcgcagtactcgatggcgttctga

SEQ ID NO: 23598 - protein, 423 aa, Azoarcus sp. EbN1
MHTTMIARAVPAALLTMASGLASAAGFQLMEQNASGLGNAYAGSAAVAENAATIFFNPAGMTQLQAREASFGVTAVRPSFEFSDKGSQSGVLRGEGDDAGGWEALPNAYLSWALNKDLYVGVGLGAPFGLVTDYDESWVGGAQSLNFEIKTYNINPSIAYRVNDKLSLGAGLNWQRAEAEYERIAAVAPGLATTFATLDVDSDAWGWNIGVLFTPSPSMKIGVSYRSRIEHELEGDLKLKGTLAGRVPQTSNGKARADVDLPDTLIMSVAQKIDERWEMLGDLSWTGWSSIRKVDIDRRSGPLSGVTVQTLDTDYRDSWRVALGANYKLNDAWKLKFGVAYDQAPVRSRDRRLVALPDNDRTWYALGAQWKATKTTTLDVGGAYLYVRDTKIDNDQSAAGRGRVTGEYETDVWLFGAQYSMAF

SEQ ID NO: 23599 - DNA, 1371 bp, Xanthomonas oryzae pv. oryzae KACC10331
  CDS (1)..(1371): transl_table=11
ttgcagtccttatccggagagctacaacttatgtctaccgcttccattctcagccgcgccaccctgctggccgtcggtatcgccggcgtgctggccgttggtcaggcgcacggcgccgcgttccagctgaaggaaaacagcgccaagggcctcggccgcgccttcgcaggttcgggcagcgccccggacgatgcctccatcatggtcaacaacccggccggtatgcgccagttggacggtcgcctgttccaggccgacgtcagcgccatcagcttctcggccaggttccagcctgagtcggccaactacgccaacggcgccccggtctccggcggtaacggcggcgatgccggcatgatcgcgccggtgccggcgatgtacttccacgtgccgttcggcgagaacgacaacatgcacctgggcacctcgctgaccgtgccgttcggcttcaagaccgaatacgaccgcgactgggtcggccgctaccacggcaccaagaccgagctgcaggcgatcgacttcaacgtcgcgttctcctatgacgtgaacccgtacgtgtccttcggcgcctcggtgttcgccgagcgtctggatatcgacctggccaacgccgtcgattttggcagcgtgctggctgcgcgccgcgtgccgggcttcgcgccgggcagcgccgatggctactcgcgcatcaagggcgacagcactgaagtgggcttcactctgggtggcttgttcagcatcgatgagaacacccatatcggcttcagctaccgctcgcaggtggaacacaagatcaccgatggcactgccgacttcaccgtgccgggcagtgctgccgcggtgctgagcgtggccgcaccgggcaccttcgtcgacaccaagggccgcgctaccgtcaagctgccggccagcgcgaccgccagcttcacgcacaacgtgaacgagcagtggtcgatcatggccgacgtcacccgcaccgcctggagcaagttcgaccaggtgaccgtggacttcgcctccaaccagcccgacagtgtgctggacttctcctaccgcgacaccaccttcgcctcgatcggtgccgattaccgcatgagcgatacggtgaccctgcgcggcggcctggcatacgaccagaccccgaccacggccgaacaccgcgacgtgcgcgtgccggacgcgagccgcaagtgggtttcgctgggtatgagctggcgtccgtcggcgcagaccgaatacaacgtcggttacacccacctgttcaccaacaacccgaccagcgatacccgcagcgccaccggcgaccgtctggctggcagctatgacgtgaagggcgacgtgctggccgcgtcgatcaactacaagttctga

SEQ ID NO: 23600 - protein, 456 aa, Xanthomonas oryzae pv. oryzae KACC10331
MQSLSGELQLMSTASILSRATLLAVGIAGVLAVGQAHGAAFQLKENSAKGLGRAFAGSGSAPDDASIMVNNPAGMRQLDGRLFQADVSAISFSARFQPESANYANGAPVSGGNGGDAGMIAPVPAMYFHVPFGENDNMHLGTSLTVPFGFKTEYDRDWVGRYHGTKTELQAIDFNVAFSYDVNPYVSFGASVFAERLDIDLANAVDFGSVLAARRVPGFAPGSADGYSRIKGDSTEVGFTLGGLFSIDENTHIGFSYRSQVEHKITDGTADFTVPGSAAAVLSVAAPGTFVDTKGRATVKLPASATASFTHNVNEQWSIMADVTRTAWSKFDQVTVDFASNQPDSVLDFSYRDTTFASIGADYRMSDTVTLRGGLAYDQTPTTAEHRDVRVPDASRKWVSLGMSWRPSAQTEYNVGYTHLFTNNPTSDTRSATGDRLAGSYDVKGDVLAASINYKF

SEQ ID NO: 23601 - DNA, 1344 bp, Vibrio fischeri ES114
  CDS (1)..(1344): transl_table=11
atgaatacaacattttcgcgtacgctgcttgcaacaagtactttatttattagtgcgacatctatagctggaggatttcaagtaaacgaacattcagctacaggtttaggtcgagcgtttgcaggtgaggcggttattgcagataacgcttcagtattaagtcgtaatgcggcggcaatgacgatgtttgattcaacatccatttcaatggggttaactatggttaagcctgatgtaagtgtggaaaatgtagaatatcaacaactgaaaattaatgaaaatatggggattccgacaggaataggattcaacagtatgacggtttctaatactgatgggattgcaggaacggagtttgttccaaatttttatgtaattcaccccttaaatgataaatgggcatttggattcgcaagttattctaattttgggacaggcacagaatttgaggataactatgatgcttctatttttggtgggaaaacagaggtaaaaagtgccaatatcggttttagtttggcatataagcttaatgaacaatggagttttggtgctggaattgatgttatttatggtattggtaatttatatcgggatcttgacagtacgatttgtaataagccttttgcgggagcaaaagattgttctattaagaaaactaaagccttggatatatcagctactggtgtaggcattggcgggaatgttggtgttgtatatcaggttaatgagcgcaatcgttttggtttaagttataaatacagtccagaagttgaagcggaaggtgatgttgattatttagagaatcatgtacatggcgtgacaagtgatagtgtgtatttaccgctacctgatattgctgaattttcgggttatcatttactaaccgataaagtggcaatccattatagttatcagtggattggttggtctgcatttgattctgttgatattaatgatgttaattctgatcaacgtatttcggtaaaagaatacaattggaaaaactcatatcatatcgctgtaggtacaacttattacttaaataaaaaatggacattacgtgcaggctatatgtttgataaaacgccagtagatgaaattacgtcaatttcgattcctgattcagatagacaatggttttcaactggtttcacttataactggagtaaccaaaccagcgtagattttggttttacgtatttaattggtgaagatgttgaggtttcagaggttcaagatattccggatatgatgggcattactacgcctaatccatctttaactgcaaccacacacgctaatgctgtgttagccgctattcaattgagtcatagtttctaa

SEQ ID NO: 23602 - protein, 447 aa, Vibrio fischeri ES114
MNTTFSRTLLATSTLFISATSIAGGFQVNEHSATGLGRAFAGEAVIADNASVLSRNAAAMTMFDSTSISMGLTMVKPDVSVENVEYQQLKINENMGIPTGIGFNSMTVSNTDGIAGTEFVPNFYVIHPLNDKWAFGFASYSNFGTGTEFEDNYDASIFGGKTEVKSANIGFSLAYKLNEQWSFGAGIDVIYGIGNLYRDLDSTICNKPFAGAKDCSIKKTKALDISATGVGIGGNVGVVYQVNERNRFGLSYKYSPEVEAEGDVDYLENHVHGVTSDSVYLPLPDIAEFSGYHLLTDKVAIHYSYQWIGWSAFDSVDINDVNSDQRISVKEYNWKNSYHIAVGTTYYLNKKWTLRAGYMFDKTPVDEITSISIPDSDRQWFSTGFTYNWSNQTSVDFGFTYLIGEDVEVSEVQDIPDMMGITTPNPSLTATTHANAVLAAIQLSHSF

SEQ ID NO: 23603 - DNA, 1299 bp, Vibrio fischeri ES114
  CDS (1)..(1299): transl_table=11
atgaacaacaataaaaatcgtctatctatcgcagtggcacttggcctattaggttcagttgcaagctcaaacactatggctgcaggtttccaacttgcagaatattcagctacaggtctaggccgtgcttacgcaggtgaagcagcgatcgctgatggtgctgacgcacaatggcgcaacgttgcaatgctgacatatttagaaggtactcaagtttctgttggtggtatctacgtaaaccctaatattgatgttgaaggccaatcaagtatgagcccaacatcaactaaatcagaagactttgcacacgatgcttttattccaaacttgtatgtttcacaccgtgtgaatcaacaactagccatcggtttcgcagttggcactaactacggtatggaaacagacttaggtactgactttacaggtaccaactttggtaatgaagctagtgttattactaaagaaattaatgtaaatatggcttaccaaattaaccaacaattcagtattggtggtggcgttcgttacgttattgcggaaggtagtttcggggctgtagcaccaacacaaacaccaacatttcatccatcacttcctaaaccaggtacaactctaaaatacatggaaggaacagacgaggcatggggatggcaagtaggtactgcgtggcaaatcaatgatacaaaccgtatcggatttaactataaatcagaagtaaaactagatttaacaggccatgcaaatggtgttggttttgatctgtatgcaaagaacccaagtgatagatactcaggttcaatggaattagctctcccagcaacagctgaacttgcaagctttcaccaactaaatgataagctagcaattcacgcaagctttaactggacagactggagcagctttgaaaaattagaagctaatatcccatcacttaaagttgcgactcaggagattaagcaagaaaattgggaagataactatcgcttagctgttggcggtacttacgctcttgatcaaaaagtaacgttacgtacaggtattgcttacgatacttcagcagtaagcgaagaaaaccgaacggcaacaatccctgaaactgaccgtttatggttaagtatgggtgcaggctacgcttggtctgataacctaactctagatgccggttttacatatatttttgcaaaagatgcaaaaatgcatgaaaaagatccaaaatcagctccattcggcggtacatttgaaggggaaacaactggtaatgtatggctagttggtgttcaagcgaactaccgtttctaa

SEQ ID NO: 23604 - protein, 432 aa, Vibrio fischeri ES114
MNNNKNRLSIAVALGLLGSVASSNTMAAGFQLAEYSATGLGRAYAGEAAIADGADAQWRNVAMLTYLEGTQVSVGGIYVNPNIDVEGQSSMSPTSTKSEDFAHDAFIPNLYVSHRVNQQLAIGFAVGTNYGMETDLGTDFTGTNFGNEASVITKEINVNMAYQINQQFSIGGGVRYVIAEGSFGAVAPTQTPTFHPSLPKPGTTLKYMEGTDEAWGWQVGTAWQINDTNRIGFNYKSEVKLDLTGHANGVGFDLYAKNPSDRYSGSMELALPATAELASFHQLNDKLAIHASFNWTDWSSFEKLEANIPSLKVATQEIKQENWEDNYRLAVGGTYALDQKVTLRTGIAYDTSAVSEENRTATIPETDRLWLSMGAGYAWSDNLTLDAGFTYIFAKDAKMHEKDPKSAPFGGTFEGETTGNVWLVGVQANYRF

SEQ ID NO: 23605 - DNA, 1152 bp, Vibrio fischeri ES114
  CDS (1)..(1152): transl_table=11
atgaaacccttttttagctactctttaactgcctctgctgttttgctcagttttaatgccttttctagcggattatttcttcaggaagcaaccgttgcgaatgctggtacaacaggcgcaggagacggcgtttacactgaatctgcggctgcaatgtggacaaaccctgccaccatgtcctacatgggagagagtaaaacaaccatcaatgccatggcgtttgatttagaaatgaaatttaatgataacaatggttcagaagatggcaaagcacattcaattttaccttcagctggcgcttttcatactcaagcgataacagacaaattacactttggtttagcacttggcgctgttggaggctcaagcttagactatggtagtgactgggctggcagtaaactattagaagatatcagcttgactgcaatgcagttaaatcctgctttaagttatcaagtaaatgaacgattatcattaggggctggtttacaatttagctgggcttcttttgagcaatcaatgtcaggaattactgctgaaaaagattcagattgggcatatggctataatctaggcgttatgtatcaagtttcagaacaagcatccatgggcttaagctaccgttcaaaacttgagcatgaatttaataataacattagcttagataattttaatccaacgctttcgagtggaatgatcatgcctgatattgttgacctcagcaccagttatgcattaagtaaagatgtaaacttattaagtagcatacagttgcaccgttggagccactgggattcgaccattttagacgcaaacctaggtaatggtggtgccgaaataaaacgagattgggatgatgcatggaaattcgccatcggtgctgattatcgtctaaattctgattggcgtttaaaggctggattctcatatgaaacctcacctcaagatgatccttcgatgcaatgggtagatttaccggtaggtgaacaatatcgctactctgttggtgcatccacatcatgggacggtattacaatggatatgttttatgaatacgccgatttaggctctgttgatatggatcgtttaaatgtgaatggtaccttcgacggcagaatccactttgtgggcgtaaactttactttttaa

SEQ ID NO: 23606 - protein, 383 aa, Vibrio fischeri ES114
MKPFFSYSLTASAVLLSFNAFSSGLFLQEATVANAGTTGAGDGVYTESAAAMWTNPATMSYMGESKTTINAMAFDLEMKFNDNNGSEDGKAHSILPSAGAFHTQAITDKLHFGLALGAVGGSSLDYGSDWAGSKLLEDISLTAMQLNPALSYQVNERLSLGAGLQFSWASFEQSMSGITAEKDSDWAYGYNLGVMYQVSEQASMGLSYRSKLEHEFNNNISLDNFNPTLSSGMIMPDIVDLSTSYALSKDVNLLSSIQLHRWSHWDSTILDANLGNGGAEIKRDWDDAWKFAIGADYRLNSDWRLKAGFSYETSPQDDPSMQWVDLPVGEQYRYSVGASTSWDGITMDMFYEYADLGSVDMDRLNVNGTFDGRIHFVGVNFTF

SEQ ID NO: 23607 - DNA, 1284 bp, Pseudomonas syringae pv. syringae B728a
  CDS (1)..(1284)
atgaaaataatgacaaaagcactgaaccggacaacgcttggactcgcactgggtctggcttcttctcaactgctcgctgccggctttgccctcaacgaacaaagcatcagcggcatgggcaccggctttgcaggtcgctcctcgtcagccgatgacgcaagcaccgtattcggcaaccctgccggtatgtcccgcatcaaacgcgaacaaatcagcgtcggtgcagctgccgtgatcgccaagaccgatatcgacaatggtcgtggcacatttggcggcagcaacgacggcgatatggttccggtggtcggcgtacccatgggctattacgtcaaaccaatcgatgatcactgggcatttggtctgggcgtgtacgtaccgttcggcctggtcaccgattacgaaaaaggcttcgctggccgctactggggtgacaagagtcacgtccaggtcgtgaccttccagccgaccgtcagctatgcattcaacgacaaggtgtccatcggtttcggcccgacgatcaaccgtatcgacggtgaactgacctcggcaacattgaacgccgcaacaccgggccgtaacgacggcaaagtgaagatcgaaggcgatgacaccgcaatcggcttcaatgccggtattttggtgcaggctaccgacaccactcgcctgggcctgacttaccactccaaggtcgattacaagctcaagggcaagaccaagatcgaaggttcgggtttcggtcctttcggcggccagaagtatgacgcttcgctggatatctccacacccgagtccgtggacttctccatcacccagcagatcgacgaaaactggacggtctatgccggcagcacctggactcgctggagccgcctgcaagacatcaccgtcaacaacgatggcgtccctgccttactgggcggttctgccggcccaatcggcaccattactgaagagcagaactggcacgacacctgggcgcacgccatcggcgcctcgtacaaggtcaataaagagtggacgctgcgcaccggcttctccgttgatcagtcgccgaccaacaacgtcaaccgctcccctcgcatcccgaccggcgatcgcaagatcatcagcttcggtgcaggctggagcccgaccgacgacctgaccatcgacgtggcgtactcgtacctgcgtgaagacgaaaccaagatccgcgattccagcgcgaccaaaggttcgtacagcgccgactaccgtaacaccgctcacggcctgggcacttcggttacctatcgcttctga

SEQ ID NO: 23608 - protein, 427 aa, Pseudomonas syringae pv. syringae B728a
MKIMTKALNRTTLGLALGLASSQLLAAGFALNEQSISGMGTGFAGRSSSADDASTVFGNPAGMSRIKREQISVGAAAVIAKTDIDNGRGTFGGSNDGDMVPVVGVPMGYYVKPIDDHWAFGLGVYVPFGLVTDYEKGFAGRYWGDKSHVQVVTFQPTVSYAFNDKVSIGFGPTINRIDGELTSATLNAATPGRNDGKVKIEGDDTAIGFNAGILVQATDTTRLGLTYHSKVDYKLKGKTKIEGSGFGPFGGQKYDASLDISTPESVDFSITQQIDENWTVYAGSTWTRWSRLQDITVNNDGVPALLGGSAGPIGTITEEQNWHDTWAHAIGASYKVNKEWTLRTGFSVDQSPTNNVNRSPRIPTGDRKIISFGAGWSPTDDLTIDVAYSYLREDETKIRDSSATKGSYSADYRNTAHGLGTSVTYRF

SEQ ID NO: 23609 - DNA, 1341 bp, Xanthomonas campestris pv. campestris str. 8004
  CDS (1)..(1341): transl_table=11
atgtctaccgcttccactctcagccgcgccaccctgctggccgttggtattgccggcgtgctggccgttggccaggcacacggtgccgccttccagctgaaggaaaacagcgccaagggcctcggccgcgccttcgcaggttcgggcagcgccccggacgacgcatcgatcatcgccaacaacccggccggcatgcgccagctggacggccgcctgttccaggccgacgtcagcgccatcagcttctcggccaagtaccagggcgaaggcggcagctacgccaacggcgccccgatctccggcggtaacggcggcgacgcgggcatgatcgcgccggtcccggcagcgtatttccacgtgccgttcggtgagaacaacaacatgcacctgggtacgtcgctgaccgtgccgttcggcttcaagaccgaatacgaccgcgactggaccggccgctaccacggcaccaagaccgagctgcaggcgatcgacttcaacgtcgcgttctcctacgacgtgaacccctacgtgtcgttcggcgcgtcggtgttcgcggagcgtctggatatcgacctgggcaacgcggtggacttcggcagcatcctggccgcgcgtcgcgcaccgggcttcgcgccgggcagcgccgatggctactcgcgcatcaagggcgacagcaccgaagtgggcttcaccctcggcggcttgttcagcatcgatgagaacacccacatcggcttcagctaccgctcggaagtggagcacaagatcaccgacggcgacgccgacttcaccgtgccgggcaatgccgctgccgcgctgggcttcgccgcaccgggcaccttcatcgataccaagggccgcgccaccgtgaccctgcccgccagcgccaccgccagcttcacccacaacgtgaacgagcagtggtcgatcatggccgacgtcacccgcaccgcctggagcaagttcgaccaggtgaccgtggacttcgcctccaatcagcccaacagcgtgctggacttctcctaccgcgacaccaccttcgcctcgatcggtgccgactaccgcatgagcgagacgctgaccctgcgtggcggtgtggcgtatgaccagaccccgaccaccgccgagcaccgtgacgtgcgcgtgccggacgcgagccgcaagtgggtctcgctgggtctgagctggcgcccgtcgcagcaggccgagtacaacttcggctatacgcacctgttcaccagcgatccgaccagcgacaccaccactgccaccggcaacgcgctggccggcagctacaaggtgcacggcgacgtgctggccgcgtcgatcaactacaagttctga

SEQ ID NO: 23610 - protein, 446 aa, Xanthomonas campestris pv. campestris str. 8004
MSTASTLSRATLLAVGIAGVLAVGQAHGAAFQLKENSAKGLGRAFAGSGSAPDDASIIANNPAGMRQLDGRLFQADVSAISFSAKYQGEGGSYANGAPISGGNGGDAGMIAPVPAAYFHVPFGENNNMHLGTSLTVPFGFKTEYDRDWTGRYHGTKTELQAIDFNVAFSYDVNPYVSFGASVFAERLDIDLGNAVDFGSILAARRAPGFAPGSADGYSRIKGDSTEVGFTLGGLFSIDENTHIGFSYRSEVEHKITDGDADFTVPGNAAAALGFAAPGTFIDTKGRATVTLPASATASFTHNVNEQWSIMADVTRTAWSKFDQVTVDFASNQPNSVLDFSYRDTTFASIGADYRMSETLTLRGGVAYDQTPTTAEHRDVRVPDASRKWVSLGLSWRPSQQAEYNFGYTHLFTSDPTSDTTTATGNALAGSYKVHGDVLAASINYKF

SEQ ID NO: 23611 - DNA, 1281 bp, Pseudomonas fluorescens Pf-5
  CDS (1)..(1281): transl_table=11
atgaaaaaagtaatgctcaaatccaccataagtctcgcggttgcacttgcctctacccaacttttcgccagcggttttgctcttaacgaacaaagcatcagcggcatgggtaccggcttcgcgggtcgttcctcttctgccgaagatgccagcaccgtttacggtaaccctgccggcatgtccctgctgcaacgtgaccaggtaactgtcggcgttgcggcaatcgatgccaagaccaacctgaaaaacgtcaagggcggcccacccggcggcaccagcgacggcgacatggttccgttcaccagcgttcctatggggttcttcgtcaaacaactgggcaacggctgggcattgggtctgggcgcctatgcccccttcggcctggttaccaactatgagtcgacttctgccagccgctattacggcgacaagagcgtagtcaaggtcgtcaccctgcaaccgaccgtcagctatgccttcaatgacatggtgtcgatcggcttcggcccgaccatcaaccgcctgagcggtgaactgacttccgcgactccgtttccaaaccctgcgctcttcggccgcaatgatggcagcgtgaagatcaagggtgacgataccgccatcggctacaacgtcggcatcatcgtccagcctaccgacactactcgcctgggcctgacctaccactccaaggtcaagtacaagctggaaggccacaccaacatcgccggcccgggcttcggtccgttcaatggcggccgttacgatgcctcgctggacatcactactccggaagtcgtcgacttctctgtcacccagaaactggatgaccagtggaccgtctacgcaggtagcacttggactcgctggagccgcctgaaagacatcaccgtgaacaacgaaggtgttcctgccctgcttggcggttccaggggcccgatcggcaccatcaccgagccacagaactggcacgacacctgggcctcggctgttggtgtttcctacaaggtcaacaaagagtgggttctgcgcagcggcctctcggttgaccaggcgccaaccaacaacaccgaccgttctgtacgtatccctaccggtgaccgtaaggccatcagcttcggtgccggctacagcccgactgaagacctgactctggacctggcggtttcctacctgaaggaagaggacgtcaacgtcaacagaaccggcaaaggcaatgcctacagcgctacttaccagaacagcgcatggggctacggcctgggcgccacctacaagttctaa

SEQ ID NO: 23612 - protein, 426 aa, Pseudomonas fluorescens Pf-5
MKKVMLKSTISLAVALASTQLFASGFALNEQSISGMGTGFAGRSSSAEDASTVYGNPAGMSLLQRDQVTVGVAAIDAKTNLKNVKGGPPGGTSDGDMVPFTSVPMGFFVKQLGNGWALGLGAYAPFGLVTNYESTSASRYYGDKSVVKVVTLQPTVSYAFNDMVSIGFGPTINRLSGELTSATPFPNPALFGRNDGSVKIKGDDTAIGYNVGIIVQPTDTTRLGLTYHSKVKYKLEGHTNIAGPGFGPFNGGRYDASLDITTPEVVDFSVTQKLDDQWTVYAGSTWTRWSRLKDITVNNEGVPALLGGSRGPIGTITEPQNWHDTWASAVGVSYKVNKEWVLRSGLSVDQAPTNNTDRSVRIPTGDRKAISFGAGYSPTEDLTLDLAVSYLKEEDVNVNRTGKGNAYSATYQNSAWGYGLGATYKF

SEQ ID NO: 23613 - DNA, 1260 bp, Colwellia psychrerythraea 34H
  CDS (1)..(1260): transl_table=11
atgacattcaataaaacattgttaacactatcgttaacctgttcatcattttacagtgtcggcgccgcctttcagttggctgagcatagtgctgctggtttaggtcgagcgtttgctggtgaagctgcaattgccgatgatgcatctgtaattgcacgcaaccctgcccttatggcgcaatttgatcaaatagagttatcatttactggcacttacgttatacctgatgtcagcttaacgggtattgatgcaccaacgggtattaacccagtagcattgaatgatagtagtattgcgccaagtgccatcattccagcaatatatctagtagtgccgctaaatgacaagtttgctctaggttttggcaccttctctaattttggtttagccactgagtttgatgatgattatgctgcggggcaactcgcgggggaaacgtcaattactacggttaattttaattccagcctctcttataaagtaaatgataactttgccatagctggggggttaaatgttatttatgccgatgcttccttaatacgtaattttggtgacagtccgctgccttcgccacctgaaacggtggccgcaaatttggctggcgatgatatatcctatggttggaacctaggtttatcgtatgattttaacgaaaacaatagactaggttttagttatcgaagtgaagtagaactaacacttgaaggtgattacagtaatggtttaccagctaaccttggtggcttagcgggtgacgtagtcatgggcaccatggatataaccttgccagctattatggagttttcaggttttcatcaattaaatagttccttagctgtgcattactcagccgtgtggactggttggagtagttttgatgagctagcgggatacgctgaaggtgtagaagaccctgtgttttcaaaagaagagaactttgctgattcaatgcgatatgccattggtgccacctatcaattaagtagcaatataaagctcagaacaggtattgcttatgaccaaacacccaccggtgaagaacatcgatcgatctcaattcctgatagtaatcgtatatggataagtggcggcttaaactatagctttgacgaccaatcatcgatagatttaggtgtcagtgtcattcaaggcaatagtgaaacattcactgaaaaagatgacttaggtcaacagtggacattcgaatcacaaggtgatgcttacattgtttctgcacaatataaccatgttttctaa

SEQ ID NO: 23614 - protein, 419 aa, Colwellia psychrerythraea 34H
MTFNKTLLTLSLTCSSFYSVGAAFQLAEHSAAGLGRAFAGEAAIADDASVIARNPALMAQFDQIELSFTGTYVIPDVSLTGIDAPTGINPVALNDSSIAPSAIIPAIYLVVPLNDKFALGFGTFSNFGLATEFDDDYAAGQLAGETSITTVNFNSSLSYKVNDNFAIAGGLNVIYADASLIRNFGDSPLPSPPETVAANLAGDDISYGWNLGLSYDFNENNRLGFSYRSEVELTLEGDYSNGLPANLGGLAGDVVMGTMDITLPAIMEFSGFHQLNSSLAVHYSAVWTGWSSFDELAGYAEGVEDPVFSKEENFADSMRYAIGATYQLSSNIKLRTGIAYDQTPTGEEHRSISIPDSNRIWISGGLNYSFDDQSSIDLGVSVIQGNSETFTEKDDLGQQWTFESQGDAYIVSAQYNHVF

SEQ ID NO: 23615 - DNA, 1284 bp, Pseudomonas syringae pv. phaseolicola 1448A
  CDS (1)..(1284): transl_table=11
atgaaaataatgacaaaaacactgaaccggacaacacttggactcgccctgggtctggcttcttctcaactgcttgcagccggttttgccctaaacgaacaaagcatcagcggcatgggcacaggctttgcaggtcgctcctcgtcagccgatgatgcaagcaccgtattcggcaaccctgccggcatgtcccgaatcaaacgcgaacaaatcagcgtcggcgccgcagccgtgatcgccaagaccgacatcgacaacggtcgcggcacattcggcggcagcaacgacggtgacatggttccggtggtcggcgtgccaatgggctattacgtcaaacctatcgatgatcactgggcatttggtctgggcgtgtacgtcccgttcggcctggtcactgattacgaaaaaggcttcgccggccgctactggggcgacaagagtcacgtccagatcgtgaccttccagccaactgtcagctatgcattcaatgacaaggtttccatcggtttcggcccgaccatcaaccgcatcgacggtgaactgacctcggcaacattgaacgccgcaacaccgggccgtaatgacggcaaggtgaagatcgaaggcgatgacaccgcaatcggcttcaatgccggcattctggtgcaggctaccgacaccactcgtctgggcctgacttaccactccaaggtcgattacaagctcaagggcaagaccaagatcgaaggctcgggcttcggcccgttcggcggccagaagtacgatgcttcgctggacatctccacgcctgagtcggtggacttctctatcacccagcaactcgacgagaactggactgtttacgcaggcagtacctggactcgctggagccgcctgcaggacatcaccgtcaacaacgatggcgtccctgctctgctgggcggttctgccggcccaatcggcaccatcaccgaagaacagaactggcacgacacctgggcgcacgccatcggtgcctcgtacaaggtcaataaagagtggaccctgcgcacaggtttctccgttgatcagtcgccgaccaacaacgtcaaccgctccccacgcatcccgactggcgatcgcaagatcatcagtttcggcgcaggctggagcccgaccgacgacctgaccatcgacgtagcgtactcgtacctgcgtgaagacgaaaccaagatccgcgactccagcgcgaccaaaggttcgtacagcgctgactaccgcaacaccgctcacggcctgggcacttcggttacctatcgcttctga

SEQ ID NO: 23616 - protein, 427 aa, Pseudomonas syringae pv. phaseolicola 1448A
MKIMTKTLNRTTLGLALGLASSQLLAAGFALNEQSISGMGTGFAGRSSSADDASTVFGNPAGMSRIKREQISVGAAAVIAKTDIDNGRGTFGGSNDGDMVPVVGVPMGYYVKPIDDHWAFGLGVYVPFGLVTDYEKGFAGRYWGDKSHVQIVTFQPTVSYAFNDKVSIGFGPTINRIDGELTSATLNAATPGRNDGKVKIEGDDTAIGFNAGILVQATDTTRLGLTYHSKVDYKLKGKTKIEGSGFGPFGGQKYDASLDISTPESVDFSITQQLDENWTVYAGSTWTRWSRLQDITVNNDGVPALLGGSAGPIGTITEEQNWHDTWAHAIGASYKVNKEWTLRTGFSVDQSPTNNVNRSPRIPTGDRKIISFGAGWSPTDDLTIDVAYSYLREDETKIRDSSATKGSYSADYRNTAHGLGTSVTYRF

SEQ ID NO: 23617 - DNA, 1452 bp, Pseudomonas syringae pv. phaseolicola 1448A
  CDS (1)..(1452): transl_table=11
atgcccttgtcaacgttaaggacttacccacgaggtgtgtactatagggatcctatttttgcgttgataaaatcgcaggtttgccagcgcatggaatgcctgaaaacactttgcaggtgtatgcaggcagtttccccttcaaacgggttgaccggaccccctttactgcgagcattgaacaccatgcacaagacgaccctgggcttcacggttgccatgatttccacgcacttgtatgcaggtggctttgcgcttaacgagcaaggtataagcggcatgggcacagcgtttgcgggccgggcctctgccgccgaagatgccggcacggtatacggcaaccctgcaggcatggcgcgtctggccggccagcaggtcaccggtggtgctacctttatcgatgcatcgacggatatcagccaggcgagtggacgttcgagcggcagcaacgatggcgacatggtgccattcaaggccatcccgttcggtttttatactcgcaggctgaatgaacactgggccatcggccttggcgcgtacgtgccgttcggtctggcgacggattacgaacgcggttttcaagggcgcgcctttgccagcaagagcgatgcaaaagttctgaccctgcaaccgacattgagttatgccttcaatgacagggtatcggtgggcttcgggccgaccatcaatcagtttgccggctcgctggagtcggacctgacgcttaacccggccatcgccgacagtaatgtgaaggtgaagggcaaggatgtcgcgctgggcttcaatatcggcgttctggccagcctgactgataccacgcaggctggtttgacctaccactccaaagtgcgctacgacctggattgccacaccgaggttgccacaggtgccggtacgccagcccagttgctgagcagcaatcgctatgactgctcgctacaggtcgatactcctgaatcctacgaattgtcagtcacccagaagctcaccgatgcctggacactttatgcggggacgacctggacgcgctggagccgcatgaaggacctgagtttcagcaccgagaacatcaggcctgcgcgtggagggatacttgctgcgtccttgtctggcgctatcgctggcgggctggactggcacgatacctgggcgtatgcgctcggcacatcgtatcgactggattcacactggtcgttgcgtaccggcattcgtctggatcagtcaccgaccagcaataccaatcgctcgccacgcacaccgaccggcgaccgtacgatcttcagtgtgggggcgggttatgacgtcagcaaagaactgacccttgatgttgcctacgcctatcttaaagaagaaagcgttgatgtcagccgtgccaatgcgctggccagttacagcgcgcgctatcagaaccgcgccagctttttgggcgtgggggcgacttaccgtttctga

SEQ ID NO: 23618 - protein, 483 aa, Pseudomonas syringae pv. phaseolicola 1448A
MPLSTLRTYPRGVYYRDPIFALIKSQVCQRMECLKTLCRCMQAVSPSNGLTGPPLLRALNTMHKTTLGFTVAMISTHLYAGGFALNEQGISGMGTAFAGRASAAEDAGTVYGNPAGMARLAGQQVTGGATFIDASTDISQASGRSSGSNDGDMVPFKAIPFGFYTRRLNEHWAIGLGAYVPFGLATDYERGFQGRAFASKSDAKVLTLQPTLSYAFNDRVSVGFGPTINQFAGSLESDLTLNPAIADSNVKVKGKDVALGFNIGVLASLTDTTQAGLTYHSKVRYDLDCHTEVATGAGTPAQLLSSNRYDCSLQVDTPESYELSVTQKLTDAWTLYAGTTWTRWSRMKDLSFSTENIRPARGGILAASLSGAIAGGLDWHDTWAYALGTSYRLDSHWSLRTGIRLDQSPTSNTNRSPRTPTGDRTIFSVGAGYDVSKELTLDVAYAYLKEESVDVSRANALASYSARYQNRASFLGVGATYRF

SEQ ID NO: 23619 - DNA, 1206 bp, Dechloromonas aromatica RCB
  CDS (1)..(1206): transl_table=11
atgaataagatgaacctgcgtatcgtcccagcactgctgttggctatcttttccggcaccgcctcggctgctgccttccagctttgggagcaaaatgccagcggcctggggaatgcttatgcgggctcggcagcggtggcggataacgccagtacggttttcttcaatccggcggggatgacgcaactgtcaggcttccagttctctgctggggtaaccggggttgggccgagctatgagtttcgtgacaatggctcgaccggagcattcaagggtagcggcaacggcggtgacgcgggcggctggaatgccgttcccaatctctatttgtccgggcatctgaccgataatctttcgatcggctttggcgtttcggccccatttgggctggcgactgaatacgacagcaactgggtcgggcgtgttcaggcgatcaagtcagagatcaagaccgtcaactacaacccgtcgcttgcctatcgcgtcaacgacaaggtttcgctgggttttggcatcaattatcagcaactggatgctgaaattaccagttacaccccggctggtctctaccgggtcaagggtgacgattcgacctggggatggaatgccggtgctttgtttacactttctcccgccatgcgcgttggtgtgtcttaccgctcggcagtgaattacacgctggaaggaacccgttcggtcggggctaattccgttgccgccaaggcggacatcaagctgccagatacttttatcctgtcggtctggcaacaggtttcggatcgttgggaagcgatgggcgatttgtcctacacgcgctggagcaccctggatcgtctggatgttcgcagctccgctggcgttgataccgagatcttcaactatgaaaactcctggcgacttgcctggggtgctgcctacaaggccagtgatgcactcaaggtgaaattcggtattgcctatgaccggacgccggtgcgcgatgaataccgttcggctcgcgtgcccgacaacgatcgtttgtggttgtcgctgggcggacagtggaatgccggtcgctatggcaaggtcgatgtcggctactcctatctttacgtcaaggacccgtctatccagcagtccaaggtggtgggagtagcccacgaattgcgtggcgattacaacgccagtgcccatatcgttggcgcgcaatactcggtgggtttctaa

SEQ ID NO: 23620 - protein, 401 aa, Dechloromonas aromatica RCB
MNKMNLRIVPALLLAIFSGTASAAAFQLWEQNASGLGNAYAGSAAVADNASTVFFNPAGMTQLSGFQFSAGVTGVGPSYEFRDNGSTGAFKGSGNGGDAGGWNAVPNLYLSGHLTDNLSIGFGVSAPFGLATEYDSNWVGRVQAIKSEIKTVNYNPSLAYRVNDKVSLGFGINYQQLDAEITSYTPAGLYRVKGDDSTWGWNAGALFTLSPAMRVGVSYRSAVNYTLEGTRSVGANSVAAKADIKLPDTFILSVWQQVSDRWEAMGDLSYTRWSTLDRLDVRSSAGVDTEIFNYENSWRLAWGAAYKASDALKVKFGIAYDRTPVRDEYRSARVPDNDRLWLSLGGQWNAGRYGKVDVGYSYLYVKDPSIQQSKVVGVAHELRGDYNASAHIVGAQYSVGF

SEQ ID NO: 23621 - DNA, 1329 bp, Dechloromonas aromatica RCB
  CDS (1)..(1329): transl_table=11
atgcacaaaaacctcgcaccgcgtctgatcccggcgctgattgccattgcgttttcaggtggcgcttcagcttctggcttccagttgcttgaacaaaacgctagtggcctgggtaattcctatgccggttccgcagcagttgcagaaaatgccagtacgattttctacaatccggccggcatgacacagttgaagggtttgcaggtttccggtggcttgactgcaatacacaccagctacaagttctccgaccaaggctctagtgttggtgttttgcagaattctggtaacggtggagatggcggtggctggggttatttgcctaatgcgtacatttcttgggaagctaccaaagacttgtatcttggcctgggtatcggtgcgccttttggcttgaagaccgagtacaacaacccatggcaaggtggggcgcagtctctaaaatttgatatcaagacagtcaatatcaatccgagcattgcttggcgggcgaatgagtttgtttcagttggtgctggtatcaactatcagaaattgaccgctgaatacgagcgtcaggtagctgttgcaagtacttctggtcttgctgttgcaacaatgctttctacaacgaaggcaacactgaatctggatgatgatgcatgggggtggaatgttggcgccctgttttccattaacccaactaccaaaatcggtgtttcttatcgttcggctgtgaaatatgatttgacgggagatttcaagtttgatggaacactggctcaatcgagcaatccattgttgggtggggcaactaaagatcgtagtgcaaaagctaccttgaaggtgcctgatacttggattcttagcgccacgcatgctttgaatgatcgtgtcgagttgttgggtgatatctcttggacgggctggagttcaattcccaaagtagatgtttataacgcacaaacaactggtgcgggagcagtttctggccgtatcgcacagactctcgacacagagtttcgcgatacgtggcgtgtcgctgctggtgcgaactaccgatatacggaagctttaaagttcaagtttggtattgcttatgatcaaacgccggtgaagggcgcgtctactcgtcttgtttccttgccagacaacaaccgtatctggctctcgtttggtacccaatggaagccgaccaaggattcggcagtggacctcggtattgctcaccttttcgtcaaggattcaaagattgacaacgatcagtctgcagcaggacgtggtcgtgttaccggtacgtttgccgacagtgcttggatttttggtttgcaatactcagcagcgttctaa

SEQ ID NO: 23622 - protein, 442 aa, Dechloromonas aromatica RCB
MHKNLAPRLIPALIAIAFSGGASASGFQLLEQNASGLGNSYAGSAAVAENASTIFYNPAGMTQLKGLQVSGGLTAIHTSYKFSDQGSSVGVLQNSGNGGDGGGWGYLPNAYISWEATKDLYLGLGIGAPFGLKTEYNNPWQGGAQSLKFDIKTVNINPSIAWRANEFVSVGAGINYQKLTAEYERQVAVASTSGLAVATMLSTTKATLNLDDDAWGWNVGALFSINPTTKIGVSYRSAVKYDLTGDFKFDGTLAQSSNPLLGGATKDRSAKATLKVPDTWILSATHALNDRVELLGDISWTGWSSIPKVDVYNAQTTGAGAVSGRIAQTLDTEFRDTWRVAAGANYRYTEALKFKFGIAYDQTPVKGASTRLVSLPDNNRIWLSFGTQWKPTKDSAVDLGIAHLFVKDSKIDNDQSAAGRGRVTGTFADSAWIFGLQYSAAF

SEQ ID NO: 23623 - DNA, 1371 bp, Ralstonia eutropha JMP134
  CDS (1)..(1371): transl_table=11
gtgagaggcaactacgttcgcgtggccgtggcgctatgcgctgcggcgtgcggaacaccagcgggagcaacggacgtgttcaacctggagggctttggtccagtttcccgcgctatgggcgggaccggagcggccttcgacatcgggccagcggcgatgatggcgaatccggcaacacttggcctgatggccgaggggaatcacctgcatcttgggctcgacatggtgaccaccgacatcaaggccaccaatacggcaacgggcgagacggcccggtccggcaaccacggcaacaacaacgggccttactttgcgcccgaggccgcgttcgtctaccgtcatgacaacatcgcgctaggcgccggaatctttgcggagggcggcctcggtacgcaatacgggggcagcagtttcctgtcgcgcacgtccaatggcgtgcagacgggcctggaccagttctcccggttgctggtgctgcgcattccgtttgcggtggcctatcggccgacggacaagctgacgctcggcgcctcgctggatgcggtctggacgtcgctcaatctcggcacgctgctcgacgtcacgcagatcggcacgcttgccagccagcggcgggtgtctggttcgctggtgcccacgctgctttccgtgcccggcctttccggggggtacctgggcttctcgaacagcgcgcccgtcggtggcggggccgatgcctggggcatcggcggaaaactggggctgacctacgacatcacgcccgatacccgcgtaggactggcctacaacgcgaaaacgcgggtgggcgatcttcgcgggcaggccacgcttgcggctgtcagcaccgtcgcgggcaacattccgctgagcggcgaagtcagggtgcgggacttccagatgccggcgcagttcacggtgggcatcagccaccagttcaacgagcgactgtcggcttcggcggactaccagcgagtgttctggtcgagcgtgatgcgtgacatcaacgtcaccttcacgcgtgggggcgcgaacctcgacctgtcgctaccgcagaactaccgcgataccaacgtgttcggccttggcgtggcgtaccgtttcgattcggcctggacggtgcgcggcgggttccactatgcgcaagaagccataccgaacggcatgctgctagccgttgtgccggccattcccacgaccaccctgagtggcggcgcgacttacgcattcggcaaggacgacgcgatcgattttgccttgtcggtggtgttaccaaagaccgtggggaacgccagccagccgaatactgcggtaccgctcaccgtgcggcattcgcagctcaacgcggttctggcataccgcaagcgcttctag

SEQ ID NO: 23624 - protein, 456 aa, Ralstonia eutropha JMP134
MRGNYVRVAVALCAAACGTPAGATDVFNLEGFGPVSRAMGGTGAAFDIGPAAMMANPATLGLMAEGNHLHLGLDMVTTDIKATNTATGETARSGNHGNNNGPYFAPEAAFVYRHDNIALGAGIFAEGGLGTQYGGSSFLSRTSNGVQTGLDQFSRLLVLRIPFAVAYRPTDKLTLGASLDAVWTSLNLGTLLDVTQIGTLASQRRVSGSLVPTLLSVPGLSGGYLGFSNSAPVGGGADAWGIGGKLGLTYDITPDTRVGLAYNAKTRVGDLRGQATLAAVSTVAGNIPLSGEVRVRDFQMPAQFTVGISHQFNERLSASADYQRVFWSSVMRDINVTFTRGGANLDLSLPQNYRDTNVFGLGVAYRFDSAWTVRGGFHYAQEAIPNGMLLAVVPAIPTTTLSGGATYAFGKDDAIDFALSVVLPKTVGNASQPNTAVPLTVRHSQLNAVLAYRKRF

SEQ ID NO: 23625 - DNA, 1218 bp, Thiobacillus denitrificans ATCC 25259
  CDS (1)..(1218): transl_table=11
atgtcactttgcttcaagcggctcgccgcaagccttgcgcttgcggcggccggcggcgcggcccacgcggccggctacgcgctgatcgaacagaacgcgagcgggctcggcaacgcctacgcgggccaggcggccgcggcgagcgatgccagcacgatctatttcaacccggccggcatgacccggctgcccgaccggcagatcgtcgtcgccgggcatctgatcaagccccgcgccgagttctcggggacgagcagcgccggcgtcacgggcgggcagggcggcgacgccggggactgggccttcgtcccgaatgcctatgtcgcgatgcgcctgacgccggacctgcatctgggcctcggcctcaacagccccttcggcctcaagaccgaatacgaacccgagtggatcggccgttatcaggcgattgagtcggagctcaagacgatcaacctgaatccgtccgtcgcctacaagctcagcgagacgttttcggtgggcgctgggcttaatatccagtggatcgaagcgacgctgacccaccgacagccgcttgggccaccccctttcccggctccgttgctcaagatcaagggcgacgattacggctggggctacaacctcggcgcgctctggcaggcgacgcctgcgacgcgcatcggcgtgtcctaccgttccgaagtcgactacacgctcgagggcacgtcgagcacttccgaccccgttgtgaaccccctcaatggcccggtgaccgcggaggtcacgctgccggacagcgcgtcgctgagtcttttccacacgctctccccgcagtgggacctgttggccgacgtgagctggacgggctggagcgatttcgacgacctgccgatccgcggcacagtcgacagcacgacgatcgaaaactggagcgacagcctgcgctattcgctcggcgcaacctggcacgcgaacgaaaaatggagtctgcgcggcggcatcgcctacgatgaagcgccggtgtcggaccgctatcgcaccccgcgcatcccggacggcgcgcgcacctgggtcgcgctcggcggccagtaccgcgtgtcgaagcgcagcgcactcgacttcggctacgcgcacctgttcgtcaacgacccgggtctgcagccgtcgacgacgacgctcgacggcgaatacgacagcgcggtcgacatcgtgtccgcccagttcacgctgaatttctga

SEQ ID NO: 23626 - protein, 405 aa, Thiobacillus denitrificans ATCC 25259
MSLCFKRLAASLALAAAGGAAHAAGYALIEQNASGLGNAYAGQAAAASDASTIYFNPAGMTRLPDRQIVVAGHLIKPRAEFSGTSSAGVTGGQGGDAGDWAFVPNAYVAMRLTPDLHLGLGLNSPFGLKTEYEPEWIGRYQAIESELKTINLNPSVAYKLSETFSVGAGLNIQWIEATLTHRQPLGPPPFPAPLLKIKGDDYGWGYNLGALWQATPATRIGVSYRSEVDYTLEGTSSTSDPVVNPLNGPVTAEVTLPDSASLSLFHTLSPQWDLLADVSWTGWSDFDDLPIRGTVDSTTIENWSDSLRYSLGATWHANEKWSLRGGIAYDEAPVSDRYRTPRIPDGARTWVALGGQYRVSKRSALDFGYAHLFVNDPGLQPSTTTLDGEYDSAVDIVSAQFTLNF

SEQ ID NO: 23627 - DNA, 1275 bp, Pseudomonas syringae pv. syringae B728a
  CDS (1)..(1275)
atgacaaaagcactgaaccggacaacgcttggactcgcactgggtctggcttcttctcaactgctcgctgccggctttgccctcaacgaacaaagcatcagcggcatgggcaccggctttgcaggtcgctcctcgtcagccgatgacgcaagcaccgtattcggcaaccctgccggtatgtcccgcatcaaacgcgaacaaatcagcgtcggtgcagctgccgtgatcgccaagaccgatatcgacaatggtcgtggcacatttggcggcagcaacgacggcgatatggttccggtggtcggcgtacccatgggctattacgtcaaaccaatcgatgatcactgggcatttggtctgggcgtgtacgtaccgttcggcctggtcaccgattacgaaaaaggcttcgctggccgctactggggtgacaagagtcacgtccaggtcgtgaccttccagccgaccgtcagctatgcattcaacgacaaggtgtccatcggtttcggcccgacgatcaaccgtatcgacggtgaactgacctcggcaacattgaacgccgcaacaccgggccgtaacgacggcaaagtgaagatcgaaggcgatgacaccgcaatcggcttcaatgccggtattttggtgcaggctaccgacaccactcgcctgggcctgacttaccactccaaggtcgattacaagctcaagggcaagaccaagatcgaaggttcgggtttcggtcctttcggcggccagaagtatgacgcttcgctggatatctccacacccgagtccgtggacttctccatcacccagcagatcgacgaaaactggacggtctatgccggcagcacctggactcgctggagccgcctgcaagacatcaccgtcaacaacgatggcgtccctgccttactgggcggttctgccggcccaatcggcaccattactgaagagcagaactggcacgacacctgggcgcacgccatcggcgcctcgtacaaggtcaataaagagtggacgctgcgcaccggcttctccgttgatcagtcgccgaccaacaacgtcaaccgctcccctcgcatcccgaccggcgatcgcaagatcatcagcttcggtgcaggctggagcccgaccgacgacctgaccatcgacgtggcgtactcgtacctgcgtgaagacgaaaccaagatccgcgattccagcgcgaccaaaggttcgtacagcgccgactaccgtaacaccgctcacggcctgggcacttcggttacctatcgcttctga

SEQ ID NO: 23628 - protein, 424 aa, Pseudomonas syringae pv. syringae B728a
MTKALNRTTLGLALGLASSQLLAAGFALNEQSISGMGTGFAGRSSSADDASTVFGNPAGMSRIKREQISVGAAAVIAKTDIDNGRGTFGGSNDGDMVPVVGVPMGYYVKPIDDHWAFGLGVYVPFGLVTDYEKGFAGRYWGDKSHVQVVTFQPTVSYAFNDKVSIGFGPTINRIDGELTSATLNAATPGRNDGKVKIEGDDTAIGFNAGILVQATDTTRLGLTYHSKVDYKLKGKTKIEGSGFGPFGGQKYDASLDISTPESVDFSITQQIDENWTVYAGSTWTRWSRLQDITVNNDGVPALLGGSAGPIGTITEEQNWHDTWAHAIGASYKVNKEWTLRTGFSVDQSPTNNVNRSPRIPTGDRKIISFGAGWSPTDDLTIDVAYSYLREDETKIRDSSATKGSYSADYRNTAHGLGTSVTYRF

SEQ ID NO: 23629 - DNA, 1188 bp, Desulfovibrio desulfuricans G20
  CDS (1)..(1188)
atgtttctcagccttccgcacacggcccgggccgcaggatttgccatgtacgaattcagcgcccgcggcaatgctctgggcggcgccatggttgcgcgcaaggccagtccttcttccattgcgttcaaccctgcgctgattacgcagcttaagggtactcagatggctgcgggcatgacgctggtagaccccagcgccactgtggaagtgaaagggcaggaaactgtctccgccaaaaagaattactgggccattcctcatgcctacgccacgcggcaggtcaacgatgcgctgtactacggtgtcggcgtgttttcccgtttcggtctgggtaatgaatattccaaagactggttcggtaaagaccagctgtattatgtgggcatacagtccctgtcggtgaaccccgtcatggggcttaaacttaccgacaagctttcggtcgcctttggcattgaggccatgtggtttgactatgagcagaaaaacatagtggaagccggtgccggcggcaggctggacggccgtgtgaacggcgaaagcataggctacggcattaatctgggcattcactatcagcctgtggaatggcttgcgctgggcgccagctggcgttccggcatcaagcagaacctgaagggcacgggctatttcagcggttccggcccccttttcagcaactggggcgataccgatgcgcgcggcagcgtgaacctgcccgacatgctttttctgggggtatgtgtgatgcccaccgacaggctgagcattgaagcgggtgcggtacgtaccggctggacaagctatgacaagctggtcatcgattataacaaccccagtgtggcaacgacggacaaaaccaccgagtggaaggatgtctggcggtttaacgtgggggttgaatatgcccttaacgagatgctggacctgcgtgccggctatgtttatgacaattcgccgctcaacgaaaactatcttgattttctggtgcctgccaacgacaggcatcttttcagcggcggtgtgggcatacatcaggggccgtggacgctggacctcagctacacctacctgcttatcaaggaacgcacaggcagtgtgaccaccacaatgggcggtgaaaacagagtgcgcttcaaagacggagacgctcaccttgtgggcatgacgctgggataccgcttttag

SEQ ID NO: 23630 - protein, 395 aa, Desulfovibrio desulfuricans G20
MFLSLPHTARAAGFAMYEFSARGNALGGAMVARKASPSSIAFNPALITQLKGTQMAAGMTLVDPSATVEVKGQETVSAKKNYWAIPHAYATRQVNDALYYGVGVFSRFGLGNEYSKDWFGKDQLYYVGIQSLSVNPVMGLKLTDKLSVAFGIEAMWFDYEQKNIVEAGAGGRLDGRVNGESIGYGINLGIHYQPVEWLALGASWRSGIKQNLKGTGYFSGSGPLFSNWGDTDARGSVNLPDMLFLGVCVMPTDRLSIEAGAVRTGWTSYDKLVIDYNNPSVATTDKTTEWKDVWRFNVGVEYALNEMLDLRAGYVYDNSPLNENYLDFLVPANDRHLFSGGVGIHQGPWTLDLSYTYLLIKERTGSVTTTMGGENRVRFKDGDAHLVGMTLGYRF

SEQ ID NO: 23631 - DNA, 1161 bp, Haemophilus somnus 2336
  CDS (1)..(1161)
atgagtgtttctgccggaaaagctttacaaggtcagggagcaagcggacaaccaataaccgaagaagccacacaaaagaatattgttcccggtgctttgattcctaatatgtattttgttgcacccattaatgataaatttgctgtcggtgcggcgatgaatgtgaactttggattaaaaagccaatataaaagcaattacgaagccggtgtttttggcggaactaccgagctaaattccattaatttaaatttaagcggttcatatcgtatcagcaaaggcttaagcattggtgtgggattaaatgcggtttatgccaaagcgaaaattgagcgtcgtgccggtattttagataagggagttaataaacttgcttctcttcctaaactgaaaaagattttctcaccactagcctctatggttgatgcaaattcccctatagtgcaattacaagataacaatgcatggggattgggttggaatatcggtgcagtttatgaatttaatcagggtaaccgtatcggtattgcctatcattccaaggtagatattaattttaaagatagcgatgcattacgttatagacttgctggatctggaagtattgaaccttatagaaatagaggtaaattaacgttacatttaccggactatcttgaaatttccggtttccaccaattaacggaaaaattcgctatgcactatagctataaatatactaaatggagccgtttacaaagtttgcatgccgtttatgataacggtcaggtcgcttttcataaagatgaaaactttgatgacagttctcgtgtagctctaggggcgacttataatgtcaatgataaattaaccttgcgtgcgggtattgcttatgatgaatccgccgaacatccgagtgcttcaatccccgataccgaccgcacttggtatagcttgggggcaacctatcatttcacgccaaatctttcggttgacgtaggttttgctcatttacgtggtaaaaaacggcaatttaaagagggatatgaaattggaaatactgtatcttatccgggtaatagaggtcaggttacaaatgtacagttagccgtagtaagtgcggactaccaatcaacggcacgtgccaatttgtacggtttaaatcttagctaccgtttctaa

SEQ ID NO: 23632 - protein, 386 aa, Haemophilus somnus 2336
MSVSAGKALQGQGASGQPITEEATQKNIVPGALIPNMYFVAPINDKFAVGAAMNVNFGLKSQYKSNYEAGVFGGTTELNSINLNLSGSYRISKGLSIGVGLNAVYAKAKIERRAGILDKGVNKLASLPKLKKIFSPLASMVDANSPIVQLQDNNAWGLGWNIGAVYEFNQGNRIGIAYHSKVDINFKDSDALRYRLAGSGSIEPYRNRGKLTLHLPDYLEISGFHQLTEKFAMHYSYKYTKWSRLQSLHAVYDNGQVAFHKDENFDDSSRVALGATYNVNDKLTLRAGIAYDESAEHPSASIPDTDRTWYSLGATYHFTPNLSVDVGFAHLRGKKRQFKEGYEIGNTVSYPGNRGQVTNVQLAVVSADYQSTARANLYGLNLSYRF

SEQ ID NO: 23633 - DNA, 1413 bp, Haemophilus somnus 2336
  CDS (1)..(1413)
atgaatagcaataaacaatcactttttactaaatctttcattgcttcagcattggcattatcggcaagttacgttaatgcggcggcgttccaaattgctgaggtgtccagttccggtttaggacgagcttatgcgggtgaagcggcaattgctgataatgccgcagttgtggcaaccaacccagcgttaatgagtttgtttaaaacgaaacaattctcaatggggggggtatacgttcaatctagaattaatataaatggtgaggttaaggttaatgcggggttatttcacggaattgaaactggaaaaggggatcagaaaaacattgtgccaagtgcagttattcccaatatgtacttcgtcgcacctattaatgataaatttgctgtcggtgcgggcatgaatgtgaactttgggttacaaagtaaatataaaaaggattatgatgccggtgttttgggtggaaccaccgcactgaattccattaacttaaatttaagcggttcataccgtatcagcaaaggattaagcatcggtgctgggttgaatgcggtttatgccaaagcgaaaattgagcgtcatgcaggtattttgaaagaagcacttggtactgttaagcaaatatcaacaccaggaggacaaccagggggttttataatcagattggatccgtcatcacaacaactgcttgctgcattagctcaaataaaagttaattcggatactagcataatacaattacaagataataatgcatggggatttggttggaatatcggggcagtctatgaatttaatcaaggtaaccgtatcggtattgcctatcattctaaagtagatattaattttaaagatgatgatgcgttgagttatcaacttaaaccaagaagaattagtcctgttaaagagaaaggtgggttaacgctacatttgccggattatttcgaaatttccggtttccaccaattaacggaaaaattcgccatgcactacagctataaatatactaaatggagccgtttacaaagtttacatgccacttatgataacggcaaggtcgctttccataaagatgaaaaatttcatgacagttcacgtgtagctctaggggcgacttataatgtgaatgataaattaaccctgcgtgcaggtattgcttatgatgagtcagccgaccacccaagtgcttcaatccccgataccgaccgcacttggtatagcttgggggcaacctataacttcacgccaaatctttctgttgacgtaggttttgctcatttacgaggtaaaaaacagcaatttagcgaaacacaaaatattggaaaagagattaaactcgttaatataagtgcggattatcaatcaacggcacgtgccaatttgtacggcttaaatcttaactaccgtttctaa

SEQ ID NO: 23634 - protein, 470 aa, Haemophilus somnus 2336
MNSNKQSLFTKSFIASALALSASYVNAAAFQIAEVSSSGLGRAYAGEAAIADNAAVVATNPALMSLFKTKQFSMGGVYVQSRININGEVKVNAGLFHGIETGKGDQKNIVPSAVIPNMYFVAPINDKFAVGAGMNVNFGLQSKYKKDYDAGVLGGTTALNSINLNLSGSYRISKGLSIGAGLNAVYAKAKIERHAGILKEALGTVKQISTPGGQPGGFIIRLDPSSQQLLAALAQIKVNSDTSIIQLQDNNAWGFGWNIGAVYEFNQGNRIGIAYHSKVDINFKDDDALSYQLKPRRISPVKEKGGLTLHLPDYFEISGFHQLTEKFAMHYSYKYTKWSRLQSLHATYDNGKVAFHKDEKFHDSSRVALGATYNVNDKLTLRAGIAYDESADHPSASIPDTDRTWYSLGATYNFTPNLSVDVGFAHLRGKKQQFSETQNIGKEIKLVNISADYQSTARANLYGLNLNYRF

SEQ ID NO: 23635 - DNA, 1356 bp, Haemophilus somnus 2336
  CDS (1)..(1356)
ttgtcgttatctgccgcttatgccaatgcggcagctttccaactcgccgaggtatccagttccggtttgggacgtgcttatgcaggtgaagcggcgattgctgataatgccgccgttgtagcgactaaccctgccttaatgagtttgtttaaagcaaatcaattttctataggtggggtttatgttcaatctagaattaatataaatggtgaagtaaatgttaatgtagggaagggagttgtacaagttgcagaggaaaaagcagatcagaaaaaagttgtacccggtgcattagttcccaatttgtattttgttgcacctattaatgacaaatttgctatcggtgcgggtatgaatgtcaactttggattacaaagcaaatataaaaaggattatgatgccggtgtttttggcggaactactgagctgaattccattaatttaaatttaagcggttcatatcgtatcagcaaaggattaagcattggagccggattaaatgcggtttatgctaaagcaaaaattgagcgtcatgcgggtgttctagataaggcaattgatactattgccgattataatggaatggttgggggtatcaaaattccttcattgcaagtgttagtcccaattttctccaagttaaaaaatggagtgaatacggatactctcttaacacaattacaagataataatgcatggggattcggttggaatatcggggcggtttatgaatttaatcaaggtaaccgtatcggtattgcctaccactctaaagtagatattaattttaaagatgatgatgccttgagttatcaatttgaagcagtaaatattatccctgttaaagagaaaggtgggttaacgctacatttgccggattatttcgaaatttccggtttccatcaattaacggcaaaattcgccatgcactacagctataaatatactaaatggagccgtttacaaagtttacatgccacttatgataacggtaaggttgctttccataaagatgaaaaatttcatgacagttcacgtgtagctctaggggcgacttataatgtgaatgataaattaaccctgcgtgcaggtattgcttatgatgagtctgccgaccatccgagtgcttcaatccccgataccgaccgcacttggtatagcttgggtgcaacctataactttacgcctaatctttctgttgatgtaggttttgctcatttacgtggtaaaaaacagcaatttaaggaaaagcataagattggaagtacaggtgttgagttcggcagtatagatgcaaactataaatcaacagcacgtgccaatttgtacggcttaaatcttaactaccgtttctaa

SEQ ID NO: 23636 - protein, 451 aa, Haemophilus somnus 2336
MSLSAAYANAAAFQLAEVSSSGLGRAYAGEAAIADNAAVVATNPALMSLFKANQFSIGGVYVQSRININGEVNVNVGKGVVQVAEEKADQKKVVPGALVPNLYFVAPINDKFAIGAGMNVNFGLQSKYKKDYDAGVFGGTTELNSINLNLSGSYRISKGLSIGAGLNAVYAKAKIERHAGVLDKAIDTIADYNGMVGGIKIPSLQVLVPIFSKLKNGVNTDTLLTQLQDNNAWGFGWNIGAVYEFNQGNRIGIAYHSKVDINFKDDDALSYQFEAVNIIPVKEKGGLTLHLPDYFEISGFHQLTAKFAMHYSYKYTKWSRLQSLHATYDNGKVAFHKDEKFHDSSRVALGATYNVNDKLTLRAGIAYDESADHPSASIPDTDRTWYSLGATYNFTPNLSVDVGFAHLRGKKQQFKEKHKIGSTGVEFGSIDANYKSTARANLYGLNLNYRF

SEQ ID NO: 23637 - DNA, 993 bp, Haemophilus somnus 2336
  CDS (1)..(993)
atgaatatgaactttagtttgagaagtaaatataaagatgattatgttggcggtgttttgggtggaacaagcgagatggattctattaatttgaatttaagcggttcatatcgtgtcagcaaaggattaagcgttggtgcaggattaaatgccatttatgccaaagcgaaatttgaacgccgtgcagggattttaaagaaaactattgatagtttacgtagtgatgacaatgagctgcttattttactctctccatcaatagtatcatcggcatatagcctaacatttcatgaaaacagtactgtagcacgcttacaagataacaatgcatggggattgggttggaatatcggtgcggtttatgaatttaatcaagataatcgtatcggtattgcctaccattctaaagtagatattgattttaaagataatgatacattgggttatatacttggcaaagaagagattaagcttcatcgtgcaaaaggtaagttaactttacatttaccgagctatttcgaaatttccggtttccaccaattaacagcaaaatttgctatgcactacagctataaatatacgcaatggagccgtttacaaagtttgcatgccgcttattccaatggtgaagtcgcttttcataaagatgaaaactttcatgacagttctcgtgtagctttaggggcaacttatgatgtgaatgataaattaactttacgtgcaggtattgcttatgatgaatccgccgaccacccaactgcttccattccggataccgaccgcacttggtacagcttaggggcaacctatcatttcacaccaaatctttctgtcgacatgggctttgctcatttacgcggtaaaaaacagaaatttaaagagaaccactcatttacaagcaaagataattatgaagtaggtagaatagatgcagattatcaatcaacagcacgagccaatctgtatggcttaaatcttaactaccgtttctaa

SEQ ID NO: 23638 - protein, 330 aa, Haemophilus somnus 2336
MNMNFSLRSKYKDDYVGGVLGGTSEMDSINLNLSGSYRVSKGLSVGAGLNAIYAKAKFERRAGILKKTIDSLRSDDNELLILLSPSIVSSAYSLTFHENSTVARLQDNNAWGLGWNIGAVYEFNQDNRIGIAYHSKVDIDFKDNDTLGYILGKEEIKLHRAKGKLTLHLPSYFEISGFHQLTAKFAMHYSYKYTQWSRLQSLHAAYSNGEVAFHKDENFHDSSRVALGATYDVNDKLTLRAGIAYDESADHPTASIPDTDRTWYSLGATYHFTPNLSVDMGFAHLRGKKQKFKENHSFTSKDNYEVGRIDADYQSTARANLYGLNLNYRF

SEQ ID NO: 23639 - DNA, 1392 bp, Actinobacillus pleuropneumoniae serovar 1 str. 4074
  CDS (1)..(1392)
atgaatcacacatttaataaaactcttattgcttcactcttaactttatctgccggcggtgtatcggcttctttattccaacttgcggaagtttcaacgtcaggactcggtatggcgtacgcaggtaatgcggcggttgcggacaatgcgtccgtagtagcaaataacccggcgttaatgactaaattcaaacgccctgaaatttcagccggtggcgtgctcgttgatacagatttgaccgttcgcggaatcacttcaaacggtaatcaagcatatgcaggtaatgtcgtaccaaccgcaccgattcctaatatgtatttcgtattaccggtgaatgatgatttctcattcggtttaggttataacgtaaattacggtttaaaaacaaaatatccgaccgattttgcagcaggttcattaggcggtaataccgaattacaagcgcataacttcaacctaagcggcgcttataaattaggttacggttttagcattggtgcaggtttaaatgttgtttactctaaagcggaatttattcgtcatttaggtgataatgtcgaagcaggtgcagctcgagctaaggcaggggcagcacaagcaagagcggcggctgcaaaagcaaacgcagcgggtttaaccgctcaagcgcaagcattaaccgccacagcaaacaaatatcaagctttaggtaatttattatcctcttataaacgttcaacagaagtagctcgtgtcagtggcgatgaatggtcattaggttggaatgccggtttagtttacgagttgaatgaaaatcaccgctggggtttagcataccactctcctgtagatgtgaaatttaaaggtcattacagtaacagtatttctgctgcaacaggaagttctatcgttgcattcccaacagccggtcaagagtttccgggtaaattaacacttaatttaccggcattctgggaattatcgggtttccataaattaaccgaccgcttagcggttcaatatagctggaaacgtaccgaatggagccgtttaaaaacgttagatgcttacggcactaaaggcgaacattacttacacaaaaaagaagatttctcggatgcgagtcgttatgcactaggcgtatcttatgatgtatccgagccattaacattacgtgcgggtatcgcttatgatgaaaacgcaagcaccaatcatccgtcaatttcgattccggatacaaaccgtatgtggtattcggtgggtgcaacctatcgtgtaacccctgcgctttcggtggatgccggttatgcgttcctacgcggtacggcaaacagctttgacgaaaaaggtacggcatttaaaattaaagctcgcgggaatctctacggcttaaatcttaactacaaattttaa

SEQ ID NO: 23640 - protein, 463 aa, Actinobacillus pleuropneumoniae serovar 1 str. 4074
MNHTFNKTLIASLLTLSAGGVSASLFQLAEVSTSGLGMAYAGNAAVADNASVVANNPALMTKFKRPEISAGGVLVDTDLTVRGITSNGNQAYAGNVVPTAPIPNMYFVLPVNDDFSFGLGYNVNYGLKTKYPTDFAAGSLGGNTELQAHNFNLSGAYKLGYGFSIGAGLNVVYSKAEFIRHLGDNVEAGAARAKAGAAQARAAAAKANAAGLTAQAQALTATANKYQALGNLLSSYKRSTEVARVSGDEWSLGWNAGLVYELNENHRWGLAYHSPVDVKFKGHYSNSISAATGSSIVAFPTAGQEFPGKLTLNLPAFWELSGFHKLTDRLAVQYSWKRTEWSRLKTLDAYGTKGEHYLHKKEDFSDASRYALGVSYDVSEPLTLRAGIAYDENASTNHPSISIPDTNRMWYSVGATYRVTPALSVDAGYAFLRGTANSFDEKGTAFKIKARGNLYGLNLNYKF

SEQ ID NO: 23641 - DNA, 1275 bp, Pseudomonas aeruginosa UCBPP-PA14
  CDS (1)..(1275)
atgaaaacaatatggtttaaaacctctctcgcactgaccattagcgctgtctccacctacaccctcgccaacggcatcgccatcaacgaacagagcgccagcggcgccggcaccgcctacgccggccgcgcctcgtccgcgctcgatgccagcaccatctacggcaacccggccggcctgtccaagctgaaacgcaccgaagtcagcggcggtctggccatcgtcaaggccaaggacgacatcagccaggcccacagcaccgcccagggcagcaacaagggcgactcggtaccgctggccgccgtaccgttcggctacttctccacgccgatcaacgaagatttcactttcggcctgggcatctacgtgccctacggcatcatcaacgattacgaaaacggcttcatgggcagctcccacggctcctatagcaaggtgcaggtgatcaccgtgcagccgaccatcgcctggaagatcaacgacaaggtttccgtcggcttcggtccgaccttcaaccgcatcgacggccagttgaagaacaccctggccaccaatggcctgctcggcagcaacggcgataccaagatcaacatcaagggcgacgacactgccatcggctacaacgtcggcgtgatggtcgacctgaccgacgacaccacctggggcctgacctaccactccaaggtcaagtaccacctgggcggcaacaccgaagtgaagaacgctccgggtgccctgggcctgaacggcaagtacgacgccaagctggacatcaccctgccggaatcggtggatacctccatcacccacaagttcgacgacaagtggacgggctacctgggcgccgtctggacccgctggagccgcctggagaagatcgaagtgcgcaacagcggcgtaccggcgctcggccaggccctgggcttcaacaccatcggcgaagacctgaactggcgcgacacctggtccttctcggtaggtacctcctaccaggccaccccggagtgggtgctgcgtaccggctttgcctacgagccctcgccgaccaccaacgaggaccgcaacgtgcgcatcccggtgggcgaccgcaaggtcttcaccgtcggtgccggctggtcgccgaaccaggacctgaccgtcgacgtggcctacgcctacctgtgggaaaccactgccggcgtcaaccaggaaggcagcgccctgcagccggcctacagcgccaagtacgacaacagcgcgcatggcctgaccgcccaggtcacctatcgcttctga

SEQ ID NO: 23642 - protein, 424 aa, Pseudomonas aeruginosa UCBPP-PA14
MKTIWFKTSLALTISAVSTYTLANGIAINEQSASGAGTAYAGRASSALDASTIYGNPAGLSKLKRTEVSGGLAIVKAKDDISQAHSTAQGSNKGDSVPLAAVPFGYFSTPINEDFTFGLGIYVPYGIINDYENGFMGSSHGSYSKVQVITVQPTIAWKINDKVSVGFGPTFNRIDGQLKNTLATNGLLGSNGDTKINIKGDDTAIGYNVGVMVDLTDDTTWGLTYHSKVKYHLGGNTEVKNAPGALGLNGKYDAKLDITLPESVDTSITHKFDDKWTGYLGAVWTRWSRLEKIEVRNSGVPALGQALGFNTIGEDLNWRDTWSFSVGTSYQATPEWVLRTGFAYEPSPTTNEDRNVRIPVGDRKVFTVGAGWSPNQDLTVDVAYAYLWETTAGVNQEGSALQPAYSAKYDNSAHGLTAQVTYRF

SEQ ID NO: 23643 - DNA, 1197 bp, Dechloromonas aromatica RCB
  CDS (1)..(1197)
atgaacctgcgtatcgtcccagcactgctgttggctatcttttccggcaccgcctcggctgctgccttccagctttgggagcaaaatgccagcggcctggggaatgcttatgcgggctcggcagcggtggcggataacgccagtacggttttcttcaatccggcggggatgacgcaactgtcaggcttccagttctctgctggggtaaccggggttgggccgagctatgagtttcgtgacaatggctcgaccggagcattcaagggtagcggcaacggcggtgacgcgggcggctggaatgccgttcccaatctctatttgtccgggcatctgaccgataatctttcgatcggctttggcgtttcggccccatttgggctggcgactgaatacgacagcaactgggtcgggcgtgttcaggcgatcaagtcagagatcaagaccgtcaactacaacccgtcgcttgcctatcgcgtcaacgacaaggtttcgctgggttttggcatcaattatcagcaactggatgctgaaattaccagttacaccccggctggtctctaccgggtcaagggtgacgattcgacctggggatggaatgccggtgctttgtttacactttctcccgccatgcgcgttggtgtgtcttaccgctcggcagtgaattacacgctggaaggaacccgttcggtcggggctaattccgttgccgccaaggcggacatcaagctgccagatacttttatcctgtcggtctggcaacaggtttcggatcgttgggaagcgatgggcgatttgtcctacacgcgctggagcaccctggatcgtctggatgttcgcagctccgctggcgttgataccgagatcttcaactatgaaaactcctggcgacttgcctggggtgctgcctacaaggccagtgatgcactcaaggtgaaattcggtattgcctatgaccggacgccggtgcgcgatgaataccgttcggctcgcgtgcccgacaacgatcgtttgtggttgtcgctgggcggacagtggaatgccggtcgctatggcaaggtcgatgtcggctactcctatctttacgtcaaggacccgtctatccagcagtccaaggtggtgggagtagcccacgaattgcgtggcgattacaacgccagtgcccatatcgttggcgcgcaatactcggtgggtttctaa

SEQ ID NO: 23644 - protein, 398 aa, Dechloromonas aromatica RCB
MNLRIVPALLLAIFSGTASAAAFQLWEQNASGLGNAYAGSAAVADNASTVFFNPAGMTQLSGFQFSAGVTGVGPSYEFRDNGSTGAFKGSGNGGDAGGWNAVPNLYLSGHLTDNLSIGFGVSAPFGLATEYDSNWVGRVQAIKSEIKTVNYNPSLAYRVNDKVSLGFGINYQQLDAEITSYTPAGLYRVKGDDSTWGWNAGALFTLSPAMRVGVSYRSAVNYTLEGTRSVGANSVAAKADIKLPDTFILSVWQQVSDRWEAMGDLSYTRWSTLDRLDVRSSAGVDTEIFNYENSWRLAWGAAYKASDALKVKFGIAYDRTPVRDEYRSARVPDNDRLWLSLGGQWNAGRYGKVDVGYSYLYVKDPSIQQSKVVGVAHELRGDYNASAHIVGAQYSVGF

SEQ ID NO: 23645 - DNA, 1356 bp, Haemophilus influenzae R2846
  CDS (1)..(1356)
atgaaaaaatttaatcaatctatattagcaactgcaatgttgttggctgcaggtggtgcaaatgcggcggcgtttcaattggcggaagtttctacttctgggcttggtcgtgcctatgcgggtgaagcggcgattgcagataatgcttctgtggtggcaactaacccagctttgatgagtttatttaaaacggcacagttttccacaggtggcgtttatattgattctagaattaatatgaatggtgatgtaaattcttatctaaacagtggttcaatggcattaacaaagtacggctcagcttcacagcgtaatgttgttcccggtgcttttgtgccaaatctttatttcgttgcgccagtaaatgataaattcgcgctgggtgcaggaatgaatgtcaatttcggtctaaaaagtgaatatgacgatagctatgatgctggtgtatttggtggaaaaactgacttgaatgctatcaacttaaatttaagtggtgcttatcgagtaatagaaggcttgagcctaggtttaggggtaaatgcggtttatgctaacgcccaagttgaacgaaatgcgggtattattgcggatagtcttcaggattcacaagtaaaaggagcactcaaaatagtagattctacaaataaagctcctgaccgtttgacctctaaagacaaatctgttgtgtcattacaagatagagcagcttggggctttggctggaatgcaggtgtaatgtatcaatttaatgaagctaatcgaattggtttagcctatcattctaaagtggacattgattttgctgaccgcactgccactagtttcggaaaaaaggatatcgtggcggggaaaacaggtaatttaacctttacattgccagattacttagaactttctggtttccatcaattaactgacaaatttgctgtgcattatagttataaatatacccattggagtcgtttaacaaaattacatgctagctatgaaaatggtgaaaaagcttttgataaagaattgcaatacagtaataactctcgtgttgcattaggggcaagttataatcttgatgaaaaattgaccttacgtgcgggtattgcttacgatcaagcggcatctcgtcatcagcgtagtgctgcaattccagataccgatcgcacttggtatagtttagggggaacctataaattcacccctaatttatctgttgatcttggctatgcttacttaaaaggcaaaaaagttcactttaaagaagtacaaaaagctgcaggtggccacataacaacaaccgcaaattacacttctcaagcacatgcaaatctttacggtttgaatttaaattatagtttctaa

SEQ ID NO: 23646 - protein, 451 aa, Haemophilus influenzae R2846
MKKFNQSILATAMLLAAGGANAAAFQLAEVSTSGLGRAYAGEAAIADNASVVATNPALMSLFKTAQFSTGGVYIDSRINMNGDVNSYLNSGSMALTKYGSASQRNVVPGAFVPNLYFVAPVNDKFALGAGMNVNFGLKSEYDDSYDAGVFGGKTDLNAINLNLSGAYRVIEGLSLGLGVNAVYANAQVERNAGIIADSLQDSQVKGALKIVDSTNKAPDRLTSKDKSVVSLQDRAAWGFGWNAGVMYQFNEANRIGLAYHSKVDIDFADRTATSFGKKDIVAGKTGNLTFTLPDYLELSGFHQLTDKFAVHYSYKYTHWSRLTKLHASYENGEKAFDKELQYSNNSRVALGASYNLDEKLTLRAGIAYDQAASRHQRSAAIPDTDRTWYSLGGTYKFTPNLSVDLGYAYLKGKKVHFKEVQKAAGGHITTTANYTSQAHANLYGLNLNYSF

SEQ ID NO: 23647 - DNA, 1356 bp, Haemophilus influenzae R2866
  CDS (1)..(1356)
atgaaaaaatttaatcaatctctattagcaactgcaatgttgttggctgcaggtggtgcaaatgcggcagcgtttcaattggcggaagtttctacttctgggcttggtcgtgcctatgcaggtgaagcggcgattgcagataatgcttcagtggtggcaactaacccagctttgatgagtttatttaaaacggcacagttttccacaggtggcgtttatgttgattctagaattaatatgagtggtgatgtaactgcttctataacaggttctgtaatgacagcagcaaaggacggctcagcttcacagcgtaatgttgttcctggtgcttttgtgccaaatctttatttcgttgcgccagtaaatgataaattcgcgctgggtgcaggaatgaatgtcaatttcggtctaaaaagtgaatatgatgatagttatgatgctggtgtatttggtggaaaaactgacttgagtgctatcaacttaaatttaagtggtgcttatcgagtaacagaaggcttgagcctaggtttaggggtaaatgcggtttatgctaacgcccaagttgaacgaaatgcgggtgttattgcggatagtgttcaggatggacaagcaaaaacggcactcagagcagtagttccaggaacaaaaattcctgacatattgacctctaaagacaaatctgttgtgtcattacaagatagagccgcttggggctttggctggaatgcaggtgtaatgtatcaatttaatgaagctaatcgaattggtttagcctatcattctaaagtggacattgattttactgaccgcactgccactagtttaggaaaaacggatatcgtggcggggaaaacaggtaatttaacctttacattgccagattacttagaactttctggtttccatcaattaactgacaaacttgctgtgcattatagttataaatatacccattggagtcgtttaacaaaattaaacgctagctatgaaaatggtgaaaaagcttttgataaagaattacaatacagtaataactctcgtgttgcattaggggcaagttataatcttgctgaaaaattaaccttacgtgcgggtattgcttacgatcaagcggcatctcgtcatcaccgtagtgctgcaattccagataccgatcgcacttggtatagtttaggggcaacctataaattcacgccgaacttatctgttgatcttggctatgcttacttaaaaggcaaaaaagttcactttaaagaagtacaaaaagttgcaaatggcttcctaacaacaaccgcaaattatacctctcaagcacacgcaaatctttacggcttaaacttaaattatagtttctaa

SEQ ID NO: 23648 - protein, 451 aa, Haemophilus influenzae R2866
MKKFNQSLLATAMLLAAGGANAAAFQLAEVSTSGLGRAYAGEAAIADNASVVATNPALMSLFKTAQFSTGGVYVDSRINMSGDVTASITGSVMTAAKDGSASQRNVVPGAFVPNLYFVAPVNDKFALGAGMNVNFGLKSEYDDSYDAGVFGGKTDLSAINLNLSGAYRVTEGLSLGLGVNAVYANAQVERNAGVIADSVQDGQAKTALRAVVPGTKIPDILTSKDKSVVSLQDRAAWGFGWNAGVMYQFNEANRIGLAYHSKVDIDFTDRTATSLGKTDIVAGKTGNLTFTLPDYLELSGFHQLTDKLAVHYSYKYTHWSRLTKLNASYENGEKAFDKELQYSNNSRVALGASYNLAEKLTLRAGIAYDQAASRHHRSAAIPDTDRTWYSLGATYKFTPNLSVDLGYAYLKGKKVHFKEVQKVANGFLTTTANYTSQAHANLYGLNLNYSF

SEQ ID NO: 23649 - DNA, 1260 bp, Pseudomonas fluorescens PfO-1
  CDS (1)..(1260)
atgctcaagaatcccgtcggcctggcggtcgcgctggtgtcctccaatgtgttggccggtggttttgccctcaacgaacaaagcatcagcgggatggggtccgggtttgcgggacgatcttcatccgccgaagacgccagtacgatctacggcaacccggcaggcatggcgcggcttaaacgagagcaggtgagcgtgggggcggcgacgctgttcgccaaatcggacatcagccagacacgcagtacgtttggggggaaggaagacggcgacatggtgcccgccaccacagtaccgatggggtattacgtgaaaccgatcgatgagcattgggcattcggcgtcgggttttatgtgcctttcgggctgatcaccgactacggcagtggttttgccggccgctattacgccaacaagagtgaagtcaccacgctgacctttcagccgaccatcagctacgcctttaacgaaaaggtgtcgatcggattcgggccgaccatcaatcgtatcggcggagagatatcgggcatggtgcccaatccactcagccccgggcgcaacgacggcaaactcaaaagcaccggcgatgacaccgcactgggcttcaatgctggcgtgctggtgcaggcgaccgatcagacccgcctgggcctgacgtatcactccaaagtcagttaccacctggacgccaaaaccaaggtcaccgatggcatcttcagcgtgctgggcgtcagcggccgtagctatgacgcatcgctggatgtggacacgccggagtcggtggacttttcgctgacgcatcaattcaacgacgactggacgctctatgtgggcagcacctggacacgctggagccgcttcaaggaactgaccattgagaacagcggcttgccgccgttgctgagcgggcaattggggacgatcagcgaagaacagaactggcatgacacctgggctcacgcgatcggtgcggcctatcgattgaataaccaatgggtgctgcgtggcgggttttcggtcgatcagtcacccgccaacaacaccaatcgggggccgcgcattccgacgggcgaccgtaaggttgtcagcttcggcgccggctggacacccgtggacaatgtcacgatcgatctcgcgtattcctatctttgggaggaaagcgtcgaggtcaacgacacctcggcatcgaggggggcctaccgtgccaggtacaagaacagtgccagcgggttcggtacgtcggtcagttatcgcttctag

SEQ ID NO: 23650 - protein, 419 aa, Pseudomonas fluorescens PfO-1
MLKNPVGLAVALVSSNVLAGGFALNEQSISGMGSGFAGRSSSAEDASTIYGNPAGMARLKREQVSVGAATLFAKSDISQTRSTFGGKEDGDMVPATTVPMGYYVKPIDEHWAFGVGFYVPFGLITDYGSGFAGRYYANKSEVTTLTFQPTISYAFNEKVSIGFGPTINRIGGEISGMVPNPLSPGRNDGKLKSTGDDTALGFNAGVLVQATDQTRLGLTYHSKVSYHLDAKTKVTDGIFSVLGVSGRSYDASLDVDTPESVDFSLTHQFNDDWTLYVGSTWTRWSRFKELTIENSGLPPLLSGQLGTISEEQNWHDTWAHAIGAAYRLNNQWVLRGGFSVDQSPANNTNRGPRIPTGDRKVVSFGAGWTPVDNVTIDLAYSYLWEESVEVNDTSASRGAYRARYKNSASGFGTSVSYRF

SEQ ID NO: 23651 - DNA, 1272 bp, Pseudomonas fluorescens PfO-1
  CDS (1)..(1272)
atgaaaaaagtcatgctcaaaaccacccttagccttgccgtaaccgtggcatccacccagatcttcgcggctggctttgccatcaacgaacacagcatcagcgggatggggactgggtacgccgggcgatcttcttctgccgacgacgcaagcactgtttacggcaaccctgccggcatgtcgcgcatcacgcgcgaacaagtcaccggtggcgttgcattcctcgatgcaaaaaccgatatcagcgacgccagctccagcccgaacggcggcagcaacaaaggcgacatggtgcccttcacctccgtacctatgggttactacgtcaagccgatcgacgagcattgggcattcggtctgggtgtgtacgtacccttcggcctgatcaccgactatgaaaacggcttcgccggccgttacttcggcagcaagtccgaagtcaagatcattaccttccagccaaccgtcagctacaagttcaacgacgtcgtgtcgatcggtttcggcccgaccatcaaccgtatcgacggctcgcttgaatctaacctgtcgatcactcaggctgcgccggacggcaaggtcaagatcaagggtgacgacaccgcactgggctacaacatcggggtgctggtacaggctaccgacagcactcgcctgggtctgacctaccactcgaaagtcgactacaagctcgaaggcaacaccaaggtcaactacggtgtgctgggcgcgatcggcctgggtgcgaaccagaagtacgacgcttcgctgaagatcaccacgcctgaatccgtggacctctcggtcacccaggcgatcaacgatcgctggaacgtctacgccggtaccacctggacccgctggagccagctggaaaagatcaccgtcaagaactccggcgttcagccactgctggctggccagttcggcgagatcaccgaagaacagaactggcatgacacctgggcgtacgccatcggtacgtcctaccaactgaacaaggaatgggtactgcgtaccggtctgacgttcgaccagtcgccgaccaacaacgtcgaccgttcgccacgcataccgaccggcgaccggaccatcttcagtatcggtgccggctggagcccgaccgaagacctgaccatcgacgttgcctactcgtacctgaaggaagagaaggtcaacattcgcaacacaaacgatcgtggccagagctacaactcgcagtatgaaaactcggcaaacggcttcggtgtcggcgcaacctaccgcttctga

SEQ ID NO: 23652 - protein, 423 aa, Pseudomonas fluorescens PfO-1
MKKVMLKTTLSLAVTVASTQIFAAGFAINEHSISGMGTGYAGRSSSADDASTVYGNPAGMSRITREQVTGGVAFLDAKTDISDASSSPNGGSNKGDMVPFTSVPMGYYVKPIDEHWAFGLGVYVPFGLITDYENGFAGRYFGSKSEVKIITFQPTVSYKFNDVVSIGFGPTINRIDGSLESNLSITQAAPDGKVKIKGDDTALGYNIGVLVQATDSTRLGLTYHSKVDYKLEGNTKVNYGVLGAIGLGANQKYDASLKITTPESVDLSVTQAINDRWNVYAGTTWTRWSQLEKITVKNSGVQPLLAGQFGEITEEQNWHDTWAYAIGTSYQLNKEWVLRTGLTFDQSPTNNVDRSPRIPTGDRTIFSIGAGWSPTEDLTIDVAYSYLKEEKVNIRNTNDRGQSYNSQYENSANGFGVGATYRF

SEQ ID NO: 23653 - DNA, 1290 bp, Rhodospirillum rubrum
  CDS (1)..(1290)
atgaccattattcgtacatccggggccgtcgccggtctgtgtggactggccgtggccctgagcggcggctcggcctgggcttcgggtttccagttgaaggaacagagcgccgagggcctgggcaacgccttcgccggcgccaccgccaaggcttatgacccgagcaccgccttttataaccccgccggcctcacccgcctcaagggcacccaagccgacagcgttttgacctatatcatgccaaaggcccatttcagcggctcgggcaccaacgccctgggcggttcgacgggcagcatcgaaggcggcgacgccgtggccgacgcggccgtgccgtcattctatggcgtatacagctataacgacgacctgaagttcggcatcgccgccaatgtgcccttcggcctgcgcaccgattacgacaagaactgggccgggcgctatcaggcgatcgaatccgatctgcagatcgtcaccctgacgccttcggtggcctatcgggtggttggcgattcgtcgtttggcgatttctcgatcggcggtggcccggttgtgcagttcgcctcggtcaagctgaccaacgccgtcaacaacttcggtctggtggccggtgacggtcgcgccaaggtctcgggctcggatatcggctacggcttcaatatcggcgctttgtgggagccgaccgaaaccacccgcatcggcgtcaactaccgctcgcgcgtcgagcacaatttcgatggcgacgccaaatacaccaatgtcgcccggcctttggccatctcgcgcggcctcgtcaacagcggcgcctcggccgatttgacgaccccggatgtggtcagcatcggcgcctatcacgaattcgatccgcaatgggcggtcacggccgatgtcgcctggaccaactggtcgctgtttgacgaattgaagatcgagaacgacaagggcggggtgatcacccgcgtcgatgaaagctgggaagacaccatgttcgtcgcccttggcggcatctacaagccggtcgaggacgtcgccctgcggatcggcgtggcctatgaccaggcccccgtcggcaagaagcaccgcaccgcccgcatccccgataccaaccgctattggctggccgccggcgtgagctacgcggtgaccgacagcttcagtctcgacgcctcctacgcccacatcttcgccgatcgggtcagcatcaacgaaaccaccgcccagggcaatctgacgggcacctacgacagctcgatcgacatcctgtcggccagcgcgacgttgcgtttctaa

SEQ ID NO: 23654 - protein, 429 aa, Rhodospirillum rubrum
MTIIRTSGAVAGLCGLAVALSGGSAWASGFQLKEQSAEGLGNAFAGATAKAYDPSTAFYNPAGLTRLKGTQADSVLTYIMPKAHFSGSGTNALGGSTGSIEGGDAVADAAVPSFYGVYSYNDDLKFGIAANVPFGLRTDYDKNWAGRYQAIESDLQIVTLTPSVAYRVVGDSSFGDFSIGGGPVVQFASVKLTNAVNNFGLVAGDGRAKVSGSDIGYGFNIGALWEPTETTRIGVNYRSRVEHNFDGDAKYTNVARPLAISRGLVNSGASADLTTPDVVSIGAYHEFDPQWAVTADVAWTNWSLFDELKIENDKGGVITRVDESWEDTMFVALGGIYKPVEDVALRIGVAYDQAPVGKKHRTARIPDTNRYWLAAGVSYAVTDSFSLDASYAHIFADRVSINETTAQGNLTGTYDSSIDILSASATLRF

SEQ ID NO: 23655 - DNA, 1128 bp, Cytophaga hutchinsonii
  CDS (1)..(1128)
atgggtggagcaggcgttgcaacaaacttagatgccgccagtgttttcttcaaccccggcagtgttgcgcacttagagcaaaacagtgtgagtgcaggggtgagtttaaccgctgaaagtaccgccttccgcgacgggaacagccagcaggagtttaatacaaattctccggtcagcacaccatttacgggctatggcgtttggggaccgaaagaaagcaaatttaaatttggtatgggtgtatatacaccattcggaagtaccattacatacgaagatggctggtccggacgatttagcttaacacaaatgaaattgctttccgtattttttcagccgacagtaagttataaaatcaacgacaagtttggcataggtgcaggttttgtatatggctatggaaatatagatttaagcagagacctgccgattagcaattcaaacggagattatgctacagctaacttaaaaggtacagccggcggcatgggttataatcttggtatctattacaaacccagtgacaaactttcgtttggtctgagttaccgctcggaagtaaagatgaaagtaaacaagggcacggcaacgtttaatgtacctccatcccttgccagcagctttccatcaggtaatttcagtgcgtcccttccacttcctcaagtgttaacattagggatcggctacaatgcgagcgaacggttattacttacttttgatgtgaactacatcggctggggaagttacaaatcactggcgtttgattacgaacagaatacttcttcgttaaaagacacagagtcgccccgtaattataaaaacacgtatgcattgcgtttaggtgcacaatataaagtgagtgaaaagtttttagtgcgtgcaggtacaaactatgaaaaaacaccaatcaaagatggatatgtaacaccggaagttccggatgcagacaggttgaattttacaggaggtatcgggtacaagcccagcgaccgttttgtaatagatgcttcattcagttatatcaactttatgaaacgtacggacaccaacatagaaacacacatgtccggtacatacaaaacacgcattttagtgccaggtatttcattaacctataacttcaactag

SEQ ID NO: 23656 - protein, 375 aa, Cytophaga hutchinsonii
MGGAGVATNLDAASVFFNPGSVAHLEQNSVSAGVSLTAESTAFRDGNSQQEFNTNSPVSTPFTGYGVWGPKESKFKFGMGVYTPFGSTITYEDGWSGRFSLTQMKLLSVFFQPTVSYKINDKFGIGAGFVYGYGNIDLSRDLPISNSNGDYATANLKGTAGGMGYNLGIYYKPSDKLSFGLSYRSEVKMKVNKGTATFNVPPSLASSFPSGNFSASLPLPQVLTLGIGYNASERLLLTFDVNYIGWGSYKSLAFDYEQNTSSLKDTESPRNYKNTYALRLGAQYKVSEKFLVRAGTNYEKTPIKDGYVTPEVPDADRLNFTGGIGYKPSDRFVIDASFSYINFMKRTDTNIETHMSGTYKTRILVPGISLTYNFN

SEQ ID NO: 23657 - DNA, 1035 bp, Azotobacter vinelandii AvOP
  CDS (1)..(1035): transl_table=11
atgccaacccgtcaggttctgttcgggctcgccctgctcggtgccgctggcaccgcttgggcggatgattccagattctccgtcgctgccggtcgcagcgctccggtcgcctccggttccggcgcggccgttccgccggcggccaatcccgtcatggccgccggaatgggaatggccgtggcgaacggcagcgggcagggtgccggccgcctggtcgccgaacccggactgcgcggactgaccctgcagccgactttcgcctaccggctcaacgatgcgctttccatcggtatcggcgcgcgcctcgtccagggcgctgtgatccgtcccggcggcgctccggccgatgcgcctccggcctacctggatagcgacaccggcgctggcctcaatctgggcctgctgtaccgggtgagcgacagcacctggctggggctggcctacgccagcggctacgaactgaatctcgacgagcgtgccggcgtcgccgatcccgtggcgaacgtcgcccgcggacgtccggaaaccaaccggacgatcgccgaggcgcgggcgccggacagcgtcaccgcgagcatttcccaccggctggacagtggctggatgctgtcggccagcctcggctggatgggctggagcgccctgcaacggtccgagggcgaggcgccgagcccggctgccgcgagcgtcggtggcgcacaccagtaccgcgacacctggcgcctcgccctgggcgcggaacagcaactcggcgagcatctgcactggagcatggggctgagctacgactcgtcgcccttgcccggcgaccagcgcaatctggacgacccgttgccggaaaacctgcgcctggccgccgggctgagctaccggatggatcagggggtggagttgcagctcggctacagcctgatctggctgggcgaagcggagtcgcggcagaacggccggacgcgcaacgacggcatcctgtccgccgagccgcccagcagtaccctgcacgtcatcggcgggggcatggtctggcgtttctga

SEQ ID NO: 23658 - protein, 344 aa, Azotobacter vinelandii AvOP
MPTRQVLFGLALLGAAGTAWADDSRFSVAAGRSAPVASGSGAAVPPAANPVMAAGMGMAVANGSGQGAGRLVAEPGLRGLTLQPTFAYRLNDALSIGIGARLVQGAVIRPGGAPADAPPAYLDSDTGAGLNLGLLYRVSDSTWLGLAYASGYELNLDERAGVADPVANVARGRPETNRTIAEARAPDSVTASISHRLDSGWMLSASLGWMGWSALQRSEGEAPSPAAASVGGAHQYRDTWRLALGAEQQLGEHLHWSMGLSYDSSPLPGDQRNLDDPLPENLRLAAGLSYRMDQGVELQLGYSLIWLGEAESRQNGRTRNDGILSAEPPSSTLHVIGGGMVWRF

SEQ ID NO: 23659 - DNA, 1353 bp, Chromohalobacter salexigens DSM 3043
  CDS (1)..(1353): transl_table=11
atgcataacaacatcaacaagctcacactcgccgtgacgctggcctctaccgtgatcgcctccggccatgccgctgcgtctggcttccaggtccgcgaacagagcgccaaggcactcggcaacgccatggccggggcggcggccggtgccgaggacgtcagctacatgacctacaacccggcggccatcggtaacgtcgagggcactcaggtggccggcggcatttcctacatcgatgccagcttcgaattgaccgacgcctcggcgagctccgtcaccggggccagttacatgggaaatggcaataacgaagggggcgaggaggcctgggtacccagttttgccttcaagacccgtctcgacgagcgcttcgatcttggcctggcgatctccgcgccgtacggtctctcgacgaagtatgacaaggaatggatcgggcgttatcacgccatcgaaaccgagctcaagaccatcgacatccaaccaacgctgaattaccgcgccaccgaccgcctcgaccttgctgtggggctgcgtgctcagtatgccgatgccacgctctccaacgccatcgatctgggcgcggtgggagccggcgcaggtcagttgccgccctcggcgatcggcaatgccgatggcatggccgaggtgaccggtgacgactggggctacggctacaccctgggggcgctgttccaggccaccgagcggacccgtctgggcatcagctaccgctcggaggtcgagctgacgctggacggtgacgtcgattacagctccgacaacgccgcggggcaggcagtattggccggggcgcaggccaccggtcagctgcaggacggcggcggcaaggcggagatcaccacgccggccaacctcaacctggggatctaccatcaattgactgatcggctcgccttgatggccaatgccgaatggacggagtggagcagcttcgaggagctgaccgtcgagttcgataatggagggcagagcaccacgaccgaaaactgggacgatacctgggctttctcggtgggggcgaactatcaactcaaccggcagtggctgctgcgcgccggcctgggggtcgacgaatcgccggtgccggacagcgaacaccgcacgccgcgtgtgcccgatgccgaccgccgctgggcgacgctcggggccacctggatgccgacttcgaacctgggcgtgacggcgggctacatgcacgtgttcggtgacgatggcgatatcgatcagaacgccacgccgaccaacgagaatgccagccgcggcaacctgtccgggacctatgaagtcgaggccgatgtgttcgcactgtcgatggattatcgcttctga

SEQ ID NO: 23660 - protein, 450 aa, Chromohalobacter salexigens DSM 3043
MHNNINKLTLAVTLASTVIASGHAAASGFQVREQSAKALGNAMAGAAAGAEDVSYMTYNPAAIGNVEGTQVAGGISYIDASFELTDASASSVTGASYMGNGNNEGGEEAWVPSFAFKTRLDERFDLGLAISAPYGLSTKYDKEWIGRYHAIETELKTIDIQPTLNYRATDRLDLAVGLRAQYADATLSNAIDLGAVGAGAGQLPPSAIGNADGMAEVTGDDWGYGYTLGALFQATERTRLGISYRSEVELTLDGDVDYSSDNAAGQAVLAGAQATGQLQDGGGKAEITTPANLNLGIYHQLTDRLALMANAEWTEWSSFEELTVEFDNGGQSTTTENWDDTWAFSVGANYQLNRQWLLRAGLGVDESPVPDSEHRTPRVPDADRRWATLGATWMPTSNLGVTAGYMHVFGDDGDIDQNATPTNENASRGNLSGTYEVEADVFALSMDYRF

SEQ ID NO: 23661 - DNA, 1320 bp, Desulfuromonas acetoxidans DSM 684
  CDS (1)..(1320): transl_table=11
ttgaaattactggttactgctgttgccctggcactgatgctgccgggttgggtgagtgcggcgggttttcatatccgcgaacaggggagcaaggcgatgggcatggccaatgcctttgctgcccaggctgatgatccgtcggctattttttacaatcccgccgggattgtttttcaaaccggaacccaggtcagtcttggtgtgaccgtcatcaacgtaccggaaacggaatttcgcgggaccaccaagttgggtgatgtggcaagtggccttggtgtggaacaacaggtggataccgaagcgcgtgatgacatcttttttccgcccaatttctatatgaccacccgtaaagaaggttctccctgggcgtttggtattggtattggatcactttatccacttgccaagcgctgggataccaccagcccgtttcgtgatgagattaaagaaattgccatcaagccgattaacgtcaatccgacagtggcctatctgtttgagtcgatcaaccttggtgttgcagttggtattgactatacctacgcggatgtgtggcttgaaaagtcagcgtgtgtcgatgcctatgccctgggagccgtgcctgtaccgggattgactgccgttcaattgggtgagttggagctcgaagccgatggcgatggttggggatataactttggtttgttgtggcagccgttggaaaccttgtcgtttggcgttgcctatcgcagtgaaattgaactggattttgatggtgatgctgattaccagatcaccagtgcgggccagagtgtttatggtgctccaccactttcctacacagattctatttacagtacaggcgctgaaacggaaattacgttgccggacacttggagcttcgctgttgcctggaagccgacgcgtaagctgaccgtagagttcgatgcggaccgctttggttggagctcctatgacagtttggacatcctgtttgatgaaaataccgtgctgtcggattctctgaatcgtaaagattggaacgatgtctgggcttatcggtttggtgcccagtatgcggtgacggaaactcttgatctacgtgttggttatgcccgtgacaacaccccggtacccaatgataccattggtcctgagcttcctgatgccgatcgtaacaactacacctttggtttcggttaccatacggatcgggcggtgtttgattttgcctacatgtgggttgatttcgatgatcgtaaagtcgacaacgagactcaaaccggtacatacaaaagtgacgcttatctgtttgccgctaatctgacctattttttctaa

SEQ ID NO: 23662 - protein, 439 aa, Desulfuromonas acetoxidans DSM 684
MKLLVTAVALALMLPGWVSAAGFHIREQGSKAMGMANAFAAQADDPSAIFYNPAGIVFQTGTQVSLGVTVINVPETEFRGTTKLGDVASGLGVEQQVDTEARDDIFFPPNFYMTTRKEGSPWAFGIGIGSLYPLAKRWDTTSPFRDEIKEIAIKPINVNPTVAYLFESINLGVAVGIDYTYADVWLEKSACVDAYALGAVPVPGLTAVQLGELELEADGDGWGYNFGLLWQPLETLSFGVAYRSEIELDFDGDADYQITSAGQSVYGAPPLSYTDSIYSTGAETEITLPDTWSFAVAWKPTRKLTVEFDADRFGWSSYDSLDILFDENTVLSDSLNRKDWNDVWAYRFGAQYAVTETLDLRVGYARDNTPVPNDTIGPELPDADRNNYTFGFGYHTDRAVFDFAYMWVDFDDRKVDNETQTGTYKSDAYLFAANLTYFF

SEQ ID NO: 23663 - DNA, 1353 bp, Methylobacillus flagellatus KT
  CDS (1)..(1353): transl_table=11
atggaaatcaaaatgatcaaacgcttttgcttcttatcgatcttgggaatcagcagcagcgcagccacgacgggacatgcggcaggcttcgccctgatcgagcaaagcgcatccgggtttggcaatgcctatgccggcatggctgcgcgcgccgatgacgccagtgtgcagttcttcaatccggccagcctttcctggctgccaccaggcaggcagatcatcgtgggtggcagtgccatcctgcccagcgccaagctcaggaatgtcaacagcacccaccgcagcactggtacccccattcccggtaacgatgggggagatgccgcctcactggagttggtgcccaacttttactttgcaaatgacctgggggacaacctcaagtttggcttgggcgtcaccgtcccgtacggactgacctcggactatgacagtggctggaaagggcgctaccaggcgctgaaatccgaggtaatgaccctagacatcaacccggctttctctttcaaggccaacgagaaactctccatcggtggcggtatcagcgtgcaatatattcgggcagaactgaccaatgcgctcgattccagtgcattgtgccaagccaacccggcattgccagcgggcacgtgtaacgcactcggactgggccaaataggcaatccggcagtagacagctatagcaagatgcaaggggacgatatcagttgggggttcaacctgggtgtgatctttaaaccttgggacggaacgacattgggggccagctatcgctcgcatatcaagcacaagctggaaggaaaggcaaaattcagacctgttgccccgctggccgccacattacgcaactccgatatctccaccagtctctctctgccagaaaccgcctcgttcagtattgcccagcgattgaatgaccgtgttgaactgttggctgatgtgacatggaccaattggagccgcttccaggaattacgcatccattttgataatggcctgggtgacaatgtcaccaccacaaaatggaatgacagctaccgtttctcccttggtgggaactatcgttacagcgaccgcctgacgttgcgcgccggggtggcttacgaccaaacgcctgtgcccgatgccgctcaccgcacgccgcgcatcccggatgctgaccgcacctggtttgctgtgggtgcaagctggaaactggatgcagccaacaccctggattttggttacgcgtatttgcgcctgaaagacaccagcaccaggcacgtcagcgaaggagctgtcagccatgtgctggaaggcgattttacgtcgaaagtgaatatactcagcgcacagtgggtatatagcttttga

SEQ ID NO: 23664 - protein, 450 aa, Methylobacillus flagellatus KT
MEIKMIKRFCFLSILGISSSAATTGHAAGFALIEQSASGFGNAYAGMAARADDASVQFFNPASLSWLPPGRQIIVGGSAILPSAKLRNVNSTHRSTGTPIPGNDGGDAASLELVPNFYFANDLGDNLKFGLGVTVPYGLTSDYDSGWKGRYQALKSEVMTLDINPAFSFKANEKLSIGGGISVQYIRAELTNALDSSALCQANPALPAGTCNALGLGQIGNPAVDSYSKMQGDDISWGFNLGVIFKPWDGTTLGASYRSHIKHKLEGKAKFRPVAPLAATLRNSDISTSLSLPETASFSIAQRLNDRVELLADVTWTNWSRFQELRIHFDNGLGDNVTTTKWNDSYRFSLGGNYRYSDRLTLRAGVAYDQTPVPDAAHRTPRIPDADRTWFAVGASWKLDAANTLDFGYAYLRLKDTSTRHVSEGAVSHVLEGDFTSKVNILSAQWVYSF

SEQ ID NO: 23665 - DNA, 1350 bp, Shewanella baltica OS155
  CDS (1)..(1350): transl_table=11
atgcaaaaacgtcttctgactttggctgtcactgcagccttgttaagttcaacgactcaactccatgccgcaggttttcaattagccgaatattctgccacaggcttaggccgcgcctttgcgggtgaagcggctatggcggataacgcttcggctcaagcacgtaatccagccatgttgacttatctcgaaggtcgtcagttatcgacgggtggtatttatgtcatgccaaacgtcgatgtgactggcgatgtcagcattagctcgccgttgcttggcccagatcctgttgttatgaaaggtggcgatgcactggatgtggccgatgacgcactggtgccaaatttttactactcaaatcagttaaatgatcaatggacttggggcctagcggtaaattctaactatggtctagccactgaattacctgcgactcacgccgcggctatttttggtaacaagacttcggttacaaccgttgagtttaatccaaacatcgcttatcgcatcaatgatgccgttagcgtcggtgctggtgtacgtatcgtttatggtgaaggcgaaattggtgcgtcattaccaggttgggtcgatggtatcaaacctgctctgcctgctcccgtgcaggctgtgttacctcctggtggcactgagctgaaaagcatgaagggtgatgatgtgggttacggctggcagttaggtgcaagctggcagatcaatccggctcaccgtttaggttttgcgtatcacagcggcgtgcaattggacttagatggtcatgcttctggcgtcttgtataccggcggtcaagacgtgtctattgaagggtatttaccgcttgaattacccgcctttgcagaaattgcttcccaccaccaattgaccgataactgggccatgcacgcgagcgtgaactggaccgattggagtgtatttgatcagctggtggcttatttccctggtgacgttaaacctaagggcgatttagagtctgatttagttaaagaagaacactttgaagataactggcgtttcgcgctgggaaccacttatcaagtgaataatgactggttagtgcgtgccggtgttgctttagacaaaacggcagcaaatgacgagtggcgcacaactacaattccagactctgaccgtctgtggttctctgtcggtgccggttatcaggcgactaagaatctgaatgttgattttgcggtgacgtatatcaaagcaacaggcgatgcgccaatcaacgaacagcaaaatctactgggcttagcggccgttaactttaacggtgaagcgagcggcgatgtgtggcttgcgggtatccagatgagctataagatgtaa

SEQ ID NO: 23666 - protein, 449 aa, Shewanella baltica OS155
MQKRLLTLAVTAALLSSTTQLHAAGFQLAEYSATGLGRAFAGEAAMADNASAQARNPAMLTYLEGRQLSTGGIYVMPNVDVTGDVSISSPLLGPDPVVMKGGDALDVADDALVPNFYYSNQLNDQWTWGLAVNSNYGLATELPATHAAAIFGNKTSVTTVEFNPNIAYRINDAVSVGAGVRIVYGEGEIGASLPGWVDGIKPALPAPVQAVLPPGGTELKSMKGDDVGYGWQLGASWQINPAHRLGFAYHSGVQLDLDGHASGVLYTGGQDVSIEGYLPLELPAFAEIASHHQLTDNWAMHASVNWTDWSVFDQLVAYFPGDVKPKGDLESDLVKEEHFEDNWRFALGTTYQVNNDWLVRAGVALDKTAANDEWRTTTIPDSDRLWFSVGAGYQATKNLNVDFAVTYIKATGDAPINEQQNLLGLAAVNFNGEASGDVWLAGIQMSYKM

SEQ ID NO: 23667 - DNA, 1323 bp, Shewanella amazonensis SB2B
  CDS (1)..(1323): transl_table=11
atgacaacaagagaagagacgatgaagtacttcaacaagacactgcttgcagccgccattggtttggcaagcacccaaaccctggctgccggttttcaactcaacagtcactctgccaccggtgttggccgcgccatttccggtgatgccgttattgccgacaacgcctccgtgttgtcccgtaacccagctgccatggcgctgtttgacaacacagccctgtctctgggcgtgacctatgccgacatcgatgtgagtgtaaaagatgtctgtaaagccggtacccctatttgtttcggtagcgacaccgatgctgcggaagataaaatcatccccaatttctattacatcaaccccattaacgataaatgggcctttggtgtagccgccttctccaacttcggcacaggtaccgatcctggcgctctggccaacaatgcagtcactctgcctggccttggtaccattcctgcgccagttgacctgctgggtaacacagaagttatcaccatgaacctgaatgccagcctgtcatatcgtgtaaacgaacagctgagcctgggcgccggtgtggatgtgatttacggccagggcaccctgacccgtaaaggcaacctgccttttggcccgaacggtgaaatggtgccggtaagtctggtgaacgtggatgccgacggttgggcactgggcgggatcctgggcgcggtgtatgaatttaatgcagaccaccgtttaggggtgagctacagattcagccccgagtttaaagccagcggcgatgtgcagacgttggtgccacaggctcaggcgtatgccaactttgatgagattgttattccgctgccggacattttccaggtggccggtttccaccagctgaccgaaaagtttgccctgcactatacggcgcaactgacttcctggggcgatttcaaagagatcaccctcgaaaatggcactctgggccagaccagcattccgtcttctcagctcaagcactatgcctgggatgactcttggctgttcagcatcggtggtacttatcagctgtctgatgcctggacactgcgtgctggctacatgcacgatcagggtgtagtggatgagatcagctcgatttctatccctgattcagatcgcaactggtacacccttggcgcaagctatgcactgtctgccaatgccaccctggatctgggggtagcactggtacgcggtgaagacacccaggtgctggagcaaagcgccattatcggtgacgtgattgcccacacccgctccaacgccgtgtactattcactgcagtacaactacaagtactga

SEQ ID NO: 23668 - protein, 440 aa, Shewanella amazonensis SB2B
MTTREETMKYFNKTLLAAAIGLASTQTLAAGFQLNSHSATGVGRAISGDAVIADNASVLSRNPAAMALFDNTALSLGVTYADIDVSVKDVCKAGTPICFGSDTDAAEDKIIPNFYYINPINDKWAFGVAAFSNFGTGTDPGALANNAVTLPGLGTIPAPVDLLGNTEVITMNLNASLSYRVNEQLSLGAGVDVIYGQGTLTRKGNLPFGPNGEMVPVSLVNVDADGWALGGILGAVYEFNADHRLGVSYRFSPEFKASGDVQTLVPQAQAYANFDEIVIPLPDIFQVAGFHQLTEKFALHYTAQLTSWGDFKEITLENGTLGQTSIPSSQLKHYAWDDSWLFSIGGTYQLSDAWTLRAGYMHDQGVVDEISSISIPDSDRNWYTLGASYALSANATLDLGVALVRGEDTQVLEQSAIIGDVIAHTRSNAVYYSLQYNYKY

SEQ ID NO: 23669 - DNA, 1359 bp, Shewanella amazonensis SB2B
  CDS (1)..(1359): transl_table=11
atgataatgaaaaagagtgtactgacttttgccgtatcagcggctcttatggggattacgactcaggttaacgctgctggcttccagctggctgaatactctgccactggtcttggccgtgcttttgccggtgaagcggccatggccgacaacgccgcggctcaagcgcgtaacccagccatgctggcatacctgagcggtcgtcaggtatccggcggcggtatctacgtcgctaccgaagtggacgtgaccggcgatgtgcacattgcgtctccagtgcttggtccgcagggtgtgacgctgaatgccgacgcctatgacgttgccgacagtgcacttatcccaaacttctattactcaagccaaatcaatgacaactggacctggggtctggctgttaactccaactacggcctggccaccgagctgcctgccactcacgcggcctccttgtttggccatcacaccgaaatcaccacagttgagttcaaccccaacatcgcatatcgcctgaacgatgcggtgactttgggtgccggtgtgcgcattgtttacggtgacggtagcattggtgcagctacaccttactgggtgggcgccatcaaggccaatccaaacctgccagcacaaattgccgcccgtctgcctgagcctggcactgtgctcaaaaccatggaaggcgatgatgtaagctacggctggcaagtgggcggtagctggcagccttctgaaaaccacagattcggcttggcttatcacagcggtgtagagctggagctgtccgggagcgctgctggtcttgtctacactggtggccagaacctggatattgaaggttatctgccactggagctgccagcttttgccgagttgtcttctttccatcagctgagtgatgatgtggcgctgcacgccagcgttaactggacccagtggagtgtgttcgaccgtctggtggcttacttccccggtgaaaccaagccagtgggtggcatcgagtccgatctggtgaaagaagagaacttcaaggacagctggcgcgttgccgtaggttctacctggaacgtaaacaaagactggaccgtacgcagcggctttgcggttgaccgcactgcagtggatgatgagttccgtaccaccaccatccccgactctgaccgcctgtggttcagtctgggtgccggttaccgcgccagcgaaaacctgaccgtggatatggccatcacctatattcgtgcccacggtttcgcgcctatcgatgagcatcaggatctggccggtctggctcaggtcagctttaacggtgaagccggtggcagcgtgtggctggccggtgtgcagttaagctataagatgtaa

SEQ ID NO: 23670 - protein, 452 aa, Shewanella amazonensis SB2B
MIMKKSVLTFAVSAALMGITTQVNAAGFQLAEYSATGLGRAFAGEAAMADNAAAQARNPAMLAYLSGRQVSGGGIYVATEVDVTGDVHIASPVLGPQGVTLNADAYDVADSALIPNFYYSSQINDNWTWGLAVNSNYGLATELPATHAASLFGHHTEITTVEFNPNIAYRLNDAVTLGAGVRIVYGDGSIGAATPYWVGAIKANPNLPAQIAARLPEPGTVLKTMEGDDVSYGWQVGGSWQPSENHRFGLAYHSGVELELSGSAAGLVYTGGQNLDIEGYLPLELPAFAELSSFHQLSDDVALHASVNWTQWSVFDRLVAYFPGETKPVGGIESDLVKEENFKDSWRVAVGSTWNVNKDWTVRSGFAVDRTAVDDEFRTTTIPDSDRLWFSLGAGYRASENLTVDMAITYIRAHGFAPIDEHQDLAGLAQVSFNGEAGGSVWLAGVQLSYKM

SEQ ID NO: 23671 - DNA, 999 bp, Shewanella denitrificans OS-217
  CDS (1)..(999): transl_table=11
atgaaaaaaaccgtgttaaccttggccatcagtgccttagtcgtaggttcaactgcgccagtgaatgccgcaggtttccagctggctgaatactctgccacaggtcaaggccgagcctttgctggcgaagccgctatggctgacaatgcctcaactcaagcgcgtaaccctgccatgttaagttaccttgaaggccagcaagtctccttgggtggtatttacgtgatgacgaatgttgacgtagatggtgatgtctccctacgctcacccttatttggttcggctgaagtggtgatccctgccgatggaaaagacgttgccgccagtgcgttagttcctaatttttactacgctaatccactaaatgaagattggactctgggccttggggtgaattccaactatggattagccacagaagtgcccgcggatcacgcggccgccatctttggtagtcacacttcggtgaaaacagtcgaattcaatcccaatcttgcttaccgcgtaaatgatgcgttcactttaggtgcaggcgcgcgcttggtgtatggcgaaggtgaaatatcagcaagcacccctgcttggattagcgctataggcagtcatcccaatgtccctgctagcattgcagcacgtctgccgtcagcaggtactcagcttaagtctatgcaaggtgatgacataggttatggctggacgttaggttcaagctggcagattaacccaagtcacagactcggcttggcttatcacagcggagtggagcttgagcttgcaggttctgcggcagggttaagctatactggtggccaagatgtggctatagaaggttatttaccccttgaactgcccgcttttgcagaacttgcctcttaccatgagctgacagagaagcttgccattcataccagtgtgaactggactcagtggagtgtatttgagcgtttagtggcacatttcccaggtgatgtgaagcctgtgggcaaccttgagacatag

SEQ ID NO: 23672 - protein, 332 aa, Shewanella denitrificans OS-217
MKKTVLTLAISALVVGSTAPVNAAGFQLAEYSATGQGRAFAGEAAMADNASTQARNPAMLSYLEGQQVSLGGIYVMTNVDVDGDVSLRSPLFGSAEVVIPADGKDVAASALVPNFYYANPLNEDWTLGLGVNSNYGLATEVPADHAAAIFGSHTSVKTVEFNPNLAYRVNDAFTLGAGARLVYGEGEISASTPAWISAIGSHPNVPASIAARLPSAGTQLKSMQGDDIGYGWTLGSSWQINPSHRLGLAYHSGVELELAGSAAGLSYTGGQDVAIEGYLPLELPAFAELASYHELTEKLAIHTSVNWTQWSVFERLVAHFPGDVKPVGNLET

SEQ ID NO: 23673 - DNA, 1353 bp, Shewanella frigidimarina NCIMB 400
  CDS (1)..(1353): transl_table=11
atgaaaaaaacagtgttaacactggcgattagcgccattgtatttggggcaacaactcaagtgaacgcggcaggtttccaacttgcagaatactcagcgacaggtttgggccgtgcatttgctggtgaagcagctattgcagacaatgcgtcaactcaagcgcgtaatccagccatgctagcttatctagaaggccgccaagtatcagcgggtggcatttatgttatgccaaatgttgatgtggttggtgatgtcggtatttcttcaccgttattaggctcagagccattagtgattggtgctgacgcatacgatgttgctgacaatgcatttgtgccaaacttttattattcaaaccagttgaatgatcaatggacttggggtctagcggttaattcaaattatggtttagcaactgatattccggtagcggatgcagcggctatttttggcagtaaaacctcaattaccactgtcgagtttaatcccaatgttgctttccgtgttgatgactcattcactgtaggtgcaggcttacgtgttgtgtacggtgaaggtgaagttagtgcaaccgctccaggttggattgatgcgattaaagctaatcctaacttacctgcaagcattaatgcacgtttaccttcaggtggtaccaatctaaagtcaatggaaggtgatgatgttggctatggttggaaagcgggcgcgagctggcaaattaactcagcaaaccgcatcggtttggcttatcacagtagtgtcgatcttaaattagacggtcatgtgtctggcgtggcttataacggtggtcaaaatattgaaattgagggctacttacctattgagttacctgcatttgcggaactggcttcttaccatcagttaactgaaaactgggcaatgcatgcaagtgttaattggacagaatggagtgtgtttgaacaactagtggcgtacttccctggtgatgttaagcctgtcggtggcctagagtcagacgtggtaaaagaagagaactttaaagataactggcgttatgcgcttggtaccacctatacacttaatgaccagtggacattacgtgctggtatggcgctagataaaaccgcggttgatgaccaacaccgcaccaccaccattccagattctgaccgtttatggttcagtgtgggtaccggttatcaagtctctaaaaatctgaatgttgatgttggtgtgacttacattcgcactcatggtgatgcacccattacagagactcagagcctgcaaaatattgcatcggttagcttcactggtgaagcaacgggtgacgtatggttaacaggcgtacagttaagttataagatgtaa

SEQ ID NO: 23674 - protein, 450 aa, Shewanella frigidimarina NCIMB 400
MKKTVLTLAISAIVFGATTQVNAAGFQLAEYSATGLGRAFAGEAAIADNASTQARNPAMLAYLEGRQVSAGGIYVMPNVDVVGDVGISSPLLGSEPLVIGADAYDVADNAFVPNFYYSNQLNDQWTWGLAVNSNYGLATDIPVADAAAIFGSKTSITTVEFNPNVAFRVDDSFTVGAGLRVVYGEGEVSATAPGWIDAIKANPNLPASINARLPSGGTNLKSMEGDDVGYGWKAGASWQINSANRIGLAYHSSVDLKLDGHVSGVAYNGGQNIEIEGYLPIELPAFAELASYHQLTENWAMHASVNWTEWSVFEQLVAYFPGDVKPVGGLESDVVKEENFKDNWRYALGTTYTLNDQWTLRAGMALDKTAVDDQHRTTTIPDSDRLWFSVGTGYQVSKNLNVDVGVTYIRTHGDAPITETQSLQNIASVSFTGEATGDVWLTGVQLSYKM

SEQ ID NO: 23675 - DNA, 1242 bp, Thiomicrospira denitrificans ATCC 33889
  CDS (1)..(1242): transl_table=11
atgagaaatgcgtttgtttttttactacttggctctgctcttgtagcaggtggatataaaattcctgagacttcactaaactctgttgctcttggtgccgcaaatgtcgcacatgcaaatggtgctgatgcagcgtattacaacccagcaaatatggcttttatgaaagatgaagcagttattgagggaaacctaatttatattgggcttagtgatgtaaactttcaaggttcgtacacaagtagtttgggaacaactagcggatataacatagactcaaaaagagaaaattttattatcccctcacttcactatgtctcacaagatataagcggagttcgtcttggagttagtttagtctctccagcagggctctcaaaaagatggcaagatgctccagctgtgtatagctcggaggagtttacgctaaaaactgttgaactaaatccaagtgttgcgtttaaagtaagtgagaacattggtgtagctttaggtctaagagctatctacacagatggtattgtaaagagtacttcaccaatcgcttctcgtgatatgagcggtgatagcatagattttggatataacttagcgctctcatataagccaacatcagagttagaatttgcgctgacatatcgctcaaaagtagatttaacctcaaaaggctctgctactcttttttatcgtgatattgcaaatagttttggaggcggcgtgggagcgacttacagctcttctagctctgcttcagttagtgtacctgttccagctcttttaaatatagcagcagcatatacgtttctttcaaaaacaacactagagtttgtgtatgagagaaactactggagtgcatataaagagcttgattttaactatggaagtggcgtaaatccagtgactaacattgtttttggcacgtcaattgcaaaaaactttaaagattgcgatgtctttcgctttggtgtaacgcaagagttaaatgcgctaaaacttatgggtggtctagtgatagataaatccccagtaccaaactcaacaataagttttgagcttccagatagcgattcactctcgttctcaatgggtgcaaggtatcaaataaacgacaaattaaacataggattagcggctctttactcagtgcgagaaaacagaagagtctcaaacgcatcaatagatggcgaattttcagatgcaaacgtacttatagtttcatctgcaatagagtataaattttaa

SEQ ID NO: 23676 - protein, 413 aa, Thiomicrospira denitrificans ATCC 33889
MRNAFVFLLLGSALVAGGYKIPETSLNSVALGAANVAHANGADAAYYNPANMAFMKDEAVIEGNLIYIGLSDVNFQGSYTSSLGTTSGYNIDSKRENFIIPSLHYVSQDISGVRLGVSLVSPAGLSKRWQDAPAVYSSEEFTLKTVELNPSVAFKVSENIGVALGLRAIYTDGIVKSTSPIASRDMSGDSIDFGYNLALSYKPTSELEFALTYRSKVDLTSKGSATLFYRDIANSFGGGVGATYSSSSSASVSVPVPALLNIAAAYTFLSKTTLEFVYERNYWSAYKELDFNYGSGVNPVTNIVFGTSIAKNFKDCDVFRFGVTQELNALKLMGGLVIDKSPVPNSTISFELPDSDSLSFSMGARYQINDKLNIGLAALYSVRENRRVSNASIDGEFSDANVLIVSSAIEYKF

SEQ ID NO: 23677 - DNA, 1401 bp, Syntrophobacter fumaroxidans MPOB
  CDS (1)..(1401): transl_table=11
atggatcgaggaacatccggtctccatccggcaagccgacggcaacgagtcgaaggccgcggacggcccccctggccgaaggggatcgccaacgaacaaggaggttggagtatgctgtgtctgcgtatcgccggttccatgctgttgatcgtgctggccagtttcgccctgatcggcgcttctcccgctttcggttcgggctttgccatctacacacagggagccgcatccctcgggcaggccgcagccaccatcgcccacggggaagatccctcggtcattttcttcaaccccgccctgatgagcaaattcgaaggcactcaggtcgaagtcgggaccacgttgctcattcccctgcgcgatttcaagagcgggctcaccggaaattccaccagtgccgaaaaggatgttttctttccttccactttttttgtcactcaccggttcacggacaagatcagcctgggactcggagtgttcaatcccttcggactcgccacggaatgggcggacaactgggaaggaagatatatcgcgaccaagtccgaattgacgacttacgacatcaaccccgtgatttcctggcaggtcacgccgtggctggccatcggcggcggtcccgatttcctgatcctggacaccaccttggagaaaaagctctatttcgcgcccttggggctcgccgacggaggacagaggttcaaaggggacggtcacggcgtgggatggagtttcggggcgctgtttgaaccccatccggatgtatccatcggggcatcgtatcggagcatggtcagagtgaacgtcgacggcaaggctgagttcaccctgcccaacggcgcaccggcttatttctcactgctgtttcccgacaccgacggcgacgcccaactcaatctcccccagcgcgttcacttcggtgtgtgctacaagggcttctatcccctcaccctggaagtcgccgcgcgatgggaagggtggtcttccttcgaacagttgatcatccggctcgacaagccggtcgcaggcagcatggtgtccgtcaacaacaggaactggcacgacgtatggaccggaagcatcggggccaaataccagttgaacgaccggttcgcgcttgtggccggatacctctaccagggcaatcccgttccggattccaccttcgacccgtccatcccggacgccgacgcccacctgatcaccatcgggacggatttcaggtatggagcgctgcgcgccgggttgtcctacggcttccagaaaatggtgagccgcaccaaaaacaacacggtggacgacaatcccaacgacggcttcttcaatcccttgactgcggccaacggggagtacaacacggacatccatctcatcgggctgaccctgagctacatgttctga

SEQ ID NO: 23678 - protein, 466 aa, Syntrophobacter fumaroxidans MPOB
MDRGTSGLHPASRRQRVEGRGRPPWPKGIANEQGGWSMLCLRIAGSMLLIVLASFALIGASPAFGSGFAIYTQGAASLGQAAATIAHGEDPSVIFFNPALMSKFEGTQVEVGTTLLIPLRDFKSGLTGNSTSAEKDVFFPSTFFVTHRFTDKISLGLGVFNPFGLATEWADNWEGRYIATKSELTTYDINPVISWQVTPWLAIGGGPDFLILDTTLEKKLYFAPLGLADGGQRFKGDGHGVGWSFGALFEPHPDVSIGASYRSMVRVNVDGKAEFTLPNGAPAYFSLLFPDTDGDAQLNLPQRVHFGVCYKGFYPLTLEVAARWEGWSSFEQLIIRLDKPVAGSMVSVNNRNWHDVWTGSIGAKYQLNDRFALVAGYLYQGNPVPDSTFDPSIPDADAHLITIGTDFRYGALRAGLSYGFQKMVSRTKNNTVDDNPNDGFFNPLTAANGEYNTDIHLIGLTLSYMF

SEQ ID NO: 23679 - DNA, 1029 bp, Syntrophobacter fumaroxidans MPOB
  CDS (1)..(1029): transl_table=11
atggccatcataccgagcaccgatgtaaagttcgtgggcgcctcctatggaaccaaggacaacgtgtggcttgcgccgcatttttatgccacgtaccagttttccgaccggctctggttcggcgtggggttgttctcacccttcgggctgggcacggaattcgacagcgactggccgggcaggttcagcaactacaacgcggtgatccagaccctgaacttcaatcccaatgtcgccctcaagctgaacgaccagttttccatcgcggcgggatttgacatcatgtggttcgacctgaagctcgagcagagcgttgcggacttgagcggctacggtctgggaatcatcgaccaggacctgagcggcagttccttcgggtatgggttcaacctcgccatgcattaccgggcttgcgattggttgcgcctggggatttcctatcgcagccaggtcaagcagcatgtggacggcaatgtggagttttcgccgaacgtgtcgttctatcccttcaattttgtcaacatggacggcagcgggaccatcacgctgccggatgagctcttttttggcgccacgttttatcccatgccgaacctcagcttcgaggtcggagccgtctggacccggtggagcacgtacaatgcgttgaccatccagtacgaggagccgatcgtcggccccacatccacggtcacgagggaaaagcaatgggaagacgtctggaggatccagttcggggttgaatacaaagtgtgcgaatggctggacctgagagcgggatacgtgttcgaccaggaacccagtgtcgacaagtacgtcgactatctcgtgccggccaacgacaggcacctgttcaacttcggcccgggttttcactgggggaactggaccaccgacctgtcctacacgtatctactcatcgaggatcgggacgtcagtgactccgaggcctccggcttcatcaggccgtcgcagttcaggaacgggcatgcccatctgatcgggatcagcgtcggctacaagttttga

SEQ ID NO: 23680 - protein, 342 aa, Syntrophobacter fumaroxidans MPOB
MAIIPSTDVKFVGASYGTKDNVWLAPHFYATYQFSDRLWFGVGLFSPFGLGTEFDSDWPGRFSNYNAVIQTLNFNPNVALKLNDQFSIAAGFDIMWFDLKLEQSVADLSGYGLGIIDQDLSGSSFGYGFNLAMHYRACDWLRLGISYRSQVKQHVDGNVEFSPNVSFYPFNFVNMDGSGTITLPDELFFGATFYPMPNLSFEVGAVWTRWSTYNALTIQYEEPIVGPTSTVTREKQWEDVWRIQFGVEYKVCEWLDLRAGYVFDQEPSVDKYVDYLVPANDRHLFNFGPGFHWGNWTTDLSYTYLLIEDRDVSDSEASGFIRPSQFRNGHAHLIGISVGYKF

SEQ ID NO: 23681 - DNA, 1344 bp, Xylella fastidiosa Ann-1
  CDS (1)..(1344): transl_table=11
atgattagacgtgctttcaccttagtcaacgttactgcactaacgctaagcatcactggtgtgctctacatcggtaatgcgcacgctgctgctttccaattaaaggagaacagcgctaaagctctgggtcggtcattcgcaggcgcggcaagcgcccaagacgacgccgccatcattgtcaacaaccctgccggcatgcgccaactcgacggacgacaattccaggccgatctgagcacggtcagattttccgccgaatatcgtgggagtccaggaatttatcgcaatggcaacccaatcggtggcggcaatggtggggatgccggcatggtggcactgctgcctgactcctatttccacatgccttttggcgataacaacaacgtgcatttaggggcaacgctcaacgcaccattcggtttcagtacaaaatacgatcgcaactggacaggacgctatcacggcatctatagcaagttacaggcaatcgatctaggcatagccgtttcctatgacgttaacccgtacgtgtcgttcggcggtgcagtgtttgctgaacgcttgaacgtggacctgagtaatgcgatcgacttcgggagcattctaaatgcgcgtcgcataccaagcttctccccgggtagtgccgatggttactcacacatcgaaggtcacgataccagcatgggcttcacactgggggggttgttcagtcccgatgaaaagacccatattggcttcagctaccgatctgaggttgaacacaacgcaaacaatggaaacgctcactttactgtgcctgagaacgctgctgcagtgctggcggttgctgcaccgggaacattcatcaatacaaaaattaagtccacaatccgcctacctgccagcgcaacaaccagcttcactcatgccattgatgaccgatggtccataatggctgaagtcactcggactgcctggagcaagttagacaaaatcaccattcatttcgcatcctctcagcccaacaacgtactgaatttttcctatcaagataccacttttgttgctctcgggaccgaatatcggttcaacgacatgctaacgctgcgtggtggcttggcttatgaccagacgccgaccaccgccgaatatcgcagcgtacgggtgccagacaacagccgcacctggatctcattcggtatgacttggaaaccatcaaagcaaaccgattacaacatcggatatgcacatttgtttatcggtcatccgactatcacacaaatcagcgcaacaggtagcaccttagccggtgcttacaacatcaatgccgacttacttgctacttcgatcaactacaagttctga

SEQ ID NO: 23682 - protein, 447 aa, Xylella fastidiosa Ann-1
MIRRAFTLVNVTALTLSITGVLYIGNAHAAAFQLKENSAKALGRSFAGAASAQDDAAIIVNNPAGMRQLDGRQFQADLSTVRFSAEYRGSPGIYRNGNPIGGGNGGDAGMVALLPDSYFHMPFGDNNNVHLGATLNAPFGFSTKYDRNWTGRYHGIYSKLQAIDLGIAVSYDVNPYVSFGGAVFAERLNVDLSNAIDFGSILNARRIPSFSPGSADGYSHIEGHDTSMGFTLGGLFSPDEKTHIGFSYRSEVEHNANNGNAHFTVPENAAAVLAVAAPGTFINTKIKSTIRLPASATTSFTHAIDDRWSIMAEVTRTAWSKLDKITIHFASSQPNNVLNFSYQDTTFVALGTEYRFNDMLTLRGGLAYDQTPTTAEYRSVRVPDNSRTWISFGMTWKPSKQTDYNIGYAHLFIGHPTITQISATGSTLAGAYNINADLLATSINYKF

SEQ ID NO: 23683 - DNA, 1203 bp, Rhodoferax ferrireducens DSM 15236
  CDS (1)..(1203): transl_table=11
atgaaattcaaacaaacaatggtaagtctgtcagtggctggtgcgttgttggtgatgtccggaagcgccgcagcatccgggttcgcattgatcgaacaaagcgccagcggaatgggcaatgcttttgcgggcggagcggcgatcgccgatgatgcctcgacggtgttcttcaatcctgctgggatgtcgcgtttgagtggcaagcaaattgcgatcactgcgcatgcgatcacaccctcggctaaatatacttctgctgcgggcgttcccagcgggggcgatgcgggcggcaccgcgatcgtcccgaatggctattttgtgatggaagtgaaccccgccctgagattcggcctgggtgtcaacgcaccgttcgggttgcagaccgaatatgacgcgaactgggtcggcaaacagcaggcgatcaagtcaaagctcgaaaccgtgaacgtgaatccgtcactgtcttaccaggttaatgacaagctgagcattggtggaggactggattaccagcacatcaagggcgaattgtcccaagatcaagggggcgctatcggcgttgcggtcatcaatggctccgacagtacctggggttacaacctgggcgcgttgtatcaggtggattccaccacacgcatcggagtggcctatcgttccacgatgagctataccttgagcggctctgtggccacttcgctgcccttcgcaaacgggccggtgtcgctaaatataaaactgcctgacagcttgtcaatcagcggcttccatcaatacagtgataaatgggatgtcatggccgatgtcacgtttacgggatggagttcgttcaagcaggtgaagattgtggacgggacgggtgtgaccatctcgaacacgcctgaaaactggaaagacaccgtacgggtagcggttggcgcaacgtatcattacaaccagcactggttggcccgtgccggcctggcttatgaccaagcacctgtttcggatgaatttcgaaccgcgcgaattccggacaacagccgcacttggctgtcatttggcggacagtacaagccgtcggtgaccagcgcgattgatgtcgggtattcacatttattcctgagagattcctcgatcaactcgccaacgcctgcccctgctctggttggaacatacaagaacgcggtcgatatcctcagtgtgcaatatacctatagcttttaa

SEQ ID NO: 23684 - protein, 400 aa, Rhodoferax ferrireducens DSM 15236
MKFKQTMVSLSVAGALLVMSGSAAASGFALIEQSASGMGNAFAGGAAIADDASTVFFNPAGMSRLSGKQIAITAHAITPSAKYTSAAGVPSGGDAGGTAIVPNGYFVMEVNPALRFGLGVNAPFGLQTEYDANWVGKQQAIKSKLETVNVNPSLSYQVNDKLSIGGGLDYQHIKGELSQDQGGAIGVAVINGSDSTWGYNLGALYQVDSTTRIGVAYRSTMSYTLSGSVATSLPFANGPVSLNIKLPDSLSISGFHQYSDKWDVMADVTFTGWSSFKQVKIVDGTGVTISNTPENWKDTVRVAVGATYHYNQHWLARAGLAYDQAPVSDEFRTARIPDNSRTWLSFGGQYKPSVTSAIDVGYSHLFLRDSSINSPTPAPALVGTYKNAVDILSVQYTYSF

SEQ ID NO: 23685 - DNA, 1383 bp, Pseudomonas putida
  CDS (1)..(1383): transl_table=11
atgaaaaaaacaatatacagcttaagtgcctgcggcattttgacgtgcttgtactgtggtattgcgtctgcaacagatgctttcaacctcgtcggggttggaccggtttcccaaggtatgggggggattggtgcagccttcaatatcggggcacaaggtatgatgctgaacccggcaacgcttactcagatgcaagaaggtatgcatctggggctgggaatggacatcattactgcggaattggaagtcaagaataccgctaccggcgaaaaagccgactcccatagtcgtgggcgcaacaacgggccttacgtggcgcctgagctttctttggtgtggcgtggtgagcgatatgcgctgggagtcggtgcttttgcttccgatggggttggaacccagtttggagacaccagctttctctcgcgtaccacgaccaataatcttaatacagggctggaaaactactcccgtctgatagttttgcggataccgttctctgcggcttaccaggtgaacgagaagttgtccgtcggggcatcgttggatgctgtgtggacgtcggtgaacttgggactcctactggataccacacagattggtacattggttggacaaggccaggtgtccggctcattgatgccagcgttgctgagcgtgccggagctgtcggcaggttatctatccgcggacaatcaccgtgccagcggtggtggcgtggactcctggggcataggtggccggcttggtctgacctatcagttgaccccaaaaacacgggtggggattgtatacaacttcaagacccatgttggagacctgtctggcaatgccgatttgacggcagtaagcgctgtcgcgggtaatatccctctctcgggtgaactcaagctacataacttcgagatgccagcatctctcgttgcgggcatcagtcacgaattcagtgatcagtttgctgttgcgttcgactacaagcgtgtctactggagcgatgtcatggatgacatagaagtcaacttcaagcagaaagccacgggcgacactatcaatctgaaactgcctttcaattatcgggacaccaacgtgtattcgttgggagcgcaataccgctacggtgcgaactgggtgtttcgagcgggcgtgcactatgcccaactggccaacccttcaagtggtacaatgccaatcattccttcgacaccgactaccagtctctcgggaggcttttcatatgccttcagccctgaggatgtagtcgatttttctctggcctacggattcaagaagaaagtatccaatgacagcctgccgatcaccgacaagcccatcgaagtatcgcattcgcagatagttacatcgatttcctataccaagagtttctag

SEQ ID NO: 23686 - protein, 460 aa, Pseudomonas putida
MKKTIYSLSACGILTCLYCGIASATDAFNLVGVGPVSQGMGGIGAAFNIGAQGMMLNPATLTQMQEGMHLGLGMDIITAELEVKNTATGEKADSHSRGRNNGPYVAPELSLVWRGERYALGVGAFASDGVGTQFGDTSFLSRTTTNNLNTGLENYSRLIVLRIPFSAAYQVNEKLSVGASLDAVWTSVNLGLLLDTTQIGTLVGQGQVSGSLMPALLSVPELSAGYLSADNHRASGGGVDSWGIGGRLGLTYQLTPKTRVGIVYNFKTHVGDLSGNADLTAVSAVAGNIPLSGELKLHNFEMPASLVAGISHEFSDQFAVAFDYKRVYWSDVMDDIEVNFKQKATGDTINLKLPFNYRDTNVYSLGAQYRYGANWVFRAGVHYAQLANPSSGTMPIIPSTPTTSLSGGFSYAFSPEDVVDFSLAYGFKKKVSNDSLPITDKPIEVSHSQIVTSISYTKSF

SEQ ID NO: 23687 - DNA, 1416 bp, Alcaligenes eutrophus
  CDS (1)..(1416): transl_table=11
atgccgcgcgcttcgctatcccccgaaaatgacaaggagacactcgtgagaggcaactacgttcgcgtggccgtggcgctatgcgctgcggcgtgcggaacaccagcgggagcaacggacgtgttcaacctggagggctttggtccagtttcccgcgctatgggcgggaccggagcggccttcgacatcgggccagcggcgatgatggcgaatccggcaacacttggcctgatggccgaggggaatcacctgcatcttgggctcgacatggtgaccaccgacatcaaggccaccaatacggcaacgggcgagacggcccggtccggcaaccacggcaacaacaacgggccttactttgcgcccgaggccgcgttcgtctaccgtcatgacaacatcgcgctaggcgccggaatctttgcggaggcgggcctcggtacgcaatacgggggcagcagtttcctgtcgcgcacgtccaatggcgtgcagacgggcctggaccagttctcccggttgctggtgctgcgcattccgtttgcggtggcctatcggccgacggacaagctgacgctcggcgcctcgctggatgcggtctggacgtcgctcaatctcggcacgctgctcgacgtcacgcagatcggcacgcttgccagccagcggcgggtgtctggttcgctggtgcccacgctgctttccgtgcccggcctttccggggggtacctgggcttctcgaacagcgcgcccgtcggtggcggggccgatgcctggggcatcggcggaaaactggggctgacctacgacatcacgcccgatacccgcgtaggactggcctacaacgcgaaaacgcgggtgggcgatcttcgcgggcaggccacgcttgcggctgtcagcaccgtcgcgggcaacattccgctgagcggcgaagtcagggtgcgggacttccagatgccggcgcagttcacggtgggcatcagccaccagttcaacgagcgactgtcggcttcggcggactaccagcgagtgttctggtcgagcgtgatgcgtgacatcaacgtcaccttcacgcgtgggggcgcgaacctcgacctgtcgctaccgcagaactaccgcgataccaacgtgttcggccttggcgtggcgtaccgtttcgattcggcctggacggtgcgcggcgggttccactatgcgcaagaagccataccgaacggcatgctgctagccgttgtgccggccattcccacgaccaccctgagtggcggcgcgacttacgcattcggcaaggacgacgcgatcgattttgccttgtcggtggtgttaccaaagaccgtggggaacgccagccagccgaatactgcggtaccgctcaccgtgcggcattcgcagctcaacgcggttctggcataccgcaagcgcttctag

SEQ ID NO: 23688 - protein, 471 aa, Alcaligenes eutrophus
MPRASLSPENDKETLVRGNYVRVAVALCAAACGTPAGATDVFNLEGFGPVSRAMGGTGAAFDIGPAAMMANPATLGLMAEGNHLHLGLDMVTTDIKATNTATGETARSGNHGNNNGPYFAPEAAFVYRHDNIALGAGIFAEAGLGTQYGGSSFLSRTSNGVQTGLDQFSRLLVLRIPFAVAYRPTDKLTLGASLDAVWTSLNLGTLLDVTQIGTLASQRRVSGSLVPTLLSVPGLSGGYLGFSNSAPVGGGADAWGIGGKLGLTYDITPDTRVGLAYNAKTRVGDLRGQATLAAVSTVAGNIPLSGEVRVRDFQMPAQFTVGISHQFNERLSASADYQRVFWSSVMRDINVTFTRGGANLDLSLPQNYRDTNVFGLGVAYRFDSAWTVRGGFHYAQEAIPNGMLLAVVPAIPTTTLSGGATYAFGKDDAIDFALSVVLPKTVGNASQPNTAVPLTVRHSQLNAVLAYRKRF

SEQ ID NO: 23689 - DNA, 1194 bp, Myxococcus xanthus
  CDS (1)..(1194): transl_table=11
atgaagaagacactctccctcatcacgttgctcgccgccgggacgacccaggccgcgggcttccaggtcaacacccagagcgcacgctcctcgggcatggccaacgcggcggcggcgtggctggatgactcgtccgccatctactccaacgcggccaacatcctgggcgtggagaagctggacgtcaccgcgggcgtcaccggcatcctccccagcctgcagttcacccccacgggtggctccgtgcaggggcagaagacgacgctgtctccgccgccgcacgtgttcgccgtgtacaaaatcacggactcgctggcggccggcgtgggcttctacacgccgttcggcgcgagcagccggtggaaagacgacttcgtgggccgcttccgcgcccaggagtccgggctgtccatctacaacatcaaccccacggtggcgtaccaggtgcacgaccgcttccgcgtgggcgcgggcctgaacatcacccgcggcacgctggagattaagcgcgcgctgggattcgtcaccagcgaaggccaggtgcacctgggcggcgcgggctggggcctcggcttcaacgccggtgtccaggccgtggtggtccccaagctcgtgacgttgggcgtgcagtaccgcagccccatcagcatgacgttcaagggcgacgcggacttccgggacgtgccgccggccttccagggccgtctgccggacacccgcgtggagggtgacgtcaagctgccgcagtcggtggtggcgggcatcgccgtcacgccgctggaccgcctgacgcttgcgttcgacgccaactgggtgggctggtccagcttcccggagctcgccatcgagttcccggacaacccggccatcaacaacccgctgccgaagaactggcgctcgacgtggaacttccacctgggcggtgagtacggcatcaccgacgcgctgcaggtgcgcgccggcgtgctgtgggacccggcgcccagcccggatgagacgctgacgccggacctgccggacgcgaaccgcttcggcgtgtcggcgggcgtgggctacagcttcggcgcggtgcgcgtcgacgccgcctaccagttcgtcaacctgttcgacaaggacagcacggcgccgggcatgacgggcgtctacaacggcacggcccaggtgttcggcctgacgctcggctactccatgtag

SEQ ID NO: 23690 - protein, 397 aa, Myxococcus xanthus
MKKTLSLITLLAAGTTQAAGFQVNTQSARSSGMANAAAAWLDDSSAIYSNAANILGVEKLDVTAGVTGILPSLQFTPTGGSVQGQKTTLSPPPHVFAVYKITDSLAAGVGFYTPFGASSRWKDDFVGRFRAQESGLSIYNINPTVAYQVHDRFRVGAGLNITRGTLEIKRALGFVTSEGQVHLGGAGWGLGFNAGVQAVVVPKLVTLGVQYRSPISMTFKGDADFRDVPPAFQGRLPDTRVEGDVKLPQSVVAGIAVTPLDRLTLAFDANWVGWSSFPELAIEFPDNPAINNPLPKNWRSTWNFHLGGEYGITDALQVRAGVLWDPAPSPDETLTPDLPDANRFGVSAGVGYSFGAVRVDAAYQFVNLFDKDSTAPGMTGVYNGTAQVFGLTLGYSM

SEQ ID NO: 23691 - DNA, 1329 bp, Enterobacter cloacae
  CDS (1)..(1329): transl_table=11
atggtcatgagccagaaaaccctgttcaacaagactgcgctggcagtcgcagtggcactcgtctccacttccgcctggtcagcgggctttcagttaaacgaattttcttcctctggccttggccgtgcgtattccggggaaggcgctatcgctgatgatgcgggtaacgcgagtcgtaaccccgcgttgatcatgatgttcgatcgtccgactttctctgccggtgcaatttttgtcgatccaggtgttgatatctcgggccgttctccgacaggtgccgatctgaaatctgataatatcgccccaacggcatgggttccaaacatgcacttcgtggcgccgattaacgaccagttcggctggggcgcatccgtaacctctaaytacggtttagcaaccgagttcaataacgactatgcagctggggcgtttggcggtaaaaccgacctggaaactctgaacctgaacctgagcggtgcttaccgtctggataatcactggagtttcggtgttggctttgacgctgtgtatgctaaagcgaagatcgaacgttacgcgggcgacctgggcaaagtcgtcgctggctcaggcgcacttccaccagccctggcacagcgtgtggctggtatcccagcagatactcagatcgcttatctgaagggcgatgagtggggctttggctggaacgccggtatcctttatgaactcgataaaaacaaccgttacggctttacctaccgttcagaagtaaaaatcgattttgatggagattacaaaagcagcctcccttctgcttataaccagatcctcggcaacttcggtctgccaatgggaaccaatggccaaaccactggcggctctctgagcctgcacttaccagaaatgtgggaattgtcaggttataacaaagtggcgccacagtgggcagttcactatagtctgacctacaccagctggagccagttccaggagctgaaggcgaccaatagcaaaggcgacacgctcttctataaagatgagagcttccgtgatgcttaccgcatcgcgctggggacaacctactatatggatgacaactggacattccgcaccggtattgccttcgatgatagtccggtaccagcagacaaacgctctatctcgattccggatcaggaccgcttctggctgagcgctggtgcgacctatgcattcaacaaggatgcttctattgatgcgggcatatcttatatgcacggtcaaaaagttaactttaaggaaggtccgtatgagttctcttccgaaggtaaagcctggctgtacggcatgaacttcaactacgcgttctaa

SEQ ID NO: 23692 - protein, 442 aa, Enterobacter cloacae
MVMSQKTLFNKTALAVAVALVSTSAWSAGFQLNEFSSSGLGRAYSGEGAIADDAGNASRNPALIMMFDRPTFSAGAIFVDPGVDISGRSPTGADLKSDNIAPTAWVPNMHFVAPINDQFGWGASVTSNYGLATEFNNDYAAGAFGGKTDLETLNLNLSGAYRLDNHWSFGVGFDAVYAKAKIERYAGDLGKVVAGSGALPPALAQRVAGIPADTQIAYLKGDEWGFGWNAGILYELDKNNRYGFTYRSEVKIDFDGDYKSSLPSAYNQILGNFGLPMGTNGQTTGGSLSLHLPEMWELSGYNKVAPQWAVHYSLTYTSWSQFQELKATNSKGDTLFYKDESFRDAYRIALGTTYYMDDNWTFRTGIAFDDSPVPADKRSISIPDQDRFWLSAGATYAFNKDASIDAGISYMHGQKVNFKEGPYEFSSEGKAWLYGMNFNYAF

SEQ ID NO: 23693 - DNA, 1356 bp, Haemophilus influenzae
  CDS (1)..(1356): transl_table=11
atgaaaaaatttaatcaatctatattagcaacagcaatgttgttggctgcaggtggtgcaaatgcggcagctttccaattggcggaagtttctacttctgggcttggtcgtgcctatgcgggtgaagcggcgattgcagataatgcttctgtcgtggcaactaacccagctttgatgagtttatttaaaacggcacagttttccacgggtggcgtttatgttgattctagaattaatatgaatggtgatgtagctgcttctataacaggttcttcaataaaagtaacaaatgacgacgtagcttcagagcgtaatgttgttcctggtgcttttgtgcccaatctttatttcgttgcgccagtgaatgataaattagcggtgggtgcaggaatgaatgtaaatttcggtctaaaaagtgaatatgacgatagttatgatgctggtgtatttggtggaaaaactgacttgactgctatcaacttaaatttaagtggtgcttatcgagtaacagaaggcttgagcctaggtttaggggtaaatgcggtttatgctaaagcccaagttgaacggaatgcgggtattattgcggatagtgttaaggatccacaagcaaaaagggcactcgaaacagtagttccaggaacaaaaattcctgactatttgacctctaaagacaaatctgttgtgtcattacaagatagagccgcttggggstttggctggaatgcaggtgtaatgtatcaatttaatgaagctaaccgaattggtttagcctatcattctaaagtggacattgattttactgaccgcactgccactagtttaggaaaaaagggtatcgaggcggggaaaacaggtaatttaacctttacattgccagattacttagaactttctggtttccatcaattaactgacaaatttgctgtgcattatagttataaatatacccattggagtcgtttaacaaaattacatgctagctatgaagatggtaaaaaagcttttgataaagaattacaatacagtaataattctcgtgttgcattaggggcaagttataatcttgatgaaaaattaaccttacgtgcgggtattgcttacgatcaagctgcatcgcgtcatcaccgtagtgctgcaattccagataccgatcgcacttggtatagtttaggggcaacctataaattcacgccgaatttatctgttgatcttggctatgcttacttaaaaggcaaaaaagttcactttaaagaagtacaaaaagttgcagatgacttcataacagcaaacgcaaattacacttctcaagcacacgcaaatctttacggtttaaacttaaattatagtttctaa

SEQ ID NO: 23694 - protein, 451 aa, Haemophilus influenzae
MKKFNQSILATAMLLAAGGANAAAFQLAEVSTSGLGRAYAGEAAIADNASVVATNPALMSLFKTAQFSTGGVYVDSRINMNGDVAASITGSSIKVTNDDVASERNVVPGAFVPNLYFVAPVNDKLAVGAGMNVNFGLKSEYDDSYDAGVFGGKTDLTAINLNLSGAYRVTEGLSLGLGVNAVYAKAQVERNAGIIADSVKDPQAKRALETVVPGTKIPDYLTSKDKSVVSLQDRAAWGFGWNAGVMYQFNEANRIGLAYHSKVDIDFTDRTATSLGKKGIEAGKTGNLTFTLPDYLELSGFHQLTDKFAVHYSYKYTHWSRLTKLHASYEDGKKAFDKELQYSNNSRVALGASYNLDEKLTLRAGIAYDQAASRHHRSAAIPDTDRTWYSLGATYKFTPNLSVDLGYAYLKGKKVHFKEVQKVADDFITANANYTSQAHANLYGLNLNYSF

SEQ ID NO: 23695 - DNA, 1356 bp, Haemophilus influenzae
  CDS (1)..(1356): transl_table=11
atgaaaaaatttaatcaatctctattagcaactgcaatgttgttggctgcaggtggtgcaaatgcggcggcgtttcaattggcggaagtttctacttctgggcttggtcgtgcctatgcaggtgaagcggcgattgcagataatgcttctgtcgtggcaactaacccagctttgatgagtttatttaaaacggcacagttttccacaggtggcgtttatgttgattctagaattaatatgaatggtgatgtaaagtcttctacaaaaaatttacaaatgctagcagcaaagtacggctcagcttcacagcgtaatgttgttcctggtgcttttgtgccaaatctttatttcgttgcgccagtaaatgataaattcgcgctgggtgcaggaatgaatgtcaatttcggtctaaaaagtgaatatgacgatagttatgatgctggtgtatttggtggaaaaactgacttgagtgctatcaacttaaatttaagtggtgcttatcgagtaacagaaggcttgagcctaggtttaggagtaaatgcggtttatgctaaagcccaagttgaacgaaatgctggtattattaaggagagtgttgagcttgcaaaaacagcattcacagtagcgcaagatgacgaaaaagcaattcctacatatttgacctctaaaaacacatctgttgtgtcattacaagatagagcagcttggggctttggctggaatgcaggtgtaatgtatcaatttaatgaagctaatcgaattggtttagcctatcattctaaagtggacattgattttgttgaccgcactgccactagtttagaagcaggggttatcggggcggggaaaaaaggtgatttaacccttacattgccagattacttagaactttctggtttccatcaattaactgacaaacttgccgtgcattatagttataaatatacccattggagtcgtttaacaaaattaaacgccagcttcgaagatggtaagaaagcgtttgataaggaattacaatacagtaataactctcgtgttgcattaggggcaagttacgatctttatgaaaaattaaccttacgtgcaggtattgcttacgatcaagctgcatctcgtcatcagcgtagtgctgcaattccagataccgatcgcacttggtatagtttaggggcaacctataaattcacgccgaatttatctgttgatcttggctatgcttacttaaaaggcaaaaaagttcactttaaagaagtaaaaacaacaggtaaaacagtaatattgaatgcaactgcagattatacttctcaagcacatgcaaatctttacggcttaaacttaaattatagtttctaa

SEQ ID NO: 23696 - protein, 451 aa, Haemophilus influenzae
MKKFNQSLLATAMLLAAGGANAAAFQLAEVSTSGLGRAYAGEAAIADNASVVATNPALMSLFKTAQFSTGGVYVDSRINMNGDVKSSTKNLQMLAAKYGSASQRNVVPGAFVPNLYFVAPVNDKFALGAGMNVNFGLKSEYDDSYDAGVFGGKTDLSAINLNLSGAYRVTEGLSLGLGVNAVYAKAQVERNAGIIKESVELAKTAFTVAQDDEKAIPTYLTSKNTSVVSLQDRAAWGFGWNAGVMYQFNEANRIGLAYHSKVDIDFVDRTATSLEAGVIGAGKKGDLTLTLPDYLELSGFHQLTDKLAVHYSYKYTHWSRLTKLNASFEDGKKAFDKELQYSNNSRVALGASYDLYEKLTLRAGIAYDQAASRHQRSAAIPDTDRTWYSLGATYKFTPNLSVDLGYAYLKGKKVHFKEVKTTGKTVILNATADYTSQAHANLYGLNLNYSF

SEQ ID NO: 23697 - DNA, 1356 bp, Haemophilus influenzae
  CDS (1)..(1356): transl_table=11
atgaaaaaatttaatcaatctctattagcaactgcaatgttgttggctgcaggtggtgcaaatgcggcggctttccaattggcggaagtttctacttctgggcttggtcgtgcctatgcaggtgaagcggcgattgcagataatgcttctgtggtggcaactaacccagctttgatgagtttatttaaaactgcacagttttccacaggtggcgtttatgttgattctagaattaatatgaatggtgatgtagaggcttttatagcaactttaaaaatgaaaacaacaaagaacggctcagcttcagagcgtaatgttgttcctggtgcttttgtgccaaatctttatttcgttgcgccagtgaatgataaattcgcgctgggcgcaggaatgaatgtcaatttcggtctaaaaagtgaatatgacgatagttatgatgctggtgtatttggtggaaaaactgacttgactgctatcaacttaaatttaagtggtgcttatcgagtaacagaaggcttgagcctaggtttaggggtaaatgcggtttatgctaaagcccaagttgaacgaaatgcgggtattattgcggatactgttaagatttcacaaggtgcattcacagtagggtcacaggaagacaaagcaattcctaaatatttgacctctaaagacaaatctgttgtgtcattacaagatagagcagcttgggggtttggctggaatgcaggtgtaatgtatcaatttaatgaagctaaccgaattggtttagcttatcattctaaagtggacattgattttactgaccgcactgccactagtttagaagcaggggctatcggggcggggaaaaaaggtgatttaacccttacattgccagattacttagaactttctggtttccatcaattaactgacaaatttgcagtgcattatagttataaatatacccattggagtcgtttaacaagattatacgctagctctgaaaatggtaaaaaagcgtttgataaagaattgcaatacagtaataactctcgtattgcattaggggcaagttataatctttatgaaaaattgaccttacgtgcgggtattgcttacgatcaagcggcatctcgtcatcaccgtagtgctgcaattccagataccgatcgcacttggtatagtttaggggcaacctataaattcacgccgaatttatctgttgatcttggctatgcttacttaaaaggcaaaaaagttcactttaaagaagtagcaacaataggtaaaagcgtaatattgaatacaactgcaaattatacttctcaagcacatgcaaatctttacggcttaaacttaaattatagtttctaa

SEQ ID NO: 23698 - protein, 451 aa, Haemophilus influenzae
MKKFNQSLLATAMLLAAGGANAAAFQLAEVSTSGLGRAYAGEAAIADNASVVATNPALMSLFKTAQFSTGGVYVDSRINMNGDVEAFIATLKMKTTKNGSASERNVVPGAFVPNLYFVAPVNDKFALGAGMNVNFGLKSEYDDSYDAGVFGGKTDLTAINLNLSGAYRVTEGLSLGLGVNAVYAKAQVERNAGIIADTVKISQGAFTVGSQEDKAIPKYLTSKDKSVVSLQDRAAWGFGWNAGVMYQFNEANRIGLAYHSKVDIDFTDRTATSLEAGAIGAGKKGDLTLTLPDYLELSGFHQLTDKFAVHYSYKYTHWSRLTRLYASSENGKKAFDKELQYSNNSRIALGASYNLYEKLTLRAGIAYDQAASRHHRSAAIPDTDRTWYSLGATYKFTPNLSVDLGYAYLKGKKVHFKEVATIGKSVILNTTANYTSQAHANLYGLNLNYSF

SEQ ID NO: 23699 - DNA, 1374 bp, Haemophilus influenzae
  CDS (1)..(1374): transl_table=11
atgaaaaaatttaatcaatctctattagcaacggcaatgttgttggctgcaggtggtgcaaatgcggctgcgtttcaattggcggaagtttctacttctgggcttggtcgtgcctatgcaggtgaagcggcgattgcagataatgcttctgtggtggcaactaacccagctttgatgagtttatctaaaacggcacagttttccacaggtggcgtttatattgattctagaattaatatgaatggtgatgtaacttcttctgctacaccagcaaatagtgtaatgacagcaataaggtacggctcagcttcagcgcgtaatgttgttcccggtgcttttgtgccaaatctttatttcgttgcgccagtgaatgataaattcgcgctgggtgcaggaatgaatgtcaatttcggtctaaaaagtgaatatgacgatagttataatgctggtatatttggtggaaaaactgacttgagtgctatcaacttaaatttaagtggtgcttatcgagtaacagaaggcttgagcctaggtttaggggtaaatgcggtttatgctaaagcccaagttgaacggaatgctggtattattgagggtactgttaatgatgaccaaataaaaagagcactcacaacacagccaaaaccatacaaagactttcctcagcatttgtcctctaaagacaaatctgttgtgtcattacaagatagcgcagcttggggccatggctggaatgcaggtgtaatgtatcaatttaatgaagctaacagaattggtttagcctatcattctaaagtggacattgattttactgaccgcactgccactagtttagaagcaggggttatcggggcggggaaaaaaggtgatttaacccttacattgccagattacttagaactttctggtttccatcaattaactgacaaacttgcggtgcattatagttataaatatacccattggagtcgtttaacaaaattaaacgctaacttcgaagatggtaaaaaagcgtttgataaagaattgcaatacagtaataactctcgtgttgcattaggggcaagttataatctttatgaaaaattaaccttacgtgcgggtattgcttacgatcaagcggcatctcgtcatcagcgtagtgctgcaattccagataccgatcgcacttggtatagtttaggggcaacctataaattcacgccgaacttatctgttgatcttggctatgcttacttaaaaggcaaaaaagttcactttaaagaagtaaaagcaataggtgaaaaacgttcattgacattcgatacaactgcaaattacacttctcaagcacacgcaaatctttacggcttaaacttaaattatagtttctaa

SEQ ID NO: 23700 - protein, 457 aa, Haemophilus influenzae
MKKFNQSLLATAMLLAAGGANAAAFQLAEVSTSGLGRAYAGEAAIADNASVVATNPALMSLSKTAQFSTGGVYIDSRINMNGDVTSSATPANSVMTAIRYGSASARNVVPGAFVPNLYFVAPVNDKFALGAGMNVNFGLKSEYDDSYNAGIFGGKTDLSAINLNLSGAYRVTEGLSLGLGVNAVYAKAQVERNAGIIEGTVNDDQIKRALTTQPKPYKDFPQHLSSKDKSVVSLQDSAAWGHGWNAGVMYQFNEANRIGLAYHSKVDIDFTDRTATSLEAGVIGAGKKGDLTLTLPDYLELSGFHQLTDKLAVHYSYKYTHWSRLTKLNANFEDGKKAFDKELQYSNNSRVALGASYNLYEKLTLRAGIAYDQAASRHQRSAAIPDTDRTWYSLGATYKFTPNLSVDLGYAYLKGKKVHFKEVKAIGEKRSLTFDTTANYTSQAHANLYGLNLNYSF

SEQ ID NO: 23701 - DNA, 1368 bp, Haemophilus influenzae
  CDS (1)..(1368): transl_table=11
atgaaaaaatttaatcaatctatattagcaacggcaatgttgttggctgcaggtggtgcaaatgcggcagcgtttcaattggcggaagtttctacttcaggtcttggtcgtgcctatgcaggtgaagcggcgattgcagataatgcttcagtggtggcaactaacccagctttgatgagtttatttaaaacggcacagttttccacaggtggcgtttatgttgattctagaattaatatgaatggtgatgtaactgcttctatagcaactactaaaatgaactcagcaaagtacggctcagcttcagagcgtaatgttgttcctggtgcttttgtgccaaatctttatttcgttgctccagtaaatgataaattcgcgctgggcgcaggaatgaatgtaaatttcggtctaaaaagtgaatatgacgatagttatgatgctggtatatttggtggaaaaacggacttgactgctatccacttaaatttaagtggtgcttatcgagtaacagaaggcttgagcctaggtttaggggtaaatgcggtttatgctaaagcccaagttgaacggaatgctggtattattgcgaatagtgttaatgatacacaagtaaaaactgcactctcagtactggcaccaccactcaaagggcttgatcagaatttgccctctaaagacaaatctgttgtgtcattacaagatagagcagcttgggggtttggctggaatgcaggtgtaatgtatcaatttaatgaagctaaccgaattggtttagcttatcattctaaagtggacattgattttactgaccgcactgccactagtgtagaagcaaatgtcatcaaagaaggtaaaaaaggtaatttaacccttacattgccagattacttagaactttctgggttccatcaattaactgacaaatttgcagtgcattatagttataaatatacccattggagtcgtttaacaaaattacacgctagcttcgaagatggtaagaaagcttttgataaagaattacaatacagtaataactctcgtgttgcattaggggcaagttataatcttgatgaaaaattaaccttacgtgcgggtattgcttacgatcaagctgcatctcgtcatcaccgtagtgctgcaattccagataccgatcgcacttggtatagtttaggtgcaacctataaattcacgccgaatttatctgttgatcttggctatgcttacttagaaggcaaaaaagttcactttaaagaagtaaaaacaataggtgacaagcgtacattgacattgaatacaactgcaaattatacttctcaagcacacgcaaatctttacggtttgaatttaaattatagtttctaa

SEQ ID NO: 23702 - protein, 455 aa, Haemophilus influenzae
MKKFNQSILATAMLLAAGGANAAAFQLAEVSTSGLGRAYAGEAAIADNASVVATNPALMSLFKTAQFSTGGVYVDSRINMNGDVTASIATTKMNSAKYGSASERNVVPGAFVPNLYFVAPVNDKFALGAGMNVNFGLKSEYDDSYDAGIFGGKTDLTAIHLNLSGAYRVTEGLSLGLGVNAVYAKAQVERNAGIIANSVNDTQVKTALSVLAPPLKGLDQNLPSKDKSVVSLQDRAAWGFGWNAGVMYQFNEANRIGLAYHSKVDIDFTDRTATSVEANVIKEGKKGNLTLTLPDYLELSGFHQLTDKFAVHYSYKYTHWSRLTKLHASFEDGKKAFDKELQYSNNSRVALGASYNLDEKLTLRAGIAYDQAASRHHRSAAIPDTDRTWYSLGATYKFTPNLSVDLGYAYLEGKKVHFKEVKTIGDKRTLTLNTTANYTSQAHANLYGLNLNYSF

SEQ ID NO: 23703 - DNA, 1371 bp, Haemophilus influenzae
  CDS (1)..(1371): transl_table=11
atgaaaaaatttaatcaatctctattagcaactgcaatgttgttggctgcaggtggtgcaaatgcggcggctttccaattggcggaagtttctacttctgggcttggtcgtgcctatgcgggtgaagcggcgattgcagataatgcttctgtcgtggcaactaacccagctttgatgagtttatttaaaacgaatcaattttctgttgggggtgtttatgttgattctagaattaatatgaatggtgatgtagattcttatgctataataagtgattcgataaaagtaacaaatgacggctcagcttcagcgcgtaatgttgttcctggtgcttttgtgccaaatctttatttcgttgcaccagtgaatgataaatttgcgctgggcgcaggaatgaatgtcaatttcggtctaaaaagtgaatatgacgatagttatgatgctggtgtatttggtggaaaaactgacttgactgctatcaacttaaatttaagtggtgcttatcgagtaacagaaggcttgagcctaggtttaggggtaaatgcggtttatgctaaagcccaagttgaacggaatgctggtcttattgcggatactgttaaggataaccaagtaaaaaatacactcacagtacagcaagaaccactcaaatatattaataagtatttgccctctaaagacacatctgttgtgtcattacaagatagagcagcttggggctttggctggaatgcaggtgtaatgtatcaatttaatgaagctaacagaattggtttagcctatcattctaaagtagatattgattttactgaccgcactgccactagtttagaagcaaatgttatcaacgcaagtaaaacaggtgatttaacccttacattgccagattacttagaactttctggtttccatcaattaactgacaaacttgcagtgcattatagttataaatatacccattggagtcgtttaacaaaattaaacgctagcttcgaagatggtaagaaagcgtttgataaagaattacaatacagtaataactctcgtgttgcattaggggcaagttataaccttgatgaaaaattgaccttacgtgcgggtattgcttacgatcaagcggcatctcgtcatcagcgtagtgctgcaattccagataccgatcgcacttggtatagtttaggggcaacctataaattcacccctaatttatctgttgatcttggctatgcttacttaaaaggcaaaaaagttcactttaaagaagtaaaaacaataggtgacaaacgttcacttgcattgagtacaactgcaaattatacttctcaagcacacgcaaatctttacggcttaaacttaaattatagtttctaa

SEQ ID NO: 23704 - protein, 456 aa, Haemophilus influenzae
MKKFNQSLLATAMLLAAGGANAAAFQLAEVSTSGLGRAYAGEAAIADNASVVATNPALMSLFKTNQFSVGGVYVDSRINMNGDVDSYAIISDSIKVTNDGSASARNVVPGAFVPNLYFVAPVNDKFALGAGMNVNFGLKSEYDDSYDAGVFGGKTDLTAINLNLSGAYRVTEGLSLGLGVNAVYAKAQVERNAGLIADTVKDNQVKNTLTVQQEPLKYINKYLPSKDTSVVSLQDRAAWGFGWNAGVMYQFNEANRIGLAYHSKVDIDFTDRTATSLEANVINASKTGDLTLTLPDYLELSGFHQLTDKLAVHYSYKYTHWSRLTKLNASFEDGKKAFDKELQYSNNSRVALGASYNLDEKLTLRAGIAYDQAASRHQRSAAIPDTDRTWYSLGATYKFTPNLSVDLGYAYLKGKKVHFKEVKTIGDKRSLALSTTANYTSQAHANLYGLNLNYSF

SEQ ID NO: 23705 - DNA, 1377 bp, Burkholderia pickettii
  CDS (1)..(1377): transl_table=11
gtgaaaggcaactacgttcgcgcggccacggccatctgcgttgcgatctgtggaacccacgccagggcgaccgacgtgttcaatctggagggctttggtccggtctcgcgcgccatgggcggaacgggcgcggccttcgatatcgggccggcagccatgatggagaatcccgcgacacttggcctgatgggcgagggccgccacttcagcctcggcctcgatgttgtgtcgaccgacatcaaggtcacgaacacggcaaccggcgagaccgcgagttcgggcaatcatggcaacaacaacggcccgtactttgcaccgcagaccgcattcgtctaccggcagggacgttacgcctttggcgccggcatcttcgcggaaggcgggctggggacgcaatacggtggcagcagctttctttcgcgcacatccaatggcgtggacaccggcctggatcagttctccaggctgttggtgctgcgcgtgccgttctcggccgcgtaccacgtcaccgacaagctgacggtgggcgcttcggttgacgcagtctggacctcgctcaacctggggacgctgctcgatgtctcgcagatcggcacgctggccggccagggacgcgtgtctgggacgcttgtcccgaccttgctgggcgtgcccgggctctcaggcggctatatcgacttctcgcgcaatgcgcccgttggaggcggcgtgcaggcctggggtatcggcggccggctgggtctgacgtatcaggtgacgcccgatacccgcatcggggcggcgtatcaggcgaagacgcacgtgggtgacctcacgggtcaggccacgctttccgccgtcagttcggtcgccggcaacatcccgctcaagggcgacgtgacggttcgaaacttccagatgcccgcgcagctgacggtcggcatcagtcatcaattcaacgatcaactgtcggtgtcagctgactaccagcgcgtgttctggtccagcgtgatgaaggacatgaacgtcggattcgtgcagtcgggctcggcggccaatctggatctgtcgctgccgcagaactaccgcgacatcagcgtgttcgggatcggcgccgagtatcgctataacgcaaagtggacgttccgtggcgggttccattacgcgcaggaggcgatccccggcaacatgcttttggccgtggtgcccgccacgcccacgacgagcctgaccggcggcgtttcctatgcaatcggcaagaacgatgtgatcgactttgcgctgtcggtggcgctgcgcaagacgttggacaatgcaagccagcccaatacggcggtgccaatcagcgtgacgcactcgcaagtgaacgccgtgatcgcctatcagaagcgcttctag

SEQ ID NO: 23706 - protein, 458 aa, Burkholderia pickettii
MKGNYVRAATAICVAICGTHARATDVFNLEGFGPVSRAMGGTGAAFDIGPAAMMENPATLGLMGEGRHFSLGLDVVSTDIKVTNTATGETASSGNHGNNNGPYFAPQTAFVYRQGRYAFGAGIFAEGGLGTQYGGSSFLSRTSNGVDTGLDQFSRLLVLRVPFSAAYHVTDKLTVGASVDAVWTSLNLGTLLDVSQIGTLAGQGRVSGTLVPTLLGVPGLSGGYIDFSRNAPVGGGVQAWGIGGRLGLTYQVTPDTRIGAAYQAKTHVGDLTGQATLSAVSSVAGNIPLKGDVTVRNFQMPAQLTVGISHQFNDQLSVSADYQRVFWSSVMKDMNVGFVQSGSAANLDLSLPQNYRDISVFGIGAEYRYNAKWTFRGGFHYAQEAIPGNMLLAVVPATPTTSLTGGVSYAIGKNDVIDFALSVALRKTLDNASQPNTAVPISVTHSQVNAVIAYQKRF

SEQ ID NO: 23707 - DNA, 1347 bp, Escherichia coli O6
  CDS (1)..(1347): transl_table=11
atggtcatgagccagaaaaccctgtttacaaagtctgctctcgcagtcgcagtggcacttatctccacccaggcctggtcggcaggctttcagttaaacgaattttcttcctctggcctgggccgggcttattcaggggaaggtgcaattgccgatgatgcaggtaacgttagccgtaaccccgcattgattaccatgtttgaccgcccgacattttctgcgggtgcggtttatattgatccggatgtagatattaccggacattctgatttaaccggtcagagtgcaaatgctaaaaatatcgcaccgacagcatgggtacctaacctgcactttgttgcgcctattaacgatcagtttggttggggagcgtcaataacttccaactatggcctggctacggaatttaccgacaactacgctgctggtatctatggcggtaaaaccgatctgcaaacaatcaaccttaaccttagcggggcttatcgccttaacaatagctggagttttggtcttggttttgatgcagtttatgccaaggcaaaaattgagcgttacgccggttcgctggggccattgttgtctcaacagttgattgcccagggtgtacccgcttcattaaccaatggtattaatactccggactctcaaattgctcatttgaaaggtgacgaatggggctttggctggaacgcgggtattctttatgaactggataaagataaccgttgggggctgacatatcgttcagaagttaaaatcgacttcgatggggattacaaaagctccattaacccaaatctgaacaatattttgggtaacatgggcttaccgtatggcacgatgggggcaacccaaaatggatccttaacgctgaacctgcctgagatgtgggagatttctggttataaccgtgttgcgccgcagtgggcaattcactacagcatggcctataccagttggagccagttccaggaattgaaagcgaaaggcgatagtggtcagactctgttctataaagatgaaggattccgggacgcgtatcgtatcgcgttgggtacaacctactattatgataaaaactggaccttccgtaccggtatcgcttatgacgacagcccggttccggcagataaacgttctatttccattcctgaccaggatcgtttgtggttaagtgctgggttaacctacgcatttaatgaagatgcatccattgatgttggcgcatcttatatgcatggtcagaaagtgaaattcaccgaaggtgaaggagcggcagcttattccttcgagtctgaaggtaaagcctggctgttcggtactaactttaactacgcgttctga

SEQ ID NO: 23708 - protein, 448 aa, Escherichia coli O6
MVMSQKTLFTKSALAVAVALISTQAWSAGFQLNEFSSSGLGRAYSGEGAIADDAGNVSRNPALITMFDRPTFSAGAVYIDPDVDITGHSDLTGQSANAKNIAPTAWVPNLHFVAPINDQFGWGASITSNYGLATEFTDNYAAGIYGGKTDLQTINLNLSGAYRLNNSWSFGLGFDAVYAKAKIERYAGSLGPLLSQQLIAQGVPASLTNGINTPDSQIAHLKGDEWGFGWNAGILYELDKDNRWGLTYRSEVKIDFDGDYKSSINPNLNNILGNMGLPYGTMGATQNGSLTLNLPEMWEISGYNRVAPQWAIHYSMAYTSWSQFQELKAKGDSGQTLFYKDEGFRDAYRIALGTTYYYDKNWTFRTGIAYDDSPVPADKRSISIPDQDRLWLSAGLTYAFNEDASIDVGASYMHGQKVKFTEGEGAAAYSFESEGKAWLFGTNFNYAF

SEQ ID NO: 23709 - DNA, 1314 bp, Salmonella typhimurium
  CDS (1)..(1314): transl_table=11
atggtcatgagccagaaaaccctgtttacaaagtctgctctcgcagtcgcagtggcaatcatctccacccaggcctggtctgcaggctttcagttaaacgaattttcttcctctggccttggccgggcctattcgggtgaaggcgcaatcgcagatgatgcgggtaacgttagccgcaacccggcgttaattaccatgtttgaccgcccgacgttttcagcgggcgcggtttatattgatcctgatgttaatattagcgggacatcgccatctcgtcggacgttagatgcggataacatcgcgccgacggcctgggtgccgaacgtccattttgtcgccccgattaacgaccagtttggctggggggcttctattacctctaactatggtctggcgacagagtttaacgacacatacgccggcggctcggttggcggtacgaccgatcttgaaaccatgaacctgaatttaagcggcgcttatcgcttaaatgaggcctggagcttcggcctcggctttgatgcggtatacgcgcgtgcaaaaatcgaacgttttgcgggcgatttaggccagttggtcgcggcacagaatccggcgctggcgccggtcgcgggtcagattcccagcgacaccaagattgcccacctgaacggtaatcagtggggctttggctggaatgccggtatcctttatgaactggataaaaataaccgctacgcgctgacctaccgctcggaagtcaaaattgactttaaaggcaactacagtagcgatcttcccatcgctataaaccgatttaacctgcctatcccaacggcaaccggcggcgcaacgcagtcaggctacctgacgctgaatctgccggaaatgtgggaagtgtccggttataaccgtgtggcgccacagtgggccatccactatagcctggcctataccagctggagccagttccaggaattgaaggcaaaatcgaccgccggcgatacgctctttgagaagcatgaaggctttaaagacgcttatcgcattgcgttgggtaccacctattactacgatgacaactggacgttccgtaccggtatcgccttcgatgacagcccggtaccagcgcaaaaccgttctatctctattccggaccaggaccgtttctggctgagcgccggtacgacttacgcctttaacaaagatgcgtctgtcgacgttggcgtctcttatatgcatggtcagagcgtgaaaattaatgaaggcccttatcagtttgaatctgaagggaaagcctggctgttcggtactaactttaactacgcgttctaa

SEQ ID NO: 23710 - protein, 437 aa, Salmonella typhimurium
MVMSQKTLFTKSALAVAVAIISTQAWSAGFQLNEFSSSGLGRAYSGEGAIADDAGNVSRNPALITMFDRPTFSAGAVYIDPDVNISGTSPSRRTLDADNIAPTAWVPNVHFVAPINDQFGWGASITSNYGLATEFNDTYAGGSVGGTTDLETMNLNLSGAYRLNEAWSFGLGFDAVYARAKIERFAGDLGQLVAAQNPALAPVAGQIPSDTKIAHLNGNQWGFGWNAGILYELDKNNRYALTYRSEVKIDFKGNYSSDLPIAINRFNLPIPTATGGATQSGYLTLNLPEMWEVSGYNRVAPQWAIHYSLAYTSWSQFQELKAKSTAGDTLFEKHEGFKDAYRIALGTTYYYDDNWTFRTGIAFDDSPVPAQNRSISIPDQDRFWLSAGTTYAFNKDASVDVGVSYMHGQSVKINEGPYQFESEGKAWLFGTNFNYAF

SEQ ID NO: 23711 - DNA, 1287 bp, Pasteurella multocida
  CDS (1)..(1287)
atggcgaaaactagcaaatttactcaaactcttcttgcttccgcgttagcggtggtcgcgggtagcgcttctgctgccgctttccaactagcagaagtgtcaacatccggtttagggcgtgcttatgcgggggaagccgcgattgcagataatgcggcagtggttgccacgaacccagcattaatgagcttattgaaacaacctgaaatttctgttggggcaatttatgtggacccaaatattaatttaacctcaccaatgccaggattcgcctataaaaatattgcgccgaatgcgttagttccgacagtgtatggtgtgtatccaattaacgaaaaattcgctgtgggcggtggattgaatgttaactatggtttagccaccgagtttgatgacaaatatgcgggcggctttttaggcggtaaaaccgatttgaccgcaattaactttaacttaagcggtgcctatcgtgttacggagaagttcagcgttggcttaggcttaaacgcagtgcatgcgaaagcgaaacttgagcgttatgcaggtgtggctttgaaattaaaagtaccaaatgtagctcaacttgcagcattaccagcgaataccgtaatttcaaagctacaaggtgataaatggggctttggctggaatgccggtttggtatatgaatttaatgaacgtaaccgcattggtatcgcctatcattcacaagtggatattaactttaaagggcagtattcaaatcacttcccattagccgctgcagctttgctccagaccaagggcattaccgcgacaggtggcaaagaaatcccgggtaccttacatttaccgctaccagcttactgggaaatttctggttatcataaaatgaccgatcgttttgcaatgcactatagctataaatatacgcaatggagcaaatttaaagagttacgtgcaaaaggtacggacggtaagaccttatttagcaaaacagaagagtttcgtgattcttcacgtattgcccttggtgcgagctatgatgtaaccgatgcattaacggtacgtacgggtattgcgtatgatgaaagtgctgcagatgagcataacaccatttctattccagatacggatcgtacttggtttagtgtgggggccacttaccgctttacgccaaatgtatctattgatgccggttttgcacatttaaaaggcaagaagaatacctttaaagaagaaggggttccatttactagcaaagccagtgcgaacctttatggtttaaacgtgaattaccgtttctaa

SEQ ID NO: 23712 - protein, 428 aa, Pasteurella multocida
MAKTSKFTQTLLASALAVVAGSASAAAFQLAEVSTSGLGRAYAGEAAIADNAAVVATNPALMSLLKQPEISVGAIYVDPNINLTSPMPGFAYKNIAPNALVPTVYGVYPINEKFAVGGGLNVNYGLATEFDDKYAGGFLGGKTDLTAINFNLSGAYRVTEKFSVGLGLNAVHAKAKLERYAGVALKLKVPNVAQLAALPANTVISKLQGDKWGFGWNAGLVYEFNERNRIGIAYHSQVDINFKGQYSNHFPLAAAALLQTKGITATGGKEIPGTLHLPLPAYWEISGYHKMTDRFAMHYSYKYTQWSKFKELRAKGTDGKTLFSKTEEFRDSSRIALGASYDVTDALTVRTGIAYDESAADEHNTISIPDTDRTWFSVGATYRFTPNVSIDAGFAHLKGKKNTFKEEGVPFTSKASANLYGLNVNYRF

SEQ ID NO: 23713 - DNA, 23 bp, Artificial sequence
  Primer sequence
atggtcatgagccagaaaaccct

SEQ ID NO: 23714 - DNA, 27 bp, Artificial sequence
  Primer sequence
ttagaacgcgtagttaaagttagtacc

SEQ ID NO: 23715 - protein, 549 aa, Artificial sequence
  Consensus
  Variant (2)..(2): Xaa in position 2 is any amino acid
  Variant (5)..(5): Xaa in position 5 is any amino acid
  Variant (7)..(7): Xaa in position 7 is any amino acid
  Variant (9)..(12): Xaa in position 9 to 12 is any amino acid
  Variant (14)..(15): Xaa in position 14 to 15 is any or no amino acid
  Variant (17)..(18): Xaa in position 17 to 18 is any amino acid
  Variant (19)..(19): Xaa in position 19 is any or no amino acid
  Variant (22)..(23): Xaa in position 22 to 23 is any or no amino acid
  Variant (25)..(27): Xaa in position 25 to 27 is any amino acid
  Variant (28)..(28): Xaa in position 28 is any or no amino acid
  Variant (31)..(34): Xaa in position 31 to 34 is any amino acid
  Variant (38)..(38): Xaa in position 38 is any amino acid
  Variant (40)..(43): Xaa in position 40 to 43 is any amino acid
  Variant (44)..(54): Xaa in position 44 to 54 is any or no amino acid
  Variant (56)..(114): Xaa in position 56 to 114 is any or no amino acid
  Variant (117)..(117): Xaa in position 117 is any amino acid
  Variant (118)..(132): Xaa in position 118 to 132 is any or no amino acid
  Variant (134)..(139): Xaa in position 134 to 139 is any amino acid
  Variant (142)..(143): Xaa in position 142 to 143 is any or no amino acid
  Variant (145)..(145): Xaa in position 145 is any amino acid
  Variant (147)..(151): Xaa in position 147 to 151 is any amino acid
  Variant (153)..(156): Xaa in position 153 to 156 is any amino acid
  Variant (157)..(173): Xaa in position 157 to 173 is any or no amino acid
  Variant (175)..(176): Xaa in position 175 to 176 is any amino acid
  Variant (178)..(183): Xaa in position 178 to 183 is any amino acid
  Variant (186)..(186): Xaa in position 186 is any amino acid
  Variant (188)..(191): Xaa in position 188 to 191 is any amino acid
  Variant (192)..(196): Xaa in position 192 to 196 is any or no amino acid
  Variant (198)..(198): Xaa in position 198 is any amino acid
  Variant (200)..(200): Xaa in position 200 is any amino acid
  Variant (202)..(210): Xaa in position 202 to 210 is any amino acid
  Variant (212)..(225): Xaa in position 212 to 225 is any amino acid
  Variant (226)..(285): Xaa in position 226 to 285 is any or no amino acid
  Variant (288)..(289): Xaa in position 288 to 289 is any amino acid
  Variant (291)..(292): Xaa in position 291 to 292 is any amino acid
  Variant (294)..(301): Xaa in position 294 to 301 is any amino acid
  Variant (302)..(302): Xaa in position 302 is any or no amino acid
  Variant (304)..(305): Xaa in position 304 to 305 is any amino acid
  Variant (307)..(307): Xaa in position 307 is any amino acid
  Variant (309)..(309): Xaa in position 309 is any amino acid
  Variant (311)..(319): Xaa in position 311 to 319 is any amino acid
  Variant (320)..(355): Xaa in position 320 to 355 is any or no amino acid
  Variant (357)..(357): Xaa in position 357 is any amino acid
  Variant (360)..(364): Xaa in position 360 to 364 is any amino acid
  Variant (366)..(374): Xaa in position 366 to 374 is any amino acid
  Variant (375)..(376): Xaa in position 375 to 376 is any or no amino acid
  Variant (378)..(385): Xaa in position 378 to 385 is any amino acid
  Variant (388)..(391): Xaa in position 388 to 391 is any amino acid
  Variant (393)..(402): Xaa in position 393 to 402 is any amino acid
  Variant (403)..(420): Xaa in position 403 to 420 is any or no amino acid
  Variant (422)..(427): Xaa in position 422 to 427 is any amino acid
  Variant (431)..(432): Xaa in position 431 to 432 is any amino acid
  Variant (434)..(439): Xaa in position 434 to 439 is any amino acid
  Variant (440)..(440): Xaa in position 440 is any or no amino acid
  Variant (443)..(443): Xaa in position 443 is any amino acid
  Variant (445)..(446): Xaa in position 445 to 446 is any amino acid
  Variant (449)..(457): Xaa in position 449 to 457 is any amino acid
  Variant (458)..(461): Xaa in position 458 to 461 is any or no amino acid
  Variant (464)..(466): Xaa in position 464 to 466 is any amino acid
  Variant (467)..(467): Xaa in position 467 is any or no amino acid
  Variant (469)..(471): Xaa in position 469 to 471 is any amino acid
  Variant (473)..(473): Xaa in position 473 is any amino acid
  Variant (475)..(476): Xaa in position 475 to 476 is any amino acid
  Variant (478)..(482): Xaa in position 478 to 482 is any amino acid
  Variant (483)..(486): Xaa in position 483 to 486 is any or no amino acid
  Variant (489)..(489): Xaa in position 489 is any amino acid
  Variant (491)..(492): Xaa in position 491 to 492 is any amino acid
  Variant (495)..(514): Xaa in position 495 to 514 is any amino acid
  Variant (515)..(539): Xaa in position 515 to 539 is any or no amino acid
  Variant (541)..(541): Xaa in position 541 is any amino acid
  Variant (543)..(548): Xaa in position 543 to 548 is any amino acid
AXGFXLXEXXXXGXXGXXXAGXXAXXXXASXXXXNPAXMXXXXXXXXXXXXXXXVXXXXXXXXXXXXXXXXXXXXXXXXXXXXXXXXXXXXXXXXXXXXXXXXXXXXXXXXXXXVPXXXXXXXXXXXXXXXXGXXXXXXFGXXTXYXXXXXGXXXXXXXXXXXXXXXXXXXXXLXXIXXXXXXAYXVXXXXXXXXXSXGXGXXXXXXXXXLXXXXXXXXXXXXXXXXXXXXXXXXXXXXXXXXXXXXXXXXXXXXXXXXXXXXXXXXXXXXXXXXXXXXXXXXXXGWXXGXXYXXXXXXXXXGXXYXSXVXXXXXXXXXXXXXXXXXXXXXXXXXXXXXXXXXXXXXXXXXXXXXLXLPXXXXXSXXXXXXXXXXXVXXXXXXXXWSXXXXLXXXXXXXXXXXXXXXXXXXXXXXXXXXXWXXXXXXALGXXYXXXXXXXLRXGXXYDXXXXXXXXXXXXXIPXXXXRXXXSXGXXYXXXXXXXXXVDXGXXYLXXXXXXXXXXXXXXXXXXXXXXXXXXXXXXXXXXXXXXXXXXXXXLXGXXXXXXF

SEQ ID NO: 23716 - protein, 17 aa, Artificial sequence
  Consensus
  Variant (2)..(2): Xaa in position 2 is any amino acid
  Variant (3)..(3): Xaa in position 3 is Ala, Gly or Ser
  Variant (4)..(7): Xaa in position 4 to 7 is any amino acid
  Variant (8)..(8): Xaa in position 8 is Ala, Asp, Gly, Asn, Pro or Ser
  Variant (10)..(11): Xaa in position 10 to 11 is any amino acid
  Variant (12)..(14): Xaa in position 12 to 14 is any or no amino acid
  Variant (16)..(16): Xaa in position 16 is any or no amino acid
GXXXXXXXAXXXXXNXA

SEQ ID NO: 23717 - protein, 23 aa, Artificial sequence
  Consensus
  Variant (2)..(2): Xaa in position 2 is Phe, Trp or Tyr
  Variant (3)..(3): Xaa in position 3 is Asn, Gln, Ser or Thr
  Variant (4)..(4): Xaa in position 4 is any amino acid
  Variant (5)..(5): Xaa in position 5 is Ala or Gly
  Variant (6)..(16): Xaa in position 6 to 16 is any amino acid
  Variant (17)..(17): Xaa in position 17 is Ala, Gly or Ser
  Variant (18)..(18): Xaa in position 18 is any amino acid
  Variant (19)..(19): Xaa in position 19 is Ala, Gly, Asn, Ser or Thr
  Variant (21)..(21): Xaa in position 21 is any amino acid
  Variant (22)..(22): Xaa in position 22 is any or no amino acid
GXXXXXXXXXXXXXXXXXXYXXS

SEQ ID NO: 23718 - protein, 28 aa, Artificial sequence
  Consensus
  Variant (2)..(2): Xaa in position 2 is Ala, Asp, Glu or Ser
  Variant (3)..(6): Xaa in position 3 to 6 is any amino acid
  Variant (7)..(7): Xaa in position 7 is Ala, Gly or Ser
  Variant (8)..(16): Xaa in position 8 to 16 is any amino acid
  Variant (17)..(17): Xaa in position 17 is Ala, Asp, Glu, Asn, Ser or Thr
  Variant (18)..(26): Xaa in position 18 to 26 is any amino acid
PXXXXXXXXXXXXXXXXXXXXXXXXXWS

SEQ ID NO: 23719 - protein, 46 aa, Artificial sequence
  Consensus
  Variant (2)..(2): Xaa in position 2 is Ala, Gly, Ser, Thr or Val
  Variant (3)..(3): Xaa in position 3 is any amino acid
  Variant (4)..(4): Xaa in position 4 is Trp or Tyr
  Variant (5)..(12): Xaa in position 5 to 12 is any amino acid
  Variant (13)..(13): Xaa in position 13 is Lys or Arg
  Variant (14)..(14): Xaa in position 14 is any amino acid
  Variant (16)..(18): Xaa in position 16 to 18 is any amino acid
  Variant (19)..(19): Xaa in position 19 is any or no amino acid
  Variant (21)..(33): Xaa in position 21 to 33 is any amino acid
  Variant (34)..(36): Xaa in position 34 to 36 is any or no amino acid
  Variant (38)..(43): Xaa in position 38 to 43 is any amino acid
  Variant (44)..(44): Xaa in position 44 is Ala, Gly, Ser or Thr
  Variant (45)..(45): Xaa in position 45 is any amino acid
  Variant (46)..(46): Xaa in position 46 is Gly, Ser or Thr
GXXXXXXXXXXXXXGXXXXDXXXXXXXXXXXXXXXXDXXXXXXXXX

SEQ ID NO: 23720 - DNA, 1347 bp, Escherichia coli; identical to SEQ ID NO: 23515
  CDS (1)..(1347)

SEQ ID NO: 23721 - protein, 448 aa, Escherichia coli; identical to SEQ ID NO: 23516

SEQ ID NO: 23722 - DNA, 1212 bp, Aquifex aeolicus VF5; identical to SEQ ID NO: 23517
  CDS (1)..(1212): transl_table=11

SEQ ID NO: 23723 - protein, 403 aa, Aquifex aeolicus VF5; identical to SEQ ID NO: 23518

SEQ ID NO: 23724 - DNA, 1299 bp, Vibrio cholerae O1 biovar eltor str. N16961; identical to SEQ ID NO: 23519
  CDS (1)..(1299): transl_table=11

SEQ ID NO: 23725 - protein, 432 aa, Vibrio cholerae O1 biovar eltor str. N16961; identical to SEQ ID NO: 23520

SEQ ID NO: 23726 - DNA, 1287 bp, Vibrio cholerae O1 biovar eltor str. N16961; identical to SEQ ID NO: 23521
  CDS (1)..(1287): transl_table=11

SEQ ID NO: 23727 - protein, 428 aa, Vibrio cholerae O1 biovar eltor str. N16961; identical to SEQ ID NO: 23522

SEQ ID NO: 23728 - DNA, 1332 bp, Pasteurella multocida subsp. multocida str. Pm70; identical to SEQ ID NO: 23523
  CDS (1)..(1332): transl_table=11

SEQ ID NO: 23729 - protein, 443 aa, Pasteurella multocida subsp. multocida str. Pm70; identical to SEQ ID NO: 23524

SEQ ID NO: 23730 - DNA, 1275 bp, Pseudomonas aeruginosa PAO1; identical to SEQ ID NO: 23525
  CDS (1)..(1275): transl_table=11

SEQ ID NO: 23731 - protein, 424 aa, Pseudomonas aeruginosa PAO1; identical to SEQ ID NO: 23526

SEQ ID NO: 23732 - DNA, 1392 bp, Pseudomonas aeruginosa PAO1; identical to SEQ ID NO: 23527
  CDS (1)..(1392): transl_table=11

SEQ ID NO: 23733 - protein, 463 aa, Pseudomonas aeruginosa PAO1; identical to SEQ ID NO: 23528

SEQ ID NO: 23734 - DNA, 1401 bp, Neisseria meningitidis MC58; identical to SEQ ID NO: 23529
  CDS (1)..(1401): transl_table=11

SEQ ID NO: 23735 - protein, 466 aa, Neisseria meningitidis MC58; identical to SEQ ID NO: 23530

SEQ ID NO: 23736 - DNA, 1344 bp, Xylella fastidiosa 9a5c; identical to SEQ ID NO: 23531
  CDS (1)..(1344): transl_table=11

SEQ ID NO: 23737 - protein, 447 aa, Xylella fastidiosa 9a5c; identical to SEQ ID NO: 23532

SEQ ID NO: 23738 - DNA, 1299 bp, Caulobacter crescentus CB15; identical to SEQ ID NO: 23533
  CDS (1)..(1299): transl_table=11

SEQ ID NO: 23739 - protein, 432 aa, Caulobacter crescentus CB15; identical to SEQ ID NO: 23534

SEQ ID NO: 23740 - DNA, 1341 bp, Xanthomonas axonopodis pv. citri str. 306; identical to SEQ ID NO: 23535
  CDS (1)..(1341): transl_table=11

SEQ ID NO: 23741 - protein, 446 aa, Xanthomonas axonopodis pv. citri str. 306; identical to SEQ ID NO: 23536

SEQ ID NO: 23742 - DNA, 1272 bp, Yersinia pestis KIM; identical to SEQ ID NO: 23537
  CDS (1)..(1272): transl_table=11

SEQ ID NO: 23743 - protein, 423 aa, Yersinia pestis KIM; identical to SEQ ID NO: 23538

SEQ ID NO: 23744 - DNA, 1227 bp, Vibrio vulnificus CMCP6; identical to SEQ ID NO: 23539
  CDS (1)..(1227): transl_table=11

SEQ ID NO: 23745 - protein, 408 aa, Vibrio vulnificus CMCP6; identical to SEQ ID NO: 23540

SEQ ID NO: 23746 - DNA, 1248 bp, Vibrio vulnificus CMCP6; identical to SEQ ID NO: 23541
  CDS (1)..(1248): transl_table=11

SEQ ID NO: 23747 - protein, 415 aa, Vibrio vulnificus CMCP6; identical to SEQ ID NO: 23542

SEQ ID NO: 23748 - DNA, 1224 bp, Vibrio vulnificus CMCP6; identical to SEQ ID NO: 23543
  CDS (1)..(1224): transl_table=11

SEQ ID NO: 23749 - protein, 407 aa, Vibrio vulnificus CMCP6; identical to SEQ ID NO: 23544

SEQ ID NO: 23750 - DNA, 1344 bp, Xylella fastidiosa Temecula1; identical to SEQ ID NO: 23545
  CDS (1)..(1344): transl_table=11

SEQ ID NO: 23751 - protein, 447 aa, Xylella fastidiosa Temecula1; identical to SEQ ID NO: 23546

SEQ ID NO: 23752 - DNA, 1269 bp, Pseudomonas syringae pv. tomato str. DC3000; identical to SEQ ID NO: 23547
  CDS (1)..(1269): transl_table=11

SEQ ID NO: 23753 - protein, 422 aa, Pseudomonas syringae pv. tomato str. DC3000; identical to SEQ ID NO: 23548

SEQ ID NO: 23754 - DNA, 1275 bp, Pseudomonas syringae pv. tomato str. DC3000; identical to SEQ ID NO: 23549
  CDS (1)..(1275): transl_table=11

SEQ ID NO: 23755 - protein, 424 aa, Pseudomonas syringae pv. tomato str. DC3000; identical to SEQ ID NO: 23550

SEQ ID NO: 23756 - DNA, 1251 bp, Vibrio parahaemolyticus RIMD 2210633; identical to SEQ ID NO: 23551
  CDS (1)..(1251): transl_table=11

SEQ ID NO: 23757 - protein, 416 aa, Vibrio parahaemolyticus RIMD 2210633; identical to SEQ ID NO: 23552

SEQ ID NO: 23758 - DNA, 1320 bp, Vibrio parahaemolyticus RIMD 2210633; identical to SEQ ID NO: 23553
  CDS (1)..(1320): transl_table=11

SEQ ID NO: 23759 - protein, 439 aa, Vibrio parahaemolyticus RIMD 2210633; identical to SEQ ID NO: 23554

SEQ ID NO: 23760 - DNA, 1362 bp, Vibrio parahaemolyticus RIMD 2210633; identical to SEQ ID NO: 23555
  CDS (1)..(1362): transl_table=11

SEQ ID NO: 23761 - protein, 453 aa, Vibrio parahaemolyticus RIMD 2210633; identical to SEQ ID NO: 23556

SEQ ID NO: 23762 - DNA, 1104 bp, Vibrio parahaemolyticus RIMD 2210633; identical to SEQ ID NO: 23557
  CDS (1)..(1104): transl_table=11

SEQ ID NO: 23763 - protein, 367 aa, Vibrio parahaemolyticus RIMD 2210633; identical to SEQ ID NO: 23558

SEQ ID NO: 23764 - DNA, 1242 bp, Vibrio parahaemolyticus RIMD 2210633; identical to SEQ ID NO: 23559
  CDS (1)..(1242): transl_table=11

SEQ ID NO: 23765 - protein, 413 aa, Vibrio parahaemolyticus RIMD 2210633; identical to SEQ ID NO: 23560

SEQ ID NO: 23766 - DNA, 1308 bp, Haemophilus ducreyi 35000HP; identical to SEQ ID NO: 23561
  CDS (1)..(1308): transl_table=11

SEQ ID NO: 23767 - protein, 435 aa, Haemophilus ducreyi 35000HP; identical to SEQ ID NO: 23562

SEQ ID NO: 23768 - DNA, 1458 bp, Chromobacterium violaceum ATCC 12472; identical to SEQ ID NO: 23563
  CDS (1)..(1458): transl_table=11

SEQ ID NO: 23769 - protein, 485 aa, Chromobacterium violaceum ATCC 12472; identical to SEQ ID NO: 23564

SEQ ID NO: 23770 - DNA, 1338 bp, Chromobacterium violaceum ATCC 12472; identical to SEQ ID NO: 23565
  CDS (1)..(1338): transl_table=11

SEQ ID NO: 23771 - protein, 445 aa, Chromobacterium violaceum ATCC 12472; identical to SEQ ID NO: 23566

SEQ ID NO: 23772 - DNA, 1185 bp, Wolinella succinogenes DSM 1740; identical to SEQ ID NO: 23567
  CDS (1)..(1185): transl_table=11

SEQ ID NO: 23773 - protein, 394 aa, Wolinella succinogenes DSM 1740; identical to SEQ ID NO: 23568

SEQ ID NO: 23774 - DNA, 1344 bp, Photorhabdus luminescens subsp. laumondii TTO1; identical to SEQ ID NO: 23569
  CDS (1)..(1344): transl_table=11

SEQ ID NO: 23775 - protein, 447 aa, Photorhabdus luminescens subsp. laumondii TTO1; identical to SEQ ID NO: 23570

SEQ ID NO: 23776 - DNA, 1389 bp, Vibrio vulnificus YJ016; identical to SEQ ID NO: 23571
  CDS (1)..(1389): transl_table=11

SEQ ID NO: 23777 - protein, 462 aa, Vibrio vulnificus YJ016; identical to SEQ ID NO: 23572

SEQ ID NO: 23778 - DNA, 1215 bp, Desulfovibrio vulgaris subsp. vulgaris str. Hildenborough; identical to SEQ ID NO: 23573
  CDS (1)..(1215): transl_table=11

SEQ ID NO: 23779 - protein, 404 aa, Desulfovibrio vulgaris subsp. vulgaris str. Hildenborough; identical to SEQ ID NO: 23574

SEQ ID NO: 23780 - DNA, 1206 bp, Desulfovibrio vulgaris subsp. vulgaris str. Hildenborough; identical to SEQ ID NO: 23575
  CDS (1)..(1206): transl_table=11

SEQ ID NO: 23781 - protein, 401 aa, Desulfovibrio vulgaris subsp. vulgaris str. Hildenborough; identical to SEQ ID NO: 23576

SEQ ID NO: 23782 - DNA, 1287 bp, Erwinia carotovora subsp. atroseptica SCRI1043; identical to SEQ ID NO: 23577
  CDS (1)..(1287)

SEQ ID NO: 23783 - protein, 428 aa, Erwinia carotovora subsp. atroseptica SCRI1043; identical to SEQ ID NO: 23578

SEQ ID NO: 23784 - DNA, 1191 bp, Desulfotalea psychrophila LSv54; identical to SEQ ID NO: 23579
  CDS (1)..(1191): transl_table=11

SEQ ID NO: 23785 - protein, 396 aa, Desulfotalea psychrophila LSv54; identical to SEQ ID NO: 23580

SEQ ID NO: 23786 - DNA, 1266 bp, Yersinia pseudotuberculosis IP 32953; identical to SEQ ID NO: 23581
  CDS (1)..(1266): transl_table=11

SEQ ID NO: 23787 - protein, 421 aa, Yersinia pseudotuberculosis IP 32953; identical to SEQ ID NO: 23582

SEQ ID NO: 23788 - DNA, 1404 bp, Mannheimia succiniciproducens MBEL55E; identical to SEQ ID NO: 23583
  CDS (1)..(1404): transl_table=11

SEQ ID NO: 23789 - protein, 467 aa, Mannheimia succiniciproducens MBEL55E; identical to SEQ ID NO: 23584

SEQ ID NO: 23790 - DNA, 1437 bp, Legionella pneumophila str. Paris; identical to SEQ ID NO: 23585
  CDS (1)..(1437): transl_table=11

SEQ ID NO: 23791 - protein, 478 aa, Legionella pneumophila str. Paris; identical to SEQ ID NO: 23586

SEQ ID NO: 23792 - DNA, 1443 bp, Legionella pneumophila str. Lens; identical to SEQ ID NO: 23587
  CDS (1)..(1443): transl_table=11

SEQ ID NO: 23793 - protein, 480 aa, Legionella pneumophila str. Lens; identical to SEQ ID NO: 23588

SEQ ID NO: 23794 - DNA, 1293 bp, Photobacterium profundum SS9; identical to SEQ ID NO: 23589
  CDS (1)..(1293): transl_table=11

SEQ ID NO: 23795 - protein, 430 aa, Photobacterium profundum SS9; identical to SEQ ID NO: 23590

SEQ ID NO: 23796 - DNA, 1251 bp, Photobacterium profundum SS9; identical to SEQ ID NO: 23591
  CDS (1)..(1251): transl_table=11

SEQ ID NO: 23797 - protein, 416 aa, Photobacterium profundum SS9; identical to SEQ ID NO: 23592

SEQ ID NO: 23798 - DNA, 1248 bp, Photobacterium profundum SS9; identical to SEQ ID NO: 23593
  CDS (1)..(1248): transl_table=11

SEQ ID NO: 23799 - protein, 415 aa, Photobacterium profundum SS9; identical to SEQ ID NO: 23594

SEQ ID NO: 23800 - DNA, 1314 bp, Salmonella enterica subsp. enterica serovar Paratyphi A str. ATCC; identical to SEQ ID NO: 23595
  CDS (1)..(1314): transl_table=11

SEQ ID NO: 23801 - protein, 437 aa, Salmonella enterica subsp. enterica serovar Paratyphi A str. ATCC; identical to SEQ ID NO: 23596

SEQ ID NO: 23802 - DNA, 1272 bp, Azoarcus sp. EbN1; identical to SEQ ID NO: 23597
  CDS (1)..(1272): transl_table=11

SEQ ID NO: 23803 - protein, 423 aa, Azoarcus sp. EbN1; identical to SEQ ID NO: 23598

SEQ ID NO: 23804 - DNA, 1371 bp, Xanthomonas oryzae pv. oryzae KACC10331; identical to SEQ ID NO: 23599
  CDS (1)..(1371): transl_table=11

SEQ ID NO: 23805 - protein, 456 aa, Xanthomonas oryzae pv. oryzae KACC10331; identical to SEQ ID NO: 23600

SEQ ID NO: 23806 - DNA, 1344 bp, Vibrio fischeri ES114; identical to SEQ ID NO: 23601
  CDS (1)..(1344): transl_table=11

SEQ ID NO: 23807 - protein, 447 aa, Vibrio fischeri ES114; identical to SEQ ID NO: 23602

SEQ ID NO: 23808 - DNA, 1299 bp, Vibrio fischeri ES114; identical to SEQ ID NO: 23603
  CDS (1)..(1299): transl_table=11

SEQ ID NO: 23809 - protein, 432 aa, Vibrio fischeri ES114; identical to SEQ ID NO: 23604

SEQ ID NO: 23810 - DNA, 1152 bp, Vibrio fischeri ES114; identical to SEQ ID NO: 23605
  CDS (1)..(1152): transl_table=11

SEQ ID NO: 23811 - protein, 383 aa, Vibrio fischeri ES114; identical to SEQ ID NO: 23606

SEQ ID NO: 23812 - DNA, 1284 bp, Pseudomonas syringae pv. syringae B728a; identical to SEQ ID NO: 23607
  CDS (1)..(1284)

SEQ ID NO: 23813 - protein, 427 aa, Pseudomonas syringae pv. syringae B728a; identical to SEQ ID NO: 23608

SEQ ID NO: 23814 - DNA, 1341 bp, Xanthomonas campestris pv. campestris str. 8004; identical to SEQ ID NO: 23609
  CDS (1)..(1341): transl_table=11

SEQ ID NO: 23815 - protein, 446 aa, Xanthomonas campestris pv. campestris str. 8004; identical to SEQ ID NO: 23610

SEQ ID NO: 23816 - DNA, 1281 bp, Pseudomonas fluorescens Pf-5; identical to SEQ ID NO: 23611
  CDS (1)..(1281): transl_table=11

SEQ ID NO: 23817 - protein, 426 aa, Pseudomonas fluorescens Pf-5; identical to SEQ ID NO: 23612

SEQ ID NO: 23818 - DNA, 1260 bp, Colwellia psychrerythraea 34H; identical to SEQ ID NO: 23613
  CDS (1)..(1260): transl_table=11

SEQ ID NO: 23819 - protein, 419 aa, Colwellia psychrerythraea 34H; identical to SEQ ID NO: 23614

SEQ ID NO: 23820 - DNA, 1284 bp, Pseudomonas syringae pv. phaseolicola 1448A; identical to SEQ ID NO: 23615
  CDS (1)..(1284): transl_table=11

SEQ ID NO: 23821 - protein, 427 aa, Pseudomonas syringae pv. phaseolicola 1448A; identical to SEQ ID NO: 23616

SEQ ID NO: 23822 - DNA, 1452 bp, Pseudomonas syringae pv. phaseolicola 1448A; identical to SEQ ID NO: 23617
  CDS (1)..(1452): transl_table=11

SEQ ID NO: 23823 - protein, 483 aa, Pseudomonas syringae pv. phaseolicola 1448A; identical to SEQ ID NO: 23618

SEQ ID NO: 23824 - DNA, 1206 bp, Dechloromonas aromatica RCB; identical to SEQ ID NO: 23619
  CDS (1)..(1206): transl_table=11

SEQ ID NO: 23825 - protein, 401 aa, Dechloromonas aromatica RCB; identical to SEQ ID NO: 23620

SEQ ID NO: 23826 - DNA, 1329 bp, Dechloromonas aromatica RCB; identical to SEQ ID NO: 23621
  CDS (1)..(1329): transl_table=11

SEQ ID NO: 23827 - protein, 442 aa, Dechloromonas aromatica RCB; identical to SEQ ID NO: 23622

SEQ ID NO: 23828 - DNA, 1371 bp, Ralstonia eutropha JMP134; identical to SEQ ID NO: 23623
  CDS (1)..(1371): transl_table=11

SEQ ID NO: 23829 - protein, 456 aa, Ralstonia eutropha JMP134; identical to SEQ ID NO: 23624

SEQ ID NO: 23830 - DNA, 1218 bp, Thiobacillus denitrificans ATCC 25259; identical to SEQ ID NO: 23625
  CDS (1)..(1218): transl_table=11

SEQ ID NO: 23831 - protein, 405 aa, Thiobacillus denitrificans ATCC 25259; identical to SEQ ID NO: 23626

SEQ ID NO: 23832 - DNA, 1275 bp, Pseudomonas syringae pv. syringae B728a; identical to SEQ ID NO: 23627
  CDS (1)..(1275)

SEQ ID NO: 23833 - protein, 424 aa, Pseudomonas syringae pv. syringae B728a; identical to SEQ ID NO: 23628

SEQ ID NO: 23834 - DNA, 1188 bp, Desulfovibrio desulfuricans G20; identical to SEQ ID NO: 23629
  CDS (1)..(1188)

SEQ ID NO: 23835 - protein, 395 aa, Desulfovibrio desulfuricans G20; identical to SEQ ID NO: 23630

SEQ ID NO: 23836 - DNA, 1161 bp, Haemophilus somnus 2336; identical to SEQ ID NO: 23631
  CDS (1)..(1161)

SEQ ID NO: 23837 - protein, 386 aa, Haemophilus somnus 2336; identical to SEQ ID NO: 23632

SEQ ID NO: 23838 - DNA, 1413 bp, Haemophilus somnus 2336; identical to SEQ ID NO: 23633
  CDS (1)..(1413)

SEQ ID NO: 23839 - protein, 470 aa, Haemophilus somnus 2336; identical to SEQ ID NO: 23634

SEQ ID NO: 23840 - DNA, 1356 bp, Haemophilus somnus 2336; identical to SEQ ID NO: 23635
  CDS (1)..(1356)

SEQ ID NO: 23841 - protein, 451 aa, Haemophilus somnus 2336; identical to SEQ ID NO: 23636

SEQ ID NO: 23842 - DNA, 993 bp, Haemophilus somnus 2336; identical to SEQ ID NO: 23637
  CDS (1)..(993)

SEQ ID NO: 23843 - protein, 330 aa, Haemophilus somnus 2336; identical to SEQ ID NO: 23638

SEQ ID NO: 23844 - DNA, 1392 bp, Actinobacillus pleuropneumoniae serovar 1 str. 4074; identical to SEQ ID NO: 23639
  CDS (1)..(1392)

SEQ ID NO: 23845 - protein, 463 aa, Actinobacillus pleuropneumoniae serovar 1 str. 4074; identical to SEQ ID NO: 23640

SEQ ID NO: 23846 - DNA, 1275 bp, Pseudomonas aeruginosa UCBPP-PA14; identical to SEQ ID NO: 23641
  CDS (1)..(1275)

SEQ ID NO: 23847 - protein, 424 aa, Pseudomonas aeruginosa UCBPP-PA14; identical to SEQ ID NO: 23642

SEQ ID NO: 23848 - DNA, 1197 bp, Dechloromonas aromatica RCB; identical to SEQ ID NO: 23643
  CDS (1)..(1197)

SEQ ID NO: 23849 - protein, 398 aa, Dechloromonas aromatica RCB; identical to SEQ ID NO: 23644

SEQ ID NO: 23850 - DNA, 1356 bp, Haemophilus influenzae R2846; identical to SEQ ID NO: 23645
  CDS (1)..(1356)

SEQ ID NO: 23851 - protein, 451 aa, Haemophilus influenzae R2846; identical to SEQ ID NO: 23646

SEQ ID NO: 23852 - DNA, 1356 bp, Haemophilus influenzae R2866; identical to SEQ ID NO: 23647
  CDS (1)..(1356)

SEQ ID NO: 23853 - protein, 451 aa, Haemophilus influenzae R2866; identical to SEQ ID NO: 23648

SEQ ID NO: 23854 - DNA, 1260 bp, Pseudomonas fluorescens PfO-1; identical to SEQ ID NO: 23649
  CDS (1)..(1260)

SEQ ID NO: 23855 - protein, 419 aa, Pseudomonas fluorescens PfO-1; identical to SEQ ID NO: 23650

SEQ ID NO: 23856 - DNA, 1272 bp, Pseudomonas fluorescens PfO-1; identical to SEQ ID NO: 23651
  CDS (1)..(1272)

SEQ ID NO: 23857 - protein, 423 aa, Pseudomonas fluorescens PfO-1; identical to SEQ ID NO: 23652

SEQ ID NO: 23858 - DNA, 1290 bp, Rhodospirillum rubrum; identical to SEQ ID NO: 23653
  CDS (1)..(1290)

SEQ ID NO: 23859 - protein, 429 aa, Rhodospirillum rubrum; identical to SEQ ID NO: 23654

SEQ ID NO: 23860 - DNA, 1128 bp, Cytophaga hutchinsonii; identical to SEQ ID NO: 23655
  CDS (1)..(1128)

SEQ ID NO: 23861 - protein, 375 aa, Cytophaga hutchinsonii; identical to SEQ ID NO: 23656

SEQ ID NO: 23862 - DNA, 1035 bp, Azotobacter vinelandii AvOP; identical to SEQ ID NO: 23657
  CDS (1)..(1035): transl_table=11

SEQ ID NO: 23863 - protein, 344 aa, Azotobacter vinelandii AvOP; identical to SEQ ID NO: 23658

SEQ ID NO: 23864 - DNA, 1353 bp, Chromohalobacter salexigens DSM 3043; identical to SEQ ID NO: 23659
  CDS (1)..(1353): transl_table=11

SEQ ID NO: 23865 - protein, 450 aa, Chromohalobacter salexigens DSM 3043; identical to SEQ ID NO: 23660

SEQ ID NO: 23866 - DNA, 1320 bp, Desulfuromonas acetoxidans DSM 684; identical to SEQ ID NO: 23661
  CDS (1)..(1320): transl_table=11

SEQ ID NO: 23867 - protein, 439 aa, Desulfuromonas acetoxidans DSM 684; identical to SEQ ID NO: 23662

SEQ ID NO: 23868 - DNA, 1353 bp, Methylobacillus flagellatus KT; identical to SEQ ID NO: 23663
  CDS (1)..(1353): transl_table=11

SEQ ID NO: 23869 - protein, 450 aa, Methylobacillus flagellatus KT; identical to SEQ ID NO: 23664

SEQ ID NO: 23870 - DNA, 1350 bp, Shewanella baltica OS155; identical to SEQ ID NO: 23665
  CDS (1)..(1350): transl_table=11

SEQ ID NO: 23871 - protein, 449 aa, Shewanella baltica OS155; identical to SEQ ID NO: 23666

SEQ ID NO: 23872 - DNA, 1323 bp, Shewanella amazonensis SB2B; identical to SEQ ID NO: 23667
  CDS (1)..(1323): transl_table=11

SEQ ID NO: 23873 - protein, 440 aa, Shewanella amazonensis SB2B; identical to SEQ ID NO: 23668

SEQ ID NO: 23874 - DNA, 1359 bp, Shewanella amazonensis SB2B; identical to SEQ ID NO: 23669
  CDS (1)..(1359): transl_table=11

SEQ ID NO: 23875 - protein, 452 aa, Shewanella amazonensis SB2B; identical to SEQ ID NO: 23670

SEQ ID NO: 23876 - DNA, 999 bp, Shewanella denitrificans OS-217; identical to SEQ ID NO: 23671
  CDS (1)..(999): transl_table=11

SEQ ID NO: 23877 - protein, 332 aa, Shewanella denitrificans OS-217; identical to SEQ ID NO: 23672

SEQ ID NO: 23878 - DNA, 1353 bp, Shewanella frigidimarina NCIMB 400; identical to SEQ ID NO: 23673
  CDS (1)..(1353): transl_table=11

SEQ ID NO: 23879 - protein, 450 aa, Shewanella frigidimarina NCIMB 400; identical to SEQ ID NO: 23674

SEQ ID NO: 23880 - DNA, 1242 bp, Thiomicrospira denitrificans ATCC 33889; identical to SEQ ID NO: 23675
  CDS (1)..(1242): transl_table=11

SEQ ID NO: 23881 - protein, 413 aa, Thiomicrospira denitrificans ATCC 33889; identical to SEQ ID NO: 23676

SEQ ID NO: 23882 - DNA, 1401 bp, Syntrophobacter fumaroxidans MPOB; identical to SEQ ID NO: 23677
  CDS (1)..(1401): transl_table=11

SEQ ID NO: 23883 - protein, 466 aa, Syntrophobacter fumaroxidans MPOB; identical to SEQ ID NO: 23678

SEQ ID NO: 23884 - DNA, 1029 bp, Syntrophobacter fumaroxidans MPOB; identical to SEQ ID NO: 23679
  CDS (1)..(1029): transl_table=11

SEQ ID NO: 23885 - protein, 342 aa, Syntrophobacter fumaroxidans MPOB; identical to SEQ ID NO: 23680

SEQ ID NO: 23886 - DNA, 1344 bp, Xylella fastidiosa Ann-1; identical to SEQ ID NO: 23681
  CDS (1)..(1344): transl_table=11

SEQ ID NO: 23887 - protein, 447 aa, Xylella fastidiosa Ann-1; identical to SEQ ID NO: 23682

SEQ ID NO: 23888 - DNA, 1203 bp, Rhodoferax ferrireducens DSM 15236; identical to SEQ ID NO: 23683
  CDS (1)..(1203): transl_table=11

SEQ ID NO: 23889 - protein, 400 aa, Rhodoferax ferrireducens DSM 15236; identical to SEQ ID NO: 23684

SEQ ID NO: 23890 - DNA, 1383 bp, Pseudomonas putida; identical to SEQ ID NO: 23685
  CDS (1)..(1383): transl_table=11

SEQ ID NO: 23891 - protein, 460 aa, Pseudomonas putida; identical to SEQ ID NO: 23686

SEQ ID NO: 23892 - DNA, 1416 bp, Alcaligenes eutrophus; identical to SEQ ID NO: 23687
  CDS (1)..(1416): transl_table=11

SEQ ID NO: 23893 - protein, 471 aa, Alcaligenes eutrophus; identical to SEQ ID NO: 23688

SEQ ID NO: 23894 - DNA, 1194 bp, Myxococcus xanthus; identical to SEQ ID NO: 23689
  CDS (1)..(1194): transl_table=11

SEQ ID NO: 23895 - protein, 397 aa, Myxococcus xanthus; identical to SEQ ID NO: 23690

SEQ ID NO: 23896 - DNA, 1329 bp, Enterobacter cloacae; identical to SEQ ID NO: 23691
  CDS (1)..(1329): transl_table=11

SEQ ID NO: 23897 - protein, 442 aa, Enterobacter cloacae; identical to SEQ ID NO: 23692

SEQ ID NO: 23898 - DNA, 1356 bp, Haemophilus influenzae; identical to SEQ ID NO: 23693
  CDS (1)..(1356): transl_table=11

SEQ ID NO: 23899 - protein, 451 aa, Haemophilus influenzae; identical to SEQ ID NO: 23694

SEQ ID NO: 23900 - DNA, 1356 bp, Haemophilus influenzae; identical to SEQ ID NO: 23695
  CDS (1)..(1356): transl_table=11

SEQ ID NO: 23901 - protein, 451 aa, Haemophilus influenzae; identical to SEQ ID NO: 23696

SEQ ID NO: 23902 - DNA, 1356 bp, Haemophilus influenzae; identical to SEQ ID NO: 23697
  CDS (1)..(1356): transl_table=11

SEQ ID NO: 23903 - protein, 451 aa, Haemophilus influenzae; identical to SEQ ID NO: 23698

SEQ ID NO: 23904 - DNA, 1374 bp, Haemophilus influenzae; identical to SEQ ID NO: 23699
  CDS (1)..(1374): transl_table=11

SEQ ID NO: 23905 - protein, 457 aa, Haemophilus influenzae; identical to SEQ ID NO: 23700

SEQ ID NO: 23906 - DNA, 1368 bp, Haemophilus influenzae; identical to SEQ ID NO: 23701
  CDS (1)..(1368): transl_table=11

SEQ ID NO: 23907 - protein, 455 aa, Haemophilus influenzae; identical to SEQ ID NO: 23702

SEQ ID NO: 23908 - DNA, 1371 bp, Haemophilus influenzae; identical to SEQ ID NO: 23703
  CDS (1)..(1371): transl_table=11

SEQ ID NO: 23909 - protein, 456 aa, Haemophilus influenzae; identical to SEQ ID NO: 23704

SEQ ID NO: 23910 - DNA, 1377 bp, Burkholderia pickettii; identical to SEQ ID NO: 23705
  CDS (1)..(1377): transl_table=11

SEQ ID NO: 23911 - protein, 458 aa, Burkholderia pickettii; identical to SEQ ID NO: 23706

SEQ ID NO: 23912 - DNA, 1347 bp, Escherichia coli O6; identical to SEQ ID NO: 23707
  CDS (1)..(1347): transl_table=11

SEQ ID NO: 23913 - protein, 448 aa, Escherichia coli O6; identical to SEQ ID NO: 23708

SEQ ID NO: 23914 - DNA, 1314 bp, Salmonella typhimurium; identical to SEQ ID NO: 23709
  CDS (1)..(1314): transl_table=11

SEQ ID NO: 23915 - protein, 437 aa, Salmonella typhimurium; identical to SEQ ID NO: 23710

SEQ ID NO: 23916 - DNA, 1287 bp, Pasteurella multocida; identical to SEQ ID NO: 23711
  CDS (1)..(1287)

SEQ ID NO: 23917 - protein, 428 aa, Pasteurella multocida; identical to SEQ ID NO: 23712

SEQ ID NO: 23918 - DNA, 23 bp, Artificial sequence
  Primer sequence
atggtcatgagccagaaaaccct

SEQ ID NO: 23919 - DNA, 27 bp, Artificial sequence
  Primer sequence
ttagaacgcgtagttaaagttagtacc

SEQ ID NO: 23920 - protein, 549 aa, Artificial sequence; identical to SEQ ID NO: 23715
  Consensus
  Variant (2)..(2): Xaa in position 2 is any amino acid
  Variant (5)..(5): Xaa in position 5 is any amino acid
  Variant (7)..(7): Xaa in position 7 is any amino acid
  Variant (9)..(12): Xaa in position 9 to 12 is any amino acid
  Variant (14)..(15): Xaa in position 14 to 15 is any or no amino acid
  Variant (17)..(18): Xaa in position 17 to 18 is any amino acid
  Variant (19)..(19): Xaa in position 19 is any or no amino acid
  Variant (22)..(23): Xaa in position 22 to 23 is any or no amino acid
  Variant (25)..(27): Xaa in position 25 to 27 is any amino acid
  Variant (28)..(28): Xaa in position 28 is any or no amino acid
  Variant (31)..(34): Xaa in position 31 to 34 is any amino acid
  Variant (38)..(38): Xaa in position 38 is any amino acid
  Variant (40)..(43): Xaa in position 40 to 43 is any amino acid
  Variant (44)..(54): Xaa in position 44 to 54 is any or no amino acid
  Variant (56)..(114): Xaa in position 56 to 114 is any or no amino acid
  Variant (117)..(117): Xaa in position 117 is any amino acid
  Variant (118)..(132): Xaa in position 118 to 132 is any or no amino acid
  Variant (134)..(139): Xaa in position 134 to 139 is any amino acid
  Variant (142)..(143): Xaa in position 142 to 143 is any or no amino acid
  Variant (145)..(145): Xaa in position 145 is any amino acid
  Variant (147)..(151): Xaa in position 147 to 151 is any amino acid
  Variant (153)..(156): Xaa in position 153 to 156 is any amino acid
  Variant (157)..(173): Xaa in position 157 to 173 is any or no amino acid
  Variant (175)..(176): Xaa in position 175 to 176 is any amino acid
  Variant (178)..(183): Xaa in position 178 to 183 is any amino acid
  Variant (186)..(186): Xaa in position 186 is any amino acid
  Variant (188)..(191): Xaa in position 188 to 191 is any amino acid
  Variant (192)..(196): Xaa in position 192 to 196 is any or no amino acid
  Variant (198)..(198): Xaa in position 198 is any amino acid
  Variant (200)..(200): Xaa in position 200 is any amino acid
  Variant (202)..(210): Xaa in position 202 to 210 is any amino acid
  Variant (212)..(225): Xaa in position 212 to 225 is any amino acid
  Variant (226)..(285): Xaa in position 226 to 285 is any or no amino acid
  Variant (288)..(289): Xaa in position 288 to 289 is any amino acid
  Variant (291)..(292): Xaa in position 291 to 292 is any amino acid
  Variant (294)..(301): Xaa in position 294 to 301 is any amino acid
  Variant (302)..(302): Xaa in position 302 is any or no amino acid
  Variant (304)..(305): Xaa in position 304 to 305 is any amino acid
  Variant (307)..(307): Xaa in position 307 is any amino acid
  Variant (309)..(309): Xaa in position 309 is any amino acid
  Variant (311)..(319): Xaa in position 311 to 319 is any amino acid
  Variant (320)..(355): Xaa in position 320 to 355 is any or no amino acid
  Variant (357)..(357): Xaa in position 357 is any amino acid
  Variant (360)..(364): Xaa in position 360 to 364 is any amino acid
  Variant (366)..(374): Xaa in position 366 to 374 is any amino acid
  Variant (375)..(376): Xaa in position 375 to 376 is any or no amino acid
  Variant (378)..(385): Xaa in position 378 to 385 is any amino acid
  Variant (388)..(391): Xaa in position 388 to 391 is any amino acid
  Variant (393)..(402): Xaa in position 393 to 402 is any amino acid
  Variant (403)..(420): Xaa in position 403 to 420 is any or no amino acid
  Variant (422)..(427): Xaa in position 422 to 427 is any amino acid
  Variant (431)..(432): Xaa in position 431 to 432 is any amino acid
  Variant (434)..(439): Xaa in position 434 to 439 is any amino acid
  Variant (440)..(440): Xaa in position 440 is any or no amino acid
  Variant (443)..(443): Xaa in position 443 is any amino acid
  Variant (445)..(446): Xaa in position 445 to 446 is any amino acid
  Variant (449)..(457): Xaa in position 449 to 457 is any amino acid
  Variant (458)..(461): Xaa in position 458 to 461 is any or no amino acid
  Variant (464)..(466): Xaa in position 464 to 466 is any amino acid
  Variant (467)..(467): Xaa in position 467 is any or no amino acid
  Variant (469)..(471): Xaa in position 469 to 471 is any amino acid
  Variant (473)..(473): Xaa in position 473 is any amino acid
  Variant (475)..(476): Xaa in position 475 to 476 is any amino acid
  Variant (478)..(482): Xaa in position 478 to 482 is any amino acid
  Variant (483)..(486): Xaa in position 483 to 486 is any or no amino acid
  Variant (489)..(489): Xaa in position 489 is any amino acid
  Variant (491)..(492): Xaa in position 491 to 492 is any amino acid
  Variant (495)..(514): Xaa in position 495 to 514 is any amino acid
  Variant (515)..(539): Xaa in position 515 to 539 is any or no amino acid
  Variant (541)..(541): Xaa in position 541 is any amino acid
  Variant (543)..(548): Xaa in position 543 to 548 is any amino acid

SEQ ID NO: 23921 - protein, 17 aa, Artificial sequence
  Consensus
  Variant (2)..(2): Xaa in position 2 is any amino acid
  Variant (3)..(3): Xaa in position 3 is Ala, Gly or Ser
  Variant (4)..(7): Xaa in position 4 to 7 is any amino acid
  Variant (8)..(8): Xaa in position 8 is Ala, Asp, Gly, Asn, Pro or Ser
  Variant (10)..(11): Xaa in position 10 to 11 is any amino acid
  Variant (12)..(14): Xaa in position 12 to 14 is any or no amino acid
  Variant (16)..(16): Xaa in position 16 is any or no amino acid
GXXXXXXXAXXXXXNXA

SEQ ID NO: 23922 - protein, 23 aa, Artificial sequence
  Consensus
  Variant (2)..(2): Xaa in position 2 is Phe, Trp or Tyr
  Variant (3)..(3): Xaa in position 3 is Asn, Gln, Ser or Thr
  Variant (4)..(4): Xaa in position 4 is any amino acid
  Variant (5)..(5): Xaa in position 5 is Ala or Gly
  Variant (6)..(16): Xaa in position 6 to 16 is any amino acid
  Variant (17)..(17): Xaa in position 17 is Ala, Gly or Ser
  Variant (18)..(18): Xaa in position 18 is any amino acid
  Variant (19)..(19): Xaa in position 19 is Ala, Gly, Asn, Ser or Thr
  Variant (21)..(21): Xaa in position 21 is any amino acid
  Variant (22)..(22): Xaa in position 22 is any or no amino acid
GXXXXXXXXXXXXXXXXXXYXXS

SEQ ID NO: 23923 - protein, 28 aa, Artificial sequence
  Consensus
  Variant (2)..(2): Xaa in position 2 is Ala, Asp, Glu or Ser
  Variant (3)..(6): Xaa in position 3 to 6 is any amino acid
  Variant (7)..(7): Xaa in position 7 is Ala, Gly or Ser
  Variant (8)..(16): Xaa in position 8 to 16 is any amino acid
  Variant (17)..(17): Xaa in position 17 is Ala, Asp, Glu, Asn, Ser or Thr
  Variant (18)..(26): Xaa in position 18 to 26 is any amino acid
PXXXXXXXXXXXXXXXXXXXXXXXXXWS

SEQ ID NO: 23924 - protein, 46 aa, Artificial sequence; identical to SEQ ID NO: 23719
  Consensus
  Variant (2)..(2): Xaa in position 2 is Ala, Gly, Ser, Thr or Val
  Variant (3)..(3): Xaa in position 3 is any amino acid
  Variant (4)..(4): Xaa in position 4 is Trp or Tyr
  Variant (5)..(12): Xaa in position 5 to 12 is any amino acid
  Variant (13)..(13): Xaa in position 13 is Lys or Arg
  Variant (14)..(14): Xaa in position 14 is any amino acid
  Variant (16)..(18): Xaa in position 16 to 18 is any amino acid
  Variant (19)..(19): Xaa in position 19 is any or no amino acid
  Variant (21)..(33): Xaa in position 21 to 33 is any amino acid
  Variant (34)..(36): Xaa in position 34 to 36 is any or no amino acid
  Variant (38)..(43): Xaa in position 38 to 43 is any amino acid
  Variant (44)..(44): Xaa in position 44 is Ala, Gly, Ser or Thr
  Variant (45)..(45): Xaa in position 45 is any amino acid
  Variant (46)..(46): Xaa in position 46 is Gly, Ser or Thr

SEQ ID NO: 23925 - DNA, 1203 bp, Escherichia coli; identical to SEQ ID NO: 13945
  CDS (1)..(1203)

SEQ ID NO: 23926 - protein, 400 aa, Escherichia coli; identical to SEQ ID NO: 13946

SEQ ID NO: 23927 - DNA, 1281 bp, Aquifex aeolicus VF5; identical to SEQ ID NO: 13947
  CDS (1)..(1281): transl_table=11

SEQ ID NO: 23928 - protein, 426 aa, Aquifex aeolicus VF5; identical to SEQ ID NO: 13948

SEQ ID NO: 23929 - DNA, 1260 bp, Neisseria meningitidis Z2491; identical to SEQ ID NO: 13949
  CDS (1)..(1260): transl_table=11

SEQ ID NO: 23930 - protein, 419 aa, Neisseria meningitidis Z2491; identical to SEQ ID NO: 13950

SEQ ID NO: 23931 - DNA, 1425 bp, Deinococcus radiodurans R1; identical to SEQ ID NO: 13951
  CDS (1)..(1425): transl_table=11

SEQ ID NO: 23932 - protein, 474 aa, Deinococcus radiodurans R1; identical to SEQ ID NO: 13952

SEQ ID NO: 23933 - DNA, 1392 bp, Mycobacterium tuberculosis CDC1551; identical to SEQ ID NO: 13953
  CDS (1)..(1392): transl_table=11

SEQ ID NO: 23934 - protein, 463 aa, Mycobacterium tuberculosis CDC1551; identical to SEQ ID NO: 13954

SEQ ID NO: 23935 - DNA, 1203 bp, Salmonella typhimurium LT2; identical to SEQ ID NO: 13955
  CDS (1)..(1203): transl_table=11

SEQ ID NO: 23936 - protein, 400 aa, Salmonella typhimurium LT2; identical to SEQ ID NO: 13956

SEQ ID NO: 23937 - DNA, 1320 bp, Agrobacterium tumefaciens str. C58; identical to SEQ ID NO: 13957
  CDS (1)..(1320): transl_table=11

SEQ ID NO: 23938 - protein, 439 aa, Agrobacterium tumefaciens str. C58; identical to SEQ ID NO: 13958

SEQ ID NO: 23939 - DNA, 1251 bp, Yersinia pestis KIM; identical to SEQ ID NO: 13959
  CDS (1)..(1251): transl_table=11

SEQ ID NO: 23940 - protein, 416 aa, Yersinia pestis KIM; identical to SEQ ID NO: 13960

SEQ ID NO: 23941 - DNA, 1314 bp, Thermosynechococcus elongatus BP-1; identical to SEQ ID NO: 13961
  CDS (1)..(1314): transl_table=11

SEQ ID NO: 23942 - protein, 437 aa, Thermosynechococcus elongatus BP-1; identical to SEQ ID NO: 13962

SEQ ID NO: 23943 - DNA, 1464 bp, Oceanobacillus iheyensis HTE831; identical to SEQ ID NO: 13963
  CDS (1)..(1464): transl_table=11

SEQ ID NO: 23944 - protein, 487 aa, Oceanobacillus iheyensis HTE831; identical to SEQ ID NO: 13964

SEQ ID NO: 23945 - DNA, 1209 bp, Pseudomonas putida KT2440; identical to SEQ ID NO: 13965
  CDS (1)..(1209): transl_table=11

SEQ ID NO: 23946 - protein, 402 aa, Pseudomonas putida KT2440; identical to SEQ ID NO: 13966

SEQ ID NO: 23947 - DNA, 1305 bp, Bradyrhizobium japonicum USDA 110; identical to SEQ ID NO: 13967
  CDS (1)..(1305)

SEQ ID NO: 23948 - protein, 434 aa, Bradyrhizobium japonicum USDA 110; identical to SEQ ID NO: 13968

SEQ ID NO: 23949 - DNA, 1434 bp, Lactobacillus plantarum WCFS1; identical to SEQ ID NO: 13969
  CDS (1)..(1434): transl_table=11

SEQ ID NO: 23950 - protein, 477 aa, Lactobacillus plantarum WCFS1; identical to SEQ ID NO: 13970

SEQ ID NO: 23951 - DNA, 1203 bp, Salmonella enterica subsp. enterica serovar Typhi Ty2; identical to SEQ ID NO: 13971
  CDS (1)..(1203): transl_table=11

SEQ ID NO: 23952 - protein, 400 aa, Salmonella enterica subsp. enterica serovar Typhi Ty2; identical to SEQ ID NO: 13972

SEQ ID NO: 23953 - DNA, 1170 bp, Bacteroides thetaiotaomicron VPI-5482; identical to SEQ ID NO: 13973
  CDS (1)..(1170): transl_table=11

SEQ ID NO: 23954 - protein, 389 aa, Bacteroides thetaiotaomicron VPI-5482; identical to SEQ ID NO: 13974

SEQ ID NO: 23955 - DNA, 1407 bp, Coxiella burnetii RSA 493; identical to SEQ ID NO: 13975
  CDS (1)..(1407): transl_table=11

SEQ ID NO: 23956 - protein, 468 aa, Coxiella burnetii RSA 493; identical to SEQ ID NO: 13976

SEQ ID NO: 23957 - DNA, 1185 bp, Porphyromonas gingivalis W83; identical to SEQ ID NO: 13977
  CDS (1)..(1185): transl_table=11

SEQ ID NO: 23958 - protein, 394 aa, Porphyromonas gingivalis W83; identical to SEQ ID NO: 13978

SEQ ID NO: 23959 - DNA, 1608 bp, Oryza sativa (japonica cultivar-group); identical to SEQ ID NO: 13979
  CDS (1)..(1608)

SEQ ID NO: 23960 - protein, 535 aa, Oryza sativa (japonica cultivar-group); identical to SEQ ID NO: 13980

SEQ ID NO: 23961 - DNA, 1446 bp, Geobacter sulfurreducens PCA; identical to SEQ ID NO: 13981
  CDS (1)..(1446): transl_table=11

SEQ ID NO: 23962 - protein, 481 aa, Geobacter sulfurreducens PCA; identical to SEQ ID NO: 13982

SEQ ID NO: 23963 - DNA, 1437 bp, Treponema denticola ATCC 35405; identical to SEQ ID NO: 13983
  CDS (1)..(1437): transl_table=11

SEQ ID NO: 23964 - protein, 478 aa, Treponema denticola ATCC 35405; identical to SEQ ID NO: 13984

SEQ ID NO: 23965 - DNA, 1293 bp, Eremothecium gossypii; identical to SEQ ID NO: 13985
  CDS (1)..(1293)

SEQ ID NO: 23966 - protein, 430 aa, Eremothecium gossypii; identical to SEQ ID NO: 13986

SEQ ID NO: 23967 - DNA, 1434 bp, Neurospora crassa; identical to SEQ ID NO: 13987
  CDS (1)..(1434)

SEQ ID NO: 23968 - protein, 477 aa, Neurospora crassa; identical to SEQ ID NO: 13988

SEQ ID NO: 23969 - DNA, 5916 bp, Magnaporthe grisea 70-15; identical to SEQ ID NO: 13989
  CDS (1)..(5916)

SEQ ID NO: 23970 - protein, 1971 aa, Magnaporthe grisea 70-15; identical to SEQ ID NO: 13990

SEQ ID NO: 23971 - DNA, 1380 bp, Gibberella zeae PH-1; identical to SEQ ID NO: 13991
  CDS (1)..(1380)

SEQ ID NO: 23972 - protein, 459 aa, Gibberella zeae PH-1; identical to SEQ ID NO: 13992

SEQ ID NO: 23973 - DNA, 1839 bp, Ustilago maydis 521; identical to SEQ ID NO: 13993
  CDS (1)..(1839)

SEQ ID NO: 23974 - protein, 612 aa, Ustilago maydis 521; identical to SEQ ID NO: 13994

SEQ ID NO: 23975 - DNA, 1464 bp, Aspergillus nidulans FGSC A4; identical to SEQ ID NO: 13995
  CDS (1)..(1464)

SEQ ID NO: 23976 - protein, 487 aa, Aspergillus nidulans FGSC A4; identical to SEQ ID NO: 13996

SEQ ID NO: 23977 - DNA, 1296 bp, Candida glabrata CBS138; identical to SEQ ID NO: 13997
  CDS (1)..(1296)

SEQ ID NO: 23978 - protein, 431 aa, Candida glabrata CBS138; identical to SEQ ID NO: 13998

SEQ ID NO: 23979 - DNA, 1284 bp, Kluyveromyces lactis NRRL Y-1140; identical to SEQ ID NO: 13999
  CDS (1)..(1284)

SEQ ID NO: 23980 - protein, 427 aa, Kluyveromyces lactis NRRL Y-1140; identical to SEQ ID NO: 14000

SEQ ID NO: 23981 - DNA, 1269 bp, Debaryomyces hansenii CBS767; identical to SEQ ID NO: 14001
  CDS (1)..(1269)

SEQ ID NO: 23982 - protein, 422 aa, Debaryomyces hansenii CBS767; identical to SEQ ID NO: 14002

SEQ ID NO: 23983 - DNA, 1245 bp, Yarrowia lipolytica CLIB99; identical to SEQ ID NO: 14003
  CDS (1)..(1245)

SEQ ID NO: 23984 - protein, 414 aa, Yarrowia lipolytica CLIB99; identical to SEQ ID NO: 14004

SEQ ID NO: 23985 - DNA, 1362 bp, Cryptococcus neoformans var. neoformans JEC21; identical to SEQ ID NO: 14005
  CDS (1)..(1362)

SEQ ID NO: 23986 - protein, 453 aa, Cryptococcus neoformans var. neoformans JEC21; identical to SEQ ID NO: 14006

SEQ ID NO: 23987 - DNA, 1173 bp, Entamoeba histolytica HM-1:IMSS; identical to SEQ ID NO: 14007
  CDS (1)..(1173)

SEQ ID NO: 23988 - protein, 390 aa, Entamoeba histolytica HM-1:IMSS; identical to SEQ ID NO: 14008

SEQ ID NO: 23989 - DNA, 1266 bp, Candida albicans SC5314; identical to SEQ ID NO: 14009
  CDS (1)..(1266): transl_table=12

SEQ ID NO: 23990 - protein, 421 aa, Candida albicans SC5314; identical to SEQ ID NO: 14010

SEQ ID NO: 23991 - DNA, 1305 bp, Bartonella quintana str. Toulouse; identical to SEQ ID NO: 14011
  CDS (1)..(1305): transl_table=11

SEQ ID NO: 23992 - protein, 434 aa, Bartonella quintana str. Toulouse; identical to SEQ ID NO: 14012

SEQ ID NO: 23993 - DNA, 1305 bp, Bartonella henselae str. Houston-1; identical to SEQ ID NO: 14013
  CDS (1)..(1305): transl_table=11

SEQ ID NO: 23994 - protein, 434 aa, Bartonella henselae str. Houston-1; identical to SEQ ID NO: 14014

SEQ ID NO: 23995 - DNA, 1470 bp, Bacillus licheniformis ATCC 14580; identical to SEQ ID NO: 14015
  CDS (1)..(1470): transl_table=11

SEQ ID NO: 23996 - protein, 489 aa, Bacillus licheniformis ATCC 14580; identical to SEQ ID NO: 14016

SEQ ID NO: 23997 - DNA, 1167 bp, Bacteroides fragilis YCH46; identical to SEQ ID NO: 14017
  CDS (1)..(1167): transl_table=11

SEQ ID NO: 23998 - protein, 388 aa, Bacteroides fragilis YCH46; identical to SEQ ID NO: 14018

SEQ ID NO: 23999 - DNA, 1350 bp, Methylococcus capsulatus str. Bath; identical to SEQ ID NO: 14019
  CDS (1)..(1350): transl_table=11

SEQ ID NO: 24000 - protein, 449 aa, Methylococcus capsulatus str. Bath; identical to SEQ ID NO: 14020

SEQ ID NO: 24001 - DNA, 1317 bp, Nocardia farcinica IFM 10152; identical to SEQ ID NO: 14021
  CDS (1)..(1317): transl_table=11

SEQ ID NO: 24002 - protein, 438 aa, Nocardia farcinica IFM 10152; identical to SEQ ID NO: 14022

SEQ ID NO: 24003 - DNA, 1404 bp, Legionella pneumophila str. Paris; identical to SEQ ID NO: 14023
  CDS (1)..(1404): transl_table=11

SEQ ID NO: 24004 - protein, 467 aa, Legionella pneumophila str. Paris; identical to SEQ ID NO: 14024

SEQ ID NO: 24005 - DNA, 1404 bp, Legionella pneumophila str. Lens; identical to SEQ ID NO: 14025
  CDS (1)..(1404): transl_table=11

SEQ ID NO: 24006 - protein, 467 aa, Legionella pneumophila str. Lens; identical to SEQ ID NO: 14026

SEQ ID NO: 24007 - DNA, 1473 bp, Geobacillus kaustophilus HTA426; identical to SEQ ID NO: 14027
  CDS (1)..(1473): transl_table=11

SEQ ID NO: 24008 - protein, 490 aa, Geobacillus kaustophilus HTA426; identical to SEQ ID NO: 14028

SEQ ID NO: 24009 - DNA, 1347 bp, Idiomarina loihiensis L2TR; identical to SEQ ID NO: 14029
  CDS (1)..(1347): transl_table=11

SEQ ID NO: 24010 - protein, 448 aa, Idiomarina loihiensis L2TR; identical to SEQ ID NO: 14030

SEQ ID NO: 24011 - DNA, 1344 bp, Silicibacter pomeroyi DSS-3; identical to SEQ ID NO: 14031
  CDS (1)..(1344): transl_table=11

SEQ ID NO: 24012 - protein, 447 aa, Silicibacter pomeroyi DSS-3; identical to SEQ ID NO: 14032

SEQ ID NO: 24013 - DNA, 1260 bp, Neisseria gonorrhoeae FA 1090; identical to SEQ ID NO: 14033
  CDS (1)..(1260): transl_table=11

SEQ ID NO: 24014 - protein, 419 aa, Neisseria gonorrhoeae FA 1090; identical to SEQ ID NO: 14034

SEQ ID NO: 24015 - DNA, 1167 bp, Bacteroides fragilis NCTC 9343; identical to SEQ ID NO: 14035
  CDS (1)..(1167): transl_table=11

SEQ ID NO: 24016 - protein, 388 aa, Bacteroides fragilis NCTC 9343; identical to SEQ ID NO: 14036

SEQ ID NO: 24017 - DNA, 1251 bp, Salmonella enterica subsp. enterica serovar Choleraesuis str; identical to SEQ ID NO: 14037
  CDS (1)..(1251): transl_table=11

SEQ ID NO: 24018 - protein, 416 aa, Salmonella enterica subsp. enterica serovar Choleraesuis str; identical to SEQ ID NO: 14038

SEQ ID NO: 24019 - DNA, 1224 bp, Pseudomonas syringae pv. syringae B728a; identical to SEQ ID NO: 14039
  CDS (1)..(1224)

SEQ ID NO: 24020 - protein, 407 aa, Pseudomonas syringae pv. syringae B728a; identical to SEQ ID NO: 14040

SEQ ID NO: 24021 - DNA, 1326 bp, Corynebacterium jeikeium K411; identical to SEQ ID NO: 14041
  CDS (1)..(1326): transl_table=11

SEQ ID NO: 24022 - protein, 441 aa, Corynebacterium jeikeium K411; identical to SEQ ID NO: 14042

SEQ ID NO: 24023 - DNA, 1293 bp, Rhodobacter sphaeroides 2.4.1; identical to SEQ ID NO: 14043
  CDS (1)..(1293)

SEQ ID NO: 24024 - protein, 430 aa, Rhodobacter sphaeroides 2.4.1; identical to SEQ ID NO: 14044

SEQ ID NO: 24025 - DNA, 1134 bp, Xylella fastidiosa Ann-1; identical to SEQ ID NO: 14045
  CDS (1)..(1134)

SEQ ID NO: 24026 - protein, 377 aa, Xylella fastidiosa Ann-1; identical to SEQ ID NO: 14046

SEQ ID NO: 24027 - DNA, 1464 bp, Leuconostoc mesenteroides subsp. mesenteroides ATCC 8293; identical to SEQ ID NO: 14047
  CDS (1)..(1464)

SEQ ID NO: 24028 - protein, 487 aa, Leuconostoc mesenteroides subsp. mesenteroides ATCC 8293; identical to SEQ ID NO: 14048

SEQ ID NO: 24029 - DNA, 1242 bp, Psychrobacter sp. 273-4; identical to SEQ ID NO: 14049
  CDS (1)..(1242)

SEQ ID NO: 24030 - protein, 413 aa, Psychrobacter sp. 273-4; identical to SEQ ID NO: 14050

SEQ ID NO: 24031 - DNA, 1179 bp, Ralstonia eutropha JMP134; identical to SEQ ID NO: 14051
  CDS (1)..(1179)

SEQ ID NO: 24032 - protein, 392 aa, Ralstonia eutropha JMP134; identical to SEQ ID NO: 14052

SEQ ID NO: 24033 - DNA, 1200 bp, Burkholderia cepacia R18194; identical to SEQ ID NO: 14053
  CDS (1)..(1200)

SEQ ID NO: 24034 - protein, 399 aa, Burkholderia cepacia R18194; identical to SEQ ID NO: 14054

SEQ ID NO: 24035 - DNA, 1224 bp, Pseudomonas fluorescens PfO-1; identical to SEQ ID NO: 14055
  CDS (1)..(1224)

SEQ ID NO: 24036 - protein, 407 aa, Pseudomonas fluorescens PfO-1; identical to SEQ ID NO: 14056

SEQ ID NO: 24037 - DNA, 1197 bp, Burkholderia fungorum LB400; identical to SEQ ID NO: 14057
  CDS (1)..(1197)

SEQ ID NO: 24038 - protein, 398 aa, Burkholderia fungorum LB400; identical to SEQ ID NO: 14058

SEQ ID NO: 24039 - DNA, 1428 bp, Oenococcus oeni PSU-1; identical to SEQ ID NO: 14059
  CDS (1)..(1428)

SEQ ID NO: 24040 - protein, 475 aa, Oenococcus oeni PSU-1; identical to SEQ ID NO: 14060

SEQ ID NO: 24041 - DNA, 1380 bp, Trichodesmium erythraeum IMS101; identical to SEQ ID NO: 14061
  CDS (1)..(1380)

SEQ ID NO: 24042 - protein, 459 aa, Trichodesmium erythraeum IMS101; identical to SEQ ID NO: 14062

SEQ ID NO: 24043 - DNA, 1434 bp, Campylobacter upsaliensis RM3195; identical to SEQ ID NO: 14063
  CDS (1)..(1434): transl_table=11

SEQ ID NO: 24044 - protein, 477 aa, Campylobacter upsaliensis RM3195; identical to SEQ ID NO: 14064

SEQ ID NO: 24045 - DNA, 1488 bp, Lactococcus lactis subsp. cremoris SK11; identical to SEQ ID NO: 14065
  CDS (1)..(1488)

SEQ ID NO: 24046 - protein, 495 aa, Lactococcus lactis subsp. cremoris SK11; identical to SEQ ID NO: 14066

SEQ ID NO: 24047 - DNA, 1461 bp, Deinococcus geothermalis DSM 11300; identical to SEQ ID NO: 14067
  CDS (1)..(1461): transl_table=11

SEQ ID NO: 24048 - protein, 486 aa, Deinococcus geothermalis DSM 11300; identical to SEQ ID NO: 14068

SEQ ID NO: 24049 - DNA, 1359 bp, Azotobacter vinelandii AvOP; identical to SEQ ID NO: 14069
  CDS (1)..(1359): transl_table=11

SEQ ID NO: 24050 - protein, 452 aa, Azotobacter vinelandii AvOP; identical to SEQ ID NO: 14070

SEQ ID NO: 24051 - DNA, 1356 bp, Burkholderia vietnamiensis G4; identical to SEQ ID NO: 14071
  CDS (1)..(1356): transl_table=11

SEQ ID NO: 24052 - protein, 451 aa, Burkholderia vietnamiensis G4; identical to SEQ ID NO: 14072

SEQ ID NO: 24053 - DNA, 1200 bp, Burkholderia mallei 10229; identical to SEQ ID NO: 14073
  CDS (1)..(1200)

SEQ ID NO: 24054 - protein, 399 aa, Burkholderia mallei 10229; identical to SEQ ID NO: 14074

SEQ ID NO: 24055 - DNA, 1200 bp, Burkholderia cenocepacia AU 1054; identical to SEQ ID NO: 14075
  CDS (1)..(1200): transl_table=11

SEQ ID NO: 24056 - protein, 399 aa, Burkholderia cenocepacia AU 1054; identical to SEQ ID NO: 14076

SEQ ID NO: 24057 - DNA, 1356 bp, Burkholderia pseudomallei 1655; identical to SEQ ID NO: 14077
  CDS (1)..(1356)

SEQ ID NO: 24058 - protein, 451 aa, Burkholderia pseudomallei 1655; identical to SEQ ID NO: 14078

SEQ ID NO: 24059 - DNA, 1173 bp, Chromohalobacter salexigens DSM 3043; identical to SEQ ID NO: 14079
  CDS (1)..(1173): transl_table=11

SEQ ID NO: 24060 - protein, 390 aa, Chromohalobacter salexigens DSM 3043; identical to SEQ ID NO: 14080

SEQ ID NO: 24061 - DNA, 1356 bp, Burkholderia pseudomallei 668; identical to SEQ ID NO: 14081
  CDS (1)..(1356)

SEQ ID NO: 24062 - protein, 451 aa, Burkholderia pseudomallei 668; identical to SEQ ID NO: 14082

SEQ ID NO: 24063 - DNA, 1269 bp, Polaromonas sp. JS666; identical to SEQ ID NO: 14083
  CDS (1)..(1269): transl_table=11

SEQ ID NO: 24064 - protein, 422 aa, Polaromonas sp. JS666; identical to SEQ ID NO: 14084

SEQ ID NO: 24065 - DNA, 1341 bp, Crocosphaera watsonii WH 8501; identical to SEQ ID NO: 14085
  CDS (1)..(1341): transl_table=11

SEQ ID NO: 24066 - protein, 446 aa, Crocosphaera watsonii WH 8501; identical to SEQ ID NO: 14086

SEQ ID NO: 24067 - DNA, 1431 bp, Geobacter metallireducens GS-15; identical to SEQ ID NO: 14087
  CDS (1)..(1431): transl_table=11

SEQ ID NO: 24068 - protein, 476 aa, Geobacter metallireducens GS-15; identical to SEQ ID NO: 14088

SEQ ID NO: 24069 - DNA, 1206 bp, Methanosarcina barkeri str. fusaro; identical to SEQ ID NO: 14089
  CDS (1)..(1206): transl_table=11

SEQ ID NO: 24070 - protein, 401 aa, Methanosarcina barkeri str. fusaro; identical to SEQ ID NO: 14090

SEQ ID NO: 24071 - DNA, 1206 bp, Desulfuromonas acetoxidans DSM 684; identical to SEQ ID NO: 14091
  CDS (1)..(1206): transl_table=11

SEQ ID NO: 24072 - protein, 401 aa, Desulfuromonas acetoxidans DSM 684; identical to SEQ ID NO: 14092

SEQ ID NO: 24073 - DNA, 1293 bp, Jannaschia sp. CCS1; identical to SEQ ID NO: 14093
  CDS (1)..(1293): transl_table=11

SEQ ID NO: 24074 - protein, 430 aa, Jannaschia sp. CCS1; identical to SEQ ID NO: 14094

SEQ ID NO: 24075 - DNA, 1458 bp, Desulfitobacterium hafniense DCB-2; identical to SEQ ID NO: 14095
  CDS (1)..(1458): transl_table=11

SEQ ID NO: 24076 - protein, 485 aa, Desulfitobacterium hafniense DCB-2; identical to SEQ ID NO: 14096

SEQ ID NO: 24077 - DNA, 1218 bp, Methanococcoides burtonii DSM 6242; identical to SEQ ID NO: 14097
  CDS (1)..(1218): transl_table=11

SEQ ID NO: 24078 - protein, 405 aa, Methanococcoides burtonii DSM 6242; identical to SEQ ID NO: 14098

SEQ ID NO: 24079 - DNA, 1575 bp, Frankia sp. EAN1pec; identical to SEQ ID NO: 14099
  CDS (1)..(1575): transl_table=11

SEQ ID NO: 24080 - protein, 524 aa, Frankia sp. EAN1pec; identical to SEQ ID NO: 14100

SEQ ID NO: 24081 - DNA, 1200 bp, Ralstonia metallidurans CH34; identical to SEQ ID NO: 14101
  CDS (1)..(1200): transl_table=11

SEQ ID NO: 24082 - protein, 399 aa, Ralstonia metallidurans CH34; identical to SEQ ID NO: 14102

SEQ ID NO: 24083 - DNA, 1341 bp, Magnetococcus sp. MC-1; identical to SEQ ID NO: 14103
  CDS (1)..(1341): transl_table=11

SEQ ID NO: 24084 - protein, 446 aa, Magnetococcus sp. MC-1; identical to SEQ ID NO: 14104

SEQ ID NO: 24085 - DNA, 1305 bp, Mesorhizobium sp. BNC1; identical to SEQ ID NO: 14105
  CDS (1)..(1305): transl_table=11

SEQ ID NO: 24086 - protein, 434 aa, Mesorhizobium sp. BNC1; identical to SEQ ID NO: 14106

SEQ ID NO: 24087 - DNA, 1290 bp, Silicibacter sp. TM1040; identical to SEQ ID NO: 14107
  CDS (1)..(1290): transl_table=11

SEQ ID NO: 24088 - protein, 429 aa, Silicibacter sp. TM1040; identical to SEQ ID NO: 14108

SEQ ID NO: 24089 - DNA, 1305 bp, Nitrobacter hamburgensis X14; identical to SEQ ID NO: 14109
  CDS (1)..(1305): transl_table=11

SEQ ID NO: 24090 - protein, 434 aa, Nitrobacter hamburgensis X14; identical to SEQ ID NO: 14110

SEQ ID NO: 24091 - DNA, 1308 bp, Paracoccus denitrificans PD1222; identical to SEQ ID NO: 14111
  CDS (1)..(1308): transl_table=11

SEQ ID NO: 24092 - protein, 435 aa, Paracoccus denitrificans PD1222; identical to SEQ ID NO: 14112

SEQ ID NO: 24093 - DNA, 1230 bp, Pseudomonas fluorescens; identical to SEQ ID NO: 14113
  CDS (1)..(1230): transl_table=11

SEQ ID NO: 24094 - protein, 409 aa, Pseudomonas fluorescens; identical to SEQ ID NO: 14114

SEQ ID NO: 24095 - DNA, 1215 bp, Pseudomonas fluorescens; identical to SEQ ID NO: 14115
  CDS (1)..(1215): transl_table=11

SEQ ID NO: 24096 - protein, 404 aa, Pseudomonas fluorescens; identical to SEQ ID NO: 14116

SEQ ID NO: 24097 - DNA, 1443 bp, Staphylococcus haemolyticus; identical to SEQ ID NO: 14117
  CDS (1)..(1443): transl_table=11

SEQ ID NO: 24098 - protein, 480 aa, Staphylococcus haemolyticus; identical to SEQ ID NO: 14118

SEQ ID NO: 24099 - DNA, 1245 bp, Leishmania major; identical to SEQ ID NO: 14119
  CDS (1)..(1245)

SEQ ID NO: 24100 - protein, 414 aa, Leishmania major; identical to SEQ ID NO: 14120

SEQ ID NO: 24101 - DNA, 1380 bp, Gibberella moniliformis; identical to SEQ ID NO: 14121
  CDS (1)..(1380)

SEQ ID NO: 24102 - protein, 459 aa, Gibberella moniliformis; identical to SEQ ID NO: 14122

SEQ ID NO: 24103 - DNA, 1233 bp, Schizosaccharomyces pombe; identical to SEQ ID NO: 14123
  CDS (1)..(1233)

SEQ ID NO: 24104 - protein, 410 aa, Schizosaccharomyces pombe; identical to SEQ ID NO: 14124

SEQ ID NO: 24105 - DNA, 1290 bp, Saccharomyces cerevisiae; identical to SEQ ID NO: 14125
  CDS (1)..(1290)

SEQ ID NO: 24106 - protein, 429 aa, Saccharomyces cerevisiae; identical to SEQ ID NO: 14126

SEQ ID NO: 24107 - DNA, 1200 bp, Pseudomonas aeruginosa; identical to SEQ ID NO: 14127
  CDS (1)..(1200): transl_table=11

SEQ ID NO: 24108 - protein, 399 aa, Pseudomonas aeruginosa; identical to SEQ ID NO: 14128

SEQ ID NO: 24109 - DNA, 1197 bp, Pseudomonas aeruginosa; identical to SEQ ID NO: 14129
  CDS (1)..(1197): transl_table=11

SEQ ID NO: 24110 - protein, 398 aa, Pseudomonas aeruginosa; identical to SEQ ID NO: 14130

SEQ ID NO: 24111 - DNA, 1224 bp, Acinetobacter sp; identical to SEQ ID NO: 14131
  CDS (1)..(1224): transl_table=11

SEQ ID NO: 24112 - protein, 407 aa, Acinetobacter sp; identical to SEQ ID NO: 14132

SEQ ID NO: 24113 - DNA, 1218 bp, Bordetella pertussis; identical to SEQ ID NO: 14133
  CDS (1)..(1218): transl_table=11

SEQ ID NO: 24114 - protein, 405 aa, Bordetella pertussis; identical to SEQ ID NO: 14134

SEQ ID NO: 24115 - DNA, 1305 bp, Brucella melitensis; identical to SEQ ID NO: 14135
  CDS (1)..(1305): transl_table=11

SEQ ID NO: 24116 - protein, 434 aa, Brucella melitensis; identical to SEQ ID NO: 14136

SEQ ID NO: 24117 - DNA, 1305 bp, Brucella suis; identical to SEQ ID NO: 14137
  CDS (1)..(1305)

SEQ ID NO: 24118 - protein, 434 aa, Brucella suis; identical to SEQ ID NO: 14138

SEQ ID NO: 24119 - DNA, 1200 bp, Buchnera aphidicola; identical to SEQ ID NO: 14139
  CDS (1)..(1200): transl_table=11

SEQ ID NO: 24120 - protein, 399 aa, Buchnera aphidicola; identical to SEQ ID NO: 14140

SEQ ID NO: 24121 - DNA, 1197 bp, Buchnera aphidicola; identical to SEQ ID NO: 14141
  CDS (1)..(1197): transl_table=11

SEQ ID NO: 24122 - protein, 398 aa, Buchnera aphidicola; identical to SEQ ID NO: 14142

SEQ ID NO: 24123 - DNA, 1200 bp, Burkholderia mallei; identical to SEQ ID NO: 14143
  CDS (1)..(1200): transl_table=11

SEQ ID NO: 24124 - protein, 399 aa, Burkholderia mallei; identical to SEQ ID NO: 14144

SEQ ID NO: 24125 - DNA, 1209 bp, Chromobacterium violaceum; identical to SEQ ID NO: 14145
  CDS (1)..(1209): transl_table=11

SEQ ID NO: 24126 - protein, 402 aa, Chromobacterium violaceum; identical to SEQ ID NO: 14146

SEQ ID NO: 24127 - DNA, 1206 bp, Erwinia carotovora; identical to SEQ ID NO: 14147
  CDS (1)..(1206): transl_table=11

SEQ ID NO: 24128 - protein, 401 aa, Erwinia carotovora; identical to SEQ ID NO: 14148

SEQ ID NO: 24129 - DNA, 1215 bp, Methanosarcina acetivorans; identical to SEQ ID NO: 14149
  CDS (1)..(1215): transl_table=11

SEQ ID NO: 24130 - protein, 404 aa, Methanosarcina acetivorans; identical to SEQ ID NO: 14150

SEQ ID NO: 24131 - DNA, 1209 bp, Neisseria gonorrhoeae; identical to SEQ ID NO: 14151
  CDS (1)..(1209)

SEQ ID NO: 24132 - protein, 402 aa, Neisseria gonorrhoeae; identical to SEQ ID NO: 14152

SEQ ID NO: 24133 - DNA, 1209 bp, Neisseria meningitidis; identical to SEQ ID NO: 14153
  CDS (1)..(1209)

SEQ ID NO: 24134 - protein, 402 aa, Neisseria meningitidis; identical to SEQ ID NO: 14154

SEQ ID NO: 24135 - DNA, 1209 bp, Neisseria meningitidis; identical to SEQ ID NO: 14155
  CDS (1)..(1209): transl_table=11

SEQ ID NO: 24136 - protein, 402 aa, Neisseria meningitidis; identical to SEQ ID NO: 14156

SEQ ID NO: 24137 - DNA, 1215 bp, Photorhabdus luminescens; identical to SEQ ID NO: 14157
  CDS (1)..(1215): transl_table=11

SEQ ID NO: 24138 - protein, 404 aa, Photorhabdus luminescens; identical to SEQ ID NO: 14158

SEQ ID NO: 24139 - DNA, 1218 bp, Photobacterium profundum; identical to SEQ ID NO: 14159
  CDS (1)..(1218): transl_table=11

SEQ ID NO: 24140 - protein, 405 aa, Photobacterium profundum; identical to SEQ ID NO: 14160

SEQ ID NO: 24141 - DNA, 1170 bp, Ralstonia solanacearum; identical to SEQ ID NO: 14161
  CDS (1)..(1170)

SEQ ID NO: 24142 - protein, 389 aa, Ralstonia solanacearum; identical to SEQ ID NO: 14162

SEQ ID NO: 24143 - DNA, 1305 bp, Rhizobium loti; identical to SEQ ID NO: 14163
  CDS (1)..(1305): transl_table=11

SEQ ID NO: 24144 - protein, 434 aa, Rhizobium loti; identical to SEQ ID NO: 14164

SEQ ID NO: 24145 - DNA, 1305 bp, Rhizobium meliloti; identical to SEQ ID NO: 14165
  CDS (1)..(1305): transl_table=11

SEQ ID NO: 24146 - protein, 434 aa, Rhizobium meliloti; identical to SEQ ID NO: 14166

SEQ ID NO: 24147 - DNA, 1203 bp, Salmonella choleraesuis; identical to SEQ ID NO: 14167
  CDS (1)..(1203)

SEQ ID NO: 24148 - protein, 400 aa, Salmonella choleraesuis; identical to SEQ ID NO: 14168

SEQ ID NO: 24149 - DNA, 1203 bp, Salmonella paratyphi; identical to SEQ ID NO: 14169
  CDS (1)..(1203): transl_table=11

SEQ ID NO: 24150 - protein, 400 aa, Salmonella paratyphi; identical to SEQ ID NO: 14170

SEQ ID NO: 24151 - DNA, 1308 bp, Vibrio cholerae; identical to SEQ ID NO: 14171
  CDS (1)..(1308): transl_table=11

SEQ ID NO: 24152 - protein, 435 aa, Vibrio cholerae; identical to SEQ ID NO: 14172

SEQ ID NO: 24153 - DNA, 1311 bp, Vibrio parahaemolyticus; identical to SEQ ID NO: 14173
  CDS (1)..(1311): transl_table=11

SEQ ID NO: 24154 - protein, 436 aa, Vibrio parahaemolyticus; identical to SEQ ID NO: 14174

SEQ ID NO: 24155 - DNA, 1314 bp, Vibrio vulnificus; identical to SEQ ID NO: 14175
  CDS (1)..(1314): transl_table=11

SEQ ID NO: 24156 - protein, 437 aa, Vibrio vulnificus; identical to SEQ ID NO: 14176

SEQ ID NO: 24157 - DNA, 1314 bp, Vibrio vulnificus; identical to SEQ ID NO: 14177
  CDS (1)..(1314): transl_table=11

SEQ ID NO: 24158 - protein, 437 aa, Vibrio vulnificus; identical to SEQ ID NO: 14178

SEQ ID NO: 24159 - DNA, 1179 bp, Xanthomonas axonopodis; identical to SEQ ID NO: 14179
  CDS (1)..(1179): transl_table=11

SEQ ID NO: 24160 - protein, 392 aa, Xanthomonas axonopodis; identical to SEQ ID NO: 14180

SEQ ID NO: 24161 - DNA, 1197 bp, Xanthomonas campestris; identical to SEQ ID NO: 14181
  CDS (1)..(1197): transl_table=11

SEQ ID NO: 24162 - protein, 398 aa, Xanthomonas campestris; identical to SEQ ID NO: 14182

SEQ ID NO: 24163 - DNA, 1185 bp, Xylella fastidiosa; identical to SEQ ID NO: 14183
  CDS (1)..(1185): transl_table=11

SEQ ID NO: 24164 - protein, 394 aa, Xylella fastidiosa; identical to SEQ ID NO: 14184

SEQ ID NO: 24165 - DNA, 1185 bp, Xylella fastidiosa; identical to SEQ ID NO: 14185
  CDS (1)..(1185): transl_table=11

SEQ ID NO: 24166 - protein, 394 aa, Xylella fastidiosa; identical to SEQ ID NO: 14186

SEQ ID NO: 24167 - DNA, 24 bp, Artificial sequence
  Primer sequence
atgacacaattcgcttctcctgtt

SEQ ID NO: 24168 - DNA, 26 bp, Artificial sequence
  Primer sequence
ttaactggcttttttaatatgcggaa

SEQ ID NO: 24169 - protein, 581 aa, Artificial sequence; identical to SEQ ID NO: 14189
  Consensus
  Variant (3)..(3): Xaa in position 3 is any amino acid
  Variant (20)..(22): Xaa in position 20 to 22 is any amino acid
  Variant (23)..(24): Xaa in position 23 to 24 is any or no amino acid
  Variant (27)..(29): Xaa in position 27 to 29 is any amino acid
  Variant (31)..(31): Xaa in position 31 is any amino acid
  Variant (33)..(33): Xaa in position 33 is any amino acid
  Variant (35)..(36): Xaa in position 35 to 36 is any amino acid
  Variant (38)..(42): Xaa in position 38 to 42 is any amino acid
  Variant (43)..(53): Xaa in position 43 to 53 is any or no amino acid
  Variant (56)..(57): Xaa in position 56 to 57 is any amino acid
  Variant (60)..(60): Xaa in position 60 is any amino acid
  Variant (62)..(63): Xaa in position 62 to 63 is any amino acid
  Variant (68)..(68): Xaa in position 68 is any amino acid
  Variant (72)..(72): Xaa in position 72 is any amino acid
  Variant (75)..(76): Xaa in position 75 to 76 is any amino acid
  Variant (78)..(78): Xaa in position 78 is any amino acid
  Variant (80)..(88): Xaa in position 80 to 88 is any or no amino acid
  Variant (95)..(96): Xaa in position 95 to 96 is any amino acid
  Variant (100)..(103): Xaa in position 100 to 103 is any amino acid
  Variant (105)..(105): Xaa in position 105 is any amino acid
  Variant (107)..(109): Xaa in position 107 to 109 is any amino acid
  Variant (110)..(126): Xaa in position 110 to 126 is any or no amino acid
  Variant (128)..(128): Xaa in position 128 is any or no amino acid
  Variant (130)..(130): Xaa in position 130 is any or no amino acid
  Variant (132)..(132): Xaa in position 132 is any or no amino acid
  Variant (134)..(134): Xaa in position 134 is any or no amino acid
  Variant (136)..(137): Xaa in position 136 to 137 is any amino acid
  Variant (138)..(138): Xaa in position 138 is any or no amino acid
  Variant (153)..(154): Xaa in position 153 to 154 is any amino acid
  Variant (156)..(156): Xaa in position 156 is any amino acid
  Variant (158)..(161): Xaa in position 158 to 161 is any amino acid
  Variant (162)..(162): Xaa in position 162 is any or no amino acid
  Variant (164)..(172): Xaa in position 164 to 172 is any amino acid
  Variant (174)..(176): Xaa in position 174 to 176 is any amino acid
  Variant (178)..(183): Xaa in position 178 to 183 is any amino acid
  Variant (184)..(198): Xaa in position 184 to 198 is any or no amino acid
  Variant (208)..(208): Xaa in position 208 is any amino acid
  Variant (210)..(212): Xaa in position 210 to 212 is any amino acid
  Variant (214)..(215): Xaa in position 214 to 215 is any amino acid
  Variant (218)..(218): Xaa in position 218 is any amino acid
  Variant (221)..(222): Xaa in position 221 to 222 is any amino acid
  Variant (224)..(224): Xaa in position 224 is any amino acid
  Variant (225)..(236): Xaa in position 225 to 236 is any or no amino acid
  Variant (238)..(238): Xaa in position 238 is any or no amino acid
  Variant (244)..(245): Xaa in position 244 to 245 is any amino acid
  Variant (250)..(250): Xaa in position 250 is any amino acid
  Variant (252)..(252): Xaa in position 252 is any amino acid
  Variant (263)..(263): Xaa in position 263 is any amino acid
  Variant (265)..(266): Xaa in position 265 to 266 is any amino acid
  Variant (269)..(270): Xaa in position 269 to 270 is any amino acid
  Variant (271)..(288): Xaa in position 271 to 288 is any or no amino acid
  Variant (290)..(291): Xaa in position 290 to 291 is any amino acid
  Variant (294)..(295): Xaa in position 294 to 295 is any amino acid
  Variant (298)..(299): Xaa in position 298 to 299 is any amino acid
  Variant (302)..(303): Xaa in position 302 to 303 is any amino acid
  Variant (305)..(305): Xaa in position 305 is any amino acid
  Variant (306)..(316): Xaa in position 306 to 316 is any or no amino acid
  Variant (318)..(318): Xaa in position 318 is any amino acid
  Variant (326)..(329): Xaa in position 326 to 329 is any amino acid
  Variant (334)..(334): Xaa in position 334 is any amino acid
  Variant (337)..(337): Xaa in position 337 is any amino acid
  Variant (338)..(391): Xaa in position 338 to 391 is any or no amino acid
  Variant (394)..(394): Xaa in position 394 is any amino acid
  Variant (397)..(397): Xaa in position 397 is any amino acid
  Variant (401)..(401): Xaa in position 401 is any amino acid
  Variant (407)..(408): Xaa in position 407 to 408 is any amino acid
  Variant (416)..(416): Xaa in position 416 is any amino acid
  Variant (418)..(418): Xaa in position 418 is any amino acid
  Variant (419)..(427): Xaa in position 419 to 427 is any or no amino acid
  Variant (430)..(430): Xaa in position 430 is any amino acid
  Variant (433)..(442): Xaa in position 433 to 442 is any or no amino acid
  Variant (453)..(453): Xaa in position 453 is any amino acid
  Variant (455)..(455): Xaa in position 455 is any amino acid
  Variant (457)..(457): Xaa in position 457 is any amino acid
  Variant (459)..(459): Xaa in position 459 is any amino acid
  Variant (461)..(466): Xaa in position 461 to 466 is any amino acid
  Variant (468)..(474): Xaa in position 468 to 474 is any or no amino acid
  Variant (484)..(484): Xaa in position 484 is any amino acid
  Variant (489)..(491): Xaa in position 489 to 491 is any amino acid
  Variant (492)..(531): Xaa in position 492 to 531 is any or no amino acid
  Variant (541)..(542): Xaa in position 541 to 542 is any amino acid
  Variant (545)..(545): Xaa in position 545 is any amino acid
  Variant (553)..(553): Xaa in position 553 is any amino acid
  Variant (557)..(557): Xaa in position 557 is any amino acid
  Variant (559)..(560): Xaa in position 559 to 560 is any amino acid
  Variant (561)..(575): Xaa in position 561 to 575 is any or no amino acid
  Variant (578)..(579): Xaa in position 578 to 579 is any amino acid

SEQ ID NO: 24170 - protein, 10 aa, Artificial sequence
  Consensus
  Variant (2)..(2): Xaa in position 2 is any amino acid
  Variant (3)..(3): Xaa in position 3 is Asn or Thr
  Variant (5)..(5): Xaa in position 5 is any amino acid
  Variant (7)..(7): Xaa in position 7 is any amino acid
  Variant (8)..(8): Xaa in position 8 is Phe, Ile, Leu or Val
  Variant (9)..(9): Xaa in position 9 is any amino acid
LXXDXYXXXM

SEQ ID NO: 24171 - protein, 25 aa, Artificial sequence
  Consensus
  Variant (2)..(4): Xaa in position 2 to 4 is any or no amino acid
  Variant (8)..(10): Xaa in position 8 to 10 is any amino acid
  Variant (11)..(11): Xaa in position 11 is Ala or Gly
  Variant (12)..(14): Xaa in position 12 to 14 is any amino acid
  Variant (15)..(15): Xaa in position 15 is Ala, Asp, Glu, Gly, Asn, Gln or Ser
  Variant (16)..(19): Xaa in position 16 to 19 is any amino acid
  Variant (22)..(22): Xaa in position 22 is any amino acid
  Variant (25)..(25): Xaa in position 25 is Ala, Glu, Gln or Ser
GXXXTSNXXXXXXXXXXXXGTXAHX

SEQ ID NO: 24172 - DNA, 1758 bp, Escherichia coli K12; identical to SEQ ID NO: 20139
  CDS (1)..(1758): transl_table=11

SEQ ID NO: 24173 - protein, 585 aa, Escherichia coli K12; identical to SEQ ID NO: 20140

SEQ ID NO: 24174 - DNA, 1761 bp, Pseudomonas aeruginosa PAO1; identical to SEQ ID NO: 20141
  CDS (1)..(1761): transl_table=11

SEQ ID NO: 24175 - protein, 586 aa, Pseudomonas aeruginosa PAO1; identical to SEQ ID NO: 20142

SEQ ID NO: 24176 - DNA, 1764 bp, Yersinia pestis CO92; identical to SEQ ID NO: 20143
  CDS (1)..(1764): transl_table=11

SEQ ID NO: 24177 - protein, 587 aa, Yersinia pestis CO92; identical to SEQ ID NO: 20144

SEQ ID NO: 24178 - DNA, 1701 bp, Fusobacterium nucleatum subsp. nucleatum ATCC 25586; identical to SEQ ID NO: 20145
  CDS (1)..(1701): transl_table=11

SEQ ID NO: 24179 - protein, 566 aa, Fusobacterium nucleatum subsp. nucleatum ATCC 25586; identical to SEQ ID NO: 20146

SEQ ID NO: 24180 - DNA, 1761 bp, Xanthomonas axonopodis pv. citri str. 306; identical to SEQ ID NO: 20147
  CDS (1)..(1761): transl_table=11

SEQ ID NO: 24181 - protein, 586 aa, Xanthomonas axonopodis pv. citri str. 306; identical to SEQ ID NO: 20148

SEQ ID NO: 24182 - DNA, 1764 bp, Yersinia pestis KIM; identical to SEQ ID NO: 20149
  CDS (1)..(1764): transl_table=11

SEQ ID NO: 24183 - protein, 587 aa, Yersinia pestis KIM; identical to SEQ ID NO: 20150

SEQ ID NO: 24184 - DNA, 1758 bp, Escherichia coli CFT073; identical to SEQ ID NO: 20151
  CDS (1)..(1758): transl_table=11

SEQ ID NO: 24185 - protein, 585 aa, Escherichia coli CFT073; identical to SEQ ID NO: 20152

SEQ ID NO: 24186 - DNA, 1758 bp, Pseudomonas syringae pv. tomato str. DC3000; identical to SEQ ID NO: 20153
  CDS (1)..(1758): transl_table=11

SEQ ID NO: 24187 - protein, 585 aa, Pseudomonas syringae pv. tomato str. DC3000; identical to SEQ ID NO: 20154

SEQ ID NO: 24188 - DNA, 1764 bp, Yersinia pseudotuberculosis IP 32953; identical to SEQ ID NO: 20155
  CDS (1)..(1764): transl_table=11

SEQ ID NO: 24189 - protein, 587 aa, Yersinia pseudotuberculosis IP 32953; identical to SEQ ID NO: 20156

SEQ ID NO: 24190 - DNA, 1764 bp, Xanthomonas campestris pv. campestris str. 8004; identical to SEQ ID NO: 20157
  CDS (1)..(1764): transl_table=11

SEQ ID NO: 24191 - protein, 587 aa, Xanthomonas campestris pv. campestris str. 8004; identical to SEQ ID NO: 20158

SEQ ID NO: 24192 - DNA, 1758 bp, Pseudomonas fluorescens Pf-5; identical to SEQ ID NO: 20159
  CDS (1)..(1758): transl_table=11

SEQ ID NO: 24193 - protein, 585 aa, Pseudomonas fluorescens Pf-5; identical to SEQ ID NO: 20160

SEQ ID NO: 24194 - DNA, 1776 bp, Ralstonia eutropha JMP134; identical to SEQ ID NO: 20161
  CDS (1)..(1776): transl_table=11

SEQ ID NO: 24195 - protein, 591 aa, Ralstonia eutropha JMP134; identical to SEQ ID NO: 20162

SEQ ID NO: 24196 - DNA, 1713 bp, Fusobacterium nucleatum subsp. vincentii ATCC 49256; identical to SEQ ID NO: 20163
  CDS (1)..(1713): transl_table=11

SEQ ID NO: 24197 - protein, 570 aa, Fusobacterium nucleatum subsp. vincentii ATCC 49256; identical to SEQ ID NO: 20164

SEQ ID NO: 24198 - DNA, 1791 bp, Ralstonia eutropha JMP134; identical to SEQ ID NO: 20165
  CDS (1)..(1791)

SEQ ID NO: 24199 - protein, 596 aa, Ralstonia eutropha JMP134; identical to SEQ ID NO: 20166

SEQ ID NO: 24200 - DNA, 1761 bp, Pseudomonas aeruginosa UCBPP-PA14; identical to SEQ ID NO: 20167
  CDS (1)..(1761)

SEQ ID NO: 24201 - protein, 586 aa, Pseudomonas aeruginosa UCBPP-PA14; identical to SEQ ID NO: 20168

SEQ ID NO: 24202 - DNA, 1758 bp, Burkholderia cepacia R18194; identical to SEQ ID NO: 20169
  CDS (1)..(1758)

SEQ ID NO: 24203 - protein, 585 aa, Burkholderia cepacia R18194; identical to SEQ ID NO: 20170

SEQ ID NO: 24204 - DNA, 1770 bp, Burkholderia vietnamiensis G4; identical to SEQ ID NO: 20171
  CDS (1)..(1770): transl_table=11

SEQ ID NO: 24205 - protein, 589 aa, Burkholderia vietnamiensis G4; identical to SEQ ID NO: 20172

SEQ ID NO: 24206 - DNA, 1770 bp, Burkholderia cenocepacia AU 1054; identical to SEQ ID NO: 20173
  CDS (1)..(1770): transl_table=11

SEQ ID NO: 24207 - protein, 589 aa, Burkholderia cenocepacia AU 1054; identical to SEQ ID NO: 20174

SEQ ID NO: 24208 - DNA, 1800 bp, Burkholderia ambifaria AMMD; identical to SEQ ID NO: 20175
  CDS (1)..(1800): transl_table=11

SEQ ID NO: 24209 - protein, 599 aa, Burkholderia ambifaria AMMD; identical to SEQ ID NO: 20176

SEQ ID NO: 24210 - DNA, 23 bp, Artificial sequence
  Primer sequence
atggaaaattcacgcatccctgg

SEQ ID NO: 24211 - DNA, 24 bp, Artificial sequence
  Primer sequence
ttagttatcacgacgcaccgccat

SEQ ID NO: 24212 - protein, 589 aa, Artificial sequence; identical to SEQ ID NO: 20179
  Consensus
  Variant (2)..(4): Xaa in position 2 to 4 is any amino acid
  Variant (6)..(7): Xaa in position 6 to 7 is any amino acid
  Variant (9)..(11): Xaa in position 9 to 11 is any amino acid
  Variant (13)..(15): Xaa in position 13 to 15 is any amino acid
  Variant (22)..(29): Xaa in position 22 to 29 is any amino acid
  Variant (30)..(35): Xaa in position 30 to 35 is any or no amino acid
  Variant (39)..(39): Xaa in position 39 is any amino acid
  Variant (50)..(50): Xaa in position 50 is any amino acid
  Variant (53)..(53): Xaa in position 53 is any amino acid
  Variant (57)..(57): Xaa in position 57 is any amino acid
  Variant (60)..(62): Xaa in position 60 to 62 is any amino acid
  Variant (73)..(73): Xaa in position 73 is any amino acid
  Variant (75)..(75): Xaa in position 75 is any amino acid
  Variant (77)..(77): Xaa in position 77 is any amino acid
  Variant (80)..(80): Xaa in position 80 is any or no amino acid
  Variant (83)..(87): Xaa in position 83 to 87 is any amino acid
  Variant (89)..(89): Xaa in position 89 is any amino acid
  Variant (92)..(93): Xaa in position 92 to 93 is any amino acid
  Variant (96)..(97): Xaa in position 96 to 97 is any amino acid
  Variant (99)..(103): Xaa in position 99 to 103 is any amino acid
  Variant (105)..(106): Xaa in position 105 to 106 is any amino acid
  Variant (108)..(108): Xaa in position 108 is any amino acid
  Variant (110)..(110): Xaa in position 110 is any amino acid
  Variant (121)..(121): Xaa in position 121 is any amino acid
  Variant (125)..(125): Xaa in position 125 is any amino acid
  Variant (131)..(131): Xaa in position 131 is any amino acid
  Variant (134)..(134): Xaa in position 134 is any amino acid
  Variant (143)..(143): Xaa in position 143 is any amino acid
  Variant (153)..(153): Xaa in position 153 is any amino acid
  Variant (156)..(156): Xaa in position 156 is any amino acid
  Variant (159)..(161): Xaa in position 159 to 161 is any amino acid
  Variant (164)..(164): Xaa in position 164 is any amino acid
  Variant (173)..(173): Xaa in position 173 is any amino acid
  Variant (180)..(181): Xaa in position 180 to 181 is any amino acid
  Variant (184)..(184): Xaa in position 184 is any amino acid
  Variant (187)..(188): Xaa in position 187 to 188 is any amino acid
  Variant (190)..(190): Xaa in position 190 is any amino acid
  Variant (193)..(193): Xaa in position 193 is any amino acid
  Variant (195)..(195): Xaa in position 195 is any amino acid
  Variant (199)..(199): Xaa in position 199 is any amino acid
  Variant (203)..(203): Xaa in position 203 is any amino acid
  Variant (206)..(207): Xaa in position 206 to 207 is any amino acid
  Variant (209)..(209): Xaa in position 209 is any amino acid
  Variant (213)..(213): Xaa in position 213 is any amino acid
  Variant (216)..(216): Xaa in position 216 is any amino acid
  Variant (219)..(219): Xaa in position 219 is any amino acid
  Variant (229)..(229): Xaa in position 229 is any amino acid
  Variant (235)..(236): Xaa in position 235 to 236 is any amino acid
  Variant (239)..(240): Xaa in position 239 to 240 is any amino acid
  Variant (243)..(244): Xaa in position 243 to 244 is any amino acid
  Variant (246)..(246): Xaa in position 246 is any amino acid
  Variant (248)..(249): Xaa in position 248 to 249 is any amino acid
  Variant (252)..(254): Xaa in position 252 to 254 is any amino acid
  Variant (256)..(256): Xaa in position 256 is any amino acid
  Variant (269)..(270): Xaa in position 269 to 270 is any amino acid
  Variant (272)..(277): Xaa in position 272 to 277 is any amino acid
  Variant (280)..(282): Xaa in position 280 to 282 is any amino acid
  Variant (284)..(295): Xaa in position 284 to 295 is any amino acid
  Variant (298)..(307): Xaa in position 298 to 307 is any amino acid
  Variant (309)..(310): Xaa in position 309 to 310 is any amino acid
  Variant (312)..(317): Xaa in position 312 to 317 is any amino acid
  Variant (318)..(321): Xaa in position 318 to 321 is any or no amino acid
  Variant (323)..(328): Xaa in position 323 to 328 is any amino acid
  Variant (331)..(335): Xaa in position 331 to 335 is any amino acid
  Variant (337)..(337): Xaa in position 337 is any amino acid
  Variant (340)..(340): Xaa in position 340 is any amino acid
  Variant (343)..(345): Xaa in position 343 to 345 is any amino acid
  Variant (360)..(362): Xaa in position 360 to 362 is any amino acid
  Variant (364)..(366): Xaa in position 364 to 366 is any amino acid
  Variant (369)..(370): Xaa in position 369 to 370 is any amino acid
  Variant (373)..(374): Xaa in position 373 to 374 is any amino acid
  Variant (377)..(377): Xaa in position 377 is any amino acid
  Variant (379)..(379): Xaa in position 379 is any amino acid
  Variant (382)..(382): Xaa in position 382 is any amino acid
  Variant (386)..(386): Xaa in position 386 is any amino acid
  Variant (389)..(390): Xaa in position 389 to 390 is any amino acid
  Variant (392)..(393): Xaa in position 392 to 393 is any amino acid
  Variant (396)..(397): Xaa in position 396 to 397 is any amino acid
  Variant (400)..(401): Xaa in position 400 to 401 is any amino acid
  Variant (403)..(406): Xaa in position 403 to 406 is any amino acid
  Variant (407)..(408): Xaa in position 407 to 408 is any or no amino acid
  Variant (427)..(433): Xaa in position 427 to 433 is any amino acid
  Variant (434)..(440): Xaa in position 434 to 440 is any or no amino acid
  Variant (448)..(449): Xaa in position 448 to 449 is any amino acid
  Variant (452)..(453): Xaa in position 452 to 453 is any amino acid
  Variant (455)..(456): Xaa in position 455 to 456 is any amino acid
  Variant (459)..(461): Xaa in position 459 to 461 is any amino acid
  Variant (463)..(465): Xaa in position 463 to 465 is any amino acid
  Variant (468)..(468): Xaa in position 468 is any or no amino acid
  Variant (470)..(471): Xaa in position 470 to 471 is any amino acid
  Variant (473)..(473): Xaa in position 473 is any amino acid
  Variant (477)..(479): Xaa in position 477 to 479 is any amino acid
  Variant (482)..(482): Xaa in position 482 is any amino acid
  Variant (484)..(484): Xaa in position 484 is any amino acid
  Variant (486)..(486): Xaa in position 486 is any amino acid
  Variant (500)..(500): Xaa in position 500 is any amino acid
  Variant (503)..(504): Xaa in position 503 to 504 is any amino acid
  Variant (506)..(507): Xaa in position 506 to 507 is any amino acid
  Variant (510)..(510): Xaa in position 510 is any amino acid
  Variant (514)..(514): Xaa in position 514 is any amino acid
  Variant (517)..(518): Xaa in position 517 to 518 is any amino acid
  Variant (521)..(521): Xaa in position 521 is any amino acid
  Variant (534)..(535): Xaa in position 534 to 535 is any amino acid
  Variant (538)..(539): Xaa in position 538 to 539 is any amino acid
  Variant (541)..(542): Xaa in position 541 to 542 is any amino acid
  Variant (545)..(548): Xaa in position 545 to 548 is any amino acid
  Variant (549)..(549): Xaa in position 549 is any or no amino acid
  Variant (554)..(554): Xaa in position 554 is any amino acid
  Variant (558)..(558): Xaa in position 558 is any amino acid
  Variant (562)..(562): Xaa in position 562 is any amino acid
  Variant (565)..(566): Xaa in position 565 to 566 is any amino acid
  Variant (570)..(570): Xaa in position 570 is any amino acid
  Variant (572)..(573): Xaa in position 572 to 573 is any amino acid
  Variant (575)..(575): Xaa in position 575 is any amino acid
  Variant (578)..(579): Xaa in position 578 to 579 is any amino acid
  Variant (588)..(588): Xaa in position 588 is any amino acid

SEQ ID NO: 24213 - protein, 9 aa, Artificial sequence
  Consensus
  Variant (8)..(8): Xaa in position 8 is Ala or Gly
HRGHEHSXR

SEQ ID NO: 24214 - protein, 96 aa, Artificial sequence; identical to SEQ ID NO: 20181
  Consensus
  Variant (5)..(5): Xaa in position 5 is any amino acid
  Variant (6)..(6): Xaa in position 6 is Ile, Leu or Val
  Variant (8)..(8): Xaa in position 8 is Ala, Cys, Gly or Ser
  Variant (9)..(9): Xaa in position 9 is Leu or Met
  Variant (11)..(11): Xaa in position 11 is Leu or Val
  Variant (17)..(17): Xaa in position 17 is any amino acid
  Variant (18)..(18): Xaa in position 18 is Ile or Val
  Variant (24)..(24): Xaa in position 24 is Phe or Leu
  Variant (27)..(27): Xaa in position 27 is any amino acid
  Variant (30)..(30): Xaa in position 30 is any amino acid
  Variant (32)..(35): Xaa in position 32 to 35 is any amino acid
  Variant (36)..(36): Xaa in position 36 is Lys or Arg
  Variant (38)..(38): Xaa in position 38 is any amino acid
  Variant (40)..(40): Xaa in position 40 is Phe or Tyr
  Variant (41)..(41): Xaa in position 41 is Ile or Val
  Variant (42)..(42): Xaa in position 42 is Asn or Thr
  Variant (47)..(47): Xaa in position 47 is Ala, Gly or Pro
  Variant (48)..(48): Xaa in position 48 is any amino acid
  Variant (49)..(49): Xaa in position 49 is Phe, Trp or Tyr
  Variant (51)..(51): Xaa in position 51 is Ser or Thr
  Variant (54)..(54): Xaa in position 54 is any amino acid
  Variant (55)..(55): Xaa in position 55 is Ala, Glu or Gln
  Variant (57)..(57): Xaa in position 57 is Ile or Val
  Variant (58)..(58): Xaa in position 58 is any amino acid
  Variant (60)..(60): Xaa in position 60 is Phe or Tyr
  Variant (61)..(61): Xaa in position 61 is any amino acid
  Variant (62)..(62): Xaa in position 62 is Ala, Asn, Gln, Ser or Thr
  Variant (64)..(64): Xaa in position 64 is any amino acid
  Variant (66)..(66): Xaa in position 66 is Ile or Val
  Variant (67)..(67): Xaa in position 67 is Ala or Thr
  Variant (68)..(68): Xaa in position 68 is Lys or Arg
  Variant (69)..(69): Xaa in position 69 is any amino acid
  Variant (71)..(71): Xaa in position 71 is Ala or Ser
  Variant (73)..(73): Xaa in position 73 is Asn or Arg
  Variant (74)..(74): Xaa in position 74 is Ile, Met or Val
  Variant (77)..(77): Xaa in position 77 is Asp or Gly
  Variant (79)..(79): Xaa in position 79 is His or Tyr
  Variant (80)..(80): Xaa in position 80 is any amino acid
  Variant (81)..(81): Xaa in position 81 is Ala or Thr
  Variant (82)..(82): Xaa in position 82 is Ala, Gly or Ser
  Variant (83)..(83): Xaa in position 83 is any amino acid
  Variant (85)..(85): Xaa in position 85 is Ile or Val
  Variant (87)..(87): Xaa in position 87 is Ala, Asp or Ser
  Variant (89)..(89): Xaa in position 89 is Ala or Ser
  Variant (90)..(90): Xaa in position 90 is Ala, Gln or Thr
  Variant (93)..(93): Xaa in position 93 is Gln or Thr
  Variant (94)..(94): Xaa in position 94 is Ile, Leu or Val

SEQ ID NO: 24215 - protein, 53 aa, Artificial sequence; identical to SEQ ID NO: 20182
  Consensus
  Variant (2)..(2): Xaa in position 2 is any amino acid
  Variant (4)..(4): Xaa in position 4 is any amino acid
  Variant (5)..(5): Xaa in position 5 is any or no amino acid
  Variant (7)..(7): Xaa in position 7 is any or no amino acid
  Variant (9)..(9): Xaa in position 9 is any amino acid
  Variant (10)..(10): Xaa in position 10 is Asp, Glu, Gln, Arg or Ser
  Variant (11)..(11): Xaa in position 11 is any amino acid
  Variant (18)..(18): Xaa in position 18 is Ser or Thr
  Variant (22)..(22): Xaa in position 22 is Ile or Val
  Variant (24)..(24): Xaa in position 24 is Gln or Arg
  Variant (26)..(26): Xaa in position 26 is any amino acid
  Variant (27)..(27): Xaa in position 27 is Ala or Pro
  Variant (28)..(28): Xaa in position 28 is any amino acid
  Variant (30)..(31): Xaa in position 30 to 31 is any amino acid
  Variant (32)..(32): Xaa in position 32 is Ala, Gly, Ile or Pro
  Variant (33)..(33): Xaa in position 33 is Phe, Ile, Leu or Val
  Variant (35)..(36): Xaa in position 35 to 36 is any amino acid
  Variant (37)..(37): Xaa in position 37 is Ile or Val
  Variant (39)..(39): Xaa in position 39 is His, Lys or Arg
  Variant (40)..(40): Xaa in position 40 is any amino acid
  Variant (43)..(43): Xaa in position 43 is Asp, Asn or Gln
  Variant (44)..(44): Xaa in position 44 is Ala or Ser
  Variant (45)..(45): Xaa in position 45 is Ile, Pro or Val
  Variant (48)..(48): Xaa in position 48 is any amino acid
  Variant (52)..(52): Xaa in position 52 is any amino acid

SEQ ID NO: 24216 - protein, 93 aa, Artificial sequence; identical to SEQ ID NO: 20183
  Consensus
  Variant (7)..(7): Xaa in position 7 is Ala, Gly, Pro or Ser
  Variant (8)..(8): Xaa in position 8 is Asp, Glu or Ser
  Variant (10)..(11): Xaa in position 10 to 11 is any amino acid
  Variant (12)..(12): Xaa in position 12 is Ile or Val
  Variant (13)..(14): Xaa in position 13 to 14 is any amino acid
  Variant (17)..(17): Xaa in position 17 is any amino acid
  Variant (20)..(20): Xaa in position 20 is Ala or Gly
  Variant (21)..(21): Xaa in position 21 is Ala, Glu, Asn, Gln or Ser
  Variant (23)..(23): Xaa in position 23 is Ile, Leu or Val
  Variant (24)..(24): Xaa in position 24 is any amino acid
  Variant (25)..(25): Xaa in position 25 is Glu or Pro
  Variant (27)..(27): Xaa in position 27 is Ala or Gly
  Variant (28)..(28): Xaa in position 28 is any amino acid
  Variant (30)..(30): Xaa in position 30 is Ile, Leu or Val
  Variant (41)..(41): Xaa in position 41 is Glu or Lys
  Variant (42)..(42): Xaa in position 42 is any amino acid
  Variant (45)..(45): Xaa in position 45 is any amino acid
  Variant (46)..(46): Xaa in position 46 is Ala, Thr or Val
  Variant (48)..(48): Xaa in position 48 is Asn or Thr
  Variant (49)..(49): Xaa in position 49 is Asn or Ser
  Variant (51)..(51): Xaa in position 51 is any amino acid
  Variant (52)..(52): Xaa in position 52 is Ala, Asp, Glu, Gly, Asn or Gln
  Variant (53)..(53): Xaa in position 53 is Asp, Glu or Gly
  Variant (54)..(54): Xaa in position 54 is any amino acid
  Variant (55)..(55): Xaa in position 55 is Ala, Pro or Thr
  Variant (57)..(57): Xaa in position 57 is Met or Val
  Variant (60)..(60): Xaa in position 60 is any amino acid
  Variant (62)..(62): Xaa in position 62 is Ser or Thr
  Variant (64)..(64): Xaa in position 64 is any amino acid
  Variant (68)..(68): Xaa in position 68 is Glu, Gly, Gln, Ser or Thr
  Variant (71)..(72): Xaa in position 71 to 72 is any amino acid
  Variant (76)..(76): Xaa in position 76 is Asp, Glu or Arg
  Variant (78)..(81): Xaa in position 78 to 81 is any amino acid
  Variant (82)..(82): Xaa in position 82 is Ile or Val
  Variant (84)..(85): Xaa in position 84 to 85 is any amino acid
  Variant (89)..(89): Xaa in position 89 is Ser or Thr
  Variant (92)..(92): Xaa in position 92 is Leu or Met

SEQ ID NO: 24217 - DNA, 291 bp, Escherichia coli K12; identical to SEQ ID NO: 18608
  CDS (1)..(291): transl_table=11

SEQ ID NO: 24218 - protein, 96 aa, Escherichia coli K12; identical to SEQ ID NO: 18609

SEQ ID NO: 24219 - DNA, 216 bp, Bacteriophage 933W; identical to SEQ ID NO: 18610
  CDS (1)..(216): transl_table=11

SEQ ID NO: 24220 - protein, 71 aa, Bacteriophage 933W; identical to SEQ ID NO: 18611

SEQ ID NO: 24221 - DNA, 291 bp, Bacteriophage VT2-Sa; identical to SEQ ID NO: 18612
  CDS (1)..(291): transl_table=11

SEQ ID NO: 24222 - protein, 96 aa, Bacteriophage VT2-Sa; identical to SEQ ID NO: 18613

SEQ ID NO: 24223 - DNA, 315 bp, Escherichia coli O157:H7 EDL933; identical to SEQ ID NO: 18614
  CDS (1)..(315): transl_table=11

SEQ ID NO: 24224 - protein, 104 aa, Escherichia coli O157:H7 EDL933; identical to SEQ ID NO: 18615

SEQ ID NO: 24225 - DNA, 315 bp, Escherichia coli O157:H7 EDL933; identical to SEQ ID NO: 18616
  CDS (1)..(315): transl_table=11

SEQ ID NO: 24226 - protein, 104 aa, Escherichia coli O157:H7 EDL933; identical to SEQ ID NO: 18617

SEQ ID NO: 24227 - DNA, 273 bp, Escherichia coli O157:H7 EDL933; identical to SEQ ID NO: 18618
  CDS (1)..(273): transl_table=11

SEQ ID NO: 24228 - protein, 90 aa, Escherichia coli O157:H7 EDL933; identical to SEQ ID NO: 18619

SEQ ID NO: 24229 - DNA, 216 bp, Escherichia coli O157:H7; identical to SEQ ID NO: 18620
  CDS (1)..(216): transl_table=11

SEQ ID NO: 24230 - protein, 71 aa, Escherichia coli O157:H7; identical to SEQ ID NO: 18621

SEQ ID NO: 24231 - DNA, 207 bp, Escherichia coli O157:H7; identical to SEQ ID NO: 18622
  CDS (1)..(207): transl_table=11

SEQ ID NO: 24232 - protein, 68 aa, Escherichia coli O157:H7; identical to SEQ ID NO: 18623

SEQ ID NO: 24233 - DNA, 216 bp, Escherichia coli O157:H7; identical to SEQ ID NO: 18624
  CDS (1)..(216): transl_table=11

SEQ ID NO: 24234 - protein, 71 aa, Escherichia coli O157:H7; identical to SEQ ID NO: 18625

SEQ ID NO: 24235 - DNA, 216 bp, Escherichia coli O157:H7; identical to SEQ ID NO: 18626
  CDS (1)..(216): transl_table=11

SEQ ID NO: 24236 - protein, 71 aa, Escherichia coli O157:H7; identical to SEQ ID NO: 18627

SEQ ID NO: 24237 - DNA, 216 bp, Escherichia coli O157:H7; identical to SEQ ID NO: 18628
  CDS (1)..(216): transl_table=11

SEQ ID NO: 24238 - protein, 71 aa, Escherichia coli O157:H7; identical to SEQ ID NO: 18629

SEQ ID NO: 24239 - DNA, 207 bp, Escherichia coli O157:H7; identical to SEQ ID NO: 18630
  CDS (1)..(207): transl_table=11

SEQ ID NO: 24240 - protein, 68 aa, Escherichia coli O157:H7; identical to SEQ ID NO: 18631

SEQ ID NO: 24241 - DNA, 207 bp, Escherichia coli O157:H7; identical to SEQ ID NO: 18632
  CDS (1)..(207): transl_table=11

SEQ ID NO: 24242 - protein, 68 aa, Escherichia coli O157:H7; identical to SEQ ID NO: 18633

SEQ ID NO: 24243 - DNA, 216 bp, Shigella flexneri 2a str. 301; identical to SEQ ID NO: 18634
  CDS (1)..(216): transl_table=11

SEQ ID NO: 24244 - protein, 71 aa, Shigella flexneri 2a str. 301; identical to SEQ ID NO: 18635

SEQ ID NO: 24245 - DNA, 216 bp, Shigella flexneri 2a str. 301; identical to SEQ ID NO: 18636
  CDS (1)..(216): transl_table=11

SEQ ID NO: 24246 - protein, 71 aa, Shigella flexneri 2a str. 301; identical to SEQ ID NO: 18637

SEQ ID NO: 24247 - DNA, 321 bp, Escherichia coli CFT073; identical to SEQ ID NO: 18638
  CDS (1)..(321): transl_table=11

SEQ ID NO: 24248 - protein, 106 aa, Escherichia coli CFT073; identical to SEQ ID NO: 18639

SEQ ID NO: 24249 - DNA, 216 bp, Escherichia coli CFT073; identical to SEQ ID NO: 18640
  CDS (1)..(216): transl_table=11

SEQ ID NO: 24250 - protein, 71 aa, Escherichia coli CFT073; identical to SEQ ID NO: 18641

SEQ ID NO: 24251 - DNA, 216 bp, Shigella flexneri 2a str. 2457T; identical to SEQ ID NO: 18642
  CDS (1)..(216): transl_table=11

SEQ ID NO: 24252 - protein, 71 aa, Shigella flexneri 2a str. 2457T; identical to SEQ ID NO: 18643

SEQ ID NO: 24253 - DNA, 180 bp, Shigella flexneri 2a str. 2457T; identical to SEQ ID NO: 18644
  CDS (1)..(180): transl_table=11

SEQ ID NO: 24254 - protein, 59 aa, Shigella flexneri 2a str. 2457T; identical to SEQ ID NO: 18645

SEQ ID NO: 24255 - DNA, 213 bp, Yersinia pseudotuberculosis IP 32953; identical to SEQ ID NO: 18646
  CDS (1)..(213): transl_table=11

SEQ ID NO: 24256 - protein, 70 aa, Yersinia pseudotuberculosis IP 32953; identical to SEQ ID NO: 18647

SEQ ID NO: 24257 - DNA, 216 bp, Shigella sonnei Ss046; identical to SEQ ID NO: 18648
  CDS (1)..(216): transl_table=11

SEQ ID NO: 24258 - protein, 71 aa, Shigella sonnei Ss046; identical to SEQ ID NO: 18649

SEQ ID NO: 24259 - DNA, 216 bp, Shigella sonnei Ss046; identical to SEQ ID NO: 18650
  CDS (1)..(216): transl_table=11

SEQ ID NO: 24260 - protein, 71 aa, Shigella sonnei Ss046; identical to SEQ ID NO: 18651

SEQ ID NO: 24261 - DNA, 207 bp, Bacteriophage H19B; identical to SEQ ID NO: 18652
  CDS (1)..(207): transl_table=11

SEQ ID NO: 24262 - protein, 68 aa, Bacteriophage H19B; identical to SEQ ID NO: 18653

SEQ ID NO: 24263 - DNA, 291 bp, Stx1; identical to SEQ ID NO: 18654
  CDS (1)..(291): transl_table=11

SEQ ID NO: 24264 - protein, 96 aa, Stx1; identical to SEQ ID NO: 18655

SEQ ID NO: 24265 - DNA, 150 bp, Escherichia coli; identical to SEQ ID NO: 18656
  CDS (1)..(150): transl_table=11

SEQ ID NO: 24266 - protein, 49 aa, Escherichia coli; identical to SEQ ID NO: 18657

SEQ ID NO: 24267 - DNA, 216 bp, Escherichia coli; identical to SEQ ID NO: 18658
  CDS (1)..(216): transl_table=11

SEQ ID NO: 24268 - protein, 71 aa, Escherichia coli; identical to SEQ ID NO: 18659

SEQ ID NO: 24269 - DNA, 216 bp, Shigella dysenteriae; identical to SEQ ID NO: 18660
  CDS (1)..(216): transl_table=11

SEQ ID NO: 24270 - protein, 71 aa, Shigella dysenteriae; identical to SEQ ID NO: 18661

SEQ ID NO: 24271 - DNA, 216 bp, Escherichia coli O6; identical to SEQ ID NO: 18662
  CDS (1)..(216): transl_table=11

SEQ ID NO: 24272 - protein, 71 aa, Escherichia coli O6; identical to SEQ ID NO: 18663

SEQ ID NO: 24273 - DNA, 216 bp, Bacteriophage P21; identical to SEQ ID NO: 18664
  CDS (1)..(216): transl_table=11

SEQ ID NO: 24274 - protein, 71 aa, Bacteriophage P21; identical to SEQ ID NO: 18665

SEQ ID NO: 24275 - DNA, 24 bp, Artificial sequence
  Primer sequence
atgctgtcaaaactaccccgtaga

SEQ ID NO: 24276 - DNA, 23 bp, Artificial sequence
  Primer sequence
ttactctcctctcgcagccttac

SEQ ID NO: 24277 - protein, 71 aa, Artificial sequence; identical to SEQ ID NO: 18668
  Consensus
  Variant (2)..(3): Xaa in position 2 to 3 is any amino acid
  Variant (14)..(14): Xaa in position 14 is any amino acid
  Variant (18)..(20): Xaa in position 18 to 20 is any amino acid
  Variant (24)..(24): Xaa in position 24 is any amino acid
  Variant (27)..(27): Xaa in position 27 is any amino acid
  Variant (30)..(30): Xaa in position 30 is any amino acid
  Variant (37)..(37): Xaa in position 37 is any amino acid
  Variant (47)..(47): Xaa in position 47 is any amino acid
  Variant (49)..(49): Xaa in position 49 is any amino acid
  Variant (67)..(67): Xaa in position 67 is any amino acid

SEQ ID NO: 24278 - protein, 10 aa, Artificial sequence
  Consensus
  Variant (2)..(2): Xaa in position 2 is Asp or Glu
  Variant (5)..(5): Xaa in position 5 is Ser or Thr
  Variant (7)..(7): Xaa in position 7 is Gly or Ser
  Variant (8)..(8): Xaa in position 8 is Ile or Val
  Variant (9)..(9): Xaa in position 9 is Ala or Ser
MXKIXTXXXY

SEQ ID NO: 24279 - protein, 6 aa, Artificial sequence
  Consensus
  Variant (2)..(2): Xaa in position 2 is Phe or Leu
  Variant (5)..(5): Xaa in position 5 is any amino acid
WXLQXL

SEQ ID NO: 24280 - protein, 14 aa, Artificial sequence
  Consensus
  Variant (5)..(5): Xaa in position 5 is any or no amino acid
  Variant (7)..(7): Xaa in position 7 is any or no amino acid
PSQWXAXIGVLGSL

SEQ ID NO: 24281 - DNA, 1047 bp, Escherichia coli K12; identical to SEQ ID NO: 1323
  CDS (1)..(1047)

SEQ ID NO: 24282 - protein, 348 aa, Escherichia coli K12; identical to SEQ ID NO: 1324

SEQ ID NO: 24283 - DNA, 1235 bp, Salmonella typhimurium; identical to SEQ ID NO: 1325
  CDS (165)..(1235)

SEQ ID NO: 24284 - protein, 356 aa, Salmonella typhimurium; identical to SEQ ID NO: 1326

SEQ ID NO: 24285 - DNA, 1086 bp, Deinococcus radiodurans; identical to SEQ ID NO: 1327
  CDS (1)..(1086)

SEQ ID NO: 24286 - protein, 361 aa, Deinococcus radiodurans; identical to SEQ ID NO: 1328

SEQ ID NO: 24287 - DNA, 1056 bp, Neisseria meningitidis; identical to SEQ ID NO: 1329
  CDS (1)..(1056)

SEQ ID NO: 24288 - protein, 351 aa, Neisseria meningitidis; identical to SEQ ID NO: 1330

SEQ ID NO: 24289 - DNA, 1047 bp, Yersinia pestis; identical to SEQ ID NO: 1331
  CDS (1)..(1047)

SEQ ID NO: 24290 - protein, 348 aa, Yersinia pestis; identical to SEQ ID NO: 1332

SEQ ID NO: 24291 - DNA, 1071 bp, Escherichia coli; identical to SEQ ID NO: 1333
  CDS (1)..(1071)

SEQ ID NO: 24292 - protein, 356 aa, Escherichia coli; identical to SEQ ID NO: 1334

SEQ ID NO: 24293 - DNA, 1131 bp, Nostoc sp. PCC 7120; identical to SEQ ID NO: 1335
  CDS (1)..(1131)

SEQ ID NO: 24294 - protein, 376 aa, Nostoc sp. PCC 7120; identical to SEQ ID NO: 1336

SEQ ID NO: 24295 - DNA, 1053 bp, Salmonella enterica subsp. enterica serovar Typhi; identical to SEQ ID NO: 1337
  CDS (1)..(1053)

SEQ ID NO: 24296 - protein, 350 aa, Salmonella enterica subsp. enterica serovar Typhi; identical to SEQ ID NO: 1338

SEQ ID NO: 24297 - DNA, 1077 bp, Pseudomonas aeruginosa; identical to SEQ ID NO: 1339
  CDS (1)..(1077)

SEQ ID NO: 24298 - protein, 358 aa, Pseudomonas aeruginosa; identical to SEQ ID NO: 1340

SEQ ID NO: 24299 - DNA, 1047 bp, Buchnera sp; identical to SEQ ID NO: 1341
  CDS (1)..(1047)

SEQ ID NO: 24300 - protein, 348 aa, Buchnera sp; identical to SEQ ID NO: 1342

SEQ ID NO: 24301 - DNA, 1074 bp, Vibrio cholerae; identical to SEQ ID NO: 1343
  CDS (1)..(1074)

SEQ ID NO: 24302 - protein, 357 aa, Vibrio cholerae; identical to SEQ ID NO: 1344

SEQ ID NO: 24303 - DNA, 1038 bp, Lactococcus lactis subsp. lactis; identical to SEQ ID NO: 1345
  CDS (1)..(1038)

SEQ ID NO: 24304 - protein, 345 aa, Lactococcus lactis subsp. lactis; identical to SEQ ID NO: 1346

SEQ ID NO: 24305 - DNA, 1023 bp, Lactococcus lactis subsp. lactis; identical to SEQ ID NO: 1347
  CDS (1)..(1023)

SEQ ID NO: 24306 - protein, 340 aa, Lactococcus lactis subsp. lactis; identical to SEQ ID NO: 1348

SEQ ID NO: 24307 - DNA, 1032 bp, Streptococcus pneumoniae; identical to SEQ ID NO: 1349
  CDS (1)..(1032)

SEQ ID NO: 24308 - protein, 343 aa, Streptococcus pneumoniae; identical to SEQ ID NO: 1350

SEQ ID NO: 24309 - DNA, 1095 bp, Pseudomonas aeruginosa; identical to SEQ ID NO: 1351
  CDS (1)..(1095)

SEQ ID NO: 24310 - protein, 364 aa, Pseudomonas aeruginosa; identical to SEQ ID NO: 1352

SEQ ID NO: 24311 - DNA, 1110 bp, Caulobacter crescentus; identical to SEQ ID NO: 1353
  CDS (1)..(1110)

SEQ ID NO: 24312 - protein, 369 aa, Caulobacter crescentus; identical to SEQ ID NO: 1354

SEQ ID NO: 24313 - DNA, 1032 bp, Streptococcus pneumoniae; identical to SEQ ID NO: 1355
  CDS (1)..(1032)

SEQ ID NO: 24314 - protein, 343 aa, Streptococcus pneumoniae; identical to SEQ ID NO: 1356

SEQ ID NO: 24315 - DNA, 1047 bp, Buchnera aphidicola; identical to SEQ ID NO: 1357
  CDS (1)..(1047)

SEQ ID NO: 24316 - protein, 348 aa, Buchnera aphidicola; identical to SEQ ID NO: 1358

SEQ ID NO: 24317 - DNA, 1089 bp, Haemophilus influenzae; identical to SEQ ID NO: 1359
  CDS (1)..(1089)

SEQ ID NO: 24318 - protein, 362 aa, Haemophilus influenzae; identical to SEQ ID NO: 1360

SEQ ID NO: 24319 - DNA, 1502 bp, Candida albicans; identical to SEQ ID NO: 1361
  CDS (336)..(1442)

SEQ ID NO: 24320 - protein, 368 aa, Candida albicans; identical to SEQ ID NO: 1362

SEQ ID NO: 24321 - DNA, 1113 bp, Saccharomyces cerevisiae; identical to SEQ ID NO: 1363
  CDS (1)..(1113)

SEQ ID NO: 24322 - protein, 370 aa, Saccharomyces cerevisiae; identical to SEQ ID NO: 1364

SEQ ID NO: 24323 - DNA, 2048 bp, Saccharomyces cerevisiae; identical to SEQ ID NO: 1365
  CDS (619)..(1731)

SEQ ID NO: 24324 - protein, 370 aa, Saccharomyces cerevisiae; identical to SEQ ID NO: 1366

SEQ ID NO: 24325 - DNA, 1107 bp, Schizosaccharomyces pombe; identical to SEQ ID NO: 1367
  CDS (1)..(1107)

SEQ ID NO: 24326 - protein, 368 aa, Schizosaccharomyces pombe; identical to SEQ ID NO: 1368

SEQ ID NO: 24327 - DNA, 1089 bp, Amycolatopsis orientalis; identical to SEQ ID NO: 1369
  CDS (1)..(1089)

SEQ ID NO: 24328 - protein, 362 aa, Amycolatopsis orientalis; identical to SEQ ID NO: 1370

SEQ ID NO: 24329 - DNA, 1119 bp, Schizosaccharomyces pombe; identical to SEQ ID NO: 1371
  CDS (1)..(1119)

SEQ ID NO: 24330 - protein, 372 aa, Schizosaccharomyces pombe; identical to SEQ ID NO: 1372

SEQ ID NO: 24331 - DNA, 1248 bp, Corynebacterium glutamicum; identical to SEQ ID NO: 1373
  CDS (101)..(1228)

SEQ ID NO: 24332 - protein, 375 aa, Corynebacterium glutamicum; identical to SEQ ID NO: 1374

SEQ ID NO: 24333 - DNA, 1083 bp, Methylophilus methylotrophus; identical to SEQ ID NO: 1375
  CDS (1)..(1083)

SEQ ID NO: 24334 - protein, 360 aa, Methylophilus methylotrophus; identical to SEQ ID NO: 1376

SEQ ID NO: 24335 - DNA, 1107 bp, Debaryomyces hansenii; identical to SEQ ID NO: 1377
  CDS (1)..(1107)

SEQ ID NO: 24336 - protein, 368 aa, Debaryomyces hansenii; identical to SEQ ID NO: 1378

SEQ ID NO: 24337 - DNA, 1074 bp, Yarrowia lipolytica; identical to SEQ ID NO: 1379
  CDS (1)..(1074)

SEQ ID NO: 24338 - protein, 357 aa, Yarrowia lipolytica; identical to SEQ ID NO: 1380

SEQ ID NO: 24339 - DNA, 1089 bp, Yarrowia lipolytica; identical to SEQ ID NO: 1381
  CDS (1)..(1089)

SEQ ID NO: 24340 - protein, 362 aa, Yarrowia lipolytica; identical to SEQ ID NO: 1382

SEQ ID NO: 24341 - DNA, 1119 bp, Kluyveromyces lactis; identical to SEQ ID NO: 1383
  CDS (1)..(1119)

SEQ ID NO: 24342 - protein, 372 aa, Kluyveromyces lactis; identical to SEQ ID NO: 1384

SEQ ID NO: 24343 - DNA, 1095 bp, Kluyveromyces lactis; identical to SEQ ID NO: 1385
  CDS (1)..(1095)

SEQ ID NO: 24344 - protein, 364 aa, Kluyveromyces lactis; identical to SEQ ID NO: 1386

SEQ ID NO: 24345 - DNA, 1074 bp, Erwinia carotovora subsp; identical to SEQ ID NO: 1387
  CDS (1)..(1074)

SEQ ID NO: 24346 - protein, 357 aa, Erwinia carotovora subsp; identical to SEQ ID NO: 1388

SEQ ID NO: 24347 - DNA, 1047 bp, Erwinia carotovora subsp; identical to SEQ ID NO: 1389
  CDS (1)..(1047)

SEQ ID NO: 24348 - protein, 348 aa, Erwinia carotovora subsp; identical to SEQ ID NO: 1390

SEQ ID NO: 24349 - DNA, 1056 bp, Erwinia carotovora subsp; identical to SEQ ID NO: 1391
  CDS (1)..(1056)

SEQ ID NO: 24350 - protein, 351 aa, Erwinia carotovora subsp; identical to SEQ ID NO: 1392

SEQ ID NO: 24351 - DNA, 1113 bp, Acinetobacter sp; identical to SEQ ID NO: 1393
  CDS (1)..(1113)

SEQ ID NO: 24352 - protein, 370 aa, Acinetobacter sp; identical to SEQ ID NO: 1394

SEQ ID NO: 24353 - DNA, 1056 bp, Acinetobacter sp; identical to SEQ ID NO: 1395
  CDS (1)..(1056)

SEQ ID NO: 24354 - protein, 351 aa, Acinetobacter sp; identical to SEQ ID NO: 1396

SEQ ID NO: 24355 - DNA, 1119 bp, Candida glabrata; identical to SEQ ID NO: 1397
  CDS (1)..(1119)

SEQ ID NO: 24356 - protein, 372 aa, Candida glabrata; identical to SEQ ID NO: 1398

SEQ ID NO: 24357 - DNA, 1071 bp, Candida glabrata; identical to SEQ ID NO: 1399
  CDS (1)..(1071)

SEQ ID NO: 24358 - protein, 356 aa, Candida glabrata; identical to SEQ ID NO: 1400

SEQ ID NO: 24359 - DNA, 1083 bp, Photobacterium profundum; identical to SEQ ID NO: 1401
  CDS (1)..(1083)

SEQ ID NO: 24360 - protein, 360 aa, Photobacterium profundum; identical to SEQ ID NO: 1402

SEQ ID NO: 24361 - DNA, 1053 bp, Photobacterium profundum; identical to SEQ ID NO: 1403
  CDS (1)..(1053)

SEQ ID NO: 24362 - protein, 350 aa, Photobacterium profundum; identical to SEQ ID NO: 1404

SEQ ID NO: 24363 - DNA, 1113 bp, Photobacterium profundum; identical to SEQ ID NO: 1405
  CDS (1)..(1113)

SEQ ID NO: 24364 - protein, 370 aa, Photobacterium profundum; identical to SEQ ID NO: 1406

SEQ ID NO: 24365 - DNA, 1056 bp, Photobacterium profundum; identical to SEQ ID NO: 1407
  CDS (1)..(1056)

SEQ ID NO: 24366 - protein, 351 aa, Photobacterium profundum; identical to SEQ ID NO: 1408

SEQ ID NO: 24367 - DNA, 1092 bp, Parachlamydia sp; identical to SEQ ID NO: 1409
  CDS (1)..(1092)

SEQ ID NO: 24368 - protein, 363 aa, Parachlamydia sp; identical to SEQ ID NO: 1410

SEQ ID NO: 24369 - DNA, 1095 bp, Rhodopseudomonas palustris; identical to SEQ ID NO: 1411
  CDS (1)..(1095)

SEQ ID NO: 24370 - protein, 364 aa, Rhodopseudomonas palustris; identical to SEQ ID NO: 1412

SEQ ID NO: 24371 - DNA, 1100 bp, Amycolatopsis methanolica; identical to SEQ ID NO: 1413
  CDS (1)..(1086)

SEQ ID NO: 24372 - protein, 361 aa, Amycolatopsis methanolica; identical to SEQ ID NO: 1414

SEQ ID NO: 24373 - DNA, 1071 bp, Treponema denticola; identical to SEQ ID NO: 1415
  CDS (1)..(1071)

SEQ ID NO: 24374 - protein, 356 aa, Treponema denticola; identical to SEQ ID NO: 1416

SEQ ID NO: 24375 - DNA, 1068 bp, Geobacter sulfurreducens; identical to SEQ ID NO: 1417
  CDS (1)..(1068)

SEQ ID NO: 24376 - protein, 355 aa, Geobacter sulfurreducens; identical to SEQ ID NO: 1418

SEQ ID NO: 24377 - DNA, 1095 bp, Ashbya gossypii; identical to SEQ ID NO: 1419
  CDS (1)..(1095)

SEQ ID NO: 24378 - protein, 364 aa, Ashbya gossypii; identical to SEQ ID NO: 1420

SEQ ID NO: 24379 - DNA, 1122 bp, Ashbya gossypii; identical to SEQ ID NO: 1421
  CDS (1)..(1122)

SEQ ID NO: 24380 - protein, 373 aa, Ashbya gossypii; identical to SEQ ID NO: 1422

SEQ ID NO: 24381 - DNA, 1098 bp, Amycolatopsis balhimycina; identical to SEQ ID NO: 1423
  CDS (1)..(1098)

SEQ ID NO: 24382 - protein, 365 aa, Amycolatopsis balhimycina; identical to SEQ ID NO: 1424

SEQ ID NO: 24383 - DNA, 1071 bp, Vibrio vulnificus; identical to SEQ ID NO: 1425
  CDS (1)..(1071)

SEQ ID NO: 24384 - protein, 356 aa, Vibrio vulnificus; identical to SEQ ID NO: 1426

SEQ ID NO: 24385 - DNA, 1047 bp, Photorhabdus luminescens; identical to SEQ ID NO: 1427
  CDS (1)..(1047)

SEQ ID NO: 24386 - protein, 348 aa, Photorhabdus luminescens; identical to SEQ ID NO: 1428

SEQ ID NO: 24387 - DNA, 1053 bp, Photorhabdus luminescens; identical to SEQ ID NO: 1429
  CDS (1)..(1053)

SEQ ID NO: 24388 - protein, 350 aa, Photorhabdus luminescens; identical to SEQ ID NO: 1430

SEQ ID NO: 24389 - DNA, 1095 bp, Photorhabdus luminescens; identical to SEQ ID NO: 1431
  CDS (1)..(1095)

SEQ ID NO: 24390 - protein, 364 aa, Photorhabdus luminescens; identical to SEQ ID NO: 1432

SEQ ID NO: 24391 - DNA, 1119 bp, Gloeobacter violaceus; identical to SEQ ID NO: 1433
  CDS (1)..(1119)

SEQ ID NO: 24392 - protein, 372 aa, Gloeobacter violaceus; identical to SEQ ID NO: 1434

SEQ ID NO: 24393 - DNA, 1107 bp, Chromobacterium violaceum; identical to SEQ ID NO: 1435
  CDS (1)..(1107)

SEQ ID NO: 24394 - protein, 368 aa, Chromobacterium violaceum; identical to SEQ ID NO: 1436

SEQ ID NO: 24395 - DNA, 1059 bp, Chromobacterium violaceum; identical to SEQ ID NO: 1437
  CDS (1)..(1059)

SEQ ID NO: 24396 - protein, 352 aa, Chromobacterium violaceum; identical to SEQ ID NO: 1438

SEQ ID NO: 24397 - DNA, 1140 bp, Neurospora crassa; identical to SEQ ID NO: 1439
  CDS (1)..(1140)

SEQ ID NO: 24398 - protein, 379 aa, Neurospora crassa; identical to SEQ ID NO: 1440

SEQ ID NO: 24399 - DNA, 1092 bp, Neurospora crassa; identical to SEQ ID NO: 1441
  CDS (1)..(1092)

SEQ ID NO: 24400 - protein, 363 aa, Neurospora crassa; identical to SEQ ID NO: 1442

SEQ ID NO: 24401 - DNA, 1068 bp, Synechococcus sp; identical to SEQ ID NO: 1443
  CDS (1)..(1068)

SEQ ID NO: 24402 - protein, 355 aa, Synechococcus sp; identical to SEQ ID NO: 1444

SEQ ID NO: 24403 - DNA, 1053 bp, Rhodopirellula baltica; identical to SEQ ID NO: 1445
  CDS (1)..(1053)

SEQ ID NO: 24404 - protein, 350 aa, Rhodopirellula baltica; identical to SEQ ID NO: 1446

SEQ ID NO: 24405 - DNA, 1068 bp, Prochlorococcus marinus subsp; identical to SEQ ID NO: 1447
  CDS (1)..(1068)

SEQ ID NO: 24406 - protein, 355 aa, Prochlorococcus marinus subsp; identical to SEQ ID NO: 1448

SEQ ID NO: 24407 - DNA, 1083 bp, Prochlorococcus marinus; identical to SEQ ID NO: 1449
  CDS (1)..(1083)

SEQ ID NO: 24408 - protein, 360 aa, Prochlorococcus marinus; identical to SEQ ID NO: 1450

SEQ ID NO: 24409 - DNA, 1074 bp, Prochlorococcus marinus; identical to SEQ ID NO: 1451
  CDS (1)..(1074)

SEQ ID NO: 24410 - protein, 357 aa, Prochlorococcus marinus; identical to SEQ ID NO: 1452

SEQ ID NO: 24411 - DNA, 1113 bp, Haemophilus ducreyi; identical to SEQ ID NO: 1453
  CDS (1)..(1113)

SEQ ID NO: 24412 - protein, 370 aa, Haemophilus ducreyi; identical to SEQ ID NO: 1454

SEQ ID NO: 24413 - DNA, 1080 bp, Haemophilus ducreyi; identical to SEQ ID NO: 1455
  CDS (1)..(1080)

SEQ ID NO: 24414 - protein, 359 aa, Haemophilus ducreyi; identical to SEQ ID NO: 1456

SEQ ID NO: 24415 - DNA, 1086 bp, Candidatus Blochmannia floridanus; identical to SEQ ID NO: 1457
  CDS (1)..(1086)

SEQ ID NO: 24416 - protein, 361 aa, Candidatus Blochmannia floridanus; identical to SEQ ID NO: 1458

SEQ ID NO: 24417 - DNA, 1074 bp, Bordetella pertussis; identical to SEQ ID NO: 1459
  CDS (1)..(1074)

SEQ ID NO: 24418 - protein, 357 aa, Bordetella pertussis; identical to SEQ ID NO: 1460

SEQ ID NO: 24419 - DNA, 1119 bp, Bordetella bronchiseptica; identical to SEQ ID NO: 1461
  CDS (1)..(1119)

SEQ ID NO: 24420 - protein, 372 aa, Bordetella bronchiseptica; identical to SEQ ID NO: 1462

SEQ ID NO: 24421 - DNA, 1179 bp, Nitrosomonas europaea; identical to SEQ ID NO: 1463
  CDS (1)..(1179)

SEQ ID NO: 24422 - protein, 392 aa, Nitrosomonas europaea; identical to SEQ ID NO: 1464

SEQ ID NO: 24423 - DNA, 1083 bp, Coxiella burnetii; identical to SEQ ID NO: 1465
  CDS (1)..(1083)

SEQ ID NO: 24424 - protein, 360 aa, Coxiella burnetii; identical to SEQ ID NO: 1466

SEQ ID NO: 24425 - DNA, 834 bp, Vibrio anguillarum; identical to SEQ ID NO: 1467
  CDS (1)..(834)

SEQ ID NO: 24426 - protein, 277 aa, Vibrio anguillarum; identical to SEQ ID NO: 1468

SEQ ID NO: 24427 - DNA, 1143 bp, Xylella fastidiosa; identical to SEQ ID NO: 1469
  CDS (1)..(1143)

SEQ ID NO: 24428 - protein, 380 aa, Xylella fastidiosa; identical to SEQ ID NO: 1470

SEQ ID NO: 24429 - DNA, 1053 bp, Vibrio parahaemolyticus; identical to SEQ ID NO: 1471
  CDS (1)..(1053)

SEQ ID NO: 24430 - protein, 350 aa, Vibrio parahaemolyticus; identical to SEQ ID NO: 1472

SEQ ID NO: 24431 - DNA, 1053 bp, Vibrio parahaemolyticus; identical to SEQ ID NO: 1473
  CDS (1)..(1053)

SEQ ID NO: 24432 - protein, 350 aa, Vibrio parahaemolyticus; identical to SEQ ID NO: 1474

SEQ ID NO: 24433 - DNA, 1074 bp, Vibrio parahaemolyticus; identical to SEQ ID NO: 1475
  CDS (1)..(1074)

SEQ ID NO: 24434 - protein, 357 aa, Vibrio parahaemolyticus; identical to SEQ ID NO: 1476

SEQ ID NO: 24435 - DNA, 1083 bp, Pseudomonas syringae; identical to SEQ ID NO: 1477
  CDS (1)..(1083)

SEQ ID NO: 24436 - protein, 360 aa, Pseudomonas syringae; identical to SEQ ID NO: 1478

SEQ ID NO: 24437 - DNA, 1077 bp, Pseudomonas syringae; identical to SEQ ID NO: 1479
  CDS (1)..(1077)

SEQ ID NO: 24438 - protein, 358 aa, Pseudomonas syringae; identical to SEQ ID NO: 1480

SEQ ID NO: 24439 - DNA, 1062 bp, Pseudomonas putida; identical to SEQ ID NO: 1481
  CDS (1)..(1062)

SEQ ID NO: 24440 - protein, 353 aa, Pseudomonas putida; identical to SEQ ID NO: 1482

SEQ ID NO: 24441 - DNA, 1113 bp, Pseudomonas putida; identical to SEQ ID NO: 1483
  CDS (1)..(1113)

SEQ ID NO: 24442 - protein, 370 aa, Pseudomonas putida; identical to SEQ ID NO: 1484

SEQ ID NO: 24443 - DNA, 1086 bp, Bradyrhizobium japonicum; identical to SEQ ID NO: 1485
  CDS (1)..(1086)

SEQ ID NO: 24444 - protein, 361 aa, Bradyrhizobium japonicum; identical to SEQ ID NO: 1486

SEQ ID NO: 24445 - DNA, 1053 bp, Yersinia pestis; identical to SEQ ID NO: 1487
  CDS (1)..(1053)

SEQ ID NO: 24446 - protein, 350 aa, Yersinia pestis; identical to SEQ ID NO: 1488

SEQ ID NO: 24447 - DNA, 1077 bp, Yersinia pestis; identical to SEQ ID NO: 1489
  CDS (1)..(1077)

SEQ ID NO: 24448 - protein, 358 aa, Yersinia pestis; identical to SEQ ID NO: 1490

SEQ ID NO: 24449 - DNA, 1038 bp, Wigglesworthia glossinidia brevipalpis; identical to SEQ ID NO: 1491
  CDS (1)..(1038)

SEQ ID NO: 24450 - protein, 345 aa, Wigglesworthia glossinidia brevipalpis; identical to SEQ ID NO: 1492

SEQ ID NO: 24451 - DNA, 1053 bp, Vibrio vulnificus; identical to SEQ ID NO: 1493
  CDS (1)..(1053)

SEQ ID NO: 24452 - protein, 350 aa, Vibrio vulnificus; identical to SEQ ID NO: 1494

SEQ ID NO: 24453 - DNA, 1053 bp, Vibrio vulnificus; identical to SEQ ID NO: 1495
  CDS (1)..(1053)

SEQ ID NO: 24454 - protein, 350 aa, Vibrio vulnificus; identical to SEQ ID NO: 1496

SEQ ID NO: 24455 - DNA, 1071 bp, Vibrio vulnificus; identical to SEQ ID NO: 1497
  CDS (1)..(1071)

SEQ ID NO: 24456 - protein, 356 aa, Vibrio vulnificus; identical to SEQ ID NO: 1498

SEQ ID NO: 24457 - DNA, 1062 bp, Synechococcus elongatus; identical to SEQ ID NO: 1499
  CDS (1)..(1062)

SEQ ID NO: 24458 - protein, 353 aa, Synechococcus elongatus; identical to SEQ ID NO: 1500

SEQ ID NO: 24459 - DNA, 1032 bp, Streptococcus mutans; identical to SEQ ID NO: 1501
  CDS (1)..(1032)

SEQ ID NO: 24460 - protein, 343 aa, Streptococcus mutans; identical to SEQ ID NO: 1502

SEQ ID NO: 24461 - DNA, 1035 bp, Streptococcus mutans; identical to SEQ ID NO: 1503
  CDS (1)..(1035)

SEQ ID NO: 24462 - protein, 344 aa, Streptococcus mutans; identical to SEQ ID NO: 1504

SEQ ID NO: 24463 - DNA, 1008 bp, Streptococcus agalactiae; identical to SEQ ID NO: 1505
  CDS (1)..(1008)

SEQ ID NO: 24464 - protein, 335 aa, Streptococcus agalactiae; identical to SEQ ID NO: 1506

SEQ ID NO: 24465 - DNA, 1065 bp, Shewanella oneidensis; identical to SEQ ID NO: 1507
  CDS (1)..(1065)

SEQ ID NO: 24466 - protein, 354 aa, Shewanella oneidensis; identical to SEQ ID NO: 1508

SEQ ID NO: 24467 - DNA, 1092 bp, Shewanella oneidensis; identical to SEQ ID NO: 1509
  CDS (1)..(1092)

SEQ ID NO: 24468 - protein, 363 aa, Shewanella oneidensis; identical to SEQ ID NO: 1510

SEQ ID NO: 24469 - DNA, 1059 bp, Shewanella oneidensis; identical to SEQ ID NO: 1511
  CDS (1)..(1059)

SEQ ID NO: 24470 - protein, 352 aa, Shewanella oneidensis; identical to SEQ ID NO: 1512

SEQ ID NO: 24471 - DNA, 1053 bp, Escherichia coli O6; identical to SEQ ID NO: 1513
  CDS (1)..(1053)

SEQ ID NO: 24472 - protein, 350 aa, Escherichia coli O6; identical to SEQ ID NO: 1514

SEQ ID NO: 24473 - DNA, 1170 bp, Corynebacterium efficiens; identical to SEQ ID NO: 1515
  CDS (1)..(1170)

SEQ ID NO: 24474 - protein, 389 aa, Corynebacterium efficiens; identical to SEQ ID NO: 1516

SEQ ID NO: 24475 - DNA, 1134 bp, Bifidobacterium longum; identical to SEQ ID NO: 1517
  CDS (1)..(1134)

SEQ ID NO: 24476 - protein, 377 aa, Bifidobacterium longum; identical to SEQ ID NO: 1518

SEQ ID NO: 24477 - DNA, 1233 bp, Bifidobacterium longum; identical to SEQ ID NO: 1519
  CDS (1)..(1233)

SEQ ID NO: 24478 - protein, 410 aa, Bifidobacterium longum; identical to SEQ ID NO: 1520

SEQ ID NO: 24479 - DNA, 1221 bp, Phytophthora infestans; identical to SEQ ID NO: 1521
  CDS (20)..(1153)

SEQ ID NO: 24480 - protein, 377 aa, Phytophthora infestans; identical to SEQ ID NO: 1522

SEQ ID NO: 24481 - DNA, 1062 bp, Chlorobium tepidum; identical to SEQ ID NO: 1523
  CDS (1)..(1062)

SEQ ID NO: 24482 - protein, 353 aa, Chlorobium tepidum; identical to SEQ ID NO: 1524

SEQ ID NO: 24483 - DNA, 1074 bp, Xanthomonas campestris; identical to SEQ ID NO: 1525
  CDS (1)..(1074)

SEQ ID NO: 24484 - protein, 357 aa, Xanthomonas campestris; identical to SEQ ID NO: 1526

SEQ ID NO: 24485 - DNA, 1074 bp, Xanthomonas axonopodis; identical to SEQ ID NO: 1527
  CDS (1)..(1074)

SEQ ID NO: 24486 - protein, 357 aa, Xanthomonas axonopodis; identical to SEQ ID NO: 1528

SEQ ID NO: 24487 - DNA, 1080 bp, Ralstonia solanacearum; identical to SEQ ID NO: 1529
  CDS (1)..(1080)

SEQ ID NO: 24488 - protein, 359 aa, Ralstonia solanacearum; identical to SEQ ID NO: 1530

SEQ ID NO: 24489 - DNA, 1179 bp, Ralstonia solanacearum; identical to SEQ ID NO: 1531
  CDS (1)..(1179)

SEQ ID NO: 24490 - protein, 392 aa, Ralstonia solanacearum; identical to SEQ ID NO: 1532

SEQ ID NO: 24491 - DNA, 1065 bp, Synechococcus sp; identical to SEQ ID NO: 1533
  CDS (1)..(1065)

SEQ ID NO: 24492 - protein, 354 aa, Synechococcus sp; identical to SEQ ID NO: 1534

SEQ ID NO: 24493 - DNA, 1035 bp, Escherichia coli; identical to SEQ ID NO: 1535
  CDS (1)..(1035)

SEQ ID NO: 24494 - protein, 344 aa, Escherichia coli; identical to SEQ ID NO: 1536

SEQ ID NO: 24495 - DNA, 1200 bp, Stigmatella aurantiaca; identical to SEQ ID NO: 1537
  CDS (62)..(1147)

SEQ ID NO: 24496 - protein, 361 aa, Stigmatella aurantiaca; identical to SEQ ID NO: 1538

SEQ ID NO: 24497 - DNA, 1092 bp, Rhizobium loti; identical to SEQ ID NO: 1539
  CDS (1)..(1092)

SEQ ID NO: 24498 - protein, 363 aa, Rhizobium loti; identical to SEQ ID NO: 1540

SEQ ID NO: 24499 - DNA, 1083 bp, Amycolatopsis mediterranei; identical to SEQ ID NO: 1541
  CDS (1)..(1083)

SEQ ID NO: 24500 - protein, 360 aa, Amycolatopsis mediterranei; identical to SEQ ID NO: 1542

SEQ ID NO: 24501 - DNA, 1053 bp, Pasteurella multocida; identical to SEQ ID NO: 1543
  CDS (1)..(1053)

SEQ ID NO: 24502 - protein, 350 aa, Pasteurella multocida; identical to SEQ ID NO: 1544

SEQ ID NO: 24503 - DNA, 1086 bp, Pasteurella multocida; identical to SEQ ID NO: 1545
  CDS (1)..(1086)

SEQ ID NO: 24504 - protein, 361 aa, Pasteurella multocida; identical to SEQ ID NO: 1546

SEQ ID NO: 24505 - DNA, 1125 bp, Emericella nidulans; identical to SEQ ID NO: 1547
  CDS (1)..(1125)

SEQ ID NO: 24506 - protein, 374 aa, Emericella nidulans; identical to SEQ ID NO: 1548

SEQ ID NO: 24507 - DNA, 1089 bp, Emericella nidulans; identical to SEQ ID NO: 1549
  CDS (1)..(1089)

SEQ ID NO: 24508 - protein, 362 aa, Emericella nidulans; identical to SEQ ID NO: 1550

SEQ ID NO: 24509 - DNA, 1239 bp, Vibrio cholerae; identical to SEQ ID NO: 1551
  CDS (114)..(1175)

SEQ ID NO: 24510 - protein, 353 aa, Vibrio cholerae; identical to SEQ ID NO: 1552

SEQ ID NO: 24511 - DNA, 2184 bp, Candida albicans; identical to SEQ ID NO: 1553
  CDS (461)..(1573)

SEQ ID NO: 24512 - protein, 370 aa, Candida albicans; identical to SEQ ID NO: 1554

SEQ ID NO: 24513 - DNA, 1047 bp, Buchnera aphidicola; identical to SEQ ID NO: 1555
  CDS (1)..(1047)

SEQ ID NO: 24514 - protein, 348 aa, Buchnera aphidicola; identical to SEQ ID NO: 1556

SEQ ID NO: 24515 - DNA, 1047 bp, Buchnera aphidicola; identical to SEQ ID NO: 1557
  CDS (1)..(1047)

SEQ ID NO: 24516 - protein, 348 aa, Buchnera aphidicola; identical to SEQ ID NO: 1558

SEQ ID NO: 24517 - DNA, 1047 bp, Erwinia herbicola; identical to SEQ ID NO: 1559
  CDS (1)..(1047)

SEQ ID NO: 24518 - protein, 348 aa, Erwinia herbicola; identical to SEQ ID NO: 1560

SEQ ID NO: 24519 - DNA, 1047 bp, Salmonella typhimurium; identical to SEQ ID NO: 1561
  CDS (1)..(1047)

SEQ ID NO: 24520 - protein, 348 aa, Salmonella typhimurium; identical to SEQ ID NO: 1562

SEQ ID NO: 24521 - DNA, 23 bp, Artificial sequence
  Primer sequence
atgaacagaactgacgaactccg

SEQ ID NO: 24522 - DNA, 24 bp, Artificial sequence
  Primer sequence
ttagaagcgggtatctaccgcaga

SEQ ID NO: 24523 - protein, 352 aa, Artificial sequence; identical to SEQ ID NO: 19007
  Consensus
  Variant (2)..(3): Xaa in position 2 to 3 is any amino acid
  Variant (5)..(11): Xaa in position 5 to 11 is any amino acid
  Variant (13)..(24): Xaa in position 13 to 24 is any amino acid
  Variant (26)..(30): Xaa in position 26 to 30 is any amino acid
  Variant (32)..(33): Xaa in position 32 to 33 is any amino acid
  Variant (35)..(35): Xaa in position 35 is any amino acid
  Variant (37)..(40): Xaa in position 37 to 40 is any amino acid
  Variant (42)..(43): Xaa in position 42 to 43 is any amino acid
  Variant (45)..(46): Xaa in position 45 to 46 is any amino acid
  Variant (51)..(51): Xaa in position 51 is any amino acid
  Variant (54)..(55): Xaa in position 54 to 55 is any amino acid
  Variant (58)..(59): Xaa in position 58 to 59 is any amino acid
  Variant (62)..(63): Xaa in position 62 to 63 is any amino acid
  Variant (65)..(76): Xaa in position 65 to 76 is any amino acid
  Variant (78)..(80): Xaa in position 78 to 80 is any amino acid
  Variant (83)..(83): Xaa in position 83 is any amino acid
  Variant (85)..(85): Xaa in position 85 is any amino acid
  Variant (91)..(93): Xaa in position 91 to 93 is any amino acid
  Variant (100)..(100): Xaa in position 100 is any amino acid
  Variant (103)..(112): Xaa in position 103 to 112 is any amino acid
  Variant (115)..(117): Xaa in position 115 to 117 is any amino acid
  Variant (119)..(119): Xaa in position 119 is any amino acid
  Variant (121)..(128): Xaa in position 121 to 128 is any amino acid
  Variant (130)..(130): Xaa in position 130 is any amino acid
  Variant (132)..(132): Xaa in position 132 is any amino acid
  Variant (134)..(134): Xaa in position 134 is any amino acid
  Variant (136)..(136): Xaa in position 136 is any amino acid
  Variant (139)..(142): Xaa in position 139 to 142 is any amino acid
  Variant (144)..(146): Xaa in position 144 to 146 is any amino acid
  Variant (148)..(152): Xaa in position 148 to 152 is any amino acid
  Variant (163)..(163): Xaa in position 163 is any amino acid
  Variant (166)..(167): Xaa in position 166 to 167 is any amino acid
  Variant (170)..(170): Xaa in position 170 is any amino acid
  Variant (173)..(173): Xaa in position 173 is any amino acid
  Variant (175)..(175): Xaa in position 175 is any amino acid
  Variant (180)..(180): Xaa in position 180 is any amino acid
  Variant (182)..(182): Xaa in position 182 is any amino acid
  Variant (184)..(187): Xaa in position 184 to 187 is any amino acid
  Variant (189)..(190): Xaa in position 189 to 190 is any amino acid
  Variant (192)..(194): Xaa in position 192 to 194 is any amino acid
  Variant (196)..(198): Xaa in position 196 to 198 is any amino acid
  Variant (200)..(200): Xaa in position 200 is any amino acid
  Variant (202)..(207): Xaa in position 202 to 207 is any amino acid
  Variant (209)..(214): Xaa in position 209 to 214 is any amino acid
  Variant (216)..(216): Xaa in position 216 is any amino acid
  Variant (219)..(221): Xaa in position 219 to 221 is any amino acid
  Variant (223)..(224): Xaa in position 223 to 224 is any amino acid
  Variant (229)..(237): Xaa in position 229 to 237 is any amino acid
  Variant (240)..(268): Xaa in position 240 to 268 is any amino acid
  Variant (270)..(270): Xaa in position 270 is any amino acid
  Variant (273)..(273): Xaa in position 273 is any amino acid
  Variant (276)..(276): Xaa in position 276 is any amino acid
  Variant (278)..(281): Xaa in position 278 to 281 is any amino acid
  Variant (283)..(284): Xaa in position 283 to 284 is any amino acid
  Variant (286)..(291): Xaa in position 286 to 291 is any amino acid
  Variant (293)..(295): Xaa in position 293 to 295 is any amino acid
  Variant (297)..(304): Xaa in position 297 to 304 is any amino acid
  Variant (306)..(306): Xaa in position 306 is any amino acid
  Variant (308)..(308): Xaa in position 308 is any amino acid
  Variant (311)..(314): Xaa in position 311 to 314 is any amino acid
  Variant (316)..(316): Xaa in position 316 is any amino acid
  Variant (318)..(333): Xaa in position 318 to 333 is any amino acid
  Variant (336)..(336): Xaa in position 336 is any amino acid
  Variant (338)..(338): Xaa in position 338 is any amino acid
  Variant (341)..(341): Xaa in position 341 is any amino acid
  Variant (343)..(344): Xaa in position 343 to 344 is any amino acid
  Variant (346)..(347): Xaa in position 346 to 347 is any amino acid
  Variant (349)..(351): Xaa in position 349 to 351 is any amino acid

SEQ ID NO: 24524 - protein, 24 aa, Artificial sequence
  Consensus
  Variant (2)..(2): Xaa in position 2 is any amino acid
  Variant (3)..(3): Xaa in position 3 is Leu, Val, Phe, Ile, Ala or Met
  Variant (4)..(4): Xaa in position 4 is Val, Ile, Leu or Ala
  Variant (5)..(5): Xaa in position 5 is Val or Ile
  Variant (6)..(6): Xaa in position 6 is Val, Ile, Cys or Thr
  Variant (11)..(11): Xaa in position 11 is Ile, Val, Ser or Leu
  Variant (12)..(12): Xaa in position 12 is His or Asp
  Variant (13)..(13): Xaa in position 13 is Asp or Asn
  Variant (14)..(15): Xaa in position 14 to 15 is any amino acid
  Variant (16)..(16): Xaa in position 16 is Ala, Ser, Gln or Thr
  Variant (17)..(17): Xaa in position 17 is Ala, Val or Gly
  Variant (18)..(18): Xaa in position 18 is any amino acid
  Variant (19)..(19): Xaa in position 19 is Glu, Asp, Ala or Gln
  Variant (21)..(21): Xaa in position 21 is Ala, Gly, Cys or Ser
  Variant (22)..(22): Xaa in position 22 is any amino acid
  Variant (23)..(23): Xaa in position 23 is Arg, Lys, Gln, His or Leu
  Variant (24)..(24): Xaa in position 24 is Leu, Ile or Phe
RXXXXXGPCSXXXXXXXXXYXXXX

SEQ ID NO: 24525 - protein, 42 aa, Artificial sequence; identical to SEQ ID NO: 2884
  Consensus
  Variant (1)..(1): Xaa in position 1 is Leu, Ile, Phe or Met
  Variant (2)..(2): Xaa in position 2 is any amino acid
  Variant (3)..(3): Xaa in position 3 is Ile, Val, Leu or Met
  Variant (4)..(4): Xaa in position 4 is Val, Ile or Leu
  Variant (7)..(7): Xaa in position 7 is Val, Ala or Thr
  Variant (9)..(9): Xaa in position 9 is Phe, Leu, Thr or Val
  Variant (10)..(10): Xaa in position 10 is Glu or Ala
  Variant (15)..(16): Xaa in position 15 to 16 is any amino acid
  Variant (17)..(17): Xaa in position 17 is any or no amino acid
  Variant (19)..(19): Xaa in position 19 is Trp or Tyr
  Variant (20)..(20): Xaa in position 20 is Lys or Arg
  Variant (22)..(22): Xaa in position 22 is Leu, Phe, Met or Tyr
  Variant (23)..(23): Xaa in position 23 is Ile, Val, Ala or Leu
  Variant (24)..(24): Xaa in position 24 is any amino acid
  Variant (25)..(25): Xaa in position 25 is Asp, Glu or Gln
  Variant (27)..(27): Xaa in position 27 is any amino acid
  Variant (28)..(28): Xaa in position 28 is Leu, Met, Ile, Val, Ala or Thr
  Variant (29)..(29): Xaa in position 29 is Asp, Asn or Ser
  Variant (30)..(33): Xaa in position 30 to 33 is any amino acid
  Variant (34)..(34): Xaa in position 34 is Ile, Val, Leu or Met
  Variant (35)..(36): Xaa in position 35 to 36 is any amino acid
  Variant (38)..(38): Xaa in position 38 is Leu, Ile, Met or Val
  Variant (39)..(40): Xaa in position 39 to 40 is any amino acid
  Variant (41)..(41): Xaa in position 41 is Ala, Ser, Gly, Val or Thr

SEQ ID NO: 24526 - protein, 65 aa, Artificial sequence; identical to SEQ ID NO: 2885
  Consensus
  Variant (2)..(2): Xaa in position 2 is any amino acid
  Variant (4)..(4): Xaa in position 4 is Asp, Tyr, Gln, Asn or Glu
  Variant (5)..(9): Xaa in position 5 to 9 is any amino acid
  Variant (10)..(10): Xaa in position 10 is Tyr, Phe or Leu
  Variant (11)..(12): Xaa in position 11 to 12 is any amino acid
  Variant (13)..(13): Xaa in position 13 is Asp or Glu
  Variant (14)..(15): Xaa in position 14 to 15 is any amino acid
  Variant (16)..(16): Xaa in position 16 is Ser, Ala, Thr or Cys
  Variant (17)..(17): Xaa in position 17 is Trp, Phe, Tyr, Leu or Val
  Variant (18)..(18): Xaa in position 18 is any amino acid
  Variant (19)..(19): Xaa in position 19 is Ala or Ser
  Variant (20)..(20): Xaa in position 20 is Ile or Val
  Variant (24)..(24): Xaa in position 24 is Thr, Ser or Asn
  Variant (25)..(25): Xaa in position 25 is Thr, Val, Ala, Ser or Ile
  Variant (26)..(26): Xaa in position 26 is Glu or Ala
  Variant (27)..(27): Xaa in position 27 is Ser, Asp or Asn
  Variant (29)..(29): Xaa in position 29 is any amino acid
  Variant (32)..(32): Xaa in position 32 is Glu, Gln, Phe or Met
  Variant (33)..(33): Xaa in position 33 is Leu, Met, Val, Ile or Phe
  Variant (34)..(34): Xaa in position 34 is Ala, Ser, Thr, Cys or Val
  Variant (36)..(36): Xaa in position 36 is Gly, Ala or Asn
  Variant (37)..(39): Xaa in position 37 to 39 is any amino acid
  Variant (40)..(40): Xaa in position 40 is Pro or Ala
  Variant (41)..(41): Xaa in position 41 is Val, Ile, Thr or Leu
  Variant (43)..(43): Xaa in position 43 is Phe, Met, Tyr or Ile
  Variant (46)..(46): Xaa in position 46 is any amino acid
  Variant (47)..(47): Xaa in position 47 is Thr, Ser or Arg
  Variant (48)..(48): Xaa in position 48 is any amino acid
  Variant (50)..(53): Xaa in position 50 to 53 is any amino acid
  Variant (54)..(54): Xaa in position 54 is Ala or Met
  Variant (55)..(55): Xaa in position 55 is any amino acid
  Variant (56)..(56): Xaa in position 56 is Asp, Asn or Glu
  Variant (57)..(57): Xaa in position 57 is Ala or Gly
  Variant (58)..(59): Xaa in position 58 to 59 is any amino acid
  Variant (60)..(60): Xaa in position 60 is Ala or Ser
  Variant (61)..(61): Xaa in position 61 is Ala, Ser, Val or Thr
  Variant (62)..(64): Xaa in position 62 to 64 is any amino acid
  Variant (65)..(65): Xaa in position 65 is His or Gln

SEQ ID NO: 24527 - protein, 71 aa, Artificial sequence; identical to SEQ ID NO: 2886
  Consensus
  Variant (1)..(1): Xaa in position 1 is Thr or Ser
  Variant (2)..(2): Xaa in position 2 is any amino acid
  Variant (5)..(7): Xaa in position 5 to 7 is any amino acid
  Variant (8)..(8): Xaa in position 8 is His or Phe
  Variant (9)..(9): Xaa in position 9 is Val, Ile, Leu or Ala
  Variant (10)..(10): Xaa in position 10 is Ile or Val
  Variant (11)..(11): Xaa in position 11 is Leu or Met
  Variant (14)..(14): Xaa in position 14 is Gly, Ser or Ala
  Variant (15)..(16): Xaa in position 15 to 16 is any amino acid
  Variant (17)..(22): Xaa in position 17 to 22 is any or no amino acid
  Variant (23)..(23): Xaa in position 23 is Pro, Thr or Ser
  Variant (25)..(25): Xaa in position 25 is Tyr, Phe or His
  Variant (26)..(29): Xaa in position 26 to 29 is any amino acid
  Variant (30)..(30): Xaa in position 30 is Val, Ile or Leu
  Variant (31)..(36): Xaa in position 31 to 36 is any amino acid
  Variant (37)..(37): Xaa in position 37 is Leu, Met, Ile, Tyr or His
  Variant (38)..(40): Xaa in position 38 to 40 is any amino acid
  Variant (41)..(51): Xaa in position 41 to 51 is any or no amino acid
  Variant (52)..(52): Xaa in position 52 is Leu, Ile or Val
  Variant (53)..(53): Xaa in position 53 is Met, Val, Ile or Leu
  Variant (54)..(54): Xaa in position 54 is Ile or Val
  Variant (56)..(56): Xaa in position 56 is Cys, Phe, Ala, Thr, Tyr or Val
  Variant (57)..(57): Xaa in position 57 is Ser, Asn or Ala
  Variant (59)..(59): Xaa in position 59 is Gly, Ala or Asp
  Variant (61)..(61): Xaa in position 61 is Ser or Cys
  Variant (62)..(62): Xaa in position 62 is any amino acid
  Variant (64)..(66): Xaa in position 64 to 66 is any amino acid
  Variant (67)..(67): Xaa in position 67 is Arg, Asn, Lys, Leu or Glu
  Variant (69)..(70): Xaa in position 69 to 70 is any amino acid
  Variant (71)..(71): Xaa in position 71 is Val or Ile

SEQ ID NO: 24528 - protein, 41 aa, Artificial sequence; identical to SEQ ID NO: 2887
  Consensus
  Variant (2)..(2): Xaa in position 2 is any amino acid
  Variant (4)..(4): Xaa in position 4 is Ile, Leu, Val, Ala or Met
  Variant (7)..(7): Xaa in position 7 is His, Asn, Phe or Tyr
  Variant (8)..(8): Xaa in position 8 is Leu or Ile
  Variant (9)..(10): Xaa in position 9 to 10 is any amino acid
  Variant (12)..(12): Xaa in position 12 is any amino acid
  Variant (14)..(19): Xaa in position 14 to 19 is any amino acid
  Variant (20)..(30): Xaa in position 20 to 30 is any or no amino acid
  Variant (32)..(32): Xaa in position 32 is any amino acid
  Variant (34)..(34): Xaa in position 34 is Ile or Val
  Variant (37)..(37): Xaa in position 37 is Ala, Pro, Gly, Lys, Ser or Glu
  Variant (39)..(39): Xaa in position 39 is Ile, Leu or Val
  Variant (40)..(40): Xaa in position 40 is any amino acid
  Variant (41)..(41): Xaa in position 41 is Trp, Ile, Leu or Phe

SEQ ID NO: 24529 - DNA, 1071 bp, Escherichia coli K12; identical to SEQ ID NO: 23463
  CDS (1)..(1071)

SEQ ID NO: 24530 - protein, 356 aa, Escherichia coli K12; identical to SEQ ID NO: 23464

SEQ ID NO: 24531 - DNA, 1068 bp, Yersinia pestis; identical to SEQ ID NO: 23465
  CDS (1)..(1068)

SEQ ID NO: 24532 - protein, 355 aa, Yersinia pestis; identical to SEQ ID NO: 23466

SEQ ID NO: 24533 - DNA, 1068 bp, Salmonella enterica subsp. enterica serovar Typhi; identical to SEQ ID NO: 23467
  CDS (1)..(1068)

SEQ ID NO: 24534 - protein, 355 aa, Salmonella enterica subsp. enterica serovar Typhi; identical to SEQ ID NO: 23468

SEQ ID NO: 24535 - DNA, 1074 bp, Vibrio cholerae; identical to SEQ ID NO: 23469
  CDS (1)..(1074)

SEQ ID NO: 24536 - protein, 357 aa, Vibrio cholerae; identical to SEQ ID NO: 23470

SEQ ID NO: 24537 - DNA, 1128 bp, Xylella fastidiosa; identical to SEQ ID NO: 23471
  CDS (1)..(1128)

SEQ ID NO: 24538 - protein, 375 aa, Xylella fastidiosa; identical to SEQ ID NO: 23472

SEQ ID NO: 24539 - DNA, 1065 bp, Salmonella typhimurium; identical to SEQ ID NO: 23473
  CDS (1)..(1065)

SEQ ID NO: 24540 - protein, 354 aa, Salmonella typhimurium; identical to SEQ ID NO: 23474

SEQ ID NO: 24541 - DNA, 1059 bp, Campylobacter jejuni; identical to SEQ ID NO: 23475
  CDS (1)..(1059)

SEQ ID NO: 24542 - protein, 352 aa, Campylobacter jejuni; identical to SEQ ID NO: 23476

SEQ ID NO: 24543 - DNA, 1089 bp, Haemophilus influenzae; identical to SEQ ID NO: 23477
  CDS (1)..(1089)

SEQ ID NO: 24544 - protein, 362 aa, Haemophilus influenzae; identical to SEQ ID NO: 23478

SEQ ID NO: 24545 - DNA, 1125 bp, Bacteroides fragilis; identical to SEQ ID NO: 23479
  CDS (1)..(1125)

SEQ ID NO: 24546 - protein, 374 aa, Bacteroides fragilis; identical to SEQ ID NO: 23480

SEQ ID NO: 24547 - DNA, 1098 bp, Mannheimia succiniciproducens MBEL55E; identical to SEQ ID NO: 23481
  CDS (1)..(1098)

SEQ ID NO: 24548 - protein, 365 aa, Mannheimia succiniciproducens MBEL55E; identical to SEQ ID NO: 23482

SEQ ID NO: 24549 - DNA, 1068 bp, Erwinia carotovora; identical to SEQ ID NO: 23483
  CDS (1)..(1068)

SEQ ID NO: 24550 - protein, 355 aa, Erwinia carotovora; identical to SEQ ID NO: 23484

SEQ ID NO: 24551 - DNA, 1125 bp, Bacteroides thetaiotaomicron; identical to SEQ ID NO: 23485
  CDS (1)..(1125)

SEQ ID NO: 24552 - protein, 374 aa, Bacteroides thetaiotaomicron; identical to SEQ ID NO: 23486

SEQ ID NO: 24553 - DNA, 1068 bp, Buchnera aphidicola; identical to SEQ ID NO: 23487
  CDS (1)..(1068)

SEQ ID NO: 24554 - protein, 355 aa, Buchnera aphidicola; identical to SEQ ID NO: 23488

SEQ ID NO: 24555 - DNA, 1074 bp, Buchnera aphidicola; identical to SEQ ID NO: 23489
  CDS (1)..(1074)

SEQ ID NO: 24556 - protein, 357 aa, Buchnera aphidicola; identical to SEQ ID NO: 23490

SEQ ID NO: 24557 - DNA, 1074 bp, Candidatus Blochmannia floridanus; identical to SEQ ID NO: 23491
  CDS (1)..(1074)

SEQ ID NO: 24558 - protein, 357 aa, Candidatus Blochmannia floridanus; identical to SEQ ID NO: 23492

SEQ ID NO: 24559 - DNA, 1092 bp, Pasteurella multocida; identical to SEQ ID NO: 23493
  CDS (1)..(1092)

SEQ ID NO: 24560 - protein, 363 aa, Pasteurella multocida; identical to SEQ ID NO: 23494

SEQ ID NO: 24561 - DNA, 1068 bp, Photorhabdus luminescens; identical to SEQ ID NO: 23495
  CDS (1)..(1068)

SEQ ID NO: 24562 - protein, 355 aa, Photorhabdus luminescens; identical to SEQ ID NO: 23496

SEQ ID NO: 24563 - DNA, 1086 bp, Photobacterium profundum; identical to SEQ ID NO: 23497
  CDS (1)..(1086)

SEQ ID NO: 24564 - protein, 361 aa, Photobacterium profundum; identical to SEQ ID NO: 23498

SEQ ID NO: 24565 - DNA, 1092 bp, Shewanella oneidensis; identical to SEQ ID NO: 23499
  CDS (1)..(1092)

SEQ ID NO: 24566 - protein, 363 aa, Shewanella oneidensis; identical to SEQ ID NO: 23500

SEQ ID NO: 24567 - DNA, 1074 bp, Vibrio vulnificus; identical to SEQ ID NO: 23501
  CDS (1)..(1074)

SEQ ID NO: 24568 - protein, 357 aa, Vibrio vulnificus; identical to SEQ ID NO: 23502

SEQ ID NO: 24569 - DNA, 1128 bp, Xanthomonas campestris; identical to SEQ ID NO: 23503
  CDS (1)..(1128)

SEQ ID NO: 24570 - protein, 375 aa, Xanthomonas campestris; identical to SEQ ID NO: 23504

SEQ ID NO: 24571 - DNA, 27 bp, Artificial sequence
  Primer sequence
atgatgagtcagaagtatctttttatc

SEQ ID NO: 24572 - DNA, 23 bp, Artificial sequence
  Primer sequence
ttacagcactcctttcgacgagg

SEQ ID NO: 24573 - protein, 392 aa, Artificial sequence; identical to SEQ ID NO: 23507
  Consensus
  Variant (6)..(8): Xaa in position 6 to 8 is any amino acid
  Variant (11)..(14): Xaa in position 11 to 14 is any amino acid
  Variant (16)..(16): Xaa in position 16 is any amino acid
  Variant (18)..(20): Xaa in position 18 to 20 is any amino acid
  Variant (23)..(47): Xaa in position 23 to 47 is any amino acid
  Variant (50)..(50): Xaa in position 50 is any amino acid
  Variant (54)..(57): Xaa in position 54 to 57 is any amino acid
  Variant (59)..(61): Xaa in position 59 to 61 is any amino acid
  Variant (63)..(68): Xaa in position 63 to 68 is any amino acid
  Variant (70)..(76): Xaa in position 70 to 76 is any amino acid
  Variant (78)..(79): Xaa in position 78 to 79 is any amino acid
  Variant (81)..(84): Xaa in position 81 to 84 is any amino acid
  Variant (86)..(96): Xaa in position 86 to 96 is any amino acid
  Variant (100)..(117): Xaa in position 100 to 117 is any amino acid
  Variant (119)..(121): Xaa in position 119 to 121 is any amino acid
  Variant (125)..(126): Xaa in position 125 to 126 is any amino acid
  Variant (128)..(163): Xaa in position 128 to 163 is any amino acid
  Variant (165)..(185): Xaa in position 165 to 185 is any amino acid
  Variant (187)..(191): Xaa in position 187 to 191 is any amino acid
  Variant (193)..(193): Xaa in position 193 is any amino acid
  Variant (195)..(195): Xaa in position 195 is any amino acid
  Variant (198)..(204): Xaa in position 198 to 204 is any amino acid
  Variant (206)..(214): Xaa in position 206 to 214 is any amino acid
  Variant (217)..(219): Xaa in position 217 to 219 is any amino acid
  Variant (221)..(221): Xaa in position 221 is any amino acid
  Variant (225)..(225): Xaa in position 225 is any amino acid
  Variant (227)..(229): Xaa in position 227 to 229 is any amino acid
  Variant (231)..(240): Xaa in position 231 to 240 is any amino acid
  Variant (243)..(245): Xaa in position 243 to 245 is any amino acid
  Variant (247)..(247): Xaa in position 247 is any amino acid
  Variant (250)..(251): Xaa in position 250 to 251 is any amino acid
  Variant (254)..(264): Xaa in position 254 to 264 is any amino acid
  Variant (266)..(268): Xaa in position 266 to 268 is any amino acid
  Variant (270)..(270): Xaa in position 270 is any amino acid
  Variant (272)..(273): Xaa in position 272 to 273 is any amino acid
  Variant (275)..(293): Xaa in position 275 to 293 is any amino acid
  Variant (295)..(296): Xaa in position 295 to 296 is any amino acid
  Variant (301)..(308): Xaa in position 301 to 308 is any amino acid
  Variant (310)..(312): Xaa in position 310 to 312 is any amino acid
  Variant (314)..(327): Xaa in position 314 to 327 is any amino acid
  Variant (329)..(336): Xaa in position 329 to 336 is any amino acid
  Variant (340)..(340): Xaa in position 340 is any amino acid
  Variant (342)..(349): Xaa in position 342 to 349 is any amino acid
  Variant (351)..(355): Xaa in position 351 to 355 is any amino acid
  Variant (357)..(357): Xaa in position 357 is any amino acid
  Variant (359)..(359): Xaa in position 359 is any amino acid
  Variant (362)..(363): Xaa in position 362 to 363 is any amino acid
  Variant (365)..(366): Xaa in position 365 to 366 is any amino acid
  Variant (369)..(390): Xaa in position 369 to 390 is any amino acid

SEQ ID NO: 24574 - protein, 397 aa, Artificial sequence; identical to SEQ ID NO: 23508
  Consensus
  Variant (11)..(11): Xaa in position 11 is any amino acid
  Variant (14)..(15): Xaa in position 14 to 15 is any amino acid
  Variant (17)..(17): Xaa in position 17 is any amino acid
  Variant (19)..(19): Xaa in position 19 is any amino acid
  Variant (21)..(23): Xaa in position 21 to 23 is any amino acid
  Variant (26)..(30): Xaa in position 26 to 30 is any amino acid
  Variant (34)..(34): Xaa in position 34 is any amino acid
  Variant (36)..(37): Xaa in position 36 to 37 is any amino acid
  Variant (39)..(46): Xaa in position 39 to 46 is any amino acid
  Variant (49)..(50): Xaa in position 49 to 50 is any amino acid
  Variant (58)..(58): Xaa in position 58 is any amino acid
  Variant (60)..(60): Xaa in position 60 is any amino acid
  Variant (62)..(64): Xaa in position 62 to 64 is any amino acid
  Variant (66)..(67): Xaa in position 66 to 67 is any amino acid
  Variant (70)..(71): Xaa in position 70 to 71 is any amino acid
  Variant (73)..(77): Xaa in position 73 to 77 is any amino acid
  Variant (81)..(82): Xaa in position 81 to 82 is any amino acid
  Variant (84)..(86): Xaa in position 84 to 86 is any amino acid
  Variant (92)..(96): Xaa in position 92 to 96 is any amino acid
  Variant (98)..(98): Xaa in position 98 is any amino acid
  Variant (103)..(105): Xaa in position 103 to 105 is any amino acid
  Variant (107)..(109): Xaa in position 107 to 109 is any amino acid
  Variant (111)..(116): Xaa in position 111 to 116 is any amino acid
  Variant (118)..(120): Xaa in position 118 to 120 is any amino acid
  Variant (122)..(122): Xaa in position 122 is any amino acid
  Variant (128)..(128): Xaa in position 128 is any amino acid
  Variant (131)..(132): Xaa in position 131 to 132 is any amino acid
  Variant (135)..(135): Xaa in position 135 is any amino acid
  Variant (137)..(138): Xaa in position 137 to 138 is any amino acid
  Variant (140)..(143): Xaa in position 140 to 143 is any amino acid
  Variant (145)..(166): Xaa in position 145 to 166 is any amino acid
  Variant (168)..(169): Xaa in position 168 to 169 is any amino acid
  Variant (171)..(173): Xaa in position 171 to 173 is any amino acid
  Variant (175)..(188): Xaa in position 175 to 188 is any amino acid
  Variant (190)..(190): Xaa in position 190 is any amino acid
  Variant (192)..(192): Xaa in position 192 is any amino acid
  Variant (194)..(194): Xaa in position 194 is any amino acid
  Variant (196)..(196): Xaa in position 196 is any amino acid
  Variant (201)..(201): Xaa in position 201 is any amino acid
  Variant (203)..(203): Xaa in position 203 is any amino acid
  Variant (205)..(207): Xaa in position 205 to 207 is any amino acid
  Variant (210)..(215): Xaa in position 210 to 215 is any amino acid
  Variant (217)..(217): Xaa in position 217 is any amino acid
  Variant (220)..(221): Xaa in position 220 to 221 is any amino acid
  Variant (228)..(228): Xaa in position 228 is any amino acid
  Variant (232)..(232): Xaa in position 232 is any amino acid
  Variant (234)..(234): Xaa in position 234 is any amino acid
  Variant (236)..(243): Xaa in position 236 to 243 is any amino acid
  Variant (247)..(247): Xaa in position 247 is any amino acid
  Variant (250)..(250): Xaa in position 250 is any amino acid
  Variant (254)..(254): Xaa in position 254 is any amino acid
  Variant (258)..(258): Xaa in position 258 is any amino acid
  Variant (263)..(263): Xaa in position 263 is any amino acid
  Variant (265)..(267): Xaa in position 265 to 267 is any amino acid
  Variant (271)..(271): Xaa in position 271 is any amino acid
  Variant (276)..(276): Xaa in position 276 is any amino acid
  Variant (278)..(296): Xaa in position 278 to 296 is any amino acid
  Variant (299)..(299): Xaa in position 299 is any amino acid
  Variant (305)..(306): Xaa in position 305 to 306 is any amino acid
  Variant (308)..(308): Xaa in position 308 is any amino acid
  Variant (310)..(310): Xaa in position 310 is any amino acid
  Variant (313)..(313): Xaa in position 313 is any amino acid
  Variant (318)..(322): Xaa in position 318 to 322 is any amino acid
  Variant (324)..(324): Xaa in position 324 is any amino acid
  Variant (326)..(330): Xaa in position 326 to 330 is any amino acid
  Variant (332)..(334): Xaa in position 332 to 334 is any amino acid
  Variant (338)..(339): Xaa in position 338 to 339 is any amino acid
  Variant (343)..(343): Xaa in position 343 is any amino acid
  Variant (346)..(352): Xaa in position 346 to 352 is any amino acid
  Variant (356)..(358): Xaa in position 356 to 358 is any amino acid
  Variant (360)..(360): Xaa in position 360 is any amino acid
  Variant (365)..(366): Xaa in position 365 to 366 is any amino acid
  Variant (368)..(368): Xaa in position 368 is any amino acid
  Variant (372)..(374): Xaa in position 372 to 374 is any amino acid
  Variant (376)..(376): Xaa in position 376 is any amino acid
  Variant (378)..(378): Xaa in position 378 is any amino acid
  Variant (381)..(386): Xaa in position 381 to 386 is any amino acid
  Variant (388)..(389): Xaa in position 388 to 389 is any amino acid
  Variant (396)..(396): Xaa in position 396 is any amino acid

SEQ ID NO: 24575 - protein, 25 aa, Artificial sequence
  Consensus
  Variant (1)..(1): Xaa in position 1 is Leu or Val
  Variant (2)..(2): Xaa in position 2 is Phe or Leu
  Variant (3)..(3): Xaa in position 3 is Ile or Val
  Variant (9)..(9): Xaa in position 9 is Leu or Ile
  Variant (10)..(10): Xaa in position 10 is Ile or Val
  Variant (11)..(11): Xaa in position 11 is any amino acid
  Variant (14)..(14): Xaa in position 14 is any amino acid
  Variant (15)..(15): Xaa in position 15 is any or no amino acid
  Variant (16)..(16): Xaa in position 16 is Asp or Asn
  Variant (17)..(17): Xaa in position 17 is any amino acid
  Variant (19)..(19): Xaa in position 19 is Val, Ile or Leu
  Variant (21)..(22): Xaa in position 21 to 22 is any amino acid
  Variant (23)..(23): Xaa in position 23 is Asp, Glu, Ala or Asn
XXXDRDGTXXXEPXXXXQXDXXXKL

SEQ ID NO: 24576 - protein, 22 aa, Artificial sequence
  Consensus
  Variant (1)..(1): Xaa in position 1 is Tyr or Phe
  Variant (2)..(2): Xaa in position 2 is any amino acid
  Variant (3)..(3): Xaa in position 3 is Phe or Leu
  Variant (4)..(4): Xaa in position 4 is Val or Ile
  Variant (5)..(5): Xaa in position 5 is Met or Ile
  Variant (6)..(6): Xaa in position 6 is Val or Ile
  Variant (7)..(7): Xaa in position 7 is Thr or Ser
  Variant (10)..(10): Xaa in position 10 is Asp or Asn
  Variant (14)..(14): Xaa in position 14 is Thr or Ser
  Variant (15)..(15): Xaa in position 15 is any amino acid
  Variant (16)..(16): Xaa in position 16 is Ser, Ala, Asn or Leu
  Variant (17)..(17): Xaa in position 17 is Phe or Tyr
  Variant (19)..(21): Xaa in position 19 to 21 is any amino acid
XXXXXXXNQXGLGXXXXPXXXF

SEQ ID NO: 24577 - protein, 42 aa, Artificial sequence; identical to SEQ ID NO: 23511
  Consensus
  Variant (4)..(6): Xaa in position 4 to 6 is any amino acid
  Variant (7)..(7): Xaa in position 7 is Leu or Met
  Variant (8)..(8): Xaa in position 8 is Val, Ile, Leu or Met
  Variant (9)..(10): Xaa in position 9 to 10 is any amino acid
  Variant (11)..(11): Xaa in position 11 is Tyr, Trp or Phe
  Variant (12)..(12): Xaa in position 12 is Leu or Ile
  Variant (13)..(17): Xaa in position 13 to 17 is any amino acid
  Variant (18)..(18): Xaa in position 18 is Asp or Asn
  Variant (19)..(21): Xaa in position 19 to 21 is any amino acid
  Variant (23)..(23): Xaa in position 23 is any amino acid
  Variant (24)..(24): Xaa in position 24 is Val or Met
  Variant (25)..(25): Xaa in position 25 is Ile or Val
  Variant (29)..(29): Xaa in position 29 is any amino acid
  Variant (30)..(30): Xaa in position 30 is Thr or Ser
  Variant (32)..(32): Xaa in position 32 is Ile, Val, Leu or Met
  Variant (33)..(33): Xaa in position 33 is any amino acid
  Variant (34)..(34): Xaa in position 34 is Leu or Phe
  Variant (35)..(35): Xaa in position 35 is Ala or Gly
  Variant (36)..(36): Xaa in position 36 is any amino acid
  Variant (37)..(37): Xaa in position 37 is Asn, Ala or Ser
  Variant (38)..(38): Xaa in position 38 is Met, Leu or Ile
  Variant (39)..(39): Xaa in position 39 is Gly, Ala or Asn
  Variant (40)..(40): Xaa in position 40 is Ile, Leu, Val or Cys
  Variant (41)..(41): Xaa in position 41 is any amino acid
  Variant (42)..(42): Xaa in position 42 is Gly, Ala or Ser

SEQ ID NO: 24578 - protein, 45 aa, Artificial sequence; identical to SEQ ID NO: 23512
  Consensus
  Variant (2)..(2): Xaa in position 2 is any amino acid
  Variant (3)..(3): Xaa in position 3 is Ala or Arg
  Variant (4)..(4): Xaa in position 4 is any amino acid
  Variant (5)..(5): Xaa in position 5 is Val, Ile or Tyr
  Variant (6)..(6): Xaa in position 6 is any amino acid
  Variant (8)..(8): Xaa in position 8 is any amino acid
  Variant (10)..(10): Xaa in position 10 is Lys, Asn or Arg
  Variant (13)..(13): Xaa in position 13 is any amino acid
  Variant (14)..(14): Xaa in position 14 is Ile or Val
  Variant (15)..(15): Xaa in position 15 is any amino acid
  Variant (16)..(16): Xaa in position 16 is Val or Ile
  Variant (17)..(17): Xaa in position 17 is any amino acid
  Variant (18)..(18): Xaa in position 18 is Val, Leu or Ile
  Variant (19)..(19): Xaa in position 19 is any amino acid
  Variant (21)..(21): Xaa in position 21 is Asp or Asn
  Variant (22)..(26): Xaa in position 22 to 26 is any amino acid
  Variant (27)..(27): Xaa in position 27 is any or no amino acid
  Variant (28)..(28): Xaa in position 28 is Ile or Thr
  Variant (29)..(29): Xaa in position 29 is any amino acid
  Variant (32)..(32): Xaa in position 32 is Leu, Val or Ile
  Variant (33)..(33): Xaa in position 33 is any amino acid
  Variant (34)..(34): Xaa in position 34 is Phe or Met
  Variant (36)..(36): Xaa in position 36 is Asp or Asn
  Variant (40)..(40): Xaa in position 40 is Asp or Glu
  Variant (42)..(42): Xaa in position 42 is Ile or Leu
  Variant (43)..(43): Xaa in position 43 is Ala, Gly or Ser
  Variant (44)..(44): Xaa in position 44 is any amino acid

SEQ ID NO: 24579 - protein, 61 aa, Artificial sequence; identical to SEQ ID NO: 23513
  Consensus
  Variant (3)..(3): Xaa in position 3 is Leu or Ile
  Variant (4)..(4): Xaa in position 4 is any amino acid
  Variant (5)..(5): Xaa in position 5 is Ile or Val
  Variant (7)..(7): Xaa in position 7 is Asp or Glu
  Variant (10)..(10): Xaa in position 10 is Thr or Ser
  Variant (11)..(11): Xaa in position 11 is Val or Ile
  Variant (14)..(14): Xaa in position 14 is Thr or Val
  Variant (15)..(15): Xaa in position 15 is Ala or Gly
  Variant (16)..(16): Xaa in position 16 is Leu or Ile
  Variant (17)..(17): Xaa in position 17 is Ala, Val or Ser
  Variant (18)..(18): Xaa in position 18 is Leu or Ile
  Variant (19)..(19): Xaa in position 19 is Gly or Arg
  Variant (20)..(20): Xaa in position 20 is any amino acid
  Variant (21)..(21): Xaa in position 21 is Ala or Cys
  Variant (22)..(22): Xaa in position 22 is Leu, Ile or Val
  Variant (23)..(24): Xaa in position 23 to 24 is any amino acid
  Variant (26)..(26): Xaa in position 26 is Leu, Ile or Val
  Variant (27)..(27): Xaa in position 27 is Gly, Asn or Arg
  Variant (28)..(28): Xaa in position 28 is Asp, Asn or Ser
  Variant (30)..(30): Xaa in position 30 is any amino acid
  Variant (32)..(32): Xaa in position 32 is Ile or Leu
  Variant (33)..(33): Xaa in position 33 is any amino acid
  Variant (35)..(35): Xaa in position 35 is Phe or Tyr
  Variant (36)..(53): Xaa in position 36 to 53 is any or no amino acid
  Variant (55)..(55): Xaa in position 55 is Phe or Tyr
  Variant (56)..(56): Xaa in position 56 is any amino acid
  Variant (61)..(61): Xaa in position 61 is Glu or Asp

SEQ ID NO: 24580 - protein, 68 aa, Artificial sequence; identical to SEQ ID NO: 23514
  Consensus
  Variant (1)..(1): Xaa in position 1 is Val, Ile or Leu
  Variant (3)..(3): Xaa in position 3 is any amino acid
  Variant (4)..(4): Xaa in position 4 is Leu, Met or Phe
  Variant (5)..(5): Xaa in position 5 is any amino acid
  Variant (6)..(6): Xaa in position 6 is Thr or Ser
  Variant (7)..(7): Xaa in position 7 is Glu, His or Asp
  Variant (8)..(8): Xaa in position 8 is Met or Leu
  Variant (9)..(10): Xaa in position 9 to 10 is any amino acid
  Variant (14)..(14): Xaa in position 14 is any amino acid
  Variant (16)..(16): Xaa in position 16 is Leu, Ile, Val or Phe
  Variant (17)..(22): Xaa in position 17 to 22 is any amino acid
  Variant (23)..(23): Xaa in position 23 is Thr, Asn or Ser
  Variant (25)..(25): Xaa in position 25 is His or Asn
  Variant (26)..(26): Xaa in position 26 is Leu, Ile or Val
  Variant (27)..(29): Xaa in position 27 to 29 is any amino acid
  Variant (31)..(31): Xaa in position 31 is any amino acid
  Variant (33)..(33): Xaa in position 33 is Asp, Glu or Ala
  Variant (36)..(37): Xaa in position 36 to 37 is any amino acid
  Variant (39)..(39): Xaa in position 39 is Ser, Gly or Ala
  Variant (40)..(40): Xaa in position 40 is Leu, Cys or Ile
  Variant (43)..(43): Xaa in position 43 is Ala, Val or Ser
  Variant (44)..(44): Xaa in position 44 is Phe or Leu
  Variant (45)..(45): Xaa in position 45 is Gly or Ala
  Variant (46)..(46): Xaa in position 46 is Arg or Lys
  Variant (47)..(47): Xaa in position 47 is Thr, Ala or Ser
  Variant (48)..(48): Xaa in position 48 is Leu or Val
  Variant (49)..(49): Xaa in position 49 is Arg, Lys or Asn
  Variant (50)..(50): Xaa in position 50 is Gln, Met or Lys
  Variant (51)..(51): Xaa in position 51 is Ala or Cys
  Variant (52)..(52): Xaa in position 52 is Ile, Leu or Val
  Variant (53)..(53): Xaa in position 53 is any amino acid
  Variant (54)..(55): Xaa in position 54 to 55 is any or no amino acid
  Variant (56)..(56): Xaa in position 56 is Val, Ile or Arg
  Variant (57)..(57): Xaa in position 57 is any amino acid
  Variant (58)..(58): Xaa in position 58 is Gly, His or Ser
  Variant (59)..(60): Xaa in position 59 to 60 is any amino acid
  Variant (61)..(61): Xaa in position 61 is Leu, Met or Ile
  Variant (62)..(62): Xaa in position 62 is Pro or Ala
  Variant (63)..(64): Xaa in position 63 to 64 is Ser or Thr
  Variant (67)..(67): Xaa in position 67 is any amino acid
  Variant (68)..(68): Xaa in position 68 is Leu or Ile

SEQ ID NO: 24581 - DNA, 1431 bp, Escherichia coli; identical to SEQ ID NO: 14875
  CDS (1)..(1431)

SEQ ID NO: 24582 - protein, 476 aa, Escherichia coli; identical to SEQ ID NO: 14876

SEQ ID NO: 24583 - DNA, 1638 bp, Fusobacterium nucleatum subsp. nucleatum ATCC 25586; identical to SEQ ID NO: 14877
  CDS (1)..(1638): transl_table=11

SEQ ID NO: 24584 - protein, 545 aa, Fusobacterium nucleatum subsp. nucleatum ATCC 25586; identical to SEQ ID NO: 14878

SEQ ID NO: 24585 - DNA, 1392 bp, Clostridium tetani E88; identical to SEQ ID NO: 14879
  CDS (1)..(1392): transl_table=11

SEQ ID NO: 24586 - protein, 463 aa, Clostridium tetani E88; identical to SEQ ID NO: 14880

SEQ ID NO: 24587 - DNA, 1380 bp, Bacteroides thetaiotaomicron VPI-5482; identical to SEQ ID NO: 14881
  CDS (1)..(1380): transl_table=11

SEQ ID NO: 24588 - protein, 459 aa, Bacteroides thetaiotaomicron VPI-5482; identical to SEQ ID NO: 14882

SEQ ID NO: 24589 - DNA, 1380 bp, Porphyromonas gingivalis W83; identical to SEQ ID NO: 14883
  CDS (1)..(1380): transl_table=11

SEQ ID NO: 24590 - protein, 459 aa, Porphyromonas gingivalis W83; identical to SEQ ID NO: 14884

SEQ ID NO: 24591 - DNA, 1449 bp, Rhodopseudomonas palustris CGA009; identical to SEQ ID NO: 14885
  CDS (1)..(1449): transl_table=11

SEQ ID NO: 24592 - protein, 482 aa, Rhodopseudomonas palustris CGA009; identical to SEQ ID NO: 14886

SEQ ID NO: 24593 - DNA, 1380 bp, Treponema denticola ATCC 35405; identical to SEQ ID NO: 14887
  CDS (1)..(1380): transl_table=11

SEQ ID NO: 24594 - protein, 459 aa, Treponema denticola ATCC 35405; identical to SEQ ID NO: 14888

SEQ ID NO: 24595 - DNA, 1380 bp, Treponema denticola ATCC 35405; identical to SEQ ID NO: 14889
  CDS (1)..(1380): transl_table=11

SEQ ID NO: 24596 - protein, 459 aa, Treponema denticola ATCC 35405; identical to SEQ ID NO: 14890

SEQ ID NO: 24597 - DNA, 1617 bp, Entamoeba histolytica HM-1:IMSS; identical to SEQ ID NO: 14891
  CDS (1)..(1617)

SEQ ID NO: 24598 - protein, 538 aa, Entamoeba histolytica HM-1:IMSS; identical to SEQ ID NO: 14892

SEQ ID NO: 24599 - DNA, 1389 bp, Desulfovibrio vulgaris subsp. vulgaris str. Hildenborough; identical to SEQ ID NO: 14893
  CDS (1)..(1389): transl_table=11

SEQ ID NO: 24600 - protein, 462 aa, Desulfovibrio vulgaris subsp. vulgaris str. Hildenborough; identical to SEQ ID NO: 14894

SEQ ID NO: 24601 - DNA, 1377 bp, Propionibacterium acnes KPA171202; identical to SEQ ID NO: 14895
  CDS (1)..(1377): transl_table=11

SEQ ID NO: 24602 - protein, 458 aa, Propionibacterium acnes KPA171202; identical to SEQ ID NO: 14896

SEQ ID NO: 24603 - DNA, 1365 bp, Symbiobacterium thermophilum IAM 14863; identical to SEQ ID NO: 14897
  CDS (1)..(1365): transl_table=11

SEQ ID NO: 24604 - protein, 454 aa, Symbiobacterium thermophilum IAM 14863; identical to SEQ ID NO: 14898

SEQ ID NO: 24605 - DNA, 1416 bp, Symbiobacterium thermophilum IAM 14863; identical to SEQ ID NO: 14899
  CDS (1)..(1416): transl_table=11

SEQ ID NO: 24606 - protein, 471 aa, Symbiobacterium thermophilum IAM 14863; identical to SEQ ID NO: 14900

SEQ ID NO: 24607 - DNA, 1443 bp, Photobacterium profundum SS9; identical to SEQ ID NO: 14901
  CDS (1)..(1443): transl_table=11

SEQ ID NO: 24608 - protein, 480 aa, Photobacterium profundum SS9; identical to SEQ ID NO: 14902

SEQ ID NO: 24609 - DNA, 1467 bp, Photobacterium profundum SS9; identical to SEQ ID NO: 14903
  CDS (1)..(1467): transl_table=11

SEQ ID NO: 24610 - protein, 488 aa, Photobacterium profundum SS9; identical to SEQ ID NO: 14904

SEQ ID NO: 24611 - DNA, 1401 bp, Photobacterium profundum SS9; identical to SEQ ID NO: 14905
  CDS (1)..(1401): transl_table=11

SEQ ID NO: 24612 - protein, 466 aa, Photobacterium profundum SS9; identical to SEQ ID NO: 14906

SEQ ID NO: 24613 - DNA, 1344 bp, Haloarcula marismortui ATCC 43049; identical to SEQ ID NO: 14907
  CDS (1)..(1344): transl_table=11

SEQ ID NO: 24614 - protein, 447 aa, Haloarcula marismortui ATCC 43049; identical to SEQ ID NO: 14908

SEQ ID NO: 24615 - DNA, 1449 bp, Azoarcus sp. EbN1; identical to SEQ ID NO: 14909
  CDS (1)..(1449): transl_table=11

SEQ ID NO: 24616 - protein, 482 aa, Azoarcus sp. EbN1; identical to SEQ ID NO: 14910

SEQ ID NO: 24617 - DNA, 1404 bp, Nostoc punctiforme PCC 73102; identical to SEQ ID NO: 14911
  CDS (1)..(1404)

SEQ ID NO: 24618 - protein, 467 aa, Nostoc punctiforme PCC 73102; identical to SEQ ID NO: 14912

SEQ ID NO: 24619 - DNA, 1416 bp, Haemophilus somnus 129PT; identical to SEQ ID NO: 14913
  CDS (1)..(1416)

SEQ ID NO: 24620 - protein, 471 aa, Haemophilus somnus 129PT; identical to SEQ ID NO: 14914

SEQ ID NO: 24621 - DNA, 1569 bp, Fusobacterium nucleatum subsp. vincentii ATCC 49256; identical to SEQ ID NO: 14915
  CDS (1)..(1569): transl_table=11

SEQ ID NO: 24622 - protein, 522 aa, Fusobacterium nucleatum subsp. vincentii ATCC 49256; identical to SEQ ID NO: 14916

SEQ ID NO: 24623 - DNA, 1383 bp, Fusobacterium nucleatum subsp. vincentii ATCC 49256; identical to SEQ ID NO: 14917
  CDS (1)..(1383): transl_table=11

SEQ ID NO: 24624 - protein, 460 aa, Fusobacterium nucleatum subsp. vincentii ATCC 49256; identical to SEQ ID NO: 14918

SEQ ID NO: 24625 - DNA, 1182 bp, Haemophilus influenzae 86-028NP; identical to SEQ ID NO: 14919
  CDS (1)..(1182)

SEQ ID NO: 24626 - protein, 393 aa, Haemophilus influenzae 86-028NP; identical to SEQ ID NO: 14920

SEQ ID NO: 24627 - DNA, 1347 bp, Solibacter usitatus Ellin6076; identical to SEQ ID NO: 14921
  CDS (1)..(1347): transl_table=11

SEQ ID NO: 24628 - protein, 448 aa, Solibacter usitatus Ellin6076; identical to SEQ ID NO: 14922

SEQ ID NO: 24629 - DNA, 1374 bp, Desulfitobacterium hafniense DCB-2; identical to SEQ ID NO: 14923
  CDS (1)..(1374): transl_table=11

SEQ ID NO: 24630 - protein, 457 aa, Desulfitobacterium hafniense DCB-2; identical to SEQ ID NO: 14924

SEQ ID NO: 24631 - DNA, 1389 bp, Desulfitobacterium hafniense DCB-2; identical to SEQ ID NO: 14925
  CDS (1)..(1389): transl_table=11

SEQ ID NO: 24632 - protein, 462 aa, Desulfitobacterium hafniense DCB-2; identical to SEQ ID NO: 14926

SEQ ID NO: 24633 - DNA, 1443 bp, uncultured bacterium; identical to SEQ ID NO: 14927
  CDS (1)..(1443)

SEQ ID NO: 24634 - protein, 480 aa, uncultured bacterium; identical to SEQ ID NO: 14928

SEQ ID NO: 24635 - DNA, 1365 bp, Symbiobacterium thermophilum; identical to SEQ ID NO: 14929
  CDS (1)..(1365)

SEQ ID NO: 24636 - protein, 454 aa, Symbiobacterium thermophilum; identical to SEQ ID NO: 14930

SEQ ID NO: 24637 - DNA, 1365 bp, Symbiobacterium thermophilum; identical to SEQ ID NO: 14897
  CDS (1)..(1365)

SEQ ID NO: 24638 - protein, 454 aa, Symbiobacterium thermophilum; identical to SEQ ID NO: 14898

SEQ ID NO: 24639 - DNA, 1386 bp, Chromobacterium violaceum; identical to SEQ ID NO: 14933
  CDS (1)..(1386): transl_table=11

SEQ ID NO: 24640 - protein, 461 aa, Chromobacterium violaceum; identical to SEQ ID NO: 14934

SEQ ID NO: 24641 - DNA, 1419 bp, Clostridium tetani; identical to SEQ ID NO: 14935
  CDS (1)..(1419): transl_table=11

SEQ ID NO: 24642 - protein, 472 aa, Clostridium tetani; identical to SEQ ID NO: 14936

SEQ ID NO: 24643 - DNA, 1389 bp, Enterobacter aerogenes; identical to SEQ ID NO: 14937
  CDS (1)..(1389): transl_table=11

SEQ ID NO: 24644 - protein, 462 aa, Enterobacter aerogenes; identical to SEQ ID NO: 14938

SEQ ID NO: 24645 - DNA, 1419 bp, Haemophilus influenzae; identical to SEQ ID NO: 14939
  CDS (1)..(1419): transl_table=11

SEQ ID NO: 24646 - protein, 472 aa, Haemophilus influenzae; identical to SEQ ID NO: 14940

SEQ ID NO: 24647 - DNA, 1347 bp, Halobacterium salinarium; identical to SEQ ID NO: 14941
  CDS (1)..(1347)

SEQ ID NO: 24648 - protein, 448 aa, Halobacterium salinarium; identical to SEQ ID NO: 14942

SEQ ID NO: 24649 - DNA, 1416 bp, Pasteurella multocida; identical to SEQ ID NO: 14943
  CDS (1)..(1416): transl_table=11

SEQ ID NO: 24650 - protein, 471 aa, Pasteurella multocida; identical to SEQ ID NO: 14944

SEQ ID NO: 24651 - DNA, 1401 bp, Photorhabdus luminescens; identical to SEQ ID NO: 14945
  CDS (1)..(1401): transl_table=11

SEQ ID NO: 24652 - protein, 466 aa, Photorhabdus luminescens; identical to SEQ ID NO: 14946

SEQ ID NO: 24653 - DNA, 1398 bp, Proteus inconstans; identical to SEQ ID NO: 14947
  CDS (1)..(1398): transl_table=11

SEQ ID NO: 24654 - protein, 465 aa, Proteus inconstans; identical to SEQ ID NO: 14948

SEQ ID NO: 24655 - DNA, 1404 bp, Proteus vulgaris; identical to SEQ ID NO: 14949
  CDS (1)..(1404): transl_table=11

SEQ ID NO: 24656 - protein, 467 aa, Proteus vulgaris; identical to SEQ ID NO: 14950

SEQ ID NO: 24657 - DNA, 1365 bp, Rhodobacter capsulatus; identical to SEQ ID NO: 14951
  CDS (1)..(1365): transl_table=11

SEQ ID NO: 24658 - protein, 454 aa, Rhodobacter capsulatus; identical to SEQ ID NO: 14952

SEQ ID NO: 24659 - DNA, 1389 bp, Thermoanaerobacter tengcongensis; identical to SEQ ID NO: 14953
  CDS (1)..(1389): transl_table=11

SEQ ID NO: 24660 - protein, 462 aa, Thermoanaerobacter tengcongensis; identical to SEQ ID NO: 14954

SEQ ID NO: 24661 - DNA, 1419 bp, Vibrio cholerae; identical to SEQ ID NO: 14955
  CDS (1)..(1419): transl_table=11

SEQ ID NO: 24662 - protein, 472 aa, Vibrio cholerae; identical to SEQ ID NO: 14956

SEQ ID NO: 24663 - DNA, 1401 bp, Vibrio parahaemolyticus; identical to SEQ ID NO: 14957
  CDS (1)..(1401): transl_table=11

SEQ ID NO: 24664 - protein, 466 aa, Vibrio parahaemolyticus; identical to SEQ ID NO: 14958

SEQ ID NO: 24665 - DNA, 1422 bp, Vibrio vulnificus; identical to SEQ ID NO: 14959
  CDS (1)..(1422): transl_table=11

SEQ ID NO: 24666 - protein, 473 aa, Vibrio vulnificus; identical to SEQ ID NO: 14960

SEQ ID NO: 24667 - DNA, 1371 bp, Citrobacter freundii; identical to SEQ ID NO: 14961
  CDS (1)..(1371): transl_table=11

SEQ ID NO: 24668 - protein, 456 aa, Citrobacter freundii; identical to SEQ ID NO: 14962

SEQ ID NO: 24669 - DNA, 1383 bp, Clostridium tetani; identical to SEQ ID NO: 14963
  CDS (1)..(1383)

SEQ ID NO: 24670 - protein, 460 aa, Clostridium tetani; identical to SEQ ID NO: 14964

SEQ ID NO: 24671 - DNA, 1371 bp, Enterobacter agglomerans; identical to SEQ ID NO: 14965
  CDS (1)..(1371): transl_table=11

SEQ ID NO: 24672 - protein, 456 aa, Enterobacter agglomerans; identical to SEQ ID NO: 14966

SEQ ID NO: 24673 - DNA, 1383 bp, Fusobacterium nucleatum; identical to SEQ ID NO: 14967
  CDS (1)..(1383): transl_table=11

SEQ ID NO: 24674 - protein, 460 aa, Fusobacterium nucleatum; identical to SEQ ID NO: 14968

SEQ ID NO: 24675 - DNA, 1377 bp, Pasteurella multocida; identical to SEQ ID NO: 14969
  CDS (1)..(1377): transl_table=11

SEQ ID NO: 24676 - protein, 458 aa, Pasteurella multocida; identical to SEQ ID NO: 14970

SEQ ID NO: 24677 - DNA, 1377 bp, Symbiobacterium sp; identical to SEQ ID NO: 14971
  CDS (1)..(1377): transl_table=11

SEQ ID NO: 24678 - protein, 458 aa, Symbiobacterium sp; identical to SEQ ID NO: 14972

SEQ ID NO: 24679 - DNA, 27 bp, Artificial sequence
  Primer sequence
atgaaggattatgtaatggaaaacttt

SEQ ID NO: 24680 - DNA, 26 bp, Artificial sequence
  Primer sequence
ttaaacttctttaagttttgcggtga

SEQ ID NO: 24681 - protein, 533 aa, Artificial sequence; identical to SEQ ID NO: 14975
  Consensus
  Variant (2)..(2): Xaa in position 2 is any amino acid
  Variant (7)..(7): Xaa in position 7 is any amino acid
  Variant (10)..(10): Xaa in position 10 is any amino acid
  Variant (12)..(18): Xaa in position 12 to 18 is any amino acid
  Variant (20)..(22): Xaa in position 20 to 22 is any amino acid
  Variant (24)..(25): Xaa in position 24 to 25 is any amino acid
  Variant (27)..(28): Xaa in position 27 to 28 is any amino acid
  Variant (30)..(30): Xaa in position 30 is any amino acid
  Variant (32)..(32): Xaa in position 32 is any amino acid
  Variant (34)..(34): Xaa in position 34 is any amino acid
  Variant (36)..(37): Xaa in position 36 to 37 is any amino acid
  Variant (49)..(49): Xaa in position 49 is any amino acid
  Variant (53)..(54): Xaa in position 53 to 54 is any amino acid
  Variant (56)..(56): Xaa in position 56 is any or no amino acid
  Variant (61)..(61): Xaa in position 61 is any amino acid
  Variant (70)..(71): Xaa in position 70 to 71 is any amino acid
  Variant (73)..(74): Xaa in position 73 to 74 is any amino acid
  Variant (76)..(78): Xaa in position 76 to 78 is any amino acid
  Variant (80)..(80): Xaa in position 80 is any amino acid
  Variant (83)..(83): Xaa in position 83 is any amino acid
  Variant (86)..(88): Xaa in position 86 to 88 is any amino acid
  Variant (89)..(134): Xaa in position 89 to 134 is any or no amino acid
  Variant (137)..(137): Xaa in position 137 is any amino acid
  Variant (145)..(145): Xaa in position 145 is any amino acid
  Variant (147)..(150): Xaa in position 147 to 150 is any amino acid
  Variant (153)..(160): Xaa in position 153 to 160 is any amino acid
  Variant (161)..(170): Xaa in position 161 to 170 is any or no amino acid
  Variant (172)..(173): Xaa in position 172 to 173 is any amino acid
  Variant (175)..(175): Xaa in position 175 is any amino acid
  Variant (178)..(179): Xaa in position 178 to 179 is any amino acid
  Variant (181)..(184): Xaa in position 181 to 184 is any amino acid
  Variant (187)..(190): Xaa in position 187 to 190 is any amino acid
  Variant (192)..(195): Xaa in position 192 to 195 is any amino acid
  Variant (197)..(202): Xaa in position 197 to 202 is any amino acid
  Variant (203)..(210): Xaa in position 203 to 210 is any or no amino acid
  Variant (214)..(215): Xaa in position 214 to 215 is any amino acid
  Variant (218)..(218): Xaa in position 218 is any amino acid
  Variant (221)..(223): Xaa in position 221 to 223 is any amino acid
  Variant (225)..(227): Xaa in position 225 to 227 is any amino acid
  Variant (229)..(230): Xaa in position 229 to 230 is any amino acid
  Variant (231)..(231): Xaa in position 231 is any or no amino acid
  Variant (233)..(234): Xaa in position 233 to 234 is any amino acid
  Variant (236)..(238): Xaa in position 236 to 238 is any amino acid
  Variant (241)..(241): Xaa in position 241 is any amino acid
  Variant (243)..(244): Xaa in position 243 to 244 is any amino acid
  Variant (252)..(252): Xaa in position 252 is any amino acid
  Variant (256)..(259): Xaa in position 256 to 259 is any amino acid
  Variant (261)..(263): Xaa in position 261 to 263 is any amino acid
  Variant (265)..(265): Xaa in position 265 is any amino acid
  Variant (267)..(267): Xaa in position 267 is any amino acid
  Variant (269)..(270): Xaa in position 269 to 270 is any amino acid
  Variant (273)..(273): Xaa in position 273 is any amino acid
  Variant (275)..(276): Xaa in position 275 to 276 is any amino acid
  Variant (283)..(285): Xaa in position 283 to 285 is any amino acid
  Variant (287)..(288): Xaa in position 287 to 288 is any amino acid
  Variant (290)..(292): Xaa in position 290 to 292 is any amino acid
  Variant (295)..(296): Xaa in position 295 to 296 is any amino acid
  Variant (298)..(299): Xaa in position 298 to 299 is any amino acid
  Variant (301)..(301): Xaa in position 301 is any amino acid
  Variant (303)..(303): Xaa in position 303 is any amino acid
  Variant (307)..(309): Xaa in position 307 to 309 is any amino acid
  Variant (316)..(316): Xaa in position 316 is any amino acid
  Variant (323)..(323): Xaa in position 323 is any amino acid
  Variant (325)..(327): Xaa in position 325 to 327 is any amino acid
  Variant (329)..(330): Xaa in position 329 to 330 is any amino acid
  Variant (331)..(348): Xaa in position 331 to 348 is any or no amino acid
  Variant (351)..(357): Xaa in position 351 to 357 is any amino acid
  Variant (359)..(360): Xaa in position 359 to 360 is any amino acid
  Variant (363)..(364): Xaa in position 363 to 364 is any amino acid
  Variant (370)..(370): Xaa in position 370 is any amino acid
  Variant (375)..(375): Xaa in position 375 is any amino acid
  Variant (379)..(379): Xaa in position 379 is any amino acid
  Variant (382)..(382): Xaa in position 382 is any amino acid
  Variant (384)..(388): Xaa in position 384 to 388 is any amino acid
  Variant (391)..(392): Xaa in position 391 to 392 is any amino acid
  Variant (395)..(395): Xaa in position 395 is any amino acid
  Variant (398)..(398): Xaa in position 398 is any amino acid
  Variant (401)..(403): Xaa in position 401 to 403 is any amino acid
  Variant (405)..(407): Xaa in position 405 to 407 is any amino acid
  Variant (410)..(413): Xaa in position 410 to 413 is any amino acid
  Variant (414)..(414): Xaa in position 414 is any or no amino acid
  Variant (416)..(416): Xaa in position 416 is any or no amino acid
  Variant (421)..(421): Xaa in position 421 is any amino acid
  Variant (426)..(429): Xaa in position 426 to 429 is any amino acid
  Variant (431)..(433): Xaa in position 431 to 433 is any or no amino acid
  Variant (436)..(439): Xaa in position 436 to 439 is any amino acid
  Variant (443)..(444): Xaa in position 443 to 444 is any amino acid
  Variant (446)..(448): Xaa in position 446 to 448 is any amino acid
  Variant (451)..(453): Xaa in position 451 to 453 is any amino acid
  Variant (457)..(458): Xaa in position 457 to 458 is any amino acid
  Variant (460)..(460): Xaa in position 460 is any amino acid
  Variant (462)..(467): Xaa in position 462 to 467 is any amino acid
  Variant (468)..(470): Xaa in position 468 to 470 is any or no amino acid
  Variant (472)..(479): Xaa in position 472 to 479 is any or no amino acid
  Variant (481)..(482): Xaa in position 481 to 482 is any amino acid
  Variant (485)..(485): Xaa in position 485 is any amino acid
  Variant (489)..(490): Xaa in position 489 to 490 is any amino acid
  Variant (493)..(494): Xaa in position 493 to 494 is any amino acid
  Variant (498)..(498): Xaa in position 498 is any amino acid
  Variant (500)..(505): Xaa in position 500 to 505 is any amino acid
  Variant (507)..(512): Xaa in position 507 to 512 is any amino acid
  Variant (514)..(514): Xaa in position 514 is any amino acid
  Variant (515)..(515): Xaa in position 515 is any or no amino acid
  Variant (518)..(521): Xaa in position 518 to 521 is any amino acid
  Variant (524)..(525): Xaa in position 524 to 525 is any amino acid
  Variant (526)..(527): Xaa in position 526 to 527 is any or no amino acid
  Variant (530)..(530): Xaa in position 530 is any amino acid
  Variant (532)..(532): Xaa in position 532 is any amino acid

SEQ ID NO: 24682 - protein, 85 aa, Artificial sequence; identical to SEQ ID NO: 14976
  Consensus
  Variant (2)..(2): Xaa in position 2 is Pro or Ser
  Variant (3)..(4): Xaa in position 3 to 4 is any amino acid
  Variant (5)..(5): Xaa in position 5 is Ile, Leu or Met
  Variant (6)..(8): Xaa in position 6 to 8 is any amino acid
  Variant (10)..(10): Xaa in position 10 is any amino acid
  Variant (11)..(18): Xaa in position 11 to 18 is any or no amino acid
  Variant (20)..(25): Xaa in position 20 to 25 is any amino acid
  Variant (26)..(26): Xaa in position 26 is Ala, Ser or Val
  Variant (27)..(28): Xaa in position 27 to 28 is any amino acid
  Variant (30)..(30): Xaa in position 30 is any amino acid
  Variant (32)..(32): Xaa in position 32 is any amino acid
  Variant (33)..(33): Xaa in position 33 is Ile or Leu
  Variant (34)..(34): Xaa in position 34 is any amino acid
  Variant (35)..(35): Xaa in position 35 is Ala, Gly or Ser
  Variant (36)..(39): Xaa in position 36 to 39 is any amino acid
  Variant (49)..(49): Xaa in position 49 is Ala, Gly, Asn, Ser or Thr
  Variant (51)..(51): Xaa in position 51 is Ile, Met or Val
  Variant (52)..(52): Xaa in position 52 is Ser or Thr
  Variant (53)..(53): Xaa in position 53 is Asp, Asn, Gln or Ser
  Variant (54)..(56): Xaa in position 54 to 56 is any amino acid
  Variant (57)..(57): Xaa in position 57 is Ala, Gly or Ser
  Variant (58)..(58): Xaa in position 58 is Ala or Gly
  Variant (59)..(59): Xaa in position 59 is Ile, Leu, Met or Val
  Variant (60)..(60): Xaa in position 60 is Phe, Ile, Leu or Met
  Variant (61)..(61): Xaa in position 61 is any amino acid
  Variant (65)..(65): Xaa in position 65 is Ala or Ser
  Variant (67)..(67): Xaa in position 67 is Ala or Ser
  Variant (69)..(69): Xaa in position 69 is Ala, Gly or Ser
  Variant (70)..(70): Xaa in position 70 is any amino acid
  Variant (71)..(71): Xaa in position 71 is Asn or Ser
  Variant (72)..(72): Xaa in position 72 is Phe, Trp or Tyr
  Variant (73)..(74): Xaa in position 73 to 74 is any amino acid
  Variant (75)..(75): Xaa in position 75 is Phe, Leu or Met
  Variant (76)..(78): Xaa in position 76 to 78 is any amino acid
  Variant (79)..(79): Xaa in position 79 is Ala, Gly, Ile or Val
  Variant (80)..(83): Xaa in position 80 to 83 is any amino acid
  Variant (84)..(84): Xaa in position 84 is Asp, Gly, Asn or Pro
  Variant (85)..(85): Xaa in position 85 is Phe or Tyr

SEQ ID NO: 24683 - protein, 41 aa, Artificial sequence; identical to SEQ ID NO: 14977
  Consensus
  Variant (2)..(2): Xaa in position 2 is Ala or Thr
  Variant (7)..(7): Xaa in position 7 is Ala or Gly
  Variant (10)..(10): Xaa in position 10 is any amino acid
  Variant (11)..(15): Xaa in position 11 to 15 is any or no amino acid
  Variant (17)..(40): Xaa in position 17 to 40 is any amino acid
  Variant (41)..(41): Xaa in position 41 is Ala, Glu, Gly, Gln or Thr

SEQ ID NO: 24684 - protein, 100 aa, Artificial sequence; identical to SEQ ID NO: 14978
  Consensus
  Variant (2)..(13): Xaa in position 2 to 13 is any amino acid
  Variant (14)..(17): Xaa in position 14 to 17 is any or no amino acid
  Variant (19)..(19): Xaa in position 19 is Cys, Asn, Ser or Val
  Variant (21)..(22): Xaa in position 21 to 22 is any amino acid
  Variant (27)..(27): Xaa in position 27 is Ile or Val
  Variant (29)..(29): Xaa in position 29 is Ile, Leu or Met
  Variant (30)..(30): Xaa in position 30 is any amino acid
  Variant (32)..(32): Xaa in position 32 is Ile, Leu or Met
  Variant (33)..(33): Xaa in position 33 is any amino acid
  Variant (34)..(34): Xaa in position 34 is Ala, Asp, Glu, Gly or Ser
  Variant (35)..(37): Xaa in position 35 to 37 is any amino acid
  Variant (38)..(38): Xaa in position 38 is Ile, Leu, Met or Val
  Variant (39)..(39): Xaa in position 39 is Ala, Cys or Thr
  Variant (40)..(43): Xaa in position 40 to 43 is any amino acid
  Variant (44)..(44): Xaa in position 44 is Ile or Val
  Variant (45)..(45): Xaa in position 45 is any amino acid
  Variant (46)..(46): Xaa in position 46 is Phe, Ile, Leu, Met or Val
  Variant (47)..(48): Xaa in position 47 to 48 is any amino acid
  Variant (50)..(50): Xaa in position 50 is Ala, Ser or Val
  Variant (51)..(51): Xaa in position 51 is Ala, Cys or Thr
  Variant (53)..(53): Xaa in position 53 is any amino acid
  Variant (54)..(54): Xaa in position 54 is Ala, Cys, Ser or Val
  Variant (57)..(57): Xaa in position 57 is Ala or Cys
  Variant (58)..(58): Xaa in position 58 is His, Trp or Tyr
  Variant (60)..(60): Xaa in position 60 is Ile or Val
  Variant (61)..(62): Xaa in position 61 to 62 is any amino acid
  Variant (63)..(63): Xaa in position 63 is Asp, Gln or Arg
  Variant (64)..(64): Xaa in position 64 is Asp or Glu
  Variant (65)..(68): Xaa in position 65 to 68 is any amino acid
  Variant (69)..(69): Xaa in position 69 is Asp, Glu, Gly, Asn or Ser
  Variant (70)..(71): Xaa in position 70 to 71 is any amino acid
  Variant (72)..(72): Xaa in position 72 is Ile, Leu, Pro or Val
  Variant (73)..(73): Xaa in position 73 is any amino acid
  Variant (74)..(74): Xaa in position 74 is Asp, Glu, Gln, Ser or Thr
  Variant (75)..(75): Xaa in position 75 is Ile or Val
  Variant (76)..(77): Xaa in position 76 to 77 is any amino acid
  Variant (78)..(78): Xaa in position 78 is Asp, Glu or Lys
  Variant (79)..(83): Xaa in position 79 to 83 is any amino acid
  Variant (84)..(84): Xaa in position 84 is Asp or Glu
  Variant (85)..(88): Xaa in position 85 to 88 is any amino acid
  Variant (90)..(90): Xaa in position 90 is Ala, Gly or Ser
  Variant (94)..(94): Xaa in position 94 is Ala, Cys, Gly, Pro or Thr
  Variant (95)..(95): Xaa in position 95 is Phe, Ile, Leu or Met
  Variant (96)..(96): Xaa in position 96 is Ala, Leu or Val
  Variant (97)..(97): Xaa in position 97 is Asn, Pro or Gln
  Variant (98)..(98): Xaa in position 98 is Ile or Met

SEQ ID NO: 24685 - protein, 84 aa, Artificial sequence; identical to SEQ ID NO: 14979
  Consensus
  Variant (2)..(4): Xaa in position 2 to 4 is any amino acid
  Variant (8)..(8): Xaa in position 8 is Leu or Met
  Variant (9)..(9): Xaa in position 9 is Ala, Glu, Asn, Ser or Thr
  Variant (11)..(11): Xaa in position 11 is any amino acid
  Variant (12)..(12): Xaa in position 12 is Ala or Asp
  Variant (13)..(13): Xaa in position 13 is Ile, Leu or Met
  Variant (14)..(16): Xaa in position 14 to 16 is any amino acid
  Variant (18)..(18): Xaa in position 18 is any amino acid
  Variant (20)..(20): Xaa in position 20 is Phe, Ile or Leu
  Variant (21)..(31): Xaa in position 21 to 31 is any amino acid
  Variant (33)..(33): Xaa in position 33 is Ile or Val
  Variant (34)..(34): Xaa in position 34 is any amino acid
  Variant (36)..(39): Xaa in position 36 to 39 is any amino acid
  Variant (40)..(40): Xaa in position 40 is Ala, Gly, Asn or Val
  Variant (41)..(42): Xaa in position 41 to 42 is any amino acid
  Variant (44)..(46): Xaa in position 44 to 46 is any amino acid
  Variant (47)..(47): Xaa in position 47 is Asp, Glu, Gly or Asn
  Variant (48)..(48): Xaa in position 48 is Ile or Val
  Variant (49)..(49): Xaa in position 49 is Ala, Ile, Leu, Pro or Val
  Variant (50)..(52): Xaa in position 50 to 52 is any amino acid
  Variant (53)..(53): Xaa in position 53 is Ala or Pro
  Variant (54)..(54): Xaa in position 54 is any amino acid
  Variant (56)..(56): Xaa in position 56 is any or no amino acid
  Variant (58)..(58): Xaa in position 58 is Ala, Gly or Thr
  Variant (59)..(60): Xaa in position 59 to 60 is any amino acid
  Variant (61)..(61): Xaa in position 61 is Ile, Leu or Val
  Variant (62)..(62): Xaa in position 62 is Asp or Glu
  Variant (63)..(63): Xaa in position 63 is Ala, Gly or Thr
  Variant (64)..(67): Xaa in position 64 to 67 is any amino acid
  Variant (68)..(68): Xaa in position 68 is Glu, Asn, Pro or Thr
  Variant (69)..(75): Xaa in position 69 to 75 is any amino acid
  Variant (76)..(76): Xaa in position 76 is Gly, Ile or Pro
  Variant (77)..(77): Xaa in position 77 is Ala, Asp, Gly or Ser
  Variant (78)..(80): Xaa in position 78 to 80 is any amino acid
  Variant (81)..(81): Xaa in position 81 is Ala, Cys, Gly, Asn, Ser, Thr or Val
  Variant (82)..(83): Xaa in position 82 to 83 is any amino acid
  Variant (84)..(84): Xaa in position 84 is Ile, Leu or Val

SEQ ID NO: 24686 - DNA, 1113 bp, Saccharomyces cerevisiae; identical to SEQ ID NO: 1363
  CDS (1)..(1113)

SEQ ID NO: 24687 - protein, 370 aa, Saccharomyces cerevisiae; identical to SEQ ID NO: 1364

SEQ ID NO: 24688 - DNA, 1086 bp, Deinococcus radiodurans; identical to SEQ ID NO: 1327
  CDS (1)..(1086)

SEQ ID NO: 24689 - protein, 361 aa, Deinococcus radiodurans; identical to SEQ ID NO: 1328

SEQ ID NO: 24690 - DNA, 1071 bp, Salmonella enterica subsp. enterica serovar Typhi; identical to SEQ ID NO: 2245
  CDS (1)..(1071)

SEQ ID NO: 24691 - protein, 356 aa, Salmonella enterica subsp. enterica serovar Typhi; identical to SEQ ID NO: 2246

SEQ ID NO: 24692 - DNA, 1071 bp, Yersinia pestis; identical to SEQ ID NO: 2247
  CDS (1)..(1071)

SEQ ID NO: 24693 - protein, 356 aa, Yersinia pestis; identical to SEQ ID NO: 2248

SEQ ID NO: 24694 - DNA, 1047 bp, Yersinia pestis; identical to SEQ ID NO: 1331
  CDS (1)..(1047)

SEQ ID NO: 24695 - protein, 348 aa, Yersinia pestis; identical to SEQ ID NO: 1332

SEQ ID NO: 24696 - DNA, 1053 bp, Escherichia coli; identical to SEQ ID NO: 2251
  CDS (1)..(1053)

SEQ ID NO: 24697 - protein, 350 aa, Escherichia coli; identical to SEQ ID NO: 1580

SEQ ID NO: 24698 - DNA, 1071 bp, Escherichia coli; identical to SEQ ID NO: 1333
  CDS (1)..(1071)

SEQ ID NO: 24699 - protein, 356 aa, Escherichia coli; identical to SEQ ID NO: 1334

SEQ ID NO: 24700 - DNA, 1131 bp, Nostoc sp. PCC 7120; identical to SEQ ID NO: 1335
  CDS (1)..(1131)

SEQ ID NO: 24701 - protein, 376 aa, Nostoc sp. PCC 7120; identical to SEQ ID NO: 1336

SEQ ID NO: 24702 - DNA, 1053 bp, Salmonella enterica subsp. enterica serovar Typhi; identical to SEQ ID NO: 1337
  CDS (1)..(1053)

SEQ ID NO: 24703 - protein, 350 aa, Salmonella enterica subsp. enterica serovar Typhi; identical to SEQ ID NO: 1338

SEQ ID NO: 24704 - DNA, 1077 bp, Pseudomonas aeruginosa; identical to SEQ ID NO: 1339
  CDS (1)..(1077)

SEQ ID NO: 24705 - protein, 358 aa, Pseudomonas aeruginosa; identical to SEQ ID NO: 1340

SEQ ID NO: 24706 - DNA, 1074 bp, Vibrio cholerae; identical to SEQ ID NO: 1343
  CDS (1)..(1074)

SEQ ID NO: 24707 - protein, 357 aa, Vibrio cholerae; identical to SEQ ID NO: 1344

SEQ ID NO: 24708 - DNA, 1038 bp, Lactococcus lactis subsp. lactis; identical to SEQ ID NO: 1345
  CDS (1)..(1038)

SEQ ID NO: 24709 - protein, 345 aa, Lactococcus lactis subsp. lactis; identical to SEQ ID NO: 1346

SEQ ID NO: 24710 - DNA, 1023 bp, Lactococcus lactis subsp. lactis; identical to SEQ ID NO: 1347
  CDS (1)..(1023)

SEQ ID NO: 24711 - protein, 340 aa, Lactococcus lactis subsp. lactis; identical to SEQ ID NO: 1348

SEQ ID NO: 24712 - DNA, 1032 bp, Streptococcus pneumoniae; identical to SEQ ID NO: 1349
  CDS (1)..(1032)

SEQ ID NO: 24713 - protein, 343 aa, Streptococcus pneumoniae; identical to SEQ ID NO: 1350

SEQ ID NO: 24714 - DNA, 1056 bp, Neisseria meningitidis; identical to SEQ ID NO: 2269
  CDS (1)..(1056)

SEQ ID NO: 24715 - protein, 351 aa, Neisseria meningitidis; identical to SEQ ID NO: 2270

SEQ ID NO: 24716 - DNA, 1095 bp, Pseudomonas aeruginosa; identical to SEQ ID NO: 1351
  CDS (1)..(1095)

SEQ ID NO: 24717 - protein, 364 aa, Pseudomonas aeruginosa; identical to SEQ ID NO: 1352

SEQ ID NO: 24718 - DNA, 1032 bp, Streptococcus pneumoniae; identical to SEQ ID NO: 1355
  CDS (1)..(1032)

SEQ ID NO: 24719 - protein, 343 aa, Streptococcus pneumoniae; identical to SEQ ID NO: 1356

SEQ ID NO: 24720 - DNA, 1143 bp, Xylella fastidiosa; identical to SEQ ID NO: 1603
  CDS (1)..(1143)

SEQ ID NO: 24721 - protein, 380 aa, Xylella fastidiosa; identical to SEQ ID NO: 1604

SEQ ID NO: 24722 - DNA, 1047 bp, Buchnera aphidicola; identical to SEQ ID NO: 1357
  CDS (1)..(1047)

SEQ ID NO: 24723 - protein, 348 aa, Buchnera aphidicola; identical to SEQ ID NO: 1358

SEQ ID NO: 24724 - DNA, 1104 bp, Corynebacterium glutamicum; identical to SEQ ID NO: 2279
  CDS (1)..(1104)

SEQ ID NO: 24725 - protein, 367 aa, Corynebacterium glutamicum; identical to SEQ ID NO: 2280

SEQ ID NO: 24726 - DNA, 1089 bp, Haemophilus influenzae; identical to SEQ ID NO: 1359
  CDS (1)..(1089)

SEQ ID NO: 24727 - protein, 362 aa, Haemophilus influenzae; identical to SEQ ID NO: 1360

SEQ ID NO: 24728 - DNA, 1502 bp, Candida albicans; identical to SEQ ID NO: 1361
  CDS (336)..(1442)

SEQ ID NO: 24729 - protein, 368 aa, Candida albicans; identical to SEQ ID NO: 1362

SEQ ID NO: 24730 - DNA, 2048 bp, Saccharomyces cerevisiae; identical to SEQ ID NO: 1365
  CDS (619)..(1731)

SEQ ID NO: 24731 - protein, 370 aa, Saccharomyces cerevisiae; identical to SEQ ID NO: 1366

SEQ ID NO: 24732 - DNA, 1107 bp, Schizosaccharomyces pombe; identical to SEQ ID NO: 1367
  CDS (1)..(1107)

SEQ ID NO: 24733 - protein, 368 aa, Schizosaccharomyces pombe; identical to SEQ ID NO: 1368

SEQ ID NO: 24734 - DNA, 1089 bp, Amycolatopsis orientalis; identical to SEQ ID NO: 1369
  CDS (1)..(1089)

SEQ ID NO: 24735 - protein, 362 aa, Amycolatopsis orientalis; identical to SEQ ID NO: 1370

SEQ ID NO: 24736 - DNA, 1119 bp, Schizosaccharomyces pombe; identical to SEQ ID NO: 1371
  CDS (1)..(1119)

SEQ ID NO: 24737 - protein, 372 aa, Schizosaccharomyces pombe; identical to SEQ ID NO: 1372

SEQ ID NO: 24738 - DNA, 1083 bp, Methylophilus methylotrophus; identical to SEQ ID NO: 1375
  CDS (1)..(1083)

SEQ ID NO: 24739 - protein, 360 aa, Methylophilus methylotrophus; identical to SEQ ID NO: 1376

SEQ ID NO: 24740 - DNA, 1770 bp, Debaryomyces hansenii; identical to SEQ ID NO: 2295
  CDS (1)..(1770)

SEQ ID NO: 24741 - protein, 589 aa, Debaryomyces hansenii; identical to SEQ ID NO: 2296

SEQ ID NO: 24742 - DNA, 1107 bp, Debaryomyces hansenii; identical to SEQ ID NO: 1377
  CDS (1)..(1107)

SEQ ID NO: 24743 - protein, 368 aa, Debaryomyces hansenii; identical to SEQ ID NO: 1378

SEQ ID NO: 24744 - DNA, 1074 bp, Yarrowia lipolytica; identical to SEQ ID NO: 1379
  CDS (1)..(1074)

SEQ ID NO: 24745 - protein, 357 aa, Yarrowia lipolytica; identical to SEQ ID NO: 1380

SEQ ID NO: 24746 - DNA, 1089 bp, Yarrowia lipolytica; identical to SEQ ID NO: 1381
  CDS (1)..(1089)

SEQ ID NO: 24747 - protein, 362 aa, Yarrowia lipolytica; identical to SEQ ID NO: 1382

SEQ ID NO: 24748 - DNA, 1119 bp, Kluyveromyces lactis; identical to SEQ ID NO: 1383
  CDS (1)..(1119)

SEQ ID NO: 24749 - protein, 372 aa, Kluyveromyces lactis; identical to SEQ ID NO: 1384

SEQ ID NO: 24750 - DNA, 1095 bp, Kluyveromyces lactis; identical to SEQ ID NO: 1385
  CDS (1)..(1095)

SEQ ID NO: 24751 - protein, 364 aa, Kluyveromyces lactis; identical to SEQ ID NO: 1386

SEQ ID NO: 24752 - DNA, 1074 bp, Erwinia carotovora subsp; identical to SEQ ID NO: 1387
  CDS (1)..(1074)

SEQ ID NO: 24753 - protein, 357 aa, Erwinia carotovora subsp; identical to SEQ ID NO: 1388

SEQ ID NO: 24754 - DNA, 1047 bp, Erwinia carotovora subsp; identical to SEQ ID NO: 1389
  CDS (1)..(1047)

SEQ ID NO: 24755 - protein, 348 aa, Erwinia carotovora subsp; identical to SEQ ID NO: 1390

SEQ ID NO: 24756 - DNA, 1056 bp, Erwinia carotovora subsp; identical to SEQ ID NO: 1391
  CDS (1)..(1056)

SEQ ID NO: 24757 - protein, 351 aa, Erwinia carotovora subsp; identical to SEQ ID NO: 1392

SEQ ID NO: 24758 - DNA, 1113 bp, Acinetobacter sp; identical to SEQ ID NO: 1393
  CDS (1)..(1113)

SEQ ID NO: 24759 - protein, 370 aa, Acinetobacter sp; identical to SEQ ID NO: 1394

SEQ ID NO: 24760 - DNA, 1056 bp, Acinetobacter sp; identical to SEQ ID NO: 1395
  CDS (1)..(1056)

SEQ ID NO: 24761 - protein, 351 aa, Acinetobacter sp; identical to SEQ ID NO: 1396

SEQ ID NO: 24762 - DNA, 1119 bp, Candida glabrata; identical to SEQ ID NO: 1397
  CDS (1)..(1119)

SEQ ID NO: 24763 - protein, 372 aa, Candida glabrata; identical to SEQ ID NO: 1398

SEQ ID NO: 24764 - DNA, 1071 bp, Candida glabrata; identical to SEQ ID NO: 1399
  CDS (1)..(1071)

SEQ ID NO: 24765 - protein, 356 aa, Candida glabrata; identical to SEQ ID NO: 1400

SEQ ID NO: 24766 - DNA, 1083 bp, Photobacterium profundum; identical to SEQ ID NO: 1401
  CDS (1)..(1083)

SEQ ID NO: 24767 - protein, 360 aa, Photobacterium profundum; identical to SEQ ID NO: 1402

SEQ ID NO: 24768 - DNA, 1053 bp, Photobacterium profundum; identical to SEQ ID NO: 1403
  CDS (1)..(1053)

SEQ ID NO: 24769 - protein, 350 aa, Photobacterium profundum; identical to SEQ ID NO: 1404

SEQ ID NO: 24770 - DNA, 1113 bp, Photobacterium profundum; identical to SEQ ID NO: 1405
  CDS (1)..(1113)

SEQ ID NO: 24771 - protein, 370 aa, Photobacterium profundum; identical to SEQ ID NO: 1406

SEQ ID NO: 24772 - DNA, 1056 bp, Photobacterium profundum; identical to SEQ ID NO: 1407
  CDS (1)..(1056)

SEQ ID NO: 24773 - protein, 351 aa, Photobacterium profundum; identical to SEQ ID NO: 1408

SEQ ID NO: 24774 - DNA, 1092 bp, Parachlamydia sp; identical to SEQ ID NO: 1409
  CDS (1)..(1092)

SEQ ID NO: 24775 - protein, 363 aa, Parachlamydia sp; identical to SEQ ID NO: 1410

SEQ ID NO: 24776 - DNA, 1095 bp, Rhodopseudomonas palustris; identical to SEQ ID NO: 1411
  CDS (1)..(1095)

SEQ ID NO: 24777 - protein, 364 aa, Rhodopseudomonas palustris; identical to SEQ ID NO: 1412

SEQ ID NO: 24778 - DNA, 1100 bp, Amycolatopsis methanolica; identical to SEQ ID NO: 1413
  CDS (1)..(1086)

SEQ ID NO: 24779 - protein, 361 aa, Amycolatopsis methanolica; identical to SEQ ID NO: 1414

SEQ ID NO: 24780 - DNA, 1071 bp, Treponema denticola; identical to SEQ ID NO: 1415
  CDS (1)..(1071)

SEQ ID NO: 24781 - protein, 356 aa, Treponema denticola; identical to SEQ ID NO: 1416

SEQ ID NO: 24782 - DNA, 1068 bp, Geobacter sulfurreducens; identical to SEQ ID NO: 1417
  CDS (1)..(1068)

SEQ ID NO: 24783 - protein, 355 aa, Geobacter sulfurreducens; identical to SEQ ID NO: 1418

SEQ ID NO: 24784 - DNA, 1095 bp, Ashbya gossypii; identical to SEQ ID NO: 1419
  CDS (1)..(1095)

SEQ ID NO: 24785 - protein, 364 aa, Ashbya gossypii; identical to SEQ ID NO: 1420

SEQ ID NO: 24786 - DNA, 1122 bp, Ashbya gossypii; identical to SEQ ID NO: 1421
  CDS (1)..(1122)

SEQ ID NO: 24787 - protein, 373 aa, Ashbya gossypii; identical to SEQ ID NO: 1422

SEQ ID NO: 24788 - DNA, 1098 bp, Amycolatopsis balhimycina; identical to SEQ ID NO: 1423
  CDS (1)..(1098)

SEQ ID NO: 24789 - protein, 365 aa, Amycolatopsis balhimycina; identical to SEQ ID NO: 1424

SEQ ID NO: 24790 - DNA, 1053 bp, Vibrio vulnificus; identical to SEQ ID NO: 2345
  CDS (1)..(1053)

SEQ ID NO: 24791 - protein, 350 aa, Vibrio vulnificus; identical to SEQ ID NO: 2346

SEQ ID NO: 24792 - DNA, 1047 bp, Photorhabdus luminescens; identical to SEQ ID NO: 1427
  CDS (1)..(1047)

SEQ ID NO: 24793 - protein, 348 aa, Photorhabdus luminescens; identical to SEQ ID NO: 1428

SEQ ID NO: 24794 - DNA, 1053 bp, Photorhabdus luminescens; identical to SEQ ID NO: 1429
  CDS (1)..(1053)

SEQ ID NO: 24795 - protein, 350 aa, Photorhabdus luminescens; identical to SEQ ID NO: 1430

SEQ ID NO: 24796 - DNA, 1095 bp, Photorhabdus luminescens; identical to SEQ ID NO: 1431
  CDS (1)..(1095)

SEQ ID NO: 24797 - protein, 364 aa, Photorhabdus luminescens; identical to SEQ ID NO: 1432

SEQ ID NO: 24798 - DNA, 1119 bp, Gloeobacter violaceus; identical to SEQ ID NO: 1433
  CDS (1)..(1119)

SEQ ID NO: 24799 - protein, 372 aa, Gloeobacter violaceus; identical to SEQ ID NO: 1434

SEQ ID NO: 24800 - DNA, 1107 bp, Chromobacterium violaceum; identical to SEQ ID NO: 1435
  CDS (1)..(1107)

SEQ ID NO: 24801 - protein, 368 aa, Chromobacterium violaceum; identical to SEQ ID NO: 1436

SEQ ID NO: 24802 - DNA, 1059 bp, Chromobacterium violaceum; identical to SEQ ID NO: 1437
  CDS (1)..(1059)

SEQ ID NO: 24803 - protein, 352 aa, Chromobacterium violaceum; identical to SEQ ID NO: 1438

SEQ ID NO: 24804 - DNA, 1140 bp, Neurospora crassa; identical to SEQ ID NO: 1439
  CDS (1)..(1140)

SEQ ID NO: 24805 - protein, 379 aa, Neurospora crassa; identical to SEQ ID NO: 1440

SEQ ID NO: 24806 - DNA, 1092 bp, Neurospora crassa; identical to SEQ ID NO: 1441
  CDS (1)..(1092)

SEQ ID NO: 24807 - protein, 363 aa, Neurospora crassa; identical to SEQ ID NO: 1442

SEQ ID NO: 24808 - DNA, 1068 bp, Synechococcus sp; identical to SEQ ID NO: 1443
  CDS (1)..(1068)

SEQ ID NO: 24809 - protein, 355 aa, Synechococcus sp; identical to SEQ ID NO: 1444

SEQ ID NO: 24810 - DNA, 1053 bp, Rhodopirellula baltica; identical to SEQ ID NO: 1445
  CDS (1)..(1053)

SEQ ID NO: 24811 - protein, 350 aa, Rhodopirellula baltica; identical to SEQ ID NO: 1446

SEQ ID NO: 24812 - DNA, 1068 bp, Prochlorococcus marinus subsp; identical to SEQ ID NO: 1447
  CDS (1)..(1068)

SEQ ID NO: 24813 - protein, 355 aa, Prochlorococcus marinus subsp; identical to SEQ ID NO: 1448

SEQ ID NO: 24814 - DNA, 1083 bp, Prochlorococcus marinus; identical to SEQ ID NO: 1449
  CDS (1)..(1083)

SEQ ID NO: 24815 - protein, 360 aa, Prochlorococcus marinus; identical to SEQ ID NO: 1450

SEQ ID NO: 24816 - DNA, 1074 bp, Prochlorococcus marinus; identical to SEQ ID NO: 1451
  CDS (1)..(1074)

SEQ ID NO: 24817 - protein, 357 aa, Prochlorococcus marinus; identical to SEQ ID NO: 1452

SEQ ID NO: 24818 - DNA, 1113 bp, Haemophilus ducreyi; identical to SEQ ID NO: 1453
  CDS (1)..(1113)

SEQ ID NO: 24819 - protein, 370 aa, Haemophilus ducreyi; identical to SEQ ID NO: 1454

SEQ ID NO: 24820 - DNA, 1080 bp, Haemophilus ducreyi; identical to SEQ ID NO: 1455
  CDS (1)..(1080)

SEQ ID NO: 24821 - protein, 359 aa, Haemophilus ducreyi; identical to SEQ ID NO: 1456

SEQ ID NO: 24822 - DNA, 1086 bp, Candidatus Blochmannia floridanus; identical to SEQ ID NO: 1457
  CDS (1)..(1086)

SEQ ID NO: 24823 - protein, 361 aa, Candidatus Blochmannia floridanus; identical to SEQ ID NO: 1458

SEQ ID NO: 24824 - DNA, 1074 bp, Bordetella pertussis; identical to SEQ ID NO: 2379
  CDS (1)..(1074)

SEQ ID NO: 24825 - protein, 357 aa, Bordetella pertussis; identical to SEQ ID NO: 1460

SEQ ID NO: 24826 - DNA, 1119 bp, Bordetella bronchiseptica; identical to SEQ ID NO: 1461
  CDS (1)..(1119)

SEQ ID NO: 24827 - protein, 372 aa, Bordetella bronchiseptica; identical to SEQ ID NO: 1462

SEQ ID NO: 24828 - DNA, 1179 bp, Nitrosomonas europaea; identical to SEQ ID NO: 1463
  CDS (1)..(1179)

SEQ ID NO: 24829 - protein, 392 aa, Nitrosomonas europaea; identical to SEQ ID NO: 1464

SEQ ID NO: 24830 - DNA, 1083 bp, Coxiella burnetii; identical to SEQ ID NO: 1465
  CDS (1)..(1083)

SEQ ID NO: 24831 - protein, 360 aa, Coxiella burnetii; identical to SEQ ID NO: 1466

SEQ ID NO: 24832 - DNA, 1053 bp, Vibrio parahaemolyticus; identical to SEQ ID NO: 1471
  CDS (1)..(1053)

SEQ ID NO: 24833 - protein, 350 aa, Vibrio parahaemolyticus; identical to SEQ ID NO: 1472

SEQ ID NO: 24834 - DNA, 1053 bp, Vibrio parahaemolyticus; identical to SEQ ID NO: 1473
  CDS (1)..(1053)

SEQ ID NO: 24835 - protein, 350 aa, Vibrio parahaemolyticus; identical to SEQ ID NO: 1474

SEQ ID NO: 24836 - DNA, 1074 bp, Vibrio parahaemolyticus; identical to SEQ ID NO: 1475
  CDS (1)..(1074)

SEQ ID NO: 24837 - protein, 357 aa, Vibrio parahaemolyticus; identical to SEQ ID NO: 1476

SEQ ID NO: 24838 - DNA, 1083 bp, Pseudomonas syringae; identical to SEQ ID NO: 1477
  CDS (1)..(1083)

SEQ ID NO: 24839 - protein, 360 aa, Pseudomonas syringae; identical to SEQ ID NO: 1478

SEQ ID NO: 24840 - DNA, 1077 bp, Pseudomonas syringae; identical to SEQ ID NO: 1479
  CDS (1)..(1077)

SEQ ID NO: 24841 - protein, 358 aa, Pseudomonas syringae; identical to SEQ ID NO: 1480

SEQ ID NO: 24842 - DNA, 1062 bp, Pseudomonas putida; identical to SEQ ID NO: 1481
  CDS (1)..(1062)

SEQ ID NO: 24843 - protein, 353 aa, Pseudomonas putida; identical to SEQ ID NO: 1482

SEQ ID NO: 24844 - DNA, 1113 bp, Pseudomonas putida; identical to SEQ ID NO: 1483
  CDS (1)..(1113)

SEQ ID NO: 24845 - protein, 370 aa, Pseudomonas putida; identical to SEQ ID NO: 1484

SEQ ID NO: 24846 - DNA, 1086 bp, Bradyrhizobium japonicum; identical to SEQ ID NO: 1485
  CDS (1)..(1086)

SEQ ID NO: 24847 - protein, 361 aa, Bradyrhizobium japonicum; identical to SEQ ID NO: 1486

SEQ ID NO: 24848 - DNA, 1053 bp, Yersinia pestis; identical to SEQ ID NO: 1487
  CDS (1)..(1053)

SEQ ID NO: 24849 - protein, 350 aa, Yersinia pestis; identical to SEQ ID NO: 1488

SEQ ID NO: 24850 - DNA, 1038 bp, Wigglesworthia glossinidia brevipalpis; identical to SEQ ID NO: 1491
  CDS (1)..(1038)

SEQ ID NO: 24851 - protein, 345 aa, Wigglesworthia glossinidia brevipalpis; identical to SEQ ID NO: 1492

SEQ ID NO: 24852 - DNA, 1071 bp, Vibrio vulnificus; identical to SEQ ID NO: 1739
  CDS (1)..(1071)

SEQ ID NO: 24853 - protein, 356 aa, Vibrio vulnificus; identical to SEQ ID NO: 1740

SEQ ID NO: 24854 - DNA, 1053 bp, Vibrio vulnificus; identical to SEQ ID NO: 1493
  CDS (1)..(1053)

SEQ ID NO: 24855 - protein, 350 aa, Vibrio vulnificus; identical to SEQ ID NO: 1494

SEQ ID NO: 24856 - DNA, 1071 bp, Vibrio vulnificus; identical to SEQ ID NO: 1497
  CDS (1)..(1071)

SEQ ID NO: 24857 - protein, 356 aa, Vibrio vulnificus; identical to SEQ ID NO: 1498

SEQ ID NO: 24858 - DNA, 1062 bp, Synechococcus elongatus; identical to SEQ ID NO: 1499
  CDS (1)..(1062)

SEQ ID NO: 24859 - protein, 353 aa, Synechococcus elongatus; identical to SEQ ID NO: 1500

SEQ ID NO: 24860 - DNA, 1032 bp, Streptococcus mutans; identical to SEQ ID NO: 1501
  CDS (1)..(1032)

SEQ ID NO: 24861 - protein, 343 aa, Streptococcus mutans; identical to SEQ ID NO: 1502

SEQ ID NO: 24862 - DNA, 1035 bp, Streptococcus mutans; identical to SEQ ID NO: 1503
  CDS (1)..(1035)

SEQ ID NO: 24863 - protein, 344 aa, Streptococcus mutans; identical to SEQ ID NO: 1504

SEQ ID NO: 24864 - DNA, 1008 bp, Streptococcus agalactiae; identical to SEQ ID NO: 1505
  CDS (1)..(1008)

SEQ ID NO: 24865 - protein, 335 aa, Streptococcus agalactiae; identical to SEQ ID NO: 1506

SEQ ID NO: 24866 - DNA, 1065 bp, Shewanella oneidensis; identical to SEQ ID NO: 1507
  CDS (1)..(1065)

SEQ ID NO: 24867 - protein, 354 aa, Shewanella oneidensis; identical to SEQ ID NO: 1508

SEQ ID NO: 24868 - DNA, 1092 bp, Shewanella oneidensis; identical to SEQ ID NO: 1509
  CDS (1)..(1092)

SEQ ID NO: 24869 - protein, 363 aa, Shewanella oneidensis; identical to SEQ ID NO: 1510

SEQ ID NO: 24870 - DNA, 1059 bp, Shewanella oneidensis; identical to SEQ ID NO: 1511
  CDS (1)..(1059)

SEQ ID NO: 24871 - protein, 352 aa, Shewanella oneidensis; identical to SEQ ID NO: 1512

SEQ ID NO: 24872 - DNA, 1170 bp, Corynebacterium efficiens; identical to SEQ ID NO: 1515
  CDS (1)..(1170)

SEQ ID NO: 24873 - protein, 389 aa, Corynebacterium efficiens; identical to SEQ ID NO: 1516

SEQ ID NO: 24874 - DNA, 1134 bp, Bifidobacterium longum; identical to SEQ ID NO: 1517
  CDS (1)..(1134)

SEQ ID NO: 24875 - protein, 377 aa, Bifidobacterium longum; identical to SEQ ID NO: 1518

SEQ ID NO: 24876 - DNA, 1233 bp, Bifidobacterium longum; identical to SEQ ID NO: 1519
  CDS (1)..(1233)

SEQ ID NO: 24877 - protein, 410 aa, Bifidobacterium longum; identical to SEQ ID NO: 1520

SEQ ID NO: 24878 - DNA, 1221 bp, Phytophthora infestans; identical to SEQ ID NO: 1521
  CDS (20)..(1153)

SEQ ID NO: 24879 - protein, 377 aa, Phytophthora infestans; identical to SEQ ID NO: 1522

SEQ ID NO: 24880 - DNA, 1062 bp, Chlorobium tepidum; identical to SEQ ID NO: 1523
  CDS (1)..(1062)

SEQ ID NO: 24881 - protein, 353 aa, Chlorobium tepidum; identical to SEQ ID NO: 1524

SEQ ID NO: 24882 - DNA, 1074 bp, Xanthomonas campestris; identical to SEQ ID NO: 1525
  CDS (1)..(1074)

SEQ ID NO: 24883 - protein, 357 aa, Xanthomonas campestris; identical to SEQ ID NO: 1526

SEQ ID NO: 24884 - DNA, 1074 bp, Xanthomonas axonopodis; identical to SEQ ID NO: 1527
  CDS (1)..(1074)

SEQ ID NO: 24885 - protein, 357 aa, Xanthomonas axonopodis; identical to SEQ ID NO: 1528

SEQ ID NO: 24886 - DNA, 1080 bp, Ralstonia solanacearum; identical to SEQ ID NO: 1529
  CDS (1)..(1080)

SEQ ID NO: 24887 - protein, 359 aa, Ralstonia solanacearum; identical to SEQ ID NO: 1530

SEQ ID NO: 24888 - DNA, 1179 bp, Ralstonia solanacearum; identical to SEQ ID NO: 1531
  CDS (1)..(1179)

SEQ ID NO: 24889 - protein, 392 aa, Ralstonia solanacearum; identical to SEQ ID NO: 1532

SEQ ID NO: 24890 - DNA, 1065 bp, Synechococcus sp; identical to SEQ ID NO: 1533
  CDS (1)..(1065)

SEQ ID NO: 24891 - protein, 354 aa, Synechococcus sp; identical to SEQ ID NO: 1534

SEQ ID NO: 24892 - DNA, 1035 bp, Escherichia coli; identical to SEQ ID NO: 1535
  CDS (1)..(1035)

SEQ ID NO: 24893 - protein, 344 aa, Escherichia coli; identical to SEQ ID NO: 1536

SEQ ID NO: 24894 - DNA, 1200 bp, Stigmatella aurantiaca; identical to SEQ ID NO: 1537
  CDS (62)..(1147)

SEQ ID NO: 24895 - protein, 361 aa, Stigmatella aurantiaca; identical to SEQ ID NO: 1538

SEQ ID NO: 24896 - DNA, 1083 bp, Amycolatopsis mediterranei; identical to SEQ ID NO: 1541
  CDS (1)..(1083)

SEQ ID NO: 24897 - protein, 360 aa, Amycolatopsis mediterranei; identical to SEQ ID NO: 1542

SEQ ID NO: 24898 - DNA, 1053 bp, Pasteurella multocida; identical to SEQ ID NO: 1543
  CDS (1)..(1053)

SEQ ID NO: 24899 - protein, 350 aa, Pasteurella multocida; identical to SEQ ID NO: 1544

SEQ ID NO: 24900 - DNA, 1086 bp, Pasteurella multocida; identical to SEQ ID NO: 1545
  CDS (1)..(1086)

SEQ ID NO: 24901 - protein, 361 aa, Pasteurella multocida; identical to SEQ ID NO: 1546

SEQ ID NO: 24902 - DNA, 1125 bp, Emericella nidulans; identical to SEQ ID NO: 1547
  CDS (1)..(1125)

SEQ ID NO: 24903 - protein, 374 aa, Emericella nidulans; identical to SEQ ID NO: 1548

SEQ ID NO: 24904 - DNA, 1089 bp, Emericella nidulans; identical to SEQ ID NO: 1549
  CDS (1)..(1089)

SEQ ID NO: 24905 - protein, 362 aa, Emericella nidulans; identical to SEQ ID NO: 1550

SEQ ID NO: 24906 - DNA, 1239 bp, Vibrio cholerae; identical to SEQ ID NO: 1551
  CDS (114)..(1175)

SEQ ID NO: 24907 - protein, 353 aa, Vibrio cholerae; identical to SEQ ID NO: 1552

SEQ ID NO: 24908 - DNA, 2184 bp, Candida albicans; identical to SEQ ID NO: 1553
  CDS (461)..(1573)

SEQ ID NO: 24909 - protein, 370 aa, Candida albicans; identical to SEQ ID NO: 1554

SEQ ID NO: 24910 - DNA, 1047 bp, Buchnera aphidicola; identical to SEQ ID NO: 1555
  CDS (1)..(1047)

SEQ ID NO: 24911 - protein, 348 aa, Buchnera aphidicola; identical to SEQ ID NO: 1556

SEQ ID NO: 24912 - DNA, 1047 bp, Buchnera aphidicola; identical to SEQ ID NO: 1557
  CDS (1)..(1047)

SEQ ID NO: 24913 - protein, 348 aa, Buchnera aphidicola; identical to SEQ ID NO: 1558

SEQ ID NO: 24914 - DNA, 1047 bp, Erwinia herbicola; identical to SEQ ID NO: 1559
  CDS (1)..(1047)

SEQ ID NO: 24915 - protein, 348 aa, Erwinia herbicola; identical to SEQ ID NO: 1560

SEQ ID NO: 24916 - DNA, 1047 bp, Salmonella typhimurium; identical to SEQ ID NO: 1561
  CDS (1)..(1047)

SEQ ID NO: 24917 - protein, 348 aa, Salmonella typhimurium; identical to SEQ ID NO: 1562

SEQ ID NO: 24918 - DNA, 1047 bp, Shigella flexneri; identical to SEQ ID NO: 2473
  CDS (1)..(1047)

SEQ ID NO: 24919 - protein, 348 aa, Shigella flexneri; identical to SEQ ID NO: 2474

SEQ ID NO: 24920 - DNA, 25 bp, Artificial sequence
  Primer sequence
atgttcattaaaaacgatcacgccg

SEQ ID NO: 24921 - DNA, 25 bp, Artificial sequence
  Primer sequence
ctattttttcaaggcctttcttctg

SEQ ID NO: 24922 - protein, 353 aa, Artificial sequence
  Consensus
  Variant (2)..(3): Xaa in position 2 to 3 is any amino acid
  Variant (5)..(11): Xaa in position 5 to 11 is any amino acid
  Variant (13)..(24): Xaa in position 13 to 24 is any amino acid
  Variant (26)..(30): Xaa in position 26 to 30 is any amino acid
  Variant (32)..(33): Xaa in position 32 to 33 is any amino acid
  Variant (35)..(35): Xaa in position 35 is any amino acid
  Variant (37)..(37): Xaa in position 37 is any amino acid
  Variant (39)..(46): Xaa in position 39 to 46 is any amino acid
  Variant (51)..(51): Xaa in position 51 is any amino acid
  Variant (54)..(56): Xaa in position 54 to 56 is any amino acid
  Variant (58)..(59): Xaa in position 58 to 59 is any amino acid
  Variant (62)..(63): Xaa in position 62 to 63 is any amino acid
  Variant (65)..(76): Xaa in position 65 to 76 is any amino acid
  Variant (78)..(80): Xaa in position 78 to 80 is any amino acid
  Variant (83)..(83): Xaa in position 83 is any amino acid
  Variant (85)..(85): Xaa in position 85 is any amino acid
  Variant (91)..(93): Xaa in position 91 to 93 is any amino acid
  Variant (100)..(100): Xaa in position 100 is any amino acid
  Variant (103)..(112): Xaa in position 103 to 112 is any amino acid
  Variant (115)..(117): Xaa in position 115 to 117 is any amino acid
  Variant (119)..(119): Xaa in position 119 is any amino acid
  Variant (121)..(130): Xaa in position 121 to 130 is any amino acid
  Variant (132)..(132): Xaa in position 132 is any amino acid
  Variant (134)..(134): Xaa in position 134 is any amino acid
  Variant (136)..(136): Xaa in position 136 is any amino acid
  Variant (139)..(142): Xaa in position 139 to 142 is any amino acid
  Variant (144)..(146): Xaa in position 144 to 146 is any amino acid
  Variant (148)..(152): Xaa in position 148 to 152 is any amino acid
  Variant (163)..(163): Xaa in position 163 is any amino acid
  Variant (166)..(168): Xaa in position 166 to 168 is any amino acid
  Variant (171)..(171): Xaa in position 171 is any amino acid
  Variant (174)..(174): Xaa in position 174 is any amino acid
  Variant (176)..(176): Xaa in position 176 is any amino acid
  Variant (181)..(181): Xaa in position 181 is any amino acid
  Variant (183)..(183): Xaa in position 183 is any amino acid
  Variant (185)..(188): Xaa in position 185 to 188 is any amino acid
  Variant (190)..(191): Xaa in position 190 to 191 is any amino acid
  Variant (193)..(195): Xaa in position 193 to 195 is any amino acid
  Variant (197)..(199): Xaa in position 197 to 199 is any amino acid
  Variant (201)..(201): Xaa in position 201 is any amino acid
  Variant (203)..(208): Xaa in position 203 to 208 is any amino acid
  Variant (210)..(215): Xaa in position 210 to 215 is any amino acid
  Variant (217)..(217): Xaa in position 217 is any amino acid
  Variant (220)..(222): Xaa in position 220 to 222 is any amino acid
  Variant (224)..(225): Xaa in position 224 to 225 is any amino acid
  Variant (230)..(238): Xaa in position 230 to 238 is any amino acid
  Variant (241)..(269): Xaa in position 241 to 269 is any amino acid
  Variant (271)..(271): Xaa in position 271 is any amino acid
  Variant (274)..(274): Xaa in position 274 is any amino acid
  Variant (277)..(277): Xaa in position 277 is any amino acid
  Variant (279)..(282): Xaa in position 279 to 282 is any amino acid
  Variant (284)..(285): Xaa in position 284 to 285 is any amino acid
  Variant (287)..(292): Xaa in position 287 to 292 is any amino acid
  Variant (294)..(296): Xaa in position 294 to 296 is any amino acid
  Variant (298)..(305): Xaa in position 298 to 305 is any amino acid
  Variant (307)..(307): Xaa in position 307 is any amino acid
  Variant (309)..(309): Xaa in position 309 is any amino acid
  Variant (312)..(315): Xaa in position 312 to 315 is any amino acid
  Variant (317)..(317): Xaa in position 317 is any amino acid
  Variant (319)..(334): Xaa in position 319 to 334 is any amino acid
  Variant (337)..(337): Xaa in position 337 is any amino acid
  Variant (339)..(339): Xaa in position 339 is any amino acid
  Variant (342)..(342): Xaa in position 342 is any amino acid
  Variant (344)..(345): Xaa in position 344 to 345 is any amino acid
  Variant (347)..(348): Xaa in position 347 to 348 is any amino acid
  Variant (350)..(352): Xaa in position 350 to 352 is any amino acid
LXXPXXXXXXXPXXXXXXXXXXXXRXXXXXIXXGXDXRXXXXXXXXGPCSXHDXXXAXXYAXXLXXXXXXXXXXXXLXXXMRXYXEKPRTXXXGWKGLIXDPXXXXXXXXXXGLXXXRXLXXXXXXXXXXPXAXEXLDXXXXQXXXDXXXXXAIGARTTESQXHRXXXASXLSXPXGFKNXTXGXXXXAXXAXXXAXXXHXFXXXXXXGXXXXXXTXGNXXXHXXLRGGXXXXXXXXXNYXXXXXXXXXXXXXXXXXXXXXXXXXXXXXDXSHXNSXKXXXXQXXVXXXXXXQXXXGXXXXXXXXGXMXESXXXXGXQXXXXXXXXXXXXXXXXYGXSXTDXCXXWXXTXXXL

SEQ ID NO: 24923 - protein, 72 aa, Artificial sequence; identical to SEQ ID NO: 2906
  Consensus
  Variant (5)..(5): Xaa in position 5 is Ile, Val, Ser or Leu
  Variant (6)..(6): Xaa in position 6 is His or Asp
  Variant (7)..(7): Xaa in position 7 is Asp or Asn
  Variant (8)..(10): Xaa in position 8 to 10 is any amino acid
  Variant (11)..(11): Xaa in position 11 is Ala, Val or Gly
  Variant (12)..(12): Xaa in position 12 is any amino acid
  Variant (13)..(13): Xaa in position 13 is Glu, Asp, Ala or Gln
  Variant (15)..(15): Xaa in position 15 is Ala, Gly or Cys
  Variant (16)..(17): Xaa in position 16 to 17 is any amino acid
  Variant (18)..(18): Xaa in position 18 is Leu, Ile or Phe
  Variant (19)..(28): Xaa in position 19 to 28 is any amino acid
  Variant (29)..(30): Xaa in position 29 to 30 is any or no amino acid
  Variant (31)..(31): Xaa in position 31 is Leu, Ile, Phe or Met
  Variant (32)..(32): Xaa in position 32 is any amino acid
  Variant (33)..(33): Xaa in position 33 is Ile, Val, Leu or Met
  Variant (34)..(34): Xaa in position 34 is Val, Ile or Leu
  Variant (37)..(37): Xaa in position 37 is Val, Ala or Thr
  Variant (39)..(39): Xaa in position 39 is Phe, Leu, Thr or Val
  Variant (40)..(40): Xaa in position 40 is Glu or Ala
  Variant (45)..(46): Xaa in position 45 to 46 is any amino acid
  Variant (47)..(47): Xaa in position 47 is any or no amino acid
  Variant (49)..(49): Xaa in position 49 is Trp or Tyr
  Variant (50)..(50): Xaa in position 50 is Lys or Arg
  Variant (52)..(52): Xaa in position 52 is Leu, Phe, Met or Tyr
  Variant (53)..(53): Xaa in position 53 is Ile, Val, Ala or Leu
  Variant (54)..(54): Xaa in position 54 is any amino acid
  Variant (55)..(55): Xaa in position 55 is Asp, Glu or Gln
  Variant (57)..(57): Xaa in position 57 is any amino acid
  Variant (58)..(58): Xaa in position 58 is Leu, Met, Ile, Val, Ala or Thr
  Variant (59)..(59): Xaa in position 59 is Asp, Asn or Ser
  Variant (60)..(63): Xaa in position 60 to 63 is any amino acid
  Variant (64)..(64): Xaa in position 64 is Ile, Val, Leu or Met
  Variant (65)..(66): Xaa in position 65 to 66 is any amino acid
  Variant (68)..(68): Xaa in position 68 is Leu, Ile, Met or Val
  Variant (69)..(70): Xaa in position 69 to 70 is any amino acid
  Variant (71)..(71): Xaa in position 71 is Ala, Ser, Gly, Val or Thr

SEQ ID NO: 24924 - protein, 76 aa, Artificial sequence; identical to SEQ ID NO: 2907
  Consensus
  Variant (1)..(1): Xaa in position 1 is Ala or Ser
  Variant (2)..(2): Xaa in position 2 is Ile or Val
  Variant (6)..(6): Xaa in position 6 is Thr, Ser or Asn
  Variant (7)..(7): Xaa in position 7 is Thr, Val, Ala, Ser or Ile
  Variant (8)..(8): Xaa in position 8 is Glu or Ala
  Variant (9)..(9): Xaa in position 9 is Ser, Asp or Asn
  Variant (11)..(11): Xaa in position 11 is any amino acid
  Variant (14)..(14): Xaa in position 14 is Glu, Gln, Phe or Met
  Variant (15)..(15): Xaa in position 15 is Leu, Met, Val, Phe or Ile
  Variant (16)..(16): Xaa in position 16 is Ala, Ser, Thr, Cys or Val
  Variant (18)..(18): Xaa in position 18 is Gly, Ala or Asn
  Variant (19)..(21): Xaa in position 19 to 21 is any amino acid
  Variant (22)..(22): Xaa in position 22 is Pro or Ala
  Variant (23)..(23): Xaa in position 23 is Val, Ile, Thr or Leu
  Variant (25)..(25): Xaa in position 25 is Phe, Met, Tyr or Ile
  Variant (28)..(28): Xaa in position 28 is any amino acid
  Variant (29)..(29): Xaa in position 29 is Thr, Ser or Arg
  Variant (30)..(30): Xaa in position 30 is any amino acid
  Variant (32)..(35): Xaa in position 32 to 35 is any amino acid
  Variant (36)..(36): Xaa in position 36 is Ala or Met
  Variant (37)..(37): Xaa in position 37 is any amino acid
  Variant (38)..(38): Xaa in position 38 is Asp, Asn or Glu
  Variant (39)..(39): Xaa in position 39 is Ala or Gly
  Variant (40)..(41): Xaa in position 40 to 41 is any amino acid
  Variant (42)..(42): Xaa in position 42 is Ala or Ser
  Variant (43)..(43): Xaa in position 43 is Ala, Ser, Val or Thr
  Variant (44)..(46): Xaa in position 44 to 46 is any amino acid
  Variant (47)..(47): Xaa in position 47 is His or Gln
  Variant (48)..(48): Xaa in position 48 is any amino acid
  Variant (49)..(49): Xaa in position 49 is Phe, Tyr, His or Val
  Variant (50)..(51): Xaa in position 50 to 51 is any amino acid
  Variant (52)..(55): Xaa in position 52 to 55 is any or no amino acid
  Variant (57)..(60): Xaa in position 57 to 60 is any amino acid
  Variant (61)..(62): Xaa in position 61 to 62 is any or no amino acid
  Variant (63)..(63): Xaa in position 63 is Thr or Ser
  Variant (64)..(64): Xaa in position 64 is any amino acid
  Variant (67)..(69): Xaa in position 67 to 69 is any amino acid
  Variant (70)..(70): Xaa in position 70 is His or Phe
  Variant (71)..(71): Xaa in position 71 is Val, Ile, Leu or Ala
  Variant (72)..(72): Xaa in position 72 is Ile or Val
  Variant (73)..(73): Xaa in position 73 is Leu or Met
  Variant (76)..(76): Xaa in position 76 is Gly, Ala or Ser

SEQ ID NO: 24925 - protein, 83 aa, Artificial sequence; identical to SEQ ID NO: 2908
  Consensus
  Variant (1)..(1): Xaa in position 1 is Leu, Ile or Val
  Variant (2)..(2): Xaa in position 2 is Met, Val, Ile or Leu
  Variant (3)..(3): Xaa in position 3 is Ile or Val
  Variant (5)..(5): Xaa in position 5 is Cys, Phe, Ala, Thr or Tyr
  Variant (6)..(6): Xaa in position 6 is Ser, Asn or Ala
  Variant (8)..(8): Xaa in position 8 is Gly, Ala or Asp
  Variant (10)..(10): Xaa in position 10 is Ser or Cys
  Variant (11)..(11): Xaa in position 11 is any amino acid
  Variant (13)..(15): Xaa in position 13 to 15 is any amino acid
  Variant (16)..(16): Xaa in position 16 is Arg, Asn, Lys, Leu or Glu
  Variant (18)..(19): Xaa in position 18 to 19 is any amino acid
  Variant (20)..(20): Xaa in position 20 is Val or Ile
  Variant (21)..(26): Xaa in position 21 to 26 is any amino acid
  Variant (27)..(27): Xaa in position 27 is Gln, Asn or Arg
  Variant (28)..(28): Xaa in position 28 is Ile, Leu, Val, Arg or Met
  Variant (29)..(30): Xaa in position 29 to 30 is any amino acid
  Variant (31)..(31): Xaa in position 31 is Gly, Asn or Asp
  Variant (32)..(32): Xaa in position 32 is any amino acid
  Variant (33)..(37): Xaa in position 33 to 37 is any or no amino acid
  Variant (38)..(38): Xaa in position 38 is Ile, Val or Leu
  Variant (39)..(39): Xaa in position 39 is any amino acid
  Variant (41)..(41): Xaa in position 41 is any amino acid
  Variant (43)..(43): Xaa in position 43 is Ile, Leu, Val, Ala or Met
  Variant (46)..(46): Xaa in position 46 is His, Phe, Asn or Tyr
  Variant (47)..(47): Xaa in position 47 is Leu or Ile
  Variant (48)..(49): Xaa in position 48 to 49 is any amino acid
  Variant (51)..(51): Xaa in position 51 is any amino acid
  Variant (53)..(57): Xaa in position 53 to 57 is any amino acid
  Variant (58)..(69): Xaa in position 58 to 69 is any or no amino acid
  Variant (71)..(71): Xaa in position 71 is any amino acid
  Variant (73)..(73): Xaa in position 73 is Ile or Val
  Variant (76)..(76): Xaa in position 76 is any amino acid
  Variant (78)..(78): Xaa in position 78 is Ile, Leu or Val
  Variant (79)..(79): Xaa in position 79 is any amino acid
  Variant (80)..(80): Xaa in position 80 is Trp, Ile, Leu or Phe
  Variant (81)..(82): Xaa in position 81 to 82 is any amino acid
  Variant (83)..(83): Xaa in position 83 is Thr or Ser

SEQ ID NO: 24926 - DNA, 1257 bp, Saccharomyces cerevisiae; identical to SEQ ID NO: 12824
  CDS (1)..(1257)

SEQ ID NO: 24927 - protein, 418 aa, Saccharomyces cerevisiae; identical to SEQ ID NO: 12825

SEQ ID NO: 24928 - DNA, 1203 bp, Chlamydia trachomatis; identical to SEQ ID NO: 12826
  CDS (1)..(1203)

SEQ ID NO: 24929 - protein, 400 aa, Chlamydia trachomatis; identical to SEQ ID NO: 12827

SEQ ID NO: 24930 - DNA, 1242 bp, Vibrio cholerae; identical to SEQ ID NO: 12828
  CDS (1)..(1242)

SEQ ID NO: 24931 - protein, 413 aa, Vibrio cholerae; identical to SEQ ID NO: 12829

SEQ ID NO: 24932 - DNA, 1188 bp, Chlamydophila pneumoniae, Chlamydia pneumoniae; identical to SEQ ID NO: 12830
  CDS (1)..(1188)

SEQ ID NO: 24933 - protein, 395 aa, Chlamydophila pneumoniae, Chlamydia pneumoniae; identical to SEQ ID NO: 12831

SEQ ID NO: 24934 - DNA, 1194 bp, Yersinia pestis; identical to SEQ ID NO: 12832
  CDS (1)..(1194)

SEQ ID NO: 24935 - protein, 397 aa, Yersinia pestis; identical to SEQ ID NO: 12833

SEQ ID NO: 24936 - DNA, 1191 bp, Salmonella enterica subsp. enterica serovar Typhi; identical to SEQ ID NO: 12834
  CDS (1)..(1191)

SEQ ID NO: 24937 - protein, 396 aa, Salmonella enterica subsp. enterica serovar Typhi; identical to SEQ ID NO: 12835

SEQ ID NO: 24938 - DNA, 1420 bp, Rhizobium meliloti; identical to SEQ ID NO: 12836
  CDS (175)..(1344)

SEQ ID NO: 24939 - protein, 389 aa, Rhizobium meliloti; identical to SEQ ID NO: 12837

SEQ ID NO: 24940 - DNA, 1197 bp, Pseudomonas aeruginosa; identical to SEQ ID NO: 12838
  CDS (1)..(1197)

SEQ ID NO: 24941 - protein, 398 aa, Pseudomonas aeruginosa; identical to SEQ ID NO: 12839

SEQ ID NO: 24942 - DNA, 1194 bp, Neisseria meningitidis; identical to SEQ ID NO: 12840
  CDS (1)..(1194)

SEQ ID NO: 24943 - protein, 397 aa, Neisseria meningitidis; identical to SEQ ID NO: 12841

SEQ ID NO: 24944 - DNA, 1203 bp, Xylella fastidiosa; identical to SEQ ID NO: 12842
  CDS (1)..(1203)

SEQ ID NO: 24945 - protein, 400 aa, Xylella fastidiosa; identical to SEQ ID NO: 12843

SEQ ID NO: 24946 - DNA, 1200 bp, Pseudomonas aeruginosa; identical to SEQ ID NO: 12844
  CDS (1)..(1200)

SEQ ID NO: 24947 - protein, 399 aa, Pseudomonas aeruginosa; identical to SEQ ID NO: 12845

SEQ ID NO: 24948 - DNA, 1215 bp, Vibrio cholerae; identical to SEQ ID NO: 12846
  CDS (1)..(1215)

SEQ ID NO: 24949 - protein, 404 aa, Vibrio cholerae; identical to SEQ ID NO: 12847

SEQ ID NO: 24950 - DNA, 1287 bp, Staphylococcus aureus; identical to SEQ ID NO: 12848
  CDS (1)..(1287)

SEQ ID NO: 24951 - protein, 428 aa, Staphylococcus aureus; identical to SEQ ID NO: 12849

SEQ ID NO: 24952 - DNA, 1182 bp, Bacillus subtilis; identical to SEQ ID NO: 12850
  CDS (1)..(1182)

SEQ ID NO: 24953 - protein, 393 aa, Bacillus subtilis; identical to SEQ ID NO: 12851

SEQ ID NO: 24954 - DNA, 1218 bp, Plasmodium falciparum; identical to SEQ ID NO: 12852
  CDS (1)..(1218)

SEQ ID NO: 24955 - protein, 405 aa, Plasmodium falciparum; identical to SEQ ID NO: 12853

SEQ ID NO: 24956 - DNA, 1194 bp, Neisseria meningitidis; identical to SEQ ID NO: 12854
  CDS (1)..(1194)

SEQ ID NO: 24957 - protein, 397 aa, Neisseria meningitidis; identical to SEQ ID NO: 12855

SEQ ID NO: 24958 - DNA, 1293 bp, Arabidopsis thaliana (mouse-ear cress); identical to SEQ ID NO: 12856
  CDS (1)..(1293)

SEQ ID NO: 24959 - protein, 430 aa, Arabidopsis thaliana (mouse-ear cress); identical to SEQ ID NO: 12857

SEQ ID NO: 24960 - DNA, 1191 bp, Haemophilus influenzae; identical to SEQ ID NO: 12858
  CDS (1)..(1191)

SEQ ID NO: 24961 - protein, 396 aa, Haemophilus influenzae; identical to SEQ ID NO: 12859

SEQ ID NO: 24962 - DNA, 1701 bp, Bacillus circulans; identical to SEQ ID NO: 12860
  CDS (367)..(1665)

SEQ ID NO: 24963 - protein, 432 aa, Bacillus circulans; identical to SEQ ID NO: 12861

SEQ ID NO: 24964 - DNA, 1578 bp, Oryza sativa (rice); identical to SEQ ID NO: 12862
  CDS (20)..(1312)

SEQ ID NO: 24965 - protein, 430 aa, Oryza sativa (rice); identical to SEQ ID NO: 12863

SEQ ID NO: 24966 - DNA, 1334 bp, Paracoccus denitrificans; identical to SEQ ID NO: 12864
  CDS (131)..(1315)

SEQ ID NO: 24967 - protein, 394 aa, Paracoccus denitrificans; identical to SEQ ID NO: 12865

SEQ ID NO: 24968 - DNA, 1677 bp, Panicum miliaceum (proso millet); identical to SEQ ID NO: 12866
  CDS (84)..(1370)

SEQ ID NO: 24969 - protein, 428 aa, Panicum miliaceum (proso millet); identical to SEQ ID NO: 12867

SEQ ID NO: 24970 - DNA, 1659 bp, Panicum miliaceum (proso millet); identical to SEQ ID NO: 12868
  CDS (84)..(1370)

SEQ ID NO: 24971 - protein, 428 aa, Panicum miliaceum (proso millet); identical to SEQ ID NO: 12869

SEQ ID NO: 24972 - DNA, 1755 bp, Glycine max (soybean); identical to SEQ ID NO: 12870
  CDS (73)..(1464)

SEQ ID NO: 24973 - protein, 463 aa, Glycine max (soybean); identical to SEQ ID NO: 12871

SEQ ID NO: 24974 - DNA, 2114 bp, Saccharomyces cerevisiae; identical to SEQ ID NO: 12872
  CDS (466)..(1821)

SEQ ID NO: 24975 - protein, 451 aa, Saccharomyces cerevisiae; identical to SEQ ID NO: 12873

SEQ ID NO: 24976 - DNA, 1257 bp, Medicago sativa (alfalfa); identical to SEQ ID NO: 12874
  CDS (1)..(1257)

SEQ ID NO: 24977 - protein, 418 aa, Medicago sativa (alfalfa); identical to SEQ ID NO: 12875

SEQ ID NO: 24978 - DNA, 1368 bp, Medicago sativa (alfalfa); identical to SEQ ID NO: 12876
  CDS (1)..(1368)

SEQ ID NO: 24979 - protein, 455 aa, Medicago sativa (alfalfa); identical to SEQ ID NO: 12877

SEQ ID NO: 24980 - DNA, 1514 bp, Panicum miliaceum (proso millet); identical to SEQ ID NO: 12878
  CDS (47)..(1276)

SEQ ID NO: 24981 - protein, 409 aa, Panicum miliaceum (proso millet); identical to SEQ ID NO: 12879

SEQ ID NO: 24982 - DNA, 1717 bp, Glycine max (soybean); identical to SEQ ID NO: 12880
  CDS (54)..(1337)

SEQ ID NO: 24983 - protein, 427 aa, Glycine max (soybean); identical to SEQ ID NO: 12881

SEQ ID NO: 24984 - DNA, 1681 bp, Panicum miliaceum (proso millet); identical to SEQ ID NO: 12882
  CDS (64)..(1437)

SEQ ID NO: 24985 - protein, 457 aa, Panicum miliaceum (proso millet); identical to SEQ ID NO: 12883

SEQ ID NO: 24986 - DNA, 1447 bp, Arabidopsis thaliana (mouse-ear cress); identical to SEQ ID NO: 12884
  CDS (1)..(1362)

SEQ ID NO: 24987 - protein, 453 aa, Arabidopsis thaliana (mouse-ear cress); identical to SEQ ID NO: 12885

SEQ ID NO: 24988 - DNA, 1523 bp, Daucus carota (carrot); identical to SEQ ID NO: 12886
  CDS (24)..(1241)

SEQ ID NO: 24989 - protein, 405 aa, Daucus carota (carrot); identical to SEQ ID NO: 12887

SEQ ID NO: 24990 - DNA, 1245 bp, Caenorhabditis elegans; identical to SEQ ID NO: 12888
  CDS (1)..(1245)

SEQ ID NO: 24991 - protein, 414 aa, Caenorhabditis elegans; identical to SEQ ID NO: 12889

SEQ ID NO: 24992 - DNA, 1095 bp, Caenorhabditis elegans; identical to SEQ ID NO: 12890
  CDS (1)..(1095)

SEQ ID NO: 24993 - protein, 364 aa, Caenorhabditis elegans; identical to SEQ ID NO: 12891

SEQ ID NO: 24994 - DNA, 1074 bp, Caenorhabditis elegans; identical to SEQ ID NO: 12892
  CDS (1)..(1074)

SEQ ID NO: 24995 - protein, 357 aa, Caenorhabditis elegans; identical to SEQ ID NO: 12893

SEQ ID NO: 24996 - DNA, 1227 bp, Caenorhabditis elegans; identical to SEQ ID NO: 12894
  CDS (1)..(1227)

SEQ ID NO: 24997 - protein, 408 aa, Caenorhabditis elegans; identical to SEQ ID NO: 12895

SEQ ID NO: 24998 - DNA, 1350 bp, Caenorhabditis elegans; identical to SEQ ID NO: 12896
  CDS (1)..(1350)

SEQ ID NO: 24999 - protein, 449 aa, Caenorhabditis elegans; identical to SEQ ID NO: 12897

SEQ ID NO: 25000 - DNA, 1230 bp, Schizosaccharomyces pombe; identical to SEQ ID NO: 12898
  CDS (1)..(1230)

SEQ ID NO: 25001 - protein, 409 aa, Schizosaccharomyces pombe; identical to SEQ ID NO: 12899

SEQ ID NO: 25002 - DNA, 1314 bp, Schizosaccharomyces pombe; identical to SEQ ID NO: 12900
  CDS (1)..(1314)

SEQ ID NO: 25003 - protein, 437 aa, Schizosaccharomyces pombe; identical to SEQ ID NO: 12901

SEQ ID NO: 25004 - DNA, 1381 bp, Arabidopsis thaliana (mouse-ear cress); identical to SEQ ID NO: 12902
  CDS (1)..(1350)

SEQ ID NO: 25005 - protein, 449 aa, Arabidopsis thaliana (mouse-ear cress); identical to SEQ ID NO: 12903

SEQ ID NO: 25006 - DNA, 1791 bp, Gallus gallus (chicken); identical to SEQ ID NO: 12904
  CDS (25)..(1263)

SEQ ID NO: 25007 - protein, 412 aa, Gallus gallus (chicken); identical to SEQ ID NO: 12905

SEQ ID NO: 25008 - DNA, 1331 bp, Escherichia coli; identical to SEQ ID NO: 12906
  CDS (10)..(1200)

SEQ ID NO: 25009 - protein, 396 aa, Escherichia coli; identical to SEQ ID NO: 12907

SEQ ID NO: 25010 - DNA, 1208 bp, Escherichia coli; identical to SEQ ID NO: 12908
  CDS (14)..(1207)

SEQ ID NO: 25011 - protein, 397 aa, Escherichia coli; identical to SEQ ID NO: 12909

SEQ ID NO: 25012 - DNA, 1266 bp, Homo sapiens; identical to SEQ ID NO: 12910
  CDS (1)..(1266)

SEQ ID NO: 25013 - protein, 421 aa, Homo sapiens; identical to SEQ ID NO: 12911

SEQ ID NO: 25014 - DNA, 1685 bp, Lotus corniculatus; identical to SEQ ID NO: 12912
  CDS (119)..(1492)

SEQ ID NO: 25015 - protein, 457 aa, Lotus corniculatus; identical to SEQ ID NO: 12913

SEQ ID NO: 25016 - DNA, 1748 bp, Moraxella sp; identical to SEQ ID NO: 12914
  CDS (340)..(1533)

SEQ ID NO: 25017 - protein, 397 aa, Moraxella sp; identical to SEQ ID NO: 12915

SEQ ID NO: 25018 - DNA, 1194 bp, Klebsiella pneumoniae; identical to SEQ ID NO: 12916
  CDS (1)..(1194)

SEQ ID NO: 25019 - protein, 397 aa, Klebsiella pneumoniae; identical to SEQ ID NO: 12917

SEQ ID NO: 25020 - DNA, 1737 bp, Canavalia lineata; identical to SEQ ID NO: 12918
  CDS (44)..(1441)

SEQ ID NO: 25021 - protein, 465 aa, Canavalia lineata; identical to SEQ ID NO: 12919

SEQ ID NO: 25022 - DNA, 1263 bp, Lupinus angustifolius; identical to SEQ ID NO: 12920
  CDS (1)..(1263)

SEQ ID NO: 25023 - protein, 420 aa, Lupinus angustifolius; identical to SEQ ID NO: 12921

SEQ ID NO: 25024 - DNA, 1753 bp, Lotus japonicus; identical to SEQ ID NO: 12922
  CDS (86)..(1342)

SEQ ID NO: 25025 - protein, 418 aa, Lotus japonicus; identical to SEQ ID NO: 12923

SEQ ID NO: 25026 - DNA, 1263 bp, Debaryomyces hansenii CBS767; identical to SEQ ID NO: 12924
  CDS (1)..(1263)

SEQ ID NO: 25027 - protein, 420 aa, Debaryomyces hansenii CBS767; identical to SEQ ID NO: 12925

SEQ ID NO: 25028 - DNA, 1296 bp, Debaryomyces hansenii CBS767; identical to SEQ ID NO: 12926
  CDS (1)..(1296)

SEQ ID NO: 25029 - protein, 431 aa, Debaryomyces hansenii CBS767; identical to SEQ ID NO: 12927

SEQ ID NO: 25030 - DNA, 1212 bp, Debaryomyces hansenii CBS767; identical to SEQ ID NO: 12928
  CDS (1)..(1212)

SEQ ID NO: 25031 - protein, 403 aa, Debaryomyces hansenii CBS767; identical to SEQ ID NO: 12929

SEQ ID NO: 25032 - DNA, 1296 bp, Yarrowia lipolytica CLIB99; identical to SEQ ID NO: 12930
  CDS (1)..(1296)

SEQ ID NO: 25033 - protein, 431 aa, Yarrowia lipolytica CLIB99; identical to SEQ ID NO: 12931

SEQ ID NO: 25034 - DNA, 1302 bp, Yarrowia lipolytica CLIB99; identical to SEQ ID NO: 12932
  CDS (1)..(1302)

SEQ ID NO: 25035 - protein, 433 aa, Yarrowia lipolytica CLIB99; identical to SEQ ID NO: 12933

SEQ ID NO: 25036 - DNA, 1266 bp, Kluyveromyces lactis NRRL Y; identical to SEQ ID NO: 12934
  CDS (1)..(1266)

SEQ ID NO: 25037 - protein, 421 aa, Kluyveromyces lactis NRRL Y; identical to SEQ ID NO: 12935

SEQ ID NO: 25038 - DNA, 1257 bp, Kluyveromyces lactis NRRL Y; identical to SEQ ID NO: 12936
  CDS (1)..(1257)

SEQ ID NO: 25039 - protein, 418 aa, Kluyveromyces lactis NRRL Y; identical to SEQ ID NO: 12937

SEQ ID NO: 25040 - DNA, 1194 bp, Erwinia carotovora subsp; identical to SEQ ID NO: 12938
  CDS (1)..(1194)

SEQ ID NO: 25041 - protein, 397 aa, Erwinia carotovora subsp; identical to SEQ ID NO: 12939

SEQ ID NO: 25042 - DNA, 1191 bp, Erwinia carotovora subsp; identical to SEQ ID NO: 12940
  CDS (1)..(1191)

SEQ ID NO: 25043 - protein, 396 aa, Erwinia carotovora subsp; identical to SEQ ID NO: 12941

SEQ ID NO: 25044 - DNA, 1232 bp, Pseudomonas putida; identical to SEQ ID NO: 12942
  CDS (10)..(1206)

SEQ ID NO: 25045 - protein, 398 aa, Pseudomonas putida; identical to SEQ ID NO: 12943

SEQ ID NO: 25046 - DNA, 1765 bp, Oryza sativa; identical to SEQ ID NO: 12944
  CDS (152)..(1450)

SEQ ID NO: 25047 - protein, 432 aa, Oryza sativa; identical to SEQ ID NO: 12945

SEQ ID NO: 25048 - DNA, 1215 bp, Acinetobacter sp; identical to SEQ ID NO: 12946
  CDS (1)..(1215)

SEQ ID NO: 25049 - protein, 404 aa, Acinetobacter sp; identical to SEQ ID NO: 12947

SEQ ID NO: 25050 - DNA, 1362 bp, Candida glabrata CBS138; identical to SEQ ID NO: 12948
  CDS (1)..(1362)

SEQ ID NO: 25051 - protein, 453 aa, Candida glabrata CBS138; identical to SEQ ID NO: 12949

SEQ ID NO: 25052 - DNA, 1260 bp, Candida glabrata CBS138; identical to SEQ ID NO: 12950
  CDS (1)..(1260)

SEQ ID NO: 25053 - protein, 419 aa, Candida glabrata CBS138; identical to SEQ ID NO: 12951

SEQ ID NO: 25054 - DNA, 1257 bp, Candida glabrata CBS138; identical to SEQ ID NO: 12952
  CDS (1)..(1257)

SEQ ID NO: 25055 - protein, 418 aa, Candida glabrata CBS138; identical to SEQ ID NO: 12953

SEQ ID NO: 25056 - DNA, 1287 bp, Staphylococcus aureus subsp; identical to SEQ ID NO: 12954
  CDS (1)..(1287)

SEQ ID NO: 25057 - protein, 428 aa, Staphylococcus aureus subsp; identical to SEQ ID NO: 12955

SEQ ID NO: 25058 - DNA, 1681 bp, Oryza sativa; identical to SEQ ID NO: 12956
  CDS (62)..(1438)

SEQ ID NO: 25059 - protein, 458 aa, Oryza sativa; identical to SEQ ID NO: 12957

SEQ ID NO: 25060 - DNA, 1182 bp, Photobacterium profundum; identical to SEQ ID NO: 12958
  CDS (1)..(1182)

SEQ ID NO: 25061 - protein, 393 aa, Photobacterium profundum; identical to SEQ ID NO: 12959

SEQ ID NO: 25062 - DNA, 1191 bp, Photobacterium profundum; identical to SEQ ID NO: 12960
  CDS (1)..(1191)

SEQ ID NO: 25063 - protein, 396 aa, Photobacterium profundum; identical to SEQ ID NO: 12961

SEQ ID NO: 25064 - DNA, 1221 bp, Parachlamydia sp; identical to SEQ ID NO: 12962
  CDS (1)..(1221)

SEQ ID NO: 25065 - protein, 406 aa, Parachlamydia sp; identical to SEQ ID NO: 12963

SEQ ID NO: 25066 - DNA, 1191 bp, Rhodopseudomonas palustris; identical to SEQ ID NO: 12964
  CDS (1)..(1191)

SEQ ID NO: 25067 - protein, 396 aa, Rhodopseudomonas palustris; identical to SEQ ID NO: 12965

SEQ ID NO: 25068 - DNA, 1194 bp, Neisseria subflava; identical to SEQ ID NO: 12966
  CDS (1)..(1194)

SEQ ID NO: 25069 - protein, 397 aa, Neisseria subflava; identical to SEQ ID NO: 12967

SEQ ID NO: 25070 - DNA, 1329 bp, Bacillus amyloliquefaciens; identical to SEQ ID NO: 12968
  CDS (1)..(1329)

SEQ ID NO: 25071 - protein, 442 aa, Bacillus amyloliquefaciens; identical to SEQ ID NO: 12969

SEQ ID NO: 25072 - DNA, 1260 bp, Ashbya gossypii; identical to SEQ ID NO: 12970
  CDS (1)..(1260)

SEQ ID NO: 25073 - protein, 419 aa, Ashbya gossypii; identical to SEQ ID NO: 12971

SEQ ID NO: 25074 - DNA, 1332 bp, Ashbya gossypii; identical to SEQ ID NO: 12972
  CDS (1)..(1332)

SEQ ID NO: 25075 - protein, 443 aa, Ashbya gossypii; identical to SEQ ID NO: 12973

SEQ ID NO: 25076 - DNA, 1690 bp, Glycine max; identical to SEQ ID NO: 12974
  CDS (263)..(1522)

SEQ ID NO: 25077 - protein, 419 aa, Glycine max; identical to SEQ ID NO: 12975

SEQ ID NO: 25078 - DNA, 1197 bp, Vibrio vulnificus; identical to SEQ ID NO: 12976
  CDS (1)..(1197)

SEQ ID NO: 25079 - protein, 398 aa, Vibrio vulnificus; identical to SEQ ID NO: 12977

SEQ ID NO: 25080 - DNA, 1200 bp, Photorhabdus luminescens; identical to SEQ ID NO: 12978
  CDS (1)..(1200)

SEQ ID NO: 25081 - protein, 399 aa, Photorhabdus luminescens; identical to SEQ ID NO: 12979

SEQ ID NO: 25082 - DNA, 1191 bp, Photorhabdus luminescens; identical to SEQ ID NO: 12980
  CDS (1)..(1191)

SEQ ID NO: 25083 - protein, 396 aa, Photorhabdus luminescens; identical to SEQ ID NO: 12981

SEQ ID NO: 25084 - DNA, 1209 bp, Chromobacterium violaceum; identical to SEQ ID NO: 12982
  CDS (1)..(1209)

SEQ ID NO: 25085 - protein, 402 aa, Chromobacterium violaceum; identical to SEQ ID NO: 12983

SEQ ID NO: 25086 - DNA, 1194 bp, Chromobacterium violaceum; identical to SEQ ID NO: 12984
  CDS (1)..(1194)

SEQ ID NO: 25087 - protein, 397 aa, Chromobacterium violaceum; identical to SEQ ID NO: 12985

SEQ ID NO: 25088 - DNA, 1233 bp, Plasmodium yoelii yoelii; identical to SEQ ID NO: 12986
  CDS (1)..(1233)

SEQ ID NO: 25089 - protein, 410 aa, Plasmodium yoelii yoelii; identical to SEQ ID NO: 12987

SEQ ID NO: 25090 - DNA, 1449 bp, Neurospora crassa; identical to SEQ ID NO: 12988
  CDS (1)..(1449)

SEQ ID NO: 25091 - protein, 482 aa, Neurospora crassa; identical to SEQ ID NO: 12989

SEQ ID NO: 25092 - DNA, 1290 bp, Neurospora crassa; identical to SEQ ID NO: 12990
  CDS (1)..(1290)

SEQ ID NO: 25093 - protein, 429 aa, Neurospora crassa; identical to SEQ ID NO: 12991

SEQ ID NO: 25094 - DNA, 1451 bp, Mus musculus; identical to SEQ ID NO: 12992
  CDS (62)..(1276)

SEQ ID NO: 25095 - protein, 404 aa, Mus musculus; identical to SEQ ID NO: 12993

SEQ ID NO: 25096 - DNA, 1194 bp, Rhodopirellula baltica; identical to SEQ ID NO: 12994
  CDS (1)..(1194)

SEQ ID NO: 25097 - protein, 397 aa, Rhodopirellula baltica; identical to SEQ ID NO: 12995

SEQ ID NO: 25098 - DNA, 1191 bp, Haemophilus ducreyi; identical to SEQ ID NO: 12996
  CDS (1)..(1191)

SEQ ID NO: 25099 - protein, 396 aa, Haemophilus ducreyi; identical to SEQ ID NO: 12997

SEQ ID NO: 25100 - DNA, 1221 bp, Candidatus Blochmannia floridanus; identical to SEQ ID NO: 12998
  CDS (1)..(1221)

SEQ ID NO: 25101 - protein, 406 aa, Candidatus Blochmannia floridanus; identical to SEQ ID NO: 12999

SEQ ID NO: 25102 - DNA, 1203 bp, Bordetella bronchiseptica; identical to SEQ ID NO: 13000
  CDS (1)..(1203)

SEQ ID NO: 25103 - protein, 400 aa, Bordetella bronchiseptica; identical to SEQ ID NO: 13001

SEQ ID NO: 25104 - DNA, 1200 bp, Bordetella bronchiseptica; identical to SEQ ID NO: 13002
  CDS (1)..(1200)

SEQ ID NO: 25105 - protein, 399 aa, Bordetella bronchiseptica; identical to SEQ ID NO: 13003

SEQ ID NO: 25106 - DNA, 1586 bp, Drosophila melanogaster; identical to SEQ ID NO: 13004
  CDS (1)..(1251)

SEQ ID NO: 25107 - protein, 416 aa, Drosophila melanogaster; identical to SEQ ID NO: 13005

SEQ ID NO: 25108 - DNA, 1191 bp, Chlamydophila caviae; identical to SEQ ID NO: 13006
  CDS (1)..(1191)

SEQ ID NO: 25109 - protein, 396 aa, Chlamydophila caviae; identical to SEQ ID NO: 13007

SEQ ID NO: 25110 - DNA, 1236 bp, Shigella flexneri; identical to SEQ ID NO: 13008
  CDS (1)..(1236)

SEQ ID NO: 25111 - protein, 411 aa, Shigella flexneri; identical to SEQ ID NO: 13009

SEQ ID NO: 25112 - DNA, 1203 bp, Xylella fastidiosa; identical to SEQ ID NO: 13010
  CDS (1)..(1203)

SEQ ID NO: 25113 - protein, 400 aa, Xylella fastidiosa; identical to SEQ ID NO: 13011

SEQ ID NO: 25114 - DNA, 1197 bp, Vibrio parahaemolyticus; identical to SEQ ID NO: 13012
  CDS (1)..(1197)

SEQ ID NO: 25115 - protein, 398 aa, Vibrio parahaemolyticus; identical to SEQ ID NO: 13013

SEQ ID NO: 25116 - DNA, 1245 bp, Vibrio parahaemolyticus; identical to SEQ ID NO: 13014
  CDS (1)..(1245)

SEQ ID NO: 25117 - protein, 414 aa, Vibrio parahaemolyticus; identical to SEQ ID NO: 13015

SEQ ID NO: 25118 - DNA, 1200 bp, Pseudomonas syringae; identical to SEQ ID NO: 13016
  CDS (1)..(1200)

SEQ ID NO: 25119 - protein, 399 aa, Pseudomonas syringae; identical to SEQ ID NO: 13017

SEQ ID NO: 25120 - DNA, 1197 bp, Pseudomonas syringae; identical to SEQ ID NO: 13018
  CDS (1)..(1197)

SEQ ID NO: 25121 - protein, 398 aa, Pseudomonas syringae; identical to SEQ ID NO: 13019

SEQ ID NO: 25122 - DNA, 1197 bp, Pseudomonas putida; identical to SEQ ID NO: 13020
  CDS (1)..(1197)

SEQ ID NO: 25123 - protein, 398 aa, Pseudomonas putida; identical to SEQ ID NO: 13021

SEQ ID NO: 25124 - DNA, 1197 bp, Pseudomonas putida; identical to SEQ ID NO: 13022
  CDS (1)..(1197)

SEQ ID NO: 25125 - protein, 398 aa, Pseudomonas putida; identical to SEQ ID NO: 13023

SEQ ID NO: 25126 - DNA, 1305 bp, Staphylococcus epidermidis; identical to SEQ ID NO: 13024
  CDS (19)..(1305)

SEQ ID NO: 25127 - protein, 428 aa, Staphylococcus epidermidis; identical to SEQ ID NO: 13025

SEQ ID NO: 25128 - DNA, 1206 bp, Yersinia pestis; identical to SEQ ID NO: 13026
  CDS (1)..(1206)

SEQ ID NO: 25129 - protein, 401 aa, Yersinia pestis; identical to SEQ ID NO: 13027

SEQ ID NO: 25130 - DNA, 1197 bp, Wigglesworthia glossinidia brevipalpis; identical to SEQ ID NO: 13028
  CDS (1)..(1197)

SEQ ID NO: 25131 - protein, 398 aa, Wigglesworthia glossinidia brevipalpis; identical to SEQ ID NO: 13029

SEQ ID NO: 25132 - DNA, 1200 bp, Vibrio vulnificus; identical to SEQ ID NO: 13030
  CDS (1)..(1200)

SEQ ID NO: 25133 - protein, 399 aa, Vibrio vulnificus; identical to SEQ ID NO: 13031

SEQ ID NO: 25134 - DNA, 1191 bp, Shewanella oneidensis; identical to SEQ ID NO: 13032
  CDS (1)..(1191)

SEQ ID NO: 25135 - protein, 396 aa, Shewanella oneidensis; identical to SEQ ID NO: 13033

SEQ ID NO: 25136 - DNA, 1194 bp, Shewanella oneidensis; identical to SEQ ID NO: 13034
  CDS (1)..(1194)

SEQ ID NO: 25137 - protein, 397 aa, Shewanella oneidensis; identical to SEQ ID NO: 13035

SEQ ID NO: 25138 - DNA, 1236 bp, Escherichia coli O6; identical to SEQ ID NO: 13036
  CDS (1)..(1236)

SEQ ID NO: 25139 - protein, 411 aa, Escherichia coli O6; identical to SEQ ID NO: 13037

SEQ ID NO: 25140 - DNA, 1797 bp, Phaseolus vulgaris; identical to SEQ ID NO: 13038
  CDS (176)..(1561)

SEQ ID NO: 25141 - protein, 461 aa, Phaseolus vulgaris; identical to SEQ ID NO: 13039

SEQ ID NO: 25142 - DNA, 1179 bp, Ruegeria sp; identical to SEQ ID NO: 13040
  CDS (1)..(1179)

SEQ ID NO: 25143 - protein, 392 aa, Ruegeria sp; identical to SEQ ID NO: 13041

SEQ ID NO: 25144 - DNA, 1203 bp, Xanthomonas campestris; identical to SEQ ID NO: 13042
  CDS (1)..(1203)

SEQ ID NO: 25145 - protein, 400 aa, Xanthomonas campestris; identical to SEQ ID NO: 13043

SEQ ID NO: 25146 - DNA, 1203 bp, Xanthomonas axonopodis; identical to SEQ ID NO: 13044
  CDS (1)..(1203)

SEQ ID NO: 25147 - protein, 400 aa, Xanthomonas axonopodis; identical to SEQ ID NO: 13045

SEQ ID NO: 25148 - DNA, 1248 bp, Fusobacterium nucleatum; identical to SEQ ID NO: 13046
  CDS (1)..(1248)

SEQ ID NO: 25149 - protein, 415 aa, Fusobacterium nucleatum; identical to SEQ ID NO: 13047

SEQ ID NO: 25150 - DNA, 1197 bp, Ralstonia solanacearum; identical to SEQ ID NO: 13048
  CDS (1)..(1197)

SEQ ID NO: 25151 - protein, 398 aa, Ralstonia solanacearum; identical to SEQ ID NO: 13049

SEQ ID NO: 25152 - DNA, 1369 bp, Brugia malayi; identical to SEQ ID NO: 13050
  CDS (23)..(1237)

SEQ ID NO: 25153 - protein, 404 aa, Brugia malayi; identical to SEQ ID NO: 13051

SEQ ID NO: 25154 - DNA, 1284 bp, Giardia lamblia; identical to SEQ ID NO: 13052
  CDS (1)..(1284)

SEQ ID NO: 25155 - protein, 427 aa, Giardia lamblia; identical to SEQ ID NO: 13053

SEQ ID NO: 25156 - DNA, 1173 bp, Trypanosoma brucei; identical to SEQ ID NO: 13054
  CDS (1)..(1173)

SEQ ID NO: 25157 - protein, 390 aa, Trypanosoma brucei; identical to SEQ ID NO: 13055

SEQ ID NO: 25158 - DNA, 1212 bp, Trypanosoma brucei; identical to SEQ ID NO: 13056
  CDS (1)..(1212)

SEQ ID NO: 25159 - protein, 403 aa, Trypanosoma brucei; identical to SEQ ID NO: 13057

SEQ ID NO: 25160 - DNA, 1218 bp, Crithidia fasciculata; identical to SEQ ID NO: 13058
  CDS (1)..(1218)

SEQ ID NO: 25161 - protein, 405 aa, Crithidia fasciculata; identical to SEQ ID NO: 13059

SEQ ID NO: 25162 - DNA, 1185 bp, Rhizobium loti; identical to SEQ ID NO: 13060
  CDS (1)..(1185)

SEQ ID NO: 25163 - protein, 394 aa, Rhizobium loti; identical to SEQ ID NO: 13061

SEQ ID NO: 25164 - DNA, 1191 bp, Pasteurella multocida; identical to SEQ ID NO: 13062
  CDS (1)..(1191)

SEQ ID NO: 25165 - protein, 396 aa, Pasteurella multocida; identical to SEQ ID NO: 13063

SEQ ID NO: 25166 - DNA, 1302 bp, Bacillus subtilis; identical to SEQ ID NO: 13064
  CDS (1)..(1302)

SEQ ID NO: 25167 - protein, 433 aa, Bacillus subtilis; identical to SEQ ID NO: 13065

SEQ ID NO: 25168 - DNA, 1203 bp, Chlamydia muridarum; identical to SEQ ID NO: 13066
  CDS (1)..(1203)

SEQ ID NO: 25169 - protein, 400 aa, Chlamydia muridarum; identical to SEQ ID NO: 13067

SEQ ID NO: 25170 - DNA, 1191 bp, Aeromonas hydrophila; identical to SEQ ID NO: 13068
  CDS (1)..(1191)

SEQ ID NO: 25171 - protein, 396 aa, Aeromonas hydrophila; identical to SEQ ID NO: 13069

SEQ ID NO: 25172 - DNA, 1574 bp, Drosophila melanogaster; identical to SEQ ID NO: 13070
  CDS (106)..(1380)

SEQ ID NO: 25173 - protein, 424 aa, Drosophila melanogaster; identical to SEQ ID NO: 13071

SEQ ID NO: 25174 - DNA, 1535 bp, Arabidopsis thaliana; identical to SEQ ID NO: 13072
  CDS (96)..(1313)

SEQ ID NO: 25175 - protein, 405 aa, Arabidopsis thaliana; identical to SEQ ID NO: 13073

SEQ ID NO: 25176 - DNA, 1490 bp, Arabidopsis thaliana; identical to SEQ ID NO: 13074
  CDS (48)..(1259)

SEQ ID NO: 25177 - protein, 403 aa, Arabidopsis thaliana; identical to SEQ ID NO: 13075

SEQ ID NO: 25178 - DNA, 2001 bp, Sus scrofa; identical to SEQ ID NO: 13076
  CDS (54)..(1295)

SEQ ID NO: 25179 - protein, 413 aa, Sus scrofa; identical to SEQ ID NO: 13077

SEQ ID NO: 25180 - DNA, 1194 bp, Salmonella typhimurium; identical to SEQ ID NO: 13078
  CDS (1)..(1194)

SEQ ID NO: 25181 - protein, 397 aa, Salmonella typhimurium; identical to SEQ ID NO: 13079

SEQ ID NO: 25182 - DNA, 2032 bp, Xenopus tropicalis; identical to SEQ ID NO: 13080
  CDS (30)..(1265)

SEQ ID NO: 25183 - protein, 411 aa, Xenopus tropicalis; identical to SEQ ID NO: 13081

SEQ ID NO: 25184 - DNA, 26 bp, Artificial sequence
  Primer sequence
atgaacaaaagaacacaggaatacaa

SEQ ID NO: 25185 - DNA, 28 bp, Artificial sequence
  Primer sequence
ttacaatttagcttcaatagtatagaag

SEQ ID NO: 25186 - protein, 437 aa, Artificial sequence; identical to SEQ ID NO: 13495
  Consensus
  Variant (2)..(16): Xaa in position 2 to 16 is any amino acid
  Variant (18)..(21): Xaa in position 18 to 21 is any amino acid
  Variant (23)..(23): Xaa in position 23 is any amino acid
  Variant (26)..(27): Xaa in position 26 to 27 is any amino acid
  Variant (29)..(29): Xaa in position 29 is any amino acid
  Variant (31)..(42): Xaa in position 31 to 42 is any amino acid
  Variant (44)..(45): Xaa in position 44 to 45 is any amino acid
  Variant (47)..(61): Xaa in position 47 to 61 is any amino acid
  Variant (63)..(66): Xaa in position 63 to 66 is any amino acid
  Variant (68)..(77): Xaa in position 68 to 77 is any amino acid
  Variant (79)..(96): Xaa in position 79 to 96 is any amino acid
  Variant (98)..(101): Xaa in position 98 to 101 is any amino acid
  Variant (103)..(105): Xaa in position 103 to 105 is any amino acid
  Variant (107)..(107): Xaa in position 107 is any amino acid
  Variant (111)..(137): Xaa in position 111 to 137 is any amino acid
  Variant (139)..(139): Xaa in position 139 is any amino acid
  Variant (141)..(141): Xaa in position 141 is any amino acid
  Variant (144)..(146): Xaa in position 144 to 146 is any amino acid
  Variant (148)..(150): Xaa in position 148 to 150 is any amino acid
  Variant (152)..(157): Xaa in position 152 to 157 is any amino acid
  Variant (159)..(159): Xaa in position 159 is any amino acid
  Variant (161)..(195): Xaa in position 161 to 195 is any amino acid
  Variant (198)..(198): Xaa in position 198 is any amino acid
  Variant (200)..(200): Xaa in position 200 is any amino acid
  Variant (206)..(206): Xaa in position 206 is any amino acid
  Variant (208)..(212): Xaa in position 208 to 212 is any amino acid
  Variant (214)..(234): Xaa in position 214 to 234 is any amino acid
  Variant (236)..(236): Xaa in position 236 is any amino acid
  Variant (242)..(243): Xaa in position 242 to 243 is any amino acid
  Variant (245)..(248): Xaa in position 245 to 248 is any amino acid
  Variant (251)..(253): Xaa in position 251 to 253 is any amino acid
  Variant (255)..(273): Xaa in position 255 to 273 is any amino acid
  Variant (275)..(276): Xaa in position 275 to 276 is any amino acid
  Variant (278)..(280): Xaa in position 278 to 280 is any amino acid
  Variant (283)..(283): Xaa in position 283 is any amino acid
  Variant (286)..(286): Xaa in position 286 is any amino acid
  Variant (288)..(323): Xaa in position 288 to 323 is any amino acid
  Variant (325)..(327): Xaa in position 325 to 327 is any amino acid
  Variant (329)..(329): Xaa in position 329 is any amino acid
  Variant (332)..(333): Xaa in position 332 to 333 is any amino acid
  Variant (335)..(341): Xaa in position 335 to 341 is any amino acid
  Variant (343)..(347): Xaa in position 343 to 347 is any amino acid
  Variant (349)..(351): Xaa in position 349 to 351 is any amino acid
  Variant (353)..(358): Xaa in position 353 to 358 is any amino acid
  Variant (360)..(361): Xaa in position 360 to 361 is any amino acid
  Variant (363)..(366): Xaa in position 363 to 366 is any amino acid
  Variant (368)..(373): Xaa in position 368 to 373 is any amino acid
  Variant (375)..(393): Xaa in position 375 to 393 is any amino acid
  Variant (395)..(395): Xaa in position 395 is any amino acid
  Variant (399)..(401): Xaa in position 399 to 401 is any amino acid
  Variant (403)..(406): Xaa in position 403 to 406 is any amino acid
  Variant (408)..(421): Xaa in position 408 to 421 is any amino acid
  Variant (423)..(426): Xaa in position 423 to 426 is any amino acid
  Variant (428)..(431): Xaa in position 428 to 431 is any amino acid
  Variant (433)..(436): Xaa in position 433 to 436 is any amino acid

SEQ ID NO: 25187 - protein, 55 aa, Artificial sequence; identical to SEQ ID NO: 13492
  Consensus
  Variant (1)..(1): Xaa in position 1 is Gly, Ala or Val
  Variant (2)..(2): Xaa in position 2 is Thr or Ser
  Variant (3)..(3): Xaa in position 3 is Gly or Asn
  Variant (4)..(4): Xaa in position 4 is Ala or Ser
  Variant (5)..(5): Xaa in position 5 is Leu, Cys, Ile or Phe
  Variant (6)..(18): Xaa in position 6 to 18 is any amino acid
  Variant (19)..(27): Xaa in position 19 to 27 is any or no amino acid
  Variant (28)..(28): Xaa in position 28 is Val, Ile or Leu
  Variant (29)..(30): Xaa in position 29 to 30 is any amino acid
  Variant (31)..(31): Xaa in position 31 is Ser, Pro or Thr
  Variant (32)..(34): Xaa in position 32 to 34 is any amino acid
  Variant (35)..(35): Xaa in position 35 is Trp or Tyr
  Variant (36)..(37): Xaa in position 36 to 37 is any amino acid
  Variant (38)..(38): Xaa in position 38 is His or Tyr
  Variant (39)..(40): Xaa in position 39 to 40 is any amino acid
  Variant (41)..(41): Xaa in position 41 is Ile, Val, Leu or Met
  Variant (42)..(51): Xaa in position 42 to 51 is any amino acid
  Variant (52)..(52): Xaa in position 52 is any or no amino acid
  Variant (53)..(53): Xaa in position 53 is Tyr or Phe
  Variant (54)..(55): Xaa in position 54 to 55 is any amino acid

SEQ ID NO: 25188 - protein, 93 aa, Artificial sequence; identical to SEQ ID NO: 13493
  Consensus
  Variant (1)..(1): Xaa in position 1 is Leu, Val, Ile or Met
  Variant (2)..(2): Xaa in position 2 is Leu, Phe, Ile or Val
  Variant (3)..(3): Xaa in position 3 is His, Leu or Gln
  Variant (4)..(5): Xaa in position 4 to 5 is any amino acid
  Variant (6)..(6): Xaa in position 6 is Cys, Ala or Pro
  Variant (7)..(7): Xaa in position 7 is His or Asn
  Variant (10)..(10): Xaa in position 10 is Thr or Ser
  Variant (12)..(13): Xaa in position 12 to 13 is any amino acid
  Variant (14)..(14): Xaa in position 14 is Pro, Leu, Ile, Met or Phe
  Variant (15)..(18): Xaa in position 15 to 18 is any amino acid
  Variant (19)..(19): Xaa in position 19 is Trp or Val
  Variant (20)..(21): Xaa in position 20 to 21 is any amino acid
  Variant (22)..(22): Xaa in position 22 is Ile, Leu or Val
  Variant (23)..(33): Xaa in position 23 to 33 is any amino acid
  Variant (34)..(38): Xaa in position 34 to 38 is any or no amino acid
  Variant (39)..(39): Xaa in position 39 is Phe, Leu, Ile or Val
  Variant (40)..(40): Xaa in position 40 is any amino acid
  Variant (42)..(42): Xaa in position 42 is any amino acid
  Variant (45)..(45): Xaa in position 45 is Gln, Tyr, Leu or Phe
  Variant (47)..(47): Xaa in position 47 is Phe, Leu or Tyr
  Variant (48)..(53): Xaa in position 48 to 53 is any amino acid
  Variant (54)..(54): Xaa in position 54 is any or no amino acid
  Variant (55)..(55): Xaa in position 55 is Asp, Gln or Glu
  Variant (56)..(65): Xaa in position 56 to 65 is any amino acid
  Variant (66)..(77): Xaa in position 66 to 77 is any or no amino acid
  Variant (78)..(78): Xaa in position 78 is Ala, Cys, Ser, Thr, Ile or Leu
  Variant (79)..(79): Xaa in position 79 is any amino acid
  Variant (80)..(80): Xaa in position 80 is Ser or Gly
  Variant (81)..(81): Xaa in position 81 is Phe, Tyr, Cys, Ala or Leu
  Variant (82)..(82): Xaa in position 82 is Ser, Ala or Thr
  Variant (84)..(84): Xaa in position 84 is Asn, Ser, Ile or Glu
  Variant (85)..(85): Xaa in position 85 is any amino acid
  Variant (86)..(86): Xaa in position 86 is Gly, Ser or Phe
  Variant (87)..(87): Xaa in position 87 is Leu, Met, Ile or Ala
  Variant (88)..(88): Xaa in position 88 is Tyr or Trp
  Variant (89)..(89): Xaa in position 89 is Gly, Asn, Ala, Arg or Ser
  Variant (90)..(90): Xaa in position 90 is any amino acid
  Variant (92)..(92): Xaa in position 92 is Val, Ile, Ala, Thr or Cys

SEQ ID NO: 25189 - protein, 120 aa, Artificial sequence; identical to SEQ ID NO: 13494
  Consensus
  Variant (1)..(1): Xaa in position 1 is Leu, Val, Met, Ile or Thr
  Variant (2)..(5): Xaa in position 2 to 5 is any amino acid
  Variant (6)..(6): Xaa in position 6 is Arg or Gln
  Variant (7)..(9): Xaa in position 7 to 9 is any amino acid
  Variant (10)..(10): Xaa in position 10 is Ser or Thr
  Variant (11)..(11): Xaa in position 11 is Asn, Ser, Met or Thr
  Variant (12)..(12): Xaa in position 12 is Pro, Ala, Ser or Gly
  Variant (13)..(13): Xaa in position 13 is Pro, Ala or Ser
  Variant (14)..(15): Xaa in position 14 to 15 is any amino acid
  Variant (16)..(16): Xaa in position 16 is Gly, Ser or Thr
  Variant (17)..(18): Xaa in position 17 to 18 is any amino acid
  Variant (19)..(19): Xaa in position 19 is Ile, Val, Leu, Ala, Thr or Phe
  Variant (20)..(20): Xaa in position 20 is Val, Ala or Ile
  Variant (21)..(22): Xaa in position 21 to 22 is any amino acid
  Variant (23)..(23): Xaa in position 23 is Ile, Val, Thr, Ala or Leu
  Variant (24)..(24): Xaa in position 24 is Leu, Val, Met or Phe
  Variant (25)..(28): Xaa in position 25 to 28 is any amino acid
  Variant (29)..(29): Xaa in position 29 is any or no amino acid
  Variant (30)..(30): Xaa in position 30 is Leu, Met or Phe
  Variant (31)..(33): Xaa in position 31 to 33 is any amino acid
  Variant (34)..(34): Xaa in position 34 is Trp, Phe, Lys or Ile
  Variant (35)..(36): Xaa in position 35 to 36 is any amino acid
  Variant (37)..(37): Xaa in position 37 is Glu, Asp, Asn, Ser or Lys
  Variant (38)..(38): Xaa in position 38 is Leu, Val, Met or Ile
  Variant (39)..(40): Xaa in position 39 to 40 is any amino acid
  Variant (41)..(41): Xaa in position 41 is Met, Ile, Leu or Val
  Variant (42)..(43): Xaa in position 42 to 43 is any amino acid
  Variant (44)..(44): Xaa in position 44 is Arg, Ser or His
  Variant (45)..(45): Xaa in position 45 is Ile, Leu, Met, Tyr, Val or Ala
  Variant (46)..(47): Xaa in position 46 to 47 is any amino acid
  Variant (48)..(48): Xaa in position 48 is Met, Ile, Leu, Val, Thr or Arg
  Variant (49)..(49): Xaa in position 49 is Arg or Lys
  Variant (50)..(51): Xaa in position 50 to 51 is any amino acid
  Variant (52)..(52): Xaa in position 52 is Leu, Phe, Met, Val or Ile
  Variant (53)..(60): Xaa in position 53 to 60 is any amino acid
  Variant (61)..(69): Xaa in position 61 to 69 is any or no amino acid
  Variant (70)..(70): Xaa in position 70 is Trp, Phe or Leu
  Variant (71)..(72): Xaa in position 71 to 72 is any amino acid
  Variant (73)..(73): Xaa in position 73 is Ile, Leu, Val, Tyr or Phe
  Variant (74)..(77): Xaa in position 74 to 77 is any amino acid
  Variant (79)..(79): Xaa in position 79 is Met, Phe, Tyr or Leu
  Variant (81)..(83): Xaa in position 81 to 83 is any amino acid
  Variant (84)..(84): Xaa in position 84 is Gly, Lys, Pro or Arg
  Variant (85)..(97): Xaa in position 85 to 97 is any amino acid
  Variant (98)..(102): Xaa in position 98 to 102 is any or no amino acid
  Variant (103)..(103): Xaa in position 103 is Ile or Val
  Variant (104)..(104): Xaa in position 104 is Tyr, Gly or Phe
  Variant (105)..(108): Xaa in position 105 to 108 is any amino acid
  Variant (109)..(109): Xaa in position 109 is Gly, Ser or Asn
  Variant (110)..(113): Xaa in position 110 to 113 is any or no amino acid
  Variant (115)..(115): Xaa in position 115 is Ile, Met, Val, Ala, Phe or Leu
  Variant (116)..(116): Xaa in position 116 is any amino acid
  Variant (117)..(117): Xaa in position 117 is Val, Met, Leu, Ile or Phe
  Variant (118)..(118): Xaa in position 118 is Ala, Ser, Cys or Asn
  Variant (119)..(119): Xaa in position 119 is Gly, Ala, Cys or Ser
  Variant (120)..(120): Xaa in position 120 is Leu, Ile, Val or Met

SEQ ID NO: 25190 - DNA, 1518 bp, Saccharomyces cerevisiae; identical to SEQ ID NO: 2533
  CDS (1)..(1518)

SEQ ID NO: 25191 - protein, 505 aa, Saccharomyces cerevisiae; identical to SEQ ID NO: 2534

SEQ ID NO: 25192 - DNA, 1548 bp, Mus musculus (house mouse); identical to SEQ ID NO: 2535
  CDS (1)..(1548)

SEQ ID NO: 25193 - protein, 515 aa, Mus musculus (house mouse); identical to SEQ ID NO: 2536

SEQ ID NO: 25194 - DNA, 1593 bp, Fugu rubripes (Japanese pufferfish); identical to SEQ ID NO: 2537
  CDS (1)..(1593)

SEQ ID NO: 25195 - protein, 530 aa, Fugu rubripes (Japanese pufferfish); identical to SEQ ID NO: 2538

SEQ ID NO: 25196 - DNA, 1506 bp, Vibrio cholerae; identical to SEQ ID NO: 2539
  CDS (1)..(1506)

SEQ ID NO: 25197 - protein, 501 aa, Vibrio cholerae; identical to SEQ ID NO: 2540

SEQ ID NO: 25198 - DNA, 1470 bp, Pseudomonas aeruginosa; identical to SEQ ID NO: 2541
  CDS (1)..(1470)

SEQ ID NO: 25199 - protein, 489 aa, Pseudomonas aeruginosa; identical to SEQ ID NO: 2542

SEQ ID NO: 25200 - DNA, 1485 bp, Staphylococcus aureus; identical to SEQ ID NO: 2543
  CDS (1)..(1485)

SEQ ID NO: 25201 - protein, 494 aa, Staphylococcus aureus; identical to SEQ ID NO: 2544

SEQ ID NO: 25202 - DNA, 1488 bp, Streptococcus pneumoniae; identical to SEQ ID NO: 2545
  CDS (1)..(1488)

SEQ ID NO: 25203 - protein, 495 aa, Streptococcus pneumoniae; identical to SEQ ID NO: 2546

SEQ ID NO: 25204 - DNA, 1476 bp, Salmonella enterica subsp. enterica serovar Typhi; identical to SEQ ID NO: 2547
  CDS (1)..(1476)

SEQ ID NO: 25205 - protein, 491 aa, Salmonella enterica subsp. enterica serovar Typhi; identical to SEQ ID NO: 2548

SEQ ID NO: 25206 - DNA, 1476 bp, Agrobacterium tumefaciens; identical to SEQ ID NO: 2549
  CDS (1)..(1476)

SEQ ID NO: 25207 - protein, 491 aa, Agrobacterium tumefaciens; identical to SEQ ID NO: 2550

SEQ ID NO: 25208 - DNA, 1530 bp, Nostoc sp. PCC 7120; identical to SEQ ID NO: 2551
  CDS (1)..(1530)

SEQ ID NO: 25209 - protein, 509 aa, Nostoc sp. PCC 7120; identical to SEQ ID NO: 2552

SEQ ID NO: 25210 - DNA, 1386 bp, Agrobacterium tumefaciens; identical to SEQ ID NO: 2553
  CDS (1)..(1386)

SEQ ID NO: 25211 - protein, 461 aa, Agrobacterium tumefaciens; identical to SEQ ID NO: 2554

SEQ ID NO: 25212 - DNA, 1476 bp, Brucella melitensis; identical to SEQ ID NO: 2555
  CDS (1)..(1476)

SEQ ID NO: 25213 - protein, 491 aa, Brucella melitensis; identical to SEQ ID NO: 2556

SEQ ID NO: 25214 - DNA, 1458 bp, Zymomonas mobilis; identical to SEQ ID NO: 2557
  CDS (1)..(1458)

SEQ ID NO: 25215 - protein, 485 aa, Zymomonas mobilis; identical to SEQ ID NO: 2558

SEQ ID NO: 25216 - DNA, 1470 bp, Bacillus subtilis; identical to SEQ ID NO: 2559
  CDS (1)..(1470)

SEQ ID NO: 25217 - protein, 489 aa, Bacillus subtilis; identical to SEQ ID NO: 2560

SEQ ID NO: 25218 - DNA, 1401 bp, Mycobacterium tuberculosis; identical to SEQ ID NO: 2561
  CDS (1)..(1401)

SEQ ID NO: 25219 - protein, 466 aa, Mycobacterium tuberculosis; identical to SEQ ID NO: 2562

SEQ ID NO: 25220 - DNA, 1545 bp, Mycobacterium tuberculosis; identical to SEQ ID NO: 2563
  CDS (1)..(1545)

SEQ ID NO: 25221 - protein, 514 aa, Mycobacterium tuberculosis; identical to SEQ ID NO: 2564

SEQ ID NO: 25222 - DNA, 1320 bp, Chlamydia trachomatis; identical to SEQ ID NO: 2565
  CDS (1)..(1320)

SEQ ID NO: 25223 - protein, 439 aa, Chlamydia trachomatis; identical to SEQ ID NO: 2566

SEQ ID NO: 25224 - DNA, 1773 bp, Deinococcus radiodurans; identical to SEQ ID NO: 2567
  CDS (1)..(1773)

SEQ ID NO: 25225 - protein, 590 aa, Deinococcus radiodurans; identical to SEQ ID NO: 2568

SEQ ID NO: 25226 - DNA, 1467 bp, Pseudomonas aeruginosa; identical to SEQ ID NO: 2569
  CDS (1)..(1467)

SEQ ID NO: 25227 - protein, 488 aa, Pseudomonas aeruginosa; identical to SEQ ID NO: 2570

SEQ ID NO: 25228 - DNA, 1422 bp, Caulobacter crescentus; identical to SEQ ID NO: 2571
  CDS (1)..(1422)

SEQ ID NO: 25229 - protein, 473 aa, Caulobacter crescentus; identical to SEQ ID NO: 2572

SEQ ID NO: 25230 - DNA, 1437 bp, Borrelia burgdorferi (Lyme disease spirochete); identical to SEQ ID NO: 2573
  CDS (1)..(1437)

SEQ ID NO: 25231 - protein, 478 aa, Borrelia burgdorferi (Lyme disease spirochete); identical to SEQ ID NO: 2574

SEQ ID NO: 25232 - DNA, 1539 bp, Chlamydophila pneumoniae, Chlamydia pneumoniae; identical to SEQ ID NO: 2575
  CDS (1)..(1539)

SEQ ID NO: 25233 - protein, 512 aa, Chlamydophila pneumoniae, Chlamydia pneumoniae; identical to SEQ ID NO: 2576

SEQ ID NO: 25234 - DNA, 1476 bp, Escherichia coli; identical to SEQ ID NO: 2577
  CDS (1)..(1476)

SEQ ID NO: 25235 - protein, 491 aa, Escherichia coli; identical to SEQ ID NO: 2578

SEQ ID NO: 25236 - DNA, 1548 bp, Treponema pallidum subsp. pallidum (syphilis spirochete); identical to SEQ ID NO: 2579
  CDS (1)..(1548)

SEQ ID NO: 25237 - protein, 515 aa, Treponema pallidum subsp. pallidum (syphilis spirochete); identical to SEQ ID NO: 2580

SEQ ID NO: 25238 - DNA, 1476 bp, Buchnera sp; identical to SEQ ID NO: 2581
  CDS (1)..(1476)

SEQ ID NO: 25239 - protein, 491 aa, Buchnera sp; identical to SEQ ID NO: 2582

SEQ ID NO: 25240 - DNA, 1512 bp, Lactococcus lactis subsp. lactis; identical to SEQ ID NO: 2583
  CDS (1)..(1512)

SEQ ID NO: 25241 - protein, 503 aa, Lactococcus lactis subsp. lactis; identical to SEQ ID NO: 2584

SEQ ID NO: 25242 - DNA, 1572 bp, Drosophila melanogaster; identical to SEQ ID NO: 2585
  CDS (1)..(1572)

SEQ ID NO: 25243 - protein, 523 aa, Drosophila melanogaster; identical to SEQ ID NO: 2586

SEQ ID NO: 25244 - DNA, 1575 bp, Synechococcus sp; identical to SEQ ID NO: 2587
  CDS (1)..(1575)

SEQ ID NO: 25245 - protein, 524 aa, Synechococcus sp; identical to SEQ ID NO: 2588

SEQ ID NO: 25246 - DNA, 1485 bp, Haemophilus influenzae; identical to SEQ ID NO: 2589
  CDS (1)..(1485)

SEQ ID NO: 25247 - protein, 494 aa, Haemophilus influenzae; identical to SEQ ID NO: 2590

SEQ ID NO: 25248 - DNA, 1446 bp, Neisseria meningitidis; identical to SEQ ID NO: 2591
  CDS (1)..(1446)

SEQ ID NO: 25249 - protein, 481 aa, Neisseria meningitidis; identical to SEQ ID NO: 2592

SEQ ID NO: 25250 - DNA, 1278 bp, Helicobacter pylori; identical to SEQ ID NO: 2593
  CDS (1)..(1278)

SEQ ID NO: 25251 - protein, 425 aa, Helicobacter pylori; identical to SEQ ID NO: 2594

SEQ ID NO: 25252 - DNA, 1434 bp, Xylella fastidiosa; identical to SEQ ID NO: 2595
  CDS (1)..(1434)

SEQ ID NO: 25253 - protein, 477 aa, Xylella fastidiosa; identical to SEQ ID NO: 2596

SEQ ID NO: 25254 - DNA, 1296 bp, Aquifex aeolicus; identical to SEQ ID NO: 2597
  CDS (1)..(1296)

SEQ ID NO: 25255 - protein, 431 aa, Aquifex aeolicus; identical to SEQ ID NO: 2598

SEQ ID NO: 25256 - DNA, 1491 bp, Thermotoga maritima; identical to SEQ ID NO: 2599
  CDS (1)..(1491)

SEQ ID NO: 25257 - protein, 496 aa, Thermotoga maritima; identical to SEQ ID NO: 2600

SEQ ID NO: 25258 - DNA, 1494 bp, Kluyveromyces marxianus var. lactis, Candida sphaerica; identical to SEQ ID NO: 2601
  CDS (1)..(1494)

SEQ ID NO: 25259 - protein, 497 aa, Kluyveromyces marxianus var. lactis, Candida sphaerica; identical to SEQ ID NO: 2602

SEQ ID NO: 25260 - DNA, 2813 bp, Erwinia chrysanthemi; identical to SEQ ID NO: 2603
  CDS (322)..(1797)

SEQ ID NO: 25261 - protein, 491 aa, Erwinia chrysanthemi; identical to SEQ ID NO: 2604

SEQ ID NO: 25262 - DNA, 3244 bp, Plasmodium falciparum; identical to SEQ ID NO: 2605
  CDS (184)..(2916)

SEQ ID NO: 25263 - protein, 910 aa, Plasmodium falciparum; identical to SEQ ID NO: 2606

SEQ ID NO: 25264 - DNA, 1785 bp, Medicago sativa (alfalfa); identical to SEQ ID NO: 2607
  CDS (38)..(1585)

SEQ ID NO: 25265 - protein, 515 aa, Medicago sativa (alfalfa); identical to SEQ ID NO: 2608

SEQ ID NO: 25266 - DNA, 1689 bp, Solanum tuberosum (potato); identical to SEQ ID NO: 2609
  CDS (46)..(1581)

SEQ ID NO: 25267 - protein, 511 aa, Solanum tuberosum (potato); identical to SEQ ID NO: 2610

SEQ ID NO: 25268 - DNA, 1530 bp, Synechocystis sp; identical to SEQ ID NO: 2611
  CDS (1)..(1530)

SEQ ID NO: 25269 - protein, 509 aa, Synechocystis sp; identical to SEQ ID NO: 2612

SEQ ID NO: 25270 - DNA, 1953 bp, Nicotiana tabacum (common tobacco); identical to SEQ ID NO: 2613
  CDS (43)..(1824)

SEQ ID NO: 25271 - protein, 593 aa, Nicotiana tabacum (common tobacco); identical to SEQ ID NO: 2614

SEQ ID NO: 25272 - DNA, 1869 bp, Nicotiana tabacum (common tobacco); identical to SEQ ID NO: 2615
  CDS (22)..(1788)

SEQ ID NO: 25273 - protein, 588 aa, Nicotiana tabacum (common tobacco); identical to SEQ ID NO: 2616

SEQ ID NO: 25274 - DNA, 2058 bp, Solanum tuberosum (potato); identical to SEQ ID NO: 2617
  CDS (41)..(1774)

SEQ ID NO: 25275 - protein, 577 aa, Solanum tuberosum (potato); identical to SEQ ID NO: 2618

SEQ ID NO: 25276 - DNA, 2049 bp, Spinacia oleracea (spinach); identical to SEQ ID NO: 2619
  CDS (147)..(1871)

SEQ ID NO: 25277 - protein, 574 aa, Spinacia oleracea (spinach); identical to SEQ ID NO: 2620

SEQ ID NO: 25278 - DNA, 2359 bp, Petroselinum crispum (parsley); identical to SEQ ID NO: 2621
  CDS (172)..(1986)

SEQ ID NO: 25279 - protein, 604 aa, Petroselinum crispum (parsley); identical to SEQ ID NO: 2622

SEQ ID NO: 25280 - DNA, 1848 bp, Petroselinum crispum (parsley); identical to SEQ ID NO: 2623
  CDS (41)..(1528)

SEQ ID NO: 25281 - protein, 495 aa, Petroselinum crispum (parsley); identical to SEQ ID NO: 2624

SEQ ID NO: 25282 - DNA, 1957 bp, Petroselinum crispum (parsley); identical to SEQ ID NO: 2625
  CDS (74)..(1678)

SEQ ID NO: 25283 - protein, 534 aa, Petroselinum crispum (parsley); identical to SEQ ID NO: 2626

SEQ ID NO: 25284 - DNA, 1569 bp, Caenorhabditis elegans; identical to SEQ ID NO: 2627
  CDS (1)..(1569)

SEQ ID NO: 25285 - protein, 522 aa, Caenorhabditis elegans; identical to SEQ ID NO: 2628

SEQ ID NO: 25286 - DNA, 1779 bp, Streptomyces coelicolor; identical to SEQ ID NO: 2629
  CDS (1)..(1779)

SEQ ID NO: 25287 - protein, 592 aa, Streptomyces coelicolor; identical to SEQ ID NO: 2630

SEQ ID NO: 25288 - DNA, 1524 bp, Streptomyces coelicolor; identical to SEQ ID NO: 2631
  CDS (1)..(1524)

SEQ ID NO: 25289 - protein, 507 aa, Streptomyces coelicolor; identical to SEQ ID NO: 2632

SEQ ID NO: 25290 - DNA, 1422 bp, Schizosaccharomyces pombe; identical to SEQ ID NO: 2633
  CDS (1)..(1422)

SEQ ID NO: 25291 - protein, 473 aa, Schizosaccharomyces pombe; identical to SEQ ID NO: 2634

SEQ ID NO: 25292 - DNA, 1503 bp, Schizosaccharomyces pombe; identical to SEQ ID NO: 2635
  CDS (1)..(1503)

SEQ ID NO: 25293 - protein, 500 aa, Schizosaccharomyces pombe; identical to SEQ ID NO: 2636

SEQ ID NO: 25294 - DNA, 1428 bp, Schizosaccharomyces pombe; identical to SEQ ID NO: 2637
  CDS (1)..(1428)

SEQ ID NO: 25295 - protein, 475 aa, Schizosaccharomyces pombe; identical to SEQ ID NO: 2638

SEQ ID NO: 25296 - DNA, 1461 bp, Leuconostoc mesenteroides; identical to SEQ ID NO: 2639
  CDS (1)..(1461)

SEQ ID NO: 25297 - protein, 486 aa, Leuconostoc mesenteroides; identical to SEQ ID NO: 2640

SEQ ID NO: 25298 - DNA, 3038 bp, Corynebacterium glutamicum; identical to SEQ ID NO: 2641
  CDS (115)..(1659)

SEQ ID NO: 25299 - protein, 514 aa, Corynebacterium glutamicum; identical to SEQ ID NO: 2642

SEQ ID NO: 25300 - DNA, 1852 bp, Nicotiana tabacum; identical to SEQ ID NO: 2643
  CDS (102)..(1634)

SEQ ID NO: 25301 - protein, 510 aa, Nicotiana tabacum; identical to SEQ ID NO: 2644

SEQ ID NO: 25302 - DNA, 1821 bp, Nicotiana tabacum; identical to SEQ ID NO: 2645
  CDS (88)..(1623)

SEQ ID NO: 25303 - protein, 511 aa, Nicotiana tabacum; identical to SEQ ID NO: 2646

SEQ ID NO: 25304 - DNA, 1808 bp, Chlamydia trachomatis; identical to SEQ ID NO: 2647
  CDS (105)..(1643)

SEQ ID NO: 25305 - protein, 512 aa, Chlamydia trachomatis; identical to SEQ ID NO: 2648

SEQ ID NO: 25306 - DNA, 2750 bp, Plasmodium falciparum; identical to SEQ ID NO: 2649
  CDS (48)..(2258)

SEQ ID NO: 25307 - protein, 736 aa, Plasmodium falciparum; identical to SEQ ID NO: 2650

SEQ ID NO: 25308 - DNA, 1509 bp, Debaryomyces hansenii; identical to SEQ ID NO: 2651
  CDS (1)..(1509)

SEQ ID NO: 25309 - protein, 502 aa, Debaryomyces hansenii; identical to SEQ ID NO: 2652

SEQ ID NO: 25310 - DNA, 1503 bp, Candida glabrata; identical to SEQ ID NO: 2653
  CDS (1)..(1503)

SEQ ID NO: 25311 - protein, 500 aa, Candida glabrata; identical to SEQ ID NO: 2654

SEQ ID NO: 25312 - DNA, 1485 bp, Bacillus thuringiensis serovar konkukian str; identical to SEQ ID NO: 2655
  CDS (1)..(1485)

SEQ ID NO: 25313 - protein, 494 aa, Bacillus thuringiensis serovar konkukian str; identical to SEQ ID NO: 2656

SEQ ID NO: 25314 - DNA, 1554 bp, Oryza sativa; identical to SEQ ID NO: 2657
  CDS (1)..(1554)

SEQ ID NO: 25315 - protein, 517 aa, Oryza sativa; identical to SEQ ID NO: 2658

SEQ ID NO: 25316 - DNA, 1500 bp, Photobacterium profundum; identical to SEQ ID NO: 2659
  CDS (1)..(1500)

SEQ ID NO: 25317 - protein, 499 aa, Photobacterium profundum; identical to SEQ ID NO: 2660

SEQ ID NO: 25318 - DNA, 1551 bp, Parachlamydia sp; identical to SEQ ID NO: 2661
  CDS (1)..(1551)

SEQ ID NO: 25319 - protein, 516 aa, Parachlamydia sp; identical to SEQ ID NO: 2662

SEQ ID NO: 25320 - DNA, 1515 bp, Rhodopseudomonas palustris; identical to SEQ ID NO: 2663
  CDS (1)..(1515)

SEQ ID NO: 25321 - protein, 504 aa, Rhodopseudomonas palustris; identical to SEQ ID NO: 2664

SEQ ID NO: 25322 - DNA, 1650 bp, Corynebacterium diphtheriae; identical to SEQ ID NO: 2665
  CDS (1)..(1650)

SEQ ID NO: 25323 - protein, 549 aa, Corynebacterium diphtheriae; identical to SEQ ID NO: 2666

SEQ ID NO: 25324 - DNA, 1446 bp, uncultured bacterium 581; identical to SEQ ID NO: 2667
  CDS (1)..(1446)

SEQ ID NO: 25325 - protein, 481 aa, uncultured bacterium 581; identical to SEQ ID NO: 2668

SEQ ID NO: 25326 - DNA, 1602 bp, Nonomuraea sp; identical to SEQ ID NO: 2669
  CDS (1)..(1602)

SEQ ID NO: 25327 - protein, 533 aa, Nonomuraea sp; identical to SEQ ID NO: 2670

SEQ ID NO: 25328 - DNA, 1476 bp, Listeria monocytogenes; identical to SEQ ID NO: 2671
  CDS (1)..(1476)

SEQ ID NO: 25329 - protein, 491 aa, Listeria monocytogenes; identical to SEQ ID NO: 2672

SEQ ID NO: 25330 - DNA, 1485 bp, Bacillus cereus; identical to SEQ ID NO: 2673
  CDS (1)..(1485)

SEQ ID NO: 25331 - protein, 494 aa, Bacillus cereus; identical to SEQ ID NO: 2674

SEQ ID NO: 25332 - DNA, 1410 bp, Mycobacterium paratuberculosis; identical to SEQ ID NO: 2675
  CDS (1)..(1410)

SEQ ID NO: 25333 - protein, 469 aa, Mycobacterium paratuberculosis; identical to SEQ ID NO: 2676

SEQ ID NO: 25334 - DNA, 2454 bp, Mycobacterium paratuberculosis; identical to SEQ ID NO: 2677
  CDS (1)..(2454)

SEQ ID NO: 25335 - protein, 817 aa, Mycobacterium paratuberculosis; identical to SEQ ID NO: 2678

SEQ ID NO: 25336 - DNA, 1545 bp, Mycobacterium paratuberculosis; identical to SEQ ID NO: 2679
  CDS (1)..(1545)

SEQ ID NO: 25337 - protein, 514 aa, Mycobacterium paratuberculosis; identical to SEQ ID NO: 2680

SEQ ID NO: 25338 - DNA, 1449 bp, Lactobacillus johnsonii; identical to SEQ ID NO: 2681
  CDS (1)..(1449)

SEQ ID NO: 25339 - protein, 482 aa, Lactobacillus johnsonii; identical to SEQ ID NO: 2682

SEQ ID NO: 25340 - DNA, 1539 bp, Ashbya gossypii; identical to SEQ ID NO: 2683
  CDS (1)..(1539)

SEQ ID NO: 25341 - protein, 512 aa, Ashbya gossypii; identical to SEQ ID NO: 2684

SEQ ID NO: 25342 - DNA, 1734 bp, Oryza sativa; identical to SEQ ID NO: 2685
  CDS (1)..(1734)

SEQ ID NO: 25343 - protein, 577 aa, Oryza sativa; identical to SEQ ID NO: 2686

SEQ ID NO: 25344 - DNA, 1467 bp, Gluconobacter oxydans; identical to SEQ ID NO: 2687
  CDS (1)..(1467)

SEQ ID NO: 25345 - protein, 488 aa, Gluconobacter oxydans; identical to SEQ ID NO: 2688

SEQ ID NO: 25346 - DNA, 1581 bp, Vibrio vulnificus; identical to SEQ ID NO: 2689
  CDS (1)..(1581)

SEQ ID NO: 25347 - protein, 526 aa, Vibrio vulnificus; identical to SEQ ID NO: 2690

SEQ ID NO: 25348 - DNA, 1476 bp, Photorhabdus luminescens; identical to SEQ ID NO: 2691
  CDS (1)..(1476)

SEQ ID NO: 25349 - protein, 491 aa, Photorhabdus luminescens; identical to SEQ ID NO: 2692

SEQ ID NO: 25350 - DNA, 1539 bp, Gloeobacter violaceus; identical to SEQ ID NO: 2693
  CDS (1)..(1539)

SEQ ID NO: 25351 - protein, 512 aa, Gloeobacter violaceus; identical to SEQ ID NO: 2694

SEQ ID NO: 25352 - DNA, 1539 bp, Gloeobacter violaceus; identical to SEQ ID NO: 2695
  CDS (1)..(1539)

SEQ ID NO: 25353 - protein, 512 aa, Gloeobacter violaceus; identical to SEQ ID NO: 2696

SEQ ID NO: 25354 - DNA, 1479 bp, Chromobacterium violaceum; identical to SEQ ID NO: 2697
  CDS (1)..(1479)

SEQ ID NO: 25355 - protein, 492 aa, Chromobacterium violaceum; identical to SEQ ID NO: 2698

SEQ ID NO: 25356 - DNA, 2229 bp, Giardia lamblia ATCC 50803; identical to SEQ ID NO: 2699
  CDS (1)..(2229)

SEQ ID NO: 25357 - protein, 742 aa, Giardia lamblia ATCC 50803; identical to SEQ ID NO: 2700

SEQ ID NO: 25358 - DNA, 2850 bp, Plasmodium yoelii yoelii; identical to SEQ ID NO: 2701
  CDS (1)..(2850)

SEQ ID NO: 25359 - protein, 949 aa, Plasmodium yoelii yoelii; identical to SEQ ID NO: 2702

SEQ ID NO: 25360 - DNA, 1476 bp, Neurospora crassa; identical to SEQ ID NO: 2703
  CDS (1)..(1476)

SEQ ID NO: 25361 - protein, 491 aa, Neurospora crassa; identical to SEQ ID NO: 2704

SEQ ID NO: 25362 - DNA, 1524 bp, Synechococcus sp; identical to SEQ ID NO: 2705
  CDS (1)..(1524)

SEQ ID NO: 25363 - protein, 507 aa, Synechococcus sp; identical to SEQ ID NO: 2706

SEQ ID NO: 25364 - DNA, 1455 bp, Rhodopirellula baltica; identical to SEQ ID NO: 2707
  CDS (1)..(1455)

SEQ ID NO: 25365 - protein, 484 aa, Rhodopirellula baltica; identical to SEQ ID NO: 2708

SEQ ID NO: 25366 - DNA, 1524 bp, Prochlorococcus marinus subsp; identical to SEQ ID NO: 2709
  CDS (1)..(1524)

SEQ ID NO: 25367 - protein, 507 aa, Prochlorococcus marinus subsp; identical to SEQ ID NO: 2710

SEQ ID NO: 25368 - DNA, 1524 bp, Prochlorococcus marinus; identical to SEQ ID NO: 2711
  CDS (1)..(1524)

SEQ ID NO: 25369 - protein, 507 aa, Prochlorococcus marinus; identical to SEQ ID NO: 2712

SEQ ID NO: 25370 - DNA, 1521 bp, Prochlorococcus marinus; identical to SEQ ID NO: 2713
  CDS (1)..(1521)

SEQ ID NO: 25371 - protein, 506 aa, Prochlorococcus marinus; identical to SEQ ID NO: 2714

SEQ ID NO: 25372 - DNA, 1488 bp, Haemophilus ducreyi; identical to SEQ ID NO: 2715
  CDS (1)..(1488)

SEQ ID NO: 25373 - protein, 495 aa, Haemophilus ducreyi; identical to SEQ ID NO: 2716

SEQ ID NO: 25374 - DNA, 1497 bp, Candidatus Blochmannia floridanus; identical to SEQ ID NO: 2717
  CDS (1)..(1497)

SEQ ID NO: 25375 - protein, 498 aa, Candidatus Blochmannia floridanus; identical to SEQ ID NO: 2718

SEQ ID NO: 25376 - DNA, 1768 bp, Oryza sativa; identical to SEQ ID NO: 2719
  CDS (2)..(1768)

SEQ ID NO: 25377 - protein, 588 aa, Oryza sativa; identical to SEQ ID NO: 2720

SEQ ID NO: 25378 - DNA, 1548 bp, Bos indicus; identical to SEQ ID NO: 2721
  CDS (1)..(1548)

SEQ ID NO: 25379 - protein, 515 aa, Bos indicus; identical to SEQ ID NO: 2722

SEQ ID NO: 25380 - DNA, 1536 bp, Chlamydophila caviae; identical to SEQ ID NO: 2723
  CDS (1)..(1536)

SEQ ID NO: 25381 - protein, 511 aa, Chlamydophila caviae; identical to SEQ ID NO: 2724

SEQ ID NO: 25382 - DNA, 1524 bp, Streptomyces avermitilis; identical to SEQ ID NO: 2725
  CDS (1)..(1524)

SEQ ID NO: 25383 - protein, 507 aa, Streptomyces avermitilis; identical to SEQ ID NO: 2726

SEQ ID NO: 25384 - DNA, 1647 bp, Streptomyces avermitilis; identical to SEQ ID NO: 2727
  CDS (1)..(1647)

SEQ ID NO: 25385 - protein, 548 aa, Streptomyces avermitilis; identical to SEQ ID NO: 2728

SEQ ID NO: 25386 - DNA, 1491 bp, Nitrosomonas europaea; identical to SEQ ID NO: 2729
  CDS (1)..(1491)

SEQ ID NO: 25387 - protein, 496 aa, Nitrosomonas europaea; identical to SEQ ID NO: 2730

SEQ ID NO: 25388 - DNA, 1524 bp, Enterococcus faecalis; identical to SEQ ID NO: 2731
  CDS (1)..(1524)

SEQ ID NO: 25389 - protein, 507 aa, Enterococcus faecalis; identical to SEQ ID NO: 2732

SEQ ID NO: 25390 - DNA, 1464 bp, Tropheryma whipplei; identical to SEQ ID NO: 2733
  CDS (1)..(1464)

SEQ ID NO: 25391 - protein, 487 aa, Tropheryma whipplei; identical to SEQ ID NO: 2734

SEQ ID NO: 25392 - DNA, 2145 bp, Leishmania mexicana; identical to SEQ ID NO: 2735
  CDS (298)..(1986)

SEQ ID NO: 25393 - protein, 562 aa, Leishmania mexicana; identical to SEQ ID NO: 2736

SEQ ID NO: 25394 - DNA, 1494 bp, Dictyostelium discoideum; identical to SEQ ID NO: 2737
  CDS (1)..(1494)

SEQ ID NO: 25395 - protein, 497 aa, Dictyostelium discoideum; identical to SEQ ID NO: 2738

SEQ ID NO: 25396 - DNA, 1503 bp, Xylella fastidiosa; identical to SEQ ID NO: 2739
  CDS (1)..(1503)

SEQ ID NO: 25397 - protein, 500 aa, Xylella fastidiosa; identical to SEQ ID NO: 2740

SEQ ID NO: 25398 - DNA, 1506 bp, Vibrio parahaemolyticus; identical to SEQ ID NO: 2741
  CDS (1)..(1506)

SEQ ID NO: 25399 - protein, 501 aa, Vibrio parahaemolyticus; identical to SEQ ID NO: 2742

SEQ ID NO: 25400 - DNA, 1533 bp, Pseudomonas syringae; identical to SEQ ID NO: 2743
  CDS (1)..(1533)

SEQ ID NO: 25401 - protein, 510 aa, Pseudomonas syringae; identical to SEQ ID NO: 2744

SEQ ID NO: 25402 - DNA, 1470 bp, Pseudomonas syringae; identical to SEQ ID NO: 2745
  CDS (1)..(1470)

SEQ ID NO: 25403 - protein, 489 aa, Pseudomonas syringae; identical to SEQ ID NO: 2746

SEQ ID NO: 25404 - DNA, 1458 bp, Pseudomonas putida; identical to SEQ ID NO: 2747
  CDS (1)..(1458)

SEQ ID NO: 25405 - protein, 485 aa, Pseudomonas putida; identical to SEQ ID NO: 2748

SEQ ID NO: 25406 - DNA, 1506 bp, Pseudomonas putida; identical to SEQ ID NO: 2749
  CDS (1)..(1506)

SEQ ID NO: 25407 - protein, 501 aa, Pseudomonas putida; identical to SEQ ID NO: 2750

SEQ ID NO: 25408 - DNA, 1470 bp, Pseudomonas putida; identical to SEQ ID NO: 2751
  CDS (1)..(1470)

SEQ ID NO: 25409 - protein, 489 aa, Pseudomonas putida; identical to SEQ ID NO: 2752

SEQ ID NO: 25410 - DNA, 1485 bp, Lactobacillus plantarum; identical to SEQ ID NO: 2753
  CDS (1)..(1485)

SEQ ID NO: 25411 - protein, 494 aa, Lactobacillus plantarum; identical to SEQ ID NO: 2754

SEQ ID NO: 25412 - DNA, 1440 bp, Clostridium tetani; identical to SEQ ID NO: 2755
  CDS (1)..(1440)

SEQ ID NO: 25413 - protein, 479 aa, Clostridium tetani; identical to SEQ ID NO: 2756

SEQ ID NO: 25414 - DNA, 1512 bp, Bradyrhizobium japonicum; identical to SEQ ID NO: 2757
  CDS (1)..(1512)

SEQ ID NO: 25415 - protein, 503 aa, Bradyrhizobium japonicum; identical to SEQ ID NO: 2758

SEQ ID NO: 25416 - DNA, 1497 bp, Bacteroides thetaiotaomicron; identical to SEQ ID NO: 2759
  CDS (1)..(1497)

SEQ ID NO: 25417 - protein, 498 aa, Bacteroides thetaiotaomicron; identical to SEQ ID NO: 2760

SEQ ID NO: 25418 - DNA, 4583 bp, Mus musculus; identical to SEQ ID NO: 2761
  CDS (119)..(2488)

SEQ ID NO: 25419 - protein, 789 aa, Mus musculus; identical to SEQ ID NO: 2762

SEQ ID NO: 25420 - DNA, 1485 bp, Staphylococcus epidermidis; identical to SEQ ID NO: 2763
  CDS (1)..(1485)

SEQ ID NO: 25421 - protein, 494 aa, Staphylococcus epidermidis; identical to SEQ ID NO: 2764

SEQ ID NO: 25422 - DNA, 1590 bp, Yersinia pestis; identical to SEQ ID NO: 2765
  CDS (1)..(1590)

SEQ ID NO: 25423 - protein, 529 aa, Yersinia pestis; identical to SEQ ID NO: 2766

SEQ ID NO: 25424 - DNA, 1530 bp, Synechococcus elongatus; identical to SEQ ID NO: 2767
  CDS (1)..(1530)

SEQ ID NO: 25425 - protein, 509 aa, Synechococcus elongatus; identical to SEQ ID NO: 2768

SEQ ID NO: 25426 - DNA, 1473 bp, Shewanella oneidensis; identical to SEQ ID NO: 2769
  CDS (1)..(1473)

SEQ ID NO: 25427 - protein, 490 aa, Shewanella oneidensis; identical to SEQ ID NO: 2770

SEQ ID NO: 25428 - DNA, 1476 bp, Oceanobacillus iheyensis; identical to SEQ ID NO: 2771
  CDS (1)..(1476)

SEQ ID NO: 25429 - protein, 491 aa, Oceanobacillus iheyensis; identical to SEQ ID NO: 2772

SEQ ID NO: 25430 - DNA, 1344 bp, Corynebacterium efficiens; identical to SEQ ID NO: 2773
  CDS (1)..(1344)

SEQ ID NO: 25431 - protein, 447 aa, Corynebacterium efficiens; identical to SEQ ID NO: 2774

SEQ ID NO: 25432 - DNA, 1545 bp, Corynebacterium efficiens; identical to SEQ ID NO: 2775
  CDS (1)..(1545)

SEQ ID NO: 25433 - protein, 514 aa, Corynebacterium efficiens; identical to SEQ ID NO: 2776

SEQ ID NO: 25434 - DNA, 1668 bp, Bifidobacterium longum; identical to SEQ ID NO: 2777
  CDS (1)..(1668)

SEQ ID NO: 25435 - protein, 555 aa, Bifidobacterium longum; identical to SEQ ID NO: 2778

SEQ ID NO: 25436 - DNA, 1284 bp, Rhodococcus opacus; identical to SEQ ID NO: 2779
  CDS (1)..(1284)

SEQ ID NO: 25437 - protein, 427 aa, Rhodococcus opacus; identical to SEQ ID NO: 2780

SEQ ID NO: 25438 - DNA, 2879 bp, Leishmania guyanensis; identical to SEQ ID NO: 2781
  misc_feature (1992)..(2321): n is a, c, g, or t
  misc_feature (2700)..(2700): n is a, c, g, or t
  misc_feature (2840)..(2840): n is a, c, g, or t
  CDS (205)..(1893)

SEQ ID NO: 25439 - protein, 562 aa, Leishmania guyanensis; identical to SEQ ID NO: 2782

SEQ ID NO: 25440 - DNA, 1689 bp, Leishmania mexicana; identical to SEQ ID NO: 2783
  misc_feature (227)..(444): n is a, c, g, or t
  misc_feature (1475)..(1528): n is a, c, g, or t
  CDS (1)..(1689)

SEQ ID NO: 25441 - protein, 562 aa, Leishmania mexicana; identical to SEQ ID NO: 2784
  misc_feature (76)..(148): Xaa can be any naturally occuring amino acid
  misc_feature (187)..(187): Xaa can be any naturally occuring amino acid
  misc_feature (197)..(197): Xaa can be any naturally occuring amino acid
  misc_feature (224)..(224): Xaa can be any naturally occuring amino acid
  misc_feature (243)..(243): Xaa can be any naturally occuring amino acid
  misc_feature (250)..(250): Xaa can be any naturally occuring amino acid
  misc_feature (492)..(510): Xaa can be any naturally occuring amino acid

SEQ ID NO: 25442 - DNA, 2916 bp, Leishmania amazonensis; identical to SEQ ID NO: 2785
  misc_feature (2191)..(2311): n is a, c, g, or t
  CDS (207)..(1895)

SEQ ID NO: 25443 - protein, 562 aa, Leishmania amazonensis; identical to SEQ ID NO: 2786
  misc_feature (463)..(463): Xaa can be any naturally occuring amino acid
  misc_feature (481)..(481): Xaa can be any naturally occuring amino acid

SEQ ID NO: 25444 - DNA, 1440 bp, Chlorobium tepidum; identical to SEQ ID NO: 2787
  CDS (1)..(1440)

SEQ ID NO: 25445 - protein, 479 aa, Chlorobium tepidum; identical to SEQ ID NO: 2788

SEQ ID NO: 25446 - DNA, 2187 bp, Methylobacterium extorquens; identical to SEQ ID NO: 2789
  CDS (640)..(2187)

SEQ ID NO: 25447 - protein, 515 aa, Methylobacterium extorquens; identical to SEQ ID NO: 2790

SEQ ID NO: 25448 - DNA, 1476 bp, Bartonella henselae; identical to SEQ ID NO: 2791
  CDS (1)..(1476)

SEQ ID NO: 25449 - protein, 491 aa, Bartonella henselae; identical to SEQ ID NO: 2792

SEQ ID NO: 25450 - DNA, 2266 bp, Toxoplasma gondii; identical to SEQ ID NO: 2793
  CDS (169)..(1851)

SEQ ID NO: 25451 - protein, 560 aa, Toxoplasma gondii; identical to SEQ ID NO: 2794

SEQ ID NO: 25452 - DNA, 1923 bp, Xanthomonas campestris; identical to SEQ ID NO: 2795
  CDS (1)..(1923)

SEQ ID NO: 25453 - protein, 640 aa, Xanthomonas campestris; identical to SEQ ID NO: 2796

SEQ ID NO: 25454 - DNA, 1431 bp, Xanthomonas campestris; identical to SEQ ID NO: 2797
  CDS (1)..(1431)

SEQ ID NO: 25455 - protein, 476 aa, Xanthomonas campestris; identical to SEQ ID NO: 2798

SEQ ID NO: 25456 - DNA, 1839 bp, Xanthomonas axonopodis; identical to SEQ ID NO: 2799
  CDS (1)..(1839)

SEQ ID NO: 25457 - protein, 612 aa, Xanthomonas axonopodis; identical to SEQ ID NO: 2800

SEQ ID NO: 25458 - DNA, 1431 bp, Xanthomonas axonopodis; identical to SEQ ID NO: 2801
  CDS (1)..(1431)

SEQ ID NO: 25459 - protein, 476 aa, Xanthomonas axonopodis; identical to SEQ ID NO: 2802

SEQ ID NO: 25460 - DNA, 1458 bp, Thermoanaerobacter tengcongensis; identical to SEQ ID NO: 2803
  CDS (1)..(1458)

SEQ ID NO: 25461 - protein, 485 aa, Thermoanaerobacter tengcongensis; identical to SEQ ID NO: 2804

SEQ ID NO: 25462 - DNA, 1762 bp, Oryza sativa; identical to SEQ ID NO: 2805
  CDS (41)..(1558)

SEQ ID NO: 25463 - protein, 505 aa, Oryza sativa; identical to SEQ ID NO: 2806

SEQ ID NO: 25464 - DNA, 1305 bp, Encephalitozoon cuniculi; identical to SEQ ID NO: 2807
  CDS (1)..(1305)

SEQ ID NO: 25465 - protein, 434 aa, Encephalitozoon cuniculi; identical to SEQ ID NO: 2808

SEQ ID NO: 25466 - DNA, 2125 bp, Drosophila melanogaster; identical to SEQ ID NO: 2809
  CDS (158)..(1738)

SEQ ID NO: 25467 - protein, 526 aa, Drosophila melanogaster; identical to SEQ ID NO: 2810

SEQ ID NO: 25468 - DNA, 1470 bp, Ralstonia solanacearum; identical to SEQ ID NO: 2811
  CDS (1)..(1470)

SEQ ID NO: 25469 - protein, 489 aa, Ralstonia solanacearum; identical to SEQ ID NO: 2812

SEQ ID NO: 25470 - DNA, 1521 bp, Enterococcus mundtii; identical to SEQ ID NO: 2813
  CDS (1)..(1521)

SEQ ID NO: 25471 - protein, 506 aa, Enterococcus mundtii; identical to SEQ ID NO: 2814

SEQ ID NO: 25472 - DNA, 2230 bp, Homo sapiens; identical to SEQ ID NO: 2815
  CDS (54)..(1601)

SEQ ID NO: 25473 - protein, 515 aa, Homo sapiens [sequence omitted]

SEQ ID NO: 25474 - DNA, 1470 bp, Rhizobium loti; identical to SEQ ID NO: 2817
  CDS (1)..(1470)

SEQ ID NO: 25475 - protein, 489 aa, Rhizobium loti; identical to SEQ ID NO: 2818

SEQ ID NO: 25476 - DNA, 1428 bp, Rhizobium loti; identical to SEQ ID NO: 2819
  CDS (1)..(1428)

SEQ ID NO: 25477 - protein, 475 aa, Rhizobium loti; identical to SEQ ID NO: 2820

SEQ ID NO: 25478 - DNA, 3584 bp, Plasmodium berghei; identical to SEQ ID NO: 2821
  CDS (370)..(3222)

SEQ ID NO: 25479 - protein, 950 aa, Plasmodium berghei; identical to SEQ ID NO: 2822

SEQ ID NO: 25480 - DNA, 1491 bp, Pasteurella multocida; identical to SEQ ID NO: 2823
  CDS (1)..(1491)

SEQ ID NO: 25481 - protein, 496 aa, Pasteurella multocida; identical to SEQ ID NO: 2824

SEQ ID NO: 25482 - DNA, 1470 bp, Pseudomonas putida; identical to SEQ ID NO: 2825
  CDS (1)..(1470)

SEQ ID NO: 25483 - protein, 489 aa, Pseudomonas putida; identical to SEQ ID NO: 2826

SEQ ID NO: 25484 - DNA, 1566 bp, Trypanosoma brucei; identical to SEQ ID NO: 2827
  CDS (1)..(1566)

SEQ ID NO: 25485 - protein, 521 aa, Trypanosoma brucei; identical to SEQ ID NO: 2828

SEQ ID NO: 25486 - DNA, 1904 bp, Triticum aestivum; identical to SEQ ID NO: 2829
  CDS (153)..(1682)

SEQ ID NO: 25487 - protein, 509 aa, Triticum aestivum; identical to SEQ ID NO: 2830

SEQ ID NO: 25488 - DNA, 2098 bp, Solanum tuberosum; identical to SEQ ID NO: 2831
  CDS (27)..(1775)

SEQ ID NO: 25489 - protein, 582 aa, Solanum tuberosum; identical to SEQ ID NO: 2832

SEQ ID NO: 25490 - DNA, 1924 bp, Dunaliella bioculata; identical to SEQ ID NO: 2833
  CDS (68)..(1840)

SEQ ID NO: 25491 - protein, 590 aa, Dunaliella bioculata; identical to SEQ ID NO: 2834

SEQ ID NO: 25492 - DNA, 1976 bp, Cyanidium caldarium; identical to SEQ ID NO: 2835
  CDS (46)..(1848)

SEQ ID NO: 25493 - protein, 600 aa, Cyanidium caldarium; identical to SEQ ID NO: 2836

SEQ ID NO: 25494 - DNA, 2106 bp, Drosophila melanogaster; identical to SEQ ID NO: 2837
  CDS (28)..(1746)

SEQ ID NO: 25495 - protein, 572 aa, Drosophila melanogaster; identical to SEQ ID NO: 2838

SEQ ID NO: 25496 - DNA, 1777 bp, Mesembryanthemum crystallinum; identical to SEQ ID NO: 2839
  CDS (39)..(1589)

SEQ ID NO: 25497 - protein, 516 aa, Mesembryanthemum crystallinum; identical to SEQ ID NO: 2840

SEQ ID NO: 25498 - DNA, 1542 bp, Mus musculus; identical to SEQ ID NO: 2841
  CDS (1)..(1542)

SEQ ID NO: 25499 - protein, 513 aa, Mus musculus; identical to SEQ ID NO: 2842

SEQ ID NO: 25500 - DNA, 1485 bp, Actinobacillus actinomycetemcomitans; identical to SEQ ID NO: 2843
  CDS (1)..(1485)

SEQ ID NO: 25501 - protein, 494 aa, Actinobacillus actinomycetemcomitans; identical to SEQ ID NO: 2844

SEQ ID NO: 25502 - DNA, 1473 bp, Buchnera aphidicola; identical to SEQ ID NO: 2845
  CDS (1)..(1473)

SEQ ID NO: 25503 - protein, 490 aa, Buchnera aphidicola; identical to SEQ ID NO: 2846

SEQ ID NO: 25504 - DNA, 1473 bp, Buchnera aphidicola; identical to SEQ ID NO: 2847
  CDS (1)..(1473)

SEQ ID NO: 25505 - protein, 490 aa, Buchnera aphidicola; identical to SEQ ID NO: 2848

SEQ ID NO: 25506 - DNA, 2049 bp, Ceratitis capitata; identical to SEQ ID NO: 2849
  CDS (60)..(1640)

SEQ ID NO: 25507 - protein, 526 aa, Ceratitis capitata; identical to SEQ ID NO: 2850

SEQ ID NO: 25508 - DNA, 1524 bp, Chlamydia muridarum; identical to SEQ ID NO: 2851
  CDS (1)..(1524)

SEQ ID NO: 25509 - protein, 507 aa, Chlamydia muridarum; identical to SEQ ID NO: 2852

SEQ ID NO: 25510 - DNA, 2062 bp, Drosophila melanogaster; identical to SEQ ID NO: 2853
  CDS (303)..(1877)

SEQ ID NO: 25511 - protein, 524 aa, Drosophila melanogaster; identical to SEQ ID NO: 2854

SEQ ID NO: 25512 - DNA, 1536 bp, Emericella nidulans; identical to SEQ ID NO: 2855
  CDS (1)..(1536)

SEQ ID NO: 25513 - protein, 511 aa, Emericella nidulans; identical to SEQ ID NO: 2856

SEQ ID NO: 25514 - DNA, 1957 bp, Leuconostoc mesenteroides; identical to SEQ ID NO: 2857
  CDS (206)..(1666)

SEQ ID NO: 25515 - protein, 486 aa, Leuconostoc mesenteroides; identical to SEQ ID NO: 2858

SEQ ID NO: 25516 - DNA, 2055 bp, Macropus robustus; identical to SEQ ID NO: 2859
  CDS (94)..(1641)

SEQ ID NO: 25517 - protein, 515 aa, Macropus robustus; identical to SEQ ID NO: 2860

SEQ ID NO: 25518 - DNA, 1530 bp, Nostoc punctiforme; identical to SEQ ID NO: 2861
  CDS (1)..(1530)

SEQ ID NO: 25519 - protein, 509 aa, Nostoc punctiforme; identical to SEQ ID NO: 2862

SEQ ID NO: 25520 - DNA, 1476 bp, Rhizobium meliloti; identical to SEQ ID NO: 2863
  CDS (1)..(1476)

SEQ ID NO: 25521 - protein, 491 aa, Rhizobium meliloti; identical to SEQ ID NO: 2864

SEQ ID NO: 25522 - DNA, 2853 bp, Homo sapiens; identical to SEQ ID NO: 2865
  CDS (273)..(2648)

SEQ ID NO: 25523 - protein, 791 aa, Homo sapiens; identical to SEQ ID NO: 2866

SEQ ID NO: 25524 - DNA, 1970 bp, Arabidopsis thaliana; identical to SEQ ID NO: 2867
  CDS (60)..(1790)

SEQ ID NO: 25525 - protein, 576 aa, Arabidopsis thaliana; identical to SEQ ID NO: 2868

SEQ ID NO: 25526 - DNA, 2112 bp, Arabidopsis thaliana; identical to SEQ ID NO: 2869
  CDS (142)..(1932)

SEQ ID NO: 25527 - protein, 596 aa, Arabidopsis thaliana; identical to SEQ ID NO: 2870

SEQ ID NO: 25528 - DNA, 2161 bp, Arabidopsis thaliana; identical to SEQ ID NO: 2871
  CDS (90)..(1967)

SEQ ID NO: 25529 - protein, 625 aa, Arabidopsis thaliana; identical to SEQ ID NO: 2872

SEQ ID NO: 25530 - DNA, 1936 bp, Arabidopsis thaliana; identical to SEQ ID NO: 2873
  CDS (136)..(1686)

SEQ ID NO: 25531 - protein, 516 aa, Arabidopsis thaliana; identical to SEQ ID NO: 2874

SEQ ID NO: 25532 - DNA, 1959 bp, Arabidopsis thaliana; identical to SEQ ID NO: 2875
  CDS (194)..(1741)

SEQ ID NO: 25533 - protein, 515 aa, Arabidopsis thaliana [sequence omitted]

SEQ ID NO: 25534 - DNA, 1503 bp, Xenopus laevis; identical to SEQ ID NO: 2877
  CDS (1)..(1503)

SEQ ID NO: 25535 - protein, 500 aa, Xenopus laevis; identical to SEQ ID NO: 2878

SEQ ID NO: 25536 - DNA, 2004 bp, Arabidopsis thaliana; identical to SEQ ID NO: 2879
  CDS (51)..(1850)

SEQ ID NO: 25537 - protein, 599 aa, Arabidopsis thaliana; identical to SEQ ID NO: 2880

SEQ ID NO: 25538 - DNA, 23 bp, Artificial sequence
  Primer sequence
atgagtgaaggccccgtcaaatt

SEQ ID NO: 25539 - DNA, 25 bp, Artificial sequence
  Primer sequence
ctaattatccttcgtatcttctggc

SEQ ID NO: 25540 - protein, 806 aa, Artificial sequence; identical to SEQ ID NO: 18604
  Consensus
  Variant (2)..(3): Xaa in position 2 to 3 is any amino acid
  Variant (7)..(9): Xaa in position 7 to 9 is any amino acid
  Variant (11)..(12): Xaa in position 11 to 12 is any amino acid
  Variant (14)..(17): Xaa in position 14 to 17 is any amino acid
  Variant (19)..(23): Xaa in position 19 to 23 is any amino acid
  Variant (25)..(32): Xaa in position 25 to 32 is any amino acid
  Variant (34)..(35): Xaa in position 34 to 35 is any amino acid
  Variant (37)..(81): Xaa in position 37 to 81 is any amino acid
  Variant (83)..(95): Xaa in position 83 to 95 is any amino acid
  Variant (97)..(225): Xaa in position 97 to 225 is any amino acid
  Variant (227)..(230): Xaa in position 227 to 230 is any amino acid
  Variant (232)..(258): Xaa in position 232 to 258 is any amino acid
  Variant (260)..(262): Xaa in position 260 to 262 is any amino acid
  Variant (266)..(266): Xaa in position 266 is any amino acid
  Variant (268)..(268): Xaa in position 268 is any amino acid
  Variant (270)..(271): Xaa in position 270 to 271 is any amino acid
  Variant (273)..(275): Xaa in position 273 to 275 is any amino acid
  Variant (277)..(285): Xaa in position 277 to 285 is any amino acid
  Variant (287)..(290): Xaa in position 287 to 290 is any amino acid
  Variant (300)..(300): Xaa in position 300 is any amino acid
  Variant (302)..(302): Xaa in position 302 is any amino acid
  Variant (304)..(307): Xaa in position 304 to 307 is any amino acid
  Variant (310)..(310): Xaa in position 310 is any amino acid
  Variant (312)..(318): Xaa in position 312 to 318 is any amino acid
  Variant (321)..(323): Xaa in position 321 to 323 is any amino acid
  Variant (325)..(328): Xaa in position 325 to 328 is any amino acid
  Variant (330)..(332): Xaa in position 330 to 332 is any amino acid
  Variant (334)..(335): Xaa in position 334 to 335 is any amino acid
  Variant (337)..(339): Xaa in position 337 to 339 is any amino acid
  Variant (341)..(342): Xaa in position 341 to 342 is any amino acid
  Variant (344)..(347): Xaa in position 344 to 347 is any amino acid
  Variant (349)..(351): Xaa in position 349 to 351 is any amino acid
  Variant (354)..(355): Xaa in position 354 to 355 is any amino acid
  Variant (359)..(360): Xaa in position 359 to 360 is any amino acid
  Variant (362)..(366): Xaa in position 362 to 366 is any amino acid
  Variant (370)..(370): Xaa in position 370 is any amino acid
  Variant (372)..(382): Xaa in position 372 to 382 is any amino acid
  Variant (385)..(385): Xaa in position 385 is any amino acid
  Variant (387)..(387): Xaa in position 387 is any amino acid
  Variant (389)..(405): Xaa in position 389 to 405 is any amino acid
  Variant (409)..(438): Xaa in position 409 to 438 is any amino acid
  Variant (440)..(451): Xaa in position 440 to 451 is any amino acid
  Variant (453)..(455): Xaa in position 453 to 455 is any amino acid
  Variant (457)..(465): Xaa in position 457 to 465 is any amino acid
  Variant (467)..(467): Xaa in position 467 is any amino acid
  Variant (470)..(470): Xaa in position 470 is any amino acid
  Variant (475)..(478): Xaa in position 475 to 478 is any amino acid
  Variant (481)..(493): Xaa in position 481 to 493 is any amino acid
  Variant (495)..(524): Xaa in position 495 to 524 is any amino acid
  Variant (526)..(531): Xaa in position 526 to 531 is any amino acid
  Variant (534)..(534): Xaa in position 534 is any amino acid
  Variant (536)..(543): Xaa in position 536 to 543 is any amino acid
  Variant (545)..(545): Xaa in position 545 is any amino acid
  Variant (548)..(588): Xaa in position 548 to 588 is any amino acid
  Variant (592)..(592): Xaa in position 592 is any amino acid
  Variant (594)..(595): Xaa in position 594 to 595 is any amino acid
  Variant (597)..(599): Xaa in position 597 to 599 is any amino acid
  Variant (601)..(604): Xaa in position 601 to 604 is any amino acid
  Variant (606)..(609): Xaa in position 606 to 609 is any amino acid
  Variant (611)..(614): Xaa in position 611 to 614 is any amino acid
  Variant (616)..(797): Xaa in position 616 to 797 is any amino acid
  Variant (799)..(800): Xaa in position 799 to 800 is any amino acid
  Variant (802)..(805): Xaa in position 802 to 805 is any amino acid

SEQ ID NO: 25541 - protein, 150 aa, Artificial sequence; identical to SEQ ID NO: 2917
  Consensus
  Variant (1)..(1): Xaa in position 1 is Arg or Lys
  Variant (2)..(2): Xaa in position 2 is Val, Ile, Leu or Ala
  Variant (3)..(3): Xaa in position 3 is Ile, Val, Met or Ala
  Variant (4)..(4): Xaa in position 4 is Ile, Val, Leu, Met or Ala
  Variant (8)..(8): Xaa in position 8 is Phe, Ile, Leu or Tyr
  Variant (9)..(9): Xaa in position 9 is Gly or Ala
  Variant (10)..(10): Xaa in position 10 is any amino acid
  Variant (11)..(11): Xaa in position 11 is Asp, Ser or Asn
  Variant (12)..(13): Xaa in position 12 to 13 is any amino acid
  Variant (14)..(14): Xaa in position 14 is Ser, Thr or Asn
  Variant (15)..(15): Xaa in position 15 is Ala, Ser, Phe or Tyr
  Variant (16)..(17): Xaa in position 16 to 17 is any amino acid
  Variant (18)..(18): Xaa in position 18 is Leu, Ile, Val or Phe
  Variant (19)..(21): Xaa in position 19 to 21 is any amino acid
  Variant (22)..(22): Xaa in position 22 is Leu, Ile or Val
  Variant (23)..(27): Xaa in position 23 to 27 is any amino acid
  Variant (28)..(28): Xaa in position 28 is Glu, Asp, Pro or Ser
  Variant (29)..(30): Xaa in position 29 to 30 is any amino acid
  Variant (31)..(31): Xaa in position 31 is Ile, Val, Leu, Thr or Met
  Variant (32)..(32): Xaa in position 32 is Tyr, Phe or Leu
  Variant (33)..(33): Xaa in position 33 is Arg, His or Leu
  Variant (34)..(34): Xaa in position 34 is Ile, Val, Met or Leu
  Variant (37)..(37): Xaa in position 37 is Tyr or Phe
  Variant (39)..(39): Xaa in position 39 is Gly, Ser or Ala
  Variant (40)..(40): Xaa in position 40 is Lys, Arg or Glu
  Variant (41)..(42): Xaa in position 41 to 42 is any amino acid
  Variant (43)..(43): Xaa in position 43 is Val, Ile, Leu, Ala or Met
  Variant (44)..(44): Xaa in position 44 is any amino acid
  Variant (45)..(45): Xaa in position 45 is Asn, Gly, Gln or Ala
  Variant (46)..(46): Xaa in position 46 is Leu, Ile, Met, Phe or Val
  Variant (47)..(49): Xaa in position 47 to 49 is any amino acid
  Variant (50)..(50): Xaa in position 50 is Arg, Lys or Glu
  Variant (51)..(51): Xaa in position 51 is Phe or Tyr
  Variant (52)..(52): Xaa in position 52 is any amino acid
  Variant (54)..(59): Xaa in position 54 to 59 is any amino acid
  Variant (60)..(60): Xaa in position 60 is any or no amino acid
  Variant (61)..(61): Xaa in position 61 is Trp, Met, Asn or Leu
  Variant (62)..(63): Xaa in position 62 to 63 is any amino acid
  Variant (64)..(65): Xaa in position 64 to 65 is any or no amino acid
  Variant (66)..(66): Xaa in position 66 is Ile, Val or Ala
  Variant (67)..(68): Xaa in position 67 to 68 is any amino acid
  Variant (69)..(69): Xaa in position 69 is Val, Ile, Met or Leu
  Variant (70)..(70): Xaa in position 70 is any amino acid
  Variant (71)..(71): Xaa in position 71 is Ile, Leu, Val, Phe or Ser
  Variant (72)..(74): Xaa in position 72 to 74 is any amino acid
  Variant (76)..(77): Xaa in position 76 to 77 is any amino acid
  Variant (78)..(78): Xaa in position 78 is Gly, Asp, Val or Ala
  Variant (79)..(81): Xaa in position 79 to 81 is any amino acid
  Variant (82)..(82): Xaa in position 82 is Arg or Lys
  Variant (83)..(84): Xaa in position 83 to 84 is any or no amino acid
  Variant (85)..(85): Xaa in position 85 is Tyr or Phe
  Variant (86)..(86): Xaa in position 86 is Tyr, Phe or Trp
  Variant (87)..(87): Xaa in position 87 is Asp, Glu, Ala or Asn
  Variant (88)..(89): Xaa in position 88 to 89 is any amino acid
  Variant (91)..(91): Xaa in position 91 is any amino acid
  Variant (92)..(92): Xaa in position 92 is any or no amino acid
  Variant (93)..(93): Xaa in position 93 is Leu, Ile, Val, Met or Ala
  Variant (94)..(94): Xaa in position 94 is Arg, Lys or Leu
  Variant (96)..(96): Xaa in position 96 is Met, Val, Ile or Leu
  Variant (97)..(97): Xaa in position 97 is Val, Met, Ile, Leu or Phe
  Variant (98)..(98): Xaa in position 98 is Gln, Pro or Thr
  Variant (99)..(99): Xaa in position 99 is Asn or Ser
  Variant (100)..(100): Xaa in position 100 is His, Gln or Pro
  Variant (101)..(102): Xaa in position 101 to 102 is any amino acid
  Variant (103)..(103): Xaa in position 103 is Gln, Glu, Asn or Leu
  Variant (104)..(104): Xaa in position 104 is Leu, Ile, Val, Met or Thr
  Variant (105)..(105): Xaa in position 105 is Leu, Met, Val, Ile, Phe or Tyr
  Variant (106)..(106): Xaa in position 106 is any amino acid
  Variant (107)..(107): Xaa in position 107 is Leu, Met, Ile, Val, Trp or Phe
  Variant (108)..(109): Xaa in position 108 to 109 is any amino acid
  Variant (111)..(111): Xaa in position 111 is Glu, Asp, Ser or Asn
  Variant (112)..(112): Xaa in position 112 is any amino acid
  Variant (114)..(118): Xaa in position 114 to 118 is any amino acid
  Variant (119)..(121): Xaa in position 119 to 121 is any or no amino acid
  Variant (122)..(122): Xaa in position 122 is Ile, Val, Leu, Phe or Met
  Variant (123)..(124): Xaa in position 123 to 124 is any amino acid
  Variant (125)..(125): Xaa in position 125 is Glu, Lys, Ala, Arg or His
  Variant (126)..(126): Xaa in position 126 is Lys or Val
  Variant (127)..(128): Xaa in position 127 to 128 is any amino acid
  Variant (129)..(129): Xaa in position 129 is Val, Ile, Ala, Leu or Phe
  Variant (130)..(130): Xaa in position 130 is Leu, Ile, Val, Phe or Met
  Variant (131)..(140): Xaa in position 131 to 140 is any amino acid
  Variant (141)..(145): Xaa in position 141 to 145 is any or no amino acid
  Variant (146)..(146): Xaa in position 146 is Val, Leu, Ile, Ala or Ser
  Variant (147)..(147): Xaa in position 147 is any amino acid
  Variant (148)..(148): Xaa in position 148 is Gly or Ala
  Variant (149)..(149): Xaa in position 149 is Gln or Arg
  Variant (150)..(150): Xaa in position 150 is Tyr or Phe

SEQ ID NO: 25542 - protein, 44 aa, Artificial sequence; identical to SEQ ID NO: 2918
  Consensus
  Variant (1)..(1): Xaa in position 1 is Tyr or Leu
  Variant (2)..(2): Xaa in position 2 is any amino acid
  Variant (3)..(13): Xaa in position 3 to 13 is any or no amino acid
  Variant (15)..(17): Xaa in position 15 to 17 is any amino acid
  Variant (19)..(19): Xaa in position 19 is Phe or Tyr
  Variant (20)..(25): Xaa in position 20 to 25 is any amino acid
  Variant (26)..(26): Xaa in position 26 is Ile, Val, Leu or Phe
  Variant (27)..(29): Xaa in position 27 to 29 is any amino acid
  Variant (30)..(30): Xaa in position 30 is Arg, Asn, Phe or Gln
  Variant (31)..(31): Xaa in position 31 is Trp or Phe
  Variant (32)..(32): Xaa in position 32 is any amino acid
  Variant (33)..(33): Xaa in position 33 is Gly or Asp
  Variant (34)..(34): Xaa in position 34 is Val or Thr
  Variant (36)..(36): Xaa in position 36 is Phe or Ile
  Variant (37)..(37): Xaa in position 37 is any amino acid
  Variant (38)..(38): Xaa in position 38 is Leu, Met, Ile, Val or Phe
  Variant (39)..(40): Xaa in position 39 to 40 is any amino acid
  Variant (41)..(41): Xaa in position 41 is Gly or Ala
  Variant (43)..(43): Xaa in position 43 is any amino acid
  Variant (44)..(44): Xaa in position 44 is Leu, Met or Val

SEQ ID NO: 25543 - protein, 97 aa, Artificial sequence; identical to SEQ ID NO: 2919
  Consensus
  Variant (1)..(1): Xaa in position 1 is Asn, Asp, Gln, Arg or Lys
  Variant (2)..(4): Xaa in position 2 to 4 is any amino acid
  Variant (5)..(5): Xaa in position 5 is Ile, Leu, Met, Phe or Val
  Variant (6)..(6): Xaa in position 6 is any amino acid
  Variant (7)..(7): Xaa in position 7 is Ile, Leu, Val, Ala or Ser
  Variant (8)..(8): Xaa in position 8 is any amino acid
  Variant (9)..(9): Xaa in position 9 is Pro or His
  Variant (10)..(12): Xaa in position 10 to 12 is any amino acid
  Variant (13)..(13): Xaa in position 13 is Ile, Val, Met, Leu, Phe or Ala
  Variant (14)..(19): Xaa in position 14 to 19 is any amino acid
  Variant (20)..(20): Xaa in position 20 is Lys, Ser or Arg
  Variant (21)..(29): Xaa in position 21 to 29 is any amino acid
  Variant (30)..(35): Xaa in position 30 to 35 is any or no amino acid
  Variant (36)..(36): Xaa in position 36 is Leu, Ile, Met or Val
  Variant (37)..(44): Xaa in position 37 to 44 is any amino acid
  Variant (45)..(64): Xaa in position 45 to 64 is any or no amino acid
  Variant (65)..(65): Xaa in position 65 is Ala, Gly, Pro or Ser
  Variant (66)..(66): Xaa in position 66 is Tyr or Leu
  Variant (67)..(68): Xaa in position 67 to 68 is any amino acid
  Variant (69)..(69): Xaa in position 69 is Leu, Met or Tyr
  Variant (70)..(70): Xaa in position 70 is Leu, Ile, Phe or Met
  Variant (71)..(71): Xaa in position 71 is any amino acid
  Variant (72)..(72): Xaa in position 72 is Asp, Glu, Ala, Asn or His
  Variant (73)..(75): Xaa in position 73 to 75 is any amino acid
  Variant (76)..(76): Xaa in position 76 is Gly, Ser or Asp
  Variant (77)..(80): Xaa in position 77 to 80 is any amino acid
  Variant (81)..(81): Xaa in position 81 is Phe or Tyr
  Variant (82)..(85): Xaa in position 82 to 85 is any amino acid
  Variant (86)..(86): Xaa in position 86 is any or no amino acid
  Variant (87)..(87): Xaa in position 87 is Val, Ile, Leu, Ala or Gln
  Variant (88)..(90): Xaa in position 88 to 90 is any amino acid
  Variant (92)..(96): Xaa in position 92 to 96 is any amino acid
  Variant (97)..(97): Xaa in position 97 is Ile, Val, Leu, Phe or Ala

SEQ ID NO: 25544 - DNA, 612 bp, Escherichia coli; identical to SEQ ID NO: 15395
  CDS (1)..(612)

SEQ ID NO: 25545 - protein, 203 aa, Escherichia coli; identical to SEQ ID NO: 15396

SEQ ID NO: 25546 - DNA, 558 bp, Mesorhizobium loti MAFF303099; identical to SEQ ID NO: 15397
  CDS (1)..(558): transl_table=11

SEQ ID NO: 25547 - protein, 185 aa, Mesorhizobium loti MAFF303099; identical to SEQ ID NO: 15398

SEQ ID NO: 25548 - DNA, 591 bp, Mesorhizobium loti MAFF303099; identical to SEQ ID NO: 15399
  CDS (1)..(591): transl_table=11

SEQ ID NO: 25549 - protein, 196 aa, Mesorhizobium loti MAFF303099; identical to SEQ ID NO: 15400

SEQ ID NO: 25550 - DNA, 558 bp, Mesorhizobium loti MAFF303099; identical to SEQ ID NO: 15401
  CDS (1)..(558): transl_table=11

SEQ ID NO: 25551 - protein, 185 aa, Mesorhizobium loti MAFF303099; identical to SEQ ID NO: 15402

SEQ ID NO: 25552 - DNA, 579 bp, Vibrio cholerae O1 biovar eltor str. N16961; identical to SEQ ID NO: 15403
  CDS (1)..(579): transl_table=11

SEQ ID NO: 25553 - protein, 192 aa, Vibrio cholerae O1 biovar eltor str. N16961; identical to SEQ ID NO: 15404

SEQ ID NO: 25554 - DNA, 561 bp, Bacillus halodurans C-125; identical to SEQ ID NO: 15405
  CDS (1)..(561): transl_table=11

SEQ ID NO: 25555 - protein, 186 aa, Bacillus halodurans C-125; identical to SEQ ID NO: 15406

SEQ ID NO: 25556 - DNA, 612 bp, Pasteurella multocida subsp. multocida str. Pm70; identical to SEQ ID NO: 15407
  CDS (1)..(612): transl_table=11

SEQ ID NO: 25557 - protein, 203 aa, Pasteurella multocida subsp. multocida str. Pm70; identical to SEQ ID NO: 15408

SEQ ID NO: 25558 - DNA, 771 bp, Lactococcus lactis subsp. lactis Il1403; identical to SEQ ID NO: 15409
  CDS (1)..(771): transl_table=11

SEQ ID NO: 25559 - protein, 256 aa, Lactococcus lactis subsp. lactis Il1403; identical to SEQ ID NO: 15410

SEQ ID NO: 25560 - DNA, 612 bp, Lactococcus lactis subsp. lactis Il1403; identical to SEQ ID NO: 15411
  CDS (1)..(612): transl_table=11

SEQ ID NO: 25561 - protein, 203 aa, Lactococcus lactis subsp. lactis Il1403; identical to SEQ ID NO: 15412

SEQ ID NO: 25562 - DNA, 603 bp, Lactococcus lactis subsp. lactis Il1403; identical to SEQ ID NO: 15413
  CDS (1)..(603): transl_table=11

SEQ ID NO: 25563 - protein, 200 aa, Lactococcus lactis subsp. lactis Il1403; identical to SEQ ID NO: 15414

SEQ ID NO: 25564 - DNA, 612 bp, Lactococcus lactis subsp. lactis Il1403; identical to SEQ ID NO: 15415
  CDS (1)..(612): transl_table=11

SEQ ID NO: 25565 - protein, 203 aa, Lactococcus lactis subsp. lactis Il1403; identical to SEQ ID NO: 15416

SEQ ID NO: 25566 - DNA, 462 bp, Lactococcus lactis subsp. lactis Il1403; identical to SEQ ID NO: 15417
  CDS (1)..(462): transl_table=11

SEQ ID NO: 25567 - protein, 153 aa, Lactococcus lactis subsp. lactis Il1403; identical to SEQ ID NO: 15418

SEQ ID NO: 25568 - DNA, 567 bp, Streptococcus pyogenes M1 GAS; identical to SEQ ID NO: 15419
  CDS (1)..(567): transl_table=11

SEQ ID NO: 25569 - protein, 188 aa, Streptococcus pyogenes M1 GAS; identical to SEQ ID NO: 15420

SEQ ID NO: 25570 - DNA, 513 bp, Neisseria meningitidis Z2491; identical to SEQ ID NO: 15421
  CDS (1)..(513): transl_table=11

SEQ ID NO: 25571 - protein, 170 aa, Neisseria meningitidis Z2491; identical to SEQ ID NO: 15422

SEQ ID NO: 25572 - DNA, 549 bp, Escherichia coli O157:H7; identical to SEQ ID NO: 15423
  CDS (1)..(549): transl_table=11

SEQ ID NO: 25573 - protein, 182 aa, Escherichia coli O157:H7; identical to SEQ ID NO: 15424

SEQ ID NO: 25574 - DNA, 558 bp, Streptococcus pneumoniae TIGR4; identical to SEQ ID NO: 15425
  CDS (1)..(558): transl_table=11

SEQ ID NO: 25575 - protein, 185 aa, Streptococcus pneumoniae TIGR4; identical to SEQ ID NO: 15426

SEQ ID NO: 25576 - DNA, 561 bp, Clostridium acetobutylicum ATCC 824; identical to SEQ ID NO: 15427
  CDS (1)..(561): transl_table=11

SEQ ID NO: 25577 - protein, 186 aa, Clostridium acetobutylicum ATCC 824; identical to SEQ ID NO: 15428

SEQ ID NO: 25578 - DNA, 615 bp, Clostridium acetobutylicum ATCC 824; identical to SEQ ID NO: 15429
  CDS (1)..(615): transl_table=11

SEQ ID NO: 25579 - protein, 204 aa, Clostridium acetobutylicum ATCC 824; identical to SEQ ID NO: 15430

SEQ ID NO: 25580 - DNA, 600 bp, Staphylococcus aureus subsp. aureus Mu50; identical to SEQ ID NO: 15431
  CDS (1)..(600): transl_table=11

SEQ ID NO: 25581 - protein, 199 aa, Staphylococcus aureus subsp. aureus Mu50; identical to SEQ ID NO: 15432

SEQ ID NO: 25582 - DNA, 552 bp, Escherichia coli K12; identical to SEQ ID NO: 15433
  CDS (1)..(552): transl_table=11

SEQ ID NO: 25583 - protein, 183 aa, Escherichia coli K12; identical to SEQ ID NO: 15434

SEQ ID NO: 25584 - DNA, 615 bp, Sinorhizobium meliloti 1021; identical to SEQ ID NO: 15435
  CDS (1)..(615): transl_table=11

SEQ ID NO: 25585 - protein, 204 aa, Sinorhizobium meliloti 1021; identical to SEQ ID NO: 15436

SEQ ID NO: 25586 - DNA, 552 bp, Salmonella typhimurium LT2; identical to SEQ ID NO: 15437
  CDS (1)..(552): transl_table=11

SEQ ID NO: 25587 - protein, 183 aa, Salmonella typhimurium LT2; identical to SEQ ID NO: 15438

SEQ ID NO: 25588 - DNA, 564 bp, Listeria monocytogenes EGD-e; identical to SEQ ID NO: 15439
  CDS (1)..(564): transl_table=11

SEQ ID NO: 25589 - protein, 187 aa, Listeria monocytogenes EGD-e; identical to SEQ ID NO: 15440

SEQ ID NO: 25590 - DNA, 570 bp, Listeria innocua Clip11262; identical to SEQ ID NO: 15441
  CDS (1)..(570): transl_table=11

SEQ ID NO: 25591 - protein, 189 aa, Listeria innocua Clip11262; identical to SEQ ID NO: 15442

SEQ ID NO: 25592 - DNA, 564 bp, Listeria innocua Clip11262; identical to SEQ ID NO: 15443
  CDS (1)..(564): transl_table=11

SEQ ID NO: 25593 - protein, 187 aa, Listeria innocua Clip11262; identical to SEQ ID NO: 15444

SEQ ID NO: 25594 - DNA, 579 bp, Nostoc sp. PCC 7120; identical to SEQ ID NO: 15445
  CDS (1)..(579): transl_table=11

SEQ ID NO: 25595 - protein, 192 aa, Nostoc sp. PCC 7120; identical to SEQ ID NO: 15446

SEQ ID NO: 25596 - DNA, 828 bp, Nostoc sp. PCC 7120; identical to SEQ ID NO: 15447
  CDS (1)..(828): transl_table=11

SEQ ID NO: 25597 - protein, 275 aa, Nostoc sp. PCC 7120; identical to SEQ ID NO: 15448

SEQ ID NO: 25598 - DNA, 513 bp, Ralstonia solanacearum GMI1000; identical to SEQ ID NO: 15449
  CDS (1)..(513): transl_table=11

SEQ ID NO: 25599 - protein, 170 aa, Ralstonia solanacearum GMI1000; identical to SEQ ID NO: 15450

SEQ ID NO: 25600 - DNA, 618 bp, Agrobacterium tumefaciens str. C58; identical to SEQ ID NO: 15451
  CDS (1)..(618): transl_table=11

SEQ ID NO: 25601 - protein, 205 aa, Agrobacterium tumefaciens str. C58; identical to SEQ ID NO: 15452

SEQ ID NO: 25602 - DNA, 561 bp, Agrobacterium tumefaciens str. C58; identical to SEQ ID NO: 15453
  CDS (1)..(561): transl_table=11

SEQ ID NO: 25603 - protein, 186 aa, Agrobacterium tumefaciens str. C58; identical to SEQ ID NO: 15454

SEQ ID NO: 25604 - DNA, 633 bp, Agrobacterium tumefaciens str. C58; identical to SEQ ID NO: 15455
  CDS (1)..(633): transl_table=11

SEQ ID NO: 25605 - protein, 210 aa, Agrobacterium tumefaciens str. C58; identical to SEQ ID NO: 15456

SEQ ID NO: 25606 - DNA, 687 bp, Brucella melitensis 16M; identical to SEQ ID NO: 15457
  CDS (1)..(687): transl_table=11

SEQ ID NO: 25607 - protein, 228 aa, Brucella melitensis 16M; identical to SEQ ID NO: 15458

SEQ ID NO: 25608 - DNA, 681 bp, Pyrobaculum aerophilum str. IM2; identical to SEQ ID NO: 15459
  CDS (1)..(681): transl_table=11

SEQ ID NO: 25609 - protein, 226 aa, Pyrobaculum aerophilum str. IM2; identical to SEQ ID NO: 15460

SEQ ID NO: 25610 - DNA, 585 bp, Clostridium perfringens str. 13; identical to SEQ ID NO: 15461
  CDS (1)..(585): transl_table=11

SEQ ID NO: 25611 - protein, 194 aa, Clostridium perfringens str. 13; identical to SEQ ID NO: 15462

SEQ ID NO: 25612 - DNA, 501 bp, Pyrococcus furiosus DSM 3638; identical to SEQ ID NO: 15463
  CDS (1)..(501): transl_table=11

SEQ ID NO: 25613 - protein, 166 aa, Pyrococcus furiosus DSM 3638; identical to SEQ ID NO: 15464

SEQ ID NO: 25614 - DNA, 687 bp, Corynebacterium glutamicum ATCC 13032; identical to SEQ ID NO: 15465
  CDS (1)..(687): transl_table=11

SEQ ID NO: 25615 - protein, 228 aa, Corynebacterium glutamicum ATCC 13032; identical to SEQ ID NO: 15466

SEQ ID NO: 25616 - DNA, 576 bp, Methanosarcina acetivorans C2A; identical to SEQ ID NO: 15467
  CDS (1)..(576): transl_table=11

SEQ ID NO: 25617 - protein, 191 aa, Methanosarcina acetivorans C2A; identical to SEQ ID NO: 15468

SEQ ID NO: 25618 - DNA, 600 bp, Methanosarcina acetivorans C2A; identical to SEQ ID NO: 15469
  CDS (1)..(600): transl_table=11

SEQ ID NO: 25619 - protein, 199 aa, Methanosarcina acetivorans C2A; identical to SEQ ID NO: 15470

SEQ ID NO: 25620 - DNA, 525 bp, Methanosarcina acetivorans C2A; identical to SEQ ID NO: 15471
  CDS (1)..(525): transl_table=11

SEQ ID NO: 25621 - protein, 174 aa, Methanosarcina acetivorans C2A; identical to SEQ ID NO: 15472

SEQ ID NO: 25622 - DNA, 555 bp, Methanosarcina acetivorans C2A; identical to SEQ ID NO: 15473
  CDS (1)..(555): transl_table=11

SEQ ID NO: 25623 - protein, 184 aa, Methanosarcina acetivorans C2A; identical to SEQ ID NO: 15474

SEQ ID NO: 25624 - DNA, 663 bp, Thermoanaerobacter tengcongensis MB4; identical to SEQ ID NO: 15475
  CDS (1)..(663): transl_table=11

SEQ ID NO: 25625 - protein, 220 aa, Thermoanaerobacter tengcongensis MB4; identical to SEQ ID NO: 15476

SEQ ID NO: 25626 - DNA, 528 bp, Streptomyces coelicolor A3(2); identical to SEQ ID NO: 15477
  CDS (1)..(528)

SEQ ID NO: 25627 - protein, 175 aa, Streptomyces coelicolor A3(2); identical to SEQ ID NO: 15478

SEQ ID NO: 25628 - DNA, 804 bp, Streptomyces coelicolor A3(2); identical to SEQ ID NO: 15479
  CDS (1)..(804)

SEQ ID NO: 25629 - protein, 267 aa, Streptomyces coelicolor A3(2); identical to SEQ ID NO: 15480

SEQ ID NO: 25630 - DNA, 582 bp, Streptomyces coelicolor A3(2); identical to SEQ ID NO: 15481
  CDS (1)..(582)

SEQ ID NO: 25631 - protein, 193 aa, Streptomyces coelicolor A3(2); identical to SEQ ID NO: 15482

SEQ ID NO: 25632 - DNA, 564 bp, Methanosarcina mazei Go1; identical to SEQ ID NO: 15483
  CDS (1)..(564): transl_table=11

SEQ ID NO: 25633 - protein, 187 aa, Methanosarcina mazei Go1; identical to SEQ ID NO: 15484

SEQ ID NO: 25634 - DNA, 702 bp, Methanosarcina mazei Go1; identical to SEQ ID NO: 15485
  CDS (1)..(702): transl_table=11

SEQ ID NO: 25635 - protein, 233 aa, Methanosarcina mazei Go1; identical to SEQ ID NO: 15486

SEQ ID NO: 25636 - DNA, 579 bp, Xanthomonas campestris pv. campestris str. ATCC 33913; identical to SEQ ID NO: 15487
  CDS (1)..(579): transl_table=11

SEQ ID NO: 25637 - protein, 192 aa, Xanthomonas campestris pv. campestris str. ATCC 33913; identical to SEQ ID NO: 15488

SEQ ID NO: 25638 - DNA, 579 bp, Xanthomonas axonopodis pv. citri str. 306; identical to SEQ ID NO: 15489
  CDS (1)..(579): transl_table=11

SEQ ID NO: 25639 - protein, 192 aa, Xanthomonas axonopodis pv. citri str. 306; identical to SEQ ID NO: 15490

SEQ ID NO: 25640 - DNA, 639 bp, Streptococcus agalactiae 2603V/R; identical to SEQ ID NO: 15491
  CDS (1)..(639): transl_table=11

SEQ ID NO: 25641 - protein, 212 aa, Streptococcus agalactiae 2603V/R; identical to SEQ ID NO: 15492

SEQ ID NO: 25642 - DNA, 549 bp, Streptococcus agalactiae 2603V/R; identical to SEQ ID NO: 15493
  CDS (1)..(549): transl_table=11

SEQ ID NO: 25643 - protein, 182 aa, Streptococcus agalactiae 2603V/R; identical to SEQ ID NO: 15494

SEQ ID NO: 25644 - DNA, 540 bp, Oceanobacillus iheyensis HTE831; identical to SEQ ID NO: 15495
  CDS (1)..(540): transl_table=11

SEQ ID NO: 25645 - protein, 179 aa, Oceanobacillus iheyensis HTE831; identical to SEQ ID NO: 15496

SEQ ID NO: 25646 - DNA, 675 bp, Bifidobacterium longum NCC2705; identical to SEQ ID NO: 15497
  CDS (1)..(675): transl_table=11

SEQ ID NO: 25647 - protein, 224 aa, Bifidobacterium longum NCC2705; identical to SEQ ID NO: 15498

SEQ ID NO: 25648 - DNA, 678 bp, Bifidobacterium longum NCC2705; identical to SEQ ID NO: 15499
  CDS (1)..(678): transl_table=11

SEQ ID NO: 25649 - protein, 225 aa, Bifidobacterium longum NCC2705; identical to SEQ ID NO: 15500

SEQ ID NO: 25650 - DNA, 597 bp, Leptospira interrogans serovar Lai str. 56601; identical to SEQ ID NO: 15501
  CDS (1)..(597): transl_table=11

SEQ ID NO: 25651 - protein, 198 aa, Leptospira interrogans serovar Lai str. 56601; identical to SEQ ID NO: 15502

SEQ ID NO: 25652 - DNA, 579 bp, Shewanella oneidensis MR-1; identical to SEQ ID NO: 15503
  CDS (1)..(579): transl_table=11

SEQ ID NO: 25653 - protein, 192 aa, Shewanella oneidensis MR-1; identical to SEQ ID NO: 15504

SEQ ID NO: 25654 - DNA, 630 bp, Shewanella oneidensis MR-1; identical to SEQ ID NO: 15505
  CDS (1)..(630): transl_table=11

SEQ ID NO: 25655 - protein, 209 aa, Shewanella oneidensis MR-1; identical to SEQ ID NO: 15506

SEQ ID NO: 25656 - DNA, 699 bp, Streptococcus mutans UA159; identical to SEQ ID NO: 15507
  CDS (1)..(699): transl_table=11

SEQ ID NO: 25657 - protein, 232 aa, Streptococcus mutans UA159; identical to SEQ ID NO: 15508

SEQ ID NO: 25658 - DNA, 648 bp, Streptomyces coelicolor A3(2); identical to SEQ ID NO: 15509
  CDS (1)..(648)

SEQ ID NO: 25659 - protein, 215 aa, Streptomyces coelicolor A3(2); identical to SEQ ID NO: 15510

SEQ ID NO: 25660 - DNA, 567 bp, Pseudomonas putida KT2440; identical to SEQ ID NO: 15511
  CDS (1)..(567): transl_table=11

SEQ ID NO: 25661 - protein, 188 aa, Pseudomonas putida KT2440; identical to SEQ ID NO: 15512

SEQ ID NO: 25662 - DNA, 552 bp, Escherichia coli CFT073; identical to SEQ ID NO: 15513
  CDS (1)..(552): transl_table=11

SEQ ID NO: 25663 - protein, 183 aa, Escherichia coli CFT073; identical to SEQ ID NO: 15514

SEQ ID NO: 25664 - DNA, 549 bp, Escherichia coli CFT073; identical to SEQ ID NO: 15515
  CDS (1)..(549): transl_table=11

SEQ ID NO: 25665 - protein, 182 aa, Escherichia coli CFT073; identical to SEQ ID NO: 15516

SEQ ID NO: 25666 - DNA, 588 bp, Mycoplasma penetrans HF-2; identical to SEQ ID NO: 15517
  CDS (1)..(588): transl_table=4

SEQ ID NO: 25667 - protein, 195 aa, Mycoplasma penetrans HF-2; identical to SEQ ID NO: 15518

SEQ ID NO: 25668 - DNA, 771 bp, Vibrio vulnificus CMCP6; identical to SEQ ID NO: 15519
  CDS (1)..(771): transl_table=11

SEQ ID NO: 25669 - protein, 256 aa, Vibrio vulnificus CMCP6; identical to SEQ ID NO: 15520

SEQ ID NO: 25670 - DNA, 594 bp, Vibrio vulnificus CMCP6; identical to SEQ ID NO: 15521
  CDS (1)..(594): transl_table=11

SEQ ID NO: 25671 - protein, 197 aa, Vibrio vulnificus CMCP6; identical to SEQ ID NO: 15522

SEQ ID NO: 25672 - DNA, 549 bp, Vibrio vulnificus CMCP6; identical to SEQ ID NO: 15523
  CDS (1)..(549): transl_table=11

SEQ ID NO: 25673 - protein, 182 aa, Vibrio vulnificus CMCP6; identical to SEQ ID NO: 15524

SEQ ID NO: 25674 - DNA, 621 bp, Bradyrhizobium japonicum USDA 110; identical to SEQ ID NO: 15525
  CDS (1)..(621)

SEQ ID NO: 25675 - protein, 206 aa, Bradyrhizobium japonicum USDA 110; identical to SEQ ID NO: 15526

SEQ ID NO: 25676 - DNA, 564 bp, Clostridium tetani E88; identical to SEQ ID NO: 15527
  CDS (1)..(564): transl_table=11

SEQ ID NO: 25677 - protein, 187 aa, Clostridium tetani E88; identical to SEQ ID NO: 15528

SEQ ID NO: 25678 - DNA, 618 bp, Lactobacillus plantarum WCFS1; identical to SEQ ID NO: 15529
  CDS (1)..(618): transl_table=11

SEQ ID NO: 25679 - protein, 205 aa, Lactobacillus plantarum WCFS1; identical to SEQ ID NO: 15530

SEQ ID NO: 25680 - DNA, 609 bp, Lactobacillus plantarum WCFS1; identical to SEQ ID NO: 15531
  CDS (1)..(609): transl_table=11

SEQ ID NO: 25681 - protein, 202 aa, Lactobacillus plantarum WCFS1; identical to SEQ ID NO: 15532

SEQ ID NO: 25682 - DNA, 555 bp, Lactobacillus plantarum WCFS1; identical to SEQ ID NO: 15533
  CDS (1)..(555): transl_table=11

SEQ ID NO: 25683 - protein, 184 aa, Lactobacillus plantarum WCFS1; identical to SEQ ID NO: 15534

SEQ ID NO: 25684 - DNA, 603 bp, Lactobacillus plantarum WCFS1; identical to SEQ ID NO: 15535
  CDS (1)..(603): transl_table=11

SEQ ID NO: 25685 - protein, 200 aa, Lactobacillus plantarum WCFS1; identical to SEQ ID NO: 15536

SEQ ID NO: 25686 - DNA, 621 bp, Lactobacillus plantarum WCFS1; identical to SEQ ID NO: 15537
  CDS (1)..(621): transl_table=11

SEQ ID NO: 25687 - protein, 206 aa, Lactobacillus plantarum WCFS1; identical to SEQ ID NO: 15538

SEQ ID NO: 25688 - DNA, 570 bp, Lactobacillus plantarum WCFS1; identical to SEQ ID NO: 15539
  CDS (1)..(570): transl_table=11

SEQ ID NO: 25689 - protein, 189 aa, Lactobacillus plantarum WCFS1; identical to SEQ ID NO: 15540

SEQ ID NO: 25690 - DNA, 561 bp, Lactobacillus plantarum WCFS1; identical to SEQ ID NO: 15541
  CDS (1)..(561): transl_table=11

SEQ ID NO: 25691 - protein, 186 aa, Lactobacillus plantarum WCFS1; identical to SEQ ID NO: 15542

SEQ ID NO: 25692 - DNA, 555 bp, Vibrio parahaemolyticus RIMD 2210633; identical to SEQ ID NO: 15543
  CDS (1)..(555): transl_table=11

SEQ ID NO: 25693 - protein, 184 aa, Vibrio parahaemolyticus RIMD 2210633; identical to SEQ ID NO: 15544

SEQ ID NO: 25694 - DNA, 549 bp, Vibrio parahaemolyticus RIMD 2210633; identical to SEQ ID NO: 15545
  CDS (1)..(549): transl_table=11

SEQ ID NO: 25695 - protein, 182 aa, Vibrio parahaemolyticus RIMD 2210633; identical to SEQ ID NO: 15546

SEQ ID NO: 25696 - DNA, 552 bp, Salmonella enterica subsp. enterica serovar Typhi Ty2; identical to SEQ ID NO: 15547
  CDS (1)..(552): transl_table=11

SEQ ID NO: 25697 - protein, 183 aa, Salmonella enterica subsp. enterica serovar Typhi Ty2; identical to SEQ ID NO: 15548

SEQ ID NO: 25698 - DNA, 759 bp, Bacteroides thetaiotaomicron VPI-5482; identical to SEQ ID NO: 15549
  CDS (1)..(759): transl_table=11

SEQ ID NO: 25699 - protein, 252 aa, Bacteroides thetaiotaomicron VPI-5482; identical to SEQ ID NO: 15550

SEQ ID NO: 25700 - DNA, 624 bp, Bacteroides thetaiotaomicron VPI-5482; identical to SEQ ID NO: 15551
  CDS (1)..(624): transl_table=11

SEQ ID NO: 25701 - protein, 207 aa, Bacteroides thetaiotaomicron VPI-5482; identical to SEQ ID NO: 15552

SEQ ID NO: 25702 - DNA, 564 bp, Bacteroides thetaiotaomicron VPI-5482; identical to SEQ ID NO: 15553
  CDS (1)..(564): transl_table=11

SEQ ID NO: 25703 - protein, 187 aa, Bacteroides thetaiotaomicron VPI-5482; identical to SEQ ID NO: 15554

SEQ ID NO: 25704 - DNA, 606 bp, Bacteroides thetaiotaomicron VPI-5482; identical to SEQ ID NO: 15555
  CDS (1)..(606): transl_table=11

SEQ ID NO: 25705 - protein, 201 aa, Bacteroides thetaiotaomicron VPI-5482; identical to SEQ ID NO: 15556

SEQ ID NO: 25706 - DNA, 552 bp, Bacteroides thetaiotaomicron VPI-5482; identical to SEQ ID NO: 15557
  CDS (1)..(552): transl_table=11

SEQ ID NO: 25707 - protein, 183 aa, Bacteroides thetaiotaomicron VPI-5482; identical to SEQ ID NO: 15558

SEQ ID NO: 25708 - DNA, 846 bp, Enterococcus faecalis V583; identical to SEQ ID NO: 15559
  CDS (1)..(846): transl_table=11

SEQ ID NO: 25709 - protein, 281 aa, Enterococcus faecalis V583; identical to SEQ ID NO: 15560

SEQ ID NO: 25710 - DNA, 639 bp, Enterococcus faecalis V583; identical to SEQ ID NO: 15561
  CDS (1)..(639): transl_table=11

SEQ ID NO: 25711 - protein, 212 aa, Enterococcus faecalis V583; identical to SEQ ID NO: 15562

SEQ ID NO: 25712 - DNA, 582 bp, Enterococcus faecalis V583; identical to SEQ ID NO: 15563
  CDS (1)..(582): transl_table=11

SEQ ID NO: 25713 - protein, 193 aa, Enterococcus faecalis V583; identical to SEQ ID NO: 15564

SEQ ID NO: 25714 - DNA, 723 bp, Bacillus cereus ATCC 14579; identical to SEQ ID NO: 15565
  CDS (1)..(723): transl_table=11

SEQ ID NO: 25715 - protein, 240 aa, Bacillus cereus ATCC 14579; identical to SEQ ID NO: 15566

SEQ ID NO: 25716 - DNA, 561 bp, Bacillus cereus ATCC 14579; identical to SEQ ID NO: 15567
  CDS (1)..(561): transl_table=11

SEQ ID NO: 25717 - protein, 186 aa, Bacillus cereus ATCC 14579; identical to SEQ ID NO: 15568

SEQ ID NO: 25718 - DNA, 666 bp, Bacillus anthracis str. Ames; identical to SEQ ID NO: 15569
  CDS (1)..(666): transl_table=11

SEQ ID NO: 25719 - protein, 221 aa, Bacillus anthracis str. Ames; identical to SEQ ID NO: 15570

SEQ ID NO: 25720 - DNA, 564 bp, Bacillus anthracis str. Ames; identical to SEQ ID NO: 15571
  CDS (1)..(564): transl_table=11

SEQ ID NO: 25721 - protein, 187 aa, Bacillus anthracis str. Ames; identical to SEQ ID NO: 15572

SEQ ID NO: 25722 - DNA, 723 bp, Bacillus anthracis str. Ames; identical to SEQ ID NO: 15573
  CDS (1)..(723): transl_table=11

SEQ ID NO: 25723 - protein, 240 aa, Bacillus anthracis str. Ames; identical to SEQ ID NO: 15574

SEQ ID NO: 25724 - DNA, 618 bp, Helicobacter hepaticus ATCC 51449; identical to SEQ ID NO: 15575
  CDS (1)..(618): transl_table=11

SEQ ID NO: 25725 - protein, 205 aa, Helicobacter hepaticus ATCC 51449; identical to SEQ ID NO: 15576

SEQ ID NO: 25726 - DNA, 555 bp, Rhodopirellula baltica SH 1; identical to SEQ ID NO: 15577
  CDS (1)..(555): transl_table=11

SEQ ID NO: 25727 - protein, 184 aa, Rhodopirellula baltica SH 1; identical to SEQ ID NO: 15578

SEQ ID NO: 25728 - DNA, 522 bp, Chromobacterium violaceum ATCC 12472; identical to SEQ ID NO: 15579
  CDS (1)..(522): transl_table=11

SEQ ID NO: 25729 - protein, 173 aa, Chromobacterium violaceum ATCC 12472; identical to SEQ ID NO: 15580

SEQ ID NO: 25730 - DNA, 561 bp, Gloeobacter violaceus PCC 7421; identical to SEQ ID NO: 15581
  CDS (1)..(561): transl_table=11

SEQ ID NO: 25731 - protein, 186 aa, Gloeobacter violaceus PCC 7421; identical to SEQ ID NO: 15582

SEQ ID NO: 25732 - DNA, 771 bp, Vibrio vulnificus YJ016; identical to SEQ ID NO: 15583
  CDS (1)..(771): transl_table=11

SEQ ID NO: 25733 - protein, 256 aa, Vibrio vulnificus YJ016; identical to SEQ ID NO: 15584

SEQ ID NO: 25734 - DNA, 558 bp, Vibrio vulnificus YJ016; identical to SEQ ID NO: 15585
  CDS (1)..(558): transl_table=11

SEQ ID NO: 25735 - protein, 185 aa, Vibrio vulnificus YJ016; identical to SEQ ID NO: 15586

SEQ ID NO: 25736 - DNA, 657 bp, Vibrio vulnificus YJ016; identical to SEQ ID NO: 15587
  CDS (1)..(657): transl_table=11

SEQ ID NO: 25737 - protein, 218 aa, Vibrio vulnificus YJ016; identical to SEQ ID NO: 15588

SEQ ID NO: 25738 - DNA, 621 bp, Vibrio vulnificus YJ016; identical to SEQ ID NO: 15589
  CDS (1)..(621): transl_table=11

SEQ ID NO: 25739 - protein, 206 aa, Vibrio vulnificus YJ016; identical to SEQ ID NO: 15590

SEQ ID NO: 25740 - DNA, 570 bp, Corynebacterium diphtheriae NCTC 13129; identical to SEQ ID NO: 15591
  CDS (1)..(570): transl_table=11

SEQ ID NO: 25741 - protein, 189 aa, Corynebacterium diphtheriae NCTC 13129; identical to SEQ ID NO: 15592

SEQ ID NO: 25742 - DNA, 573 bp, Rhodopseudomonas palustris CGA009; identical to SEQ ID NO: 15593
  CDS (1)..(573): transl_table=11

SEQ ID NO: 25743 - protein, 190 aa, Rhodopseudomonas palustris CGA009; identical to SEQ ID NO: 15594

SEQ ID NO: 25744 - DNA, 615 bp, Lactobacillus johnsonii NCC 533; identical to SEQ ID NO: 15595
  CDS (1)..(615): transl_table=11

SEQ ID NO: 25745 - protein, 204 aa, Lactobacillus johnsonii NCC 533; identical to SEQ ID NO: 15596

SEQ ID NO: 25746 - DNA, 564 bp, Bacillus cereus ATCC 10987; identical to SEQ ID NO: 15597
  CDS (1)..(564): transl_table=11

SEQ ID NO: 25747 - protein, 187 aa, Bacillus cereus ATCC 10987; identical to SEQ ID NO: 15598

SEQ ID NO: 25748 - DNA, 2154 bp, Neurospora crassa; identical to SEQ ID NO: 15599
  CDS (1)..(2154)

SEQ ID NO: 25749 - protein, 717 aa, Neurospora crassa; identical to SEQ ID NO: 15600

SEQ ID NO: 25750 - DNA, 660 bp, Magnaporthe grisea 70-15; identical to SEQ ID NO: 15601
  CDS (1)..(660)

SEQ ID NO: 25751 - protein, 219 aa, Magnaporthe grisea 70-15; identical to SEQ ID NO: 15602

SEQ ID NO: 25752 - DNA, 699 bp, Gibberella zeae PH-1; identical to SEQ ID NO: 15603
  CDS (1)..(699)

SEQ ID NO: 25753 - protein, 232 aa, Gibberella zeae PH-1; identical to SEQ ID NO: 15604

SEQ ID NO: 25754 - DNA, 699 bp, Gibberella zeae PH-1; identical to SEQ ID NO: 15605
  CDS (1)..(699)

SEQ ID NO: 25755 - protein, 232 aa, Gibberella zeae PH-1; identical to SEQ ID NO: 15606

SEQ ID NO: 25756 - DNA, 690 bp, Ustilago maydis 521; identical to SEQ ID NO: 15607
  CDS (1)..(690)

SEQ ID NO: 25757 - protein, 229 aa, Ustilago maydis 521; identical to SEQ ID NO: 15608

SEQ ID NO: 25758 - DNA, 702 bp, Aspergillus nidulans FGSC A4; identical to SEQ ID NO: 15609
  CDS (1)..(702)

SEQ ID NO: 25759 - protein, 233 aa, Aspergillus nidulans FGSC A4; identical to SEQ ID NO: 15610

SEQ ID NO: 25760 - DNA, 618 bp, Aspergillus nidulans FGSC A4; identical to SEQ ID NO: 15611
  CDS (1)..(618)

SEQ ID NO: 25761 - protein, 205 aa, Aspergillus nidulans FGSC A4; identical to SEQ ID NO: 15612

SEQ ID NO: 25762 - DNA, 573 bp, Candida glabrata CBS138; identical to SEQ ID NO: 15613
  CDS (1)..(573)

SEQ ID NO: 25763 - protein, 190 aa, Candida glabrata CBS138; identical to SEQ ID NO: 15614

SEQ ID NO: 25764 - DNA, 570 bp, Kluyveromyces lactis NRRL Y-1140; identical to SEQ ID NO: 15615
  CDS (1)..(570)

SEQ ID NO: 25765 - protein, 189 aa, Kluyveromyces lactis NRRL Y-1140; identical to SEQ ID NO: 15616

SEQ ID NO: 25766 - DNA, 693 bp, Debaryomyces hansenii CBS767; identical to SEQ ID NO: 15617
  CDS (1)..(693)

SEQ ID NO: 25767 - protein, 230 aa, Debaryomyces hansenii CBS767; identical to SEQ ID NO: 15618

SEQ ID NO: 25768 - DNA, 690 bp, Debaryomyces hansenii CBS767; identical to SEQ ID NO: 15619
  CDS (1)..(690)

SEQ ID NO: 25769 - protein, 229 aa, Debaryomyces hansenii CBS767; identical to SEQ ID NO: 15620

SEQ ID NO: 25770 - DNA, 666 bp, Yarrowia lipolytica CLIB99; identical to SEQ ID NO: 15621
  CDS (1)..(666)

SEQ ID NO: 25771 - protein, 221 aa, Yarrowia lipolytica CLIB99; identical to SEQ ID NO: 15622

SEQ ID NO: 25772 - DNA, 840 bp, Yarrowia lipolytica CLIB99; identical to SEQ ID NO: 15623
  CDS (1)..(840)

SEQ ID NO: 25773 - protein, 279 aa, Yarrowia lipolytica CLIB99; identical to SEQ ID NO: 15624

SEQ ID NO: 25774 - DNA, 642 bp, Cryptococcus neoformans var. neoformans JEC21; identical to SEQ ID NO: 15625
  CDS (1)..(642)

SEQ ID NO: 25775 - protein, 213 aa, Cryptococcus neoformans var. neoformans JEC21; identical to SEQ ID NO: 15626

SEQ ID NO: 25776 - DNA, 546 bp, Dictyostelium discoideum; identical to SEQ ID NO: 15627
  CDS (1)..(546)

SEQ ID NO: 25777 - protein, 181 aa, Dictyostelium discoideum; identical to SEQ ID NO: 15628

SEQ ID NO: 25778 - DNA, 576 bp, Dictyostelium discoideum; identical to SEQ ID NO: 15629
  CDS (1)..(576)

SEQ ID NO: 25779 - protein, 191 aa, Dictyostelium discoideum; identical to SEQ ID NO: 15630

SEQ ID NO: 25780 - DNA, 591 bp, Dictyostelium discoideum; identical to SEQ ID NO: 15631
  CDS (1)..(591)

SEQ ID NO: 25781 - protein, 196 aa, Dictyostelium discoideum; identical to SEQ ID NO: 15632

SEQ ID NO: 25782 - DNA, 573 bp, Dictyostelium discoideum; identical to SEQ ID NO: 15633
  CDS (1)..(573)

SEQ ID NO: 25783 - protein, 190 aa, Dictyostelium discoideum; identical to SEQ ID NO: 15634

SEQ ID NO: 25784 - DNA, 459 bp, Entamoeba histolytica HM-1:IMSS; identical to SEQ ID NO: 15635
  CDS (1)..(459)

SEQ ID NO: 25785 - protein, 152 aa, Entamoeba histolytica HM-1:IMSS; identical to SEQ ID NO: 15636

SEQ ID NO: 25786 - DNA, 609 bp, Entamoeba histolytica HM-1:IMSS; identical to SEQ ID NO: 15637
  CDS (1)..(609)

SEQ ID NO: 25787 - protein, 202 aa, Entamoeba histolytica HM-1:IMSS; identical to SEQ ID NO: 15638

SEQ ID NO: 25788 - DNA, 609 bp, Entamoeba histolytica HM-1:IMSS; identical to SEQ ID NO: 15639
  CDS (1)..(609)

SEQ ID NO: 25789 - protein, 202 aa, Entamoeba histolytica HM-1:IMSS; identical to SEQ ID NO: 15640

SEQ ID NO: 25790 - DNA, 549 bp, Entamoeba histolytica HM-1:IMSS; identical to SEQ ID NO: 15641
  CDS (1)..(549)

SEQ ID NO: 25791 - protein, 182 aa, Entamoeba histolytica HM-1:IMSS; identical to SEQ ID NO: 15642

SEQ ID NO: 25792 - DNA, 612 bp, Entamoeba histolytica HM-1:IMSS; identical to SEQ ID NO: 15643
  CDS (1)..(612)

SEQ ID NO: 25793 - protein, 203 aa, Entamoeba histolytica HM-1:IMSS; identical to SEQ ID NO: 15644

SEQ ID NO: 25794 - DNA, 615 bp, Entamoeba histolytica HM-1:IMSS; identical to SEQ ID NO: 15645
  CDS (1)..(615)

SEQ ID NO: 25795 - protein, 204 aa, Entamoeba histolytica HM-1:IMSS; identical to SEQ ID NO: 15646

SEQ ID NO: 25796 - DNA, 924 bp, Candida albicans SC5314; identical to SEQ ID NO: 15647
  CDS (1)..(924): transl_table=12

SEQ ID NO: 25797 - protein, 307 aa, Candida albicans SC5314; identical to SEQ ID NO: 15648

SEQ ID NO: 25798 - DNA, 888 bp, Thermus thermophilus HB27; identical to SEQ ID NO: 15649
  CDS (1)..(888): transl_table=11

SEQ ID NO: 25799 - protein, 295 aa, Thermus thermophilus HB27; identical to SEQ ID NO: 15650

SEQ ID NO: 25800 - DNA, 594 bp, Desulfovibrio vulgaris subsp. vulgaris str. Hildenborough; identical to SEQ ID NO: 15651
  CDS (1)..(594): transl_table=11

SEQ ID NO: 25801 - protein, 197 aa, Desulfovibrio vulgaris subsp. vulgaris str. Hildenborough; identical to SEQ ID NO: 15652

SEQ ID NO: 25802 - DNA, 570 bp, Listeria monocytogenes str. 4b F2365; identical to SEQ ID NO: 15653
  CDS (1)..(570): transl_table=11

SEQ ID NO: 25803 - protein, 189 aa, Listeria monocytogenes str. 4b F2365; identical to SEQ ID NO: 15654

SEQ ID NO: 25804 - DNA, 564 bp, Listeria monocytogenes str. 4b F2365; identical to SEQ ID NO: 15655
  CDS (1)..(564): transl_table=11

SEQ ID NO: 25805 - protein, 187 aa, Listeria monocytogenes str. 4b F2365; identical to SEQ ID NO: 15656

SEQ ID NO: 25806 - DNA, 564 bp, Bacillus thuringiensis serovar konkukian str. 97-27; identical to SEQ ID NO: 15657
  CDS (1)..(564): transl_table=11

SEQ ID NO: 25807 - protein, 187 aa, Bacillus thuringiensis serovar konkukian str. 97-27; identical to SEQ ID NO: 15658

SEQ ID NO: 25808 - DNA, 486 bp, Staphylococcus aureus subsp. aureus MRSA252; identical to SEQ ID NO: 15659
  CDS (1)..(486): transl_table=11

SEQ ID NO: 25809 - protein, 161 aa, Staphylococcus aureus subsp. aureus MRSA252; identical to SEQ ID NO: 15660

SEQ ID NO: 25810 - DNA, 600 bp, Staphylococcus aureus subsp. aureus MRSA252; identical to SEQ ID NO: 15661
  CDS (1)..(600): transl_table=11

SEQ ID NO: 25811 - protein, 199 aa, Staphylococcus aureus subsp. aureus MRSA252; identical to SEQ ID NO: 15662

SEQ ID NO: 25812 - DNA, 627 bp, Erwinia carotovora subsp. atroseptica SCRI1043; identical to SEQ ID NO: 15663
  CDS (1)..(627)

SEQ ID NO: 25813 - protein, 208 aa, Erwinia carotovora subsp. atroseptica SCRI1043; identical to SEQ ID NO: 15664

SEQ ID NO: 25814 - DNA, 573 bp, Propionibacterium acnes KPA171202; identical to SEQ ID NO: 15665
  CDS (1)..(573): transl_table=11

SEQ ID NO: 25815 - protein, 190 aa, Propionibacterium acnes KPA171202; identical to SEQ ID NO: 15666

SEQ ID NO: 25816 - DNA, 510 bp, Desulfotalea psychrophila LSv54; identical to SEQ ID NO: 15667
  CDS (1)..(510): transl_table=11

SEQ ID NO: 25817 - protein, 169 aa, Desulfotalea psychrophila LSv54; identical to SEQ ID NO: 15668

SEQ ID NO: 25818 - DNA, 579 bp, Bacillus licheniformis ATCC 14580; identical to SEQ ID NO: 15669
  CDS (1)..(579): transl_table=11

SEQ ID NO: 25819 - protein, 192 aa, Bacillus licheniformis ATCC 14580; identical to SEQ ID NO: 15670

SEQ ID NO: 25820 - DNA, 564 bp, Bacillus cereus E33L; identical to SEQ ID NO: 15671
  CDS (1)..(564): transl_table=11

SEQ ID NO: 25821 - protein, 187 aa, Bacillus cereus E33L; identical to SEQ ID NO: 15672

SEQ ID NO: 25822 - DNA, 603 bp, Mannheimia succiniciproducens MBEL55E; identical to SEQ ID NO: 15673
  CDS (1)..(603): transl_table=11

SEQ ID NO: 25823 - protein, 200 aa, Mannheimia succiniciproducens MBEL55E; identical to SEQ ID NO: 15674

SEQ ID NO: 25824 - DNA, 597 bp, Mannheimia succiniciproducens MBEL55E; identical to SEQ ID NO: 15675
  CDS (1)..(597): transl_table=11

SEQ ID NO: 25825 - protein, 198 aa, Mannheimia succiniciproducens MBEL55E; identical to SEQ ID NO: 15676

SEQ ID NO: 25826 - DNA, 606 bp, Bacteroides fragilis YCH46; identical to SEQ ID NO: 15677
  CDS (1)..(606): transl_table=11

SEQ ID NO: 25827 - protein, 201 aa, Bacteroides fragilis YCH46; identical to SEQ ID NO: 15678

SEQ ID NO: 25828 - DNA, 630 bp, Bacteroides fragilis YCH46; identical to SEQ ID NO: 15679
  CDS (1)..(630): transl_table=11

SEQ ID NO: 25829 - protein, 209 aa, Bacteroides fragilis YCH46; identical to SEQ ID NO: 15680

SEQ ID NO: 25830 - DNA, 627 bp, Bacteroides fragilis YCH46; identical to SEQ ID NO: 15681
  CDS (1)..(627): transl_table=11

SEQ ID NO: 25831 - protein, 208 aa, Bacteroides fragilis YCH46; identical to SEQ ID NO: 15682

SEQ ID NO: 25832 - DNA, 591 bp, Methylococcus capsulatus str. Bath; identical to SEQ ID NO: 15683
  CDS (1)..(591): transl_table=11

SEQ ID NO: 25833 - protein, 196 aa, Methylococcus capsulatus str. Bath; identical to SEQ ID NO: 15684

SEQ ID NO: 25834 - DNA, 648 bp, Photobacterium profundum SS9; identical to SEQ ID NO: 15685
  CDS (1)..(648): transl_table=11

SEQ ID NO: 25835 - protein, 215 aa, Photobacterium profundum SS9; identical to SEQ ID NO: 15686

SEQ ID NO: 25836 - DNA, 549 bp, Photobacterium profundum SS9; identical to SEQ ID NO: 15687
  CDS (1)..(549): transl_table=11

SEQ ID NO: 25837 - protein, 182 aa, Photobacterium profundum SS9; identical to SEQ ID NO: 15688

SEQ ID NO: 25838 - DNA, 564 bp, Photobacterium profundum SS9; identical to SEQ ID NO: 15689
  CDS (1)..(564): transl_table=11

SEQ ID NO: 25839 - protein, 187 aa, Photobacterium profundum SS9; identical to SEQ ID NO: 15690

SEQ ID NO: 25840 - DNA, 561 bp, Haloarcula marismortui ATCC 43049; identical to SEQ ID NO: 15691
  CDS (1)..(561): transl_table=11

SEQ ID NO: 25841 - protein, 186 aa, Haloarcula marismortui ATCC 43049; identical to SEQ ID NO: 15692

SEQ ID NO: 25842 - DNA, 675 bp, Geobacillus kaustophilus HTA426; identical to SEQ ID NO: 15693
  CDS (1)..(675): transl_table=11

SEQ ID NO: 25843 - protein, 224 aa, Geobacillus kaustophilus HTA426; identical to SEQ ID NO: 15694

SEQ ID NO: 25844 - DNA, 558 bp, Geobacillus kaustophilus HTA426; identical to SEQ ID NO: 15695
  CDS (1)..(558): transl_table=11

SEQ ID NO: 25845 - protein, 185 aa, Geobacillus kaustophilus HTA426; identical to SEQ ID NO: 15696

SEQ ID NO: 25846 - DNA, 552 bp, Azoarcus sp. EbN1; identical to SEQ ID NO: 15697
  CDS (1)..(552): transl_table=11

SEQ ID NO: 25847 - protein, 183 aa, Azoarcus sp. EbN1; identical to SEQ ID NO: 15698

SEQ ID NO: 25848 - DNA, 600 bp, Zymomonas mobilis subsp. mobilis ZM4; identical to SEQ ID NO: 15699
  CDS (1)..(600): transl_table=11

SEQ ID NO: 25849 - protein, 199 aa, Zymomonas mobilis subsp. mobilis ZM4; identical to SEQ ID NO: 15700

SEQ ID NO: 25850 - DNA, 693 bp, Dehalococcoides ethenogenes 195; identical to SEQ ID NO: 15701
  CDS (1)..(693): transl_table=11

SEQ ID NO: 25851 - protein, 230 aa, Dehalococcoides ethenogenes 195; identical to SEQ ID NO: 15702

SEQ ID NO: 25852 - DNA, 486 bp, Staphylococcus aureus subsp. aureus COL; identical to SEQ ID NO: 15703
  CDS (1)..(486): transl_table=11

SEQ ID NO: 25853 - protein, 161 aa, Staphylococcus aureus subsp. aureus COL; identical to SEQ ID NO: 15704

SEQ ID NO: 25854 - DNA, 600 bp, Staphylococcus aureus subsp. aureus COL; identical to SEQ ID NO: 15705
  CDS (1)..(600): transl_table=11

SEQ ID NO: 25855 - protein, 199 aa, Staphylococcus aureus subsp. aureus COL; identical to SEQ ID NO: 15706

SEQ ID NO: 25856 - DNA, 615 bp, Lactobacillus acidophilus NCFM; identical to SEQ ID NO: 15707
  CDS (1)..(615): transl_table=11

SEQ ID NO: 25857 - protein, 204 aa, Lactobacillus acidophilus NCFM; identical to SEQ ID NO: 15708

SEQ ID NO: 25858 - DNA, 600 bp, Vibrio fischeri ES114; identical to SEQ ID NO: 15709
  CDS (1)..(600): transl_table=11

SEQ ID NO: 25859 - protein, 199 aa, Vibrio fischeri ES114; identical to SEQ ID NO: 15710

SEQ ID NO: 25860 - DNA, 546 bp, Vibrio fischeri ES114; identical to SEQ ID NO: 15711
  CDS (1)..(546): transl_table=11

SEQ ID NO: 25861 - protein, 181 aa, Vibrio fischeri ES114; identical to SEQ ID NO: 15712

SEQ ID NO: 25862 - DNA, 552 bp, Vibrio fischeri ES114; identical to SEQ ID NO: 15713
  CDS (1)..(552): transl_table=11

SEQ ID NO: 25863 - protein, 183 aa, Vibrio fischeri ES114; identical to SEQ ID NO: 15714

SEQ ID NO: 25864 - DNA, 756 bp, Vibrio fischeri ES114; identical to SEQ ID NO: 15715
  CDS (1)..(756): transl_table=11

SEQ ID NO: 25865 - protein, 251 aa, Vibrio fischeri ES114; identical to SEQ ID NO: 15716

SEQ ID NO: 25866 - DNA, 522 bp, Bacteroides fragilis NCTC 9343; identical to SEQ ID NO: 15717
  CDS (1)..(522): transl_table=11

SEQ ID NO: 25867 - protein, 173 aa, Bacteroides fragilis NCTC 9343; identical to SEQ ID NO: 15718

SEQ ID NO: 25868 - DNA, 600 bp, Bacteroides fragilis NCTC 9343; identical to SEQ ID NO: 15719
  CDS (1)..(600): transl_table=11

SEQ ID NO: 25869 - protein, 199 aa, Bacteroides fragilis NCTC 9343; identical to SEQ ID NO: 15720

SEQ ID NO: 25870 - DNA, 630 bp, Bacteroides fragilis NCTC 9343; identical to SEQ ID NO: 15721
  CDS (1)..(630): transl_table=11

SEQ ID NO: 25871 - protein, 209 aa, Bacteroides fragilis NCTC 9343; identical to SEQ ID NO: 15722

SEQ ID NO: 25872 - DNA, 624 bp, Bacteroides fragilis NCTC 9343; identical to SEQ ID NO: 15723
  CDS (1)..(624): transl_table=11

SEQ ID NO: 25873 - protein, 207 aa, Bacteroides fragilis NCTC 9343; identical to SEQ ID NO: 15724

SEQ ID NO: 25874 - DNA, 552 bp, Bacteroides fragilis NCTC 9343; identical to SEQ ID NO: 15725
  CDS (1)..(552): transl_table=11

SEQ ID NO: 25875 - protein, 183 aa, Bacteroides fragilis NCTC 9343; identical to SEQ ID NO: 15726

SEQ ID NO: 25876 - DNA, 588 bp, Bacteroides fragilis NCTC 9343; identical to SEQ ID NO: 15727
  CDS (1)..(588): transl_table=11

SEQ ID NO: 25877 - protein, 195 aa, Bacteroides fragilis NCTC 9343; identical to SEQ ID NO: 15728

SEQ ID NO: 25878 - DNA, 690 bp, Brucella abortus biovar 1 str. 9-941; identical to SEQ ID NO: 15729
  CDS (1)..(690): transl_table=11

SEQ ID NO: 25879 - protein, 229 aa, Brucella abortus biovar 1 str. 9-941; identical to SEQ ID NO: 15730

SEQ ID NO: 25880 - DNA, 690 bp, Chloroflexus aurantiacus; identical to SEQ ID NO: 15731
  CDS (1)..(690)

SEQ ID NO: 25881 - protein, 229 aa, Chloroflexus aurantiacus; identical to SEQ ID NO: 15732

SEQ ID NO: 25882 - DNA, 564 bp, Chloroflexus aurantiacus; identical to SEQ ID NO: 15733
  CDS (1)..(564)

SEQ ID NO: 25883 - protein, 187 aa, Chloroflexus aurantiacus; identical to SEQ ID NO: 15734

SEQ ID NO: 25884 - DNA, 615 bp, Lactobacillus gasseri; identical to SEQ ID NO: 15735
  CDS (1)..(615)

SEQ ID NO: 25885 - protein, 204 aa, Lactobacillus gasseri; identical to SEQ ID NO: 15736

SEQ ID NO: 25886 - DNA, 606 bp, Magnetospirillum magnetotacticum MS-1; identical to SEQ ID NO: 15737
  CDS (1)..(606)

SEQ ID NO: 25887 - protein, 201 aa, Magnetospirillum magnetotacticum MS-1; identical to SEQ ID NO: 15738

SEQ ID NO: 25888 - DNA, 702 bp, Leuconostoc mesenteroides subsp. mesenteroides ATCC 8293; identical to SEQ ID NO: 15739
  CDS (1)..(702)

SEQ ID NO: 25889 - protein, 233 aa, Leuconostoc mesenteroides subsp. mesenteroides ATCC 8293; identical to SEQ ID NO: 15740

SEQ ID NO: 25890 - DNA, 561 bp, Nostoc punctiforme PCC 73102; identical to SEQ ID NO: 15741
  CDS (1)..(561)

SEQ ID NO: 25891 - protein, 186 aa, Nostoc punctiforme PCC 73102; identical to SEQ ID NO: 15742

SEQ ID NO: 25892 - DNA, 594 bp, Nostoc punctiforme PCC 73102; identical to SEQ ID NO: 15743
  CDS (1)..(594)

SEQ ID NO: 25893 - protein, 197 aa, Nostoc punctiforme PCC 73102; identical to SEQ ID NO: 15744

SEQ ID NO: 25894 - DNA, 702 bp, Nostoc punctiforme PCC 73102; identical to SEQ ID NO: 15745
  CDS (1)..(702)

SEQ ID NO: 25895 - protein, 233 aa, Nostoc punctiforme PCC 73102; identical to SEQ ID NO: 15746

SEQ ID NO: 25896 - DNA, 675 bp, Bifidobacterium longum DJO10A; identical to SEQ ID NO: 15747
  CDS (1)..(675)

SEQ ID NO: 25897 - protein, 224 aa, Bifidobacterium longum DJO10A; identical to SEQ ID NO: 15748

SEQ ID NO: 25898 - DNA, 633 bp, Bifidobacterium longum DJO10A; identical to SEQ ID NO: 15749
  CDS (1)..(633)

SEQ ID NO: 25899 - protein, 210 aa, Bifidobacterium longum DJO10A; identical to SEQ ID NO: 15750

SEQ ID NO: 25900 - DNA, 609 bp, Desulfovibrio desulfuricans G20; identical to SEQ ID NO: 15751
  CDS (1)..(609)

SEQ ID NO: 25901 - protein, 202 aa, Desulfovibrio desulfuricans G20; identical to SEQ ID NO: 15752

SEQ ID NO: 25902 - DNA, 558 bp, Desulfovibrio desulfuricans G20; identical to SEQ ID NO: 15753
  CDS (1)..(558)

SEQ ID NO: 25903 - protein, 185 aa, Desulfovibrio desulfuricans G20; identical to SEQ ID NO: 15754

SEQ ID NO: 25904 - DNA, 576 bp, Anabaena variabilis ATCC 29413; identical to SEQ ID NO: 15755
  CDS (1)..(576)

SEQ ID NO: 25905 - protein, 191 aa, Anabaena variabilis ATCC 29413; identical to SEQ ID NO: 15756

SEQ ID NO: 25906 - DNA, 561 bp, Anabaena variabilis ATCC 29413; identical to SEQ ID NO: 15757
  CDS (1)..(561)

SEQ ID NO: 25907 - protein, 186 aa, Anabaena variabilis ATCC 29413; identical to SEQ ID NO: 15758

SEQ ID NO: 25908 - DNA, 576 bp, Actinobacillus pleuropneumoniae serovar 1 str. 4074; identical to SEQ ID NO: 15759
  CDS (1)..(576)

SEQ ID NO: 25909 - protein, 191 aa, Actinobacillus pleuropneumoniae serovar 1 str. 4074; identical to SEQ ID NO: 15760

SEQ ID NO: 25910 - DNA, 501 bp, Burkholderia cepacia R18194; identical to SEQ ID NO: 15761
  CDS (1)..(501)

SEQ ID NO: 25911 - protein, 166 aa, Burkholderia cepacia R18194; identical to SEQ ID NO: 15762

SEQ ID NO: 25912 - DNA, 609 bp, Burkholderia cepacia R18194; identical to SEQ ID NO: 15763
  CDS (1)..(609)

SEQ ID NO: 25913 - protein, 202 aa, Burkholderia cepacia R18194; identical to SEQ ID NO: 15764

SEQ ID NO: 25914 - DNA, 528 bp, Listeria monocytogenes str. 4b H7858; identical to SEQ ID NO: 15765
  CDS (1)..(528): transl_table=11

SEQ ID NO: 25915 - protein, 175 aa, Listeria monocytogenes str. 4b H7858; identical to SEQ ID NO: 15766

SEQ ID NO: 25916 - DNA, 570 bp, Listeria monocytogenes str. 4b H7858; identical to SEQ ID NO: 15767
  CDS (1)..(570): transl_table=11

SEQ ID NO: 25917 - protein, 189 aa, Listeria monocytogenes str. 4b H7858; identical to SEQ ID NO: 15768

SEQ ID NO: 25918 - DNA, 564 bp, Bacillus cereus G9241; identical to SEQ ID NO: 15769
  CDS (1)..(564): transl_table=11

SEQ ID NO: 25919 - protein, 187 aa, Bacillus cereus G9241; identical to SEQ ID NO: 15770

SEQ ID NO: 25920 - DNA, 558 bp, Bacillus cereus G9241; identical to SEQ ID NO: 15771
  CDS (1)..(558): transl_table=11

SEQ ID NO: 25921 - protein, 185 aa, Bacillus cereus G9241; identical to SEQ ID NO: 15772

SEQ ID NO: 25922 - DNA, 588 bp, Burkholderia fungorum LB400; identical to SEQ ID NO: 15773
  CDS (1)..(588)

SEQ ID NO: 25923 - protein, 195 aa, Burkholderia fungorum LB400; identical to SEQ ID NO: 15774

SEQ ID NO: 25924 - DNA, 555 bp, Thermobifida fusca; identical to SEQ ID NO: 15775
  CDS (1)..(555)

SEQ ID NO: 25925 - protein, 184 aa, Thermobifida fusca; identical to SEQ ID NO: 15776

SEQ ID NO: 25926 - DNA, 513 bp, Cytophaga hutchinsonii; identical to SEQ ID NO: 15777
  CDS (1)..(513)

SEQ ID NO: 25927 - protein, 170 aa, Cytophaga hutchinsonii; identical to SEQ ID NO: 15778

SEQ ID NO: 25928 - DNA, 654 bp, Cytophaga hutchinsonii; identical to SEQ ID NO: 15779
  CDS (1)..(654)

SEQ ID NO: 25929 - protein, 217 aa, Cytophaga hutchinsonii; identical to SEQ ID NO: 15780

SEQ ID NO: 25930 - DNA, 744 bp, Microbulbifer degradans 2-40; identical to SEQ ID NO: 15781
  CDS (1)..(744)

SEQ ID NO: 25931 - protein, 247 aa, Microbulbifer degradans 2-40; identical to SEQ ID NO: 15782

SEQ ID NO: 25932 - DNA, 549 bp, Microbulbifer degradans 2-40; identical to SEQ ID NO: 15783
  CDS (1)..(549)

SEQ ID NO: 25933 - protein, 182 aa, Microbulbifer degradans 2-40; identical to SEQ ID NO: 15784

SEQ ID NO: 25934 - DNA, 417 bp, Oenococcus oeni PSU-1; identical to SEQ ID NO: 15785
  CDS (1)..(417)

SEQ ID NO: 25935 - protein, 138 aa, Oenococcus oeni PSU-1; identical to SEQ ID NO: 15786

SEQ ID NO: 25936 - DNA, 567 bp, Pediococcus pentosaceus ATCC 25745; identical to SEQ ID NO: 15787
  CDS (1)..(567)

SEQ ID NO: 25937 - protein, 188 aa, Pediococcus pentosaceus ATCC 25745; identical to SEQ ID NO: 15788

SEQ ID NO: 25938 - DNA, 555 bp, Pediococcus pentosaceus ATCC 25745; identical to SEQ ID NO: 15789
  CDS (1)..(555)

SEQ ID NO: 25939 - protein, 184 aa, Pediococcus pentosaceus ATCC 25745; identical to SEQ ID NO: 15790

SEQ ID NO: 25940 - DNA, 552 bp, Pediococcus pentosaceus ATCC 25745; identical to SEQ ID NO: 15791
  CDS (1)..(552)

SEQ ID NO: 25941 - protein, 183 aa, Pediococcus pentosaceus ATCC 25745; identical to SEQ ID NO: 15792

SEQ ID NO: 25942 - DNA, 465 bp, Streptococcus suis 89/1591; identical to SEQ ID NO: 15793
  CDS (1)..(465)

SEQ ID NO: 25943 - protein, 154 aa, Streptococcus suis 89/1591; identical to SEQ ID NO: 15794

SEQ ID NO: 25944 - DNA, 606 bp, Desulfovibrio desulfuricans G20; identical to SEQ ID NO: 15795
  CDS (1)..(606)

SEQ ID NO: 25945 - protein, 201 aa, Desulfovibrio desulfuricans G20; identical to SEQ ID NO: 15796

SEQ ID NO: 25946 - DNA, 543 bp, Chloroflexus aurantiacus; identical to SEQ ID NO: 15797
  CDS (1)..(543)

SEQ ID NO: 25947 - protein, 180 aa, Chloroflexus aurantiacus; identical to SEQ ID NO: 15798

SEQ ID NO: 25948 - DNA, 186 bp, Brevibacterium linens BL2; identical to SEQ ID NO: 15799
  CDS (1)..(186)

SEQ ID NO: 25949 - protein, 61 aa, Brevibacterium linens BL2; identical to SEQ ID NO: 15800

SEQ ID NO: 25950 - DNA, 612 bp, Lactococcus lactis subsp. cremoris SK11; identical to SEQ ID NO: 15801
  CDS (1)..(612)

SEQ ID NO: 25951 - protein, 203 aa, Lactococcus lactis subsp. cremoris SK11; identical to SEQ ID NO: 15802

SEQ ID NO: 25952 - DNA, 588 bp, Lactococcus lactis subsp. cremoris SK11; identical to SEQ ID NO: 15803
  CDS (1)..(588)

SEQ ID NO: 25953 - protein, 195 aa, Lactococcus lactis subsp. cremoris SK11; identical to SEQ ID NO: 15804

SEQ ID NO: 25954 - DNA, 597 bp, Lactobacillus casei ATCC 334; identical to SEQ ID NO: 15805
  CDS (1)..(597)

SEQ ID NO: 25955 - protein, 198 aa, Lactobacillus casei ATCC 334; identical to SEQ ID NO: 15806

SEQ ID NO: 25956 - DNA, 705 bp, Lactobacillus casei ATCC 334; identical to SEQ ID NO: 15807
  CDS (1)..(705)

SEQ ID NO: 25957 - protein, 234 aa, Lactobacillus casei ATCC 334; identical to SEQ ID NO: 15808

SEQ ID NO: 25958 - DNA, 591 bp, Lactobacillus delbrueckii subsp. bulgaricus ATCC BAA-365; identical to SEQ ID NO: 15809
  CDS (1)..(591)

SEQ ID NO: 25959 - protein, 196 aa, Lactobacillus delbrueckii subsp. bulgaricus ATCC BAA-365; identical to SEQ ID NO: 15810

SEQ ID NO: 25960 - DNA, 609 bp, Bacillus anthracis str. A2012; identical to SEQ ID NO: 15811
  CDS (1)..(609): Xaa of translated CDS can stand for any naturally occuring amino acid which can be translated from respective CDS-codon

SEQ ID NO: 25961 - protein, 202 aa, Bacillus anthracis str. A2012; identical to SEQ ID NO: 15812
  misc_feature (136)..(136): Xaa can be any naturally occuring amino acid

SEQ ID NO: 25962 - DNA, 534 bp, Anaeromyxobacter dehalogenans 2CP-C; identical to SEQ ID NO: 15813
  CDS (1)..(534): transl_table=11

SEQ ID NO: 25963 - protein, 177 aa, Anaeromyxobacter dehalogenans 2CP-C; identical to SEQ ID NO: 15814

SEQ ID NO: 25964 - DNA, 663 bp, Streptococcus pneumoniae TIGR4; identical to SEQ ID NO: 15815
  CDS (1)..(663)

SEQ ID NO: 25965 - protein, 220 aa, Streptococcus pneumoniae TIGR4; identical to SEQ ID NO: 15816

SEQ ID NO: 25966 - DNA, 558 bp, Burkholderia vietnamiensis G4; identical to SEQ ID NO: 15817
  CDS (1)..(558): transl_table=11

SEQ ID NO: 25967 - protein, 185 aa, Burkholderia vietnamiensis G4; identical to SEQ ID NO: 15818

SEQ ID NO: 25968 - DNA, 576 bp, Crocosphaera watsonii WH 8501; identical to SEQ ID NO: 15819
  CDS (1)..(576): transl_table=11

SEQ ID NO: 25969 - protein, 191 aa, Crocosphaera watsonii WH 8501; identical to SEQ ID NO: 15820

SEQ ID NO: 25970 - DNA, 555 bp, Chlorobium phaeobacteroides DSM 266; identical to SEQ ID NO: 15821
  CDS (1)..(555): transl_table=11

SEQ ID NO: 25971 - protein, 184 aa, Chlorobium phaeobacteroides DSM 266; identical to SEQ ID NO: 15822

SEQ ID NO: 25972 - DNA, 618 bp, Chlorobium phaeobacteroides BS1; identical to SEQ ID NO: 15823
  CDS (1)..(618): transl_table=11

SEQ ID NO: 25973 - protein, 205 aa, Chlorobium phaeobacteroides BS1; identical to SEQ ID NO: 15824

SEQ ID NO: 25974 - DNA, 576 bp, Exiguobacterium sp. 255-15; identical to SEQ ID NO: 15825
  CDS (1)..(576): transl_table=11

SEQ ID NO: 25975 - protein, 191 aa, Exiguobacterium sp. 255-15; identical to SEQ ID NO: 15826

SEQ ID NO: 25976 - DNA, 552 bp, Exiguobacterium sp. 255-15; identical to SEQ ID NO: 15827
  CDS (1)..(552): transl_table=11

SEQ ID NO: 25977 - protein, 183 aa, Exiguobacterium sp. 255-15; identical to SEQ ID NO: 15828

SEQ ID NO: 25978 - DNA, 702 bp, Exiguobacterium sp. 255-15; identical to SEQ ID NO: 15829
  CDS (1)..(702): transl_table=11

SEQ ID NO: 25979 - protein, 233 aa, Exiguobacterium sp. 255-15; identical to SEQ ID NO: 15830

SEQ ID NO: 25980 - DNA, 642 bp, Methanosarcina barkeri str. fusaro; identical to SEQ ID NO: 15831
  CDS (1)..(642): transl_table=11

SEQ ID NO: 25981 - protein, 213 aa, Methanosarcina barkeri str. fusaro; identical to SEQ ID NO: 15832

SEQ ID NO: 25982 - DNA, 600 bp, Methanosarcina barkeri str. fusaro; identical to SEQ ID NO: 15833
  CDS (1)..(600): transl_table=11

SEQ ID NO: 25983 - protein, 199 aa, Methanosarcina barkeri str. fusaro; identical to SEQ ID NO: 15834

SEQ ID NO: 25984 - DNA, 549 bp, Methanosarcina barkeri str. fusaro; identical to SEQ ID NO: 15835
  CDS (1)..(549): transl_table=11

SEQ ID NO: 25985 - protein, 182 aa, Methanosarcina barkeri str. fusaro; identical to SEQ ID NO: 15836

SEQ ID NO: 25986 - DNA, 609 bp, Methanosarcina barkeri str. fusaro; identical to SEQ ID NO: 15837
  CDS (1)..(609): transl_table=11

SEQ ID NO: 25987 - protein, 202 aa, Methanosarcina barkeri str. fusaro; identical to SEQ ID NO: 15838

SEQ ID NO: 25988 - DNA, 531 bp, Desulfuromonas acetoxidans DSM 684; identical to SEQ ID NO: 15839
  CDS (1)..(531): transl_table=11

SEQ ID NO: 25989 - protein, 176 aa, Desulfuromonas acetoxidans DSM 684; identical to SEQ ID NO: 15840

SEQ ID NO: 25990 - DNA, 555 bp, Jannaschia sp. CCS1; identical to SEQ ID NO: 15841
  CDS (1)..(555): transl_table=11

SEQ ID NO: 25991 - protein, 184 aa, Jannaschia sp. CCS1; identical to SEQ ID NO: 15842

SEQ ID NO: 25992 - DNA, 630 bp, Frankia sp. EAN1pec; identical to SEQ ID NO: 15843
  CDS (1)..(630): transl_table=11

SEQ ID NO: 25993 - protein, 209 aa, Frankia sp. EAN1pec; identical to SEQ ID NO: 15844

SEQ ID NO: 25994 - DNA, 555 bp, Shewanella baltica OS155; identical to SEQ ID NO: 15845
  CDS (1)..(555): transl_table=11

SEQ ID NO: 25995 - protein, 184 aa, Shewanella baltica OS155; identical to SEQ ID NO: 15846

SEQ ID NO: 25996 - DNA, 585 bp, Shewanella baltica OS155; identical to SEQ ID NO: 15847
  CDS (1)..(585): transl_table=11

SEQ ID NO: 25997 - protein, 194 aa, Shewanella baltica OS155; identical to SEQ ID NO: 15848

SEQ ID NO: 25998 - DNA, 726 bp, Ralstonia metallidurans CH34; identical to SEQ ID NO: 15849
  CDS (1)..(726): transl_table=11

SEQ ID NO: 25999 - protein, 241 aa, Ralstonia metallidurans CH34; identical to SEQ ID NO: 15850

SEQ ID NO: 26000 - DNA, 549 bp, Paracoccus denitrificans PD1222; identical to SEQ ID NO: 15851
  CDS (1)..(549): transl_table=11

SEQ ID NO: 26001 - protein, 182 aa, Paracoccus denitrificans PD1222; identical to SEQ ID NO: 15852

SEQ ID NO: 26002 - DNA, 615 bp, Shewanella frigidimarina NCIMB 400; identical to SEQ ID NO: 15853
  CDS (1)..(615): transl_table=11

SEQ ID NO: 26003 - protein, 204 aa, Shewanella frigidimarina NCIMB 400; identical to SEQ ID NO: 15854

SEQ ID NO: 26004 - DNA, 777 bp, Escherichia coli; identical to SEQ ID NO: 15855
  CDS (1)..(777): transl_table=11

SEQ ID NO: 26005 - protein, 258 aa, Escherichia coli; identical to SEQ ID NO: 15856

SEQ ID NO: 26006 - DNA, 651 bp, Pseudomonas fluorescens; identical to SEQ ID NO: 15857
  CDS (1)..(651): transl_table=11

SEQ ID NO: 26007 - protein, 216 aa, Pseudomonas fluorescens; identical to SEQ ID NO: 15858

SEQ ID NO: 26008 - DNA, 579 bp, Staphylococcus haemolyticus; identical to SEQ ID NO: 15859
  CDS (1)..(579): transl_table=11

SEQ ID NO: 26009 - protein, 192 aa, Staphylococcus haemolyticus; identical to SEQ ID NO: 15860

SEQ ID NO: 26010 - DNA, 648 bp, Aspergillus fumigatus Af293; identical to SEQ ID NO: 15861
  CDS (1)..(648)

SEQ ID NO: 26011 - protein, 215 aa, Aspergillus fumigatus Af293; identical to SEQ ID NO: 15862

SEQ ID NO: 26012 - DNA, 747 bp, Aspergillus fumigatus Af293; identical to SEQ ID NO: 15863
  CDS (1)..(747)

SEQ ID NO: 26013 - protein, 248 aa, Aspergillus fumigatus Af293; identical to SEQ ID NO: 15864

SEQ ID NO: 26014 - DNA, 687 bp, Aspergillus fumigatus Af293; identical to SEQ ID NO: 15865
  CDS (1)..(687)

SEQ ID NO: 26015 - protein, 228 aa, Aspergillus fumigatus Af293; identical to SEQ ID NO: 15866

SEQ ID NO: 26016 - DNA, 603 bp, Lactobacillus crispatus; identical to SEQ ID NO: 15867
  CDS (1)..(603): transl_table=11

SEQ ID NO: 26017 - protein, 200 aa, Lactobacillus crispatus; identical to SEQ ID NO: 15868

SEQ ID NO: 26018 - DNA, 642 bp, Cryptococcus neoformans var; identical to SEQ ID NO: 15869
  CDS (1)..(642)

SEQ ID NO: 26019 - protein, 213 aa, Cryptococcus neoformans var; identical to SEQ ID NO: 15870

SEQ ID NO: 26020 - DNA, 513 bp, Klebsiella pneumoniae; identical to SEQ ID NO: 15871
  CDS (1)..(513): transl_table=11

SEQ ID NO: 26021 - protein, 170 aa, Klebsiella pneumoniae; identical to SEQ ID NO: 15872

SEQ ID NO: 26022 - DNA, 555 bp, Vibrio cholerae non; identical to SEQ ID NO: 15873
  CDS (1)..(555): transl_table=11

SEQ ID NO: 26023 - protein, 184 aa, Vibrio cholerae non; identical to SEQ ID NO: 15874

SEQ ID NO: 26024 - DNA, 645 bp, Rhizobium etli; identical to SEQ ID NO: 15875
  CDS (1)..(645): transl_table=11

SEQ ID NO: 26025 - protein, 214 aa, Rhizobium etli; identical to SEQ ID NO: 15876

SEQ ID NO: 26026 - DNA, 558 bp, Bacillus stearothermophilus; identical to SEQ ID NO: 15877
  CDS (1)..(558): transl_table=11

SEQ ID NO: 26027 - protein, 185 aa, Bacillus stearothermophilus; identical to SEQ ID NO: 15878

SEQ ID NO: 26028 - DNA, 594 bp, Rhizobium leguminosarum bv; identical to SEQ ID NO: 15879
  CDS (1)..(594): transl_table=11

SEQ ID NO: 26029 - protein, 197 aa, Rhizobium leguminosarum bv; identical to SEQ ID NO: 15880

SEQ ID NO: 26030 - DNA, 573 bp, Dictyostelium discoideum; identical to SEQ ID NO: 15881
  CDS (1)..(573)

SEQ ID NO: 26031 - protein, 190 aa, Dictyostelium discoideum; identical to SEQ ID NO: 15882

SEQ ID NO: 26032 - DNA, 657 bp, Physcomitrella patens; identical to SEQ ID NO: 15883
  CDS (1)..(657)

SEQ ID NO: 26033 - protein, 218 aa, Physcomitrella patens; identical to SEQ ID NO: 15884

SEQ ID NO: 26034 - DNA, 636 bp, Aeromonas hydrophila; identical to SEQ ID NO: 15885
  CDS (1)..(636): transl_table=11

SEQ ID NO: 26035 - protein, 211 aa, Aeromonas hydrophila; identical to SEQ ID NO: 15886

SEQ ID NO: 26036 - DNA, 600 bp, Aeromonas hydrophila; identical to SEQ ID NO: 15887
  CDS (1)..(600): transl_table=11

SEQ ID NO: 26037 - protein, 199 aa, Aeromonas hydrophila; identical to SEQ ID NO: 15888

SEQ ID NO: 26038 - DNA, 678 bp, Corynebacterium glutamicum; identical to SEQ ID NO: 15889
  CDS (1)..(678): transl_table=11

SEQ ID NO: 26039 - protein, 225 aa, Corynebacterium glutamicum; identical to SEQ ID NO: 15890

SEQ ID NO: 26040 - DNA, 624 bp, Lactococcus lactis; identical to SEQ ID NO: 15891
  CDS (1)..(624): transl_table=11

SEQ ID NO: 26041 - protein, 207 aa, Lactococcus lactis; identical to SEQ ID NO: 15892

SEQ ID NO: 26042 - DNA, 621 bp, Candida albicans; identical to SEQ ID NO: 15893
  CDS (1)..(621): transl_table=12

SEQ ID NO: 26043 - protein, 206 aa, Candida albicans; identical to SEQ ID NO: 15894

SEQ ID NO: 26044 - DNA, 519 bp, Staphylococcus aureus; identical to SEQ ID NO: 15895
  CDS (1)..(519): transl_table=11

SEQ ID NO: 26045 - protein, 172 aa, Staphylococcus aureus; identical to SEQ ID NO: 15896

SEQ ID NO: 26046 - DNA, 555 bp, Bacillus subtilis; identical to SEQ ID NO: 15897
  CDS (1)..(555): transl_table=11

SEQ ID NO: 26047 - protein, 184 aa, Bacillus subtilis; identical to SEQ ID NO: 15898

SEQ ID NO: 26048 - DNA, 552 bp, Escherichia coli; identical to SEQ ID NO: 15433
  CDS (1)..(552)

SEQ ID NO: 26049 - protein, 183 aa, Escherichia coli; identical to SEQ ID NO: 15434

SEQ ID NO: 26050 - DNA, 573 bp, Rhizobium leguminosarum bv; identical to SEQ ID NO: 15901
  CDS (1)..(573): transl_table=11

SEQ ID NO: 26051 - protein, 190 aa, Rhizobium leguminosarum bv; identical to SEQ ID NO: 15902

SEQ ID NO: 26052 - DNA, 552 bp, Rhizobium meliloti; identical to SEQ ID NO: 15903
  CDS (1)..(552): transl_table=11

SEQ ID NO: 26053 - protein, 183 aa, Rhizobium meliloti; identical to SEQ ID NO: 15904

SEQ ID NO: 26054 - DNA, 624 bp, Lactococcus lactis subsp; identical to SEQ ID NO: 15905
  CDS (1)..(624): transl_table=11

SEQ ID NO: 26055 - protein, 207 aa, Lactococcus lactis subsp; identical to SEQ ID NO: 15906

SEQ ID NO: 26056 - DNA, 645 bp, Methanococcus jannaschii; identical to SEQ ID NO: 15907
  CDS (1)..(645): transl_table=11

SEQ ID NO: 26057 - protein, 214 aa, Methanococcus jannaschii; identical to SEQ ID NO: 15908

SEQ ID NO: 26058 - DNA, 624 bp, Schizosaccharomyces pombe; identical to SEQ ID NO: 15909
  CDS (1)..(624)

SEQ ID NO: 26059 - protein, 207 aa, Schizosaccharomyces pombe; identical to SEQ ID NO: 15910

SEQ ID NO: 26060 - DNA, 591 bp, Saccharomyces cerevisiae; identical to SEQ ID NO: 15911
  CDS (1)..(591)

SEQ ID NO: 26061 - protein, 196 aa, Saccharomyces cerevisiae; identical to SEQ ID NO: 15912

SEQ ID NO: 26062 - DNA, 25 bp, Artificial sequence
  Primer sequence
atgaacatgccaatgaccgaaagaa

SEQ ID NO: 26063 - DNA, 28 bp, Artificial sequence
  Primer sequence
ttaaactgacgattcaactttataatct

SEQ ID NO: 26064 - protein, 204 aa, Artificial sequence; identical to SEQ ID NO: 15915
  Consensus
  Variant (2)..(4): Xaa in position 2 to 4 is any amino acid
  Variant (5)..(9): Xaa in position 5 to 9 is any or no amino acid
  Variant (11)..(26): Xaa in position 11 to 26 is any or no amino acid
  Variant (28)..(28): Xaa in position 28 is any amino acid
  Variant (31)..(41): Xaa in position 31 to 41 is any amino acid
  Variant (42)..(92): Xaa in position 42 to 92 is any or no amino acid
  Variant (94)..(94): Xaa in position 94 is any or no amino acid
  Variant (97)..(97): Xaa in position 97 is any amino acid
  Variant (98)..(101): Xaa in position 98 to 101 is any or no amino acid
  Variant (103)..(106): Xaa in position 103 to 106 is any amino acid
  Variant (108)..(109): Xaa in position 108 to 109 is any amino acid
  Variant (110)..(112): Xaa in position 110 to 112 is any or no amino acid
  Variant (114)..(119): Xaa in position 114 to 119 is any amino acid
  Variant (120)..(152): Xaa in position 120 to 152 is any or no amino acid
  Variant (154)..(154): Xaa in position 154 is any amino acid
  Variant (156)..(159): Xaa in position 156 to 159 is any amino acid
  Variant (163)..(166): Xaa in position 163 to 166 is any or no amino acid
  Variant (168)..(169): Xaa in position 168 to 169 is any or no amino acid
  Variant (172)..(172): Xaa in position 172 is any or no amino acid
  Variant (175)..(177): Xaa in position 175 to 177 is any or no amino acid
  Variant (188)..(188): Xaa in position 188 is any amino acid
  Variant (191)..(193): Xaa in position 191 to 193 is any amino acid
  Variant (195)..(196): Xaa in position 195 to 196 is any amino acid
  Variant (198)..(198): Xaa in position 198 is any amino acid
  Variant (200)..(200): Xaa in position 200 is any amino acid

SEQ ID NO: 26065 - protein, 12 aa, Artificial sequence
  Consensus
  Variant (2)..(2): Xaa in position 2 is any or no amino acid
  Variant (4)..(5): Xaa in position 4 to 5 is any amino acid
  Variant (6)..(6): Xaa in position 6 is Ala, Cys, Thr or Val
  Variant (7)..(7): Xaa in position 7 is any amino acid
  Variant (8)..(8): Xaa in position 8 is Phe, Ile, Leu, Met or Val
  Variant (9)..(11): Xaa in position 9 to 11 is any amino acid
  Variant (12)..(12): Xaa in position 12 is Ala, Cys, Asp, Gly, Asn, Ser, Thr or Val
IXGXXXXXXXXX

SEQ ID NO: 26066 - protein, 43 aa, Artificial sequence; identical to SEQ ID NO: 15917
  Consensus
  Variant (2)..(2): Xaa in position 2 is any amino acid
  Variant (3)..(4): Xaa in position 3 to 4 is any or no amino acid
  Variant (6)..(10): Xaa in position 6 to 10 is any amino acid
  Variant (11)..(12): Xaa in position 11 to 12 is any or no amino acid
  Variant (14)..(14): Xaa in position 14 is Ala, Ile or Val
  Variant (15)..(15): Xaa in position 15 is any amino acid
  Variant (16)..(16): Xaa in position 16 is Ile, Leu or Val
  Variant (17)..(17): Xaa in position 17 is Asp, Gly or Thr
  Variant (18)..(19): Xaa in position 18 to 19 is any amino acid
  Variant (20)..(20): Xaa in position 20 is Ala, Cys, Gly, Ser, Thr or Val
  Variant (21)..(21): Xaa in position 21 is any amino acid
  Variant (22)..(22): Xaa in position 22 is Ala, Ile, Leu or Val
  Variant (23)..(23): Xaa in position 23 is Ala, Gly or Ser
  Variant (24)..(25): Xaa in position 24 to 25 is any amino acid
  Variant (26)..(26): Xaa in position 26 is Ala, Cys, Ser or Thr
  Variant (27)..(27): Xaa in position 27 is any amino acid
  Variant (28)..(28): Xaa in position 28 is Ala, Ile or Val
  Variant (29)..(31): Xaa in position 29 to 31 is any amino acid
  Variant (32)..(32): Xaa in position 32 is Phe, Ile, Leu, Met or Val
  Variant (33)..(39): Xaa in position 33 to 39 is any amino acid
  Variant (41)..(41): Xaa in position 41 is any amino acid
  Variant (43)..(43): Xaa in position 43 is Ala, Cys or Gly

SEQ ID NO: 26067 - DNA, 1818 bp, Escherichia coli; identical to SEQ ID NO: 13510
  CDS (1)..(1818)

SEQ ID NO: 26068 - protein, 605 aa, Escherichia coli; identical to SEQ ID NO: 13511

SEQ ID NO: 26069 - DNA, 1665 bp, Mesorhizobium loti MAFF303099; identical to SEQ ID NO: 13512
  CDS (1)..(1665): transl_table=11

SEQ ID NO: 26070 - protein, 554 aa, Mesorhizobium loti MAFF303099; identical to SEQ ID NO: 13513

SEQ ID NO: 26071 - DNA, 1635 bp, Mesorhizobium loti MAFF303099; identical to SEQ ID NO: 13514
  CDS (1)..(1635): transl_table=11

SEQ ID NO: 26072 - protein, 544 aa, Mesorhizobium loti MAFF303099; identical to SEQ ID NO: 13515

SEQ ID NO: 26073 - DNA, 1851 bp, Thermoplasma volcanium GSS1; identical to SEQ ID NO: 13516
  CDS (1)..(1851): transl_table=11

SEQ ID NO: 26074 - protein, 616 aa, Thermoplasma volcanium GSS1; identical to SEQ ID NO: 13517

SEQ ID NO: 26075 - DNA, 1422 bp, Thermotoga maritima MSB8; identical to SEQ ID NO: 13518
  CDS (1)..(1422): transl_table=11

SEQ ID NO: 26076 - protein, 473 aa, Thermotoga maritima MSB8; identical to SEQ ID NO: 13519

SEQ ID NO: 26077 - DNA, 1671 bp, Thermotoga maritima MSB8; identical to SEQ ID NO: 13520
  CDS (1)..(1671): transl_table=11

SEQ ID NO: 26078 - protein, 556 aa, Thermotoga maritima MSB8; identical to SEQ ID NO: 13521

SEQ ID NO: 26079 - DNA, 1737 bp, Bacillus halodurans C-125; identical to SEQ ID NO: 13522
  CDS (1)..(1737): transl_table=11

SEQ ID NO: 26080 - protein, 578 aa, Bacillus halodurans C-125; identical to SEQ ID NO: 13523

SEQ ID NO: 26081 - DNA, 1704 bp, Streptococcus pyogenes M1 GAS; identical to SEQ ID NO: 13524
  CDS (1)..(1704): transl_table=11

SEQ ID NO: 26082 - protein, 567 aa, Streptococcus pyogenes M1 GAS; identical to SEQ ID NO: 13525

SEQ ID NO: 26083 - DNA, 1614 bp, Streptococcus pyogenes M1 GAS; identical to SEQ ID NO: 13526
  CDS (1)..(1614): transl_table=11

SEQ ID NO: 26084 - protein, 537 aa, Streptococcus pyogenes M1 GAS; identical to SEQ ID NO: 13527

SEQ ID NO: 26085 - DNA, 1974 bp, Deinococcus radiodurans R1; identical to SEQ ID NO: 13528
  CDS (1)..(1974): transl_table=11

SEQ ID NO: 26086 - protein, 657 aa, Deinococcus radiodurans R1; identical to SEQ ID NO: 13529

SEQ ID NO: 26087 - DNA, 1497 bp, Deinococcus radiodurans R1; identical to SEQ ID NO: 13530
  CDS (1)..(1497): transl_table=11

SEQ ID NO: 26088 - protein, 498 aa, Deinococcus radiodurans R1; identical to SEQ ID NO: 13531

SEQ ID NO: 26089 - DNA, 1695 bp, Deinococcus radiodurans R1; identical to SEQ ID NO: 13532
  CDS (1)..(1695): transl_table=11

SEQ ID NO: 26090 - protein, 564 aa, Deinococcus radiodurans R1; identical to SEQ ID NO: 13533

SEQ ID NO: 26091 - DNA, 1452 bp, Deinococcus radiodurans R1; identical to SEQ ID NO: 13534
  CDS (1)..(1452): transl_table=11

SEQ ID NO: 26092 - protein, 483 aa, Deinococcus radiodurans R1; identical to SEQ ID NO: 13535

SEQ ID NO: 26093 - DNA, 1659 bp, Deinococcus radiodurans R1; identical to SEQ ID NO: 13536
  CDS (1)..(1659): transl_table=11

SEQ ID NO: 26094 - protein, 552 aa, Deinococcus radiodurans R1; identical to SEQ ID NO: 13537

SEQ ID NO: 26095 - DNA, 1824 bp, Mycoplasma pulmonis UAB CTIP; identical to SEQ ID NO: 13538
  CDS (1)..(1824): transl_table=4

SEQ ID NO: 26096 - protein, 607 aa, Mycoplasma pulmonis UAB CTIP; identical to SEQ ID NO: 13539

SEQ ID NO: 26097 - DNA, 1806 bp, Mycobacterium tuberculosis CDC1551; identical to SEQ ID NO: 13540
  CDS (1)..(1806): transl_table=11

SEQ ID NO: 26098 - protein, 601 aa, Mycobacterium tuberculosis CDC1551; identical to SEQ ID NO: 13541

SEQ ID NO: 26099 - DNA, 1641 bp, Mycobacterium tuberculosis CDC1551; identical to SEQ ID NO: 13542
  CDS (1)..(1641): transl_table=11

SEQ ID NO: 26100 - protein, 546 aa, Mycobacterium tuberculosis CDC1551; identical to SEQ ID NO: 13543

SEQ ID NO: 26101 - DNA, 1356 bp, Clostridium acetobutylicum ATCC 824; identical to SEQ ID NO: 13544
  CDS (1)..(1356): transl_table=11

SEQ ID NO: 26102 - protein, 451 aa, Clostridium acetobutylicum ATCC 824; identical to SEQ ID NO: 13545

SEQ ID NO: 26103 - DNA, 1785 bp, Agrobacterium tumefaciens str. C58; identical to SEQ ID NO: 13546
  CDS (1)..(1785): transl_table=11

SEQ ID NO: 26104 - protein, 594 aa, Agrobacterium tumefaciens str. C58; identical to SEQ ID NO: 13547

SEQ ID NO: 26105 - DNA, 1608 bp, Streptococcus pneumoniae R6; identical to SEQ ID NO: 13548
  CDS (1)..(1608): transl_table=11

SEQ ID NO: 26106 - protein, 535 aa, Streptococcus pneumoniae R6; identical to SEQ ID NO: 13549

SEQ ID NO: 26107 - DNA, 1764 bp, Streptococcus pneumoniae R6; identical to SEQ ID NO: 13550
  CDS (1)..(1764): transl_table=11

SEQ ID NO: 26108 - protein, 587 aa, Streptococcus pneumoniae R6; identical to SEQ ID NO: 13551

SEQ ID NO: 26109 - DNA, 1851 bp, Thermoplasma acidophilum DSM 1728; identical to SEQ ID NO: 13552
  CDS (1)..(1851): transl_table=11

SEQ ID NO: 26110 - protein, 616 aa, Thermoplasma acidophilum DSM 1728; identical to SEQ ID NO: 13553

SEQ ID NO: 26111 - DNA, 1527 bp, Synechocystis sp. PCC 6803; identical to SEQ ID NO: 13554
  CDS (1)..(1527): transl_table=11

SEQ ID NO: 26112 - protein, 508 aa, Synechocystis sp. PCC 6803; identical to SEQ ID NO: 13555

SEQ ID NO: 26113 - DNA, 1818 bp, Salmonella typhimurium LT2; identical to SEQ ID NO: 13556
  CDS (1)..(1818): transl_table=11

SEQ ID NO: 26114 - protein, 605 aa, Salmonella typhimurium LT2; identical to SEQ ID NO: 13557

SEQ ID NO: 26115 - DNA, 1662 bp, Listeria monocytogenes EGD-e; identical to SEQ ID NO: 13558
  CDS (1)..(1662): transl_table=11

SEQ ID NO: 26116 - protein, 553 aa, Listeria monocytogenes EGD-e; identical to SEQ ID NO: 13559

SEQ ID NO: 26117 - DNA, 1776 bp, Listeria monocytogenes EGD-e; identical to SEQ ID NO: 13560
  CDS (1)..(1776): transl_table=11

SEQ ID NO: 26118 - protein, 591 aa, Listeria monocytogenes EGD-e; identical to SEQ ID NO: 13561

SEQ ID NO: 26119 - DNA, 1467 bp, Nostoc sp. PCC 7120; identical to SEQ ID NO: 13562
  CDS (1)..(1467): transl_table=11

SEQ ID NO: 26120 - protein, 488 aa, Nostoc sp. PCC 7120; identical to SEQ ID NO: 13563

SEQ ID NO: 26121 - DNA, 3483 bp, Ralstonia solanacearum GMI1000; identical to SEQ ID NO: 13564
  CDS (1)..(3483): transl_table=11

SEQ ID NO: 26122 - protein, 1160 aa, Ralstonia solanacearum GMI1000; identical to SEQ ID NO: 13565

SEQ ID NO: 26123 - DNA, 1821 bp, Clostridium perfringens str. 13; identical to SEQ ID NO: 13566
  CDS (1)..(1821): transl_table=11

SEQ ID NO: 26124 - protein, 606 aa, Clostridium perfringens str. 13; identical to SEQ ID NO: 13567

SEQ ID NO: 26125 - DNA, 1665 bp, Clostridium perfringens str. 13; identical to SEQ ID NO: 13568
  CDS (1)..(1665): transl_table=11

SEQ ID NO: 26126 - protein, 554 aa, Clostridium perfringens str. 13; identical to SEQ ID NO: 13569

SEQ ID NO: 26127 - DNA, 1833 bp, Clostridium perfringens str. 13; identical to SEQ ID NO: 13570
  CDS (1)..(1833): transl_table=11

SEQ ID NO: 26128 - protein, 610 aa, Clostridium perfringens str. 13; identical to SEQ ID NO: 13571

SEQ ID NO: 26129 - DNA, 1938 bp, Pyrococcus furiosus DSM 3638; identical to SEQ ID NO: 13572
  CDS (1)..(1938): transl_table=11

SEQ ID NO: 26130 - protein, 645 aa, Pyrococcus furiosus DSM 3638; identical to SEQ ID NO: 13573

SEQ ID NO: 26131 - DNA, 1614 bp, Streptococcus pyogenes MGAS8232; identical to SEQ ID NO: 13574
  CDS (1)..(1614): transl_table=11

SEQ ID NO: 26132 - protein, 537 aa, Streptococcus pyogenes MGAS8232; identical to SEQ ID NO: 13575

SEQ ID NO: 26133 - DNA, 1725 bp, Thermoanaerobacter tengcongensis MB4; identical to SEQ ID NO: 13576
  CDS (1)..(1725): transl_table=11

SEQ ID NO: 26134 - protein, 574 aa, Thermoanaerobacter tengcongensis MB4; identical to SEQ ID NO: 13577

SEQ ID NO: 26135 - DNA, 1575 bp, Thermoanaerobacter tengcongensis MB4; identical to SEQ ID NO: 13578
  CDS (1)..(1575): transl_table=11

SEQ ID NO: 26136 - protein, 524 aa, Thermoanaerobacter tengcongensis MB4; identical to SEQ ID NO: 13579

SEQ ID NO: 26137 - DNA, 1719 bp, Streptomyces coelicolor A3(2); identical to SEQ ID NO: 13580
  CDS (1)..(1719)

SEQ ID NO: 26138 - protein, 572 aa, Streptomyces coelicolor A3(2); identical to SEQ ID NO: 13581

SEQ ID NO: 26139 - DNA, 3351 bp, Xanthomonas campestris pv. campestris str. ATCC 33913; identical to SEQ ID NO: 13582
  CDS (1)..(3351): transl_table=11

SEQ ID NO: 26140 - protein, 1116 aa, Xanthomonas campestris pv. campestris str. ATCC 33913; identical to SEQ ID NO: 13583

SEQ ID NO: 26141 - DNA, 1617 bp, Xanthomonas campestris pv. campestris str. ATCC 33913; identical to SEQ ID NO: 13584
  CDS (1)..(1617): transl_table=11

SEQ ID NO: 26142 - protein, 538 aa, Xanthomonas campestris pv. campestris str. ATCC 33913; identical to SEQ ID NO: 13585

SEQ ID NO: 26143 - DNA, 1617 bp, Xanthomonas axonopodis pv. citri str. 306; identical to SEQ ID NO: 13586
  CDS (1)..(1617): transl_table=11

SEQ ID NO: 26144 - protein, 538 aa, Xanthomonas axonopodis pv. citri str. 306; identical to SEQ ID NO: 13587

SEQ ID NO: 26145 - DNA, 3327 bp, Chlorobium tepidum TLS; identical to SEQ ID NO: 13588
  CDS (1)..(3327): transl_table=11

SEQ ID NO: 26146 - protein, 1108 aa, Chlorobium tepidum TLS; identical to SEQ ID NO: 13589

SEQ ID NO: 26147 - DNA, 1668 bp, Yersinia pestis KIM; identical to SEQ ID NO: 13590
  CDS (1)..(1668): transl_table=11

SEQ ID NO: 26148 - protein, 555 aa, Yersinia pestis KIM; identical to SEQ ID NO: 13591

SEQ ID NO: 26149 - DNA, 1830 bp, Yersinia pestis KIM; identical to SEQ ID NO: 13592
  CDS (1)..(1830): transl_table=11

SEQ ID NO: 26150 - protein, 609 aa, Yersinia pestis KIM; identical to SEQ ID NO: 13593

SEQ ID NO: 26151 - DNA, 1608 bp, Streptococcus agalactiae 2603V/R; identical to SEQ ID NO: 13594
  CDS (1)..(1608): transl_table=11

SEQ ID NO: 26152 - protein, 535 aa, Streptococcus agalactiae 2603V/R; identical to SEQ ID NO: 13595

SEQ ID NO: 26153 - DNA, 1497 bp, Oceanobacillus iheyensis HTE831; identical to SEQ ID NO: 13596
  CDS (1)..(1497): transl_table=11

SEQ ID NO: 26154 - protein, 498 aa, Oceanobacillus iheyensis HTE831; identical to SEQ ID NO: 13597

SEQ ID NO: 26155 - DNA, 1752 bp, Oceanobacillus iheyensis HTE831; identical to SEQ ID NO: 13598
  CDS (1)..(1752): transl_table=11

SEQ ID NO: 26156 - protein, 583 aa, Oceanobacillus iheyensis HTE831; identical to SEQ ID NO: 13599

SEQ ID NO: 26157 - DNA, 1398 bp, Bifidobacterium longum NCC2705; identical to SEQ ID NO: 13600
  CDS (1)..(1398): transl_table=11

SEQ ID NO: 26158 - protein, 465 aa, Bifidobacterium longum NCC2705; identical to SEQ ID NO: 13601

SEQ ID NO: 26159 - DNA, 1818 bp, Shigella flexneri 2a str. 301; identical to SEQ ID NO: 13602
  CDS (1)..(1818): transl_table=11

SEQ ID NO: 26160 - protein, 605 aa, Shigella flexneri 2a str. 301; identical to SEQ ID NO: 13603

SEQ ID NO: 26161 - DNA, 1746 bp, Leptospira interrogans serovar Lai str. 56601; identical to SEQ ID NO: 13604
  CDS (1)..(1746): transl_table=11

SEQ ID NO: 26162 - protein, 581 aa, Leptospira interrogans serovar Lai str. 56601; identical to SEQ ID NO: 13605

SEQ ID NO: 26163 - DNA, 1839 bp, Corynebacterium efficiens YS-314; identical to SEQ ID NO: 13606
  CDS (1)..(1839): transl_table=11

SEQ ID NO: 26164 - protein, 612 aa, Corynebacterium efficiens YS-314; identical to SEQ ID NO: 13607

SEQ ID NO: 26165 - DNA, 1839 bp, Vibrio vulnificus CMCP6; identical to SEQ ID NO: 13608
  CDS (1)..(1839): transl_table=11

SEQ ID NO: 26166 - protein, 612 aa, Vibrio vulnificus CMCP6; identical to SEQ ID NO: 13609

SEQ ID NO: 26167 - DNA, 2064 bp, Vibrio vulnificus CMCP6; identical to SEQ ID NO: 13610
  CDS (1)..(2064): transl_table=11

SEQ ID NO: 26168 - protein, 687 aa, Vibrio vulnificus CMCP6; identical to SEQ ID NO: 13611

SEQ ID NO: 26169 - DNA, 1464 bp, Bradyrhizobium japonicum USDA 110; identical to SEQ ID NO: 13612
  CDS (1)..(1464)

SEQ ID NO: 26170 - protein, 487 aa, Bradyrhizobium japonicum USDA 110; identical to SEQ ID NO: 13613

SEQ ID NO: 26171 - DNA, 1698 bp, Bradyrhizobium japonicum USDA 110; identical to SEQ ID NO: 13614
  CDS (1)..(1698)

SEQ ID NO: 26172 - protein, 565 aa, Bradyrhizobium japonicum USDA 110; identical to SEQ ID NO: 13615

SEQ ID NO: 26173 - DNA, 1626 bp, Lactobacillus plantarum WCFS1; identical to SEQ ID NO: 13616
  CDS (1)..(1626): transl_table=11

SEQ ID NO: 26174 - protein, 541 aa, Lactobacillus plantarum WCFS1; identical to SEQ ID NO: 13617

SEQ ID NO: 26175 - DNA, 1827 bp, Vibrio parahaemolyticus RIMD 2210633; identical to SEQ ID NO: 13618
  CDS (1)..(1827): transl_table=11

SEQ ID NO: 26176 - protein, 608 aa, Vibrio parahaemolyticus RIMD 2210633; identical to SEQ ID NO: 13619

SEQ ID NO: 26177 - DNA, 1818 bp, Salmonella enterica subsp. enterica serovar Typhi Ty2; identical to SEQ ID NO: 13620
  CDS (1)..(1818): transl_table=11

SEQ ID NO: 26178 - protein, 605 aa, Salmonella enterica subsp. enterica serovar Typhi Ty2; identical to SEQ ID NO: 13621

SEQ ID NO: 26179 - DNA, 2079 bp, Bacteroides thetaiotaomicron VPI-5482; identical to SEQ ID NO: 13622
  CDS (1)..(2079): transl_table=11

SEQ ID NO: 26180 - protein, 692 aa, Bacteroides thetaiotaomicron VPI-5482; identical to SEQ ID NO: 13623

SEQ ID NO: 26181 - DNA, 1854 bp, Bacteroides thetaiotaomicron VPI-5482; identical to SEQ ID NO: 13624
  CDS (1)..(1854): transl_table=11

SEQ ID NO: 26182 - protein, 617 aa, Bacteroides thetaiotaomicron VPI-5482; identical to SEQ ID NO: 13625

SEQ ID NO: 26183 - DNA, 1767 bp, Enterococcus faecalis V583; identical to SEQ ID NO: 13626
  CDS (1)..(1767): transl_table=11

SEQ ID NO: 26184 - protein, 588 aa, Enterococcus faecalis V583; identical to SEQ ID NO: 13627

SEQ ID NO: 26185 - DNA, 1614 bp, Enterococcus faecalis V583; identical to SEQ ID NO: 13628
  CDS (1)..(1614): transl_table=11

SEQ ID NO: 26186 - protein, 537 aa, Enterococcus faecalis V583; identical to SEQ ID NO: 13629

SEQ ID NO: 26187 - DNA, 1674 bp, Enterococcus faecalis V583; identical to SEQ ID NO: 13630
  CDS (1)..(1674): transl_table=11

SEQ ID NO: 26188 - protein, 557 aa, Enterococcus faecalis V583; identical to SEQ ID NO: 13631

SEQ ID NO: 26189 - DNA, 1719 bp, Streptomyces avermitilis MA-4680; identical to SEQ ID NO: 13632
  CDS (1)..(1719)

SEQ ID NO: 26190 - protein, 572 aa, Streptomyces avermitilis MA-4680; identical to SEQ ID NO: 13633

SEQ ID NO: 26191 - DNA, 1752 bp, Streptomyces avermitilis MA-4680; identical to SEQ ID NO: 13634
  CDS (1)..(1752)

SEQ ID NO: 26192 - protein, 583 aa, Streptomyces avermitilis MA-4680; identical to SEQ ID NO: 13635

SEQ ID NO: 26193 - DNA, 1665 bp, Bacillus anthracis str. Ames; identical to SEQ ID NO: 13636
  CDS (1)..(1665): transl_table=11

SEQ ID NO: 26194 - protein, 554 aa, Bacillus anthracis str. Ames; identical to SEQ ID NO: 13637

SEQ ID NO: 26195 - DNA, 1761 bp, Bacillus anthracis str. Ames; identical to SEQ ID NO: 13638
  CDS (1)..(1761): transl_table=11

SEQ ID NO: 26196 - protein, 586 aa, Bacillus anthracis str. Ames; identical to SEQ ID NO: 13639

SEQ ID NO: 26197 - DNA, 1641 bp, Mycobacterium bovis AF2122/97; identical to SEQ ID NO: 13640
  CDS (1)..(1641): transl_table=11

SEQ ID NO: 26198 - protein, 546 aa, Mycobacterium bovis AF2122/97; identical to SEQ ID NO: 13641

SEQ ID NO: 26199 - DNA, 1761 bp, Rhodopirellula baltica SH 1; identical to SEQ ID NO: 13642
  CDS (1)..(1761): transl_table=11

SEQ ID NO: 26200 - protein, 586 aa, Rhodopirellula baltica SH 1; identical to SEQ ID NO: 13643

SEQ ID NO: 26201 - DNA, 3342 bp, Bordetella pertussis Tohama I; identical to SEQ ID NO: 13644
  CDS (1)..(3342): transl_table=11

SEQ ID NO: 26202 - protein, 1113 aa, Bordetella pertussis Tohama I; identical to SEQ ID NO: 13645

SEQ ID NO: 26203 - DNA, 3342 bp, Bordetella bronchiseptica RB50; identical to SEQ ID NO: 13646
  CDS (1)..(3342)

SEQ ID NO: 26204 - protein, 1113 aa, Bordetella bronchiseptica RB50; identical to SEQ ID NO: 13647

SEQ ID NO: 26205 - DNA, 1452 bp, Prochlorococcus marinus str. MIT 9313; identical to SEQ ID NO: 13648
  CDS (1)..(1452): transl_table=11

SEQ ID NO: 26206 - protein, 483 aa, Prochlorococcus marinus str. MIT 9313; identical to SEQ ID NO: 13649

SEQ ID NO: 26207 - DNA, 1407 bp, Synechococcus sp. WH 8102; identical to SEQ ID NO: 13650
  CDS (1)..(1407): transl_table=11

SEQ ID NO: 26208 - protein, 468 aa, Synechococcus sp. WH 8102; identical to SEQ ID NO: 13651

SEQ ID NO: 26209 - DNA, 1662 bp, Synechococcus sp. WH 8102; identical to SEQ ID NO: 13652
  CDS (1)..(1662): transl_table=11

SEQ ID NO: 26210 - protein, 553 aa, Synechococcus sp. WH 8102; identical to SEQ ID NO: 13653

SEQ ID NO: 26211 - DNA, 1863 bp, Gloeobacter violaceus PCC 7421; identical to SEQ ID NO: 13654
  CDS (1)..(1863): transl_table=11

SEQ ID NO: 26212 - protein, 620 aa, Gloeobacter violaceus PCC 7421; identical to SEQ ID NO: 13655

SEQ ID NO: 26213 - DNA, 1443 bp, Gloeobacter violaceus PCC 7421; identical to SEQ ID NO: 13656
  CDS (1)..(1443): transl_table=11

SEQ ID NO: 26214 - protein, 480 aa, Gloeobacter violaceus PCC 7421; identical to SEQ ID NO: 13657

SEQ ID NO: 26215 - DNA, 1635 bp, Vibrio vulnificus YJ016; identical to SEQ ID NO: 13658
  CDS (1)..(1635): transl_table=11

SEQ ID NO: 26216 - protein, 544 aa, Vibrio vulnificus YJ016; identical to SEQ ID NO: 13659

SEQ ID NO: 26217 - DNA, 3303 bp, Rhodopseudomonas palustris CGA009; identical to SEQ ID NO: 13660
  CDS (1)..(3303): transl_table=11

SEQ ID NO: 26218 - protein, 1100 aa, Rhodopseudomonas palustris CGA009; identical to SEQ ID NO: 13661

SEQ ID NO: 26219 - DNA, 1617 bp, Rhodopseudomonas palustris CGA009; identical to SEQ ID NO: 13662
  CDS (1)..(1617): transl_table=11

SEQ ID NO: 26220 - protein, 538 aa, Rhodopseudomonas palustris CGA009; identical to SEQ ID NO: 13663

SEQ ID NO: 26221 - DNA, 3336 bp, Geobacter sulfurreducens PCA; identical to SEQ ID NO: 13664
  CDS (1)..(3336): transl_table=11

SEQ ID NO: 26222 - protein, 1111 aa, Geobacter sulfurreducens PCA; identical to SEQ ID NO: 13665

SEQ ID NO: 26223 - DNA, 1335 bp, Mycobacterium avium subsp. paratuberculosis str. k10; identical to SEQ ID NO: 13666
  CDS (1)..(1335): transl_table=11

SEQ ID NO: 26224 - protein, 444 aa, Mycobacterium avium subsp. paratuberculosis str. k10; identical to SEQ ID NO: 13667

SEQ ID NO: 26225 - DNA, 1773 bp, Mycobacterium avium subsp. paratuberculosis str. k10; identical to SEQ ID NO: 13668
  CDS (1)..(1773): transl_table=11

SEQ ID NO: 26226 - protein, 590 aa, Mycobacterium avium subsp. paratuberculosis str. k10; identical to SEQ ID NO: 13669

SEQ ID NO: 26227 - DNA, 1725 bp, Lactobacillus johnsonii NCC 533; identical to SEQ ID NO: 13670
  CDS (1)..(1725): transl_table=11

SEQ ID NO: 26228 - protein, 574 aa, Lactobacillus johnsonii NCC 533; identical to SEQ ID NO: 13671

SEQ ID NO: 26229 - DNA, 1668 bp, Lactobacillus johnsonii NCC 533; identical to SEQ ID NO: 13672
  CDS (1)..(1668): transl_table=11

SEQ ID NO: 26230 - protein, 555 aa, Lactobacillus johnsonii NCC 533; identical to SEQ ID NO: 13673

SEQ ID NO: 26231 - DNA, 1665 bp, Bacillus cereus ATCC 10987; identical to SEQ ID NO: 13674
  CDS (1)..(1665): transl_table=11

SEQ ID NO: 26232 - protein, 554 aa, Bacillus cereus ATCC 10987; identical to SEQ ID NO: 13675

SEQ ID NO: 26233 - DNA, 1710 bp, Anopheles gambiae str. PEST; identical to SEQ ID NO: 13676
  CDS (1)..(1710)

SEQ ID NO: 26234 - protein, 569 aa, Anopheles gambiae str. PEST; identical to SEQ ID NO: 13677

SEQ ID NO: 26235 - DNA, 1800 bp, Anopheles gambiae str. PEST; identical to SEQ ID NO: 13678
  CDS (1)..(1800)

SEQ ID NO: 26236 - protein, 599 aa, Anopheles gambiae str. PEST; identical to SEQ ID NO: 13679

SEQ ID NO: 26237 - DNA, 1509 bp, Anopheles gambiae str. PEST; identical to SEQ ID NO: 13680
  CDS (1)..(1509)

SEQ ID NO: 26238 - protein, 502 aa, Anopheles gambiae str. PEST; identical to SEQ ID NO: 13681

SEQ ID NO: 26239 - DNA, 1716 bp, Gibberella zeae PH-1; identical to SEQ ID NO: 13682
  CDS (1)..(1716)

SEQ ID NO: 26240 - protein, 571 aa, Gibberella zeae PH-1; identical to SEQ ID NO: 13683

SEQ ID NO: 26241 - DNA, 1635 bp, Leptospira interrogans serovar Copenhageni str. Fiocruz L1-130; identical to SEQ ID NO: 13684
  CDS (1)..(1635): transl_table=11

SEQ ID NO: 26242 - protein, 544 aa, Leptospira interrogans serovar Copenhageni str. Fiocruz L1-130; identical to SEQ ID NO: 13685

SEQ ID NO: 26243 - DNA, 1251 bp, Thermus thermophilus HB27; identical to SEQ ID NO: 13686
  CDS (1)..(1251): transl_table=11

SEQ ID NO: 26244 - protein, 416 aa, Thermus thermophilus HB27 [sequence omitted]

SEQ ID NO: 26245 - DNA, 1662 bp, Listeria monocytogenes str. 4b F2365; identical to SEQ ID NO: 13688
  CDS (1)..(1662): transl_table=11

SEQ ID NO: 26246 - protein, 553 aa, Listeria monocytogenes str. 4b F2365; identical to SEQ ID NO: 13689

SEQ ID NO: 26247 - DNA, 1533 bp, Listeria monocytogenes str. 4b F2365; identical to SEQ ID NO: 13690
  CDS (1)..(1533): transl_table=11

SEQ ID NO: 26248 - protein, 510 aa, Listeria monocytogenes str. 4b F2365; identical to SEQ ID NO: 13691

SEQ ID NO: 26249 - DNA, 1761 bp, Bacillus thuringiensis serovar konkukian str. 97-27; identical to SEQ ID NO: 13692
  CDS (1)..(1761): transl_table=11

SEQ ID NO: 26250 - protein, 586 aa, Bacillus thuringiensis serovar konkukian str. 97-27; identical to SEQ ID NO: 13693

SEQ ID NO: 26251 - DNA, 1710 bp, Leifsonia xyli subsp. xyli str. CTCB07; identical to SEQ ID NO: 13694
  CDS (1)..(1710): transl_table=11

SEQ ID NO: 26252 - protein, 569 aa, Leifsonia xyli subsp. xyli str. CTCB07; identical to SEQ ID NO: 13695

SEQ ID NO: 26253 - DNA, 1683 bp, Bacillus licheniformis ATCC 14580; identical to SEQ ID NO: 13696
  CDS (1)..(1683): transl_table=11

SEQ ID NO: 26254 - protein, 560 aa, Bacillus licheniformis ATCC 14580; identical to SEQ ID NO: 13697

SEQ ID NO: 26255 - DNA, 1764 bp, Bacillus licheniformis ATCC 14580; identical to SEQ ID NO: 13698
  CDS (1)..(1764): transl_table=11

SEQ ID NO: 26256 - protein, 587 aa, Bacillus licheniformis ATCC 14580; identical to SEQ ID NO: 13699

SEQ ID NO: 26257 - DNA, 1620 bp, Methylococcus capsulatus str. Bath; identical to SEQ ID NO: 13700
  CDS (1)..(1620): transl_table=11

SEQ ID NO: 26258 - protein, 539 aa, Methylococcus capsulatus str. Bath; identical to SEQ ID NO: 13701

SEQ ID NO: 26259 - DNA, 1866 bp, Photobacterium profundum SS9; identical to SEQ ID NO: 13702
  CDS (1)..(1866): transl_table=11

SEQ ID NO: 26260 - protein, 621 aa, Photobacterium profundum SS9; identical to SEQ ID NO: 13703

SEQ ID NO: 26261 - DNA, 1656 bp, Thermus thermophilus HB8; identical to SEQ ID NO: 13704
  CDS (1)..(1656): transl_table=11

SEQ ID NO: 26262 - protein, 551 aa, Thermus thermophilus HB8; identical to SEQ ID NO: 13705

SEQ ID NO: 26263 - DNA, 1767 bp, Geobacillus kaustophilus HTA426; identical to SEQ ID NO: 13706
  CDS (1)..(1767): transl_table=11

SEQ ID NO: 26264 - protein, 588 aa, Geobacillus kaustophilus HTA426; identical to SEQ ID NO: 13707

SEQ ID NO: 26265 - DNA, 1542 bp, Geobacillus kaustophilus HTA426; identical to SEQ ID NO: 13708
  CDS (1)..(1542): transl_table=11

SEQ ID NO: 26266 - protein, 513 aa, Geobacillus kaustophilus HTA426; identical to SEQ ID NO: 13709

SEQ ID NO: 26267 - DNA, 4983 bp, Geobacillus kaustophilus HTA426; identical to SEQ ID NO: 13710
  CDS (1)..(4983): transl_table=11

SEQ ID NO: 26268 - protein, 1660 aa, Geobacillus kaustophilus HTA426; identical to SEQ ID NO: 13711

SEQ ID NO: 26269 - DNA, 1689 bp, Azoarcus sp. EbN1; identical to SEQ ID NO: 13712
  CDS (1)..(1689): transl_table=11

SEQ ID NO: 26270 - protein, 562 aa, Azoarcus sp. EbN1; identical to SEQ ID NO: 13713

SEQ ID NO: 26271 - DNA, 1770 bp, Bacillus clausii KSM-K16; identical to SEQ ID NO: 13714
  CDS (1)..(1770): transl_table=11

SEQ ID NO: 26272 - protein, 589 aa, Bacillus clausii KSM-K16; identical to SEQ ID NO: 13715

SEQ ID NO: 26273 - DNA, 2298 bp, Thermococcus kodakarensis KOD1; identical to SEQ ID NO: 13716
  CDS (1)..(2298): transl_table=11

SEQ ID NO: 26274 - protein, 765 aa, Thermococcus kodakarensis KOD1; identical to SEQ ID NO: 13717

SEQ ID NO: 26275 - DNA, 2724 bp, Xanthomonas oryzae pv. oryzae KACC10331; identical to SEQ ID NO: 13718
  CDS (1)..(2724): transl_table=11

SEQ ID NO: 26276 - protein, 907 aa, Xanthomonas oryzae pv. oryzae KACC10331; identical to SEQ ID NO: 13719

SEQ ID NO: 26277 - DNA, 1260 bp, Vibrio fischeri ES114; identical to SEQ ID NO: 13720
  CDS (1)..(1260): transl_table=11

SEQ ID NO: 26278 - protein, 419 aa, Vibrio fischeri ES114; identical to SEQ ID NO: 13721

SEQ ID NO: 26279 - DNA, 1815 bp, Corynebacterium glutamicum ATCC 13032; identical to SEQ ID NO: 13722
  CDS (1)..(1815): transl_table=11

SEQ ID NO: 26280 - protein, 604 aa, Corynebacterium glutamicum ATCC 13032; identical to SEQ ID NO: 13723

SEQ ID NO: 26281 - DNA, 3327 bp, Pseudomonas syringae pv. syringae B728a; identical to SEQ ID NO: 13724
  CDS (1)..(3327)

SEQ ID NO: 26282 - protein, 1108 aa, Pseudomonas syringae pv. syringae B728a; identical to SEQ ID NO: 13725

SEQ ID NO: 26283 - DNA, 1659 bp, Lactobacillus gasseri; identical to SEQ ID NO: 13726
  CDS (1)..(1659)

SEQ ID NO: 26284 - protein, 552 aa, Lactobacillus gasseri; identical to SEQ ID NO: 13727

SEQ ID NO: 26285 - DNA, 1467 bp, Nostoc punctiforme PCC 73102; identical to SEQ ID NO: 13728
  CDS (1)..(1467)

SEQ ID NO: 26286 - protein, 488 aa, Nostoc punctiforme PCC 73102; identical to SEQ ID NO: 13729

SEQ ID NO: 26287 - DNA, 1674 bp, Nostoc punctiforme PCC 73102; identical to SEQ ID NO: 13730
  CDS (1)..(1674)

SEQ ID NO: 26288 - protein, 557 aa, Nostoc punctiforme PCC 73102; identical to SEQ ID NO: 13731

SEQ ID NO: 26289 - DNA, 1266 bp, Bifidobacterium longum DJO10A; identical to SEQ ID NO: 13732
  CDS (1)..(1266)

SEQ ID NO: 26290 - protein, 421 aa, Bifidobacterium longum DJO10A; identical to SEQ ID NO: 13733

SEQ ID NO: 26291 - DNA, 3333 bp, Desulfovibrio desulfuricans G20; identical to SEQ ID NO: 13734
  CDS (1)..(3333)

SEQ ID NO: 26292 - protein, 1110 aa, Desulfovibrio desulfuricans G20; identical to SEQ ID NO: 13735

SEQ ID NO: 26293 - DNA, 1467 bp, Anabaena variabilis ATCC 29413; identical to SEQ ID NO: 13736
  CDS (1)..(1467)

SEQ ID NO: 26294 - protein, 488 aa, Anabaena variabilis ATCC 29413; identical to SEQ ID NO: 13737

SEQ ID NO: 26295 - DNA, 3366 bp, Ralstonia eutropha JMP134; identical to SEQ ID NO: 13738
  CDS (1)..(3366)

SEQ ID NO: 26296 - protein, 1121 aa, Ralstonia eutropha JMP134; identical to SEQ ID NO: 13739

SEQ ID NO: 26297 - DNA, 2586 bp, Rhodobacter sphaeroides 2.4.1; identical to SEQ ID NO: 13740
  CDS (1)..(2586)

SEQ ID NO: 26298 - protein, 861 aa, Rhodobacter sphaeroides 2.4.1; identical to SEQ ID NO: 13741

SEQ ID NO: 26299 - DNA, 3417 bp, Burkholderia cepacia R18194; identical to SEQ ID NO: 13742
  CDS (1)..(3417)

SEQ ID NO: 26300 - protein, 1138 aa, Burkholderia cepacia R18194; identical to SEQ ID NO: 13743

SEQ ID NO: 26301 - DNA, 1776 bp, Listeria monocytogenes str. 4b H7858; identical to SEQ ID NO: 13744
  CDS (1)..(1776): transl_table=11

SEQ ID NO: 26302 - protein, 591 aa, Listeria monocytogenes str. 4b H7858; identical to SEQ ID NO: 13745

SEQ ID NO: 26303 - DNA, 1533 bp, Listeria monocytogenes str. 1/2a F6854; identical to SEQ ID NO: 13746
  CDS (1)..(1533): transl_table=11

SEQ ID NO: 26304 - protein, 510 aa, Listeria monocytogenes str. 1/2a F6854; identical to SEQ ID NO: 13747

SEQ ID NO: 26305 - DNA, 1662 bp, Listeria monocytogenes str. 1/2a F6854; identical to SEQ ID NO: 13748
  CDS (1)..(1662): transl_table=11

SEQ ID NO: 26306 - protein, 553 aa, Listeria monocytogenes str. 1/2a F6854; identical to SEQ ID NO: 13749

SEQ ID NO: 26307 - DNA, 3342 bp, Pseudomonas fluorescens PfO-1; identical to SEQ ID NO: 13750
  CDS (1)..(3342)

SEQ ID NO: 26308 - protein, 1113 aa, Pseudomonas fluorescens PfO-1; identical to SEQ ID NO: 13751

SEQ ID NO: 26309 - DNA, 1629 bp, Rhodospirillum rubrum; identical to SEQ ID NO: 13752
  CDS (1)..(1629)

SEQ ID NO: 26310 - protein, 542 aa, Rhodospirillum rubrum; identical to SEQ ID NO: 13753

SEQ ID NO: 26311 - DNA, 3303 bp, Rhodospirillum rubrum; identical to SEQ ID NO: 13754
  CDS (1)..(3303)

SEQ ID NO: 26312 - protein, 1100 aa, Rhodospirillum rubrum; identical to SEQ ID NO: 13755

SEQ ID NO: 26313 - DNA, 3465 bp, Burkholderia fungorum LB400; identical to SEQ ID NO: 13756
  CDS (1)..(3465)

SEQ ID NO: 26314 - protein, 1154 aa, Burkholderia fungorum LB400; identical to SEQ ID NO: 13757

SEQ ID NO: 26315 - DNA, 1821 bp, Thermobifida fusca; identical to SEQ ID NO: 13758
  CDS (1)..(1821)

SEQ ID NO: 26316 - protein, 606 aa, Thermobifida fusca; identical to SEQ ID NO: 13759

SEQ ID NO: 26317 - DNA, 1563 bp, Microbulbifer degradans 2-40; identical to SEQ ID NO: 13760
  CDS (1)..(1563)

SEQ ID NO: 26318 - protein, 520 aa, Microbulbifer degradans 2-40; identical to SEQ ID NO: 13761

SEQ ID NO: 26319 - DNA, 1671 bp, Oenococcus oeni PSU-1; identical to SEQ ID NO: 13762
  CDS (1)..(1671)

SEQ ID NO: 26320 - protein, 556 aa, Oenococcus oeni PSU-1; identical to SEQ ID NO: 13763

SEQ ID NO: 26321 - DNA, 1482 bp, Trichodesmium erythraeum IMS101; identical to SEQ ID NO: 13764
  CDS (1)..(1482)

SEQ ID NO: 26322 - protein, 493 aa, Trichodesmium erythraeum IMS101; identical to SEQ ID NO: 13765

SEQ ID NO: 26323 - DNA, 3288 bp, Thiobacillus denitrificans ATCC 25259; identical to SEQ ID NO: 13766
  CDS (1)..(3288)

SEQ ID NO: 26324 - protein, 1095 aa, Thiobacillus denitrificans ATCC 25259; identical to SEQ ID NO: 13767

SEQ ID NO: 26325 - DNA, 1815 bp, Chloroflexus aurantiacus; identical to SEQ ID NO: 13768
  CDS (1)..(1815)

SEQ ID NO: 26326 - protein, 604 aa, Chloroflexus aurantiacus; identical to SEQ ID NO: 13769

SEQ ID NO: 26327 - DNA, 4140 bp, Chloroflexus aurantiacus; identical to SEQ ID NO: 13770
  CDS (1)..(4140)

SEQ ID NO: 26328 - protein, 1379 aa, Chloroflexus aurantiacus; identical to SEQ ID NO: 13771

SEQ ID NO: 26329 - DNA, 3363 bp, Chloroflexus aurantiacus; identical to SEQ ID NO: 13772
  CDS (1)..(3363)

SEQ ID NO: 26330 - protein, 1120 aa, Chloroflexus aurantiacus; identical to SEQ ID NO: 13773

SEQ ID NO: 26331 - DNA, 1803 bp, Lactococcus lactis subsp. cremoris SK11; identical to SEQ ID NO: 13774
  CDS (1)..(1803)

SEQ ID NO: 26332 - protein, 600 aa, Lactococcus lactis subsp. cremoris SK11; identical to SEQ ID NO: 13775

SEQ ID NO: 26333 - DNA, 1755 bp, Lactococcus lactis subsp. cremoris SK11; identical to SEQ ID NO: 13776
  CDS (1)..(1755)

SEQ ID NO: 26334 - protein, 584 aa, Lactococcus lactis subsp. cremoris SK11; identical to SEQ ID NO: 13777

SEQ ID NO: 26335 - DNA, 1695 bp, Lactobacillus casei ATCC 334; identical to SEQ ID NO: 13778
  CDS (1)..(1695)

SEQ ID NO: 26336 - protein, 564 aa, Lactobacillus casei ATCC 334; identical to SEQ ID NO: 13779

SEQ ID NO: 26337 - DNA, 1779 bp, Lactobacillus casei ATCC 334; identical to SEQ ID NO: 13780
  CDS (1)..(1779)

SEQ ID NO: 26338 - protein, 592 aa, Lactobacillus casei ATCC 334; identical to SEQ ID NO: 13781

SEQ ID NO: 26339 - DNA, 1668 bp, Lactobacillus casei ATCC 334; identical to SEQ ID NO: 13782
  CDS (1)..(1668)

SEQ ID NO: 26340 - protein, 555 aa, Lactobacillus casei ATCC 334; identical to SEQ ID NO: 13783

SEQ ID NO: 26341 - DNA, 570 bp, Lactobacillus delbrueckii subsp. bulgaricus ATCC BAA-365; identical to SEQ ID NO: 13784
  CDS (1)..(570)

SEQ ID NO: 26342 - protein, 189 aa, Lactobacillus delbrueckii subsp. bulgaricus ATCC BAA-365; identical to SEQ ID NO: 13785

SEQ ID NO: 26343 - DNA, 1827 bp, Deinococcus geothermalis DSM 11300; identical to SEQ ID NO: 13786
  CDS (1)..(1827): transl_table=11

SEQ ID NO: 26344 - protein, 608 aa, Deinococcus geothermalis DSM 11300; identical to SEQ ID NO: 13787

SEQ ID NO: 26345 - DNA, 1491 bp, Deinococcus geothermalis DSM 11300; identical to SEQ ID NO: 13788
  CDS (1)..(1491): transl_table=11

SEQ ID NO: 26346 - protein, 496 aa, Deinococcus geothermalis DSM 11300; identical to SEQ ID NO: 13789

SEQ ID NO: 26347 - DNA, 2097 bp, Deinococcus geothermalis DSM 11300; identical to SEQ ID NO: 13790
  CDS (1)..(2097): transl_table=11

SEQ ID NO: 26348 - protein, 698 aa, Deinococcus geothermalis DSM 11300; identical to SEQ ID NO: 13791

SEQ ID NO: 26349 - DNA, 1662 bp, Anaeromyxobacter dehalogenans 2CP-C; identical to SEQ ID NO: 13792
  CDS (1)..(1662): transl_table=11

SEQ ID NO: 26350 - protein, 553 aa, Anaeromyxobacter dehalogenans 2CP-C; identical to SEQ ID NO: 13793

SEQ ID NO: 26351 - DNA, 1638 bp, Anaeromyxobacter dehalogenans 2CP-C; identical to SEQ ID NO: 13794
  CDS (1)..(1638): transl_table=11

SEQ ID NO: 26352 - protein, 545 aa, Anaeromyxobacter dehalogenans 2CP-C; identical to SEQ ID NO: 13795

SEQ ID NO: 26353 - DNA, 1602 bp, Anaeromyxobacter dehalogenans 2CP-C; identical to SEQ ID NO: 13796
  CDS (1)..(1602): transl_table=11

SEQ ID NO: 26354 - protein, 533 aa, Anaeromyxobacter dehalogenans 2CP-C; identical to SEQ ID NO: 13797

SEQ ID NO: 26355 - DNA, 1188 bp, Streptococcus pneumoniae TIGR4; identical to SEQ ID NO: 13798
  CDS (1)..(1188)

SEQ ID NO: 26356 - protein, 395 aa, Streptococcus pneumoniae TIGR4; identical to SEQ ID NO: 13799

SEQ ID NO: 26357 - DNA, 1407 bp, Arthrobacter sp. FB24; identical to SEQ ID NO: 13800
  CDS (1)..(1407): transl_table=11

SEQ ID NO: 26358 - protein, 468 aa, Arthrobacter sp. FB24; identical to SEQ ID NO: 13801

SEQ ID NO: 26359 - DNA, 1968 bp, Arthrobacter sp. FB24; identical to SEQ ID NO: 13802
  CDS (1)..(1968): transl_table=11

SEQ ID NO: 26360 - protein, 655 aa, Arthrobacter sp. FB24; identical to SEQ ID NO: 13803

SEQ ID NO: 26361 - DNA, 1797 bp, Arthrobacter sp. FB24; identical to SEQ ID NO: 13804
  CDS (1)..(1797): transl_table=11

SEQ ID NO: 26362 - protein, 598 aa, Arthrobacter sp. FB24; identical to SEQ ID NO: 13805

SEQ ID NO: 26363 - DNA, 3327 bp, Azotobacter vinelandii AvOP; identical to SEQ ID NO: 13806
  CDS (1)..(3327): transl_table=11

SEQ ID NO: 26364 - protein, 1108 aa, Azotobacter vinelandii AvOP; identical to SEQ ID NO: 13807

SEQ ID NO: 26365 - DNA, 3414 bp, Burkholderia vietnamiensis G4; identical to SEQ ID NO: 13808
  CDS (1)..(3414): transl_table=11

SEQ ID NO: 26366 - protein, 1137 aa, Burkholderia vietnamiensis G4; identical to SEQ ID NO: 13809

SEQ ID NO: 26367 - DNA, 3414 bp, Burkholderia cenocepacia HI2424; identical to SEQ ID NO: 13810
  CDS (1)..(3414): transl_table=11

SEQ ID NO: 26368 - protein, 1137 aa, Burkholderia cenocepacia HI2424; identical to SEQ ID NO: 13811

SEQ ID NO: 26369 - DNA, 1614 bp, Chromohalobacter salexigens DSM 3043; identical to SEQ ID NO: 13812
  CDS (1)..(1614): transl_table=11

SEQ ID NO: 26370 - protein, 537 aa, Chromohalobacter salexigens DSM 3043; identical to SEQ ID NO: 13813

SEQ ID NO: 26371 - DNA, 3396 bp, Burkholderia pseudomallei S13; identical to SEQ ID NO: 13814
  CDS (1)..(3396)

SEQ ID NO: 26372 - protein, 1131 aa, Burkholderia pseudomallei S13; identical to SEQ ID NO: 13815

SEQ ID NO: 26373 - DNA, 1728 bp, Clostridium thermocellum ATCC 27405; identical to SEQ ID NO: 13816
  CDS (1)..(1728): transl_table=11

SEQ ID NO: 26374 - protein, 575 aa, Clostridium thermocellum ATCC 27405; identical to SEQ ID NO: 13817

SEQ ID NO: 26375 - DNA, 1461 bp, Crocosphaera watsonii WH 8501; identical to SEQ ID NO: 13818
  CDS (1)..(1461): transl_table=11

SEQ ID NO: 26376 - protein, 486 aa, Crocosphaera watsonii WH 8501; identical to SEQ ID NO: 13819

SEQ ID NO: 26377 - DNA, 3318 bp, Chlorobium phaeobacteroides BS1; identical to SEQ ID NO: 13820
  CDS (1)..(3318): transl_table=11

SEQ ID NO: 26378 - protein, 1105 aa, Chlorobium phaeobacteroides BS1; identical to SEQ ID NO: 13821

SEQ ID NO: 26379 - DNA, 3339 bp, Geobacter metallireducens GS-15; identical to SEQ ID NO: 13822
  CDS (1)..(3339): transl_table=11

SEQ ID NO: 26380 - protein, 1112 aa, Geobacter metallireducens GS-15; identical to SEQ ID NO: 13823

SEQ ID NO: 26381 - DNA, 1785 bp, Exiguobacterium sp. 255-15; identical to SEQ ID NO: 13824
  CDS (1)..(1785): transl_table=11

SEQ ID NO: 26382 - protein, 594 aa, Exiguobacterium sp. 255-15; identical to SEQ ID NO: 13825

SEQ ID NO: 26383 - DNA, 1674 bp, Exiguobacterium sp. 255-15; identical to SEQ ID NO: 13826
  CDS (1)..(1674): transl_table=11

SEQ ID NO: 26384 - protein, 557 aa, Exiguobacterium sp. 255-15; identical to SEQ ID NO: 13827

SEQ ID NO: 26385 - DNA, 1611 bp, Exiguobacterium sp. 255-15; identical to SEQ ID NO: 13828
  CDS (1)..(1611): transl_table=11

SEQ ID NO: 26386 - protein, 536 aa, Exiguobacterium sp. 255-15; identical to SEQ ID NO: 13829

SEQ ID NO: 26387 - DNA, 1788 bp, Exiguobacterium sp. 255-15; identical to SEQ ID NO: 13830
  CDS (1)..(1788): transl_table=11

SEQ ID NO: 26388 - protein, 595 aa, Exiguobacterium sp. 255-15; identical to SEQ ID NO: 13831

SEQ ID NO: 26389 - DNA, 1803 bp, Frankia sp. CcI3; identical to SEQ ID NO: 13832
  CDS (1)..(1803): transl_table=11

SEQ ID NO: 26390 - protein, 600 aa, Frankia sp. CcI3; identical to SEQ ID NO: 13833

SEQ ID NO: 26391 - DNA, 3582 bp, Desulfitobacterium hafniense DCB-2; identical to SEQ ID NO: 13834
  CDS (1)..(3582): transl_table=11

SEQ ID NO: 26392 - protein, 1193 aa, Desulfitobacterium hafniense DCB-2; identical to SEQ ID NO: 13835

SEQ ID NO: 26393 - DNA, 1719 bp, Frankia sp. EAN1pec; identical to SEQ ID NO: 13836
  CDS (1)..(1719): transl_table=11

SEQ ID NO: 26394 - protein, 572 aa, Frankia sp. EAN1pec; identical to SEQ ID NO: 13837

SEQ ID NO: 26395 - DNA, 1761 bp, Moorella thermoacetica ATCC 39073; identical to SEQ ID NO: 13838
  CDS (1)..(1761): transl_table=11

SEQ ID NO: 26396 - protein, 586 aa, Moorella thermoacetica ATCC 39073; identical to SEQ ID NO: 13839

SEQ ID NO: 26397 - DNA, 1623 bp, Shewanella baltica OS155; identical to SEQ ID NO: 13840
  CDS (1)..(1623): transl_table=11

SEQ ID NO: 26398 - protein, 540 aa, Shewanella baltica OS155; identical to SEQ ID NO: 13841

SEQ ID NO: 26399 - DNA, 1635 bp, Shewanella amazonensis SB2B; identical to SEQ ID NO: 13842
  CDS (1)..(1635): transl_table=11

SEQ ID NO: 26400 - protein, 544 aa, Shewanella amazonensis SB2B; identical to SEQ ID NO: 13843

SEQ ID NO: 26401 - DNA, 3297 bp, Pelodictyon phaeoclathratiforme BU-1; identical to SEQ ID NO: 13844
  CDS (1)..(3297): transl_table=11

SEQ ID NO: 26402 - protein, 1098 aa, Pelodictyon phaeoclathratiforme BU-1; identical to SEQ ID NO: 13845

SEQ ID NO: 26403 - DNA, 3414 bp, Prosthecochloris aestuarii DSM 271; identical to SEQ ID NO: 13846
  CDS (1)..(3414): transl_table=11

SEQ ID NO: 26404 - protein, 1137 aa, Prosthecochloris aestuarii DSM 271; identical to SEQ ID NO: 13847

SEQ ID NO: 26405 - DNA, 1593 bp, Rubrobacter xylanophilus DSM 9941; identical to SEQ ID NO: 13848
  CDS (1)..(1593): transl_table=11

SEQ ID NO: 26406 - protein, 530 aa, Rubrobacter xylanophilus DSM 9941; identical to SEQ ID NO: 13849

SEQ ID NO: 26407 - DNA, 5328 bp, Rubrobacter xylanophilus DSM 9941; identical to SEQ ID NO: 13850
  CDS (1)..(5328): transl_table=11

SEQ ID NO: 26408 - protein, 1775 aa, Rubrobacter xylanophilus DSM 9941; identical to SEQ ID NO: 13851

SEQ ID NO: 26409 - DNA, 1755 bp, Mesorhizobium sp. BNC1; identical to SEQ ID NO: 13852
  CDS (1)..(1755): transl_table=11

SEQ ID NO: 26410 - protein, 584 aa, Mesorhizobium sp. BNC1; identical to SEQ ID NO: 13853

SEQ ID NO: 26411 - DNA, 3348 bp, Mesorhizobium sp. BNC1; identical to SEQ ID NO: 13854
  CDS (1)..(3348): transl_table=11

SEQ ID NO: 26412 - protein, 1115 aa, Mesorhizobium sp. BNC1; identical to SEQ ID NO: 13855

SEQ ID NO: 26413 - DNA, 1653 bp, Silicibacter sp. TM1040; identical to SEQ ID NO: 13856
  CDS (1)..(1653): transl_table=11

SEQ ID NO: 26414 - protein, 550 aa, Silicibacter sp. TM1040; identical to SEQ ID NO: 13857

SEQ ID NO: 26415 - DNA, 3267 bp, Nitrobacter hamburgensis X14; identical to SEQ ID NO: 13858
  CDS (1)..(3267): transl_table=11

SEQ ID NO: 26416 - protein, 1088 aa, Nitrobacter hamburgensis X14; identical to SEQ ID NO: 13859

SEQ ID NO: 26417 - DNA, 1926 bp, Shewanella denitrificans OS-217; identical to SEQ ID NO: 13860
  CDS (1)..(1926): transl_table=11

SEQ ID NO: 26418 - protein, 641 aa, Shewanella denitrificans OS-217; identical to SEQ ID NO: 13861

SEQ ID NO: 26419 - DNA, 1419 bp, Thermotoga neapolitana; identical to SEQ ID NO: 13862
  CDS (1)..(1419): transl_table=11

SEQ ID NO: 26420 - protein, 472 aa, Thermotoga neapolitana; identical to SEQ ID NO: 13863

SEQ ID NO: 26421 - DNA, 1701 bp, Bacteroides thetaiotaomicron; identical to SEQ ID NO: 13864
  CDS (1)..(1701): transl_table=11

SEQ ID NO: 26422 - protein, 566 aa, Bacteroides thetaiotaomicron; identical to SEQ ID NO: 13865

SEQ ID NO: 26423 - DNA, 3906 bp, Alicyclobacillus acidocaldarius; identical to SEQ ID NO: 13866
  CDS (1)..(3906): transl_table=11

SEQ ID NO: 26424 - protein, 1301 aa, Alicyclobacillus acidocaldarius; identical to SEQ ID NO: 13867

SEQ ID NO: 26425 - DNA, 1797 bp, Klebsiella oxytoca; identical to SEQ ID NO: 13868
  CDS (1)..(1797): transl_table=11

SEQ ID NO: 26426 - protein, 598 aa, Klebsiella oxytoca; identical to SEQ ID NO: 13869

SEQ ID NO: 26427 - DNA, 1581 bp, Bacillus sp; identical to SEQ ID NO: 13870
  CDS (1)..(1581): transl_table=11

SEQ ID NO: 26428 - protein, 526 aa, Bacillus sp; identical to SEQ ID NO: 13871

SEQ ID NO: 26429 - DNA, 1761 bp, Anoxybacillus flavithermus; identical to SEQ ID NO: 13872
  CDS (1)..(1761): transl_table=11

SEQ ID NO: 26430 - protein, 586 aa, Anoxybacillus flavithermus; identical to SEQ ID NO: 13873

SEQ ID NO: 26431 - DNA, 1749 bp, Thermoactinomyces thalpophilus; identical to SEQ ID NO: 13874
  CDS (1)..(1749): transl_table=11

SEQ ID NO: 26432 - protein, 582 aa, Thermoactinomyces thalpophilus; identical to SEQ ID NO: 13875

SEQ ID NO: 26433 - DNA, 1332 bp, Anaerobranca gottschalkii; identical to SEQ ID NO: 13876
  CDS (1)..(1332): transl_table=11

SEQ ID NO: 26434 - protein, 443 aa, Anaerobranca gottschalkii; identical to SEQ ID NO: 13877

SEQ ID NO: 26435 - DNA, 1740 bp, Aedes albopictus; identical to SEQ ID NO: 13878
  CDS (1)..(1740)

SEQ ID NO: 26436 - protein, 579 aa, Aedes albopictus; identical to SEQ ID NO: 13879

SEQ ID NO: 26437 - DNA, 1170 bp, Aeromonas hydrophila; identical to SEQ ID NO: 13880
  misc_feature (866)..(866): n is a, c, g, or t
  CDS (1)..(1170): transl_table=11

SEQ ID NO: 26438 - protein, 389 aa, Aeromonas hydrophila; identical to SEQ ID NO: 13881
  misc_feature (289)..(289): Xaa can be any naturally occuring amino acid

SEQ ID NO: 26439 - DNA, 1449 bp, Thermoactinomyces vulgaris; identical to SEQ ID NO: 13882
  CDS (1)..(1449): transl_table=11

SEQ ID NO: 26440 - protein, 482 aa, Thermoactinomyces vulgaris; identical to SEQ ID NO: 13883

SEQ ID NO: 26441 - DNA, 1581 bp, Xanthomonas campestris; identical to SEQ ID NO: 13884
  CDS (1)..(1581): transl_table=11

SEQ ID NO: 26442 - protein, 526 aa, Xanthomonas campestris; identical to SEQ ID NO: 13885

SEQ ID NO: 26443 - DNA, 3309 bp, Rhodobacter sphaeroides f; identical to SEQ ID NO: 13886
  CDS (1)..(3309): transl_table=11

SEQ ID NO: 26444 - protein, 1102 aa, Rhodobacter sphaeroides f; identical to SEQ ID NO: 13887

SEQ ID NO: 26445 - DNA, 1548 bp, Ostreococcus tauri; identical to SEQ ID NO: 13888
  CDS (1)..(1548)

SEQ ID NO: 26446 - protein, 515 aa, Ostreococcus tauri; identical to SEQ ID NO: 13889

SEQ ID NO: 26447 - DNA, 1554 bp, uncultured bacterium; identical to SEQ ID NO: 13890
  CDS (1)..(1554)

SEQ ID NO: 26448 - protein, 517 aa, uncultured bacterium; identical to SEQ ID NO: 13891

SEQ ID NO: 26449 - DNA, 2628 bp, Chlamydomonas reinhardtii; identical to SEQ ID NO: 13892
  CDS (1)..(2628)

SEQ ID NO: 26450 - protein, 875 aa, Chlamydomonas reinhardtii; identical to SEQ ID NO: 13893

SEQ ID NO: 26451 - DNA, 1962 bp, Paenibacillus sp; identical to SEQ ID NO: 13894
  CDS (1)..(1962): transl_table=11

SEQ ID NO: 26452 - protein, 653 aa, Paenibacillus sp; identical to SEQ ID NO: 13895

SEQ ID NO: 26453 - DNA, 1548 bp, Halothermothrix orenii; identical to SEQ ID NO: 13896
  CDS (1)..(1548): transl_table=11

SEQ ID NO: 26454 - protein, 515 aa, Halothermothrix orenii; identical to SEQ ID NO: 13897

SEQ ID NO: 26455 - DNA, 1533 bp, Paenibacillus sp; identical to SEQ ID NO: 13898
  CDS (1)..(1533): transl_table=11

SEQ ID NO: 26456 - protein, 510 aa, Paenibacillus sp; identical to SEQ ID NO: 13899

SEQ ID NO: 26457 - DNA, 1767 bp, Bacillus stearothermophilus; identical to SEQ ID NO: 13900
  CDS (1)..(1767): transl_table=11

SEQ ID NO: 26458 - protein, 588 aa, Bacillus stearothermophilus; identical to SEQ ID NO: 13901

SEQ ID NO: 26459 - DNA, 6057 bp, Bacillus stearothermophilus; identical to SEQ ID NO: 13902
  CDS (1)..(6057): transl_table=11

SEQ ID NO: 26460 - protein, 2018 aa, Bacillus stearothermophilus; identical to SEQ ID NO: 13903

SEQ ID NO: 26461 - DNA, 1983 bp, Thermococcus sp; identical to SEQ ID NO: 13904
  CDS (1)..(1983): transl_table=11

SEQ ID NO: 26462 - protein, 660 aa, Thermococcus sp; identical to SEQ ID NO: 13905

SEQ ID NO: 26463 - DNA, 2181 bp, Thermococcus sp; identical to SEQ ID NO: 13906
  CDS (1)..(2181)

SEQ ID NO: 26464 - protein, 726 aa, Thermococcus sp; identical to SEQ ID NO: 13907

SEQ ID NO: 26465 - DNA, 2220 bp, Thermococcus sp; identical to SEQ ID NO: 13908
  CDS (1)..(2220): transl_table=11

SEQ ID NO: 26466 - protein, 739 aa, Thermococcus sp; identical to SEQ ID NO: 13909

SEQ ID NO: 26467 - DNA, 1737 bp, Alicyclobacillus acidocaldarius; identical to SEQ ID NO: 13910
  CDS (1)..(1737): transl_table=11

SEQ ID NO: 26468 - protein, 578 aa, Alicyclobacillus acidocaldarius; identical to SEQ ID NO: 13911

SEQ ID NO: 26469 - DNA, 1548 bp, Paenibacillus polymyxa; identical to SEQ ID NO: 13912
  CDS (1)..(1548): transl_table=11

SEQ ID NO: 26470 - protein, 515 aa, Paenibacillus polymyxa; identical to SEQ ID NO: 13913

SEQ ID NO: 26471 - DNA, 1689 bp, Dictyoglomus thermophilum; identical to SEQ ID NO: 13914
  CDS (1)..(1689): transl_table=11

SEQ ID NO: 26472 - protein, 562 aa, Dictyoglomus thermophilum; identical to SEQ ID NO: 13915

SEQ ID NO: 26473 - DNA, 1497 bp, Dictyoglomus thermophilum; identical to SEQ ID NO: 13916
  CDS (1)..(1497): transl_table=11

SEQ ID NO: 26474 - protein, 498 aa, Dictyoglomus thermophilum; identical to SEQ ID NO: 13917

SEQ ID NO: 26475 - DNA, 1242 bp, Triticum aestivum; identical to SEQ ID NO: 13918
  CDS (1)..(1242)

SEQ ID NO: 26476 - protein, 413 aa, Triticum aestivum; identical to SEQ ID NO: 13919

SEQ ID NO: 26477 - DNA, 1761 bp, Bacillus acidopullulyticus; identical to SEQ ID NO: 13920
  CDS (1)..(1761): transl_table=11

SEQ ID NO: 26478 - protein, 586 aa, Bacillus acidopullulyticus; identical to SEQ ID NO: 13921

SEQ ID NO: 26479 - DNA, 1563 bp, Bacillus megaterium; identical to SEQ ID NO: 13922
  CDS (1)..(1563): transl_table=11

SEQ ID NO: 26480 - protein, 520 aa, Bacillus megaterium; identical to SEQ ID NO: 13923

SEQ ID NO: 26481 - DNA, 4428 bp, Thermoanaerobacter thermohydrosulfuricus; identical to SEQ ID NO: 13924
  CDS (1)..(4428): transl_table=11

SEQ ID NO: 26482 - protein, 1475 aa, Thermoanaerobacter thermohydrosulfuricus; identical to SEQ ID NO: 13925

SEQ ID NO: 26483 - DNA, 1776 bp, Bacillus sphaericus; identical to SEQ ID NO: 13926
  CDS (1)..(1776): transl_table=11

SEQ ID NO: 26484 - protein, 591 aa, Bacillus sphaericus; identical to SEQ ID NO: 13927

SEQ ID NO: 26485 - DNA, 1725 bp, Thermoanaerobacter ethanolicus; identical to SEQ ID NO: 13928
  CDS (1)..(1725): transl_table=11

SEQ ID NO: 26486 - protein, 574 aa, Thermoanaerobacter ethanolicus; identical to SEQ ID NO: 13929

SEQ ID NO: 26487 - DNA, 1761 bp, Drosophila virilis; identical to SEQ ID NO: 13930
  CDS (1)..(1761)

SEQ ID NO: 26488 - protein, 586 aa, Drosophila virilis; identical to SEQ ID NO: 13931

SEQ ID NO: 26489 - DNA, 1329 bp, Thermotoga neapolitana; identical to SEQ ID NO: 13932
  CDS (1)..(1329): transl_table=11

SEQ ID NO: 26490 - protein, 442 aa, Thermotoga neapolitana; identical to SEQ ID NO: 13933

SEQ ID NO: 26491 - DNA, 2001 bp, Thermoactinomyces vulgaris; identical to SEQ ID NO: 13934
  CDS (1)..(2001): transl_table=11

SEQ ID NO: 26492 - protein, 666 aa, Thermoactinomyces vulgaris; identical to SEQ ID NO: 13935

SEQ ID NO: 26493 - DNA, 1758 bp, Thermoactinomyces vulgaris; identical to SEQ ID NO: 13936
  CDS (1)..(1758): transl_table=11

SEQ ID NO: 26494 - protein, 585 aa, Thermoactinomyces vulgaris; identical to SEQ ID NO: 13937

SEQ ID NO: 26495 - DNA, 24 bp, Artificial sequence
  Primer sequence
atgatgttaaatgcatggcacctg

SEQ ID NO: 26496 - DNA, 24 bp, Artificial sequence
  Primer sequence
ttagttcatccataccgtagccga

SEQ ID NO: 26497 - protein, 917 aa, Artificial sequence; identical to SEQ ID NO: 13940
  Consensus
  Variant (2)..(2): Xaa in position 2 is any amino acid
  Variant (6)..(6): Xaa in position 6 is any amino acid
  Variant (15)..(16): Xaa in position 15 to 16 is any amino acid
  Variant (18)..(18): Xaa in position 18 is any amino acid
  Variant (22)..(22): Xaa in position 22 is any amino acid
  Variant (25)..(25): Xaa in position 25 is any amino acid
  Variant (26)..(85): Xaa in position 26 to 85 is any or no amino acid
  Variant (89)..(89): Xaa in position 89 is any amino acid
  Variant (93)..(93): Xaa in position 93 is any amino acid
  Variant (99)..(99): Xaa in position 99 is any amino acid
  Variant (101)..(108): Xaa in position 101 to 108 is any or no amino acid
  Variant (112)..(112): Xaa in position 112 is any amino acid
  Variant (117)..(117): Xaa in position 117 is any amino acid
  Variant (121)..(121): Xaa in position 121 is any amino acid
  Variant (124)..(125): Xaa in position 124 to 125 is any amino acid
  Variant (126)..(152): Xaa in position 126 to 152 is any or no amino acid
  Variant (158)..(158): Xaa in position 158 is any amino acid
  Variant (161)..(162): Xaa in position 161 to 162 is any amino acid
  Variant (166)..(166): Xaa in position 166 is any amino acid
  Variant (171)..(171): Xaa in position 171 is any amino acid
  Variant (174)..(175): Xaa in position 174 to 175 is any amino acid
  Variant (178)..(179): Xaa in position 178 to 179 is any amino acid
  Variant (182)..(182): Xaa in position 182 is any amino acid
  Variant (186)..(189): Xaa in position 186 to 189 is any or no amino acid
  Variant (195)..(195): Xaa in position 195 is any amino acid
  Variant (197)..(197): Xaa in position 197 is any amino acid
  Variant (203)..(203): Xaa in position 203 is any amino acid
  Variant (205)..(205): Xaa in position 205 is any amino acid
  Variant (208)..(208): Xaa in position 208 is any amino acid
  Variant (211)..(214): Xaa in position 211 to 214 is any amino acid
  Variant (215)..(256): Xaa in position 215 to 256 is any or no amino acid
  Variant (258)..(258): Xaa in position 258 is any or no amino acid
  Variant (266)..(266): Xaa in position 266 is any or no amino acid
  Variant (268)..(269): Xaa in position 268 to 269 is any amino acid
  Variant (270)..(394): Xaa in position 270 to 394 is any or no amino acid
  Variant (397)..(399): Xaa in position 397 to 399 is any or no amino acid
  Variant (401)..(402): Xaa in position 401 to 402 is any amino acid
  Variant (403)..(404): Xaa in position 403 to 404 is any or no amino acid
  Variant (413)..(413): Xaa in position 413 is any amino acid
  Variant (415)..(417): Xaa in position 415 to 417 is any amino acid
  Variant (420)..(420): Xaa in position 420 is any amino acid
  Variant (421)..(426): Xaa in position 421 to 426 is any or no amino acid
  Variant (433)..(433): Xaa in position 433 is any amino acid
  Variant (434)..(434): Xaa in position 434 is any or no amino acid
  Variant (436)..(441): Xaa in position 436 to 441 is any or no amino acid
  Variant (449)..(449): Xaa in position 449 is any amino acid
  Variant (451)..(452): Xaa in position 451 to 452 is any amino acid
  Variant (454)..(458): Xaa in position 454 to 458 is any amino acid
  Variant (459)..(487): Xaa in position 459 to 487 is any or no amino acid
  Variant (489)..(490): Xaa in position 489 to 490 is any amino acid
  Variant (492)..(495): Xaa in position 492 to 495 is any amino acid
  Variant (498)..(498): Xaa in position 498 is any amino acid
  Variant (504)..(509): Xaa in position 504 to 509 is any amino acid
  Variant (510)..(529): Xaa in position 510 to 529 is any or no amino acid
  Variant (532)..(534): Xaa in position 532 to 534 is any amino acid
  Variant (535)..(538): Xaa in position 535 to 538 is any or no amino acid
  Variant (540)..(544): Xaa in position 540 to 544 is any amino acid
  Variant (547)..(554): Xaa in position 547 to 554 is any amino acid
  Variant (555)..(592): Xaa in position 555 to 592 is any or no amino acid
  Variant (594)..(607): Xaa in position 594 to 607 is any amino acid
  Variant (608)..(611): Xaa in position 608 to 611 is any or no amino acid
  Variant (613)..(613): Xaa in position 613 is any amino acid
  Variant (617)..(618): Xaa in position 617 to 618 is any amino acid
  Variant (620)..(620): Xaa in position 620 is any amino acid
  Variant (623)..(623): Xaa in position 623 is any amino acid
  Variant (625)..(627): Xaa in position 625 to 627 is any amino acid
  Variant (628)..(667): Xaa in position 628 to 667 is any or no amino acid
  Variant (672)..(674): Xaa in position 672 to 674 is any amino acid
  Variant (684)..(684): Xaa in position 684 is any amino acid
  Variant (694)..(697): Xaa in position 694 to 697 is any amino acid
  Variant (698)..(737): Xaa in position 698 to 737 is any or no amino acid
  Variant (739)..(739): Xaa in position 739 is any amino acid
  Variant (740)..(740): Xaa in position 740 is any or no amino acid
  Variant (742)..(742): Xaa in position 742 is any or no amino acid
  Variant (745)..(745): Xaa in position 745 is any or no amino acid
  Variant (747)..(750): Xaa in position 747 to 750 is any amino acid
  Variant (752)..(797): Xaa in position 752 to 797 is any or no amino acid
  Variant (801)..(801): Xaa in position 801 is any amino acid
  Variant (803)..(803): Xaa in position 803 is any amino acid
  Variant (805)..(805): Xaa in position 805 is any amino acid
  Variant (808)..(808): Xaa in position 808 is any amino acid
  Variant (812)..(814): Xaa in position 812 to 814 is any amino acid
  Variant (817)..(817): Xaa in position 817 is any amino acid
  Variant (818)..(818): Xaa in position 818 is any or no amino acid
  Variant (820)..(827): Xaa in position 820 to 827 is any amino acid
  Variant (828)..(840): Xaa in position 828 to 840 is any or no amino acid
  Variant (845)..(845): Xaa in position 845 is any amino acid
  Variant (847)..(850): Xaa in position 847 to 850 is any amino acid
  Variant (852)..(852): Xaa in position 852 is any amino acid
  Variant (857)..(857): Xaa in position 857 is any amino acid
  Variant (859)..(864): Xaa in position 859 to 864 is any amino acid
  Variant (865)..(886): Xaa in position 865 to 886 is any or no amino acid
  Variant (888)..(898): Xaa in position 888 to 898 is any amino acid
  Variant (899)..(909): Xaa in position 899 to 909 is any or no amino acid
  Variant (911)..(915): Xaa in position 911 to 915 is any amino acid
  Variant (916)..(916): Xaa in position 916 is any or no amino acid

SEQ ID NO: 26498 - protein, 8 aa, Artificial sequence
  Consensus
  Variant (2)..(2): Xaa in position 2 is Glu or Gln
  Variant (3)..(3): Xaa in position 3 is Ile, Leu or Val
  Variant (4)..(7): Xaa in position 4 to 7 is any amino acid
YXXXXXXF

SEQ ID NO: 26499 - protein, 72 aa, Artificial sequence; identical to SEQ ID NO: 13942
  Consensus
  Variant (2)..(12): Xaa in position 2 to 12 is any amino acid
  Variant (14)..(16): Xaa in position 14 to 16 is any amino acid
  Variant (17)..(17): Xaa in position 17 is Phe, Ile, Leu, Met or Val
  Variant (18)..(18): Xaa in position 18 is Trp or Tyr
  Variant (19)..(19): Xaa in position 19 is Phe, Ile, Leu, Met or Val
  Variant (20)..(20): Xaa in position 20 is any amino acid
  Variant (22)..(30): Xaa in position 22 to 30 is any amino acid
  Variant (31)..(31): Xaa in position 31 is any or no amino acid
  Variant (33)..(35): Xaa in position 33 to 35 is any amino acid
  Variant (36)..(36): Xaa in position 36 is Asp, Glu, Asn or Thr
  Variant (37)..(39): Xaa in position 37 to 39 is any amino acid
  Variant (40)..(40): Xaa in position 40 is Phe, Ile, Leu or Val
  Variant (41)..(44): Xaa in position 41 to 44 is any amino acid
  Variant (46)..(52): Xaa in position 46 to 52 is any amino acid
  Variant (53)..(53): Xaa in position 53 is Phe, Leu, Met or Val
  Variant (54)..(61): Xaa in position 54 to 61 is any amino acid
  Variant (62)..(62): Xaa in position 62 is Phe, Ile, Leu, Met or Val
  Variant (63)..(63): Xaa in position 63 is any amino acid
  Variant (64)..(64): Xaa in position 64 is Ile, Leu or Val
  Variant (65)..(66): Xaa in position 65 to 66 is any amino acid
  Variant (67)..(67): Xaa in position 67 is Asp or Glu
  Variant (68)..(71): Xaa in position 68 to 71 is any amino acid

SEQ ID NO: 26500 - protein, 14 aa, Artificial sequence
  Consensus
  Variant (2)..(6): Xaa in position 2 to 6 is any amino acid
  Variant (7)..(8): Xaa in position 7 to 8 is any or no amino acid
  Variant (10)..(10): Xaa in position 10 is Ala or Gly
  Variant (11)..(11): Xaa in position 11 is any amino acid
  Variant (13)..(13): Xaa in position 13 is Phe, Ile, Leu, Met or Val
WXXXXXXXDXXRXD

SEQ ID NO: 26501 - protein, 12 aa, Artificial sequence
  Consensus
  Variant (2)..(2): Xaa in position 2 is any amino acid
  Variant (3)..(3): Xaa in position 3 is Ala, Ile, Pro or Val
  Variant (4)..(5): Xaa in position 4 to 5 is any amino acid
  Variant (7)..(7): Xaa in position 7 is any amino acid
  Variant (9)..(9): Xaa in position 9 is Asp, Glu, Gly, Asn, Gln, Ser or Thr
  Variant (11)..(11): Xaa in position 11 is any amino acid
GXXXXYXGXEXG

SEQ ID NO: 26502 - DNA, 966 bp, Escherichia coli K12
  CDS (1)..(966): transl_table=11
atgagtaaacccattgtgatggaacgcggtgttaaataccgcgatgccgataagatggcccttatcccggttaaaaacgtggcaacagagcgcgaagccctgctgcgcaagccggaatggatgaaaatcaagcttccagcggactctacacgtatccagggcatcaaagccgcaatgcgcaaaaatggcctgcattctgtctgcgaggaagcctcctgccctaacctggcggaatgcttcaaccacggcacagcaacgtttatgatcctcggcgctatttgtacccgccgttgtccgttctgtgatgttgcccacggtcgcccggtagctcctgatgccaatgaaccagtgaaactggcgcagaccattgccgatatggcgctgcgttatgtggttatcacctccgttgaccgtgatgacctgcgcgatggcggtgcccagcactttgcggattgcattactgccattcgggaaaaaagcccgcaaatcaaaattgaaactctggtgccggatttccgcggtcgtatggatcgtgctctggatattctgactgcaacgccaccagatgtgttcaaccataacctggaaaacgtaccgcgtatttaccgtcaggtacggcctggtgcagattacaactggtcgctgaagctgctggaacgctttaaagaagcgcatccggaaatcccgaccaagtctggtctgatggtgggactgggtgaaaccaatgaagaaattattgaggtaatgcgcgacctgcgccgtcatggtgtgacgatgttaacgctggggcaatatttgcagccaagccgccatcacctgccggttcaacgttacgttagcccggatgagttcgacgaaatgaaagccgaagcgctggcgatgggctttacccatgctgcatgcggtccgtttgtccgctcttcttaccacgccgatttgcaggcgaaagggatggaagttaagtaa

SEQ ID NO: 26503 - protein, 321 aa, Escherichia coli K12
MSKPIVMERGVKYRDADKMALIPVKNVATEREALLRKPEWMKIKLPADSTRIQGIKAAMRKNGLHSVCEEASCPNLAECFNHGTATFMILGAICTRRCPFCDVAHGRPVAPDANEPVKLAQTIADMALRYVVITSVDRDDLRDGGAQHFADCITAIREKSPQIKIETLVPDFRGRMDRALDILTATPPDVFNHNLENVPRIYRQVRPGADYNWSLKLLERFKEAHPEIPTKSGLMVGLGETNEEIIEVMRDLRRHGVTMLTLGQYLQPSRHHLPVQRYVSPDEFDEMKAEALAMGFTHAACGPFVRSSYHADLQAKGMEVK

SEQ ID NO: 26504 - DNA, 984 bp, Xenopus tropicalis
  CDS (1)..(984)
atgagactgtgtgggcttcgcagaggggcagaacttctacggacttgtgggttagccgaataccacacctcgtacagggcgttaagcaatttgccagatgagaagaaggaactcatcaagaatggacccgatctgcaggactttctgtcgggagagctaactgataagagttcctgggctgcatacaaaggcaacttaaagaggctgaaaggagagagattaagactcccaccttgggtgaggactgaaatcccaatgggtaaaaattacaacaagctgaaaaacacactgcgaaaccttaatcttcacactgtgtgtgaagaagctcggtgtcctaatattggggagtgctgggggggaggagaatacggcacggccacagcaactataatgttgatgggtgacacatgtacccgaggttgtcgtttctgttcggtgaaaactgcaaggaaccctcctcccctggacccagatgagccatttaatacagcaaaagcaattgcagactggggcctggattatgtagtactgacatcagtagaccgagacgacatttcagatgggggtgctgagcacattgcaaaaacagtgtcactgttaaaagagagaaaccaaacaattcttattgaatgcctcacgccagatttccgaggaaacctgaaggcagtggaaactgtagctgggtctgggttggatgtttatgcccacaatgtagagactgttccagcactgcaaaggcatgtacgtgatcctagagctaattttgaccagtcagtgaatgttctgaaacacgccaaaaatgtacggcctgaacttatatccaaaacatccatcatgttgggcttaggggaaacagatgaacaaatctactccacaatgaaagcactgcgagaagcgggtgtggattgtttgacccttggtcagtacatgcagccgacaaaacgacatcttaaggttgaggagtacatcacgccagagccctga

SEQ ID NO: 26505 - protein, 327 aa, Xenopus tropicalis
MRLCGLRRGAELLRTCGLAEYHTSYRALSNLPDEKKELIKNGPDLQDFLSGELTDKSSWAAYKGNLKRLKGERLRLPPWVRTEIPMGKNYNKLKNTLRNLNLHTVCEEARCPNIGECWGGGEYGTATATIMLMGDTCTRGCRFCSVKTARNPPPLDPDEPFNTAKAIADWGLDYVVLTSVDRDDISDGGAEHIAKTVSLLKERNQTILIECLTPDFRGNLKAVETVAGSGLDVYAHNVETVPALQRHVRDPRANFDQSVNVLKHAKNVRPELISKTSIMLGLGETDEQIYSTMKALREAGVDCLTLGQYMQPTKRHLKVEEYITPEP

SEQ ID NO: 26506 - DNA, 1122 bp, Rattus norvegicus
  CDS (1)..(1122)
atggctttacgctgctgggatgcagctcgcagcctggggtcccggatatttggaagatatgcgtgctcggttagagcattaagttctttgccagatgagaaaaagaaatttttgcataatgggccagaccttcaagattttgtatctggtgatcttgcagacaagagtacctgggatgattataaaggaaacttaaagcgccagaaaggagaaaggttaagactacctccgtggttaaagacaaagatacccatgggtaaaaattacaataagctgaaaaatacgttgcggaatttaaatctccacacagtatgtgaggaagcccgatgtccaaacatcggagagtgttggggaggtggggaatatgccaccgccacagccacgatcatgttgatgggggacacatgcacaagaggttgcagattttgctctgttaagacggcaagaaatccccctccattggatcccagtgagcccgacaatacggccagagcaatcgcagagtggggtctggactatgttgtgctgacgtctgtggaccgagatgatgtggtcgatgggggagctgagcacattgccaagacagtgtcatgcttgaaggaaaggaatccaaaaatcctcgtggaatgcctcacccccgacttccgaggagatctgagagctgtagaaaaggtggcgctgtctggactagatgtgtatgcacacaatgtagagacggttccagaattacagaggaaagtccgtgatccccgggccaattttgaccagtctcttcgtgtattgaaacatgccaaggaggtgcagcctgatgttgtttccaaaacatcaataatgctgggcctcggtgagacagacgagcaggtctatgccacgatgaaagctctccgtgcagccgatgtggactgtttaactctcgggcagtatatgcagccgaccaagcgccaccttaaggttgaagagtacgttactcctgagaagttcaaatactgggaagaagtaggaaatgaacttggatttcactacactgcaagtggccctttggtgcgatcttcatataaagcaggtgaatttttcctgaaaaatctagtggctaaaagaaaaacaaaagtttctaaagtttag

SEQ ID NO: 26507 - protein, 373 aa, Rattus norvegicus
MALRCWDAARSLGSRIFGRYACSVRALSSLPDEKKKFLHNGPDLQDFVSGDLADKSTWDDYKGNLKRQKGERLRLPPWLKTKIPMGKNYNKLKNTLRNLNLHTVCEEARCPNIGECWGGGEYATATATIMLMGDTCTRGCRFCSVKTARNPPPLDPSEPDNTARAIAEWGLDYVVLTSVDRDDVVDGGAEHIAKTVSCLKERNPKILVECLTPDFRGDLRAVEKVALSGLDVYAHNVETVPELQRKVRDPRANFDQSLRVLKHAKEVQPDVVSKTSIMLGLGETDEQVYATMKALRAADVDCLTLGQYMQPTKRHLKVEEYVTPEKFKYWEEVGNELGFHYTASGPLVRSSYKAGEFFLKNLVAKRKTKVSKV

SEQ ID NO: 26508 - DNA, 1119 bp, Bos taurus
  CDS (1)..(1119)
atgtctctacgctgcgggggcgcggtccgcaccgtgggcccccgggtatttggaagatatgtattcagccctgtcagagaagtaagtttcctgccagatgaaaaaaaggaatttttacagagtggaccagaccttcaagaatttatatctggtaatctggctgacaagagtacctgggatgaatataaaggaaatttaaaacgccagaaaggagaaaggttaagactacctccatggctaaaaacagagattcctatggggaaaaattataataaactgaaaaacactttgcggaatttaaatcttcacacagtgtgtgaggaagctcgatgtcccaatattggagagtgttggggaggtggagaatatgctaccgccacagccacaatcatgttgatgggtgacacatgtacaagaggttgtagattttgttctgttaagactgcaagaaatccacctccactggatgccaatgagccctacaatactgcaaaggcaattgcagagtggggtctggattatgttgtcctgacatctgtggatcgagatgatatgcctgatggaggagctgagcactttgcaaagactgtatcttacttaaaggaaaggaatccaaaaattcttgtggaatgtctcacccctgatttccgaggagatcttaaagcaatagaaaaagttgccctgtcaggattagatgtatatgcacataatgtagaaacagttccagaattacagaggaaagttcgtgatccccgggccaattttgaccagtctctacgtgtactaaaacatgccaaggaggttcgacctgatgttatttctaaaacatctattatgttgggtttaggtgagaatgatgagcaagtatatgccacgatgaaagcacttcgtgaggcagatgtggactgtttgactttaggacaatatatgcagccaacaaagcgccaccttaaggttgaagaatacattactcctgaaaagttcaaatactgggaaaaagtaggaaatgaacttggatttcattatactgcaagtggccccctggtgcgttcttcatacaaagcaggtgaatttttcctgaaaaatctagtggctaaaagaaaaacaaaagccctgtaa

SEQ ID NO: 26509 - protein, 372 aa, Bos taurus
MSLRCGGAVRTVGPRVFGRYVFSPVREVSFLPDEKKEFLQSGPDLQEFISGNLADKSTWDEYKGNLKRQKGERLRLPPWLKTEIPMGKNYNKLKNTLRNLNLHTVCEEARCPNIGECWGGGEYATATATIMLMGDTCTRGCRFCSVKTARNPPPLDANEPYNTAKAIAEWGLDYVVLTSVDRDDMPDGGAEHFAKTVSYLKERNPKILVECLTPDFRGDLKAIEKVALSGLDVYAHNVETVPELQRKVRDPRANFDQSLRVLKHAKEVRPDVISKTSIMLGLGENDEQVYATMKALREADVDCLTLGQYMQPTKRHLKVEEYITPEKFKYWEKVGNELGFHYTASGPLVRSSYKAGEFFLKNLVAKRKTKAL

SEQ ID NO: 26510 - DNA, 1119 bp, Homo sapiens
  CDS (1)..(1119)
atgtctctacgctgcggggatgcagcccgcaccctggggccccgggtatttgggagatatttttgcagcccagtcagaccgttaagctccttgccagataaaaaaaaggaactcctacagaatggaccagaccttcaagattttgtatctggtgatcttgcagacaggagcacctgggatgaatataaaggaaacctaaaacgccagaaaggagaaaggttaagactacctccatggctaaagacagagattcccatggggaaaaattacaataaactgaaaaatactttgcggaatttaaatctccatacagtatgtgaggaagctcgatgtcccaatattggagagtgttggggaggtggagaatatgccaccgccacagccacgatcatgttgatgggtgacacatgtacaagaggttgcagattttgttctgttaagactgcaagaaatcctcctccactggatgccagtgagccctacaatactgcaaaggcaattgcagaatggggtctggattatgttgtcctgacatctgtggatcgagatgatatgcctgatgggggagctgaacacattgcaaagaccgtatcatatttaaaggaaaggaatccaaaaatccttgtggagtgtcttactcctgattttcgaggtgatctcaaagcaatagaaaaagttgctctgtcaggattagatgtgtatgcacataatgtagaaacagtcccggaattacagagtaaggttcgtgatcctcgggccaattttgatcagtccctacgtgtactgaaacatgccaagaaggttcagcctgatgttatttctaaaacatctataatgttgggtttaggcgagaatgatgagcaagtatatgcaacaatgaaagcacttcgtgaggcagatgtagactgcttgactttaggacaatatatgcagccaacaaggcgtcaccttaaggttgaagaatatattactcctgaaaaattcaaatactgggaaaaagtaggaaatgaacttggatttcattatactgcaagtggccctttggtgcgttcttcatataaagcaggtgaatttttcctgaaaaatctagtggctaaaagaaaaacaaaagacctctaa

SEQ ID NO: 26511 - protein, 372 aa, Homo sapiens
MSLRCGDAARTLGPRVFGRYFCSPVRPLSSLPDKKKELLQNGPDLQDFVSGDLADRSTWDEYKGNLKRQKGERLRLPPWLKTEIPMGKNYNKLKNTLRNLNLHTVCEEARCPNIGECWGGGEYATATATIMLMGDTCTRGCRFCSVKTARNPPPLDASEPYNTAKAIAEWGLDYVVLTSVDRDDMPDGGAEHIAKTVSYLKERNPKILVECLTPDFRGDLKAIEKVALSGLDVYAHNVETVPELQSKVRDPRANFDQSLRVLKHAKKVQPDVISKTSIMLGLGENDEQVYATMKALREADVDCLTLGQYMQPTRRHLKVEEYITPEKFKYWEKVGNELGFHYTASGPLVRSSYKAGEFFLKNLVAKRKTKDL

SEQ ID NO: 26512 - DNA, 1125 bp, Arabidopsis thaliana
  CDS (1)..(1125)
atgcattcgcgctccgccttgctctatagattcctccgtccggcgtcgagatgcttctcctcttcctcggctgtaactccggtcaccgtaacgcaatctcccaagagtctcgaggctcttcgagctcggctggcgaatgagtcgccttccctaaccgatttcatccacggcgatacctattcggtggaagttggaaccaaaaagaaacctctcccgaaacctaaatggatgaaggaatcaattcccggcggcgagagatatgtccagatcaagaagaaattgagagaccttaagcttcacaccgtctgcgaggaagcgaaatgtcccaatctcggtgagtgctggtctggtggtgaaactggaaccgccaccgctacgattatgatccttggggatacatgtacacgcggctgcaggttttgtaatgtgaagacatcgcgtacacctccaccgcctgatccaaatgaacctaacaatgtggctgaagcaattgcttcctggggggttgattatgttgtgatcaccagtgtagatcgagatgatttacctgatcaagggagtggtcattttgctgaaactgttcagagattgaaattcttgaagccggagatgttgattgaagcactagttcctgatttccgcggagatggtggatgtgttgagaaggtttccaagtcagggcttgatgtcttagctcacaacattgagacagttgaagagcttcagagttttgtgcgggaccatcgtgctaactttaagcagtcattggatgtgcttaggatggctaaggagtatgcacctgcaggcaccttaacaaagacttctgtaatgctgggatgtggagagacccctgatcaagtggttaagacaatggagaaggtgagagcagcaggggttgacgttatgacatttggccaatatatgcgaccatctaaacgccacatgccagtagctgagtacgtgacaccagatgccttcgagaggtatcgccttcttggcatggaaatgggattcagatacgtagcatcaggaccaatggtgaggtcgtcgtacaaagcgggagagtactacataaagtcgatgatagaagccgatcgagtggcttctccttctacatccccgtag

SEQ ID NO: 26513 - protein, 374 aa, Arabidopsis thaliana
MHSRSALLYRFLRPASRCFSSSSAVTPVTVTQSPKSLEALRARLANESPSLTDFIHGDTYSVEVGTKKKPLPKPKWMKESIPGGERYVQIKKKLRDLKLHTVCEEAKCPNLGECWSGGETGTATATIMILGDTCTRGCRFCNVKTSRTPPPPDPNEPNNVAEAIASWGVDYVVITSVDRDDLPDQGSGHFAETVQRLKFLKPEMLIEALVPDFRGDGGCVEKVSKSGLDVLAHNIETVEELQSFVRDHRANFKQSLDVLRMAKEYAPAGTLTKTSVMLGCGETPDQVVKTMEKVRAAGVDVMTFGQYMRPSKRHMPVAEYVTPDAFERYRLLGMEMGFRYVASGPMVRSSYKAGEYYIKSMIEADRVASPSTSP

SEQ ID NO: 26514 - DNA, 909 bp, Rickettsia conorii str. Malish 7
  CDS (1)..(909): transl_table=11
ttgaattatttccgttttatggctaatttaaataaacgacctgattggataaaagtaaaagctcctaattctacagagtactataatacaaaagatttaataaagaatctgagattaaatactgtgtgcgaggaagctgcttgtcctaatattggtgagtgctggtcaaaaaaacatacaactgtgatgattttaggttcggtttgtactagagcttgtaggttttgtaacgttaaaacgggtagaccggatttacttgatccgtatgaaccgcaaaggttagcggaggcggtacaaaagctaaatcttaagcatgtagtaattacttccgtcgatcgtgatgatcttgaggatggcggagcgtcacattttgcggagtgtattagcgaaatccgaaaatcatcgccaaatactactattgagattctaacacccgattttttaagaaaagaaggagcagctgaaataatagcaaacgcaaaacctgacgtttttaaccataatgtcgaaacagtaccgtctttatacaaaacgattagaccgggggctagatattataattctttaagtttactgcataatattaaaaaattatctcctgaaatttttacaaaatccggtatgatggtaggacttggggaagaaataaatgaagtagtacaggttatagatgatttaagagaagcaaaggttgatttcctaactatcgggcagtatctgcagcctaccaaaaatcatgctgaggtcgcaaaatatgttacgccggaagagtttaaatatctagagcgagtagcaaaaacaaaaggattcttgatggtttcggcaagcccgctgacccgttcttcataccatgctgatgaggattttcaaaaattaaaagagaattaccaacaaaaactggtgtcttaa

SEQ ID NO: 26515 - protein, 302 aa, Rickettsia conorii str. Malish 7
MNYFRFMANLNKRPDWIKVKAPNSTEYYNTKDLIKNLRLNTVCEEAACPNIGECWSKKHTTVMILGSVCTRACRFCNVKTGRPDLLDPYEPQRLAEAVQKLNLKHVVITSVDRDDLEDGGASHFAECISEIRKSSPNTTIEILTPDFLRKEGAAEIIANAKPDVFNHNVETVPSLYKTIRPGARYYNSLSLLHNIKKLSPEIFTKSGMMVGLGEEINEVVQVIDDLREAKVDFLTIGQYLQPTKNHAEVAKYVTPEEFKYLERVAKTKGFLMVSASPLTRSSYHADEDFQKLKENYQQKLVS

SEQ ID NO: 26516 - DNA, 1065 bp, Caenorhabditis elegans
  CDS (1)..(1065)
atgctagctcgggtatgggtccgtggacttgcagccacaaagaaaaaaccgcaagttctcgtcaaagatggaccatcgcttcaggattttatttcatcagcatccgtggcagaggctgttgagaagtacgaaggaaaactgaagctggagaaaggggacagacgtttgcgacttccaccatggctcaagaaagaaaagattcttccatcggaaaacgaaaatgtcagtcgtctaaaaaagcagttgaaacatctcaaactagcgactgtttgtcaggaagcacggtgcccaaatcttggagaatgctggggaggatcagatgacagtctagcaacagcgacaatcatgttgatgggagatacctgcactcggggttgtaaattctgttcggtcaaaactgctcgagctcctccaccattggatcctatggaaccggaaaatacgtcgaccgccgttgcttcatggggtgtcgaatacattgttttaacatcagttgacagggatgatttgccagacggtggagccgatcatcttcgcaagacagtacagctgatgaagctcaagaagcctgaacttctcatcgaatgcttattgcccgatttcgctggagataagatcagtgtggagaaaatggctaccagtggactcgatgtatatgcacataacattgaaacggttgaaagactgactccatgggtcagagatccacgagctaaatatcggcagtctttggacgctcttcgatacgcaaaggaagtcagcccaaagctaatcacgaagacatcgattatgctaggactgggcgaagctgaagacgagataaagcagtgcttggccgatcttcgagctagcaatgttgacgttgtcactttcggtcaatacatgcagccgacaaaacgtcatttgcttgtcaaagaatgggtgacccccgagaaattcgaccagtgggcagaatattcgaaaaaactgggattcctttacgttgcatctggccctcttgttcgctcttcgtacaaagccggagaattctatttgaaaaatgtgttgagaaatagacaaaattaa

SEQ ID NO: 26517 - protein, 354 aa, Caenorhabditis elegans
MLARVWVRGLAATKKKPQVLVKDGPSLQDFISSASVAEAVEKYEGKLKLEKGDRRLRLPPWLKKEKILPSENENVSRLKKQLKHLKLATVCQEARCPNLGECWGGSDDSLATATIMLMGDTCTRGCKFCSVKTARAPPPLDPMEPENTSTAVASWGVEYIVLTSVDRDDLPDGGADHLRKTVQLMKLKKPELLIECLLPDFAGDKISVEKMATSGLDVYAHNIETVERLTPWVRDPRAKYRQSLDALRYAKEVSPKLITKTSIMLGLGEAEDEIKQCLADLRASNVDVVTFGQYMQPTKRHLLVKEWVTPEKFDQWAEYSKKLGFLYVASGPLVRSSYKAGEFYLKNVLRNRQN

SEQ ID NO: 26518 - DNA, 1143 bp, Drosophila melanogaster
  CDS (1)..(1143)
atgtatgtcatgttgcgagctttaaaaactcacgcggaggcccccattgtagttgccacccgtgcggcatcaacgaatgcggagaagcttgaggagattcgtgaacgtctggcaaagggtccgaatttccatgactttgtgcagaatccggacaacaccagaaacgagtgggaacagtacgatggaaagctacgccgcgaaaagggcgaggagcagcgactgcgattgccgccttggttaaagaccaccattcccgtgggcaaaaactacgccaaaatcaaggcccagatgcgcgagctcaagctgtccaccgtctgcgaggaggcccggtgtcccaacatcggcgagtgctggggcggcggcgagcatggcacccagacagccacgattatgcttatgggcgacacttgcaccagaggctgtagattttgttcggtgaaaacggcacgcaaaccaccaccgctggatgtaaacgaacccgtgaacacagccacggcaattgcctcctggggattggattacattgttctgacctcagttgatcgagatgatttgccagacggtggctcggagcacattgccgaaactgttcgcgaaattaaggcgcgcaactcaaacatctttgtggagtgcctagtacctgatttccgaggaaatctggagtgtgtgaagacgatcgccaacagcgggctggatgtttatgcgcacaacatagagacggttgagaagctcactccctatgtgcgcgaccggcgcgcccactaccgccagaccctgcaagtgctaaccgaagcgaagagattcaaccccaatctcatcaccaagagttcaattatgctgggacttggcgagaccgacgaggagatcgagaacaccttgaaggatctgcgggaggccggcgtagattgcgtgaccctgggtcagtacatgcagcccacgaataagcacctcaaggtcatcgaatacgtcacgcccgagaagttcaagcactgggaagagcgcggcaacgaactgggtttcctgtacacagccagtggaccgctggtgcgcagctcctacaaagccggcgagttcttcatcacaagtatattggagaatcgcaagaagaggcaaaacgacactgaagttcccaagaagcagtaa

SEQ ID NO: 26519 - protein, 380 aa, Drosophila melanogaster
MYVMLRALKTHAEAPIVVATRAASTNAEKLEEIRERLAKGPNFHDFVQNPDNTRNEWEQYDGKLRREKGEEQRLRLPPWLKTTIPVGKNYAKIKAQMRELKLSTVCEEARCPNIGECWGGGEHGTQTATIMLMGDTCTRGCRFCSVKTARKPPPLDVNEPVNTATAIASWGLDYIVLTSVDRDDLPDGGSEHIAETVREIKARNSNIFVECLVPDFRGNLECVKTIANSGLDVYAHNIETVEKLTPYVRDRRAHYRQTLQVLTEAKRFNPNLITKSSIMLGLGETDEEIENTLKDLREAGVDCVTLGQYMQPTNKHLKVIEYVTPEKFKHWEERGNELGFLYTASGPLVRSSYKAGEFFITSILENRKKRQNDTEVPKKQ

SEQ ID NO: 26520 - DNA, 909 bp, Thermosynechococcus elongatus BP-1
  CDS (1)..(909): transl_table=11
atggagttagccgtggttgttaagccagagtggttacgggtcaaagcaccccagtggcagcgggtgggttccgtcaaggaactgttgcgggacttaaacctcaatactgtttgcgaagaggcctcttgccccaatattggtgaatgtttctatcagggaacggccacatttttaatgatgggtccagcttgcacccgggcttgcccctactgcgatattgattttgagaaaaagccattgcctctggatcccactgaaccccagcgactagctgaagcagtggtgcggatgcgtctcaatcacgttgtcattacctcggtgaatcgggatgatttggccgacgggggtgcctctcagtttgtcgccacgattgaggctgtgcggcagcgatcgccccaaacaacaattgaagtcctgattcccgatctctgcggcaactggcaggccttggatcaaattcttgctgccggtccggaagtactcaaccacaacaccgagaccgtgccccgtctctatcggcgggtgcgtccccaaggcaactatcagcgcagtctggaactgctgcagcgggtgcgcgatcgcgccccttggatttactcaaaatcgggcattatggtgggtctaggggaaaccagcgaggaagtggtggccctcatgcaggatttgcgccaagtgggttgtgacattctcaccattggtcagtatctgcaacccagtcccaaacatctagcggtacaggcctttattccaccagagcaatttgaggaatggcgccgcctgggggaatcgatgggctttttgcaggtggtttcctctcccctcacccgtagttcctaccatgctgagcaggtgcgggctctgatgcaacagtacccacgtcagcgtcctgccccaagtcctcttggatag

SEQ ID NO: 26521 - protein, 302 aa, Thermosynechococcus elongatus BP-1
MELAVVVKPEWLRVKAPQWQRVGSVKELLRDLNLNTVCEEASCPNIGECFYQGTATFLMMGPACTRACPYCDIDFEKKPLPLDPTEPQRLAEAVVRMRLNHVVITSVNRDDLADGGASQFVATIEAVRQRSPQTTIEVLIPDLCGNWQALDQILAAGPEVLNHNTETVPRLYRRVRPQGNYQRSLELLQRVRDRAPWIYSKSGIMVGLGETSEEVVALMQDLRQVGCDILTIGQYLQPSPKHLAVQAFIPPEQFEEWRRLGESMGFLQVVSSPLTRSSYHAEQVRALMQQYPRQRPAPSPLG

SEQ ID NO: 26522 - DNA, 1248 bp, Plasmodium falciparum 3D7
  CDS (1)..(1248)
atgcattttggtatcccatcccttttttacttgtatatccttttttccattattatgaggataaaatgtgtcataacgaaaaatttgaaaaaaacaaagaaacgaacctgttcatacatacctcatggaaatatggaaaaaggtatcattttaaattatattgaaaaaccaaaccctgcatatttgaaaagaggaaagaataaaaataaaaataaaaataaaaaaggagatatatataaattaagaaatgtagaaatattgttatacgcaaacagatatgtacatgaaggaaatgaaaatttttctagcactacaaaaaaattattattaacaccaaaagttggaaataaaatgcctgaaggaaagaaaccagactggtttcatgtagctgctcctactgttgcaaaatataataaattaaaagatgatataaaaaaattaaacttacataccgtatgtgaagaagcacaatgtcctaatattggagaatgctggaatataggtacagcaactattatgttattgggtgatacatgtacaaggggttgtaaattttgctcaattaaaacatcatcaaacccattacctcctgatattaatgaacctttcaatacagctaaagctatatgtgaatggaatattgattatgttgttttaacttctgttgatagagatgatttaccagatggtggagctagtcattttgctaaaacagtagaattagtaaaattttcaagaccagatattttaattgaatgtttagtttctgattttcaaggaaacatcgattctgtacgaaaattagcttttagtggattggatgtatatgcacataatatagagacagttaaaagattacagaaatatgttagagataaaagagcaaattatgatcaatcactatttgtattaaaaacagctaaagaaatcaatcctcagttatacacaaaaacaagtattatgttaggattgggagagacaaaagaagaagttatacaaactatgtatgatgcaagaaaaaataatatagatgttataacatttggtcaatacttaagacctacaaaaaatcatttaagtattgttcaatatatatcaccacaaatgttcgaatattataaagaagaaggattaaaaatgggatttaaatatatagccagcggccctttagttcgttcttcttataaagcaggtgaatattttataaaaaatttagttaaccaacgaaacaaagataaaaaaaattaa

SEQ ID NO: 26523 - protein, 415 aa, Plasmodium falciparum 3D7
MHFGIPSLFYLYILFSIIMRIKCVITKNLKKTKKRTCSYIPHGNMEKGIILNYIEKPNPAYLKRGKNKNKNKNKKGDIYKLRNVEILLYANRYVHEGNENFSSTTKKLLLTPKVGNKMPEGKKPDWFHVAAPTVAKYNKLKDDIKKLNLHTVCEEAQCPNIGECWNIGTATIMLLGDTCTRGCKFCSIKTSSNPLPPDINEPFNTAKAICEWNIDYVVLTSVDRDDLPDGGASHFAKTVELVKFSRPDILIECLVSDFQGNIDSVRKLAFSGLDVYAHNIETVKRLQKYVRDKRANYDQSLFVLKTAKEINPQLYTKTSIMLGLGETKEEVIQTMYDARKNNIDVITFGQYLRPTKNHLSIVQYISPQMFEYYKEEGLKMGFKYIASGPLVRSSYKAGEYFIKNLVNQRNKDKKN

SEQ ID NO: 26524 - DNA, 1065 bp, Tropheryma whipplei str. Twist
  CDS (1)..(1065): transl_table=11
gtgcaaaatatgaacgattctggcaattcaagcaaagttaatgtaaggcccccttcagccggtttgggagcaccctccccgggcaagcgtaagatgctccgcctggaggtacgaaattcgcaggttcctatagaacggaagccctcatggataagggctcgtgcaactattggtacagagtacagaaaggttcaggaacgtgttaagaaacagaatttgcggactgtttgtcaagaagccggatgtccgaatatctacgaatgctgggaggatagagaggcaactttcctgatcggaggatcgcagtgtactcgcaggtgtgatttttgtcagatagacacgggaaaacctgcagagctcgacctggatgagccaaaacgggttggacagtccgtggcgcaaatgaagttacgctatgccaccgtaaccggagtagcacgcgacgacctgcccgatgggggtgtctggctctatgcagaaacaatccgagaaatacacaaacagtgccctggaagtggggttgaaatactcataccagattttaacggtaagccagagttgctccagcaaatcttcgaagcacaaccggaagtgtacgcacacaatatagaaactgttccacggatattcaggcgcattagaccggcattcagatacgacagatcgctggatgttatatcacaaggtcaaaaggctgggatgataacaaaatcaaatcttattcttggaatgggcgagaccggtgaagaggtaacacaggcattgagagacctcaaaagtgccggttgtgacattgtaacaataactcagtatctaagaccatcgcccaggcatttacccgtggcaagatgggtaaaaccacaagagttcatagaatataaagagcaagccaaagagatcggattctcaggcgttttggccggacctttagttagatcatcataccgtgccggaaaactgtgggcacaatctgtgaaagctaagatggttgaaatacccgagcgcgtacggaaactcataaacgaaatcgagatgcaggaaacgtcctttaggcaagcagtctag

SEQ ID NO: 26525 - protein, 354 aa, Tropheryma whipplei str. Twist
MQNMNDSGNSSKVNVRPPSAGLGAPSPGKRKMLRLEVRNSQVPIERKPSWIRARATIGTEYRKVQERVKKQNLRTVCQEAGCPNIYECWEDREATFLIGGSQCTRRCDFCQIDTGKPAELDLDEPKRVGQSVAQMKLRYATVTGVARDDLPDGGVWLYAETIREIHKQCPGSGVEILIPDFNGKPELLQQIFEAQPEVYAHNIETVPRIFRRIRPAFRYDRSLDVISQGQKAGMITKSNLILGMGETGEEVTQALRDLKSAGCDIVTITQYLRPSPRHLPVARWVKPQEFIEYKEQAKEIGFSGVLAGPLVRSSYRAGKLWAQSVKAKMVEIPERVRKLINEIEMQETSFRQAV

SEQ ID NO: 26526 - DNA, 1098 bp, Oryza sativa (japonica cultivar-group)
  CDS (1)..(1098)
atgatgcagagctcgctcgcgcggccgttgccgcggcccccgatccggccggcctgcgggaaccctgtctgccggagccggcccggctcggtctccgtggcccggtgccgcgcggaggctgcgccgccggctccggcgccggcggcgcgtagggcggcggggccgtacaccgggagggacccggaggtgaagaagccggcgtggctgcggcagcgtgcggcgcagggggagaagtacgcgcggctgcgggagtcgatcggcgagctcaagctcaacaccgtctgcgtcgaggcccagtgccccaacatcggcgagtgctggaacggtgggggaggggcgggcggggaaggcgacggcatcgccacggcgaccatcatggtgctcggtgatacctgtacgcgcggctgccgtttctgtgccgtgaagactagcaacaagcctccaccaccggatcccctggagcctctgaacacggccttggcagttgcaagctggggagtggactatgttgtactgaccagtgttgacagagatgacttgcctgatggtggtagcagccattttgcgcagacagagctcaaacctgggatactggtggagtgcttgacctcagattttcgaggtgacctggaggctgtttcagctttggccaactctggtctggatgtatttgcgcacaacatcgagactgtgaggagcctgcaaagaattgttagggatcctcgagcaggatatgatcagagcttagctgttctgaagcatgcaaaaagttgcaaagagggtatgataactaagtcctctatcatgcttggtcttggagagactgacgaggaggtgaaacaagccatgattgacttaagggccattggtgttgatatcttgacactgggccagtatttgcagcccactgaaagacatttgacagtaagggagtatgtaactcctgagaagttccaattttggaaggagtatggagaatcggtgggtttccgctatgttgctagtggacccctggttcggtcttcatatcgtgcaggagagctctttgtccaaaatttggtcaggaataacaaacctaagctacctgcttcatcttag

SEQ ID NO: 26527 - protein, 365 aa, Oryza sativa (japonica cultivar-group)
MMQSSLARPLPRPPIRPACGNPVCRSRPGSVSVARCRAEAAPPAPAPAARRAAGPYTGRDPEVKKPAWLRQRAAQGEKYARLRESIGELKLNTVCVEAQCPNIGECWNGGGGAGGEGDGIATATIMVLGDTCTRGCRFCAVKTSNKPPPPDPLEPLNTALAVASWGVDYVVLTSVDRDDLPDGGSSHFAQTELKPGILVECLTSDFRGDLEAVSALANSGLDVFAHNIETVRSLQRIVRDPRAGYDQSLAVLKHAKSCKEGMITKSSIMLGLGETDEEVKQAMIDLRAIGVDILTLGQYLQPTERHLTVREYVTPEKFQFWKEYGESVGFRYVASGPLVRSSYRAGELFVQNLVRNNKPKLPASS

SEQ ID NO: 26528 - DNA, 969 bp, Homo sapiens
  CDS (1)..(969)
atgtctctacgctgcggggatgcagcccgcaccctggggccccgggtatttgggagatatttttgcagcccagtcagaccgttaagctccttgccagataaaaaaaaggaactcctacagaatggaccagaccttcaagattttgtatctggtgatcttgcagacaggagcacctgggatgaatataaaggaaacctaaaacgccagaaaggagaaaggttaagactacctccatggctaaagacagagattcccatggggaaaaattacaataaactgaaaaatactttgcggaatttaaatctccatacagtatgtgaggaagctcgatgtcccaatattggagagtgttggggaggtggagaatatgccaccgccacagccacgatcatgttgatgggtgacacatgtacaagaggttgcagattttgttctgttaagactgcaagaaatcctcctccactggatgccagtgagccctacaatactgcaaaggcaattgcagaatggggtctggattatgttgtcctgacatctgtggatcgagatgatatgcctgatgggggagctgaacacattgcaaagaccgtatcatatttaaaggaaaggaatccaaaaatccttgtggagtgtcttactcctgattttcgaggtgatctcaaagcaatagaaaaagttgctctgtcaggattagatgtgtatgcacataatgtagaaacagtcccggaattacagagtaaggttcgtgatcctcgggccaattttgatcagtccctacgtgtactgaaacatgccaagaaggttcagcctgatgttatttctaaaacatctataatgttgggtttaggcgagaatgatgagcaagtatatgcaacaatgaaagcacttcgtgaggcagatgtagactgcttgactttaggacaatatatgcagccaacaaggcgtcaccttaaggtgaatttttcctga

SEQ ID NO: 26529 - protein, 322 aa, Homo sapiens
MSLRCGDAARTLGPRVFGRYFCSPVRPLSSLPDKKKELLQNGPDLQDFVSGDLADRSTWDEYKGNLKRQKGERLRLPPWLKTEIPMGKNYNKLKNTLRNLNLHTVCEEARCPNIGECWGGGEYATATATIMLMGDTCTRGCRFCSVKTARNPPPLDASEPYNTAKAIAEWGLDYVVLTSVDRDDMPDGGAEHIAKTVSYLKERNPKILVECLTPDFRGDLKAIEKVALSGLDVYAHNVETVPELQSKVRDPRANFDQSLRVLKHAKKVQPDVISKTSIMLGLGENDEQVYATMKALREADVDCLTLGQYMQPTRRHLKVNFS

SEQ ID NO: 26530 - DNA, 1089 bp, Corynebacterium diphtheriae NCTC 13129
  CDS (1)..(1089): transl_table=11
gtgtcgacgaccacagcaatcacgagtactctgcaaagggtgactaaagcacccgaaggacgcagaatgctcagagttgaggcgcgcaactcgcagacccccatcgagagcaaaccacgttggatccgcaccgctgttaaaaccggccctgaatatcaggacatgaaaaagaaagtgtcgggtgcaagcctgcacaccgtatgccaagaagccggctgccctaatatccacgaatgctgggagtcgcgtgaggctaccttcttgattggtggcgctaactgctcgcgccgttgcgatttctgccagattaattctgctaagcccgaaccactcgatcgcgacgagccacgtcgcgttgcagaatcagtacgcgaaatgcagctgaattactcgaccatcactggtgtgacccgtgacgatcttgaagatgaaggcgcttggctatatgcagaagttgttcgcaagattcatgagctcaatccccacaccggcgtagaaaacctcacccctgatttctccggcaagcctgacttgttgcaagaggttttcgaggctcgccccgaagtttttgctcacaacctcgaaacggttcctcgcatcttcaagcggatccgccccgctttccgttacgagcgctccttagacgtgatccgccaagcccgcgattttggattggttaccaaatccaacctgatcttgggcatgggagaaaccgtcgacgaaatccgtgatgccttggttgacctgcactcggcaggttgtgacatcatcacgattacccaatatcttcgtcccggcccgatgtaccatcccatcgatcgttgggtaaaacctgaggaatttatcgatcacgctgattttgcgcgtgaacttggatttggtgctgttatgtcggggccattggtacgttcttcttatcgtgccggaaagctttatgccgaggctctcgcggctcgcggtgagtccttgccagaaaacttggctcatttggccacgactgccgatggcagtactgcgcaagaagcaaataccttgttggaaaagtacggtccttcccaagacacccctgtagtgtcgtcgaaggcttaa

SEQ ID NO: 26531 - protein, 362 aa, Corynebacterium diphtheriae NCTC 13129
MSTTTAITSTLQRVTKAPEGRRMLRVEARNSQTPIESKPRWIRTAVKTGPEYQDMKKKVSGASLHTVCQEAGCPNIHECWESREATFLIGGANCSRRCDFCQINSAKPEPLDRDEPRRVAESVREMQLNYSTITGVTRDDLEDEGAWLYAEVVRKIHELNPHTGVENLTPDFSGKPDLLQEVFEARPEVFAHNLETVPRIFKRIRPAFRYERSLDVIRQARDFGLVTKSNLILGMGETVDEIRDALVDLHSAGCDIITITQYLRPGPMYHPIDRWVKPEEFIDHADFARELGFGAVMSGPLVRSSYRAGKLYAEALAARGESLPENLAHLATTADGSTAQEANTLLEKYGPSQDTPVVSSKA

SEQ ID NO: 26532 - DNA, 1200 bp, Danio rerio
  CDS (1)..(1200)
atggcgttgatcagtagaagttgtggagctgcgagccgatattcttcaagtcatctgtttttaccatctaaaggcgccgaggcggctaatgtgtactgtaacagactgagcactgctgccagcacatcatcatcatcatcaccatcaccatccacacacaatgacaggaagaaagacctgagggaggatggactgaacctgcaggacttcatatctggagagctgtcagaaaagagcaagtgggaggaatacagaggcaacctaaagagagaaaaaggagaaaggttaaggctaccaccatggctgaagacagagattcctatagggaaaaactacaacaaattgaagaatacacttagagaattaaacctccacacagtctgcgaagaagcccgttgtccaaatattggtgaatgttggggtggaggagagtacgccacggccacagccaccattatgttaatgggggacacatgcacacgtggctgtaggttttgttcagttaagacagcgagacgtcctccacctcttgaccccgatgagccatataacaccgctaaagccattgcagcatggggtctggactatgtagtactcacatcagtggaccgagatgacattcctgatggtggcgctgaacactttgcaaagactgtctccaacattaaagaaaggaactctaaaatcttggtagagtgtttgactcctgatttccgtggcgatctggcagcggtggagaaaattgctttgtctggccttgatgtttatgctcacaatgtagagacggtcagagaattacagaggcatgtacgtgacccccgggcaaactttgaccaatcactgagtgttttacgacatgctaaaaaggtgaaatccagtgtgctcacaaaaacttctatcatgctggggctcggagaaacagatgcacaaatacaagccactttaacagaattgagggactctggtgtggattgtctaaccctggggcagtacatgcaaccaaccaaacgccatcttaaggtggaagaatatgtcacccctgaaaagtttgcgttttgggagaaggttggccaggagatgggcttcatctacactgccagtggaccacttgtgcgctcgtcttataaagcaggggagttctttttgaagaatctgctggaaaagaggaagactgaagaaaccacagcaacagcagagtaa

SEQ ID NO: 26533 - protein, 399 aa, Danio rerio
MALISRSCGAASRYSSSHLFLPSKGAEAANVYCNRLSTAASTSSSSSPSPSTHNDRKKDLREDGLNLQDFISGELSEKSKWEEYRGNLKREKGERLRLPPWLKTEIPIGKNYNKLKNTLRELNLHTVCEEARCPNIGECWGGGEYATATATIMLMGDTCTRGCRFCSVKTARRPPPLDPDEPYNTAKAIAAWGLDYVVLTSVDRDDIPDGGAEHFAKTVSNIKERNSKILVECLTPDFRGDLAAVEKIALSGLDVYAHNVETVRELQRHVRDPRANFDQSLSVLRHAKKVKSSVLTKTSIMLGLGETDAQIQATLTELRDSGVDCLTLGQYMQPTKRHLKVEEYVTPEKFAFWEKVGQEMGFIYTASGPLVRSSYKAGEFFLKNLLEKRKTEETTATAE

SEQ ID NO: 26534 - DNA, 1110 bp, Eremothecium gossypii
  CDS (1)..(1110)
atgctgactaagggtgtgcgtgcgttggcatggtcgcccaggagatatatcactctggatgccgaagctgcgaagccggtggtcgccaagcggaggagaatgacggagttcactgacaaactcaacaaaggcccatcgttcgaggactttctcaccggcaaagccgcgcaaatgacgttggatccactggaggaggcgaggcagaacgcagaggagtcaaagaagcttcctgcgtggctcaaggtgccgattcccaagggcaagaactttcacaagttgaaggaggacgtgcgagatctgaagctcagtaccgtgtgcgaggaagcaaagtgcccgaacatcggtgagtgctggggcggcaacaagggcagtgccactgcaacgatcatgctgcttggggatacttgcacgcgggggtgccgcttctgctctgtgaaaacgaaccggacaccagcgaagcctgaccccaaggagccggagaacactgcagaggccatctcgcgctgggggcttggatatgttgtgctgacgatggtggacagggacgatctgcccgatggcggcgcacaccatcttgctgagacggtgcagcgcatcaagcaaaaggcgccacatattttggtggaaacacttgcgggagacttccggggcaacctagagatggtggatgtgatggcccgttcaggacttgacgtttacgcccacaatgtggagacggttgaggcgctaacgccacatgttcgagaccgcagggcgacttaccagcagtcgctcagtgtgttgaagagggcgaagcagacggttccaaccctagttacaaagacatctatcatgcttgggatgggcgagacagacgagcaggtgctacaaactatgaaggatctcagggctgtggactgtgatgtcgttacatttggccaatacatgcggccaaccagaagacatatgaaggtagttgaatacgttaaacccgagaagttcgactactggaaggagaaggccttggaacttggctttctgtactgtgcatctggtccactggtcagatcttcgtataaggccggcgaagcatacatagagaacgttctgcggaatcgacgccaagcatag

SEQ ID NO: 26535 - protein, 369 aa, Eremothecium gossypii
MLTKGVRALAWSPRRYITLDAEAAKPVVAKRRRMTEFTDKLNKGPSFEDFLTGKAAQMTLDPLEEARQNAEESKKLPAWLKVPIPKGKNFHKLKEDVRDLKLSTVCEEAKCPNIGECWGGNKGSATATIMLLGDTCTRGCRFCSVKTNRTPAKPDPKEPENTAEAISRWGLGYVVLTMVDRDDLPDGGAHHLAETVQRIKQKAPHILVETLAGDFRGNLEMVDVMARSGLDVYAHNVETVEALTPHVRDRRATYQQSLSVLKRAKQTVPTLVTKTSIMLGMGETDEQVLQTMKDLRAVDCDVVTFGQYMRPTRRHMKVVEYVKPEKFDYWKEKALELGFLYCASGPLVRSSYKAGEAYIENVLRNRRQA

SEQ ID NO: 26536 - DNA, 948 bp, Yersinia pestis biovar Medievalis str. 91001
  CDS (1)..(948): transl_table=11
atggaacgcggcgtaaaataccgtgatgcagacaaaatggcgttaatcccggtaaaaaacgtggtgaccgaacgtcaggagctgttgcgtaaacccgagtggctaaaaatcaagcttccgactgattccagccgcattcagggtatcaaagctgcaatgcgtaagaatggtctgcattcggtttgtgaagaggcctcctgccctaacctgtctgagtgctttaaccacggtacggcaacatttatgatccttggtgcaatttgtacccgccgttgcccattctgtgacgttgcccatggtcgcccagtcacaccggatgctaatgagccagagaagctggcacagacgatccaagacatgggtctgcgctatgttgttatcacgtccgttgaccgtgatgacctacgtgatggtggtgctcagcattttgccgattgtatttcagcgatccgcgccaagaatccaaccatcaaaattgaaacgttagtccctgatttccgtggtcgtatggatcgcgcactcgatattctgaccgcaaccccaccagatgtatttaaccataatttggaaaacgtaccacgtgtttatcggcaggttcgtccaggggcgaactacgattggtcactgaaattacttgagcgcttcaaagaagcacatccagatatcccaactaaatccggcttaatggtcggcttgggcgaaaccaatgccgagattgtcgaggtcatgcatgatttacgccgccacggggtcacgatgttgacgctggggcaatacttgcaaccaagccgccatcatttacccgtacaacgttatgtcagcccggccgagtttgacgaaatgaaagcagaagccatggctatgggctttacccatgcagcctgtggcccatttgttcgctcttcttaccatgcagacctgcaagcgaaaggtatggaagtgaagtaa

SEQ ID NO: 26537 - protein, 315 aa, Yersinia pestis biovar Medievalis str. 91001
MERGVKYRDADKMALIPVKNVVTERQELLRKPEWLKIKLPTDSSRIQGIKAAMRKNGLHSVCEEASCPNLSECFNHGTATFMILGAICTRRCPFCDVAHGRPVTPDANEPEKLAQTIQDMGLRYVVITSVDRDDLRDGGAQHFADCISAIRAKNPTIKIETLVPDFRGRMDRALDILTATPPDVFNHNLENVPRVYRQVRPGANYDWSLKLLERFKEAHPDIPTKSGLMVGLGETNAEIVEVMHDLRRHGVTMLTLGQYLQPSRHHLPVQRYVSPAEFDEMKAEAMAMGFTHAACGPFVRSSYHADLQAKGMEVK

SEQ ID NO: 26538 - DNA, 972 bp, Thermus thermophilus HB27
  CDS (1)..(972): transl_table=11
atgaagcctaagtttgagacggtggagctcctctcccccacgggggaggtcgttgagctcaaggtggtgaagcggggcctggcccaggcccggcccgagcccgtggaccggaacaagcccgcctggatcaaggcccctttgcccaccgggcccagataccaggccctgaaggccatggtgcgggagcttaggctccacaccgtctgccaggaggccctctgccccaacatcggggagtgctggacccacgggacccttacggtgatgatcctgggggacatctgcacccgggcctgcaagttctgcgccgtccacaccgggaaccccaagggcctcgtggacccggaggaaccaaggagggtggccgaggccatcgcccgcatgggggtgcggtacgtggtcttgaccagcgtggaccgggatgaccttccggatggcggcgcctcccacttcgccgccaccatccgggccatcaaggagagggcccccggggtcttggtggaggccctgacccccgacttccagggggacctgaaggccgtggagacggtcctcgccgcgaaccccgaggtctacgcccagaacctggagacggtgcgccgcctcacccccaaggtccgcgacccccgggcggggtacgagcagaccctgaaggttctcgcccacgccaagaaggtccggcccgacatcctcaccaagtctagcctcatgctgggcttgggggagacggaggaggagatcctcgaggccatgcgggacctcagggccgcgggggtggacatcctcaccttgggccagtacctgaggcccacccccgcccacctccccgtggcccgctacgtcccccccgaggacttcaagcggtacgaggcctgggggtacgagctgggctttagggaggtcttcgccgggcccttggtgcggagctcctaccgggcggaccgggtcttcctggaggccacccaaagatga

SEQ ID NO: 26539 - protein, 323 aa, Thermus thermophilus HB27
MKPKFETVELLSPTGEVVELKVVKRGLAQARPEPVDRNKPAWIKAPLPTGPRYQALKAMVRELRLHTVCQEALCPNIGECWTHGTLTVMILGDICTRACKFCAVHTGNPKGLVDPEEPRRVAEAIARMGVRYVVLTSVDRDDLPDGGASHFAATIRAIKERAPGVLVEALTPDFQGDLKAVETVLAANPEVYAQNLETVRRLTPKVRDPRAGYEQTLKVLAHAKKVRPDILTKSSLMLGLGETEEEILEAMRDLRAAGVDILTLGQYLRPTPAHLPVARYVPPEDFKRYEAWGYELGFREVFAGPLVRSSYRADRVFLEATQR

SEQ ID NO: 26540 - DNA, 972 bp, Parachlamydia sp. UWE25
  CDS (1)..(972): transl_table=11
gtgatggaaaactctccaaaaactcgtcgcttaaatatcctaccagataatcctgaaaatactggagatggtgtggtagggcttggccgctttccttcatggttgcaccggccacttcctaaaggaaaccaacttcaaattactgggcaagtcatcaaccaaaatcgcttacacactgtttgcgaagaggctaaatgtcccaatctcttagaatgttggactaaaaaaactgccacatttcttgtaatgggtaaagagtgttcacgtaactgtggtttttgtgatatagacttttcaaaaaatcctaaacccctagatcgaagtgaaccgtcgagagttgctttatctgtccaacagttaggattaaagcacgttgtaatcacaatggtagcacgagatgatttgtctgatggaggaagttctcatctcgtcgaggtcattgaggcgattaggcaaactaatgaagatgtaactattgaggtcttaacttcggattttgaaggaaatcgaaaggctctaagctttgttttacaagctaaacctgaaatttttaatcataatattgaaacagttcgccgtttaactccacgtgttagacataaagccacttatgaaagaactttaagtgtacttgaacaagctgcccaaaagaaatatcactcccaacttaaggttaaatcagggataatggtggggttaggtgagactgaagaagaaatttttgaaacattattagatttaaaaagggtaggatgtgaaattgtcaccattggacagtatttacaacctaatcggcaaaaactccttgtaaaatcttttgttcatcctgatatatttaaaaaatatgaacaatatggattgagtataggaatacctcatctttattgtggaccttttgttagatctagctataacgcaaatttagttcttatgcgtgcaaatcaaaaagaagcaattgttaacagcgaatag

SEQ ID NO: 26541 - protein, 323 aa, Parachlamydia sp. UWE25
MMENSPKTRRLNILPDNPENTGDGVVGLGRFPSWLHRPLPKGNQLQITGQVINQNRLHTVCEEAKCPNLLECWTKKTATFLVMGKECSRNCGFCDIDFSKNPKPLDRSEPSRVALSVQQLGLKHVVITMVARDDLSDGGSSHLVEVIEAIRQTNEDVTIEVLTSDFEGNRKALSFVLQAKPEIFNHNIETVRRLTPRVRHKATYERTLSVLEQAAQKKYHSQLKVKSGIMVGLGETEEEIFETLLDLKRVGCEIVTIGQYLQPNRQKLLVKSFVHPDIFKKYEQYGLSIGIPHLYCGPFVRSSYNANLVLMRANQKEAIVNSE

SEQ ID NO: 26542 - DNA, 897 bp, Desulfovibrio vulgaris subsp. vulgaris str. Hildenborough
  CDS (1)..(897): transl_table=11
atgtcctcacccgacaattcctcgccatctttacgcatcccgccgtggctgcgggtgaagctgccctgtagccacacctttgccgacacccgcgcactggtcgaagggctcgggctgaacaccgtatgcaacagcgccaagtgcccgaacatgttcgagtgcttctcgtcgggcacggccaccttcctcatcctcggcaacgtctgtacccgcaactgcgcgttctgcaacatcacgccgggccatgtgtccccgccagaccccgatgaaccccggcgcgtcgccgaggctgcggcacgactcgccctgcggcatgtggtcgtcacgtccgtgacgcgcgacgacctcgacgatggcggggcggcacacttcgccgccaccatcacacggcttcgcgcagcgttgcccgccgccacggtcgaagtcctcattcccgacttcaggggcgaccatgcagccttgcgcactgtcatggcggctgcaccgcatatcgtgaaccacaatgtggagaccccccccgcacactacgcccgcatccgcccgcaggccgactacaggcaaagcctcgaactgctgcgacgtgtgaaggctgcaggtggcgtggccaagagtggactcatggtcggccttggcgagaatgacacagaggtcgagggggttctcgccgacctcgccgattgcggctgtgacatcgtcaccatcgggcagtacatgcgcccttcgcgccagcatccccccgtcgaacgctacgtgcatcctgatactttcgaaagcttcgccgcgtgtggccggggcatgggcattcccttcgtgttctccgcaccgctggtgcgtagcagctacaacgccgaaagcgcctataacgccctgtgcaccctccgcacggaacctgcctga

SEQ ID NO: 26543 - protein, 298 aa, Desulfovibrio vulgaris subsp. vulgaris str. Hildenborough
MSSPDNSSPSLRIPPWLRVKLPCSHTFADTRALVEGLGLNTVCNSAKCPNMFECFSSGTATFLILGNVCTRNCAFCNITPGHVSPPDPDEPRRVAEAAARLALRHVVVTSVTRDDLDDGGAAHFAATITRLRAALPAATVEVLIPDFRGDHAALRTVMAAAPHIVNHNVETPPAHYARIRPQADYRQSLELLRRVKAAGGVAKSGLMVGLGENDTEVEGVLADLADCGCDIVTIGQYMRPSRQHPPVERYVHPDTFESFAACGRGMGIPFVFSAPLVRSSYNAESAYNALCTLRTEPA

SEQ ID NO: 26544 - DNA, 963 bp, Bartonella quintana str. Toulouse
  CDS (1)..(963): transl_table=11
atggttacggttgttgatagagttacgagtagacgtttgcgtcatcctgaaaagatgcatcgtccggatacaagcattcagaaaaaaccagattggattcgtgtgaaagcgccaacatcaaagatatataaggagacgtatgatattgtacgcgctcataaattagtgacggtatgtgaagaagcgggttgtccaaatgttggcgaatgttggagccagcggcatgccagttttatgattttgggtgaaatatgtacacgggcttgtgctttttgcaacgttgcaacaggtattccgcttgcagtcgatgataatgagccagaacgtgtggcggatgctgttgcacagatggaattaaaacatgttgtgattacatctgttgatcgtgatgaccttgctgatggtggtgcacaacattttgcaaaagttatttatgctattcgtcgaaaagctcccaagacaacaattgaagtcctcacacctgattttcgccataaggatggagctttagaaattgttgttgctgctaagcctgatgtctttaatcataatttggaaacagttccatctaaatatttaaaagttcgtccaggggcgcgttattttcattcgattcggctcttacaacgtgttaaggaacttgatccgacgatcttcacaaaatcaggaattatggttggacttggggaagaacgaaatgaaattcttcagttgatggatgatttacgctctgctgatgttgactttatgacaattgggcaatatttgcaacctacacgaaaacatcatccggttattcgtttttttcctcctgaagagtttgagtcttttgccaagattggtaaagtaaagggttttttgcatatggcttccaatcctctaacgcgttcatctcatcatgcaggggatgatttcgcaattttgcaaaaagcacgtgatgaaaaatttgctttacagagataa

SEQ ID NO: 26545 - protein, 320 aa, Bartonella quintana str. Toulouse
MVTVVDRVTSRRLRHPEKMHRPDTSIQKKPDWIRVKAPTSKIYKETYDIVRAHKLVTVCEEAGCPNVGECWSQRHASFMILGEICTRACAFCNVATGIPLAVDDNEPERVADAVAQMELKHVVITSVDRDDLADGGAQHFAKVIYAIRRKAPKTTIEVLTPDFRHKDGALEIVVAAKPDVFNHNLETVPSKYLKVRPGARYFHSIRLLQRVKELDPTIFTKSGIMVGLGEERNEILQLMDDLRSADVDFMTIGQYLQPTRKHHPVIRFFPPEEFESFAKIGKVKGFLHMASNPLTRSSHHAGDDFAILQKARDEKFALQR

SEQ ID NO: 26546 - DNA, 963 bp, Bartonella henselae str. Houston-1
  CDS (1)..(963): transl_table=11
atggttacggttgttgatagagttacagatagacgtttgcgtcaccctgaaaaggcacatcgtcctgatacaagtgttcaaaaaaaaccggattggattcgtgtaaaagcgccaacatcacaggtctataaggaaacgcatggtattgtacgtgctcataaattagtaaccgtatgtgaagaagcgggttgcccaaatattggtgaatgttggagccagcgtcatgccagttttatgattttgggtgaaatatgtacgcgggcatgtgcattttgcaacgttgcaacaggtataccatttgccgttgatgagaacgagccagaacgtgtggcagatgctgttgcacggatggaattaaaacatgttgtcattacatcagttgatcgtgatgatcttgctgatggtggtgctgagcattttgcgaaagtgatttatgcgattcgtcgaaaagctcctaaaacaacaattgaagttctcacacctgattttcgccataaggatggagctttagaaattgttgttgctgctaaacctgatgtttttaatcataatttagaaacggttccttctaaatatttaaaggttcgtccaggggcacgttattttcattcgattcggttattacaacgtgttaaagaactggatccgacaatctttacaaaatcaggaattatggttggtcttggagaagaacgaaatgaaattctccaattgatggatgatttacgctctgcagatgttgactttatgacaattgggcaatatttgcagcctacgcgaaagcatcatccagttattcgttttgtgcctcccgaagagtttgagtcttttgccaaaattggtaaagtgaaaggttttttacatatggcttccaatcctctgacgcgttcatctcatcatgcgggtgatgattttgcaattttgcaaaaagcgcgtgatgaaaaatttgctttacagagatag

SEQ ID NO: 26547 - protein, 320 aa, Bartonella henselae str. Houston-1
MVTVVDRVTDRRLRHPEKAHRPDTSVQKKPDWIRVKAPTSQVYKETHGIVRAHKLVTVCEEAGCPNIGECWSQRHASFMILGEICTRACAFCNVATGIPFAVDENEPERVADAVARMELKHVVITSVDRDDLADGGAEHFAKVIYAIRRKAPKTTIEVLTPDFRHKDGALEIVVAAKPDVFNHNLETVPSKYLKVRPGARYFHSIRLLQRVKELDPTIFTKSGIMVGLGEERNEILQLMDDLRSADVDFMTIGQYLQPTRKHHPVIRFVPPEEFESFAKIGKVKGFLHMASNPLTRSSHHAGDDFAILQKARDEKFALQR

SEQ ID NO: 26548 - DNA, 1032 bp, Acinetobacter sp. ADP1
  CDS (1)..(1032): transl_table=11
atggatttaaaaataaatgaccaacccgataaaaatatttatcttggtgaaaaactacgtgggcaggaaaagctcgagcgtattcctgttaaaattattcctagtactgaaatagcagaaaaaccagattggattcgtaccaaaatcagtgatcccaaagaaatcaaacgtattcagactttattacgtcaacaaaaattgcatacggtgtgcgaagaagctgcttgtcctaacttgccacaatgttttggaagtggcacagccacttttatgattatgggcgatatctgcactcggcgctgccctttttgcgatgtcgcacatggtcggcccaatacactcgacccattagaaccccaacatttagcagaagcagtatccaatcttcagcttcaatatgtggttatcacctcggtagatcgagatgatcttaaggatggaggagcgcagcattttgttgattgcataaaagcaattcgtgcaaccaatcctcatacattaatcgaaattttagtgcctgattttcgtggtcgactcgaaatagctttaaaaattctagccagctctccgcctgatgtttttaatcacaatatcgaaactgttccacgtttgtatcgcgccctgcgaccaggttctgattaccaacattcattaaagcttttacagcaatttaaaaaatattgtccagatgtcgtcaccaaatgtggtctgatggttggacttggtgaagtagaagctgaagtcattaccttactcaatgatctgcgcgatcatgatattgagctggtcaccattggacaatacttacaaccctccaaagcgcatgcacctgtacatcgatttgtttcaccaacagaatttgaacattatgaacagcatggcaaacgtctaggttttaaaaatatctggagtgcaccgctggttcgctccagttatcatgcagatcgtcaataccgaggcgaagctgtaccgaagccttttacacgagaagatttaaaacaactaaaacataccacatctgatattgcttaa

SEQ ID NO: 26549 - protein, 343 aa, Acinetobacter sp. ADP1
MDLKINDQPDKNIYLGEKLRGQEKLERIPVKIIPSTEIAEKPDWIRTKISDPKEIKRIQTLLRQQKLHTVCEEAACPNLPQCFGSGTATFMIMGDICTRRCPFCDVAHGRPNTLDPLEPQHLAEAVSNLQLQYVVITSVDRDDLKDGGAQHFVDCIKAIRATNPHTLIEILVPDFRGRLEIALKILASSPPDVFNHNIETVPRLYRALRPGSDYQHSLKLLQQFKKYCPDVVTKCGLMVGLGEVEAEVITLLNDLRDHDIELVTIGQYLQPSKAHAPVHRFVSPTEFEHYEQHGKRLGFKNIWSAPLVRSSYHADRQYRGEAVPKPFTREDLKQLKHTTSDIA

SEQ ID NO: 26550 - DNA, 966 bp, Erwinia carotovora subsp. atroseptica SCRI1043
  CDS (1)..(966): transl_table=11
atgagtaaaccgattcagatcgaacgtggtgtcaaataccgcgatgccgataagatggccctaattccggtacgtactgtcgttaccgaacgccaagagcttctgcgcaaacctgaatggatgaagattaaacttccggcggattcgagccgtattcagggaatcaaagcggcaatgcgcaaaaatgggttgcactcagtttgcgaagaagcgtcctgtccgaatctggccgagtgtttcaaccacggcaccgccacctttatgattctgggcgccatttgtacgcgtcgctgtccgttctgtgacgttgcccacggccgaccgcttacgccggatgccaacgaaccagagaaactggcacagactatccatgacatgggcttacgctatgtcgtgatcacctccgttgaccgtgatgacctgcgcgacggtggagctcaacactttgcggactgcattagcgccattcgtcgcaaaaacccgcatattcgtatcgaaacgctggtgccagacttccgtggtcgtatggatcgcgcgttggaaatattgaccgccacgccaccagacgtgttcaaccataatctggaaaacgtgccgcgtgtttaccgacaggtacgccctggcgcgaactatgaatggtccctgaagttgctggaaaacttcaagaacgcgcatcccgatatcacgaccaaatcaggcctgatggttggtctgggggaaaccaatgctgaaatcgtggaagtcatgcgcgatcttcgccgccacggtgtgacaatgctgacgctgggacaatatttacagccgagccgccatcatctgccggtacagcgctacgtcagcccagatgagttcgatgagatgaaagccgaagcgatggcgatgggctttacccatgccgcctgcggcccgtttgttcgctcgtcctaccatgccgacttacaggccaagggcatcgaagtaaaataa

SEQ ID NO: 26551 - protein, 321 aa, Erwinia carotovora subsp. atroseptica SCRI1043
MSKPIQIERGVKYRDADKMALIPVRTVVTERQELLRKPEWMKIKLPADSSRIQGIKAAMRKNGLHSVCEEASCPNLAECFNHGTATFMILGAICTRRCPFCDVAHGRPLTPDANEPEKLAQTIHDMGLRYVVITSVDRDDLRDGGAQHFADCISAIRRKNPHIRIETLVPDFRGRMDRALEILTATPPDVFNHNLENVPRVYRQVRPGANYEWSLKLLENFKNAHPDITTKSGLMVGLGETNAEIVEVMRDLRRHGVTMLTLGQYLQPSRHHLPVQRYVSPDEFDEMKAEAMAMGFTHAACGPFVRSSYHADLQAKGIEVK

SEQ ID NO: 26552 - DNA, 993 bp, Propionibacterium acnes KPA171202
  CDS (1)..(993): transl_table=11
gtgagtgtcgaagcagacggtagaaagctcctccgagtcgaggtcaagaattctcagacgcccatcgagaacaaaccccactggatcaagactcgggccacaatgggtccggagtaccgcgacatgcgtcgccgaatgatcgacggagatctgcacaccgtgtgtcaagaggctggctgccccaatattttcgagtgttgggaggatcgcgaggccactttcctcatcggcggcgaccactgcacccgccgttgtgacttctgccagatcgagtcggccaagccggaaggctacgacaaagacgagccgcgtcgcgtcgcagagtccgtcaagcagatggggctgcgctacgctaccgttacgtcggtatgccgagacgacctcgaggacgaaggtgcctggctgtgcgccgagacgattcgtcaaatccaccaggtaactcccggcgtcggcgtcgagatgttagcccaagatttttccggcaaacaggacctgctcgacatcgtcttcgaagcacgcccggaggtcttcggtcacaaccttgagacggtcccccgcatcttcaagcgcattcgacccggattccgctacgaccgttctttggccgtcctggactctgcacatgaggccggtctgatcaccaagtcaaatctcattcttggcatgggcgagacccgtgaagaaatttcacaggccatgcgggcgctccatgacgccaacaccgacctgctgacgatcacccagtacctgcgcccgaactcctacctacaccccatcgaccgttgggtgacgcctcaggagttcgatgagttagccgaagaggcccgcgaaattggatttgtcggtgtgatgagcggaccgcttgtgcgatcctcctaccgggctggccgcctctatcggcaagctatggaagcacgcggcgagcgtccggtgatgatcgtgaccgggtaccgcgacggtgcgaaacctgcaccattcgcggccaaggagtga

SEQ ID NO: 26553 - protein, 330 aa, Propionibacterium acnes KPA171202
MSVEADGRKLLRVEVKNSQTPIENKPHWIKTRATMGPEYRDMRRRMIDGDLHTVCQEAGCPNIFECWEDREATFLIGGDHCTRRCDFCQIESAKPEGYDKDEPRRVAESVKQMGLRYATVTSVCRDDLEDEGAWLCAETIRQIHQVTPGVGVEMLAQDFSGKQDLLDIVFEARPEVFGHNLETVPRIFKRIRPGFRYDRSLAVLDSAHEAGLITKSNLILGMGETREEISQAMRALHDANTDLLTITQYLRPNSYLHPIDRWVTPQEFDELAEEAREIGFVGVMSGPLVRSSYRAGRLYRQAMEARGERPVMIVTGYRDGAKPAPFAAKE

SEQ ID NO: 26554 - DNA, 900 bp, Desulfotalea psychrophila LSv54
  CDS (1)..(900): transl_table=11
atggcttgttcccatcagaagaatgagcagatgcgcgttggtaaaccaaaatggcttcgtcgcagtctgcctaccggtcctgaatacgaaaaaatcagaacattgctcaagggcagtggtttgaccaccgtatgtcaggaggcgcagtgccccaatcaatttgaatgttactccaagggaacggcaacatttatgattatgggcgatcactgtacccgtaactgccgtttttgtgccgtggcccatggacccaaggccctgcccgatgaggatgaggcagagcgggtggcggatgcggtctctctcttgggcctgcgctatgccgttatcacctcggtgacccgggatgatctggccgatggtggagcatcctgttttgtcagggtcatagaggccatccgcaagaaaaaccccaagaccttgattgaggtgctgattcccgatcttgccggtaattggggggccctgcagactattctcgatgctcgtcccgatgtccttaaccacaatattgaaacagtgccccgactctactccgtagcccgtcctggtgctgagtatagacgttctctggaactcctgcgggaggtacgtcgtcgtgcccctcagatggtgactaagacgggtatgatgttgggccttggtgaagagacagaagagctctatgccacctggcaggacctgcgtgagtccgactgtgatatccttaccatgggccagtacctgcaacccacggtggatcatctgctggtgcaacgttttgttgagccgacagagtttgatcgtctgggcgatgtggctctggcaaaagattttctggctgtggcttccggcccctttgtccgtagctcctatgaggcggagaaactttttcgtaaggccgagctggcccgaaaatag

SEQ ID NO: 26555 - protein, 299 aa, Desulfotalea psychrophila LSv54
MACSHQKNEQMRVGKPKWLRRSLPTGPEYEKIRTLLKGSGLTTVCQEAQCPNQFECYSKGTATFMIMGDHCTRNCRFCAVAHGPKALPDEDEAERVADAVSLLGLRYAVITSVTRDDLADGGASCFVRVIEAIRKKNPKTLIEVLIPDLAGNWGALQTILDARPDVLNHNIETVPRLYSVARPGAEYRRSLELLREVRRRAPQMVTKTGMMLGLGEETEELYATWQDLRESDCDILTMGQYLQPTVDHLLVQRFVEPTEFDRLGDVALAKDFLAVASGPFVRSSYEAEKLFRKAELARK

SEQ ID NO: 26556 - DNA, 894 bp, Rickettsia typhi str. Wilmington
  CDS (1)..(894): transl_table=11
atgactaatgtaaacagaagaccagattggataaaagtaaaagctcctaattctgcagagtattataatacaaaagatttaataaagaatttgagattaaatactgtgtgtgaagaagctgcttgtcctaatattggtgagtgttggtcgaggaaacatgccaccgtgatgattttaggttcagtttgtactagagcttgtagattttgtaatgtcaaaacgggtagaccggatttacttgatccacacgaaccgcgaaggttagcagaagcagtacaaaagttaaatttgaatcatgtagtaattacttctgttgatcgtgatgatcttgaagacggtggagcttcacattttgctgagtgtattaatgaaattagaaggtcatcaccaaatactactatagagattcttacacctgattttttaagaaaagcaggagcagtcgaagtaatagcaaattcaaagcctgatgtttttaatcataatgtcgaaacagtaccatctttatataaaacgattagacctggagctaggtattataattctttaagcttacttcacaatattaaaaaattatctcctgaaatttttacaaaatctggtatgatggtagggcttggtgaagaaataaatgaagtagtgcaggttatggatgatttaagagaagcaaatgttgattttttaactattgggcagtatcttcaacctactaaaagtcatgctgaggtcataaaatacgttactcctgaagaatttaaatatttagagcgaatagcaaaaacaaaaggattcttaatggtgtctgcaactccgttaacacgttcttcataccatgcagataaggattttcaaaaattaaaagagaattataatataaggcttgcatcaatgtaa

SEQ ID NO: 26557 - protein, 297 aa, Rickettsia typhi str. Wilmington
MTNVNRRPDWIKVKAPNSAEYYNTKDLIKNLRLNTVCEEAACPNIGECWSRKHATVMILGSVCTRACRFCNVKTGRPDLLDPHEPRRLAEAVQKLNLNHVVITSVDRDDLEDGGASHFAECINEIRRSSPNTTIEILTPDFLRKAGAVEVIANSKPDVFNHNVETVPSLYKTIRPGARYYNSLSLLHNIKKLSPEIFTKSGMMVGLGEEINEVVQVMDDLREANVDFLTIGQYLQPTKSHAEVIKYVTPEEFKYLERIAKTKGFLMVSATPLTRSSYHADKDFQKLKENYNIRLASM

SEQ ID NO: 26558 - DNA, 963 bp, Symbiobacterium thermophilum IAM 14863
  CDS (1)..(963): transl_table=11
atggccgagttccggatcgaccccgagatggagctgcccgtcctgcccagccgcgcccgggcggacgtgagccggaaacccgagtggctgaagatcaacctgcgtacggatgcggagttcgtcgagctgaagcggctgatgcgcggccaggggctgcacacggtctgcgaggaggcccgctgccccaacatcttcgagtgctggaaccggcggacggcgacgttcatgatcctgggcgacatctgcacccgcaactgcgggttctgcgccgtgcggtcgggcgtgcccaccgggctggacctggcggagcctgaacgggtggcggacgcctgcgtgcagctgggcctgcggcacgtggtggtcacctcggtggcccgggacgacctgagcgacggcggtgcgtccatcttcgccgagaccatccgggccatccggcgcaagaaccccttcaccggcgtggaggtgctcatccccgacttcggcggcaactgggacgccctggccgtcgtcatggacgcggagcccgacgtcctcaaccacaacatcgagacggtgcgccggctttcggaccgggtgcggtcccgggcgaagtacgaccggtcgctggagctgctccgccgggcgaaggagatgaagccccacgtcagcacgaagtcctcgatcatggtcggcctgggcgagaccatgcaggagctgtacgaggcgatggacgacctgcgcgcggcgggcgtcgacatcgtgaccttcggccagtacctgcggcccacggcccgccatctggcggtggagaagttctacaccccggccgagttcgaacacctgcgggaggaggccctgaagcgggggttcgcccattgcgagtcgggtcccctggtacgttcctcctaccacgccgacgagcagtcggcgcaggccgtcgcccggcgcacgggtgccgggcgcgcggcgcagaccggggactga

SEQ ID NO: 26559 - protein, 320 aa, Symbiobacterium thermophilum IAM 14863
MAEFRIDPEMELPVLPSRARADVSRKPEWLKINLRTDAEFVELKRLMRGQGLHTVCEEARCPNIFECWNRRTATFMILGDICTRNCGFCAVRSGVPTGLDLAEPERVADACVQLGLRHVVVTSVARDDLSDGGASIFAETIRAIRRKNPFTGVEVLIPDFGGNWDALAVVMDAEPDVLNHNIETVRRLSDRVRSRAKYDRSLELLRRAKEMKPHVSTKSSIMVGLGETMQELYEAMDDLRAAGVDIVTFGQYLRPTARHLAVEKFYTPAEFEHLREEALKRGFAHCESGPLVRSSYHADEQSAQAVARRTGAGRAAQTGD

SEQ ID NO: 26560 - DNA, 897 bp, Bacillus licheniformis ATCC 14580
  CDS (1)..(897): transl_table=11
ttggcaaagaaagacgagcacctaagaaagcccgaatggcttaaaatcaagctgaacacgaatgaaaactatacgggcttaaaaaaattaatgcgggaaaacaacctccatacggtctgcgaagaggcaaaatgcccgaacatccacgaatgctgggccgtcagacgtaccgcgacctttatgattctcggatctgtctgtacgagagcctgccgcttctgtgcggtgaagacggggctgccgacagagcttgacttgaatgagccggaaagagtcgcagattctgtgagcatcatgaacctgaaacacgcggtcattacagccgttgcccgtgacgatttaaaagacggaggagcgggggtattcgccgaaaccgtacgcgccgtccggagaaaaagcccatttacaacaatcgaagttctgccgtccgatatgggcggagactataataatttgaaaacgctgatggatacgcgtccggacattttaaaccataatattgaaacggtccgccgcctgacgccgagagtccgtgcgagagctacatatgaaagatcattggaatttttgcgccgcgccaaagagatgcagccggacatcccgacgaaatccagcatcatgatcggtcttggcgaaacaaaagaagaaatcatcgaaacaatggacgaccttcttgcgaacaacgtcgacatcatggcaatcggccagtatctgcagccgtccaaaaaacacattaaagtacagaaatattaccatcctgacgagtttgccgaactgaaagaaatcgccatggaaaagggcttcagccactgtgaagcaggaccgctcgtccgttcttcataccatgccgacgaacaggtgaatgaagcgtctaaaaaacgccaggcgcaggcataa

SEQ ID NO: 26561 - protein, 298 aa, Bacillus licheniformis ATCC 14580
MAKKDEHLRKPEWLKIKLNTNENYTGLKKLMRENNLHTVCEEAKCPNIHECWAVRRTATFMILGSVCTRACRFCAVKTGLPTELDLNEPERVADSVSIMNLKHAVITAVARDDLKDGGAGVFAETVRAVRRKSPFTTIEVLPSDMGGDYNNLKTLMDTRPDILNHNIETVRRLTPRVRARATYERSLEFLRRAKEMQPDIPTKSSIMIGLGETKEEIIETMDDLLANNVDIMAIGQYLQPSKKHIKVQKYYHPDEFAELKEIAMEKGFSHCEAGPLVRSSYHADEQVNEASKKRQAQA

SEQ ID NO: 26562 - DNA, 897 bp, Bacillus cereus E33L
  CDS (1)..(897): transl_table=11
atgacaaaacaaacagaatataagcgcaagcccgaatggttgaaaattaagttaaacacgaatgaaaactatacaggcttaaagaaaatgatgcgttctaagaatcttcatacagtttgtgaagaagcgaaatgtccgaatattcatgaatgctgggctgtaagaaaaacagcaacatttatgattttaggagcagtatgtacacgtgcttgtcgtttttgtgcggttaaaacaggcttaccaacagagcttgatttacaagagccagaacgcgtagcagattctgtagtacaaatgggcttaaagcacgttgttataacagcggttgcacgtgatgatttaaaagacgggggagcagctgtttttgctgaaacagtacgcgctgttcgtcgtaaaaatccatttacgtcaatcgaagtattaccatctgatatgggtggagtagaagaaaacttaaaaatgttaatggatgcaaaaccagatattttaaaccataacattgaaacagtacgtcgattatctgaccgagttcgcgctagagcaaaatatgatcgttcattagagtttttacgtcgagcgaaagaaatgcagcctgatattccaactaaatcgagcattatggtgggcttaggtgaaacgagagaagatttaattgaagcaatggatgacttacgtgcaaacaatgtggatattttaactcttggacaatacctacaaccatctaagaagcatttaccagttcttaaatattacccaccagcagaatttgcagaacttaaagaaattgcacttagcaaaggatttagccactgtgaagctggcccacttgtgcgttcttcttatcatgcggacgagcaagttcgttctgcaaaagaaaacacagcagaagcaaaataa

SEQ ID NO: 26563 - protein, 298 aa, Bacillus cereus E33L
MTKQTEYKRKPEWLKIKLNTNENYTGLKKMMRSKNLHTVCEEAKCPNIHECWAVRKTATFMILGAVCTRACRFCAVKTGLPTELDLQEPERVADSVVQMGLKHVVITAVARDDLKDGGAAVFAETVRAVRRKNPFTSIEVLPSDMGGVEENLKMLMDAKPDILNHNIETVRRLSDRVRARAKYDRSLEFLRRAKEMQPDIPTKSSIMVGLGETREDLIEAMDDLRANNVDILTLGQYLQPSKKHLPVLKYYPPAEFAELKEIALSKGFSHCEAGPLVRSSYHADEQVRSAKENTAEAK

SEQ ID NO: 26564 - DNA, 963 bp, Mannheimia succiniciproducens MBEL55E
  CDS (1)..(963): transl_table=11
gtgagtaccgcatttaaaatggaacgaggggtaaaataccgcgatgcagcgaaaacctcgatcattcaagttaaaaatattgatcccgaccaggagttactgcaaaaaccttcctggatgaagataaaacttcccgccaattcggctaaaatccaaagtattaaaaacggtatgcgtcgtcacgggttaaattccgtttgtgaagaagcttcatgccctaatttgcacgaatgttttaatcatggcacggcgacatttatgatcctcggggcaatttgtacgcgccgttgcccgttctgtgacgttgcgcacggtaaaccgttgccgccggatcctgaagaaccgaaaaaattagcggaaactattcaggatatgaaattgaaatatgtggtgattacttccgttgaccgcgacgacttgcctgatcgcggtgcggggcattttgccgaatgtatcaaggaaatccgcaaaattaacccgaatacccaaattgaaattttggtgcctgatttccgcggacgtattgaacaggcgttggataaattaaaagacaatccgccggatgtgtttaatcataatctggaaaatgtacctcgtttgtatcgcgatattcgtccgggtgcggattatcaatggtcgctgaaattattacgtgaatttaaagcattattcccgcatattccaaccaaatcaggcttaatggtaggattgggcgagacaaacgaagaaattttaaacgtgatgcaagacctgagaaataacggggtaaccatgctgaccttagggcaatatttgcagccaagccgtttccatttaccggtcgcccgttatgtgccgcctgaagaatttgacgaattccgcaccaaagcagaagtcatgggctttgaacacgcagcctgcggtccgtttgtgcgttcttcttaccatgcggatttacaagccagcggcggattggtgaagtaa

SEQ ID NO: 26565 - protein, 320 aa, Mannheimia succiniciproducens MBEL55E
MSTAFKMERGVKYRDAAKTSIIQVKNIDPDQELLQKPSWMKIKLPANSAKIQSIKNGMRRHGLNSVCEEASCPNLHECFNHGTATFMILGAICTRRCPFCDVAHGKPLPPDPEEPKKLAETIQDMKLKYVVITSVDRDDLPDRGAGHFAECIKEIRKINPNTQIEILVPDFRGRIEQALDKLKDNPPDVFNHNLENVPRLYRDIRPGADYQWSLKLLREFKALFPHIPTKSGLMVGLGETNEEILNVMQDLRNNGVTMLTLGQYLQPSRFHLPVARYVPPEEFDEFRTKAEVMGFEHAACGPFVRSSYHADLQASGGLVK

SEQ ID NO: 26566 - DNA, 912 bp, Bacillus licheniformis ATCC 14580
  CDS (1)..(912): transl_table=11
atggagatgatggaattggcaaagaaagacgagcacctaagaaagcccgaatggcttaaaatcaagctgaacacgaatgaaaactatacgggcttaaaaaaattaatgcgggaaaacaacctccatacggtctgcgaagaggcaaaatgcccgaacatccacgaatgctgggccgtcagacgtaccgcgacctttatgattctcggatctgtctgtacgagagcctgccgcttctgtgcggtgaagacggggctgccgacagagcttgacttgaatgagccggaaagagtcgcagattctgtgagcatcatgaacctgaaacacgcggtcattacagccgttgcccgtgacgatttaaaagacggaggagcgggggtattcgccgaaaccgtacgcgccgtccggagaaaaagcccatttacaacaatcgaagttctgccgtccgatatgggcggagactataataatttgaaaacgctgatggatacgcgtccggacattttaaaccataatattgaaacggtccgccgcctgacgccgagagtccgtgcgagagctacatatgaaagatcattggaatttttgcgccgcgccaaagagatgcagccggacatcccgacgaaatccagcatcatgatcggtcttggcgaaacaaaagaagaaatcatcgaaacaatggacgaccttcttgcgaacaacgtcgacatcatggcaatcggccagtatctgcagccgtccaaaaaacacattaaagtacagaaatattaccatcctgacgagtttgccgaactgaaagaaatcgccatggaaaagggcttcagccactgtgaagcaggaccgctcgtccgttcttcataccatgccgacgaacaggtgaatgaagcgtctaaaaaacgccaggcgcaggcataa

SEQ ID NO: 26567 - protein, 303 aa, Bacillus licheniformis ATCC 14580
MEMMELAKKDEHLRKPEWLKIKLNTNENYTGLKKLMRENNLHTVCEEAKCPNIHECWAVRRTATFMILGSVCTRACRFCAVKTGLPTELDLNEPERVADSVSIMNLKHAVITAVARDDLKDGGAGVFAETVRAVRRKSPFTTIEVLPSDMGGDYNNLKTLMDTRPDILNHNIETVRRLTPRVRARATYERSLEFLRRAKEMQPDIPTKSSIMIGLGETKEEIIETMDDLLANNVDIMAIGQYLQPSKKHIKVQKYYHPDEFAELKEIAMEKGFSHCEAGPLVRSSYHADEQVNEASKKRQAQA

SEQ ID NO: 26568 - DNA, 990 bp, Legionella pneumophila subsp. pneumophila str. Philadelphia 1
  CDS (1)..(990): transl_table=11
atgggcaaattgatcgatattccaatcgttgtggaaagtggacaaaaatataagacatctcagggtgtgacagctattaaagatggaataaaatcatcaggtcaagatcatgagcgattgccaaaaccgaagtggcttcgtatagtcaatcatacaactccagcctatagccaagttaaagagcaagtgcaaaaacatcgtttggcaacagtttgtgaagaagcgaaatgccccaacatctcagaatgttggtctcatggaactgcaactattatgttaatgggagcagtatgtacccgggcttgccgattttgttctgtggatacaggaaatccgcatggttggcttgatgcagaagaacctgagaataccgcagaaactgtggccttaatgaatctggattatgtggttttaacctcagttaaccgtgatgatttacctgatgggggggcgaatcattatgccaaaaccattagagcaatcaaaaaacgatctccccgaaccaaagtcgaagcgctaacccccgattttcaaggaagtgaaagagatgttgctgtattgttagatagtggcgttgatgtgtttgcgcaaaatgtagaaacggttgagcgcctgacacacccggtaagagataatcgagcgggttatcagcaaaccttgaatgtactggcttttgctaagaaatatcgaccggatgttctgaccaaaaccagtttgatgttgggtttgggtgaaaccgatgaggaaattatacagactatggatgaccttcgaactcatcacgtggatattttgactttgggacaatatttgcaaccaactaaaaatcatttacctatagcacgttacgtaactcctgaaactttttctgaattaaggcaaattggtctaaaaaagggcttttttgaagtggcttcaggcccattagttcgatcaagctatagggctgaccgagtgttcaaacgggataatttagggcttgatgtttga

SEQ ID NO: 26569 - protein, 329 aa, Legionella pneumophila subsp. pneumophila str. Philadelphia 1
MGKLIDIPIVVESGQKYKTSQGVTAIKDGIKSSGQDHERLPKPKWLRIVNHTTPAYSQVKEQVQKHRLATVCEEAKCPNISECWSHGTATIMLMGAVCTRACRFCSVDTGNPHGWLDAEEPENTAETVALMNLDYVVLTSVNRDDLPDGGANHYAKTIRAIKKRSPRTKVEALTPDFQGSERDVAVLLDSGVDVFAQNVETVERLTHPVRDNRAGYQQTLNVLAFAKKYRPDVLTKTSLMLGLGETDEEIIQTMDDLRTHHVDILTLGQYLQPTKNHLPIARYVTPETFSELRQIGLKKGFFEVASGPLVRSSYRADRVFKRDNLGLDV

SEQ ID NO: 26570 - DNA, 867 bp, Bacteroides fragilis YCH46
  CDS (1)..(867): transl_table=11
atgggaaacgataaacgggtgcgcaaacccgaatggcttaaaatcagcattggagccaatgaacgctataccgagaccaaacgcattgtcgaatcgcactgcctgcacaccatctgtagcagtgggcgttgccccaacatgggcgaatgctggggaaaagggacagctacgttcatgattgccggtgacatctgtacccgcagttgtaaattctgtaatacccagaccggacgacctctgcctttggatcccgacgaaccggcccacgttgcagaatcgattgccctgatgaaactctcacacgcagttatcacatctgtagaccgcgatgatctgcctgatttgggtgcagcccattgggcacaaacaattcgtgaaatcaaacgactaaatccggaaacaactaccgaagtactgattcccgatttccaaggacgcaaagagcttattgaccaagtgataaaagcctgtcccgaaatcatctcccataacatggagactgtgaaacgcatcagtccacaggtgcgtagtgccgccaactatcacaccagcctggaagtgatccgccaaatagccgaaagcggtattacggcaaaatcgggcattatggttggtctgggtgaaactcctgctgaagtagaagagttaatggacgacctgatttccgtcggttgcaaaatcctcaccatcgggcaatatctgcagccaacccacaaacacttcccggttgcagcatacattactccggaacagtttgctgtttataaagaaacaggactgaagaaagggttcgaacaagtggaaagcgcaccattagtacgctcctcgtatcatgcagaaaaacatatccgatttaataataagtag

SEQ ID NO: 26571 - protein, 288 aa, Bacteroides fragilis YCH46
MGNDKRVRKPEWLKISIGANERYTETKRIVESHCLHTICSSGRCPNMGECWGKGTATFMIAGDICTRSCKFCNTQTGRPLPLDPDEPAHVAESIALMKLSHAVITSVDRDDLPDLGAAHWAQTIREIKRLNPETTTEVLIPDFQGRKELIDQVIKACPEIISHNMETVKRISPQVRSAANYHTSLEVIRQIAESGITAKSGIMVGLGETPAEVEELMDDLISVGCKILTIGQYLQPTHKHFPVAAYITPEQFAVYKETGLKKGFEQVESAPLVRSSYHAEKHIRFNNK

SEQ ID NO: 26572 - DNA, 990 bp, Burkholderia mallei ATCC 23344
  CDS (1)..(990): transl_table=11
atgactgaccttaccgctacccccgcacccgccgaaccggccgcttccgcctacgatccgaccgccaagcagaaggcgcaggcgaagaccgcgcgcattccgatcaagatcgtcccgatcgagaagctgaagaagcccgaatggatccgcgtgaaggcggccaccagcagctcgcgcttcaacgagatcaagacgatcctgcgcgagcacaacctgcatacggtgtgcgaggaagcgagctgcccgaacatcggcgaatgcttcggcaagggcaccgcgacgttcatgatcatgggcgacaagtgcacgcgccgctgcccgttctgcgacgtcggccacggccggcccgatccgctcgacgcagacgagccgaagaacctcgcgcgcacgatcgcggcgctcaagctcaagtacgtggtgatcacgagcgtcgaccgcgacgatctgcgcgacggcggcgccggccacttcgtcgagtgcatccgcgaagtgcgcgagcagtcgcccgcgacgcgcatcgagatcctgacgccggacttccgtggccgcctcgaccgtgcgctcgcgatcctgaacgcggcgccgcccgacgtgatgaaccacaatctcgaaacggtgccgcgcctgtacaaggaggcgcgccccggctcggactatgcgcattcgctgaagctcctgaaggatttcaaggcgctgcatccggacgtcgcgacgaaatcgggcctgatggtcggcctgggcgagacgaccgacgagatcctgcaggtgatgcgcgacctgcgcgcgcacgacgtcgacatgctgacgatcggccaatacctgcagccgtccgagcaccatctgccggtgcgcgagtacgtgcatccggacacgttcaagatgtacgaggaagaggcgtacaagatgggcttcacgcacgcggccgtcggcgcgatggtgcgctcgagctatcacgccgatctgcaggcgcacggcgccggggtggtttga

SEQ ID NO: 26573 - protein, 329 aa, Burkholderia mallei ATCC 23344
MTDLTATPAPAEPAASAYDPTAKQKAQAKTARIPIKIVPIEKLKKPEWIRVKAATSSSRFNEIKTILREHNLHTVCEEASCPNIGECFGKGTATFMIMGDKCTRRCPFCDVGHGRPDPLDADEPKNLARTIAALKLKYVVITSVDRDDLRDGGAGHFVECIREVREQSPATRIEILTPDFRGRLDRALAILNAAPPDVMNHNLETVPRLYKEARPGSDYAHSLKLLKDFKALHPDVATKSGLMVGLGETTDEILQVMRDLRAHDVDMLTIGQYLQPSEHHLPVREYVHPDTFKMYEEEAYKMGFTHAAVGAMVRSSYHADLQAHGAGVV

SEQ ID NO: 26574 - DNA, 969 bp, Methylococcus capsulatus str. Bath
  CDS (1)..(969): transl_table=11
atgaaaaccctggatgaaaatcaggcgccgtcgcgccagacgccggagtcccatcggcggggcgcggaaaaactctcgcgcatccccgtcaaggtcgaacccggcgcgcctctacgcaagcccgactggattcgggtccgggccgggtcgggcgacgaagttcggcgcgtgaagcggctgctgcgcgagcgcggtctgcacagcgtctgcgaagaagcggcctgtcccaatctggcggaatgtttcggccacggcaccgccaccttcatgatcctcggcgacatctgcacccgccgctgccccttctgcgacgtcgcccacggccgcccggcgccgcccgacccggccgaacccgagcgtctcgcggaaaccatcgccctgctgagactgcgctacgtggtgatcacctcggtcgaccgggacgatctgcgcgacggcggcgcggcccatttcgccgcctgcatccgggccttgcgcacacgctcccccgcgctgtccgtcgagattctgaccccggatttccgtggacggatggagattgccctcgatttgctcgccgccgatccgccggacgtgttcaaccacaacatcgaaaccgtgccccgcctgtaccgccaggcgcggcccggcgccgactaccgccagtcgctggagctcctggcgcggttccgcgacaaggtgccgggcgtgccgaccaagtcggggctgatgctcggcctgggcgagaccctggacgaggtgcgcgaggcgctgcgcgatctccgcggccatggctgcgagatgctcacgctgggacagtatttgcagcccagtcgggaccacctgcccgtggtgcgctacgttccgccggcggaatttgatgaactcgcggggtatgcgcgggagctgggattcgccagcgtcgccagcgctcccctggtgcgttcgtcgtatcatgccgaccagcaggccgcgatcatcggacgctga

SEQ ID NO: 26575 - protein, 322 aa, Methylococcus capsulatus str. Bath
MKTLDENQAPSRQTPESHRRGAEKLSRIPVKVEPGAPLRKPDWIRVRAGSGDEVRRVKRLLRERGLHSVCEEAACPNLAECFGHGTATFMILGDICTRRCPFCDVAHGRPAPPDPAEPERLAETIALLRLRYVVITSVDRDDLRDGGAAHFAACIRALRTRSPALSVEILTPDFRGRMEIALDLLAADPPDVFNHNIETVPRLYRQARPGADYRQSLELLARFRDKVPGVPTKSGLMLGLGETLDEVREALRDLRGHGCEMLTLGQYLQPSRDHLPVVRYVPPAEFDELAGYARELGFASVASAPLVRSSYHADQQAAIIGR

SEQ ID NO: 26576 - DNA, 1059 bp, Nocardia farcinica IFM 10152
  CDS (1)..(1059): transl_table=11
gtgacctcagtcgacaccccgacaccgcacggcggcacccccgccccggcccccgccaccgcgaacggccgcaagctcctgcgcatcgaggcgcgcaacgcgcagaccccgatcgagcgcaaacccaagtggatccgcacgcgcgccaccatgggcccggagtactccgagctcaagggcttggtcaaacgcgaaggcctgcacaccgtctgcgaggaagcgggctgccccaacatcttcgaatgctgggaagaccgcgaggcgacgttcctcatcggcggcgagcagtgcacccggcgctgcgatttctgccagatcgacaccggcaaaccggccgccctcgaccgtgacgagccccgccgcgtcgccgagtccgtccaggcgatggggctgcgctactccaccatcaccggcgtcgcccgcgacgacctggaggacggcggcgcctggctctacgccgagaccgtgcgtgccatcaagcgcctcaaccccgccaccggtgtcgagctgctcatccccgacttcaacgccgatcccgaccagctcgccgaggtgttctccgcccgccccgaggtgctcgcgcacaatctcgagacggtgccgcgcatcttcaagcgcatccgccccgccttccgctacgagcgctcgctctcggtgctcaccgccgcccgcgaggcgggcctggtcaccaagtcgaacctgatcctcggcatgggcgagacccccgaagaggtcaccgaggcgatgcgcgacctgcacgaggcggggtgcgacatcctcaccatcacccagtacctgcgcccgtcgccccggcaccaccccgtcgaccgctgggtcaagccggaggagttcgtcgagcactcccgcgtcgccgaggagatcggtttcgccggcgtcatggcgggcccgctggtgcgctcctcctaccgcgccggccgtctctacgcccaggcgatggcgcaccacggccgtgagatcccgcccgcgatggcacatctcgcggaggaaggcacggcctcgcaggaagcctcggcggtactggcccggttcggtagctga

SEQ ID NO: 26577 - protein, 352 aa, Nocardia farcinica IFM 10152
MTSVDTPTPHGGTPAPAPATANGRKLLRIEARNAQTPIERKPKWIRTRATMGPEYSELKGLVKREGLHTVCEEAGCPNIFECWEDREATFLIGGEQCTRRCDFCQIDTGKPAALDRDEPRRVAESVQAMGLRYSTITGVARDDLEDGGAWLYAETVRAIKRLNPATGVELLIPDFNADPDQLAEVFSARPEVLAHNLETVPRIFKRIRPAFRYERSLSVLTAAREAGLVTKSNLILGMGETPEEVTEAMRDLHEAGCDILTITQYLRPSPRHHPVDRWVKPEEFVEHSRVAEEIGFAGVMAGPLVRSSYRAGRLYAQAMAHHGREIPPAMAHLAEEGTASQEASAVLARFGS

SEQ ID NO: 26578 - DNA, 990 bp, Legionella pneumophila str. Lens
  CDS (1)..(990): transl_table=11
atgggcaaattgatcgatattccaatcgttgtggaaagtggacaaaaatataagacatctcaaggtgtgacagctattaaagatggaataaaatcatcaggtcaagatcatgagcgattgccaaaaccgaagtggctccgtatagtcaatcatacaactccagcctatagccaagttaaagagcaagtgcaaaaacatcgtttggcaacagtttgtgaagaagcgaaatgccccaacatctcagaatgttggtctcatgggactgcaactattatgttaatgggagcagtatgtacccgggcttgccgattttgttctgttgatacaggaaatccgcatggttggcttgatgcagaagaacctgagaataccgcggaaactgtagctttaatgaatctggattatgtggttttaacttcagttaaccgtgatgatttacctgatggaggggcgaatcattatgccaaaaccattagagcaatcaaaaaacgatctccccgaaccaaagtcgaagcgctaactcccgattttcaaggaagtgaaagagatgtcgctgtattgttagatagtggccttgatgtgtttgcgcaaaatgtagaaacggttgagcgtctgacacacccggtaagagataatcgagcgggttatcagcaaaccttgaatgtactggcttttgccaagaaatatcgacctgatgttctgaccaaaaccagtttgatgttaggattgggtgaaaccgatgaagaaattatacggactatggatgacctccgagctcatcacgtggatattttgactttgggacaatatttgcaaccaactaaaaatcatttacctatagcacgttacgtaactcctgaaactttttctgaattaaggcaaattggtctgaaaaaagggttttttgaagtcgcttctggcccactggttcgatcaagttatagggctgaccgagtgttcaaacgggataatttagggcttgatgtttga

SEQ ID NO: 26579 - protein, 329 aa, Legionella pneumophila str. Lens
MGKLIDIPIVVESGQKYKTSQGVTAIKDGIKSSGQDHERLPKPKWLRIVNHTTPAYSQVKEQVQKHRLATVCEEAKCPNISECWSHGTATIMLMGAVCTRACRFCSVDTGNPHGWLDAEEPENTAETVALMNLDYVVLTSVNRDDLPDGGANHYAKTIRAIKKRSPRTKVEALTPDFQGSERDVAVLLDSGLDVFAQNVETVERLTHPVRDNRAGYQQTLNVLAFAKKYRPDVLTKTSLMLGLGETDEEIIRTMDDLRAHHVDILTLGQYLQPTKNHLPIARYVTPETFSELRQIGLKKGFFEVASGPLVRSSYRADRVFKRDNLGLDV

SEQ ID NO: 26580 - DNA, 969 bp, Photobacterium profundum SS9
  CDS (1)..(969): transl_table=11
atgagcaaaccaattaagatcgaacaaggtatcaaataccgtgatgccgacaaaatggcgctaattcctgtacgcaatgttgcagaagaagcacctaaagaagtcttacgaaagccagcttggatgaagattaaacttccgtctgacagcaaacgtattcaagaaatcaaatcagcactgcgtaagaataagcttcactcggtttgtgaagaagcatcttgccctaaccttgctgagtgctttaaccacggtactgctaccttcatgattttaggtgcgatttgtactcgtcgttgcccgttctgtgatgttgctcatggtcgtcccctaccaccaaatgcagaagagccaagccatttagctcaaacaatcgcagacatgaagctgaaatacgttgttatcacttcagttgaccgtgatgacctacgtgatggtggcgcacaacactttgttgattgtatccgtgaaattcgcgagaaaagcccagaaatccatatcgaaacattagtgcccgacttccgcggtcgtatggatcgtgcgctggatattcttcaaggtacgccacctaatgtgttcaatcacaaccttgaaacagcacctcgtttgtaccgtaaagctcgccctggcgcgaactaccagtggtcacttgatctgctgaaaaacttcaaagagatccatcctgaagtgccgactaagtctggtgttatgatggggcttggtgaaacaaaagaagaaattattcaagtattgaaagatcttcgcgcacatggtgtaacaatgctaacactcggtcagtacttagcacctagtcgtcaccatttacctgttgaacgttatgtaccaccagcagagtttgatgaactaaaagagatcgcacttgaattaggtttcacacatgctgcatgtggtccttttgttcgctcatcttatcatgctgatcttcaggctcagggtcttgaaattaagtaa

SEQ ID NO: 26581 - protein, 322 aa, Photobacterium profundum SS9
MSKPIKIEQGIKYRDADKMALIPVRNVAEEAPKEVLRKPAWMKIKLPSDSKRIQEIKSALRKNKLHSVCEEASCPNLAECFNHGTATFMILGAICTRRCPFCDVAHGRPLPPNAEEPSHLAQTIADMKLKYVVITSVDRDDLRDGGAQHFVDCIREIREKSPEIHIETLVPDFRGRMDRALDILQGTPPNVFNHNLETAPRLYRKARPGANYQWSLDLLKNFKEIHPEVPTKSGVMMGLGETKEEIIQVLKDLRAHGVTMLTLGQYLAPSRHHLPVERYVPPAEFDELKEIALELGFTHAACGPFVRSSYHADLQAQGLEIK

SEQ ID NO: 26582 - DNA, 930 bp, Haloarcula marismortui ATCC 43049
  CDS (1)..(930): transl_table=11
atgagtcgttcgcgcaagcctgactggctgaagatgcggccaccgtcgggcgagcggttcaccgatatcaagcagacgctccgggaccgaaacctcaatacggtctgtgaggaagccaactgccccaacctcggggagtgctggagcgggcgcgacggaccgggaacggcgacgttcatgttgatgggcgaccgctgttcgcggggctgtaacttctgtgacgtggagacgggcgggatggacccgctggaccccgacgagccacagcaggtggccgacgccgtcgcggagatcgggctggactacgtggtactgaccagcgtcgaccgcgacgacctgcccgaccagggcgcgagccacttcgccgagacgatccgggccatcaaagagcgtgacccgtcgattctggtcgagtgtctcatccccgattttcagggtgagccggaccttgtacggaaaatcatcgacgccgacccggacgtcatcgcgcacaacatcgagacggtcgaccggctccagtggccggtccgggaccgccgggcgggctacgagcagtccctctcagtgcttcggcaggtcaaccgcgaaagcgactgctacagcaagaccagcctgatgctgggcgtcggcgagtacgctcacgaagtgtaccagacgctgtcggacctccggcaggccggcgtcgacgtggtcacgttcggccagtacctccagccctcccggtcacatctggaggtctcagagtacgttcatccggacgccttcgacacctggcagcaggtcgctgaagcggagttcgacttcctgtactgtgcctcgggaccgatggtccggtcgtcctatcgtgccggcgaactgtttgtcgagagcgtcctgcgcgaggggcgaagtgccgacgaggcgcgggcggaagtgcgtgcgaacgactga

SEQ ID NO: 26583 - protein, 309 aa, Haloarcula marismortui ATCC 43049
MSRSRKPDWLKMRPPSGERFTDIKQTLRDRNLNTVCEEANCPNLGECWSGRDGPGTATFMLMGDRCSRGCNFCDVETGGMDPLDPDEPQQVADAVAEIGLDYVVLTSVDRDDLPDQGASHFAETIRAIKERDPSILVECLIPDFQGEPDLVRKIIDADPDVIAHNIETVDRLQWPVRDRRAGYEQSLSVLRQVNRESDCYSKTSLMLGVGEYAHEVYQTLSDLRQAGVDVVTFGQYLQPSRSHLEVSEYVHPDAFDTWQQVAEAEFDFLYCASGPMVRSSYRAGELFVESVLREGRSADEARAEVRAND

SEQ ID NO: 26584 - DNA, 936 bp, Geobacillus kaustophilus HTA426
  CDS (1)..(936): transl_table=11
atgagaaatgaacaatcatcgacaagtggagtgagaacgatggcgacgaaagaagaacacgtccgcaagccggactggttgaaaatcaagttgaacacgaacgagaattatatcggtttaaagaagctgatgcgggaaaaccgtttacataccgtttgcgaggaagcgaagtgcccaaacattcacgaatgctgggccgtacggcggacggcgacgtttatgattttaggcagcgtctgcacgcgcgcctgccgcttctgcgccgtcaaaaccgggctgccgaccgagctcgattggcaggagccggaacgcgtcgcggaatcggtgcgcatcatgaacttgaaacacgtcgtcgtcaccgccgtcgcccgcgatgacctaaaagacggcggggcggcggtattcgccgaaacggtgcgcgccatccgccggaaaaacccgtttacgacgatcgaggtgctgccgtcggatatgggcggggtgtatgaaaacttgaaaattttgatggatgcccgccctgacattttaaaccataacatcgaaacggtgcgccgcttgactccaagggtgcgcgcccgcgcgacgtacgaacgttcgcttgagtttttgcggcgcgcgaaagaattgcagccggacattccgacgaaatcgagcatcatggtcggccttggggaaacgaaagaggaaatcattgaagcgatggatgacttgcgcgccaaccatgtcgacattttgacgatcggccagtatttgcagccgacgaaaaagcatttgaaggtcgtgaaatattaccatccggacgagtttcaagagctgaaagaaatcgcgttgagcaaagggttcagccattgtgaagcggggccgctcgtccgctcgtcgtaccatgccgatgagcaggtgagcgaggcggcgaaagcgcggcagttgaaagcgtaa

SEQ ID NO: 26585 - protein, 311 aa, Geobacillus kaustophilus HTA426
MRNEQSSTSGVRTMATKEEHVRKPDWLKIKLNTNENYIGLKKLMRENRLHTVCEEAKCPNIHECWAVRRTATFMILGSVCTRACRFCAVKTGLPTELDWQEPERVAESVRIMNLKHVVVTAVARDDLKDGGAAVFAETVRAIRRKNPFTTIEVLPSDMGGVYENLKILMDARPDILNHNIETVRRLTPRVRARATYERSLEFLRRAKELQPDIPTKSSIMVGLGETKEEIIEAMDDLRANHVDILTIGQYLQPTKKHLKVVKYYHPDEFQELKEIALSKGFSHCEAGPLVRSSYHADEQVSEAAKARQLKA

SEQ ID NO: 26586 - DNA, 942 bp, Anaplasma marginale str. St. Maries
  CDS (1)..(942): transl_table=11
ttgacaagcgttgcagtttttactacgctactcggtagtttgttgctggtcagtatggaaaacaagcccgattggttgagggtgcggatgccgggcggtgcggtctttgatgaggttaccgaactcgtgcgtcgctacgagctcaatacagtctgcgaggaagctgcgtgtcctaatataggtgagtgttggaacaaacgccacgctaccatcatgataatgggttccgtgtgtacaagggcgtgcgcattctgtaacgtgaaggttggtgtgccgaacgctctcgatcctgatgagcctgagagggtcggcgctgcgatcagtaagcttggcctaaaacacgtggtaataacttctgtggatagggacgaccttccagatgggggggcgagccacttcgctaagtgcgttcgggagataagaaagcgtgatagctctgtaacggtggagattctcactccggactttctaggtaagccgtgcgcgattgatattatcgcctctgcgcgcccagatgtttataaccacaacttggaaaccgtacccaggttgtattctagagtcaggcccagggcgaagtattttaattcgctcaatctgcttaaggaggtaaaggacaaaagccctggggtatttaccaagtctgggtttatgctagggctgggggagtctaaggaagaagtgtaccaagttatggatgacctaaggtgtgctggggtggactttatagtgatggggcagtatttgcagcctacaaagaacaacattgaagtacatcgctatgtccccccttcggaatttgagcagtataaactcatggcgtatgcaaaggggttttccatggttgctgcaagtccgcttgcgcggtcttcctaccacgctgaggatgactttcgaaagcttaaggagcttaggttcgcacgcgctaaagtgaacgaatag

SEQ ID NO: 26587 - protein, 313 aa, Anaplasma marginale str. St. Maries
MTSVAVFTTLLGSLLLVSMENKPDWLRVRMPGGAVFDEVTELVRRYELNTVCEEAACPNIGECWNKRHATIMIMGSVCTRACAFCNVKVGVPNALDPDEPERVGAAISKLGLKHVVITSVDRDDLPDGGASHFAKCVREIRKRDSSVTVEILTPDFLGKPCAIDIIASARPDVYNHNLETVPRLYSRVRPRAKYFNSLNLLKEVKDKSPGVFTKSGFMLGLGESKEEVYQVMDDLRCAGVDFIVMGQYLQPTKNNIEVHRYVPPSEFEQYKLMAYAKGFSMVAASPLARSSYHAEDDFRKLKELRFARAKVNE

SEQ ID NO: 26588 - DNA, 933 bp, Idiomarina loihiensis L2TR
  CDS (1)..(933): transl_table=11
atgcgtgacgccgataaaatggcactgataccagtacaaattattcccaccgaacgcgatcagatgttgcgtaagccgtcgtggctgaaggtgaagttaccttcttcaactgagcgtattgatgaaattaagcaagcaatgcgcagccatggtttgcactctgtttgtgaggaagcatcctgtccaaatttaccggaatgttttaatcacggtacagccagttttatgatcctgggcgacatttgtacacgtcgttgcccattctgtgacgttgctcacggtcgccctcttcctcccgatccggaagaagctgaaaagctgggcaaaaccatccgcgacatgaaagtgaagtatgtcgtaattacatcggttgaccgtgatgatttacgcgacggcggtgctcagcactttgcggactgtattcgtgaaattcgtgagcacagtgagaacaacattcaggtagaagtgctggtaccggattttcgtggtcgtatgcaggttgcgatcgatattctcaaaggcgaggcgcctgacgtatttaaccacaaccttgagaccgtgccacgcctgtataaggcagctcgtcctggtgcaaattaccagtggtctttagacttgctgcaaaaatacaaagaagttcggccggatatccggactaagtcgggacttatggtcggccttggcgaaaccaaagaagaaatactggaagtcatgaaagatcttcgtgcgcacgatgtcgacatgttgactatcggacagtatttgcagcctagccgccaccatattccggtagcacgctacgtgcaccccgacgagtttgaagagctgcgtgttgctggtgttgaaatgggctttagccacattgccagtgggccactcgtacgctcgtcttatcatgctgatttacaggcagcaggcgaaaccgtacgttaa

SEQ ID NO: 26589 - protein, 310 aa, Idiomarina loihiensis L2TR
MRDADKMALIPVQIIPTERDQMLRKPSWLKVKLPSSTERIDEIKQAMRSHGLHSVCEEASCPNLPECFNHGTASFMILGDICTRRCPFCDVAHGRPLPPDPEEAEKLGKTIRDMKVKYVVITSVDRDDLRDGGAQHFADCIREIREHSENNIQVEVLVPDFRGRMQVAIDILKGEAPDVFNHNLETVPRLYKAARPGANYQWSLDLLQKYKEVRPDIRTKSGLMVGLGETKEEILEVMKDLRAHDVDMLTIGQYLQPSRHHIPVARYVHPDEFEELRVAGVEMGFSHIASGPLVRSSYHADLQAAGETVR

SEQ ID NO: 26590 - DNA, 948 bp, Azoarcus sp. EbN1
  CDS (1)..(948): transl_table=11
atggacagcacggcacgcaagcaacgcggcgcagacaagaccgcgcgcatcccgatcaagatcgtccccgccgaacgcctgaagaagcccgagtggatccgcatccggctcggcgccggccacgaagccgagcgcttcaacgaaatcaaggcgagcctgcgcgagcacaagctgcacaccgtatgcgaggaagcgtcgtgcccgaacatccacgaatgcttcggcaaaggtaccgcgacgttcatgatcatgggcgacatctgcacgcgtcgctgcccgttctgcgatgtcggccacggccggcccgagccgctgaacgcgaacgaaccgcaggagctcgcggcgacgatcggcgcgatgcggctcaactacgtcgtcatcaccagcgtcgaccgcgacgacctgcgtgacggcggcgcgcagcacttcgtcgactgcattcgcgagacgcgcgcggcgtcaccgaagacgcgcatcgaagtgctcgtgccggacttccgcggccggctcgacgtcgcgctcgaaatcttcgaccaggcgccgccggacgtcatgaaccacaacctcgagacagtgccgcggctctacaaacaggcgcgcccgggcgcggactacgcgtattcgcttcggctgctgaaggaattcaaggcgcgccatcccgacgtgccgacgaagtccggcctgatggtcggcctcggcgagaccgacgacgagatcctcgacgtgctgcgcgacctgcgcgcgcacgacgtcgagatgctgacgatcggccagtatctgcaaccgtcgaccggacacctgccggtgctgcgctatgtgcatccggacacgttcaagatgttcgagaccgaggcgctcgcgatgggcttcaagaacgcggcctgcggcccgatggtgcgctcgagctactgggccgaccagcaggcgtacggcgcgggcgtcgtctga

SEQ ID NO: 26591 - protein, 315 aa, Azoarcus sp. EbN1
MDSTARKQRGADKTARIPIKIVPAERLKKPEWIRIRLGAGHEAERFNEIKASLREHKLHTVCEEASCPNIHECFGKGTATFMIMGDICTRRCPFCDVGHGRPEPLNANEPQELAATIGAMRLNYVVITSVDRDDLRDGGAQHFVDCIRETRAASPKTRIEVLVPDFRGRLDVALEIFDQAPPDVMNHNLETVPRLYKQARPGADYAYSLRLLKEFKARHPDVPTKSGLMVGLGETDDEILDVLRDLRAHDVEMLTIGQYLQPSTGHLPVLRYVHPDTFKMFETEALAMGFKNAACGPMVRSSYWADQQAYGAGVV

SEQ ID NO: 26592 - DNA, 951 bp, Silicibacter pomeroyi DSS-3
  CDS (1)..(951): transl_table=11
gtgcgtgacctgaagatccccgagcagcgccaccccgaaaaggcgcatcgccccgaccaggcgcaacccaagaaaccggactggatccgggtcaaggcgccggggggcaagggctatgccgatacccgccggatcatgcgcgacaacaacctggtcaccgtctgtgaagaggccggatgcccgaacgtcggcgaatgctggagccagggccacgccaccatgatgatcatgggcgagatctgtacccgtggctgcaccttctgcaacatcgccaccgggcgccccgacgcgctggacgcgttcgagccgggccgggtggcccatgcggtggagaagctggggctgaaccatgtggtgatcacgagcgtcgaccgcgacgacctggccgatggcggggccgagcattttgcccagaccatccgtgccatccgccatcgcagcccctcgaccacgatcgagatcctgacgcccgatttcctgaaatgcgcgcccgaggtgctggaagtcgtggttgcgtccaagcccgacgtgttcaaccacaatctggaaaccgtgccgggcctgtaccccgaggtgcgccccggcgcgcgctatttccactcgctgcgtctgctccagcgggtcaaggagctggatccgtcgatctttaccaaatccggcatcatggtcggcctgggtgagaccgaacagcaggtgcgccaggtgatggacgacatgcgcgccgccgatatcgatttcctgaccatcggccagtatctgcaaccgacaccgaaacatcaccgggtcgatcgtttcgtgcatcccgatgaattcgcctcttatgagaaagccgcctatggcaagggcttcctgatggtctcggcaacgccgctgacgcgctcgtcctaccacgcgggcgacgactttgcgcgcctgcgggacgcccggcagaagaagctcggcctggcatga

SEQ ID NO: 26593 - protein, 316 aa, Silicibacter pomeroyi DSS-3
MRDLKIPEQRHPEKAHRPDQAQPKKPDWIRVKAPGGKGYADTRRIMRDNNLVTVCEEAGCPNVGECWSQGHATMMIMGEICTRGCTFCNIATGRPDALDAFEPGRVAHAVEKLGLNHVVITSVDRDDLADGGAEHFAQTIRAIRHRSPSTTIEILTPDFLKCAPEVLEVVVASKPDVFNHNLETVPGLYPEVRPGARYFHSLRLLQRVKELDPSIFTKSGIMVGLGETEQQVRQVMDDMRAADIDFLTIGQYLQPTPKHHRVDRFVHPDEFASYEKAAYGKGFLMVSATPLTRSSYHAGDDFARLRDARQKKLGLA

SEQ ID NO: 26594 - DNA, 984 bp, Francisella tularensis subsp. tularensis SCHU S4
  CDS (1)..(984): transl_table=11
atgaaagaaatatctggtataaaagttaaagttgaaagtggctctaagtacactaccgatcatggttttcatgctgtcaaagatggtattagaaataagaaagaaaatgctgtgcatgtacgtaaaccagattggttgaaagtgcaaaaacaagattctaaagaatacctaaaagttaaatccattacaaaaaaacataaactttcaacagtttgtgaagaagcaaggtgccctaatattaatgagtgctggtctcatggtacagcaacaattatgttaatggggagtgtatgtactagagcttgtaaattttgttctgtagatacaggtaatccaaaaggttggttagataaagatgaacctatgaatgctgctgaaagtgtaaagctcatgggacttgaatatgttgtattgacatctgtagatcgtgatgatttagaagatggtggtgctggacactatgcagcgactattacagctatcaaaaatcttgatgagaatattaaagtagaagcattgactccggattttgctggtattaacgaaaatattgataaaatcataaatacaaaagtagatgtaattgcacaaaatatcgagactgtagagcgcttgactcatccagtacgtgatccacgtgcagggtactggcaaacattaaatttcttaaaatatgttaaacaaaaatcaccaaatgtgcttactaaaactagtattatggtaggtttaggtgagactgatgaagaaatttacaaaactatggatgatgcgcgaagtgttggagttgatataataacgcttgggcaatatatgcaaccaacaaagcatcatttgagtgttgagaggtttgtgacaccacaacaattcgaagagtatcgcaaagtgggtctcgaaaaaggcttcttagaagtggcatcagggcctatggtaagatcaagctatagagctgatagagttttcaaaaggaataatttagatttgtaa

SEQ ID NO: 26595 - protein, 327 aa, Francisella tularensis subsp. tularensis SCHU S4
MKEISGIKVKVESGSKYTTDHGFHAVKDGIRNKKENAVHVRKPDWLKVQKQDSKEYLKVKSITKKHKLSTVCEEARCPNINECWSHGTATIMLMGSVCTRACKFCSVDTGNPKGWLDKDEPMNAAESVKLMGLEYVVLTSVDRDDLEDGGAGHYAATITAIKNLDENIKVEALTPDFAGINENIDKIINTKVDVIAQNIETVERLTHPVRDPRAGYWQTLNFLKYVKQKSPNVLTKTSIMVGLGETDEEIYKTMDDARSVGVDIITLGQYMQPTKHHLSVERFVTPQQFEEYRKVGLEKGFLEVASGPMVRSSYRADRVFKRNNLDL

SEQ ID NO: 26596 - DNA, 894 bp, Synechococcus elongatus PCC 6301
  CDS (1)..(894): transl_table=11
ttggtcgtcaaaccggaatggctgcgagtcaaagcaccgcagtggcaacgcgtcggtaacgtcaagcaagtcttggcggatctggggctgaataccgtttgcgaagaggcatcctgtcccaatattggtgagtgttttaacgctgggacggccacctttttgatcatgggtccggcttgcacgcgggcttgcccctactgcgatatcgacttcgaaaagaaacccaaagcgctcgatccgacggagccgcaacgactcacagaagctgtgggccgactgaatctcaatcacgtcgtgatcacgtcagtcaatcgtgatgacttgccggatggtggtgctgagcaattcaaacgctgtattgaagcggtgcgatcgcgatcgcctcagaccacgattgaggttctgattcccgatctctgcggcaactgggaagcgctggaaattattttgtccgcagcgcccgaggtgctgaaccacaacatcgaaacggtctcacgactctaccgacgcgtgcgaccccaaggtgactatcagcgatcgctggaactattgcgccgcagtcgggaacaagcgccgtggatctataccaagtctggcttgatggtgggtcttggtgaaactgcggaagaagtgcagcaggtcctggtggacctccgtagcgtcgactgcgacatcgtcacgatcggtcagtacctgcagccgacccaaaaacatttaggcgtcgatcgctttgtcacgccggcggaatttgatgcttggcaacagcaaggcagtcagctcggcttcctgcaagtcgtggcttcacccctgacccgcagttcctatcacgccgaagaagtgcgccgactgatgcaggaatatccgcgtcagcgaccggcgatcgccctgaattaa

SEQ ID NO: 26597 - protein, 297 aa, Synechococcus elongatus PCC 6301
MVVKPEWLRVKAPQWQRVGNVKQVLADLGLNTVCEEASCPNIGECFNAGTATFLIMGPACTRACPYCDIDFEKKPKALDPTEPQRLTEAVGRLNLNHVVITSVNRDDLPDGGAEQFKRCIEAVRSRSPQTTIEVLIPDLCGNWEALEIILSAAPEVLNHNIETVSRLYRRVRPQGDYQRSLELLRRSREQAPWIYTKSGLMVGLGETAEEVQQVLVDLRSVDCDIVTIGQYLQPTQKHLGVDRFVTPAEFDAWQQQGSQLGFLQVVASPLTRSSYHAEEVRRLMQEYPRQRPAIALN

SEQ ID NO: 26598 - DNA, 930 bp, Bacillus clausii KSM-K16
  CDS (1)..(930): transl_table=11
atgccagaaaaagatgaaaaagagcagcatatgcgcaaaccggactggctaaaaatcaagctaaatacaaacgagtcttatacaggcttgaaaaaaatgatgcgtgagaaaaaactacataccgtatgtgaagaagcacgctgcccgaacatccatgaatgttgggcggttcgaaaaacggctacttttatgatccttggcgatatttgtacacgaggttgccgtttttgtgcagtcaagacaggcttgccaacggagcttgacttgcaagagccagagcgcgtggcggaatccgtggagaccatggggttaaaacatgtcgttattactgctgttgcccgtgatgatttaaaagacggcggcgccgcagtgtttgccgaaacggtacgagccgtacgccggaaaaacccattttgcacaattgaagttttgccttctgacatgcttggcaatgaatcaagcttgcaaacattaatggatgcgcgcccgaatataatgaatcataatatcgaaaccgtaagaaggctgacgccaaaagttagagcacgagcaaaatatgaccgcacactcgagtttttgcggagagccaaagaaatgcatcctgatattccgactaaatcgagcctaatggtaggcctaggggaaacaaaggaagaaattttagaaacaatggatgatttgcgggctaataatgttgacattttgacaattggccaatatttacaacctacaaagaaacatttaaaagtcattaagtattaccatccagacgaatttgccgagttaaaggaaatcgctatgcaaaaaggctttagccattgcgaggcgggaccgcttgtccgttcgtcataccatgcagacgaacaagtgaaccaagcgcaagtgaacatggaagcaagaaaagcacaaggggagcaacagcgcgtataa

SEQ ID NO: 26599 - protein, 309 aa, Bacillus clausii KSM-K16
MPEKDEKEQHMRKPDWLKIKLNTNESYTGLKKMMREKKLHTVCEEARCPNIHECWAVRKTATFMILGDICTRGCRFCAVKTGLPTELDLQEPERVAESVETMGLKHVVITAVARDDLKDGGAAVFAETVRAVRRKNPFCTIEVLPSDMLGNESSLQTLMDARPNIMNHNIETVRRLTPKVRARAKYDRTLEFLRRAKEMHPDIPTKSSLMVGLGETKEEILETMDDLRANNVDILTIGQYLQPTKKHLKVIKYYHPDEFAELKEIAMQKGFSHCEAGPLVRSSYHADEQVNQAQVNMEARKAQGEQQRV

SEQ ID NO: 26600 - DNA, 969 bp, Gluconobacter oxydans 621H
  CDS (1)..(969): transl_table=11
atgtcccagcgcatcaccatcgatcaccgttcggcgcctgcccttcgccatccggagaaggcgcatcggcctgataacccgatccagcgcaagccgtcctggatccgggtcaaggcgccgaaccatccagtctatcacgagacccgtgcgctcatgcgggatgccgggctggtgacggtctgcgaggaggcggcgtgccccaatatcggggaatgctggtcgcagcgtcatgccacgatgatgatcatgggcgagatctgcacccgggcgtgtgcattctgcaatgtcacgaccggactgccgaagcatctcgatgaggacgagccacggcgggtcggagaagcggtggcgaagcttgggctcaagcatgtcgtcatcacttcggtggaccgtgacgatctggaagacgggggggcgatgcacttcgcgcgggtcattcatgcgatccgcgagacctctccacagaccacgatcgagattctgacgcctgatttcctgcgcaaggatggcgcgctggaggtcgtggtggcggctcggccggacgttttcaatcacaatatcgagaccataccccggctttaccccaccatcagaccgggtgcgcgttactatcagtccgtccgtctcctggacggagtaaagaaactcgatccttccatttttaccaagtccggcctgatgcttgggcttggcgaggagcggatggaagtggcccaggtgatggatgatttccggatcgcggacgtcgatttcctgacgcttggacagtatctccagccgtccgcgaaacatgcggcggtggaaaagtttgttacccccgacgagtttgacggctatgctgctgctgcccgttcaaaaggatttcttcaggtcagtgccagtccgctgacccggtcctcctaccatgcggacagtgatttcgcgaagcttcaggctgcgcggaacagccgtctgaaagaaagtctctga

SEQ ID NO: 26601 - protein, 322 aa, Gluconobacter oxydans 621H
MSQRITIDHRSAPALRHPEKAHRPDNPIQRKPSWIRVKAPNHPVYHETRALMRDAGLVTVCEEAACPNIGECWSQRHATMMIMGEICTRACAFCNVTTGLPKHLDEDEPRRVGEAVAKLGLKHVVITSVDRDDLEDGGAMHFARVIHAIRETSPQTTIEILTPDFLRKDGALEVVVAARPDVFNHNIETIPRLYPTIRPGARYYQSVRLLDGVKKLDPSIFTKSGLMLGLGEERMEVAQVMDDFRIADVDFLTLGQYLQPSAKHAAVEKFVTPDEFDGYAAAARSKGFLQVSASPLTRSSYHADSDFAKLQAARNSRLKESL

SEQ ID NO: 26602 - DNA, 864 bp, Wolbachia endosymbiont strain TRS of Brugia malayi
  CDS (1)..(864): transl_table=11
atgcatagcaagcctccatggctcagagcaaaagctccgactggtgaaatattcaatgagaccttaaatactgttaaactgcatggtctacatacagtgtgcgaagaggctgcatgtccaaatattggtgaatgttggaacaaacgtcatgctactgtgatgattcttggttctgtttgcactcgtgcttgtgcattttgcaacgttgcaactggtatccctaataagttagatcctcacgaaccagaaaatttagcaaaagcaataaaaaagttaaacttaaaatatgttgtcattacctccgtcgaccgtgatgatttaccagatggcggagcaagtcagtttataaagtgtatagaagaaattagaaaaataactccagaaacaacagtagaaattttaactcctgattttttaaataagaaaggagcgtttgaagcaatcgctgttgcatcacctgatgtctataaccacaatattgaaatggtgccaagattatatgcaagaataagaccgcgtgctcgttattttcattcactatatttgttgaagatggtgaagcaaattaatcctaaactcctcacaaagtcagggctcatggttggtcttggagaaacgaaagaagaagtacttcaagttatggacgatttacgaagtgctgaagttgactttatcacaatcggtcaatatcttcaaccaactccaaagcatgcaaagattgataggtatgttaccccagaagaatttgagcattataaatatattgcttattctaaaggtttcttagtggttgcatctagtccactaactagatcatcataccatgctgaagaggattttaataggctcaaggcttgtcgttaa

SEQ ID NO: 26603 - protein, 287 aa, Wolbachia endosymbiont strain TRS of Brugia malayi
MHSKPPWLRAKAPTGEIFNETLNTVKLHGLHTVCEEAACPNIGECWNKRHATVMILGSVCTRACAFCNVATGIPNKLDPHEPENLAKAIKKLNLKYVVITSVDRDDLPDGGASQFIKCIEEIRKITPETTVEILTPDFLNKKGAFEAIAVASPDVYNHNIEMVPRLYARIRPRARYFHSLYLLKMVKQINPKLLTKSGLMVGLGETKEEVLQVMDDLRSAEVDFITIGQYLQPTPKHAKIDRYVTPEEFEHYKYIAYSKGFLVVASSPLTRSSYHAEEDFNRLKACR

SEQ ID NO: 26604 - DNA, 1014 bp, Xanthomonas oryzae pv. oryzae KACC10331
  CDS (1)..(1014): transl_table=11
atgacccagcctaccgcccgttccatccccttgcaggtcgtctccggcgacaccgccgcgcctgcgccgttgcagaccggcgtcaagcagatcggtggcgacaagatccatcgctcgccagtgcagttcgtcgatgcgccggtattgcgcaagccgtcgtggatccgcgtgcggattccgtccggcaatgccgtgcagaacctcaaggccaagctgcgcgaaaatcgcttggtcaccgtctgcgaagaagccagttgcccgaacatccacgagtgcttcagccacggcaccgcgaccttcatgatcttgggcgaggtgtgcacacggcgctgctcgttctgcgatgtggcgcatggccggccgaagccgcctgacgcaaacgagccggccagcctggccatcaccgtggccgacatgggcctgaaatacgtggtggtgaccagcgtggaccgcgatgatctgcgcgacggtggcgcgcaacatttcgtcgactgcatctcggcgatccggaccagttcgccgaatacccgcatcgaaattctgacgccggatttccgtggcaagggccgcatggaccgcgcgctggacatcctggcgctgagcccgccggacgtgttcaaccacaacatcgaaaccgtgccggatctgtacccgaacgtgcgccccggcgcggattaccagtggtcgctgacgctgctgcagcgcttcaaggcgcagcatccgtcaattgctaccaagtccggcatcatgctcggcctgggcgaaacgatggagcaggtgcaggccaccttgcgcgatctgcgcgcgcacgatgtggatatgatcaccatcggccagtatctgcagccgacgccgcaccatcacccggtgatgcgttactggacgccggaggaatacaaggcgctggaggagtacggcaatgcgctgggcttcagtcatgtcgcctccggcccgatggtgcgttcgtcgtatcacgccgaccgccaggccgctggcgctggtgttgctgcctga

SEQ ID NO: 26605 - protein, 337 aa, Xanthomonas oryzae pv. oryzae KACC10331
MTQPTARSIPLQVVSGDTAAPAPLQTGVKQIGGDKIHRSPVQFVDAPVLRKPSWIRVRIPSGNAVQNLKAKLRENRLVTVCEEASCPNIHECFSHGTATFMILGEVCTRRCSFCDVAHGRPKPPDANEPASLAITVADMGLKYVVVTSVDRDDLRDGGAQHFVDCISAIRTSSPNTRIEILTPDFRGKGRMDRALDILALSPPDVFNHNIETVPDLYPNVRPGADYQWSLTLLQRFKAQHPSIATKSGIMLGLGETMEQVQATLRDLRAHDVDMITIGQYLQPTPHHHPVMRYWTPEEYKALEEYGNALGFSHVASGPMVRSSYHADRQAAGAGVAA

SEQ ID NO: 26606 - DNA, 984 bp, Neisseria gonorrhoeae FA 1090
  CDS (1)..(984): transl_table=11
atgagtgaaatcaaaaccgacgaccccaaacgcggcatcaaactcagaggcgcggacaaaaccgcccgcatccccatcaaagtcgtcccccttcaggaaaaactgaaaaagcccgaatggatacgcgccaaactcccatcgcgcaaattctttgaaatcaaagacattttgcgcgaacaaaagatgcacaccgtttgcgaggaagcctcctgccccaacatcggcgaatgcttcagcaaaggcacggcgaccttcatgattatgggcgacatctgcacccgccgctgcccgttctgcgacgtgggacacggccgtccgaatatgctcgaccccgacgagccgaaaaacctcgcagaatccgtcaaagccatgaacctgcgttacgtcgtcatcacctcggttgaccgcgacgacctgcgcgacggcggcgcccaacacttcgccgactgcatcaaagccatccgcgaaaccagcccgaacaccaaaatcgaaatcctcgtccccgacttccgaggccgcttggacatcgcactgaaaatccttgccgaaaccccgcccgacgtgatgaaccacaacttggaaacccatccgagcctgtacagaaaagcccgtcccggtgccaattatcaacattctttagacttattaaaacgttataaagaaatgatgccgcatatcccgaccaaatccggcattatggtaggcttgggcgaaacagacgaagacgtgcgtgaaattatgcgcgatatgcgggcgcacaatatcgagatgattaccatcggacagtacctccagccttcagacggacacttgcctgtcttgcgctacgttacacccgaacaattcaaaatatttgaaaaagaagcatacgaactgggctttaccaatgccgccatcggcgcgatggtacgttcaagttaccatgccgacgaacaggcggcggaagccttacgcgaaagccacggcggttgcgggcatcattaa

SEQ ID NO: 26607 - protein, 327 aa, Neisseria gonorrhoeae FA 1090
MSEIKTDDPKRGIKLRGADKTARIPIKVVPLQEKLKKPEWIRAKLPSRKFFEIKDILREQKMHTVCEEASCPNIGECFSKGTATFMIMGDICTRRCPFCDVGHGRPNMLDPDEPKNLAESVKAMNLRYVVITSVDRDDLRDGGAQHFADCIKAIRETSPNTKIEILVPDFRGRLDIALKILAETPPDVMNHNLETHPSLYRKARPGANYQHSLDLLKRYKEMMPHIPTKSGIMVGLGETDEDVREIMRDMRAHNIEMITIGQYLQPSDGHLPVLRYVTPEQFKIFEKEAYELGFTNAAIGAMVRSSYHADEQAAEALRESHGGCGHH

SEQ ID NO: 26608 - DNA, 867 bp, Bacteroides fragilis NCTC 9343
  CDS (1)..(867): transl_table=11
atgggaaacgataaacgggtgcgcaaacccgaatggcttaaaatcagcattggagccaatgaacgctataccgagaccaaacgcattgtcgaatcgcactgcctgcacaccatctgtagcagtgggcgttgccccaacatgggcgaatgctggggaaaagggacagctacgttcatgattgccggtgacatctgtacccgcagttgtaaattctgtaatacccagaccggacgacctctgcctttggatcccgacgaaccgacccacgttgcagaatcgattgccctgatgaaactctcacacgcagttatcacatctgtagaccgcgacgatctgcctgatttgggtgcagcccattgggcacaaacaattcgtgaaatcaaacgactaaatccggaaacaactaccgaagtactgattcccgatttccagggacgcaaagagcttgttgaccaagtgataaaagcctgtcccgaaatcatctcccataacatggagactgtgaaacgcatcagtccacaggtgcgtagtgccgccaactatcacaccagcctggaagtgatccgccaaatagccgaaagcggtattacggcaaaatcgggcattatggttggtctgggtgaaactcctgctgaagtagaagagttaatggacgacctgatttccgtcggttgcaaaatcctcaccatcgggcaatatctgcagccaacccacaaacacttcccggttgcagcatacattactccggaacagtttgctgtttataaagaaacaggactgaagaaagggttcgaacaagtggaaagcgcaccgttagtacgctcctcgtatcatgcagaaaaacatatccgatttaataataagtag

SEQ ID NO: 26609 - protein, 288 aa, Bacteroides fragilis NCTC 9343
MGNDKRVRKPEWLKISIGANERYTETKRIVESHCLHTICSSGRCPNMGECWGKGTATFMIAGDICTRSCKFCNTQTGRPLPLDPDEPTHVAESIALMKLSHAVITSVDRDDLPDLGAAHWAQTIREIKRLNPETTTEVLIPDFQGRKELVDQVIKACPEIISHNMETVKRISPQVRSAANYHTSLEVIRQIAESGITAKSGIMVGLGETPAEVEELMDDLISVGCKILTIGQYLQPTHKHFPVAAYITPEQFAVYKETGLKKGFEQVESAPLVRSSYHAEKHIRFNNK

SEQ ID NO: 26610 - DNA, 933 bp, Chlamydophila abortus S26/3
  CDS (1)..(933): transl_table=11
atgaatgacactcctaatgacatacaaaaacccaaacaagggaaacgtttttcagaacgtctccctcactggctaaggcaagctttacccaaaggctcagtctttgactttaccgacaaaactataaaacgtactggcatggctacagtatgtgaggaagcgctctgccctaatcgtacgcgctgttggtcaagaaagacagcaacatacttagctttaggagatgcctgctctcgacgttgtggattttgtaacattgatttcacaaaaaaacccctacctccagatcctgatgaaccaagaaaaatagcagaatccgcaaagatccttcagcttaagcatatcgtattaactatggtcgctcgcgacgacttagaagatggaggggcgagttgtttggtacgtattatcgatactcttcacaaagagctccccgaatctactgtagaaatgcttgcttccgactttcaaggaaatgtcgatgccttgcataccctgctagattcaggattaaccatttataatcacaacgtggaaacagttgaacgtctcacccctgtagttcgacataaagccacataccggcgttctttatttatgttggagcaagccgcgttatacctccccgatcttaaaatcaaatccggcatcatggtggggttaggagaacaagaaagcgaggtaaaacaaacactcaaagatcttgcagatcatggtgtacgtattgtcacaataggacagtatttacgtccttcacgattgcacatacctgtaaagagctacgttactcctgagacttttgattactaccggagagtaggagaatccttaggcctctttgtttatgcagggcctttcgtaagatccagcttcaacgcagatattgttttacaagatatggaaaataaacaatctaaaatggcaaaaacgtag

SEQ ID NO: 26611 - protein, 310 aa, Chlamydophila abortus S26/3
MNDTPNDIQKPKQGKRFSERLPHWLRQALPKGSVFDFTDKTIKRTGMATVCEEALCPNRTRCWSRKTATYLALGDACSRRCGFCNIDFTKKPLPPDPDEPRKIAESAKILQLKHIVLTMVARDDLEDGGASCLVRIIDTLHKELPESTVEMLASDFQGNVDALHTLLDSGLTIYNHNVETVERLTPVVRHKATYRRSLFMLEQAALYLPDLKIKSGIMVGLGEQESEVKQTLKDLADHGVRIVTIGQYLRPSRLHIPVKSYVTPETFDYYRRVGESLGLFVYAGPFVRSSFNADIVLQDMENKQSKMAKT

SEQ ID NO: 26612 - DNA, 1047 bp, Rickettsia felis URRWXCal2
  CDS (1)..(1047): transl_table=11
gtgaatttcaaaaattggcgttgtcgttctataagagtgcaggtagccacgtattattatacgctccgctccttgccttgtgaactcctcgctctttttgaaattgaccttcgtatacaactattcatttcacaggagtatatgtctaatttaaacaaaagaccggattggataaaagtaaaagctccgaattccgcagaatattataatacaaaagatttaataaagaatctgagattaaatactgtgtgcgaggaagctgcttgtcctaatatcggtgagtgctggtcgaaaaaacatgcaaccgtgatgattttaggttcggtttgtactagagcctgtaggttttgtaatgtcaaaactggtagaccggatttgcttgacccgcacgaaccgcaaaggttagcggaagcggtacaaaagttaaatcttaagcatgtagtaattacttccgtcgatcgtgatgatcttgatgatggcggagctacgcattttgcggagtgtattagcgaaattagaaaatcatcgccaaatactactattgagattctaactcctgattttttaagaaaagaaggagcagctgaaataatagcaaatgcaaaacctgacgtctttaaccataatgtcgaaacagtcccgtctttatacaaaacgattagaccaggagctagatattataattctttaagcttacttcacaatatcaaaaaattatctcctgaaatttttacaaaatccggtatgatggtagggcttggagaagaaataagtgaagtaatacaggttatggatgatttaagagaagcaaaggttgattttctaactatagggcagtatctgcaacctactaaaaatcatgctgaggtcgcaaaatatgttactcccgaagagtttaaatatttagagcgaatagcaagaacaaaaggattcttgatggtttcggcaaccccgctaacccgttcttcataccatgccgatgaggattttcaaaaattaaaagagaattaccagcagcgtcattgcgaggaggcatggcctgcgtga

SEQ ID NO: 26613 - protein, 348 aa, Rickettsia felis URRWXCal2
MNFKNWRCRSIRVQVATYYYTLRSLPCELLALFEIDLRIQLFISQEYMSNLNKRPDWIKVKAPNSAEYYNTKDLIKNLRLNTVCEEAACPNIGECWSKKHATVMILGSVCTRACRFCNVKTGRPDLLDPHEPQRLAEAVQKLNLKHVVITSVDRDDLDDGGATHFAECISEIRKSSPNTTIEILTPDFLRKEGAAEIIANAKPDVFNHNVETVPSLYKTIRPGARYYNSLSLLHNIKKLSPEIFTKSGMMVGLGEEISEVIQVMDDLREAKVDFLTIGQYLQPTKNHAEVAKYVTPEEFKYLERIARTKGFLMVSATPLTRSSYHADEDFQKLKENYQQRHCEEAWPA

SEQ ID NO: 26614 - DNA, 963 bp, Haemophilus influenzae 86-028NP
  CDS (1)..(963): transl_table=11
atgtctacgcctttcaaaatggaacgcggtgtaaaatatcgcgatgcggcaaaaacctcaattattcccgtaaaaaatatcgatcctaatcaagagttattaaaaaaaccagaatggatgaaaattaaacttccagcaagttcagctaaaattgaaagcattaaaaatggaatgcgccgtcacggattacattctgtttgtgaggaagcgtcttgtccaaatttacacgaatgttttaatcatggcacagccacttttatgattttaggtgcaatttgtacgcgccgttgcccattctgtgatgtggctcacggtaaaccattaccgcctgatcctgaagagccacaaaaattggcagaaacgattcaagatatgaaacttaaatatgtggtaatcacatcggtggatcgtgatgacttgcctgatcgtggtgctggtcatttttctgaatgtgtaaaagctgtgcgcgagcttaatcctaacattaagattgaaattttagtgcctgattttcgtggtcgcattacacaggctttagagaaattaaaagataatccgccagatgtctttaaccataatttagaaaacgtaccgcgcttatataaagaaattcgtccaggtgcggattacgaatggtcacttaaattattgcgtgaattcaaagaaatattcccaaatatcccaaccaaatctggtttaatggttgggttaggcgaaaccaacgaggaaattttgcaagtgatgcaagatttacgtgataacggtgtgactatgctcacgttgggtcaatatcttcaacctagccgccatcatttgcctgttgcccgttatgtgccgccaactgaatttgatgaattccgtgataaagccaatgaaatgggctttgaacatgcggcttgtgggccatttgttcgttcttcttatcacgctgatttacaagccagtggcggattagtgaaataa

SEQ ID NO: 26615 - protein, 320 aa, Haemophilus influenzae 86-028NP
MSTPFKMERGVKYRDAAKTSIIPVKNIDPNQELLKKPEWMKIKLPASSAKIESIKNGMRRHGLHSVCEEASCPNLHECFNHGTATFMILGAICTRRCPFCDVAHGKPLPPDPEEPQKLAETIQDMKLKYVVITSVDRDDLPDRGAGHFSECVKAVRELNPNIKIEILVPDFRGRITQALEKLKDNPPDVFNHNLENVPRLYKEIRPGADYEWSLKLLREFKEIFPNIPTKSGLMVGLGETNEEILQVMQDLRDNGVTMLTLGQYLQPSRHHLPVARYVPPTEFDEFRDKANEMGFEHAACGPFVRSSYHADLQASGGLVK

SEQ ID NO: 26616 - DNA, 1050 bp, Corynebacterium jeikeium K411
  CDS (1)..(1050): transl_table=11
atgagtgtgaccgcagatggacgccggatgctacgcatcgaggcgaagaatgccgaaacccccatcgagtcgaagcctcggtggatccgcacgaccgcgaaggtcggcccggagtatcgggatattaagaatcgcgtgaagggcgctggcctgcacaccgtgtgccaagaggctggctgcccgaatatcaacgagtgctgggaggaccgcgaggcgacgttcctcatcggcggtgatacgtgttcccgccgttgcgacttctgccagattaagtccggccgcccgtccccgctggatatggacgagccacgccgcgtggcggagaatgtccgcgagatgggtctgcgctacgccaccatcaccggcgtgacgcgcgatgacctggatgatgagggcgcgtggctgtatgccgaggttgtgaagaagattcacgagctgaacccgaacacgggtgtggagaatctgacgccagatttttccaaccgcccggagctgctgaaggtcgtcttcgattcccagccggaggtgtttgcccacaacctggagacagttccgcgcatctttaagcgcatccgcccggcctttaagtacgaccgttccctggaggtcattcaggcagctcacgattacggcctggtgacgaagtccaacctgatcctgggcatgggtgagaagaaggaagaggtccgcgcggctatcaaggacctggcagacgccggcaccgacattctgacgattacccagtacctgcgcccgtcttccatgcaccacccgattgagcgttgggtgaagccggaggagttcatggagcactccgacgcagcctacgagctgggcatcaaggctgttatgtccggcccgttggtgcgttcctcttaccgcgccggccgcctgtacgcgcaggccaagcaggcgcgcggcgaggctattccggagaacctgaagcacttggaggagactctcgattccaccacgtcgcaggaggcctctacactgctggagcgctacggcgcttcggaggacacgccggtcactgcgtcgcgccgctag

SEQ ID NO: 26617 - protein, 349 aa, Corynebacterium jeikeium K411
MSVTADGRRMLRIEAKNAETPIESKPRWIRTTAKVGPEYRDIKNRVKGAGLHTVCQEAGCPNINECWEDREATFLIGGDTCSRRCDFCQIKSGRPSPLDMDEPRRVAENVREMGLRYATITGVTRDDLDDEGAWLYAEVVKKIHELNPNTGVENLTPDFSNRPELLKVVFDSQPEVFAHNLETVPRIFKRIRPAFKYDRSLEVIQAAHDYGLVTKSNLILGMGEKKEEVRAAIKDLADAGTDILTITQYLRPSSMHHPIERWVKPEEFMEHSDAAYELGIKAVMSGPLVRSSYRAGRLYAQAKQARGEAIPENLKHLEETLDSTTSQEASTLLERYGASEDTPVTASRR

SEQ ID NO: 26618 - DNA, 927 bp, Staphylococcus haemolyticus JCSC1435
  CDS (1)..(927): transl_table=11
gtggttatggctactaaaaatgaagaaatcttacgtaaaccagattggttgaaaattaagcttaacacgaacgaaaactatattggcctcaagaagatgatgcgtgaaaagaacttacacactgtttgcgaagaagcaaagtgtccaaatatacatgaatgttggggtgctagacgtactgctacatttatgattttaggtgcagtatgtacaagagcatgtcgtttctgtgcagttaaaactggattacctaatgaactagacttaaatgaaccagaacgtgttgcagaatcagttgagttaatgaatttaaaacacgttgttatcactgcagttgcacgtgatgacttaagagatgcaggttctaacgtatatgctgaaacagtacgtaaagtacgtgaacgtaatccattcactacaattgaaatcttaccatcagacatgggtggtgactatgaagcacttgaaacattaatggcttctaaacctgatatcttaaaccataatatcgaaacagtacgtcgtttaacaccaagagttcgtgcacgtgcaacatatgaaagaacattagagttcttacgtcgttctaaagaattgcaaccagatattcctactaaatcaagcttaatggttggtttaggagaaacgattgaagagatttatgaaacaatggatgatcttcgtgcaaatgatgtagacattttaacaattggtcaatatttacaaccatcacgtaagcatttaaaagttgaaaaatactatacaccattagaatttggtaaattaagaaaagtagctatggacaaaggttttaaacactgtgaagctggcccaatggtacgtagttcttatcatgccgacgaacaagtaaatgaagcggctaaagaaaaacaccgtctaggtgaagaaaaattacaacaaaattaa

SEQ ID NO: 26619 - protein, 308 aa, Staphylococcus haemolyticus JCSC1435
MVMATKNEEILRKPDWLKIKLNTNENYIGLKKMMREKNLHTVCEEAKCPNIHECWGARRTATFMILGAVCTRACRFCAVKTGLPNELDLNEPERVAESVELMNLKHVVITAVARDDLRDAGSNVYAETVRKVRERNPFTTIEILPSDMGGDYEALETLMASKPDILNHNIETVRRLTPRVRARATYERTLEFLRRSKELQPDIPTKSSLMVGLGETIEEIYETMDDLRANDVDILTIGQYLQPSRKHLKVEKYYTPLEFGKLRKVAMDKGFKHCEAGPMVRSSYHADEQVNEAAKEKHRLGEEKLQQN

SEQ ID NO: 26620 - DNA, 1044 bp, Psychrobacter arcticum 273-4
  CDS (1)..(1044): transl_table=11
atgacaaacgccgtacaaacgcacatgcctgctgcccgtgcaaaacccaaaaaagccatccaaggcgaaaaattacgtggctacgataaagttgcacgtattccaattaaaatcatcccgactgtcgaggcaaagaaaaagccagattggattcgggtaaagctgtcttcacctgctgaagtcgcacgtatcaaatctaccttgcgtgagcaaaagctttacaccgtttgtgaagaagctgcctgccctaacctgccgcagtgttttgccgatggtaccgccacctttatgattatgggtgatatctgtacgcgtcgttgcccgttctgtgatgtcggacatggtcgccccaatgagttagataaagatgagccgcgccatactgctgagaccattcaaggtttgggtcttaaatatgccgtcattacctctgttgaccgtgatgatttaaaagatggcggcgccgcgcatttcgttgaagtattgaacgaatctcgcgcactcagcccaaattgcttaatcgagattttggtgccagatttccgtggccgtatggatatagcgttagacttattgactgaaactgcgcctgacgtctttaaccacaatatcgaaacggtgcctcgtttatataaagccttccgtccaggctctgattatcagcattcattagacttgctcaagatctataaagagcgtcgccctgatattgccaccaaatgcggctttatggttgggcttggtgaaacagaagaagaaatctataagctacttgatgatctaaaagcgcataacgtcgatatgattaccgttggtcagtacttacaaccaagtaaagaccatgcgccagtcgatcgctatgtgcatcctgatgaattccagcgttatatggactatggcaaaaagattggcttctttaacatttgggcaggtcctatggtgcgctcaagctattttgctgatcgtcaatactacggcgaagattgcccagcacctatccgtagcaaaaaagccttagcagcagaaggtaagcttggctgttaa

SEQ ID NO: 26621 - protein, 347 aa, Psychrobacter arcticum 273-4
MTNAVQTHMPAARAKPKKAIQGEKLRGYDKVARIPIKIIPTVEAKKKPDWIRVKLSSPAEVARIKSTLREQKLYTVCEEAACPNLPQCFADGTATFMIMGDICTRRCPFCDVGHGRPNELDKDEPRHTAETIQGLGLKYAVITSVDRDDLKDGGAAHFVEVLNESRALSPNCLIEILVPDFRGRMDIALDLLTETAPDVFNHNIETVPRLYKAFRPGSDYQHSLDLLKIYKERRPDIATKCGFMVGLGETEEEIYKLLDDLKAHNVDMITVGQYLQPSKDHAPVDRYVHPDEFQRYMDYGKKIGFFNIWAGPMVRSSYFADRQYYGEDCPAPIRSKKALAAEGKLGC

SEQ ID NO: 26622 - DNA, 927 bp, Candidatus Pelagibacter ubique HTCC1062
  CDS (1)..(927): transl_table=11
atgacaactaagccaagacatccagaaaaagttaacaaacctttaaatccaatcaaaaaaaaacctgattggataagatctaaacttgttaatagtaaagagttttttctaacaaaaacaattgttaataataataatttagtaacggtatgtcaggaagctaactgtccaaatatcacagaatgttggagcaaaagacatgcaacatttatgataatgggtgatacttgcacaagagcatgtgctttttgcgatgtaaaaacaggtaggcctggaaaactagactcattagaacccgttaaaatagctgaagccgtaaaaaaattaaatttaaaacatgtcgtaatcacttctgttgatagagatgatctcgacgatggaggatcaaatcatttttttgaggtaattgatcaaacaagaaaaagaaatcctaatacatcaattgaggttttaacacctgattttctaagaaaaggagatgcttataaaaaagtactagaagctaatcctgatgtttttaatcataacattgaaactgtgcctagactttatttaaaagtaagaccaggctctagatatttttcatcattagaactcttaaagaatgcaaaattagttaataaaaatgttttcacaaaatcaggattaatggttggattaggtgagaataaagaggagatcattcaagtgatggatgatctaaaagcagctgatgtagattttttaactattggtcaatacttacaaccctctgtaagacaccaccccttagatcgttattaccatccagatgaatttaaagagttagaaactattgcaaaatcaaaaggatttttattagtttcatcgacacctttaactagatcttcatatcatgcagatgaagattttgctaaacttcaactaaatagaattaacaatcattaa

SEQ ID NO: 26623 - protein, 308 aa, Candidatus Pelagibacter ubique HTCC1062
MTTKPRHPEKVNKPLNPIKKKPDWIRSKLVNSKEFFLTKTIVNNNNLVTVCQEANCPNITECWSKRHATFMIMGDTCTRACAFCDVKTGRPGKLDSLEPVKIAEAVKKLNLKHVVITSVDRDDLDDGGSNHFFEVIDQTRKRNPNTSIEVLTPDFLRKGDAYKKVLEANPDVFNHNIETVPRLYLKVRPGSRYFSSLELLKNAKLVNKNVFTKSGLMVGLGENKEEIIQVMDDLKAADVDFLTIGQYLQPSVRHHPLDRYYHPDEFKELETIAKSKGFLLVSSTPLTRSSYHADEDFAKLQLNRINNH

SEQ ID NO: 26624 - DNA, 987 bp, Colwellia psychrerythraea 34H
  CDS (1)..(987): transl_table=11
atgagtaacgacttaacatcagaatcaaaaacagccaaccgtgctgctggcgaaaaatttcgcgatgcagataaattagctcacatccctattaaagttgttagttcaacaaaagcgaccatgttacgtaaaccaagttggttacgtatcaagttaccaaaatctagtgaacgtattgataacatcaaagctaatttacgaaaaaatgaccttcattctgtttgtgaagaagcatcatgccctaatttatctgagtgttttaaccatggtactgccacctttatgattttaggtgatatttgtacgcgtcgttgccctttctgtgatgttggccatggtcgtccactggctccaaaaagtgatgaaccaaaaaagttagccaatagccttaaagatatgggcttaaagtacgtcgttattacttcagttgatagagatgatttacgtgatggtggcgcacagcaatttgcagattgtgtgaaagaaattggtgaacaagcgccaaatactaaagtcgaaatattagtacctgacttccgtggtcgtatggaccgtgcgcttgaaatactgaatcaaaaccctccacacgttttcaaccataatatggaaacagcaccacgtctttatactaaagttcgtccaggcgctaactatcaatggtcattagacttacttaaacgttttggtgaagcaaacccagacgtaaccactaaatctggtttgatggttggtttaggtgaaactaacgaagaaattttagaagtaatgcaagacttacgcgatcatggtgtaactatgcttaccgttggtcagtaccttcaaccaagtaaagatcaccttgccgttgagcgctacgttcaccctgatgactttgctatgtttgaacgtgaagcaaagaaaatgggctatgaacacgctgcttgtggtccacttgttcgttcgagctaccatgctgacaaacaagctgctggtgaagaagttaagtaa

SEQ ID NO: 26625 - protein, 328 aa, Colwellia psychrerythraea 34H
MSNDLTSESKTANRAAGEKFRDADKLAHIPIKVVSSTKATMLRKPSWLRIKLPKSSERIDNIKANLRKNDLHSVCEEASCPNLSECFNHGTATFMILGDICTRRCPFCDVGHGRPLAPKSDEPKKLANSLKDMGLKYVVITSVDRDDLRDGGAQQFADCVKEIGEQAPNTKVEILVPDFRGRMDRALEILNQNPPHVFNHNMETAPRLYTKVRPGANYQWSLDLLKRFGEANPDVTTKSGLMVGLGETNEEILEVMQDLRDHGVTMLTVGQYLQPSKDHLAVERYVHPDDFAMFEREAKKMGYEHAACGPLVRSSYHADKQAAGEEVK

SEQ ID NO: 26626 - DNA, 1008 bp, Pseudomonas syringae pv. phaseolicola 1448A
  CDS (1)..(1008): transl_table=11
atgactgacaccgtgcaaaccctgatcccgacgctggatgtttccgagcgagtggcccgtccgaaagtcgaagcgggcgttaagcttcgcggagcggaaaaggttgcgcgcatcccggtcaagatcattccaacggtagatctgccgaagaaacccgactggattcgtgtgcgcatcccggtttctccggaagtcgaccgtatcaagcaattgctgcgcaagcacaagctgcacagtgtctgtgaagaggcgtcctgcccgaacctgggcgaatgcttctccggtggcaccgcaacgttcatgatcatgggcgacatctgcacccgtcgctgcccattctgcgacgtgggccatggtcgtccgaagccgctcgacgtcaacgaaccgaagagcctcgccatcgcaattgccgacctgcgtctgaagtacgtagtgatcacctcggtggaccgtgacgacttgcgtgacggcggtgctcagcactttgccgactgcatccgcgaaatccgcctgctgtcgccgggcgtacagcttgaaacactggttcccgactaccgtggccgcatggacgtagcgctggaaatcaccgctgccgagccaccggatgtgttcaaccacaacctggaaaccgttccgcgtctgtacaaggccgcgcgtccgggttcggactaccagtggtcgttgaccctgctgcagcgcttcaaacagatggtcccgcatgtaccgaccaaatcagggctgatgctgggccttggcgagaccgacgaagaggttatcgaagtcatgcagcgcatgcgcgagcacgacatcgacatgctgacgctgggtcagtacctgcagccatcgcgcaaccaccttccggtgcagcgctttgtccaccctgacacctttgcctggtttgccgaggaaggttacaagatgggcttcaagaacgtcgcatccgggccgctggtacgctcttcgtatcatgccgacgagcaggccaagatcgccaaggcaatgctctga

SEQ ID NO: 26627 - protein, 335 aa, Pseudomonas syringae pv. phaseolicola 1448A
MTDTVQTLIPTLDVSERVARPKVEAGVKLRGAEKVARIPVKIIPTVDLPKKPDWIRVRIPVSPEVDRIKQLLRKHKLHSVCEEASCPNLGECFSGGTATFMIMGDICTRRCPFCDVGHGRPKPLDVNEPKSLAIAIADLRLKYVVITSVDRDDLRDGGAQHFADCIREIRLLSPGVQLETLVPDYRGRMDVALEITAAEPPDVFNHNLETVPRLYKAARPGSDYQWSLTLLQRFKQMVPHVPTKSGLMLGLGETDEEVIEVMQRMREHDIDMLTLGQYLQPSRNHLPVQRFVHPDTFAWFAEEGYKMGFKNVASGPLVRSSYHADEQAKIAKAML

SEQ ID NO: 26628 - DNA, 945 bp, Dechloromonas aromatica RCB
  CDS (1)..(945): transl_table=11
atggctgaaaaaggcgtcaaacaaaaaggcgaactgaaaaccgcgcgcatccccatcaagatcgtgccggtcgatacgccgctacgcaaaccggagtggattcgcgtcaaggccggcaacagcgccgggcgattcggcgagatcaagtccatgctgcgcgagaaaaagctgcacaccgtctgcgaagaagcggcctgccccaacatcggcgaatgcttcggccgcggcacggcgaccttcatgatccttggcgacatctgcacccgccgctgccctttctgcgacgttggccacggccagccgctgccgcccaacccgaacgaaccggccgagctggctgattcggtgtcgtcgctaaagctgcagtacgtggtaatcaccagcgtcgaccgcgacgacctgcgcgatggcggcgcccagcatttcgtcgatgtcgtccgtgccgtacgcgaggcctcgcccaagacgaccatcgaaaccctggtccccgacttccgtggccgcatggacatcgccatcgacattctcggcaatggcctgcccgatgtgctgaaccacaacatggaaaccgtgccccgcctgtacaagcaagcccgtcccggtgccgactacgcccattcgctggccctgatgaagcagttcaaggcacgctaccccgacgtcaagaccaagtccggcctgatggtcggcctcggcgagaccgacgaggaaatcctcgaagtcatgcgtgacctgcgggccaacgatgtcgaaatgctgactatcggccaatacctggccccgtcaggccaccacctgccggtcagccgctacgtccatcccgacactttcaaaatgttcgaggaagaagccaaaaagatgggcttctccggtgcggcctgcgccccgatggtgcgctcgagctactgggctgaccagcaggcccatagcgctggcgtcgcctga

SEQ ID NO: 26629 - protein, 314 aa, Dechloromonas aromatica RCB
MAEKGVKQKGELKTARIPIKIVPVDTPLRKPEWIRVKAGNSAGRFGEIKSMLREKKLHTVCEEAACPNIGECFGRGTATFMILGDICTRRCPFCDVGHGQPLPPNPNEPAELADSVSSLKLQYVVITSVDRDDLRDGGAQHFVDVVRAVREASPKTTIETLVPDFRGRMDIAIDILGNGLPDVLNHNMETVPRLYKQARPGADYAHSLALMKQFKARYPDVKTKSGLMVGLGETDEEILEVMRDLRANDVEMLTIGQYLAPSGHHLPVSRYVHPDTFKMFEEEAKKMGFSGAACAPMVRSSYWADQQAHSAGVA

SEQ ID NO: 26630 - DNA, 939 bp, Thermobifida fusca YX
  CDS (1)..(939): transl_table=11
gtgagcatcgctcccgagggccgccgcctgttgcggatcgaagcccgcaacagcactaccccgattgagaagaagccgccgtggatcaagatcagggcgaagatgggctcggagtacaccgagctgcacgccctggtcaaacgcgagggcctgcacacggtgtgccaggaggccgggtgccccaacatctacgagtgctgggaggaccgggaggccacgttcctcatcggcggcgaccagtgcacgcgacgctgcgacttctgccagatcgctaccgggaagccggcggcgttggaccggggggagccgctgcgggtcgccgagtcggtgcgcacgatgggtctcaagtatgcgacggtcaccggggtggcccgcgacgacttggacgacgggggcgcgtggctgtacgcggaaacggtccgcaagatccacgagttgaaccccggcaccggcgtggagctgctgatccccgacttcaacgccgacccggacctgctggccgaggtgttcagctcccggccggaggtgctggcgcacaacattgagacggtgccgcggatcttcaagcgcatccgtcccgggttccgctacgagcgttctttggaggtgatcacccgggcccgcgaggcggggctggtcaccaagtcgaatctgatcctgggcatgggcgagacccgggaggagatcagccaggcgatgcgggacctgtacgaggccgggtgcgacttgttgacgatcacccagtacctgcggccgtcccgcttgcaccacccggtggaccggtgggtgaagccggaggagttcgtggagctgggccgggaggccgaggagatcggtttcgccggggtgatgtcgggtccgctggtgcggtcgtcgtaccgggcgggccggttgtaccgccaggcgatcgagcgtcgcaaggcggacgcgaaatcgtaa

SEQ ID NO: 26631 - protein, 312 aa, Thermobifida fusca YX
MSIAPEGRRLLRIEARNSTTPIEKKPPWIKIRAKMGSEYTELHALVKREGLHTVCQEAGCPNIYECWEDREATFLIGGDQCTRRCDFCQIATGKPAALDRGEPLRVAESVRTMGLKYATVTGVARDDLDDGGAWLYAETVRKIHELNPGTGVELLIPDFNADPDLLAEVFSSRPEVLAHNIETVPRIFKRIRPGFRYERSLEVITRAREAGLVTKSNLILGMGETREEISQAMRDLYEAGCDLLTITQYLRPSRLHHPVDRWVKPEEFVELGREAEEIGFAGVMSGPLVRSSYRAGRLYRQAIERRKADAKS

SEQ ID NO: 26632 - DNA, 924 bp, Prochlorococcus marinus str. NATL2A
  CDS (1)..(924): transl_table=11
atgacaacaacaacaagaaaaacaacaaaatacagtagcttcctcccagaagagcgtttacctaattggatcaaaccatcgataggtaacgcaactcaactagagaaagttcaaaagctcgtaaaggaaaacagattacatacgatctgtgaagaaggcagatgcccgaacagaggtgaatgttatgccgctggtacggctacttttttattgggcggctcaatatgtacaaggagctgtgccttttgccaagtagaaaaaggaaagtcgccagagaaagtaaatatttttgaggcagagaaagtagcaaatgctgttcaggtattgaatcttaaatatgtggtactaacagcagtcgcaagagatgatttgccggatcacggtgcaagtctattcacgacaacaatggatgcaattagatccttgaatccaggtgtcgcaatagaggtactaacaccagatttctggggtggcaacaacaaggacaatgtcgaaaagcaaagagagcgccttaagctagttctttcggctaatccgatttgtttcaaccataatcttgaaactgtcaaaagacttcaaagagaagtcaggagaggtgctacttaccaacactcactcaatcttctcaaatttgctagagaaatcgatccaaaaattcctacaaaatcaggaataatgcttggactgggagaaaaatttcatgaaataattcaaacccttaaagaccttaggaaagtagactgtcaatatttgactatcggtcaatatttacgaccttcacttgctcacatcccagtttctcattattggtcaccaacaaagttcaatgattttgcagaaatagcaaacggattaggttttaagaaagtaaacagcggtcctttagtaagaagcagctaccatgcgaaggagaccttagattag

SEQ ID NO: 26633 - protein, 307 aa, Prochlorococcus marinus str. NATL2A
MTTTTRKTTKYSSFLPEERLPNWIKPSIGNATQLEKVQKLVKENRLHTICEEGRCPNRGECYAAGTATFLLGGSICTRSCAFCQVEKGKSPEKVNIFEAEKVANAVQVLNLKYVVLTAVARDDLPDHGASLFTTTMDAIRSLNPGVAIEVLTPDFWGGNNKDNVEKQRERLKLVLSANPICFNHNLETVKRLQREVRRGATYQHSLNLLKFAREIDPKIPTKSGIMLGLGEKFHEIIQTLKDLRKVDCQYLTIGQYLRPSLAHIPVSHYWSPTKFNDFAEIANGLGFKKVNSGPLVRSSYHAKETLD

SEQ ID NO: 26634 - DNA, 870 bp, Prochlorococcus marinus str. NATL2A
  CDS (1)..(870): transl_table=11
ttgcttaaaccagactggctacgtgttaaagcaccacagcaagagaggattggtaatgttgctgatttattagttgatttaaaactcaatacagtttgtcaggaagcaagttgtccaaatattggagagtgttttgcaggaggtactgctactttcttaataatgggacctgcttgcacgagaaaatgtccttattgcgatatttcatttgataattcaaaaaggcttttagacccatcagaacctgatcgtctaggtgaagctgtttacagaatgggcttaacgcatgtcgtcataacttccgttaatcgtgatgatttagaagatggaggcgctagtcaatttttgaaatgtattaaggctgtgcaaagtaaatctccttttacttctattgaagtcttaatcccagatctttgcggaaattgggatgctttgaaagttatcttggatgctgcgccaaatgtccttaatcacaatatcgagacagttccgaggctatatccaagagttagacctcaagggaaatatgaaaggtctttagaattattaaaaagagttcgggaaggttggccaagagtctatacaaaatcaggtttaatggctggattaggggagacagatgatgagattttgagtgttctaagtgatctccatttaaataaagttgatatagtaactattgggcaatatttatcaccaggaccaaaacatttacctgttaatagatttgtttccccttcgcaatttgatagttatcgtgttgagggagaaaataaattaggatttttacaggtcattagttcaccattaactagaagtagttatcacgctggagaagttaaaaaattaatgatgtctcatccaagataa

SEQ ID NO: 26635 - protein, 289 aa, Prochlorococcus marinus str. NATL2A
MLKPDWLRVKAPQQERIGNVADLLVDLKLNTVCQEASCPNIGECFAGGTATFLIMGPACTRKCPYCDISFDNSKRLLDPSEPDRLGEAVYRMGLTHVVITSVNRDDLEDGGASQFLKCIKAVQSKSPFTSIEVLIPDLCGNWDALKVILDAAPNVLNHNIETVPRLYPRVRPQGKYERSLELLKRVREGWPRVYTKSGLMAGLGETDDEILSVLSDLHLNKVDIVTIGQYLSPGPKHLPVNRFVSPSQFDSYRVEGENKLGFLQVISSPLTRSSYHAGEVKKLMMSHPR

SEQ ID NO: 26636 - DNA, 996 bp, Ralstonia eutropha JMP134
  CDS (1)..(996): transl_table=11
atgagcgacgccctgatcgcctcctccagcgaagccccccaatcccccgcggagcagtacgatccgacccgcaagcagaaatcggccgacaagaccgcgcgcatccccatcaagatcgtgccggccgaaaagctcaagaagccggactggatccgcgtgaaggccgccaccggcaattcgcgtttctacgagatcaaggacatcctgcgcgcgaacaacctcgtcacggtgtgcgaggaagcaagctgcccgaacatcggcgaatgcttcggcaagggcacggcgacgttcatgatcatgggcgacaagtgcacgcgccggtgcccgttctgcgacgtcggccacggccgccccgatccgctcgatgtgaacgagcccggcaacctggcccgcaccatcgcccaactcaagctcaactacgtggtcatcaccagcgttgaccgtgacgacctgcgcgacggcggtgcccagcactacgtggactgcatcagccagacgcgcgagctgtcgcccgccacccgcatcgaagtgctggtgcccgacttccgcggccgcctggacaaggcgctggacatcctgcaggcctgcccgccggacgtcatgaaccacaacatggaaacggtgccgcgcctgtacaagcaggcccgcccgggtgccgactacgcgcactcgctcaagctgctgcaggaattcaagcgccgcaacccgaacgtgccgaccaagtccggcctgatggtcggcctgggcgagaccgacgaggaaatcctcgaagtcatgcgcgacatgcgcgcgcacgatatcgacatgctgaccatcggccagtacctcgcaccgtcgaaccaccacctgccggtgctgcgctacgtgcatcccgatacgttcaagatgttcgaggaagaggcctacaagatgggcttcacccacgccgccgtgggcgcgatggtgcgcagctcgtaccacgccgaccagcaggcgcatcaggcggggtttgcctga

SEQ ID NO: 26637 - protein, 331 aa, Ralstonia eutropha JMP134
MSDALIASSSEAPQSPAEQYDPTRKQKSADKTARIPIKIVPAEKLKKPDWIRVKAATGNSRFYEIKDILRANNLVTVCEEASCPNIGECFGKGTATFMIMGDKCTRRCPFCDVGHGRPDPLDVNEPGNLARTIAQLKLNYVVITSVDRDDLRDGGAQHYVDCISQTRELSPATRIEVLVPDFRGRLDKALDILQACPPDVMNHNMETVPRLYKQARPGADYAHSLKLLQEFKRRNPNVPTKSGLMVGLGETDEEILEVMRDMRAHDIDMLTIGQYLAPSNHHLPVLRYVHPDTFKMFEEEAYKMGFTHAAVGAMVRSSYHADQQAHQAGFA

SEQ ID NO: 26638 - DNA, 942 bp, Staphylococcus saprophyticus subsp. saprophyticus ATCC 15305
  CDS (1)..(942): transl_table=11
atggctactaaaaatgaagaaattttacgtaaaccagattggttaaaaataaaactaaatactaacgaaaattatactggtcttaagaaaatgatgcgcgaaaagaatttacatacagtttgtgaagaagcaaagtgtcctaatatacacgagtgttggggtgagcgtcgtactgcaacatttatgattcttggtgcagtttgtacacgagcttgtcgtttctgtgcagttaagactggtttacctaacgaattagatttagatgagccagaacgcgtggcagaatctgtagagttaatgaatttaaaacatgttgttattactgcagttgcgcgtgatgatttaagagatgcaggttcaaatgtatacgctgaaacagtgcgtaaagtacgtgaacgtaatccatttacatcaattgaaatcttaccttcagatatgggcggagattatgatgcattagaaacattaatggcatcaaaaccggatatcttaaaccataacatcgagacagttcgccgtttgacaccgagagttcgtgctagagcgacttacgatcgtacattagagttcttgagacgttctaaagaattacaacctgatattcctacaaaatcaagtttaatggtgggattaggtgaaacacacgaggaaatttatgaaacaatggatgaccttcgtgctaatgatgtggatattttgacaataggtcaatatttacaaccttcacgtaaacacttaaaagttgaaaaatattacacacctttagaatttggtaaattaagaaaagtagcaatggataaaggttttaaacattgccaagctggtccacttgtaagaagttcttatcatgcagatgaacaagtaaatgaagctgcaaaagaaagacaccgcatcggagaagaaaaacttggtaatgaaattggtacagatacgaataactaa

SEQ ID NO: 26639 - protein, 313 aa, Staphylococcus saprophyticus subsp. saprophyticus ATCC 15305
MATKNEEILRKPDWLKIKLNTNENYTGLKKMMREKNLHTVCEEAKCPNIHECWGERRTATFMILGAVCTRACRFCAVKTGLPNELDLDEPERVAESVELMNLKHVVITAVARDDLRDAGSNVYAETVRKVRERNPFTSIEILPSDMGGDYDALETLMASKPDILNHNIETVRRLTPRVRARATYDRTLEFLRRSKELQPDIPTKSSLMVGLGETHEEIYETMDDLRANDVDILTIGQYLQPSRKHLKVEKYYTPLEFGKLRKVAMDKGFKHCQAGPLVRSSYHADEQVNEAAKERHRIGEEKLGNEIGTDTNN

SEQ ID NO: 26640 - DNA, 900 bp, Ehrlichia canis str. Jake
  CDS (1)..(900): transl_table=11
atgagaagtaagcctgattggttaaaagtgaaaatgcctacaggtgatactttttatcagatgcgtaatttgatgaagttgtacaagctaaacacggtgtgtgaggaagctgcttgcccaaatgttggtgaatgttggaataaaaaacatgcaacagtaatgattttaggttctacttgtactagagcatgtgccttttgtaatgttgctactgggattccagataagttggatcctcatgagcctcaaaacttggctaaagctatcaactcacttaaacttcatcatgttgttattacatctgttgatagggatgatttaccagatggtggagctgggcattttgttgagtgtatagaagaaatacgaaagagagatgataacattactattgaaatattaactccagattttttaaataaacatggtgcaattgataagattgctgcagtagctcctgatgtttataatcataatgtagaaactgtaccaagattatatgcaaggattaggccaaaagcacgttattttcattctctgtatttgcttaaagcagtgaaatataagaatcctaaaatatttactaaatctggaataatggtagggttaggtgaaacaaaggaagaaatatatcaggtgatggatgatttaagatcagcagatgttgattttataacaattggtcaatatttacagcctactcctaaacatgctgtagttgatagatatgtaactcctgaggaatttgatcattacaaatatgttgcatattctaaagggtttttgatggttgcttcaggtcctttagttaggtcttcatatcatgctgaagaagattttcaaaaattaaaacaaaatcgtactgctatgttaatgcgtgctgaaagtaattcgatatag

SEQ ID NO: 26641 - protein, 299 aa, Ehrlichia canis str. Jake
MRSKPDWLKVKMPTGDTFYQMRNLMKLYKLNTVCEEAACPNVGECWNKKHATVMILGSTCTRACAFCNVATGIPDKLDPHEPQNLAKAINSLKLHHVVITSVDRDDLPDGGAGHFVECIEEIRKRDDNITIEILTPDFLNKHGAIDKIAAVAPDVYNHNVETVPRLYARIRPKARYFHSLYLLKAVKYKNPKIFTKSGIMVGLGETKEEIYQVMDDLRSADVDFITIGQYLQPTPKHAVVDRYVTPEEFDHYKYVAYSKGFLMVASGPLVRSSYHAEEDFQKLKQNRTAMLMRAESNSI

SEQ ID NO: 26642 - DNA, 936 bp, Thiobacillus denitrificans ATCC 25259
  CDS (1)..(936): transl_table=11
atggcagaccccctccagcacaaaggcgcggcgaagacgtcgcgcatcccgatcaagatcgtgccgcaagagcggcaacgcctgccgccgtggatccgggcgaaggcgccgagcctaccgaacgtcggacggctcaagggcatcctgcgcgaagccaagctgcacacggtgtgcgaggaggcgtcgtgcccgaatctcggcgagtgcttcggccacggcacggcgactttcatgatccttggcgacctctgcacgcggcgttgcccgttctgtgacgtcggccacggcacgcccttgccgccggacgccgacgagccgcgtcatctcgccgaaacgatcgcgctgatggccttgaagtacgttgtcatcacgagcgtcgaccgcgacgacctgcgtgacggcggcgccgggcattttgccgagtgcatcgcggccgtgcgcgaaaaatcgccggcgacgcggatcgagatactgactcccgattttcgtggccgcctcgacaaggcgctcgcggcgctcgaccgtgccccgcccgacgtcatgaaccacaacctcgaaaccgtgccgcgcctctacaaggccgcgcgcccgggcgccgactacgcgcattcgctcaaactgctgcaggatttcaggacgcgccaccccgacatcccgaccaagtcgggcctgatgctcgggctgggcgaaaccgacgacgagatcctcgaggtcatgcgcgacctgcgcgcgcacggcgtagacatgctgaccctaggccagtacctgcagccctcgcggcaccatctggcggtgctgcgcttcgtcacccccgagcgctttgcgcagttcgagcaggaagcattggcgatgggtttccggcacgcggcctgcgggccgatggtgcgctcgagctaccacgccgaccagcaggccgccgcggcagcggcaggttag

SEQ ID NO: 26643 - protein, 311 aa, Thiobacillus denitrificans ATCC 25259
MADPLQHKGAAKTSRIPIKIVPQERQRLPPWIRAKAPSLPNVGRLKGILREAKLHTVCEEASCPNLGECFGHGTATFMILGDLCTRRCPFCDVGHGTPLPPDADEPRHLAETIALMALKYVVITSVDRDDLRDGGAGHFAECIAAVREKSPATRIEILTPDFRGRLDKALAALDRAPPDVMNHNLETVPRLYKAARPGADYAHSLKLLQDFRTRHPDIPTKSGLMLGLGETDDEILEVMRDLRAHGVDMLTLGQYLQPSRHHLAVLRFVTPERFAQFEQEALAMGFRHAACGPMVRSSYHADQQAAAAAAG

SEQ ID NO: 26644 - DNA, 963 bp, Haemophilus somnus 129PT
  CDS (1)..(963)
atgacaaccccttttaaaatggaacgtggtgtcaaatatcgtgatgctgcaaaaacgtcaatcattccggttaaaaatatcgatcccaatcaggagttattaaaaaaacctgaatggatgaaaatcaagcttcctgcaaattctgcgaaaattaacagtattaaaaacggaatgcgtcgtcatggattacattccgtatgtgaagaagcgtcttgtccaaatttacatgaatgcttcaatcacggcacagcaacatttatgattttaggtgcaatttgtacacgccgatgtccattctgcgatgttgcccatggaaaaccattacccccagatccggatgaaccaaaaaaattggcggaaactattcaagatatgaaattacgttatgtcgttattacatcagtggatcgtgatgatttaccggatcgtggtgcgggacattttgctgaatgtgttaaagaaattcgtaaacttaatccaggtattaaaattgaaattttggtgcctgattttcgtggacgcattgagcaagcattagaaaaattaaaagataatccccctgatgtttttaaccataatttagaaaatgtacctcgtttatatcgtgaaatcagaccaggtgcggactataattggtcgttaaaattactcaaagaatttaaaaccatttttccacatatccctaccaaatcaggcattatggttggcttgggagaaaccaatgaagaaattttacaggtaatgcaggacttacgggataacggtgtaaccatgttgactctaggtcaatatttgcaaccaagtcgccaccacttacctgttgcccgatacgttccacctgaggaatttgatgatttccgtgataaagccgaaaaaatgggatttgagcatgccgcttgcggaccttttgtgcgttcttcgtatcatgctgacttacaagcaagtggcgggctagtcaaataa

SEQ ID NO: 26645 - protein, 320 aa, Haemophilus somnus 129PT
MTTPFKMERGVKYRDAAKTSIIPVKNIDPNQELLKKPEWMKIKLPANSAKINSIKNGMRRHGLHSVCEEASCPNLHECFNHGTATFMILGAICTRRCPFCDVAHGKPLPPDPDEPKKLAETIQDMKLRYVVITSVDRDDLPDRGAGHFAECVKEIRKLNPGIKIEILVPDFRGRIEQALEKLKDNPPDVFNHNLENVPRLYREIRPGADYNWSLKLLKEFKTIFPHIPTKSGIMVGLGETNEEILQVMQDLRDNGVTMLTLGQYLQPSRHHLPVARYVPPEEFDDFRDKAEKMGFEHAACGPFVRSSYHADLQASGGLVK

SEQ ID NO: 26646 - DNA, 972 bp, Pseudomonas aeruginosa UCBPP-PA14
  CDS (1)..(972)
atggagaagtccggagaagccaagccgggcaaggtggaagtcggcgtgaagctgcgcggcgcggaaaaggtcgcgcggattccggtgaagatcattcccaccgaggaactgccgaagaaacccgactggatccgcgtgcgcatcccggtttcccccgaggtcgaccgcatcaagcaactgctgcgcaagcacaagctgcacagcgtctgcgaagaggcgtcctgcccgaacctgggcgagtgcttctccggcggcaccgcgaccttcatgatcatgggcgatatctgcacccgacgctgcccgttctgcgacgtcggtcatggccggccgaagccgctggacgtcgacgagccgaccaacctggccatcgccatcgccgacctgcggctgaagtacgtggtgatcacctcggtggaccgcgacgacctgcgcgacggcggcgcccagcacttcgccgactgcctgcgcgagatccgcaagctgtcgccggggatccagctggaaaccctggtgcccgactatcgcggtcgcatggacatcgccctggagatcaccgccaacgagccgccggacgtgttcaaccataacctggagacggtaccgcgcctgtaccgctcctcgcggccgggctcggacttcgagtggtcgctggacctgctgcagaagttcaagcagatggttccgcacgtaccgaccaagtccgggctgatgctcggcctgggcgagaccgacgacgaggtcatcgaggtcatgcagcggatgcgcgagcacgacatcgacatgctgaccctcggccagtacctgcagccgtcgcgcaaccacctgccggtgcagcgcttcgtgcatccggacaccttcgcctggttcgccgaggaaggcgagaagatgggcttcaagaacgtcgcgtccggcccgctggtgcgttcgtcctaccatgccgaccagcaggcgcacggcaacaagatcggctga

SEQ ID NO: 26647 - protein, 323 aa, Pseudomonas aeruginosa UCBPP-PA14
MEKSGEAKPGKVEVGVKLRGAEKVARIPVKIIPTEELPKKPDWIRVRIPVSPEVDRIKQLLRKHKLHSVCEEASCPNLGECFSGGTATFMIMGDICTRRCPFCDVGHGRPKPLDVDEPTNLAIAIADLRLKYVVITSVDRDDLRDGGAQHFADCLREIRKLSPGIQLETLVPDYRGRMDIALEITANEPPDVFNHNLETVPRLYRSSRPGSDFEWSLDLLQKFKQMVPHVPTKSGLMLGLGETDDEVIEVMQRMREHDIDMLTLGQYLQPSRNHLPVQRFVHPDTFAWFAEEGEKMGFKNVASGPLVRSSYHADQQAHGNKIG

SEQ ID NO: 26648 - DNA, 999 bp, Pseudomonas fluorescens PfO-1
  CDS (1)..(999)
atgatcccgacgctcgacgtgaccgagcgcccggccccgcgtcccaaggttgaagccggcgtcaagctgcgcggcgccgagaaggttgcacgcatcccggtgaagatcattccgaccaccgaactgccgaagaaacccgactggatccgcgtgcgcatcccggtttcgccggaagtcgaccgcatcaagagcctgctgcgcaagcacaagctgcacagcgtctgcgaagaggcgtcctgcccgaacctgggcgagtgcttctccggcggcaccgcgaccttcatgatcatgggtgacatctgcacccgtcgttgcccgttctgcgacgttggccacggtcgtccgaaaccactggacgtcaatgagccggaaagcctggccatcgccatcgccgacctgaaactcaagtacgtggtgatcacctcggttgaccgcgacgacctgcgtgacggcggtgcccagcactttgccgactgcatccgcgaaatccgcaaactgtcgccgaacgtgcagctcgagaccctggtcccggactatcgtggccgcatggacatcgccctggaaatcaccgcggccgagccgccggacgtgttcaaccacaacctggaaaccgtaccgcgcctgtacaaggctgcgcgtccgggttcggactaccagtggtcgctgactctgttgcaacgcttcaagcagatgatgccgcacatcccgaccaaatccggcctgatgctgggtctgggcgagaccgacgacgaagtcatcgaagtcatgaagcgcatgcgcgaacacgatatcgacatgctgaccctgggccagtacctgcaaccgtcccgcagccacttgccggtgcagcgtttcgtgcacccggacaccttcgcctggttcgccgaggaaggttacaagatgggcttcaagaacgtcgcgtccggcccattggtgcgttcttcgtaccacgctgacgagcaagcgaaactggtcaaggccgagctgctcggttcctga

SEQ ID NO: 26649 - protein, 332 aa, Pseudomonas fluorescens PfO-1
MIPTLDVTERPAPRPKVEAGVKLRGAEKVARIPVKIIPTTELPKKPDWIRVRIPVSPEVDRIKSLLRKHKLHSVCEEASCPNLGECFSGGTATFMIMGDICTRRCPFCDVGHGRPKPLDVNEPESLAIAIADLKLKYVVITSVDRDDLRDGGAQHFADCIREIRKLSPNVQLETLVPDYRGRMDIALEITAAEPPDVFNHNLETVPRLYKAARPGSDYQWSLTLLQRFKQMMPHIPTKSGLMLGLGETDDEVIEVMKRMREHDIDMLTLGQYLQPSRSHLPVQRFVHPDTFAWFAEEGYKMGFKNVASGPLVRSSYHADEQAKLVKAELLGS

SEQ ID NO: 26650 - DNA, 1068 bp, Microbulbifer degradans 2-40
  CDS (1)..(1068)
atgagcgaatcctcagagaacaacactggcgtacaaagccatgaacccaacgcggccacaagccaagaaagcgtaatgatgtccgatgcaatagcaaccgacggcgtgcctgttaaacgcacccgccgcattaaacagggcgaaaaactgcgcgatgccgataaggtagagcgtatccccgtaaaagtaattgcaacggatagcatgctgcgcaaacccgattggattcgcattcgcgtaaaagccgaccccgaagtggatcgtattaaaaaactactgcgcaaaaacaaactgtctacggtttgtgaagaagccaactgccctaacctaagcgaatgctttggcggcggtactgctacctttatgatcatgggcgatatctgtactcgtcgctgccctttttgcgacgtgggccacggcaagcccaacccgttagacgagaatgagccaaaacacttggccgaagctatcgccgatatgggcctcaaatacgtggtggttacctcggtggaccgcgacgacttgcgcgatggcggtgctcagcattttgccgactgtatccgtgaatcccgtgcgctttcgcccaacctgcaggtagaaattctcaccccagattttcgtggccgcatggatatagcgttagatattctcgccaacgagccgcccgatgtatttaaccacaacctagaaaccgtgccgcgtttgtaccgcgaggcgcgcccaggtgccaattacaaatggtcgctcgagctgcttaaaaagtacaaagcgcttaggccagaagtgcttactaaatctggcttgatggtaggtttaggggaaaccaaagaagaaatctttgaaaccctgaaagatatgcgcgaacacgatatagacatgttaaccatcggtcagtacctacagccgtcgcgcgatcacttgccggttaaacgctatgtagagcctgcagagtttgacgagtacaccgcaatggcagagcagctaggctttaagcacgccgcttgtggcccgcttgtgcgctcgtcctaccatgccgataaacaagctcacggtgaagaagttaagtaa

SEQ ID NO: 26651 - protein, 355 aa, Microbulbifer degradans 2-40
MSESSENNTGVQSHEPNAATSQESVMMSDAIATDGVPVKRTRRIKQGEKLRDADKVERIPVKVIATDSMLRKPDWIRIRVKADPEVDRIKKLLRKNKLSTVCEEANCPNLSECFGGGTATFMIMGDICTRRCPFCDVGHGKPNPLDENEPKHLAEAIADMGLKYVVVTSVDRDDLRDGGAQHFADCIRESRALSPNLQVEILTPDFRGRMDIALDILANEPPDVFNHNLETVPRLYREARPGANYKWSLELLKKYKALRPEVLTKSGLMVGLGETKEEIFETLKDMREHDIDMLTIGQYLQPSRDHLPVKRYVEPAEFDEYTAMAEQLGFKHAACGPLVRSSYHADKQAHGEEVK

SEQ ID NO: 26652 - DNA, 978 bp, Methylobacillus flagellatus KT
  CDS (1)..(978): transl_table=11
atgacagaaattaccgaacgtatcgtcccgccgccccgcaaggtcgcgggcgtcaaggaatccagcgccgagaagatggcgcgcatcccgatcaagatcattcccatgccggctatgcgcaagccggaatggatacgcatgaaagtgccggatagcgcacgtttccgcgaaatcaagcaggtgctgcgcgagaataatctacatactgtctgtgaagaagcatcctgtcccaatatcggggaatgcttcagtggcggcaccgccacgttcatgatccttggcgacatttgcacccgccgttgcccgttttgcgatgtatctcatggcaaaccattgccacccgatgccaacgagcctgaaaacctgggccgtaccattgcccagatgcgcctcaagtatgtcgtcatcaccagtgtggaccgcgacgacttgcgtgacggtggcgcgcagcattttgtcgattgcatcgcagcagtacgcgcccactcaccacagatcaaggtggaaatcctcgtgcctgacttccgcggccgcctggatcgcgccatccatattctcaaggccgctcctcccgacgtcatgaaccacaatctggaaactgtgccgcgactatacaaggaggcgcgccctggctccgattaccagaactcgctggatttgctcaaggaattcggcaagctgcaccccgaagtgccaaccaagtccggcctgatgctggggttgggcgaaaccgacgaggaaattttggatgtcatgcgcgacctgcgggcgcacaatgtcaccatgttgaccctcggccaatatctgcagcccagcccgcaccatttgccggtcaagcgtttcgtcacgccgcaacgctttgccgagttcgagcggcaagcccttgccatggggttcacccatgccgcctgcggccccatggtgcgctcctcctaccatgccgatcatcaggcacaacaagcaggtgtcaatttctaa

SEQ ID NO: 26653 - protein, 325 aa, Methylobacillus flagellatus KT
MTEITERIVPPPRKVAGVKESSAEKMARIPIKIIPMPAMRKPEWIRMKVPDSARFREIKQVLRENNLHTVCEEASCPNIGECFSGGTATFMILGDICTRRCPFCDVSHGKPLPPDANEPENLGRTIAQMRLKYVVITSVDRDDLRDGGAQHFVDCIAAVRAHSPQIKVEILVPDFRGRLDRAIHILKAAPPDVMNHNLETVPRLYKEARPGSDYQNSLDLLKEFGKLHPEVPTKSGLMLGLGETDEEILDVMRDLRAHNVTMLTLGQYLQPSPHHLPVKRFVTPQRFAEFERQALAMGFTHAACGPMVRSSYHADHQAQQAGVNF

SEQ ID NO: 26654 - DNA, 966 bp, Shewanella baltica OS155
  CDS (1)..(966): transl_table=11
atgaataggcctgaacgtttacaacccggagtaaaattaagagatgccgataaagtgtctcgtattccggtcaaaatcgtcccctcagagcgcgacactatgttgcgtaaacccgattggttacgggttaaactgccggcatcgaatcaacgcattttagagatcaagcaagcgctgcgtaaaaatggcctgcactctgtctgtgaagaggcatcttgccctaacctcgcagaatgctttaaccacggcactgcgacctttatgattttgggtgcgatttgtacacgtcgttgcccattctgcgacgtagcccatggtcgtccgcttaagcctgacgctgaagagccggttaaattggcgcaaacaatccgcgatatgaagctgaaatacgtggtcattacctcggtagatcgtgacgatttacgtgatggtggcgcccagcattttgccgattgtatccgcgaaattcgtaaactgaatccagacatcaagatcgaaaccttagtacctgatttccgtggtcgtatcgatgctgccttagatattttatcgactgagccgcctgatgtgttcaaccacaacttagaaacggcgccaatgcattatcgtaaagcgcgcccaggtgcgaattaccaatggtcgctcgatctgctaaaacgctttaaagaacgtcatccaaatgtgccaactaagtcaggcctgatgatgggactgggtgagaccaacgaagaaatcgctcaagtattacgtgacttgcgcgcccacaacgttgaaatgctgaccttaggccaatacctacagccgtctaagttccacttgccggttgaacgttatgtgccaccagcagagtttgacgagcttaaagccttagccgatgagctaggttttacccatgcagcctgtggcccattagtgcgctcaagctaccatgcagacttgcaggcccaaggtaaagaagtgaaataa

SEQ ID NO: 26655 - protein, 321 aa, Shewanella baltica OS155
MNRPERLQPGVKLRDADKVSRIPVKIVPSERDTMLRKPDWLRVKLPASNQRILEIKQALRKNGLHSVCEEASCPNLAECFNHGTATFMILGAICTRRCPFCDVAHGRPLKPDAEEPVKLAQTIRDMKLKYVVITSVDRDDLRDGGAQHFADCIREIRKLNPDIKIETLVPDFRGRIDAALDILSTEPPDVFNHNLETAPMHYRKARPGANYQWSLDLLKRFKERHPNVPTKSGLMMGLGETNEEIAQVLRDLRAHNVEMLTLGQYLQPSKFHLPVERYVPPAEFDELKALADELGFTHAACGPLVRSSYHADLQAQGKEVK

SEQ ID NO: 26656 - DNA, 879 bp, Prosthecochloris aestuarii DSM 271
  CDS (1)..(879): transl_table=11
atgaagattcaacgaaaacccgattggctgaaactcaggctttcgggaacggctcaatttgcatcaaccaggaaactgattgccgggtatggtctcaataccgtctgccgctcggcgcagtgcccgaacctgcacgaatgctggtcatcgggaacggctacctttctgctgcttggcaatacctgtacacgaagctgcaggttctgcgctgtaggcacaaaaaaggatcttcctcccccagacccgaacgaaccggaaaacgtcgcgcaagctgtccggaaaatgaaactcacccacgtcgtcctgacaagcgtcacccgagatgatctctccgatttcggttccggggcctgggctgaaacgatcagaaaaattcgcgaatccaatcccgataccaccatagaatgcctgattcctgatttcaggggaaatctggacgccctcgatagcgtgatgcaactccgtccggaggtgctcaatcacaatgtggaaaccgttccttcctgctacgcctcagtgcgccctgaagccgagtaccgtcaatcactcggggtacttcgtctggctgcatcaacctatggactgcaggcaaaatcaggccttatggtcggtctgggcgagacccctgaagaggtatacgaggtgcttgacgatcttctggcctacggctgccgtcacatcaccatcggtcagtacctgcagccatccaaacaccactatccggttcaacgatacgtcccaccggaagagtttgaccaataccgaacttacgcactcgaaaaaggatgcacaacggtccagtcaggcccctatgttcgaagttcctatcacgctgcagaatgcgtagagaacaagcataatacacttaccacaacgtaa

SEQ ID NO: 26657 - protein, 292 aa, Prosthecochloris aestuarii DSM 271
MKIQRKPDWLKLRLSGTAQFASTRKLIAGYGLNTVCRSAQCPNLHECWSSGTATFLLLGNTCTRSCRFCAVGTKKDLPPPDPNEPENVAQAVRKMKLTHVVLTSVTRDDLSDFGSGAWAETIRKIRESNPDTTIECLIPDFRGNLDALDSVMQLRPEVLNHNVETVPSCYASVRPEAEYRQSLGVLRLAASTYGLQAKSGLMVGLGETPEEVYEVLDDLLAYGCRHITIGQYLQPSKHHYPVQRYVPPEEFDQYRTYALEKGCTTVQSGPYVRSSYHAAECVENKHNTLTTT

SEQ ID NO: 26658 - DNA, 960 bp, Nitrobacter winogradskyi Nb
  CDS (1)..(960): transl_table=11
atggtcgtcatcctcgatacgatttccgccaatcctgtccggccgcggcatccggagaaggccaaccggccggatgcgttgtcgccgccgaaacccgactggattcgcgtgcgcgcgccgaacacgcgcggctatgcgaatacgcgccggatcgtcaaggagaacggactggtcaccgtatgcgaggaggcgggctgcccgaacatcggcgagtgctgggacaagaaacacgccaccttcatgatcatgggcgacacctgcacccgcgcctgcgccttctgcaatgtcaagacgggaatgcccggtgcgatcgagtcgtccgagcccgaatacgtggctgaagcgacgcgcaagctggggttggcgcacgtcgtcgtcacatccgtcgatcgcgacgatctcgatgacggaggcgcggaacatttcgcgcagacgatacgcgctatccgtgagcgttgtccggcgacgacgatcgagatcctgacgcccgattttcttcgcaaggacggcgcgctggaaaaggtggtggcggcgaagcccgatgtcttcaaccacaatctcgaaaccgttccgtcgcgttacctgactgtgcggcccggcgcgcgctatttccactcgatccgcctgttgcaacgggtgaaggagatcgacccggcgatcttcaccaagtccggcatcatggtcgggcttggcgaggagcgtcacgaggtcttgcaggtgatggacgatctgcggtcggcggatgtcgactttcttaccatcgggcaatacctgcagccgacccgcaagcatcacgccgtgatacgttacgtcacgccggaggagttttcgagctatgagactgtcgcttacaccaagggttttctgatggtatcggcaagcccgctgacgcgctcgtcgcatcacgccggcgaggactttgcaaagttgcaggccgcccgcgccacgttgtcgcggtaa

SEQ ID NO: 26659 - protein, 319 aa, Nitrobacter winogradskyi Nb
MVVILDTISANPVRPRHPEKANRPDALSPPKPDWIRVRAPNTRGYANTRRIVKENGLVTVCEEAGCPNIGECWDKKHATFMIMGDTCTRACAFCNVKTGMPGAIESSEPEYVAEATRKLGLAHVVVTSVDRDDLDDGGAEHFAQTIRAIRERCPATTIEILTPDFLRKDGALEKVVAAKPDVFNHNLETVPSRYLTVRPGARYFHSIRLLQRVKEIDPAIFTKSGIMVGLGEERHEVLQVMDDLRSADVDFLTIGQYLQPTRKHHAVIRYVTPEEFSSYETVAYTKGFLMVSASPLTRSSHHAGEDFAKLQAARATLSR

SEQ ID NO: 26660 - DNA, 1233 bp, Leishmania major
  CDS (1)..(1233)
atgtgcccgacggctgtgccgagccgcgtctcgccggttgctgctgctgccgccgccgatatcgcgggttcctcagaatcgacagtcagcctcgtggcagatgtggacaagaaaaactcgcaatacaagcagatctttctggagcgctttcgcaagaagcttcagtcggacaagacgggcatgaacaacttggagagttttgtggagctgcccgagggtgtcgcgccgtcggcggcgtcgattggtcctatcaagcggggaagtgagccactcccgccgtggataaagctaaaggtgccaaagggcatgacgcaccgtccgcgattcaaccgcatccgccgcagcatgcgcgagaagaatctgtcgaccgtgtgcgaggaggccaaatgccccaatattggtgagtgctggggcggcagcgacgaggagggcacggcgacggccaccatcatggtgatgggctcgcactgcacccgcgggtgccggttttgctcggtgctgacaagccgccgcccgcctccgttggacccggaggagccagagaaggtcgcggccgcggtgcacgagatgggcgtggactacatcgtaatgacgatggttgaccgtgacgacttgccagacggcggtgcctcgcatgtgtgctgctgcatccataccattaagaagaagaatccggagctgatgctggaggctctcgtcggcgacttccacggtgatctgaagctggtggagcagttggcggttaccccgctgagtgtgtacgcgcacaacatcgagtgcgtggagcgcattacgccgcgcgtgcgtgaccggcgagcctcgtacaggcagtcgctgcaaacgctcgagcacgttacgaagtggaccaatggcaacatgctcacaaagagcagtatcatgctgggcctcggcgaggaagaagcggaagtgcggcagacgctgcgcgatctgcgcacggctggtgtgtcggcggtgacccttggccagtacctgcaaccctcacacacccgtctgaaggtgtcccgctacgcccacccgaaagagttcgagatgtgggagaaggaagcgatggacatggggttcctctactgtgcctcgggcccgatggtgcgcagctcctacagggctggcgagtactacatcaagaacattctgaagcaacgtcagagcgccgagggtggaaaggctgcggcggccgccaccgctgtcaacgcaggtactgcgattgcgtga

SEQ ID NO: 26661 - protein, 410 aa, Leishmania major
MCPTAVPSRVSPVAAAAAADIAGSSESTVSLVADVDKKNSQYKQIFLERFRKKLQSDKTGMNNLESFVELPEGVAPSAASIGPIKRGSEPLPPWIKLKVPKGMTHRPRFNRIRRSMREKNLSTVCEEAKCPNIGECWGGSDEEGTATATIMVMGSHCTRGCRFCSVLTSRRPPPLDPEEPEKVAAAVHEMGVDYIVMTMVDRDDLPDGGASHVCCCIHTIKKKNPELMLEALVGDFHGDLKLVEQLAVTPLSVYAHNIECVERITPRVRDRRASYRQSLQTLEHVTKWTNGNMLTKSSIMLGLGEEEAEVRQTLRDLRTAGVSAVTLGQYLQPSHTRLKVSRYAHPKEFEMWEKEAMDMGFLYCASGPMVRSSYRAGEYYIKNILKQRQSAEGGKAAAAATAVNAGTAIA

SEQ ID NO: 26662 - DNA, 1113 bp, Oryza sativa
  CDS (1)..(1113)
atgatgcagagctcgctcgcgcggccgttgccgcggcccccgatccggccggcctgcgggaaccctgtctgccggagccggcccggctcggtctccgtggcccggtgccgcgcggaggctgcgccgccggctccggcgccggcggcgcgtagggcggcggggccgtacaccgggagggacccggaggtgaagaagccggcgtggctgcggcagcgtgcggcgcagggggagaagtacgcgcggctgcgggagtcgatcggcgagctcaagctcaacaccgtctgcgtcgaggcccagtgccccaacatcggcgagtgctggaacggtgggggaggggcgggcggggaaggcgacggcatcgccacggcgaccatcatggtgctcggtgatacctgtacgcgcggctgccgtttctgtgccgtgaagactagcaacaagcctccaccaccggatcccctggagcctctgaacacggccttggcagttgcaagctggggagtggactatgttgtactgaccagtgttgacagagatgacttgcctgatggtggtagcagccattttgcgcagacagtgagagctttaaaggagctcaaacctgggatactggtggagtgcttgacctcagattttcgaggtgacctggaggctgtttcagctttggccaactctggtctggatgtatttgcgcacaacatcgagactgtgaggagcctgcaaagaattgttagggatcctcgagcaggatatgatcagagcttagctgttctgaagcatgcaaaaagttgcaaagagggtatgataactaagtcctctatcatgcttggtcttggagagactgacgaggaggtgaaacaagccatgattgacttaagggccattggtgttgatatcttgacactgggccagtatttgcagcccactgaaagacatttgacagtaagggagtatgtaactcctgagaagttccaattttggaaggagtatggagaatcggtgggtttccgctatgttgctagtggacccctggttcggtcttcatatcgtgcaggagagctctttgtccaaaatttggtcaggaataacaaacctaagctacctgcttcatcttag

SEQ ID NO: 26663 - protein, 370 aa, Oryza sativa
MMQSSLARPLPRPPIRPACGNPVCRSRPGSVSVARCRAEAAPPAPAPAARRAAGPYTGRDPEVKKPAWLRQRAAQGEKYARLRESIGELKLNTVCVEAQCPNIGECWNGGGGAGGEGDGIATATIMVLGDTCTRGCRFCAVKTSNKPPPPDPLEPLNTALAVASWGVDYVVLTSVDRDDLPDGGSSHFAQTVRALKELKPGILVECLTSDFRGDLEAVSALANSGLDVFAHNIETVRSLQRIVRDPRAGYDQSLAVLKHAKSCKEGMITKSSIMLGLGETDEEVKQAMIDLRAIGVDILTLGQYLQPTERHLTVREYVTPEKFQFWKEYGESVGFRYVASGPLVRSSYRAGELFVQNLVRNNKPKLPASS

SEQ ID NO: 26664 - DNA, 1119 bp, Xenopus laevis
  CDS (1)..(1119)
atgaggcaatgcgggcttgtcagagcggcacaacttctgcggacttgcgggttagctgaatggcataccccttacagagcattaagcagtctgccagatgagaagaaggaactcattaagaatggacctgaccttcaagactttctgtcgggagagctggttgataagagttcctgggctgcatacaaaggagacttaaagagacagaaaggagagagattaagacttccaccttgggtgaagactgaaattccaatgggtaaaaattataacaaactgaaaaacaccttgcgaaaccttaatcttcacactgtgtgtgaagaagctcgctgtcctaatattggggagtgctgggggggaggagaatatggcacggccacagcaaccataatgttaatgggtgacacgtgtacccgaggttgccgtttctgttcagtgaaaactgcaaggaaccctcctcccctggacccagatgagccatataatacctcaaaagcaattgcagagtggggcctggattatgtggtgctgacatcagtagaccgagatgatatttcagatgggggcgctgaacacattgcacaaacagtatcgatgttaaaagagagaaacaagaccattcttattgaatgcctcaccccagatttccgagggaacatgaaggcagtggagactgtagctaagtctggattggatgtttatgctcacaatgtggagactgtgccagcactgcagaggcatgtacgtgatccaagagctaattttgaccagtcccttaatgttctgaaacacgccaaaaatgtacggccggatcttgtatccaaaacgtccatcatgcttggcttaggggaaacagacgagcaaatctactccacaatgaaagcactgagagaagcgggcgtggactgtttgacccttggtcagtacatgcagccaacaaaacgtcatctcaaggtagaggagtacatcactccagagaaatttaagtactgggaaaaagcaggcaatgaattaggattcctttacacggctagtggtcctctagttcgctcttcttacaaagcaggtgaattctttttgaagaacttgattgaaaaaaggaaaacaaaagctatttaa

SEQ ID NO: 26665 - protein, 372 aa, Xenopus laevis
MRQCGLVRAAQLLRTCGLAEWHTPYRALSSLPDEKKELIKNGPDLQDFLSGELVDKSSWAAYKGDLKRQKGERLRLPPWVKTEIPMGKNYNKLKNTLRNLNLHTVCEEARCPNIGECWGGGEYGTATATIMLMGDTCTRGCRFCSVKTARNPPPLDPDEPYNTSKAIAEWGLDYVVLTSVDRDDISDGGAEHIAQTVSMLKERNKTILIECLTPDFRGNMKAVETVAKSGLDVYAHNVETVPALQRHVRDPRANFDQSLNVLKHAKNVRPDLVSKTSIMLGLGETDEQIYSTMKALREAGVDCLTLGQYMQPTKRHLKVEEYITPEKFKYWEKAGNELGFLYTASGPLVRSSYKAGEFFLKNLIEKRKTKAI

SEQ ID NO: 26666 - DNA, 1632 bp, Toxoplasma gondii
  CDS (1)..(1632)
atggcgtatttctttgacttcccaacggacacttgggtcgaagacgcgtcgccgggtgggccgccgaaacgagctttcgggcacggcttagccgcaggtagttcccatttcgcttcccctgtttctcggaggcgactgccgacgatcacggcgcttctcctgttttcgctcttgtctgcgtctcaatcaggagctctgagtgtttctcagtgttcccggagagtgtcgctcggcccgcttctttcgcgcgtctcgtcagtttcgtgtaccccttctgccgctgcttcggctctcgcttcttctctctatcccaccgacagcctgtcgtccgtggaaggttctgtcgcgcctcgcccgcctccttctagtctggctttcgtgttgcgtcgggtgcctcccgcggcctattcttcttctctgtctccctctgtcctgcgcttcaagcactcacttccccgtccccttcaggggtcgcttgtgtgcgctcctggaattttgggcggggcagccggctctgcgcgtttcgccgggtgttgcggatctcagggccggtcttgcgggtctggaaaaaaccccgagttgccgctaaagggaagcaaagacgaggtcattccccgggtcgggacaagcaccgctggaccccgtcccgattggttccacgtgccagctccacaggccgcctctcgcggagctgaggagtcgcgctaccagcaactgcagaaacaaatccgtggccttgacctccatacggtctgtgaagaggccaagtgtccgaacatcggagagtgctggaatggaggcactgcaacgcttattctgctgggtgacacgtgcacgcgaggctgtcgtttttgtgcaattaaaacttcgagcaagccgcctcctcccgaccccctggaaccggagaaagtggcggacgcagtggccaagtgggacatcgactacgtggtcatgacaagcgttgacagagatgacatgcccgacggaggtgcaggtcacttcgctcgaacagtccagttggtcaagaaggctaaaccttcgatgctcatcgaatgccttgtctccgactttcaaggaatggaagagtccgtccgaacactcgcccaatcggggttggatgtgtacgcgcataacatcgagacagttcggaggttgacgccctatgttcgcgacaagagagcgaagtacgaccagtccctgcgtgtccttcacctagcgaaacagttcaacccgtcgctgttcacaaagtcatccataatgcttggcctgggtgaaacctcagaagaggtggttcggactctccgggatcttcgagatcacgacgtcgacgttgttaccctcggacagtatctccgaccaacaaaacaacagcttggggtcgtggagtatgtcactccagaaaccttcaaaaaatatcaagacatagcggaggagatgggattcaagtatgtggctagtggcccgctggtgcgctcatcttacaaggcaggggagtactacatgaagcaccttattgatgatgcaaggaagcacggccgacgtgaaacagtgaaacaggttaagctggaagctgatgtcggcacactgaaagggacaacaacaacatttcaagtaaacgagaaagaggcgtga

SEQ ID NO: 26667 - protein, 543 aa, Toxoplasma gondii
MAYFFDFPTDTWVEDASPGGPPKRAFGHGLAAGSSHFASPVSRRRLPTITALLLFSLLSASQSGALSVSQCSRRVSLGPLLSRVSSVSCTPSAAASALASSLYPTDSLSSVEGSVAPRPPPSSLAFVLRRVPPAAYSSSLSPSVLRFKHSLPRPLQGSLVCAPGILGGAAGSARFAGCCGSQGRSCGSGKNPELPLKGSKDEVIPRVGTSTAGPRPDWFHVPAPQAASRGAEESRYQQLQKQIRGLDLHTVCEEAKCPNIGECWNGGTATLILLGDTCTRGCRFCAIKTSSKPPPPDPLEPEKVADAVAKWDIDYVVMTSVDRDDMPDGGAGHFARTVQLVKKAKPSMLIECLVSDFQGMEESVRTLAQSGLDVYAHNIETVRRLTPYVRDKRAKYDQSLRVLHLAKQFNPSLFTKSSIMLGLGETSEEVVRTLRDLRDHDVDVVTLGQYLRPTKQQLGVVEYVTPETFKKYQDIAEEMGFKYVASGPLVRSSYKAGEYYMKHLIDDARKHGRRETVKQVKLEADVGTLKGTTTTFQVNEKEA

SEQ ID NO: 26668 - DNA, 1386 bp, Mus musculus
  CDS (105)..(1226)
ggacgtatcgcgtcatgactcaagcgacgagttgttggacgcgtccggtgccgggggtgctgttccctcgatcccttgacactcctgagacctaaaagagggggatggctctacgctgctgggatacagctcgcagcctggggtcccggatatttggaagatatgcgttcacggttagagcattaagttctttgccagataagaaaaaggaatttttgcataatggaccagaccttcaagattttgtatctggtgatcttgcagacaagagtacatgggatgaatataaaggaaacttaaagcgccagaaaggagaaaggctaagactacctccatggctaaagacaaagatacccatgggtaaaaactacaataaactgaaaaatacattgcggaatttaagtctccacacagtgtgtgaggaagcccggtgccccaacattggagagtgttggggaggtggggaatatgccacagccacagccacgatcatgttgatgggggacacatgcacaagaggttgcagattttgttccgttaagaccgcaagaaatccccctccattggatgccaatgagcccgacaatacggccaaagcaattgcagagtggggtctggattatgttgtcctgacgtcggtggatcgagatgatgtggccgacgggggagctgagcacatcgccaagaccgtgtcatgcttgaaggaaaggaatccaaaaatcctcgtggaatgcctcaccccagacttccgaggtgatctgagagcagtggagaaggtggctctgtctggattagatgtgtatgcacacaatgtggagactgtccccgagttacagaggaaagttcgtgttccccgggccaattttgaccagtctcttcgtgtactgaggcatgccaaggaggtccagcctgatgttgtttccaaaacatcgataatgctgggccttggtgagacagacgagcaagtctatgccacactgaaagctctccgtgcggccgacgtggactgtttaactctagggcagtacatgcagccaacgaagcgccaccttaaggttgaagaatatgttactcctgagaagttcaaatactgggaaaaagtagggaatgaacttggatttctctatacggcaagtggtcctttggtgcgatcttcatataaagcaggtgaatttttcctgaaaaatctagtggctagaagaaaaacaaaagcttctaaagtgtagccaagcccttcaagatcacaggagtgttgcgattttgcttccagttggtgtgaggatggtgtcaccctgtcaggattcctgtgagtgcaaggcagcaccgttctgaagggtctgatggctgatcgaagcggaatggtgtatacctgtaattccacccagg

SEQ ID NO: 26669 - protein, 373 aa, Mus musculus
MALRCWDTARSLGSRIFGRYAFTVRALSSLPDKKKEFLHNGPDLQDFVSGDLADKSTWDEYKGNLKRQKGERLRLPPWLKTKIPMGKNYNKLKNTLRNLSLHTVCEEARCPNIGECWGGGEYATATATIMLMGDTCTRGCRFCSVKTARNPPPLDANEPDNTAKAIAEWGLDYVVLTSVDRDDVADGGAEHIAKTVSCLKERNPKILVECLTPDFRGDLRAVEKVALSGLDVYAHNVETVPELQRKVRVPRANFDQSLRVLRHAKEVQPDVVSKTSIMLGLGETDEQVYATLKALRAADVDCLTLGQYMQPTKRHLKVEEYVTPEKFKYWEKVGNELGFLYTASGPLVRSSYKAGEFFLKNLVARRKTKASKV

SEQ ID NO: 26670 - DNA, 1182 bp, Arabidopsis thaliana
  CDS (1)..(1182)
atgcatcattgctcaattacgaaacccactttctcaatttcgatctcgacccagaagcttcatcatcattccagtaaattcttgaatttgggtttcagaatccgatgcgaatccggggatgtttcgtcgccattgcggaccaaggcggtgtctttgtcgtcggagatggaggattcgtcgtccttgaagaagagtttgatggagttagaagggaagaagagtgagccttacccaggaggaatgccgaagatgggtccattcacagggagagatccgaatgtgaagaaacctgcttggttgagacagaaggcaccacaaggcgaaaggtttcaggaggtgaaagagtccctttctcgtctcaatctcaatactgtttgtgaagaagctcagtgtcctaatatcggcgagtgttggaatggaggtggtgatggtgtagcaactgcaaccatcatggttcttggtgatacttgtactcgtggctgtagattctgtgctgttaaaacaagtagaaatcctcctcctcctgacccaatggaaccagagaacactgccaaggccatagccagttggggtgtagactacatagttattaccagcgtagaccgtgacgatatacctgatggtggaagtggacattttgcgcagactgtcaaagctatgaagagacataagccggatataatgatagaatgcttaacttctgattttcgtggggatttggaggctgtcgacactcttgtgcactcgggattggatgtttttgctcacaatgtcgagactgtgaaaaggctccagcgacttgtgagggatcctagggctggatatgagcagagcatgtcagttttgaaacatgcaaagatcagcaaacctggaatgatcacaaagacatccataatgcttggtcttggagaaacagacgaagagttgaaggaagcaatggctgatctaagagctatagatgttgatattctaacacttggccagtatctacagccaactccattgcatctgactgtgaaagagtatgtcacacctgagaagtttgatttctggaaaacatacggagaatcaataggatttcgttatgttgcaagtggtccactggtaagatcttcatatagagcaggagagctttttgttaagacaatggtgaaagaaagctactctaaatccttgtcttaa

SEQ ID NO: 26671 - protein, 393 aa, Arabidopsis thaliana
MHHCSITKPTFSISISTQKLHHHSSKFLNLGFRIRCESGDVSSPLRTKAVSLSSEMEDSSSLKKSLMELEGKKSEPYPGGMPKMGPFTGRDPNVKKPAWLRQKAPQGERFQEVKESLSRLNLNTVCEEAQCPNIGECWNGGGDGVATATIMVLGDTCTRGCRFCAVKTSRNPPPPDPMEPENTAKAIASWGVDYIVITSVDRDDIPDGGSGHFAQTVKAMKRHKPDIMIECLTSDFRGDLEAVDTLVHSGLDVFAHNVETVKRLQRLVRDPRAGYEQSMSVLKHAKISKPGMITKTSIMLGLGETDEELKEAMADLRAIDVDILTLGQYLQPTPLHLTVKEYVTPEKFDFWKTYGESIGFRYVASGPLVRSSYRAGELFVKTMVKESYSKSLS

SEQ ID NO: 26672 - DNA, 1128 bp, Bruguiera gymnorrhiza
  CDS (1)..(1128)
atgcagtcccgtgtgccctccttgttggctcgcaccctccggtcccgatgcttctccgccaccgtggagcctaccaagagcgatgccaccgctgcatccctggcggctctccgggcccgattggctgacgaatcgccgtctctaggcgacttcatgaacctccagtccggttactccgtggaagtcggcaacaagaagaagcccatgcctaagcctaagtggatgagggaggctattcccggaggggacaagtacgtgcacatcaagaagaagctcagggaattgaagctccacaccgtctgtgaggaggccaagtgccctaatttgggcgagtgctggtctggcggcgagaccggtaccgcgaccgccaccattatgattcttggcgatacctgtacccgtggttgcaggttctgtaacgtgaagacatcgcgcactcctcctccgccggacccgaacgagccagccaacgttgctgaagcaattgcttcgtggggtttggattatgtggtgcttactagcgtcgatcgtgacgatttggccgatcaaggaagcaaccacttccgggagactgtgcagagattgaaggcactgaagccaaacatgttgattgaagctctgactcctgattttcaaggagacaaatcctgcgtggagaaggttgctacggcaggattagatgtgtttgcccacaacattgagacagtagaagaactccagagcgtggtgcgcgataatcgtgctaacttcaagcaatctttggaggttttgatggcagctagggaattttctcctcctgggacactcaccaagacttccatcatgttgggctgtggagagacacccgaccaggttgtgaaatcaatggagaaggtgagggcagctggtgttgatgtcattacctttggtcagtacatgagaccctcaaaacgccacatgcccgtgtctgaatacatcacccctgaggccttcgagaagtataaagttcttggcgatgaaatgggattccgttatgtagcatctggtcccatggtaaggtcatcatacaaagctggggagttctacatcaagaacatgatagaacgtgatagggctgcagccgcccaacagaaactctctgttgcttga

SEQ ID NO: 26673 - protein, 375 aa, Bruguiera gymnorrhiza
MQSRVPSLLARTLRSRCFSATVEPTKSDATAASLAALRARLADESPSLGDFMNLQSGYSVEVGNKKKPMPKPKWMREAIPGGDKYVHIKKKLRELKLHTVCEEAKCPNLGECWSGGETGTATATIMILGDTCTRGCRFCNVKTSRTPPPPDPNEPANVAEAIASWGLDYVVLTSVDRDDLADQGSNHFRETVQRLKALKPNMLIEALTPDFQGDKSCVEKVATAGLDVFAHNIETVEELQSVVRDNRANFKQSLEVLMAAREFSPPGTLTKTSIMLGCGETPDQVVKSMEKVRAAGVDVITFGQYMRPSKRHMPVSEYITPEAFEKYKVLGDEMGFRYVASGPMVRSSYKAGEFYIKNMIERDRAAAAQQKLSVA

SEQ ID NO: 26674 - DNA, 1434 bp, Arabidopsis thaliana
  CDS (1)..(1434)
atggaggattcgtcgtccttgaagaagagtttgatggagttagaagggaagaagagtgagccttacccaggaggaatgccgaagatgggtccattcacagggagagatccgaatgtgaagaaacctgcttggttgagacagaaggcaccacaaggcgaaaggtttcaggaggtgaaagagtccctttctcgtctcaatctcaatactgtttgtgaagaagctcagtgtcctaatatcggcgagtgttggaatggaggtggtgatggtgtagcaactgcaaccatcatggttcttggtgatacttgtactcgtggctgtagattctgtgctgttaaaacaagtagaaatcctcctcctcctgacccaatggaaccagagaacactgccaaggccatagccagttggggtgtagactacatagttattaccagcgtagaccgtgacgatatacctgatggtggaagtggacattttgcgcagactgtcaaagctatgaaggctgtcgacactcttgtgcactcgggattggatgtttttgctcacaatgtcgagactgtgaaaaggctccagcgacttgtgagggatcctagggctggatatgagcagagcatgtcagttttgaaacatgcaaagatcagcaaacctggaatgatcacaaagacatccataatgcttggtcttggagaaacagacgaagagttgaaggaagcaatggctgatctaagagctatagatgttgatattctaacacttggccagtatctacagccaactccattgcatctgactgtgaaagagtatgtcacacctgagaagtttgatttctggaaaacatacggagaatcaataggatttcgttatgttgcaagtggtccactgatgactaacagttacgctctgtcaccggcgattatcgccgccgttcgtcctccggcatctcaagactatctagttgctgcttctcttagtggacgcaaatcgatcaactcttcatcttcgtccattttcgtacctatctcattatctacttcctacggtcgaagcaaatgcgccttctcaatctcgcggaagaatccaaaatcgacgattcgttgcgatattgctgtgaaatcggcggcttctgtagacgcggacgctgatctatcgtcatctacgtcgttggagacggaggaagacgagaaagcgaaggagaagattggagctagggttagggttacggttccgttgaaagtttaccatgtggttcgtgtaccggaggttgaattgatgggaatggaaggttttatcaaagattacgtcgttctttggaaaggaaagaaaatctcagctaatctgccgtttaaggtacagttcgtgaaagagatcgaaggtcgtggtcctgtcaaattcttcacgcatcttaaggaagacgagttcgagttaattgatccgtga

SEQ ID NO: 26675 - protein, 477 aa, Arabidopsis thaliana
MEDSSSLKKSLMELEGKKSEPYPGGMPKMGPFTGRDPNVKKPAWLRQKAPQGERFQEVKESLSRLNLNTVCEEAQCPNIGECWNGGGDGVATATIMVLGDTCTRGCRFCAVKTSRNPPPPDPMEPENTAKAIASWGVDYIVITSVDRDDIPDGGSGHFAQTVKAMKAVDTLVHSGLDVFAHNVETVKRLQRLVRDPRAGYEQSMSVLKHAKISKPGMITKTSIMLGLGETDEELKEAMADLRAIDVDILTLGQYLQPTPLHLTVKEYVTPEKFDFWKTYGESIGFRYVASGPLMTNSYALSPAIIAAVRPPASQDYLVAASLSGRKSINSSSSSIFVPISLSTSYGRSKCAFSISRKNPKSTIRCDIAVKSAASVDADADLSSSTSLETEEDEKAKEKIGARVRVTVPLKVYHVVRVPEVELMGMEGFIKDYVVLWKGKKISANLPFKVQFVKEIEGRGPVKFFTHLKEDEFELIDP

SEQ ID NO: 26676 - DNA, 1119 bp, Homo sapiens
  CDS (1)..(1119)
atgtctctacgctgcggggatgcagcccgcaccctggggccccgggtatttgggagatatttttgcagcccagtcagaccgttaagctccttgccagataaaaaaaaggaactcctacagaatggaccagaccttcaagattttgtatctggtgatcttgcagacaggagcacctgggatgaatataaaggaaacctaaaacgccagaaaggagaaaggttaagactacctccatggctaaagacagagattcccatggggaaaaattacaataaactgaaaaatactttgcggaatttaaatctccatacagtatgtgaggaagctcgatgtcccaatattggagagtgttggggaggtggagaatatgccaccgccacagccacgatcatgttgatgggtgacacatgtacaagaggttgcagattttgttctgttaagactgcaagaaatcctcctccactggatgccagtgagccctacaatactgcaaaggcaattgcagaatggggtctggattatgttgtcctgacatctgtggatcgagatgatatgcctgatgggggagctgaacacattgcaaagaccgtatcatatttaaaggaaaggaatccaaaaatccttgtggagtgtcttactcctgattttcgaggtgatctcaaagcaatagaaaaagttgctctgtcaggattagatgtgtatgcacataatgtagaaacagtcccggaattacagagtaaggttcgtgatcctcgggtcaattttgatcagtccctacgtgtactgaaacatgccaagaaggttcagcctgatgttatttctaaaacatctataatgttgggtttaggcgagaatgatgagcaagtatatgcaacaatgaaagcacttcgtgaggcagatgtagactgcttgactttaggacaatatatgcagccaacaaggcgtcaccttaaggttgaagaatatattactcctgaaaaattcaaatactgggaaaaagtaggaaatgaacttggatttcattatactgcaagtggccctttggtgcgttcttcatataaagcaggtgaatttttcctgaaaaatctagtggctaaaagaaaaacaaaagacctctaa

SEQ ID NO: 26677 - protein, 372 aa, Homo sapiens
MSLRCGDAARTLGPRVFGRYFCSPVRPLSSLPDKKKELLQNGPDLQDFVSGDLADRSTWDEYKGNLKRQKGERLRLPPWLKTEIPMGKNYNKLKNTLRNLNLHTVCEEARCPNIGECWGGGEYATATATIMLMGDTCTRGCRFCSVKTARNPPPLDASEPYNTAKAIAEWGLDYVVLTSVDRDDMPDGGAEHIAKTVSYLKERNPKILVECLTPDFRGDLKAIEKVALSGLDVYAHNVETVPELQSKVRDPRVNFDQSLRVLKHAKKVQPDVISKTSIMLGLGENDEQVYATMKALREADVDCLTLGQYMQPTRRHLKVEEYITPEKFKYWEKVGNELGFHYTASGPLVRSSYKAGEFFLKNLVAKRKTKDL

SEQ ID NO: 26678 - DNA, 1122 bp, Mus musculus
  CDS (1)..(1122)
atggctctacgctgctgggatacagctcgcagcctggggtcccggatatttggaagatatgcgttcacggttagagcattaagttctttgccagataagaaaaaggaatttttgcataatggaccagaccttcaagattttgtatctggtgatcttgcagacaagagtacatgggatgaatataaaggaaacttaaagcgccagaaaggagaaaggctaagactacctccatggctaaagacaaagatacccatgggtaaaaactacaataaactgaaaaatacattgcggaatttaagtctccacacagtgtgtgaggaagcccggtgccccaacattggagagtgttggggaggtggggaatatgccacagccacagccacgatcatgttgatgggggacacatgcacaagaggttgcagattttgttccgttaagaccgcaagaaatccccctccattggatgccaatgagcccgacaatacggccaaagcaattgcagagtggggtctggattatgttgtcctgacgtcggtggatcgagatgatgtggccgacgggggagctgagcacatcgccaagaccgtgtcatgcttgaaggaaaggaatccaaaaatcctcgtggaatgcctcaccccagacttccgaggtgatctgagagcagtggagaaggtggctctgtctggattagatgtgtatgcacacaatgtggagactgtccccgagttacagaggaaagttcgtgatccccgggccaattttgaccagtctcttcgtgtactgagacatgccaaggaggtccagcctgatgttgtttccaaaacatcgataatgctgggccttggtgagacagacgagcaagtctatgccacactgaaagctctccgtgcggccgacgtggactgtttaactctagggcagtacatgcagccaacgaagcgccaccttaaggttgaagaatatgttactcctgagaagttcaaatactgggaaaaagtagggaatgaacttggatttctctatacggcaagtggtcctttggtgcgatcttcatataaagcaggtgaatttttcctgaaaaatctagtggctagaagaaaaacaaaagcttctaaagtgtag

SEQ ID NO: 26679 - protein, 373 aa, Mus musculus
MALRCWDTARSLGSRIFGRYAFTVRALSSLPDKKKEFLHNGPDLQDFVSGDLADKSTWDEYKGNLKRQKGERLRLPPWLKTKIPMGKNYNKLKNTLRNLSLHTVCEEARCPNIGECWGGGEYATATATIMLMGDTCTRGCRFCSVKTARNPPPLDANEPDNTAKAIAEWGLDYVVLTSVDRDDVADGGAEHIAKTVSCLKERNPKILVECLTPDFRGDLRAVEKVALSGLDVYAHNVETVPELQRKVRDPRANFDQSLRVLRHAKEVQPDVVSKTSIMLGLGETDEQVYATLKALRAADVDCLTLGQYMQPTKRHLKVEEYVTPEKFKYWEKVGNELGFLYTASGPLVRSSYKAGEFFLKNLVARRKTKASKV

SEQ ID NO: 26680 - DNA, 1245 bp, Saccharomyces cerevisiae
  CDS (1)..(1245)
atgtatagacgatctgttggagtactatttgttgggagaaatacaagatggatttcgtccactattaggtgtggaacgagcgcaactcggccaataagatccaatgcattgaatactgattcagataacgctagcgttagggtaccagttggaaattcaactgaggttgaaaatgcaaccagtcagttaacagggacttcgggaaaaagacgcaaggggaacagaaaaagaattacagagttcaaagatgctcttaatttgggtccatcttttgcagattttgtttcaggtaaagcttcgaaaatgatcttggaccctctggagaaggcaaggcaaaatacagaggaagctaaaaaactacctcgttggcttaaggttcctattcctaagggtaccaattaccataaattgaaaggcgacgtaaaagaattaggcctgagtactgtttgtgaggaggcaagatgtcccaatattggtgaatgttggggaggcaaagataaatctaaggcaacggcaacaattatgctgcttggtgatacttgcactcgtggatgtaggttttgttctgtgaagaccaatagaacgcctagtaagccggacccaatggagcccgaaaatactgccgaagctatcaaaagatgggggttgggttatgttgttttaactaccgttgatagggacgatttagtcgatggtggtgctaatcacctggccgagacggttcgcaaaatcaaacagaaggcaccaaatactcttgtagagactctttctggtgatttcagaggtgatttgaagatggtggacattatggcacaatgtgggcttgatgtttacgcacataatttggaaacagttgaatcactaacaccacatgtcagagacagaagagctacttatagacagtctttgagtgttttagaaagggcaaaagctacggttccgtcactgattactaaaacatcaataatgctgggtctaggagaaactgatgagcaaattactcaaactttgaaggatttgcgcaatattcaatgtgatgttgttacatttggtcaatatatgaggccaaccaagagacatatgaaagtcgtagaatatgtgaaacccgaaaagtttgactactggaaagagagagctttagagatgggattcttgtattgtgcatctggacccctagtaagatcgtcatataaggctggtgaagcatttattgagaacgttttgaagaaaagaaacatgaaataa

SEQ ID NO: 26681 - protein, 414 aa, Saccharomyces cerevisiae
MYRRSVGVLFVGRNTRWISSTIRCGTSATRPIRSNALNTDSDNASVRVPVGNSTEVENATSQLTGTSGKRRKGNRKRITEFKDALNLGPSFADFVSGKASKMILDPLEKARQNTEEAKKLPRWLKVPIPKGTNYHKLKGDVKELGLSTVCEEARCPNIGECWGGKDKSKATATIMLLGDTCTRGCRFCSVKTNRTPSKPDPMEPENTAEAIKRWGLGYVVLTTVDRDDLVDGGANHLAETVRKIKQKAPNTLVETLSGDFRGDLKMVDIMAQCGLDVYAHNLETVESLTPHVRDRRATYRQSLSVLERAKATVPSLITKTSIMLGLGETDEQITQTLKDLRNIQCDVVTFGQYMRPTKRHMKVVEYVKPEKFDYWKERALEMGFLYCASGPLVRSSYKAGEAFIENVLKKRNMK

SEQ ID NO: 26682 - DNA, 876 bp, Anabaena sp
  CDS (1)..(876): transl_table=11
gtgactgtaaaaccagactggttgcgggtaaaagcgcctcaatgggagcgcgttggtaacgttaaagaaattttgcgggatttagcgctaaatacagtttgtgaggaagcgtcatgtccaaacattggtgaatgcttccaagctggtacagccacatttttgattatggggccagcctgcacccgtgcttgtccttattgtgatattgattttgagaaaaaacccaaagcgctcgaccccacagaacccacacgattagccgaagctgtgcggcggatgagactgaatcatgtggtcatcacttctgtgaaccgagatgatttaccagatggtggtgcatcacagtttgtcaagtgtattgcagaggtgcgcgcggtttcgcctcaaaccacaattgaggtgctaatccctgatttgtgcggtaattgggaggcgttaaggatcattctccaagcatcaccagaggtattaaaccataacacagaaacgattcctcgcctttatcgacgagtccgaccccaaggtaactacgatcgcaccctagaattattgcagcgatcgcgtcaaattgctccctggctttacaccaaatccggtatcatggtcggcttaggcgaaactaatgccgaagttcgccaagtgatgcaagacctacgtgctgtggattgcgatatcctaacaatcgggcagtatctccaacccagtcaaaagcacttgcaagtcaacgatttcgttactccagagcaatttgctgcttggcaagtttatggtgaagaactcggatttttacaagttgtctcctcacctttgacgagaagttcttaccacgccgaacaagtacgacaattaatggagcgttacccacggaacaagtag

SEQ ID NO: 26683 - protein, 291 aa, Anabaena sp
MTVKPDWLRVKAPQWERVGNVKEILRDLALNTVCEEASCPNIGECFQAGTATFLIMGPACTRACPYCDIDFEKKPKALDPTEPTRLAEAVRRMRLNHVVITSVNRDDLPDGGASQFVKCIAEVRAVSPQTTIEVLIPDLCGNWEALRIILQASPEVLNHNTETIPRLYRRVRPQGNYDRTLELLQRSRQIAPWLYTKSGIMVGLGETNAEVRQVMQDLRAVDCDILTIGQYLQPSQKHLQVNDFVTPEQFAAWQVYGEELGFLQVVSSPLTRSSYHAEQVRQLMERYPRNK

SEQ ID NO: 26684 - DNA, 957 bp, Bradyrhizobium japonicum
  CDS (1)..(957): transl_table=11
atggtcgttattgtcgataccatctcgaacccgctgcgcccgcgccaccccgaaaaggtgaatcgccccgattccgcttcaccgccgaagccggactggatccgcgtgcgcgcgcccaacacccgcggctatgccgacacccgcaacatcgtgagggcgaacggcctgcacacggtgtgcgaggaggcgggctgcccgaatatcggcgagtgctgggacaagaagcacgcgaccttcatgatcatgggtgacacgtgcacccgtgcctgcgccttctgcaacgtcaagaccggcctgcccaacgcgctggatgcggacgagccgcagaacgtcgccgaggccgtggccaagctgggcctcgcccacgtcgtcatcacctcggtcgaccgcgacgacctcgccgatggcggcgccgagcatttcgcccagaccatccgcgccatccgcgccgcatgcccctcgaccacgatcgagatcctgacgcctgacttcctgcgcaaggaaggcgcgctggaggtcgtcgtcgcggcgaggcccgacgtcttcaaccacaatctcgagaccgtgccgtcgcgctatctcacggtacggccaggcgcgcgctacttccattcgatccggctgttgcagcgggtcaaggagctcgatgcgtccatcttcaccaagtccggcatcatggtgggcctgggtgaagagcgccacgaggtgcagcaggtgatggacgatctgcgctcggccgatgtcgacttcctgaccatcgggcaatatctccagccgacccgtaagcatcacgcggtgatgcgctacgtgccgccggacgagttttcgtcctatgaaaaggtcgcctacaccaagggcttcctgatggtgtcggcgagcccgctcacccgctcgtcgcatcatgccggcgaggatttcgcgagactgaaggctgcgcgggcagctcacgcccgctga

SEQ ID NO: 26685 - protein, 318 aa, Bradyrhizobium japonicum
MVVIVDTISNPLRPRHPEKVNRPDSASPPKPDWIRVRAPNTRGYADTRNIVRANGLHTVCEEAGCPNIGECWDKKHATFMIMGDTCTRACAFCNVKTGLPNALDADEPQNVAEAVAKLGLAHVVITSVDRDDLADGGAEHFAQTIRAIRAACPSTTIEILTPDFLRKEGALEVVVAARPDVFNHNLETVPSRYLTVRPGARYFHSIRLLQRVKELDASIFTKSGIMVGLGEERHEVQQVMDDLRSADVDFLTIGQYLQPTRKHHAVMRYVPPDEFSSYEKVAYTKGFLMVSASPLTRSSHHAGEDFARLKAARAAHAR

SEQ ID NO: 26686 - DNA, 870 bp, Gloeobacter violaceus
  CDS (1)..(870): transl_table=11
gtgctcgccatgtcccaccagactgccagctcccgcctgcccgagtgggcgcgccgcaccatcggcactgcctcgcaagtctcgacggtcgagaagatcgtcaagcagcgctcgctgcacaccatctgcgaggaggggcgctgcccgaaccgggcggagtgctacgcccagaagacagcgacgtttttgttgatgggaccggtgtgcacccgcgcctgcggcttctgccaggttgccggcggcaaggctcttcccctcgacccgcaggagcctgaaaaagtcgccgaggcggtggcgctgttgggactcaagtacgtggtgctcacttcggtggcccgcgacgacctgccggatcagggggcgggctggtttgtgcgcacgatggaatctattcgcgcgcgcaactgcgcggtcgagatcgaagtactcaccccggattttcgcggcgaagaggcgtgcatcgccaccgtggtcgccgcgcgacccgtttgctttaatcacaacatcgagacggtgcggcgcctgcaaagctacgcccgccgcgccgccacctacgcgcgcagtctggcggtccttgccgccgtcaagcgtctggatgcggagatcttcaccaagtcggggctgatgctgggccacggcgagacgcgcgaagaagtgctcgagacgttgctcgacctgcgcaaggtgggttgcgaccgggtcaccctcggccagtacctccagccttccaaagaccacctgccggtgcacaagtactggaccccggccgaatttgccgaactgggcgccgtcgcccgcgatttgggctttgcccacgtgcgctccggaccgctggtgcgcagttcctaccacgccggcgagcctgaatag

SEQ ID NO: 26687 - protein, 289 aa, Gloeobacter violaceus
MLAMSHQTASSRLPEWARRTIGTASQVSTVEKIVKQRSLHTICEEGRCPNRAECYAQKTATFLLMGPVCTRACGFCQVAGGKALPLDPQEPEKVAEAVALLGLKYVVLTSVARDDLPDQGAGWFVRTMESIRARNCAVEIEVLTPDFRGEEACIATVVAARPVCFNHNIETVRRLQSYARRAATYARSLAVLAAVKRLDAEIFTKSGLMLGHGETREEVLETLLDLRKVGCDRVTLGQYLQPSKDHLPVHKYWTPAEFAELGAVARDLGFAHVRSGPLVRSSYHAGEPE

SEQ ID NO: 26688 - DNA, 885 bp, Prochlorococcus marinus
  CDS (1)..(885): transl_table=11
atgactggaaaagccttactgaaaccccactggttgcgcgtcaaggctccacaacagcaacgcatcggcgaggtagccgagctgctgaagggcctcaatctcaagacggtgtgtcaagaagccagctgcccgaatatcggggagtgcttcgcaggaggaactgccaccttcttgatcatggggccgggctgcacccgcgcttgcccttactgcgacatcgactttgacaaaagcccacgctccctagaccccactgagccagagcgcctaagcgaagcggtggctcagatgaaccttcgtcatgttgtcatcacttcagttaaccgtgatgacctcagcgacgggggagccagtcaattcgtcgcatgcatcgaggccattcgccaacgttctcccctaaccacaattgagctgctaattcctgatttcaacggcaattgggatgccctcgccaaggtaatgggagcagctccggaggtgctcaaccacaacattgagaccgtcccccggctctacaaacgggctcgtccacaagctgactacatgcgatctcttgagctgttgtatcaagtgcggcaaggctggccgaaggtctatagcaagtccggcctgatggtggggctaggtgaaacagatgctgaggtaattgaggtcctagaggatctacgccgtcaccgagtcgacatagtgaccatcggccaatacctatcgccaagcccaaaacatcttccagtcgatcgctttgtgacaccagaacagttcgaatatttccgctctatgggggaaactgagctggggttcctgcaagtggttagtacccctctcacacgcagcagctaccacgccggcgaggtccagcggctgatggccgcccacccacgctga

SEQ ID NO: 26689 - protein, 294 aa, Prochlorococcus marinus
MTGKALLKPHWLRVKAPQQQRIGEVAELLKGLNLKTVCQEASCPNIGECFAGGTATFLIMGPGCTRACPYCDIDFDKSPRSLDPTEPERLSEAVAQMNLRHVVITSVNRDDLSDGGASQFVACIEAIRQRSPLTTIELLIPDFNGNWDALAKVMGAAPEVLNHNIETVPRLYKRARPQADYMRSLELLYQVRQGWPKVYSKSGLMVGLGETDAEVIEVLEDLRRHRVDIVTIGQYLSPSPKHLPVDRFVTPEQFEYFRSMGETELGFLQVVSTPLTRSSYHAGEVQRLMAAHPR

SEQ ID NO: 26690 - DNA, 894 bp, Prochlorococcus marinus subsp
  CDS (1)..(894): transl_table=11
ttgactaatatttccaaaaatgcagttacgaagcctgactggttaagagtaaaagcacctcaagttgagagaatagggaatactgcaaatttattgagtgatttaaaattaaatactgtatgccaagaagcaagctgtcctaatattggcgaatgttttgctagcgggactgcaacttttttaattatgggaccaggttgtactagagcatgtccatattgtgatattgattttgatagatccaagagagatttagacccaacagaaccagatcgtttagcagaggctgtttttagattaaaacttaaacatgttgtgattacctcagttaatagagatgatctagatgatggtggagcttctcagttttataaatgtgtttctgaagttagaaaaaaatctcctgaaacaactattgaattattaattccagatttatgtggtaactggtcagcacttgaaaagattttagattctagaccaaatgttttaaatcataatattgaaactgtctcagctttgtataggaaagtaaggccacaaggaaactatcaaagaactttagagttactaaaaagaacaagagaatatttcccaagtgtttatactaaatctggattcatgttgggattaggagaaaaggatgatgaagttcttactcttctaatggatttaagaaaaaatgatgtagatatagttactattggtcaatatttatctccaggcccaaaacatcttcaggtccaaagatttgttaccccttcaaaatttaattattttaaattatttggagaaaatgaattagggtttatgcaagttgtcagttctcctttaactcgtagtagttatcatgctgaagagattcagaaactcatgaaaaagtttccaagataa

SEQ ID NO: 26691 - protein, 297 aa, Prochlorococcus marinus subsp
MTNISKNAVTKPDWLRVKAPQVERIGNTANLLSDLKLNTVCQEASCPNIGECFASGTATFLIMGPGCTRACPYCDIDFDRSKRDLDPTEPDRLAEAVFRLKLKHVVITSVNRDDLDDGGASQFYKCVSEVRKKSPETTIELLIPDLCGNWSALEKILDSRPNVLNHNIETVSALYRKVRPQGNYQRTLELLKRTREYFPSVYTKSGFMLGLGEKDDEVLTLLMDLRKNDVDIVTIGQYLSPGPKHLQVQRFVTPSKFNYFKLFGENELGFMQVVSSPLTRSSYHAEEIQKLMKKFPR

SEQ ID NO: 26692 - DNA, 870 bp, Synechocystis sp
  CDS (1)..(870): transl_table=11
gtgaccgtcaaaccggattggctccgagtcaaagcgccccaatggcagagggtgggcagtgttaaggatattctgcgagatttacaattaaataccgtctgtgaagaagcttcctgtcccaatattggcgagtgttttcaggccgggacggctacttttttgattatgggtcctgcttgcaccagggcttgcccctattgtgatattgattttgagaaaaagcctcaacccttagactccacagagccggaaagattggcgatcgccgtgaaaaggctcaatcttaagcatgtggtgattaccgcagtcaaccgggatgatttacccgatggaggagcctcccagtttgttagttgcatagaggctatccgcaaaatttctccaggcaccaccattgaggttttgattccagatttgtgcggcaattggcaagccttagcggcgctgttggaagctgccccagaggttttgaatcacaatatggaaacagtgcccaggctttataaacgggtgcggccccaggcggattatgatcaatccctagaattattcaaccaggcgaaacggattctgcccaaggtttacactaagtccggcattatggtggggctgggggaaacagatgcggaagtaagacaggtgatggaagatctacgccgggtggattgcgatattttgactattggccagtatctacaacctagccaaaaacatttgggagtcaaggaatttgtcaccccggaacagttcgacgtttggcgaatttatggtgaatccattggctttttacaagtggtatcctcccctttaacccgcagttcctaccatgcggaacaggtgcaggctttgatgacccgtttcccccgttaa

SEQ ID NO: 26693 - protein, 289 aa, Synechocystis sp
MTVKPDWLRVKAPQWQRVGSVKDILRDLQLNTVCEEASCPNIGECFQAGTATFLIMGPACTRACPYCDIDFEKKPQPLDSTEPERLAIAVKRLNLKHVVITAVNRDDLPDGGASQFVSCIEAIRKISPGTTIEVLIPDLCGNWQALAALLEAAPEVLNHNMETVPRLYKRVRPQADYDQSLELFNQAKRILPKVYTKSGIMVGLGETDAEVRQVMEDLRRVDCDILTIGQYLQPSQKHLGVKEFVTPEQFDVWRIYGESIGFLQVVSSPLTRSSYHAEQVQALMTRFPR

SEQ ID NO: 26694 - DNA, 903 bp, Anabaena sp
  CDS (1)..(903): transl_table=11
atgactgcctcacaatctgctcagtttaagtcggaaattacggcaatgcccagttggttgcgccgtcccattggcaaagctagcgaactgtcaacagtacagcgcattattaagcagcgtcaaattcatacaatttgtgaagaaggtcgctgcccgaatcggggtgagtgctatgcccaaaaaacggctacattcttacttatggggcctacctgcacccgtgtctgtgctttttgtcaagtcgataaaggtcatgcaccgatgccacttgacccagaggaagggcaaaaggtggcagaagcggtacaacttttgggactgcgttatgtagtacttacgtctgtagctcgtgatgatttacaagaccagggagcaagccactttgtccaaactatggaggcaatccgtcaattaaatccaggtactcaaattgaagttttgacaccggatttttggggtggtgcaggtgcgggggaatccggacaacgccagcgcataaaaatgattgtagaggcacaaccggcttgttttaaccataacattgagacagtgcgccgcttaaccgggccagtacgccggggtgcgaaatacgatcgctctttgcgagttctttctctggtcaaagaactcaacccccgtattcccaccaaatcaggcttaatggtgggatatggcgagacggttgctgaactagttgaagcaatgacagacttaaggaacataggatgcgatcgcctaactattggtcagtatatgcgcccatccctagaacatctaccagtccaaaaatattggacaccagaagaatttgagcatctaggcaaactagccagagaaatgggctttagccatgtccgttcggctccactagttcgcagttcctatcatgctggagaggagtga

SEQ ID NO: 26695 - protein, 300 aa, Anabaena sp
MTASQSAQFKSEITAMPSWLRRPIGKASELSTVQRIIKQRQIHTICEEGRCPNRGECYAQKTATFLLMGPTCTRVCAFCQVDKGHAPMPLDPEEGQKVAEAVQLLGLRYVVLTSVARDDLQDQGASHFVQTMEAIRQLNPGTQIEVLTPDFWGGAGAGESGQRQRIKMIVEAQPACFNHNIETVRRLTGPVRRGAKYDRSLRVLSLVKELNPRIPTKSGLMVGYGETVAELVEAMTDLRNIGCDRLTIGQYMRPSLEHLPVQKYWTPEEFEHLGKLAREMGFSHVRSAPLVRSSYHAGEE

SEQ ID NO: 26696 - DNA, 969 bp, Bradyrhizobium japonicum
  CDS (1)..(969): transl_table=11
atgaaagtgatacttgatctcctcaacaacgatccgcgcacgacgcagcggaccgaaaggccgcgccatcccgaaaaggccaaccgcccggacacaccgatggaaagcaggcccgcatggatccgcgtgaaagcccccggctccgcccaatggactgagacgcaacgtatcgtgcgcgaaaacaagctcgtgaccgtctgcgaggaagccagctgccccaacatcggcgagtgctgggcgaagaagcacgcgaccttcatgatcatgggtgacacctgcacgcgcgcctgcgcgttctgcaacgtgcgcaccggcctgcccggcccgctcgatgccgacgagcccggcaaggtcgccgacgccgtggccaagctcgggctcgagcacgtggtcgtgacatcggtcgatcgcgacgacctcgccgacggcggcgccgcccatttcgcagccacaattgcggcgatccgcgcaatgagcccggcaacgtcaatcgaaatcctcacgcctgatttcctgcgcaagcacggcgcgctcgaaacggtcgttgcggcaaggccagacgtgctcaatcacaatctggaaacggtgccgtcaaaatatctcgcggtacgcccaggtgcccgctatttccattcggtgcgacttctgcaacgcgcgaaggagctcgacccgcgcatcttcaccaaatcgggaatcatggtcggcctcggcgaggatcgtagcgaggtgctgcagttgatggacgatctgcgttccgccgacgtcgacttcctgaccatcggccagtatctccagccgacgcgcaagcaccatgccgtgatgcgcttcgtgccccctgatgaattcgaggcctatgagaagaccgcctatgccaagggatttctcatggtctcggccacgccactgacgcgatcctcacaccacgccggtgacgacttccgcaagctgcgcgagcgccgacgcgcgtag

SEQ ID NO: 26697 - protein, 322 aa, Bradyrhizobium japonicum
MKVILDLLNNDPRTTQRTERPRHPEKANRPDTPMESRPAWIRVKAPGSAQWTETQRIVRENKLVTVCEEASCPNIGECWAKKHATFMIMGDTCTRACAFCNVRTGLPGPLDADEPGKVADAVAKLGLEHVVVTSVDRDDLADGGAAHFAATIAAIRAMSPATSIEILTPDFLRKHGALETVVAARPDVLNHNLETVPSKYLAVRPGARYFHSVRLLQRAKELDPRIFTKSGIMVGLGEDRSEVLQLMDDLRSADVDFLTIGQYLQPTRKHHAVMRFVPPDEFEAYEKTAYAKGFLMVSATPLTRSSHHAGDDFRKLRERRRA

SEQ ID NO: 26698 - DNA, 897 bp, Gloeobacter violaceus
  CDS (1)..(897): transl_table=11
atggtcaccaagccggactggctcagggtcaaagcgccgcagcgcgagcgggtgggagcagttaaagacatcctgcgcgacctggcgctcaacaccgtctgtgaggaagcttcttgcccaaatatcggcgaatgtttcaaagccgggacggcaacgtttctgatcatgggaccggcctgcacgcgggcttgcccttactgcgacatcgattttgagaaatatcccaaggccctcgatccgaccgaacccgagcggctcgcacaggccgtgcggcggatgggcctgcgccatgtggtgattacctcggtcaaccgcgacgatctggccgacggcggcgctctgcagtttgcccgctgcatcgaagcggtgcgccgggtcatgccccaaacgaccatcgaagtgttgatccccgatttttgcggctccgaagcggccctcgatatcgtgattgccgcccatccacaagtaatcaatcacaataccgagaccgtccctcggctctaccggcgggtcagaccccagggcgactacggacgcactttgcaattgctcgagcgcgttcgcgccaaagcatcccacatctacaccaagtcgggcctgatggcgggccttggcgagagcgaagcggaagtgctcgcggtcatggcagatctgcgggccgtctactgcgacatcctgaccatcggccagtacctgcagcccacccccaaacacctcaaagtcgaagcctttgtcgaaccggcgctttttgagcgctggcggcgggcgggcgaagggatgggcttcttgcagatggtctcctcgcccctgacgcgcagttcctaccacgccgagcaggtgcagcgactgatgcgctcccacccccggacccccaaaaatcagcactcgccggagtaa

SEQ ID NO: 26699 - protein, 298 aa, Gloeobacter violaceus
MVTKPDWLRVKAPQRERVGAVKDILRDLALNTVCEEASCPNIGECFKAGTATFLIMGPACTRACPYCDIDFEKYPKALDPTEPERLAQAVRRMGLRHVVITSVNRDDLADGGALQFARCIEAVRRVMPQTTIEVLIPDFCGSEAALDIVIAAHPQVINHNTETVPRLYRRVRPQGDYGRTLQLLERVRAKASHIYTKSGLMAGLGESEAEVLAVMADLRAVYCDILTIGQYLQPTPKHLKVEAFVEPALFERWRRAGEGMGFLQMVSSPLTRSSYHAEQVQRLMRSHPRTPKNQHSPE

SEQ ID NO: 26700 - DNA, 927 bp, Prochlorococcus marinus
  CDS (1)..(927): transl_table=11
atgacaaccacaaacaaaaaaactcgttacagtgcaattaagccaagcgaaaggctacctgaatggataaaaccctctttaggtacggcctcacaattagaaaaagtacagaacctagttaaagaatatcgattaaatacaatatgcgaagaaggacgctgcccaaacagaggtgagtgctatgcatcaggaacagctactttcctattaggtggttcaatctgcactcgaagctgcgctttttgccaagtagaaaaaggaatgccaccacaaaacattgatccaaatgaatcaatccgtgtagcaaaagcagttttaaaattacaactcaaatacgttgtcttaacttctgtcgcaagagacgatcttgatgatcatggagcaattcatttttcaagaacaattcatgccataagaaaaacttctcccacgacatctattgaagttctaactcctgacttttggggtggatgtattgacaaaataaaagcaacaaaaattcaaagggagcgcttaaaaatagttcttaaagcaaagccagtttgctttaaccacaaccttgaaactgtagaacgtctacaaaaagaagtgcgcagaggtgctacctaccacaggtctcttgaactattaaaagcttctagagaaattgacaacgaaatcccaacaaaatcaggattaatgttaggcctaggtgaacgaagtgatgaaataatccaaactcttaaagaccttcgctcagtcaactgtcaacaggtaacaattggtcaatacctacgtccttcgctagcgcatatacctgttcaaaaatattggcttccaaaagactttgaacactttaagagaatagccgaaggacttggtttcaaaaaagtcaatagtggtccattagtaagaagtagttatcatgctgaacttccacaaacctaa

SEQ ID NO: 26701 - protein, 308 aa, Prochlorococcus marinus
MTTTNKKTRYSAIKPSERLPEWIKPSLGTASQLEKVQNLVKEYRLNTICEEGRCPNRGECYASGTATFLLGGSICTRSCAFCQVEKGMPPQNIDPNESIRVAKAVLKLQLKYVVLTSVARDDLDDHGAIHFSRTIHAIRKTSPTTSIEVLTPDFWGGCIDKIKATKIQRERLKIVLKAKPVCFNHNLETVERLQKEVRRGATYHRSLELLKASREIDNEIPTKSGLMLGLGERSDEIIQTLKDLRSVNCQQVTIGQYLRPSLAHIPVQKYWLPKDFEHFKRIAEGLGFKKVNSGPLVRSSYHAELPQT

SEQ ID NO: 26702 - DNA, 921 bp, Prochlorococcus marinus
  CDS (1)..(921): transl_table=11
atgtcttccacccatcgcccaacccaatacagctccattttgcctgcggagcgccttccggaatggttgcggcgccccatcggcagcgtctcccaattggagcagatgcagcagctggtgaaggggaatcatcttcacaccatttgtgaggaagggcgttgtcccaatcgcggcgagtgttacgcagccggtacagcaacttttctcctaggcggatcgatctgtacgcgtagttgtgctttttgccaggtcatgaaaggccaatctcctcaggcaatcgatccactcgaagcagagcgagttgcagatgcggtgcagcagatgggtcttcgttatgtggttcttacttcagtagcaagggatgatttgcccgaccatggcgtcagtatttttactgagaccatggcggccattcgccagcgcaatcctcttattgagatagaagtgctgacgccggatttttggggcggagtcgctgatctggccaaggcattagaggcccagagagaacgactcacgcagttgctcatggctgcaccagtttgtttcaaccacaacctcgaaaccgttgaaaggcttcagagcaaggttcgacggggagctacgtatcaccattctctcagtctgctggctgcagcgcgggaacttgctcccaacatccctactaaatcaggcttgatgttgggactaggagaagagcaagaagaggtggttcagactcttgaggatctccgttctgttgactgtcaacgggtcacattgggtcagtatctgcgcccttcattggcacatattccggtgcatcgttattggcatcctgaggatttcaagaacttggctgaagttgcttgcaagcttggatttgctcaggtgcgtagcgggcctctagtgcgtagtagttatcacgctggtgaagaatga

SEQ ID NO: 26703 - protein, 306 aa, Prochlorococcus marinus
MSSTHRPTQYSSILPAERLPEWLRRPIGSVSQLEQMQQLVKGNHLHTICEEGRCPNRGECYAAGTATFLLGGSICTRSCAFCQVMKGQSPQAIDPLEAERVADAVQQMGLRYVVLTSVARDDLPDHGVSIFTETMAAIRQRNPLIEIEVLTPDFWGGVADLAKALEAQRERLTQLLMAAPVCFNHNLETVERLQSKVRRGATYHHSLSLLAAARELAPNIPTKSGLMLGLGEEQEEVVQTLEDLRSVDCQRVTLGQYLRPSLAHIPVHRYWHPEDFKNLAEVACKLGFAQVRSGPLVRSSYHAGEE

SEQ ID NO: 26704 - DNA, 900 bp, Prochlorococcus marinus subsp
  CDS (1)..(900): transl_table=11
atgaaaaataaaaatcagatgaaagtagaaaaaattttaaggcttccttcttggataaagtttcctattagcaaagcttcggaatttgagaaaatgcaaagacttattagaaagtcaaatatacatacaatttgtgaagaagggagatgtcctaatagggccgaatgttatgcctcaggtactgctacttttttacttggaggatcaatttgttctcgtgcctgcgctttctgccaggtaaacaaaggtaaacctagtgaaataaataaatatgaaagtattcaagtcgcagaagcagtaaaaattctaaacttaaaatatgttgtacttacatcagtagccagagacgaccttcccgatcatggagctaatttatttgtctcaacgattaatcagattagaaaaattgatccaaagattcaaatagaagttcttactcctgatttatggggaggtggaaaatcttttgaagataaagataaacttcaaaaagatagacttaaaaaaattctagaacaaaggccaatttgttttaatcataatcttgagacagttgaaaggcttcaaaaagaagttcgaagaggtgctaactataaaaattcaataggcttattagaaaaagcaaagtctattgctcctaatattcaaacaaaatcaggaataatgttgggtttaggagaaacgttaaaagaaatagaaactacgattctcgatctaaaaaaagtggattgtaatcaaatcacaattggacaatatctaagaccttcattaaagcatttatctgttaagaaatattgggcaccaaaggagtttgaatacctaaaaagtttttgtagtaaattagggtttaaaaaagtatcttgtggccctttagttagaagtagttatcacgctggttag

SEQ ID NO: 26705 - protein, 299 aa, Prochlorococcus marinus subsp
MKNKNQMKVEKILRLPSWIKFPISKASEFEKMQRLIRKSNIHTICEEGRCPNRAECYASGTATFLLGGSICSRACAFCQVNKGKPSEINKYESIQVAEAVKILNLKYVVLTSVARDDLPDHGANLFVSTINQIRKIDPKIQIEVLTPDLWGGGKSFEDKDKLQKDRLKKILEQRPICFNHNLETVERLQKEVRRGANYKNSIGLLEKAKSIAPNIQTKSGIMLGLGETLKEIETTILDLKKVDCNQITIGQYLRPSLKHLSVKKYWAPKEFEYLKSFCSKLGFKKVSCGPLVRSSYHAG

SEQ ID NO: 26706 - DNA, 897 bp, Synechococcus elongatus
  CDS (1)..(897)
atggttgttaagccagagtggttacgggtcaaagcaccccagtggcagcgggtgggttccgtcaaggaactgttgcgggacttaaacctcaatactgtttgcgaagaggcctcttgccccaatattggtgaatgtttctatcagggaacggccacatttttaatgatgggtccagcttgcacccgggcttgcccctactgcgatattgattttgagaaaaagccattgcctctggatcccactgaaccccagcgactagctgaagcagtggtgcggatgcgtctcaatcacgttgtcattacctcggtgaatcgggatgatttggccgacgggggtgcctctcagtttgtcgccacgattgaggctgtgcggcagcgatcgccccaaacaacaattgaagtcctgattcccgatctctgcggcaactggcaggccttggatcaaattcttgctgccggtccggaagtactcaaccacaacaccgagaccgtgccccgtctctatcggcgggtgcgtccccaaggcaactatcagcgcagtctggaactgctgcagcgggtgcgcgatcgcgccccttggatttactcaaaatcgggcattatggtgggtctaggggaaaccagcgaggaagtggtggccctcatgcaggatttgcgccaagtgggttgtgacattctcaccattggtcagtatctgcaacccagtcccaaacatctagcggtacaggcctttattccaccagagcaatttgaggaatggcgccgcctgggggaatcgatgggctttttgcaggtggtttcctctcccctcacccgtagttcctaccatgctgagcaggtgcgggctctgatgcaacagtacccacgtcagcgtcctgccccaagtcctcttggatag

SEQ ID NO: 26707 - protein, 298 aa, Synechococcus elongatus
MVVKPEWLRVKAPQWQRVGSVKELLRDLNLNTVCEEASCPNIGECFYQGTATFLMMGPACTRACPYCDIDFEKKPLPLDPTEPQRLAEAVVRMRLNHVVITSVNRDDLADGGASQFVATIEAVRQRSPQTTIEVLIPDLCGNWQALDQILAAGPEVLNHNTETVPRLYRRVRPQGNYQRSLELLQRVRDRAPWIYSKSGIMVGLGETSEEVVALMQDLRQVGCDILTIGQYLQPSPKHLAVQAFIPPEQFEEWRRLGESMGFLQVVSSPLTRSSYHAEQVRALMQQYPRQRPAPSPLG

SEQ ID NO: 26708 - DNA, 900 bp, Synechococcus sp
  CDS (1)..(900): transl_table=11
atgagcaaatacagcaccattgctccgacggaacgactgccggagtggctgcggcgaccgatcggcgatgcatctgcgctcgagcgggtgcagggattggtcaagcagaaccggttgcacaccatctgcgaggaggggcgttgccccaaccgcggtgagtgttatgcagctggcacagccacgtttttgctgggtggttcgatctgcacccgcagctgtgccttctgccaggtggagaagggccaagcacccatggcggtggaccctgctgaggcgcagcgggtggctgatgcggtggaggcgatgcagctgcgttatgtggtgctcacggccgtcgcccgtgatgacctggctgatcacggtgcagctctcttcactacaacgatggaggcgatccgcgcccgcaatccgctgattgccatcgaggtgttgacgccggatttctggggtggctgtcccgatccacaacaggctgttgccgcgcagcgtgagcggctgtccaccgtgctcgcggctgaccccgtgtgcttcaaccacaacctggaaaccgtccaacgcctgcaaggtgaggtacggcgcggtgccacctacgagcgatccctcgggctgctggcggcgtgccgggagctggctccaacgattcccaccaaatcagggttgatgctgggccttggcgagagccgtgatgaggtgattgctgcgatgcgggatctgcgggctgtggattgtcagcgcctcaccctcggccagtacctgcgtccgtccttggctcacatcccagtggatcgctattggacgccggaggagtttgacgaactcggtgctgtggcccgcgatcttgggttcgcccaggtgcgcagtggtccgctggtgcgcagcagttatcacgctgccgattga

SEQ ID NO: 26709 - protein, 299 aa, Synechococcus sp
MSKYSTIAPTERLPEWLRRPIGDASALERVQGLVKQNRLHTICEEGRCPNRGECYAAGTATFLLGGSICTRSCAFCQVEKGQAPMAVDPAEAQRVADAVEAMQLRYVVLTAVARDDLADHGAALFTTTMEAIRARNPLIAIEVLTPDFWGGCPDPQQAVAAQRERLSTVLAADPVCFNHNLETVQRLQGEVRRGATYERSLGLLAACRELAPTIPTKSGLMLGLGESRDEVIAAMRDLRAVDCQRLTLGQYLRPSLAHIPVDRYWTPEEFDELGAVARDLGFAQVRSGPLVRSSYHAAD

SEQ ID NO: 26710 - DNA, 912 bp, Synechocystis sp
  CDS (1)..(912): transl_table=11
gtgccccaacaatcatttatgaatggctcttccttgccccgtgagttccccccacgcttacccagttggttgaaacggcccattggtagagctagtgaattatctacggttcagcagattattaaacagcgccaaattcataccatttgcgaagaaggccgctgtcccaatcggggggaatgttacgccaaccgaacggcaacttttttattaatgggtcaaatttgtactagggcatgtggtttttgtcaggtggaaaagggccaggctcccatgatgttggatcaggatgagccgagaaaagtagcggaagcagtgcaattgttgggtctaaaatatgtggtattaacttccgttgctagggatgatttaaccgatggcggtgcaggctggtttgtagcggtaatggagcgtattcgccaggataatcctgctactcaaatagaggttttaacaccggatttttggggcggtatgggtagggaaagaagccaaaaagagcgagtactgacggtgactaaagccaaaccggtttgctataaccacaacttggaaacggtggctagattacagggtaaagtacgacggggggcaaaatatcaacgctccttagatgtgttgcgctggataaaggaatttgatcccgacattttcaccaaatctgggttgatgttgggccacggggaaacggtggatgaagtggtggaaaccctcaaggatttgcgctctgtaggttgcgatcgcctgacgttgggacaatatatgcaaccatccctagaccatctgcccgtgcaaaaatattggactccagaggagtttgatcagttgggggaaattgccaaggatttgggttttagccatgtgcgatcaggaccattggtgcggagttcctaccatgccggggaagattag

SEQ ID NO: 26711 - protein, 303 aa, Synechocystis sp
MPQQSFMNGSSLPREFPPRLPSWLKRPIGRASELSTVQQIIKQRQIHTICEEGRCPNRGECYANRTATFLLMGQICTRACGFCQVEKGQAPMMLDQDEPRKVAEAVQLLGLKYVVLTSVARDDLTDGGAGWFVAVMERIRQDNPATQIEVLTPDFWGGMGRERSQKERVLTVTKAKPVCYNHNLETVARLQGKVRRGAKYQRSLDVLRWIKEFDPDIFTKSGLMLGHGETVDEVVETLKDLRSVGCDRLTLGQYMQPSLDHLPVQKYWTPEEFDQLGEIAKDLGFSHVRSGPLVRSSYHAGED

SEQ ID NO: 26712 - DNA, 888 bp, Aeropyrum pernix
  CDS (1)..(888): transl_table=11
atggcgatggaggcggcgaagccgaggcttagggtcaggataaacgactcgtacgttaaggtagccaggcttgtggcaggcctgggtgtagccacggtatgcgagggagcgttgtgccccaacatatttacctgctggggggagggtacggccaccttcatgataatgggcgacacctgcacgcggggctgtaggttctgctatgtgaagaagggtgttcccgagcccctggacccccttgagccgtataaggttgctctagccgtggacgccctgggcctggactacgtgaccctcaccagcgttgacagggatgacctgcctgacggcggggccagccacttcgccgcgaccgtcagggcgataaagaggctgaggcctgacaccatagttgaggccctcatacccgacttccagggtgtggaggagcatgtgaggcttgtcgcggccagcgggctcgaggtcctcgcccacaatatagagacggtggagaggctgacgcccctggtgagggataggagggcagggtacaggcagagcctcagggttctcgagatcgctaaggaggagggggtagttaccaagtccagcatactactgggcctgggcgaggataagagcgaggttatcgaggctatgagggatttgaggagcgtaggggtagacattctggtgctcagccagtactacaggccgagtaggaagcagctgccggttgcgaagaggtatagcctctccgagttccgcgagctggctgagaagggccttcgaatggggttcgcctacgtcgtggcccaccccctggccaggacctcgttcaaggcgaaggaggcgtacttggccgcggtgaggagagttgaagctgagggtggtggtagacgggcctag

SEQ ID NO: 26713 - protein, 295 aa, Aeropyrum pernix
MAMEAAKPRLRVRINDSYVKVARLVAGLGVATVCEGALCPNIFTCWGEGTATFMIMGDTCTRGCRFCYVKKGVPEPLDPLEPYKVALAVDALGLDYVTLTSVDRDDLPDGGASHFAATVRAIKRLRPDTIVEALIPDFQGVEEHVRLVAASGLEVLAHNIETVERLTPLVRDRRAGYRQSLRVLEIAKEEGVVTKSSILLGLGEDKSEVIEAMRDLRSVGVDILVLSQYYRPSRKQLPVAKRYSLSEFRELAEKGLRMGFAYVVAHPLARTSFKAKEAYLAAVRRVEAEGGGRRA

SEQ ID NO: 26714 - DNA, 972 bp, Agrobacterium tumefaciens
  CDS (1)..(972): transl_table=11
atggtcactattctcgacaggacgtcgtccgacgaaaagcgcatccgccacccggaaaaggcgcatcggcccgataccgaggtcatgcgcaagccggaatggatccgcgtcaaggcgccgacttccaagggttatcacgagacgcgcgaactggtgcgcagccacaagctggtaacggtgtgcgaggaagccggctgtccgaatatcggcgagtgctgggaaaagaaacacgcgaccttcatgatcatgggtgaaatctgcacccgtgcctgcgccttctgtaacgtcgcgaccggcaagcccaatgcgcttgacatggacgagcccgaaaacgtcgccaaggccgtcaagcagatgggcctttcacatgtcgttatcacctcggttgaccgtgacgatctcgccgacggcggtgctgaacatttcgagaaggtcatctgggcgatccgtgccgcgtctccgacgacgaccatcgaaatcctcacccccgacttcctgaagaagcccggcgcgctggagcgcgtcgtcgccgccaagcctgatgtcttcaaccacaacatggaaactgttccgggcaattacctcacggttcgtccgggcgcgcgttatttccattccgtgcgtctcttgcagcgtgtcaaggaactggaccccaccatgttcaccaagtccggcatcatggtcggcttgggtgaagagcgcaacgaagtgctgcagctgatggacgatctgcgcagcgccgacgtggatttcctgaccatcggccaatatctgcagccgacccgcaaacaccacaaggttgaggccttcgtcacaccggaagaattcaagtcctacgagactgtggcctatgccaagggcttcctgatggtctcttccagcccgctgacgcgttcttcccaccatgccggcgacgattttgagcgcctgcgtgcggcccgcgagaagaagctgctggctgctgctgagtaa

SEQ ID NO: 26715 - protein, 323 aa, Agrobacterium tumefaciens
MVTILDRTSSDEKRIRHPEKAHRPDTEVMRKPEWIRVKAPTSKGYHETRELVRSHKLVTVCEEAGCPNIGECWEKKHATFMIMGEICTRACAFCNVATGKPNALDMDEPENVAKAVKQMGLSHVVITSVDRDDLADGGAEHFEKVIWAIRAASPTTTIEILTPDFLKKPGALERVVAAKPDVFNHNMETVPGNYLTVRPGARYFHSVRLLQRVKELDPTMFTKSGIMVGLGEERNEVLQLMDDLRSADVDFLTIGQYLQPTRKHHKVEAFVTPEEFKSYETVAYAKGFLMVSSSPLTRSSHHAGDDFERLRAAREKKLLAAAE

SEQ ID NO: 26716 - DNA, 897 bp, Bacillus anthracis
  CDS (1)..(897): transl_table=11
atgacaaaacaaacagaatataagcgcaagcccgaatggttgaaaattaagttaaacacgaatgaaaactatacaggcttaaagaaaatgatgcgttctaagaatcttcatacagtttgtgaagaagcgaaatgtccgaatattcatgaatgctgggctgtaagaaaaacagcaacatttatgattttaggagcagtatgtacacgtgcttgtcgtttctgtgcggttaaaacaggcttaccaacagagcttgatttacaagagccagaacgcgtagcagattctgtagtacaaatgggcttaaagcacgttgttataacagcggttgcacgtgatgatttaaaagacgggggagcagctgtttttgctgaaacagtacgcgctgtacgtcgtaaaaatccatttacgtcaatcgaagtattaccatctgatatgggtggagtagaagaaaacttaaaaatgttaatggatgcaaaaccagatattttaaaccataacattgaaacagtacgtcgattatctaaccgagttcgcgctagagcaaaatatgaccgttcattagagtttttacgtcgagcgaaagaaatgcagcctgatattccaactaaatcgagcattatggtcggcttaggggaaacgagagaagatttaattgaagcaatggatgacttacgtgcaaacaatgtggatattttaactcttggacaatacctacaaccatctaagaagcatttaccagttcttaaatattatccaccagcagaatttgcagagcttaaagaaattgcacttagcaaaggatttagccactgtgaagctggcccacttgtgcgttcttcttaccatgcggacgagcaagttcgttctgcaaaagaaaaaacagcagaagcaaaataa

SEQ ID NO: 26717 - protein, 298 aa, Bacillus anthracis
MTKQTEYKRKPEWLKIKLNTNENYTGLKKMMRSKNLHTVCEEAKCPNIHECWAVRKTATFMILGAVCTRACRFCAVKTGLPTELDLQEPERVADSVVQMGLKHVVITAVARDDLKDGGAAVFAETVRAVRRKNPFTSIEVLPSDMGGVEENLKMLMDAKPDILNHNIETVRRLSNRVRARAKYDRSLEFLRRAKEMQPDIPTKSSIMVGLGETREDLIEAMDDLRANNVDILTLGQYLQPSKKHLPVLKYYPPAEFAELKEIALSKGFSHCEAGPLVRSSYHADEQVRSAKEKTAEAK

SEQ ID NO: 26718 - DNA, 894 bp, Bacillus cereus
  CDS (1)..(894): transl_table=11
atgacaaaacaaacagaatataagcgcaagcccgaatggttgaaaattaagttaaacacgaatgaaaactatacaggcttaaagaaaatgatgcgttctaagaatcttcataccgtttgtgaagaggcaaaatgtccgaatattcatgaatgctgggctgtaagaaaaacagcaacatttatgattttaggtgcggtttgtacacgtgcttgtcgtttttgtgcggttaaaacaggcttaccaactgagcttgatttacaagaaccagaacgcgtagcagattcagtagtacaaatgggcttaaagcacgttgttataacagcggttgcacgtgatgatttaaaggacgggggagcagctgtttttgctgaaacagtacgcgcagtacgtcgtaaaaacccattcacgtctatcgaagtattaccatctgatatgggtggagtagaagaaaacttaaaaatgttaatggatgcaaaaccagatattttaaaccataacattgaaacagtacgtcgattatctgaccgagttcgcgctagagcaaaatatgaacgttcattagagtttttacgtcgagcgaaagaaatgcagcctgatattccaactaaatcgagcattatggtgggcttaggtgaaacgagagaagatttaattgaagcaatggatgacttacgtgcaaacaatgtggatattttaactcttgggcaatacctacaaccatctaagaagcatttaccagttcttaaatattacccaccagcagaatttgcagagcttaaagaaattgcacttagcaaaggatttagccactgtgaagctggcccacttgtgcgttcttcttaccatgcggacgagcaagtacgttctgcaaaagaaaaaacagcaggaagctaa

SEQ ID NO: 26719 - protein, 297 aa, Bacillus cereus
MTKQTEYKRKPEWLKIKLNTNENYTGLKKMMRSKNLHTVCEEAKCPNIHECWAVRKTATFMILGAVCTRACRFCAVKTGLPTELDLQEPERVADSVVQMGLKHVVITAVARDDLKDGGAAVFAETVRAVRRKNPFTSIEVLPSDMGGVEENLKMLMDAKPDILNHNIETVRRLSDRVRARAKYERSLEFLRRAKEMQPDIPTKSSIMVGLGETREDLIEAMDDLRANNVDILTLGQYLQPSKKHLPVLKYYPPAEFAELKEIALSKGFSHCEAGPLVRSSYHADEQVRSAKEKTAGS

SEQ ID NO: 26720 - DNA, 912 bp, Bacillus halodurans
  CDS (1)..(912): transl_table=11
atggcgaagaaagaagagtatgtacgcaagccggattggctaaagataaagctcaatacgaatgagacgtatacaggcctgaaaaaaatgatgcgcgagaaaaatttacatacggtttgtgaagaagcgaaatgtccaaacattcatgagtgctgggctgtgcggaaaacggccacgtttatgattcttggggatgtatgcacgcgcgcgtgtcgattctgcgctgttaaaacagggcttccgaatgaacttgatctacaggaaccagagcgcgtagcagaatcggttgaaattatgggcttaaagcacgctgtcattaccgctgtggctcgtgatgatttgaaggatggtggagcaggtgtattcgcggaaaccgttcgcgcggttcgccgtcgtaatccattttgtacgattgaagtgcttccatcagatatgatggggaatgacgataacttaaaaacattaatggacgcaagaccgaacattttaaaccataacattgaaacggttcgccgtttgactccaagggttcgtgcaagagcaacctatgagcgctccttagaatttttacgtcgcgcaaaggaaatgcagcctgatattccgacaaagtcaagtcttatgattggccttggggaaacgaaggacgagattattgagacgatggatgacctccgtgcgaacaatgtggacattatgacaatcggtcaatatttacagccgacgaaaaagcatttgaaggtgcagaaatattaccatccagacgaatttgctgagttgaaggaaattgcgttaagcaaaggatttagtcattgtgaagcgggtccgctcgtacgctcttcttaccatgccgatgagcaagtgaatgaagcacaagtgcgtgaggaagcgcgcaaggcagcggcgaaatcataa

SEQ ID NO: 26721 - protein, 303 aa, Bacillus halodurans
MAKKEEYVRKPDWLKIKLNTNETYTGLKKMMREKNLHTVCEEAKCPNIHECWAVRKTATFMILGDVCTRACRFCAVKTGLPNELDLQEPERVAESVEIMGLKHAVITAVARDDLKDGGAGVFAETVRAVRRRNPFCTIEVLPSDMMGNDDNLKTLMDARPNILNHNIETVRRLTPRVRARATYERSLEFLRRAKEMQPDIPTKSSLMIGLGETKDEIIETMDDLRANNVDIMTIGQYLQPTKKHLKVQKYYHPDEFAELKEIALSKGFSHCEAGPLVRSSYHADEQVNEAQVREEARKAAAKS

SEQ ID NO: 26722 - DNA, 897 bp, Bacillus subtilis
  CDS (1)..(897): transl_table=11
ttggcaaagaaagacgaacacctcagaaagcccgaatggcttaaaattaaattaaatacaaatgaaaactatacagggctcaaaaaactcatgcgggaaaacaacctgcataccgtatgcgaagaagcaaagtgtccgaatattcatgaatgctgggcggtcagacgtacagcgacatttatgattttaggttctgtttgtacaagagcatgccgtttctgtgctgtcaaaacaggccttccaactgagcttgatctgcaagagccggaacgcgtagcggattcagtcgcgcttatgaatttgaaacacgcggtcattacggctgttgcgcgtgacgatcagaaagatggcggggcaggcattttcgcggaaactgtccgtgcgatccgcagaaaaagcccgttcacaacaattgaggtgctgccgtctgatatgggcggaaactacgataacctaaaaaccttgatggatacacgcccagacatcctgaatcacaatatcgaaacggttcgccgcctgacgccaagagtccgcgcgcgtgcgacgtacgaccgttcattggaatttttgcgccgtgcgaaggaaatgcagcctgacattccgacaaaatcaagtatcatgatcggactcggcgaaacaaaagaagagattattgaagtaatggacgacctcttggcgaacaacgtggatattatggcaatcggccaatatctgcagccgacgaagaaacacttgaaagtccaaaaatactaccatcctgatgaatttgcagaattaaaagaaatcgcgatgcaaaaaggcttcagccattgtgaagccggtccgcttgtccgttcctcttaccatgcggatgaacaagtaaacgaagcatctaaaaagcgtcaagcacaagcataa

SEQ ID NO: 26723 - protein, 298 aa, Bacillus subtilis
MAKKDEHLRKPEWLKIKLNTNENYTGLKKLMRENNLHTVCEEAKCPNIHECWAVRRTATFMILGSVCTRACRFCAVKTGLPTELDLQEPERVADSVALMNLKHAVITAVARDDQKDGGAGIFAETVRAIRRKSPFTTIEVLPSDMGGNYDNLKTLMDTRPDILNHNIETVRRLTPRVRARATYDRSLEFLRRAKEMQPDIPTKSSIMIGLGETKEEIIEVMDDLLANNVDIMAIGQYLQPTKKHLKVQKYYHPDEFAELKEIAMQKGFSHCEAGPLVRSSYHADEQVNEASKKRQAQA

SEQ ID NO: 26724 - DNA, 849 bp, Bacteroides thetaiotaomicron
  CDS (1)..(849): transl_table=11
atggctgacagagtgcgcaagcctgaatggctgaaaataaatatcggtgccaacgaccgttacaccgaaactaaaagaattgtcgactcccactgcctgcatacgatatgcagcagtgggcgttgtcccaacatgggagaatgctggggaaaaggaactgccacatttatgatcggcggtgacatctgtacccgcagctgcaaattctgcaacacacaaaccggacgcccgcatccactggatgccaacgaaccgacacacgtagcggagtctatcgctcttatgaaactagatcatgcggtagttacctcggtagaccgtgacgaccttcccgatctgggagccggacattgggcacataccattcgtgagatcaaacgactgaatccgcagaccacaatcgaagtactgatacccgattttcagggtagaatggaactggtagacctagtgatagaagccaatcccgacatcatttcccataatatggagacggtaagacgcatcagtcccctggttcgcagtgcggccaactatgataccagcctgcaagtgatcggtcacatcgcccgaagcggaacaaaatcaaaaagcggtattatggtggggttgggagaaactccacaggaagtggaaaccattatggacgacctgctggcagtcggctgccagattcttacgataggacaatatttgcagcctacgcaccgtcattatccggttgccgagtatgtgacgccacagcaattcgccacatacaaaaccatcggtttggagaaaggattcagcattgtagagagtgctcctctcgttcgttcgtcttatcatgcagagaaacacattcgatag

SEQ ID NO: 26725 - protein, 282 aa, Bacteroides thetaiotaomicron
MADRVRKPEWLKINIGANDRYTETKRIVDSHCLHTICSSGRCPNMGECWGKGTATFMIGGDICTRSCKFCNTQTGRPHPLDANEPTHVAESIALMKLDHAVVTSVDRDDLPDLGAGHWAHTIREIKRLNPQTTIEVLIPDFQGRMELVDLVIEANPDIISHNMETVRRISPLVRSAANYDTSLQVIGHIARSGTKSKSGIMVGLGETPQEVETIMDDLLAVGCQILTIGQYLQPTHRHYPVAEYVTPQQFATYKTIGLEKGFSIVESAPLVRSSYHAEKHIR

SEQ ID NO: 26726 - DNA, 1002 bp, Bordetella bronchiseptica
  CDS (1)..(1002): transl_table=11
atgtccacgctcgtcgagtcccccgttccctcgaacgactcgcaggccgccgcgccggccgcctacgatcccacccagaagcagaaatcgcaggccaagaccgcgcgcattccgatcaaggtggtcgcggccgagaagctgaagaagccggaatggatccgcgtgcgcgccgccgccccggggtcgcgcttctacgacatcaagcgcatcctgcgcgagcacaacctgcatacggtgtgcgaagaggcatcctgcccgaacatcggcgaatgcttcggcaagggcacggccaccttcatgatcatgggcgacaagtgcacgcgccgttgcccgttctgtgatgtgggccacggccgtcccgatccgctggacacgcaagagcccgaaaacctggcgcgcaccatcgccgcgctcaagctgtcctacgtggtcatcacctcggtcgaccgcgacgacctgcgcgacggtggcgccgcccacttcgtcgaatgcatcgccaaggtgcgcgagtattcgcccgatacccgcatcgaagtgctggtgcccgacttccgcggccgcctggaccgtgcgctgcacatcctcaacagcggcccgccggacgtcatgaaccacaacctggaaaccgtgccgcgcctgtacaagcaggcacgcccgggctcggactacgcgcattcgctcaagctgctggccgagttcaagaagctgcaccccgaggtgcccaccaagtcgggcctgatgctgggcctgggcgagacggacgaggaaatcctgcaggtcatgcgggacatgcgcgagcacaacgtcgacatgctgaccatcggccagtatctccagccgtcggagcaccatctgccggtgctgcgctacgtgcatccggacaccttcgcgatgttcgagcgcgaggcctacgccatgggctttacgcatgcggccgtgggcgccatggtgcgctcgtcgtaccacgccgaccagcaggcgcacgccgccggcgtcaactga

SEQ ID NO: 26727 - protein, 333 aa, Bordetella bronchiseptica
MSTLVESPVPSNDSQAAAPAAYDPTQKQKSQAKTARIPIKVVAAEKLKKPEWIRVRAAAPGSRFYDIKRILREHNLHTVCEEASCPNIGECFGKGTATFMIMGDKCTRRCPFCDVGHGRPDPLDTQEPENLARTIAALKLSYVVITSVDRDDLRDGGAAHFVECIAKVREYSPDTRIEVLVPDFRGRLDRALHILNSGPPDVMNHNLETVPRLYKQARPGSDYAHSLKLLAEFKKLHPEVPTKSGLMLGLGETDEEILQVMRDMREHNVDMLTIGQYLQPSEHHLPVLRYVHPDTFAMFEREAYAMGFTHAAVGAMVRSSYHADQQAHAAGVN

SEQ ID NO: 26728 - DNA, 969 bp, Brucella melitensis
  CDS (1)..(969): transl_table=11
atggttacagttctcaatacggtcaaccagagcggacgtttgcggcacccggaaaaggcacaccgccccgacaatgaggtgctgaaaaagccggactggattcgcgtcaaggcgcctgtttcgcgcggctatggcgaaacgcgcgagattgtccgctcgaacaagcttgtgactgtctgtgaagaagccggttgcccgaatatcggcgagtgctgggaaaagaagcacgcgactttcatgattatgggcgaaatctgcacacgcgcctgcgcgttctgcaatatttcgaccggcattccgaatgcgctcgacccgaacgagccggaaaatattgccaaggccgtgaagcagatggggctgacccatgtggtcattacctcggtggaccgtgacgatctggccgatggcggtgcgcatcattttgccgaagttatcaaggccgtgcgcgaggccgcaccggcgaccacgatcgagattctgacaccggacttcctgcgcaaggaaggcgcgctggagatcgtggtcaaggctcgccctgacgtgttcaaccacaatctcgaaacagtgccgtcgaaatatctcaaggttcgtccgggtgcgcgctatttccactccatccgcctgcttcagcgtgtgaaggaactggatccgaccattttcaccaagtccggcattatggttggcctgggcgaagagcggaacgaaatacttcagcttatggacgatctgcgctctgctgatgttgatttcatgactatcggccaatatcttcagcccacccgcaagcatcatccggttatccgcttcgtcaagcccgatgaattcaagtctttcgagaccatcggcaagacaaagggcttcctgctggtcgcttccagcccgctgacacgctcgtcgcatcatgcgggtgaagattttgccaagctcaaggcggcgcgcgaagcgctttatgcttcaagggcctcgtaa

SEQ ID NO: 26729 - protein, 322 aa, Brucella melitensis
MVTVLNTVNQSGRLRHPEKAHRPDNEVLKKPDWIRVKAPVSRGYGETREIVRSNKLVTVCEEAGCPNIGECWEKKHATFMIMGEICTRACAFCNISTGIPNALDPNEPENIAKAVKQMGLTHVVITSVDRDDLADGGAHHFAEVIKAVREAAPATTIEILTPDFLRKEGALEIVVKARPDVFNHNLETVPSKYLKVRPGARYFHSIRLLQRVKELDPTIFTKSGIMVGLGEERNEILQLMDDLRSADVDFMTIGQYLQPTRKHHPVIRFVKPDEFKSFETIGKTKGFLLVASSPLTRSSHHAGEDFAKLKAAREALYASRAS

SEQ ID NO: 26730 - DNA, 960 bp, Buchnera aphidicola subsp
  CDS (1)..(960): transl_table=11
atgaataaaaaaaaagattctttgttcaaaacaataaaaaaaaataacataataaatgttattactactgaaagtttttctaaaaaaataataaaacttaataaacctgattggataaaaattaaaatacctgtcgatacgtttcgtattcgtgaaataaaaagtgctttacgtaaaaacaatttacattctgtttgtgaagaagctaattgtccaaatctaccagaatgttttaatcgcggaactgcaacgtttatgattcttggatcaagatgtactcgtaattgtccattttgtgctgtatctcatggcaaacctaattctctaaatgtcgaagaaccaaataatttagcaaaaactatatttgatatgggtattgattatgtagtaatcacttcagttgtaagagatgatttgtatgacggaggagcgcaacattttgttaattgtattaaatcaattagaaaaaaaaataaagttaaaattgaaatattagttcctgactttaggggaagagtagaattaattttaaaaatttttaattcaggattgcctgatgtgtttaatcataatgtagaaaatgttcctcgtctttataaaaaagtacgtcctggagctgattataaaaaatcgttgtttctattagaatcctttaaaaaaaaatattctaatattcctacaaaatcaggtttaatgttaggtttaggagaaaaagatacagaaataattcaagtaatgaaagatctgtattcaaatggtgttacattgttaacagtaggacagtatctgcaacctagtattaatcacattccagtacaacgttatataccactttcagaattcaaaaatataaaaaaagaagcattatctatcggttttactaatgcattctgcggaccttttgtacgttcatcgtatcatgctagttttcaagcaaataaattgattaaaaaaatttaa

SEQ ID NO: 26731 - protein, 319 aa, Buchnera aphidicola subsp
MNKKKDSLFKTIKKNNIINVITTESFSKKIIKLNKPDWIKIKIPVDTFRIREIKSALRKNNLHSVCEEANCPNLPECFNRGTATFMILGSRCTRNCPFCAVSHGKPNSLNVEEPNNLAKTIFDMGIDYVVITSVVRDDLYDGGAQHFVNCIKSIRKKNKVKIEILVPDFRGRVELILKIFNSGLPDVFNHNVENVPRLYKKVRPGADYKKSLFLLESFKKKYSNIPTKSGLMLGLGEKDTEIIQVMKDLYSNGVTLLTVGQYLQPSINHIPVQRYIPLSEFKNIKKEALSIGFTNAFCGPFVRSSYHASFQANKLIKKI

SEQ ID NO: 26732 - DNA, 945 bp, Buchnera aphidicola subsp
  CDS (1)..(945): transl_table=11
atgcgtactaaaaattcaaaaattattaattctgaacaagatatatttcgcaacaaagttattccaataaaatttttatctaattataataatgaaatactaaaaaaacctcagtggatgaaaattaaatttcctgttagcaccaataaaataaaaaatttaactctaatattaagacagcataatttaaatactgtttgcgaacaggcattatgtcctaatttagccgaatgttttaatcgaggaacagctacatttatgattttaggttctatttgtacgagacgttgtccattttgcgctgtaagtcatggaaaaccatcgttagttaataaaaacgaaccacagcaattagcacgggtaatatttgatatgaaaattaattatgtagttattacttctgtggtaagagacgatttgaaagatcgaggagcacaacatttttctaattgtatacaggaaattagaaataaaaataatgttaaaattgaaatattagtaccagattttagaggaatgatgcgtgaatcatgcaaaattattagtatgaatccacctaatgtgtttaatcataatttggaaaatgtcccaaggttatataaattaataagaccaggggctagctatataagatccttgaaattattagagttttttaaaaaattgaatccaaatgttccaactaaatctggtttaatcttaggtttaggggaaacatataaagaaatagttcatgttataaatgatttattagatcatggtgtaaccattttaaccataggacaatatcttcaacctagctctaaacattttcccgtacaaaaatatattactcctgatgaatttaaaaaaattaaaaattatgcgttatccattggttttaaaaaagttttttgtgggccactaatacgatcttcttatcatgctgagaaatattttgaataa

SEQ ID NO: 26733 - protein, 314 aa, Buchnera aphidicola subsp
MRTKNSKIINSEQDIFRNKVIPIKFLSNYNNEILKKPQWMKIKFPVSTNKIKNLTLILRQHNLNTVCEQALCPNLAECFNRGTATFMILGSICTRRCPFCAVSHGKPSLVNKNEPQQLARVIFDMKINYVVITSVVRDDLKDRGAQHFSNCIQEIRNKNNVKIEILVPDFRGMMRESCKIISMNPPNVFNHNLENVPRLYKLIRPGASYIRSLKLLEFFKKLNPNVPTKSGLILGLGETYKEIVHVINDLLDHGVTILTIGQYLQPSSKHFPVQKYITPDEFKKIKNYALSIGFKKVFCGPLIRSSYHAEKYFE

SEQ ID NO: 26734 - DNA, 990 bp, Burkholderia pseudomallei
  CDS (1)..(990): transl_table=11
atgactgaccttaccgctacccccgcacccgccgaaccggccgcttccgcctacgatccgaccgccaagcagaaggcgcaggcgaagaccgcgcgcattccgatcaagatcgtcccgatcgagaagctgaagaagcccgaatggatccgcgtgaaggcggccaccggcagctcgcgcttcaacgagatcaagacgatcctgcgcgagcacaacctgcatacggtgtgcgaggaagcgagctgcccgaacatcggcgaatgcttcggcaagggcaccgcgacgttcatgatcatgggcgacaagtgcacgcgccgctgcccgttctgcgacgtcggccacggccggcccgatccgctcgacgcagacgagccgaagaacctcgcgcgcacgatcgcggcgctcaagctcaagtacgtggtgatcacgagcgtcgaccgcgacgatctgcgcgacggcggcgccggccacttcgtcgagtgcatccgcgaagtgcgcgagcagtcgcccgcgacgcgcatcgagatcctgacgccggacttccgtggccgcctcgaccgtgcgctcgcgatcctgaacgcggcgccgcccgacgtgatgaaccacaatctcgaaacggtgccgcgcctgtacaaggaggcgcgccccggctcggactatgcgcattcgctgaagctcctgaaggatttcaaggcgctgcatccggacgtcgcgacgaaatcgggcctgatggtcggcctgggcgagacgaccgacgagatcctgcaggtgatgcgcgacctgcgcgcgcacgacgtcgacatgctgacgatcggccaatacctgcagccgtccgagcaccatctgccggtgcgcgagtacgtgcatccggacacgttcaagatgtacgaggaagaggcgtacaagatgggcttcacgcacgcggccgtcggcgcgatggtgcgctcgagctatcacgccgatctgcaggcgcacggcgccggggtggtttga

SEQ ID NO: 26735 - protein, 329 aa, Burkholderia pseudomallei
MTDLTATPAPAEPAASAYDPTAKQKAQAKTARIPIKIVPIEKLKKPEWIRVKAATGSSRFNEIKTILREHNLHTVCEEASCPNIGECFGKGTATFMIMGDKCTRRCPFCDVGHGRPDPLDADEPKNLARTIAALKLKYVVITSVDRDDLRDGGAGHFVECIREVREQSPATRIEILTPDFRGRLDRALAILNAAPPDVMNHNLETVPRLYKEARPGSDYAHSLKLLKDFKALHPDVATKSGLMVGLGETTDEILQVMRDLRAHDVDMLTIGQYLQPSEHHLPVREYVHPDTFKMYEEEAYKMGFTHAAVGAMVRSSYHADLQAHGAGVV

SEQ ID NO: 26736 - DNA, 978 bp, Caulobacter crescentus
  CDS (1)..(978): transl_table=11
atggccacggtgatcgacaccctgaaggctcgcggctcggaagaccgggcggcgcgccatcctgaaaagcagaaccgaccggacacgccggtgcttcgcaagcctgaatggctgcgtgtgcgcgcgcccggctcggggcagtacaacgagaccaagggcatcgtgcgcgagcacaagctgcacacggtctgcgaagaggcggcctgcccgaacatcggcgagtgctggagccagaagcacgcgaccatgatgatcatgggcgagatctgcacccgcgcctgcgccttctgcaatgtgaccacgggcctgccgacgcaactggatcccgacgagccgcgccgcgtggccgaggctgtcgccaagatgggcctcaaacacgtggtcatcacctcggtggaccgcgacgaccttctggacggcggcgcgcgccatttcgccgaggtggtcacgtccatccgggccgccgccccgggcacgacgatcgagatcctgaccccggatttcctccgcaaggacggcgccgagaacgtcgtcatcgactccaagccggacgtcttcaaccacaatctcgaaaccgtgccgcggctctacctgaagatccgtcccggcgcgcgctactacaactcgctgcgcctgctcgaccgcgtcaagcagcgtgacccttcgcagttcaccaagtcgggcctgatggtcggtctgggtgaaaccaaggaagaggtcatgcaggtgatggacgacatgcgctcggcgggcgtcgatttcatcaccatcggccagtacctgcagccgacgcgcaagcacgcggcgatcgaccgtttcgtgacgcctgaagagttcaaggcctacgaggcgatcgcgcgggctaagggcttcctgatggtgtcgtccagtccgctgacccgctcgtcgcaccacgccggcgaggatttcgccaagttgcaggccgcgcggcgcgccctcgacgctcgtaccgcctaa

SEQ ID NO: 26737 - protein, 325 aa, Caulobacter crescentus
MATVIDTLKARGSEDRAARHPEKQNRPDTPVLRKPEWLRVRAPGSGQYNETKGIVREHKLHTVCEEAACPNIGECWSQKHATMMIMGEICTRACAFCNVTTGLPTQLDPDEPRRVAEAVAKMGLKHVVITSVDRDDLLDGGARHFAEVVTSIRAAAPGTTIEILTPDFLRKDGAENVVIDSKPDVFNHNLETVPRLYLKIRPGARYYNSLRLLDRVKQRDPSQFTKSGLMVGLGETKEEVMQVMDDMRSAGVDFITIGQYLQPTRKHAAIDRFVTPEEFKAYEAIARAKGFLMVSSSPLTRSSHHAGEDFAKLQAARRALDARTA

SEQ ID NO: 26738 - DNA, 939 bp, Chlamydophila caviae
  CDS (1)..(939): transl_table=11
atgaatacaccttccgatgaaacacgaaaacctccacaaggtaaacgtttcgccgagcgtcttcccaaatggctaaggcaagttttacctactggtccagtctttgcccaaacagatacaacgataaagcgcacgggaatggccacggtatgcgaagaagctctatgtcccaatcgggcatgttgctggtcaagaaagacagcaacctatctagctttaggagatgcgtgcacaagacgttgtggtttctgtaacattgacttcacgaaaaagcctatctcccctgatcctgaagaacctcaaaaaattgcagaatcagcaaaaattcttcagcttaagcatattgttttaaccatggtagcccgtgatgatctagaagatggcggtgcaagttttctcgtgcgtattattgatactctacatcaagagcttccagaatctactgtcgaggtattagcttcagactttcaaggaaacattgatgctttacacacactattggattcaggattaaccatttataatcataatgtggaaacggttgaacgtctcacacctgtagtacgtcataaagcaacatatcgtcgttctttatttatgttagagcaagcggctatgtatctccctgatcttaagattaaatcaggaattatggtgggtcttggagagcaggaaagcgaggtaaaacaaacgctaaaagatcttgcagatcacggagtgaaaatcgtcaccataggacagtatttacgtccttcccgatcacatataccagtaaaaagctacgttactcccgagacttttgattactaccgtacaataggaacgtctttagggctttttgtctatgcaggaccttttgttcgttctagtttcaatgcagatatcgtcttgcataatctggagaacaaacaatctgatgtagcaaaaatgcagaattag

SEQ ID NO: 26739 - protein, 312 aa, Chlamydophila caviae
MNTPSDETRKPPQGKRFAERLPKWLRQVLPTGPVFAQTDTTIKRTGMATVCEEALCPNRACCWSRKTATYLALGDACTRRCGFCNIDFTKKPISPDPEEPQKIAESAKILQLKHIVLTMVARDDLEDGGASFLVRIIDTLHQELPESTVEVLASDFQGNIDALHTLLDSGLTIYNHNVETVERLTPVVRHKATYRRSLFMLEQAAMYLPDLKIKSGIMVGLGEQESEVKQTLKDLADHGVKIVTIGQYLRPSRSHIPVKSYVTPETFDYYRTIGTSLGLFVYAGPFVRSSFNADIVLHNLENKQSDVAKMQN

SEQ ID NO: 26740 - DNA, 927 bp, Chlamydia muridarum
  CDS (1)..(927): transl_table=11
atgagtaattccccagaatcctcaactcccaagcagtccatcccagcacgattccccaaatggttgcgacaaaaacttcctctagggaaagtattttctcgaactgatggcactataaaaaataaggggctccccactgtttgtgaagaagcctcttgtcccaatcgcacgcattgttggtccagacataccgctacataccttgcattgggtgatgcatgtacacgtcgctgtggcttttgtgatattgatttcactaaaaaacctcttcccccagatcctcaagaaggagagaaaatcgctgcttccgcaaaagcattgggcctaaaacatatcgtgatcaccatggtttctcgcgatgatttggaggatggcggagcagatgctctagctcgtatcattacaaccttacatatagaacttccagaagctactattgaagttctagcctctgattttgaagggaacattgatgctttacaccatctacttgatgcacgtattgccatctataaccataatgtagaaactgtagaacgactatctccccttgttcgtcataaagcaacctaccgacggtctctgatgatgttagagcaggctgcacaatacctcccagaccttatgattaagtctggtataatggtaggattaggagaacaggaaagcgaaatcaagcaaacgttaaaagatcttgcagatcatggcgttaagatagttactataggacaataccttcgtccttcgcgaagacatattcctgtgaaaagctatgtttctccagaaacatttgattattatcgatccgtaggggaggctttgggtcttttcatttatgcaggacctttcgttcgttctagctttaatgcagatgctgtttttgaagctatgagtcaacgagagcgcctgtccgcttctatacaatag

SEQ ID NO: 26741 - protein, 308 aa, Chlamydia muridarum
MSNSPESSTPKQSIPARFPKWLRQKLPLGKVFSRTDGTIKNKGLPTVCEEASCPNRTHCWSRHTATYLALGDACTRRCGFCDIDFTKKPLPPDPQEGEKIAASAKALGLKHIVITMVSRDDLEDGGADALARIITTLHIELPEATIEVLASDFEGNIDALHHLLDARIAIYNHNVETVERLSPLVRHKATYRRSLMMLEQAAQYLPDLMIKSGIMVGLGEQESEIKQTLKDLADHGVKIVTIGQYLRPSRRHIPVKSYVSPETFDYYRSVGEALGLFIYAGPFVRSSFNADAVFEAMSQRERLSASIQ

SEQ ID NO: 26742 - DNA, 924 bp, Chlamydia pneumoniae
  CDS (1)..(924): transl_table=11
atgaaatgtagaccaactttaaatacagaccaacctagagtgcggaaaaagcttcccgagcgtttccccaagtggttacagaggcccttaccacaaggttctgcatttcatgctacggacgctacaataaaacgctcaggaatgccaacggtatgcgaagaagctctctgccccaatcgagcagaatgttggtctcgtaaaactgccacctaccttgctctcggcgatgtctgtacaagaagttgcggtttttgcaatattgggcattctaaaaccccacccgcgctagatcctacagaacccgagcgcattgctttgtcagcgaaagaactggggttgaagcatgtggtaatcaccatggtggctcgcgatgaccttgaggatggtggtgcacaaggtttagtcgatatcattcaaaagttacgtgaagaactccctcaagcgactacagaagttttagcttctgatttccaagggaatgtttctgctctccacaccctgttagattctggcattactatttataatcataatgtcgaaactgtagcgaggctctcgcctctagtacggcacaaagcaacctatgcccgatctatgttcatgttagaacaagctgccaactacctccccgatcttaaaatcaaatccgggatcatggtaggattaggtgagatggaaggagaagtcaaacaaactctccaagatctggcttccataggagttcgtattgtcactataggtcaatacttacgtccttctcgtaagcatctccaagtcaaaagttatgtgactcccgagacttttgattactatcgtcgagtcggagaagctatgggtctttttgtttacgcaggaccttttgtacgctcgagttttaatgccgatatgatcctagcttctgtacaagacaaagcgtcagcttaa

SEQ ID NO: 26743 - protein, 307 aa, Chlamydia pneumoniae
MKCRPTLNTDQPRVRKKLPERFPKWLQRPLPQGSAFHATDATIKRSGMPTVCEEALCPNRAECWSRKTATYLALGDVCTRSCGFCNIGHSKTPPALDPTEPERIALSAKELGLKHVVITMVARDDLEDGGAQGLVDIIQKLREELPQATTEVLASDFQGNVSALHTLLDSGITIYNHNVETVARLSPLVRHKATYARSMFMLEQAANYLPDLKIKSGIMVGLGEMEGEVKQTLQDLASIGVRIVTIGQYLRPSRKHLQVKSYVTPETFDYYRRVGEAMGLFVYAGPFVRSSFNADMILASVQDKASA

SEQ ID NO: 26744 - DNA, 873 bp, Chlorobium tepidum
  CDS (1)..(873): transl_table=11
atgaactctggtcccggaaagaaacccgactggctcaagatcaagctcgcttcgggctcgtcgtttgcttcgacgcgcaagctgctgaaccggcacagcctccacacggtgtgccgctcggcgatgtgcccgaacctgcacgagtgctggtcgaaaggcacggccaccttcctcttgctcggcaacgtctgcacccgctcctgccgtttttgcgcggtcggaacggaatgccggccggctatgcccgatccggaggagccgtcgaagatcgccgaggcggtgaaaacgatgaagctccgccacgccgtgctaaccagcgtcaaccgtgacgatctcgccgatggcggtgcaacgcactgggttgaaaccatccgcgcgattcgcgaagtgaaccccggcgtgagtctcgaatgtctcattcccgacttcagcggcaatgaacagtcgctcgatttggtgatgcaggagctcccggaggtgctgaatcacaacatcgaaaccgtgccgtcacgctacgccgccgtgcgcccgcaagccttgtacgaacgctcgcttgcggtgatcgagcgggcgaagcgccagttccggctcgccaccaagtccggcatgatggtcggcatgggtgaaacggaggaggagctcgaagcgtcgctgcacgacctgcgaggtcacggctgtgacatggtgactatcggccagtacctgcaaccaaccgccgcgcatctgccggtgagccgctacgtgacgcccgaagagttcgagcgctaccgcgaaatcgcgctcgacgccggattccggcacgttcagtcgggccccttcgtgcgcagttcgtaccacgccgaggcattcgagccagttgaaaaaatttcctga

SEQ ID NO: 26745 - protein, 290 aa, Chlorobium tepidum
MNSGPGKKPDWLKIKLASGSSFASTRKLLNRHSLHTVCRSAMCPNLHECWSKGTATFLLLGNVCTRSCRFCAVGTECRPAMPDPEEPSKIAEAVKTMKLRHAVLTSVNRDDLADGGATHWVETIRAIREVNPGVSLECLIPDFSGNEQSLDLVMQELPEVLNHNIETVPSRYAAVRPQALYERSLAVIERAKRQFRLATKSGMMVGMGETEEELEASLHDLRGHGCDMVTIGQYLQPTAAHLPVSRYVTPEEFERYREIALDAGFRHVQSGPFVRSSYHAEAFEPVEKIS

SEQ ID NO: 26746 - DNA, 936 bp, Chlamydia trachomatis
  CDS (1)..(936): transl_table=11
atgaccgattcagaatctcctattcctaaaaaatctatacccgccagattccctaagtggctacgccagaaactccctttagggcgggtatttgctcaaactgataatactatcaaaaataaagggcttcctacagtctgtgaggaagcctcttgtccgaatcgcacccattgttggtctagacatacagctacctatctagccttaggtgatgcctgtacacgtcgctgcggcttttgtgatattgacttcactagaaatcccttacccccagatcctgaagaaggagctaaaattgctgagtccgcaaaagctttgggactcaagcacattgtcatcactatggtttcccgtgatgatttagaggatggaggagccagcgctcttgtccacattattgaaacgttgcacacagaattaccaacagcaactattgaagtcctagcctctgattttgaaggtaacattgctgccttacatcacttactggatgcgcacattgctatctataatcataatgtagaaacagtagaacgactcactccatttgtccgtcataaagctacctaccgaagatcgcttatgatgttggagaatgcagccaaatacctccctaacctgatgactaaatcaggtatcatggtaggattaggagagcaagaaagcgaggtcaagcaaaccttaaaagatcttgctgatcatggcgttaagatcgtaactataggccagtatcttcgtccttcacgcagacatattcctgtgaaaagctatgtgtctcccgagactttcgattattatcgctcggtaggagagtcgttaggactctttatttatgctggcccattcgttcgttctagctttaatgcggattctgtttttgaagccatgcgccagcgggaaacctcaacctctgcgctacttccgaataaagattag

SEQ ID NO: 26747 - protein, 311 aa, Chlamydia trachomatis
MTDSESPIPKKSIPARFPKWLRQKLPLGRVFAQTDNTIKNKGLPTVCEEASCPNRTHCWSRHTATYLALGDACTRRCGFCDIDFTRNPLPPDPEEGAKIAESAKALGLKHIVITMVSRDDLEDGGASALVHIIETLHTELPTATIEVLASDFEGNIAALHHLLDAHIAIYNHNVETVERLTPFVRHKATYRRSLMMLENAAKYLPNLMTKSGIMVGLGEQESEVKQTLKDLADHGVKIVTIGQYLRPSRRHIPVKSYVSPETFDYYRSVGESLGLFIYAGPFVRSSFNADSVFEAMRQRETSTSALLPNKD

SEQ ID NO: 26748 - DNA, 948 bp, Chromobacterium violaceum
  CDS (1)..(948): transl_table=11
atgaagccggacaaccaggccggggtgaagcacaagggcgcggccaagaccgcccgcatcccgatcaagatcgtgccgctggacgaaaagctgaaaaagccggagtggatccgcgccaagctgcccaatggccagcgtttccacgagatcaagcagatcctgcgcgagcagaagctgcacacggtctgcgaagaggccacctgcccgaacatcggcgagtgcttcagcaagggcaccgccacctttatgatcatgggcgacatctgcacccgccgctgcccgttctgcgacgtcggccacggccgtcccaatccgctggacgagaacgagccgagacacctggccgagagcgtggccgcgatgcgcctgaagtacgtggtggtcacctcggtggaccgcgacgacctgcgcgacggcggcgcccaacacttcgcagactgcatcaacgccgtgcgcgaaatgtcgccggcgacccagatcgagaccctggtgcccgacttccgcggccggctggacatcgccgtcgacatcctgacccagacgccgccggacgtgatgaaccacaacctggaaaccgtgccgcgcctgtacaagcaggcgcgcccgggcgccgactacgcgcactcgctgcagctcctcaaggactacaaggcgaagaatccgaacgtgcgcaccaagtccggcctgatggtgggcttgggcgagaccgacgaggaaatcctggaagtgatgcgcgacctgcgcgcgcacaacgtggacatgctgaccataggccagtacctgcagccgtccgacggccacctgccggtgctgcgctacgtgcatcccgacgtattcaagatgttcgaggaaaaagcctatgaaatgggcttcgtccatgccgcggtcggcgcgatggtgcgctccagctaccatgccgacgtgcaggcgcacgaagccggcgtttaa

SEQ ID NO: 26749 - protein, 315 aa, Chromobacterium violaceum
MKPDNQAGVKHKGAAKTARIPIKIVPLDEKLKKPEWIRAKLPNGQRFHEIKQILREQKLHTVCEEATCPNIGECFSKGTATFMIMGDICTRRCPFCDVGHGRPNPLDENEPRHLAESVAAMRLKYVVVTSVDRDDLRDGGAQHFADCINAVREMSPATQIETLVPDFRGRLDIAVDILTQTPPDVMNHNLETVPRLYKQARPGADYAHSLQLLKDYKAKNPNVRTKSGLMVGLGETDEEILEVMRDLRAHNVDMLTIGQYLQPSDGHLPVLRYVHPDVFKMFEEKAYEMGFVHAAVGAMVRSSYHADVQAHEAGV

SEQ ID NO: 26750 - DNA, 1050 bp, Corynebacterium diphtheriae
  CDS (1)..(1050)
atgactaaagcacccgaaggacgcagaatgctcagagttgaggcgcgcaactcgcagacccccatcgagagcaaaccacgttggatccgcaccgctgttaaaaccggccctgaatatcaggacatgaaaaagaaagtgtcgggtgcaagcctgcacaccgtatgccaagaagccggctgccctaatatccacgaatgctgggagtcgcgtgaggctaccttcttgattggtggcgctaactgctcgcgccgttgcgatttctgccagattaattctgctaagcccgaaccactcgatcgcgacgagccacgtcgcgttgcagaatcagtacgcgaaatgcagctgaattactcgaccatcactggtgtgacccgtgacgatcttgaagatgaaggcgcttggctatatgcagaagttgttcgcaagattcatgagctcaatccccacaccggcgtagaaaacctcacccctgatttctccggcaagcctgacttgttgcaagaggttttcgaggctcgccccgaagtttttgctcacaacctcgaaacggttcctcgcatcttcaagcggatccgccccgctttccgttacgagcgctccttagacgtgatccgccaagcccgcgattttggattggttaccaaatccaacctgatcttgggcatgggagaaaccgtcgacgaaatccgtgatgccttggttgacctgcactcggcaggttgtgacatcatcacgattacccaatatcttcgtcccggcccgatgtaccatcccatcgatcgttgggtaaaacctgaggaatttatcgatcacgctgattttgcgcgtgaacttggatttggtgctgttatgtcggggccattggtacgttcttcttatcgtgccggaaagctttatgccgaggctctcgcggctcgcggtgagtccttgccagaaaacttggctcatttggccacgactgccgatggcagtactgcgcaagaagcaaataccttgttggaaaagtacggtccttcccaagacacccctgtagtgtcgtcgaaggcttaa

SEQ ID NO: 26751 - protein, 349 aa, Corynebacterium diphtheriae
MTKAPEGRRMLRVEARNSQTPIESKPRWIRTAVKTGPEYQDMKKKVSGASLHTVCQEAGCPNIHECWESREATFLIGGANCSRRCDFCQINSAKPEPLDRDEPRRVAESVREMQLNYSTITGVTRDDLEDEGAWLYAEVVRKIHELNPHTGVENLTPDFSGKPDLLQEVFEARPEVFAHNLETVPRIFKRIRPAFRYERSLDVIRQARDFGLVTKSNLILGMGETVDEIRDALVDLHSAGCDIITITQYLRPGPMYHPIDRWVKPEEFIDHADFARELGFGAVMSGPLVRSSYRAGKLYAEALAARGESLPENLAHLATTADGSTAQEANTLLEKYGPSQDTPVVSSKA

SEQ ID NO: 26752 - DNA, 1047 bp, Corynebacterium efficiens
  CDS (1)..(1047): transl_table=11
gtgactatcgcacctgaggggcgtcgtatgctccgcgtcgaggcccggaactcccagaccccgatcgagaccaagccccggtggatcagaaaccaggtcaagaacggccctgagtacaaggacatgaaggagcgcgtcgcaggtgcctccctccacaccgtgtgtcaggaggccggttgccccaacatccacgagtgctgggaatcccgcgaggccaccttcctcatcggtggggccaactgctcacgtcgttgtgatttctgcatgatcaactcggctcgtccggaacccctcgatcgtggtgagcccctccgtgtcgcggagtcggtgcgcgagatgcgtctgaactactccaccatcaccggtgtgacccgtgatgatctcccggatgagggtgcctggctctattccgaggtggtccgcaagatccacgagctcaaccccaacaccggtgtggagaatctggttccggatttctccggcaagagggatctcctgcaggaggtcttcgaatcccgtccggaggtcttcgcccacaacctggagaccgtcccccgtatcttcaaacggatccgcccggcgttccgctacgaccgttccctggatgtcatccgtcaggcccgggacttcggtctggtcaccaagtccaacctgatcctgggcatgggtgagacccgtgaggagatctccgaggctctccgcgatctgcactccgccggcaccgacatcatcaccatcacccagtacctgcgtcccggaccgctcttccaccccattgagcgttgggtgaagccggaggagttcctcgagctctccgatgaggcctatgagatcggttttgcagcggtcatgtccggtcccctggtgcgctcgtcctaccgtgccggcaagctctacgcccaggcactgaagttccgcggtgaggagctgcccgccaacctctcccacctggctgagaccaccgagggcccgaccacgcaggaggcttcctcgctgctggagcgctacggtgcctccgaggatgcgcccgtgatcccccgcggttag

SEQ ID NO: 26753 - protein, 348 aa, Corynebacterium efficiens
MTIAPEGRRMLRVEARNSQTPIETKPRWIRNQVKNGPEYKDMKERVAGASLHTVCQEAGCPNIHECWESREATFLIGGANCSRRCDFCMINSARPEPLDRGEPLRVAESVREMRLNYSTITGVTRDDLPDEGAWLYSEVVRKIHELNPNTGVENLVPDFSGKRDLLQEVFESRPEVFAHNLETVPRIFKRIRPAFRYDRSLDVIRQARDFGLVTKSNLILGMGETREEISEALRDLHSAGTDIITITQYLRPGPLFHPIERWVKPEEFLELSDEAYEIGFAAVMSGPLVRSSYRAGKLYAQALKFRGEELPANLSHLAETTEGPTTQEASSLLERYGASEDAPVIPRG

SEQ ID NO: 26754 - DNA, 1047 bp, Corynebacterium glutamicum
  CDS (1)..(1047): transl_table=11
gtgactatcgcacctgaaggacgacgactgctacgcgtcgaagctcgaaactcagaaaccccgattgagacgaagcctcgatggattagaaaccaggtcaaaaacggacctgagtatcaggatatgaaggaacgtgtcgctggcgcatcactacacactgtgtgtcaggaggctggctgtcctaatatccatgagtgttgggaatcccgtgaggcaaccttcctcattggtggcgccaactgctctcgccgctgtgatttctgcatgatcaactcggctcgccctgagccactcgaccgcggtgagccactgcgtgtcgctgagtctgttcgtgagatgcagctgaattactccaccatcaccggtgttacccgtgatgatctggatgatgaaggcgcatggctgtactcagaagtggttcgtaagatccacgagctgaacccacacaccggtgtggaaaacctggtgcctgatttctccggcaagaaggatctgctgcaggaagtttttgaatcccgcccagaggttttcgctcacaacgtggaaactgtgccacgtattttcaagcgcattcgcccagcattccgctacgagcgttcacttgatgtgatccgtcaggctcgcgatttcggtctggtgaccaagtccaacctgattttgggcatgggtgaaaccaaggaagaaatcaccgaggcgctgcaggatctgcacgacgctggctgtgacatcatcaccatcacccagtacctgcgtcctggtcctttgttccaccccatcgagcgttgggtgaagcctgaggagttcctcgagcacgctgatgctgcaaaggaaatgggcttcgctgctgttatgtccggcccattggttcgttcctcttaccgtgcaggccgtctgtacgcgcaggccatggagttccgtggcgaggaaatcccagcacacctcgcgcacctgaaggatacttccggaggatccaccgcccaggaagcatctacacttctggagcgttacggtgcttccgaagacaccccagtggtgtccttcaactaa

SEQ ID NO: 26755 - protein, 348 aa, Corynebacterium glutamicum
MTIAPEGRRLLRVEARNSETPIETKPRWIRNQVKNGPEYQDMKERVAGASLHTVCQEAGCPNIHECWESREATFLIGGANCSRRCDFCMINSARPEPLDRGEPLRVAESVREMQLNYSTITGVTRDDLDDEGAWLYSEVVRKIHELNPHTGVENLVPDFSGKKDLLQEVFESRPEVFAHNVETVPRIFKRIRPAFRYERSLDVIRQARDFGLVTKSNLILGMGETKEEITEALQDLHDAGCDIITITQYLRPGPLFHPIERWVKPEEFLEHADAAKEMGFAAVMSGPLVRSSYRAGRLYAQAMEFRGEEIPAHLAHLKDTSGGSTAQEASTLLERYGASEDTPVVSFN

SEQ ID NO: 26756 - DNA, 948 bp, Coxiella burnetii
  CDS (1)..(948): transl_table=11
atgaccacctacgatccttctcagaaaagcttggggaaagagaaactgtcacgaattcccgtcaaaattgaagccactcacacgccccttcgcaaacccgattggattcgtattcgcttatcgactgatagtaaagtcagccaattaaaaaaattgctccgggaaaaccacttagtcaccgtctgtgaagaggcctcttgccctaatttaaatgaatgctttgggcatggcaccgctacctttatgatcatgggcgataaatgtacccgtcgatgcagcttttgtgacgtcggccacggccgccctgatcccctcgatccagaagaaccggttaatctcgctaacactgtaagtatcatgtcgttaaggtatgtcgtcatcacttcagtggaccgtgacgatttacgagatggaggcgcgcagcattatgcgcaatgcattaacgccgtgcgagaaaaaaacccaggcattaaagttgaagtattggttcctgattttcgaggacgcatggaaaaagccctcgatcaactcgctcagggcctgcccgacgtttttaatcataacattgaaacggcgccccgtttatataaacaagcgcgtcccggtgctgattatccatggtctttagcgctgttacagacgttcaaaaaacgttttcctggcattcccactaaatcggggatgatgttgggcttgggcgaaacgcgagaggaggtggaaatggtgatgcgcgatctgcgccaacacgaagttgataggctaaccctcgggcaatatttgcagccgacgcgttaccacatgccggtggatcgttacgtaaccccgcaagaatttcaggagttaggcgaactcgctaaaaaactaggattcagcaatgtggccagtggtccgttagtgcgctcttcctaccacgcggatctgcaagcccaaggggaacgcgtttcctaa

SEQ ID NO: 26757 - protein, 315 aa, Coxiella burnetii
MTTYDPSQKSLGKEKLSRIPVKIEATHTPLRKPDWIRIRLSTDSKVSQLKKLLRENHLVTVCEEASCPNLNECFGHGTATFMIMGDKCTRRCSFCDVGHGRPDPLDPEEPVNLANTVSIMSLRYVVITSVDRDDLRDGGAQHYAQCINAVREKNPGIKVEVLVPDFRGRMEKALDQLAQGLPDVFNHNIETAPRLYKQARPGADYPWSLALLQTFKKRFPGIPTKSGMMLGLGETREEVEMVMRDLRQHEVDRLTLGQYLQPTRYHMPVDRYVTPQEFQELGELAKKLGFSNVASGPLVRSSYHADLQAQGERVS

SEQ ID NO: 26758 - DNA, 996 bp, Deinococcus radiodurans
  CDS (1)..(996): transl_table=11
atgacccagcaagacccgtccaccaaggaacctaaattcatcaaaaacggcatctaccgcaaggacagcgtgccggtgcgcgagaagaaacctgagtggctgaaagtcaccatccccaccgggcaggtgtttaccgaagtccgcaaaatcgtgaaggagcaccgcctgcatacggtgtgcgaggaagcgatgtgccccaacatcggcgagtgctggtcgcgtgggacggcgacgttcatgctgatgggccacatctgcacccgcgcctgccgcttttgcgcggtggacactggcaacccgatgggcaaactggacctcgacgagccgcgcagcgtggccgactcggtgcggctgatggacctgaagtacgtggtgctgacctcggtggaccgcgatgacctgcccgacggcggcgcctaccacttcgccaagacggtgaaggccatcaaagaggtcaatccgcagacccgcgtggaagcgctgacgcccgacttcggcggcaacacggcctgcgtggacctcgtgctggacagcggcgtggatacctacgcccagaacctcgaaaccgtgcggcgcctgacccacccggtgcgcgacattcgcgcgagctacgaccgcaccctgagcgtgctggcccacgccaagcaggcccgccccgacgtgattaccaagacgagcctcatgctgggcctgggcgaaacccgcgaggaaatccgcgaggcgatggctgattgccgcgccgccggggtggacgtgctcaccttcgggcagtacctgcgccccaccatgcaccatctaccggtggaacgctacatttcgcccgccgagttcgacgaaatccgcgaagaaggcatgcaacttggtttcctggaagtcgtctccggtccgctggtgcgctcgtcgtacaaggctgagcagatcgtgatggaccggcccggcaacctgcccgagcacctgagccacttagacggcggcagcgaattgaccttgatttga

SEQ ID NO: 26759 - protein, 331 aa, Deinococcus radiodurans
MTQQDPSTKEPKFIKNGIYRKDSVPVREKKPEWLKVTIPTGQVFTEVRKIVKEHRLHTVCEEAMCPNIGECWSRGTATFMLMGHICTRACRFCAVDTGNPMGKLDLDEPRSVADSVRLMDLKYVVLTSVDRDDLPDGGAYHFAKTVKAIKEVNPQTRVEALTPDFGGNTACVDLVLDSGVDTYAQNLETVRRLTHPVRDIRASYDRTLSVLAHAKQARPDVITKTSLMLGLGETREEIREAMADCRAAGVDVLTFGQYLRPTMHHLPVERYISPAEFDEIREEGMQLGFLEVVSGPLVRSSYKAEQIVMDRPGNLPEHLSHLDGGSELTLI

SEQ ID NO: 26760 - DNA, 912 bp, Geobacter sulfurreducens
  CDS (1)..(912): transl_table=11
gtgaacatccaccgcaagccggaatggctccggaaaaaaatcaaccctgccgcccacggcgccatggatgagctgctgggagagttgcggctccacacggtctgccgggaggcgcgctgccccaatatcaccgagtgcttccgggaacgccaggcaacctttctgattctcggcgcggagtgcacccgcctctgctccttctgcaacgtcaccaagggagagccgctgccgcccgacccggacgagccggcacgggtggcccaggccgttgtccgcctgagtctggcccatgtggtgatcacgagccccacccgggacgatcttcccgacggcggagccggccactacgtcgccaccgtggcgaccatcggccgggttgcgcccgcaaccgtcgtggagcttctcatccccgacttcctcggtagtcgcgcggccctggcggatgtcgtggctgccgcgccacggatcatcgggcacaatgtggaaaccgttccccgtctctacgccattcgtgccggcgccgactacggccgttcgctggcggtgctccgcaccctgcgcgaactggcgccggggtgtgccaccaagtcggggctcatgctcggcctgggtgagacggaagaggaagtcctggcggtgatggccgacctgcggcgggtcgactgcacctacctcagcctcggccagtacctggctccgagccggttccaccaccccgtgcgggagttcgtcctccccgagacctttgaccggctgaaggaactggccgaaaagatgggattccgccacgtggagagtggcccctacgtccgcagttcctaccacgctgccggctacggcggcggaacgcgtacagatcaacccgtcgcatccggctgtctgtcggatcaggaaggagtatcagcacaatga

SEQ ID NO: 26761 - protein, 303 aa, Geobacter sulfurreducens
MNIHRKPEWLRKKINPAAHGAMDELLGELRLHTVCREARCPNITECFRERQATFLILGAECTRLCSFCNVTKGEPLPPDPDEPARVAQAVVRLSLAHVVITSPTRDDLPDGGAGHYVATVATIGRVAPATVVELLIPDFLGSRAALADVVAAAPRIIGHNVETVPRLYAIRAGADYGRSLAVLRTLRELAPGCATKSGLMLGLGETEEEVLAVMADLRRVDCTYLSLGQYLAPSRFHHPVREFVLPETFDRLKELAEKMGFRHVESGPYVRSSYHAAGYGGGTRTDQPVASGCLSDQEGVSAQ

SEQ ID NO: 26762 - DNA, 993 bp, Haemophilus ducreyi
  CDS (1)..(993): transl_table=11
atgacaacagcaatcggtaaaaaaacaactaaattagaaccatttaaaatggaacgcggtgtaaaatatcgtgatgcggcaaagacttcagtgattcaagtcaggaatattgacccagaccaagaattattgaaaaaacctgagtggatgaaaatcaagttaccgactaattcagcgaaaattgatagcattaaatatggtatgcgtcgccacgggttacattcagtttgtgaagaagcatcttgtccaaatttacatgaatgttttaatcatggtactgccacttttatgattatgggcgcaatttgtactcgtcgttgtccgttttgtgatgttgcgcatggtaagccattaccacttgatccctatgaaccgcgtaaagttgccgaaacagtgcaagatatgaaattaaaatacgtggtaattacgtcggtcgatcgtgatgatttggccgatcggggggcagcacattttgcggctacagtgcgagaaattaaagcattaaatcctgaatgcaaagtcgagattttagtcccggattttcgtggtcgagtagaacaagcggttgctattttgaaacaaaatccacccgatgtatttaatcataatttagaaaatgtgccacgtttatatcgcgaaattcgcccgggagcggattataaatggtcattagaattgcttaaaattttcaaacaagagttccctaatattcccactaaatcaggcttaatggttggattgggcgaaacaaacgaagaaattttagcggttatgcaagatttacgtgatcatggtgtgacgatgttgaccgttggtcaatatttacaaccaagccgtcatcacttaagagtagaacgttatgttccgcctgctgaatttgaaatgtttcgcagtgaagctgaaaaaatgggatttgaacacgctgcttgcggtccatttgttcgttcttcttatcatgcagatttacaagcgaaaggcgagctagttaaataa

SEQ ID NO: 26763 - protein, 330 aa, Haemophilus ducreyi
MTTAIGKKTTKLEPFKMERGVKYRDAAKTSVIQVRNIDPDQELLKKPEWMKIKLPTNSAKIDSIKYGMRRHGLHSVCEEASCPNLHECFNHGTATFMIMGAICTRRCPFCDVAHGKPLPLDPYEPRKVAETVQDMKLKYVVITSVDRDDLADRGAAHFAATVREIKALNPECKVEILVPDFRGRVEQAVAILKQNPPDVFNHNLENVPRLYREIRPGADYKWSLELLKIFKQEFPNIPTKSGLMVGLGETNEEILAVMQDLRDHGVTMLTVGQYLQPSRHHLRVERYVPPAEFEMFRSEAEKMGFEHAACGPFVRSSYHADLQAKGELVK

SEQ ID NO: 26764 - DNA, 963 bp, Haemophilus influenzae
  CDS (1)..(963): transl_table=11
atgtctacgcctttcaaaatggaacgcggtgtaaaatatcgcgatgcggcaaaaacctcaattattcccgtaaaaaatatcgatcctaatcaagatttattaaaaaaaccagaatggatgaaaattaaacttccagcaagttcagctaaaattgaaagcattaaaaatggaatgcgccgtcacggattacattctgtttgtgaggaagcatcttgtccaaatttacacgaatgttttaatcatggcacagccacttttatgattttaggtgcaatttgtacgcgccgttgcccattctgtgatgtggctcacggtaaaccattaccgccagatcctgaagagccacaaaaattggcagaaacgattcaagatatgaaacttaaatatgtggtaatcacatcggtggatcgtgatgacttgcctgatcgtggtgctggtcatttttctgaatgtgtaaaagctgtgcgcgagcttaatcctaacattaagattgaaattttagtgcctgattttcgtggtcgcattacacaggctttagagaaattaaaagataatccgccagatgtctttaaccataatttagaaaacgtaccgcgcttatataaagaaattcgtccaggtgcggattacgaatggtcacttaaattattgcgtgaattcaaagaaatattcccaaatatcccaaccaaatctggtttaatggttgggttaggcgaaaccaacgaggaaattttgcaagtgatgcaagatttacgtgataacggtgtgactatgctcacgttgggtcaatatcttcaacctagccgccatcatttgcctgttgcccgttatgtgccgccaactgaatttgatgaattccgtgataaagccaatgaaatgggctttgaacatgcggcttgtgggccatttgttcgttcttcttatcacgctgatttacaagccagtggcggattagtgaaataa

SEQ ID NO: 26765 - protein, 320 aa, Haemophilus influenzae
MSTPFKMERGVKYRDAAKTSIIPVKNIDPNQDLLKKPEWMKIKLPASSAKIESIKNGMRRHGLHSVCEEASCPNLHECFNHGTATFMILGAICTRRCPFCDVAHGKPLPPDPEEPQKLAETIQDMKLKYVVITSVDRDDLPDRGAGHFSECVKAVRELNPNIKIEILVPDFRGRITQALEKLKDNPPDVFNHNLENVPRLYKEIRPGADYEWSLKLLREFKEIFPNIPTKSGLMVGLGETNEEILQVMQDLRDNGVTMLTLGQYLQPSRHHLPVARYVPPTEFDEFRDKANEMGFEHAACGPFVRSSYHADLQASGGLVK

SEQ ID NO: 26766 - DNA, 936 bp, Halobacterium salinarium
  CDS (1)..(936): transl_table=11
atgagtagccgccggaagccggagtggctaaagatgcggccgccgtccggggagcggttcacggacatcaaggagacgctccgcgacaacgacctccacacggtctgcgaggaggcgtcgtgtcccaacatgggggagtgttggagcggccgtgacggccccggcacggcgacgttcatgctgatgggggatcgctgctcgcgtggctgcaacttctgtgacgtgaaaaccggcggcatggagcccctagatcccgatgagccggcgaacgtcgcggagtccgtggcggagatcgggctggactacgtggtgttgacgtccgtcgaccgcgacgacctcgacgaccagggggccggccacttcgcgcggacgatccgggagatcaaagagcgcgacccctcgatcctggtggaagtgctgattccggatttccagggcgagaaatcgctggttcagaagatcatcgacgcggggccggacgtgatcgcgcacaacatcgaaaccgtcgcgcgccggcaggtccccgtgcgggaccggcgcgcgggctacgagcagtccctgtcggtgctggagtacgtgacccgggagtcggacatctacaccaagacgagcatcatgctgggagtcggcgagtacgaccacgaggtctatcagacgcttggagacctccgggaggccggcgtggacgtggtgaccctggggcagtatctccagccgtcgcggtcacacctcgacgtcgcggactacgtccacccccagaagttcgagacgtggcagcgcgtggccgaatccgagttcgggttcctgtactgcgcgtcgggaccgatggtgcggtcctcgtacaaggccggcgagctgttcgtggacgccgtgctgcgggagggcaaaagcgtccaggaggcccgccggaacgcgcggcgtgcggcgtcggagtga

SEQ ID NO: 26767 - protein, 311 aa, Halobacterium salinarium
MSSRRKPEWLKMRPPSGERFTDIKETLRDNDLHTVCEEASCPNMGECWSGRDGPGTATFMLMGDRCSRGCNFCDVKTGGMEPLDPDEPANVAESVAEIGLDYVVLTSVDRDDLDDQGAGHFARTIREIKERDPSILVEVLIPDFQGEKSLVQKIIDAGPDVIAHNIETVARRQVPVRDRRAGYEQSLSVLEYVTRESDIYTKTSIMLGVGEYDHEVYQTLGDLREAGVDVVTLGQYLQPSRSHLDVADYVHPQKFETWQRVAESEFGFLYCASGPMVRSSYKAGELFVDAVLREGKSVQEARRNARRAASE

SEQ ID NO: 26768 - DNA, 990 bp, Leifsonia xyli subsp
  CDS (1)..(990): transl_table=11
gtgagcgccgaaccggagggccgccggatgctgcggctcgaggtccggaacgcgcagacaccgatcgagcgcaagccggagtggatcaagacccgcgccacaatggggcccgaataccggcagctgcattccctggtgaagtccgaaggtctgcacacggtctgccaggaggctggctgcccgaacatctacgagtgctgggaggaccgggaggcgaccttcctcatcggcgggtcacagtgtacgcgacgctgcgatttctgccagatcgacacggggaagccggccgagtttgaccgcgacgaaccgcggcgggtcgccgagtcggtcgcgcggatggggctgcgctattcgacggtcacaggggtcgcgcgggacgacctggaggacgagggcgcgtggctgtacgcggagacgatccgggagatccaccggcagagccccggcaccggggtcgaaatcctggtgcccgacttctcgggagaccccgaactcctcggcgaggtgttcggagcgcgaccagaggtcttcgcacacaacgtcgagaccgtgccgcgcatcttcaagcgcatccgcccggctttccgctacgaacgttccctcgacgtgatcgcgcaggggcgcgccgccgggctcatcacgaagtccaacctgattctcgggatgggcgaggaacgccaggagatcagccaggcgctgcaggatctgcacgacgcgggcaccgacatcatcacaatcacgcagtacctgcgcccgagcccgcggcacctcccggtcgcacgctgggttcgtcccgacgagttcgtggagctgagggacgaggccgaggcgatcggcttcctgggggtgctggccgggccgctcgtgcgctcctcgtaccgcgcgggacgcctctgggcgcagtcgatgcgcgcgaagggacgcactgtcccggaggagctgcggcacctggcggatgcgtcgctggggttcgctcaggcggtgtcctga

SEQ ID NO: 26769 - protein, 329 aa, Leifsonia xyli subsp
MSAEPEGRRMLRLEVRNAQTPIERKPEWIKTRATMGPEYRQLHSLVKSEGLHTVCQEAGCPNIYECWEDREATFLIGGSQCTRRCDFCQIDTGKPAEFDRDEPRRVAESVARMGLRYSTVTGVARDDLEDEGAWLYAETIREIHRQSPGTGVEILVPDFSGDPELLGEVFGARPEVFAHNVETVPRIFKRIRPAFRYERSLDVIAQGRAAGLITKSNLILGMGEERQEISQALQDLHDAGTDIITITQYLRPSPRHLPVARWVRPDEFVELRDEAEAIGFLGVLAGPLVRSSYRAGRLWAQSMRAKGRTVPEELRHLADASLGFAQAVS

SEQ ID NO: 26770 - DNA, 906 bp, Leptospira interrogans serogroup Icterohaemorrhagiae serovar
  CDS (1)..(906): transl_table=11
atgaatcctcttaaaaaaaaacctcgtactcattctcttcaaaatgctcctgaaaaaccagattggctcaaagtaaaactcgcctttcctgatccaaaaaataaccctgtcgcaattgtaagaaattctctagaagaaaaaaaactcaatacagtttgcgaaagcgcttcttgccctaacctaaatcactgctggtccagaaaaacagcgacttatatgttaggtggagatatttgtacaagacgttgttcctattgtgacgtagcttctggaaaaccttttcctctggatccagaagaacctaaaaggatagcagaatcttcgatcgctttaggtctcagacacgtagtcattacctcggttaatagagacgatcttgaagacggaggcgcagctcattttgcaaaaaccgtaaaagaaatccgtaaaggacttccagattgtaaaatagaacttttgattccagatctgaaagtaaaacaagaggctttagaaattatttttgaatgtaatcctgatatattcaatcataacttagaaacggtaaaaagactttttccagaagtggctcctcaaaaaagatatgaacgttctttagacgttttgaaaattgcttctgcaagaggatttctgacaaaaagtggtttaattttgggtatgggagaaactttagaagaagtaaaagaatgcatgcaagatcttgcaagtgttggagtttcccttttgacactgggacagtatttacaaccgacttcgactcatcttcccgtaaaagaatacgtagttccccaagtatttaaggatttacgaatatacggaaagtccatcggttttaagggagttttttcaggaccccttgtaagaagttcttatcacgcggacgaacaaatctcatggaacccgtag

SEQ ID NO: 26771 - protein, 301 aa, Leptospira interrogans serogroup Icterohaemorrhagiae serovar
MNPLKKKPRTHSLQNAPEKPDWLKVKLAFPDPKNNPVAIVRNSLEEKKLNTVCESASCPNLNHCWSRKTATYMLGGDICTRRCSYCDVASGKPFPLDPEEPKRIAESSIALGLRHVVITSVNRDDLEDGGAAHFAKTVKEIRKGLPDCKIELLIPDLKVKQEALEIIFECNPDIFNHNLETVKRLFPEVAPQKRYERSLDVLKIASARGFLTKSGLILGMGETLEEVKECMQDLASVGVSLLTLGQYLQPTSTHLPVKEYVVPQVFKDLRIYGKSIGFKGVFSGPLVRSSYHADEQISWNP

SEQ ID NO: 26772 - DNA, 906 bp, Leptospira interrogans
  CDS (1)..(906): transl_table=11
atgaatcctcttaaaaaaaaacctcgtactcattctcttcaaaatgctcctgaaaaaccagattggctcaaagtaaaactcgcctttcctgatccaaaaaataaccctgtcgcaattgtaagaaattccctagaagaaaaaaaactcaatacagtttgcgaaagcgcttcttgccctaacctaaatcactgctggtccagaaaaacagcgacttatatgttaggtggagatatttgtacaagacgttgttcctattgtgacgtagcttctggaaaaccttttcctctggatccagaagaacctaaaaggatagcagaatcttcgatcgctttagatctcagacacgtagtcattacctcggttaatagagacgatcttgaagacggaggcgcagctcattttgcaaaaaccgtaaaagaaatccgtaaaggacttccagattgtaaaatagaacttttgattccagatctgaaagtaaaacaagaggctttagaaattatttttgaatgtaatcctgatatattcaatcataacttagaaacggtaaaaagactttttccagaagtggctcctcaaaaaagatatgaacgttctttagacgttttgaaaattgcttctgcaagagggtttctgacaaaaagtggtttaattttgggtatgggagaaactttagaagaagtaaaagaatgcatgcaagatcttgcaagtgttggagtttcccttttgacactgggacagtatttacaaccgacttcgactcatcttcctgtaaaagaatacgtagttccccaagtatttaaggatttacgaatatacggaaagtccatcggttttaagggagttttttcagggccccttgtaagaagttcttatcacgcggacgaacaaatctcatggaacccgtag

SEQ ID NO: 26773 - protein, 301 aa, Leptospira interrogans
MNPLKKKPRTHSLQNAPEKPDWLKVKLAFPDPKNNPVAIVRNSLEEKKLNTVCESASCPNLNHCWSRKTATYMLGGDICTRRCSYCDVASGKPFPLDPEEPKRIAESSIALDLRHVVITSVNRDDLEDGGAAHFAKTVKEIRKGLPDCKIELLIPDLKVKQEALEIIFECNPDIFNHNLETVKRLFPEVAPQKRYERSLDVLKIASARGFLTKSGLILGMGETLEEVKECMQDLASVGVSLLTLGQYLQPTSTHLPVKEYVVPQVFKDLRIYGKSIGFKGVFSGPLVRSSYHADEQISWNP

SEQ ID NO: 26774 - DNA, 936 bp, Mycobacterium bovis
  CDS (1)..(936): transl_table=11
atgagtgtcgctgccgagggccggcgcctgttacgcctggaggtgcgcaacgcgcagaccccaatcgagcgcaaaccgccgtggatcaagacacgagcccgcatcgggccggagtacaccgagctgaagaacctggtccgccgcgaggggctgcacacggtctgcgaggaggccggctgccccaacatcttcgaatgctgggaggaccgagaagccaccttcctgatcggcggtgaccagtgcacccgccgatgcgatttctgccagatcgacaccggaaagcccgccgagctggaccgcgacgagccacgccgagtcgccgacagcgtgcgcacgatgggcctgcgctatgccaccgtcaccggcgtggctcgcgacgacctgcctgacggcggggcctggctgtacgccgcgaccgtgcgcgccatcaaggaactcaatccgtcgaccggcgtcgaactgctgattcccgacttcaacggcgaaccaacccggctggccgaggtcttcgagtccggcccggaagtcctggcacacaatgtcgaaaccgtgccccgtatcttcaagcggatccggccggcgttcacgtaccggcgcagcctgggtgtgcttaccgctgcgcgcgacgccggcctggtcaccaagagcaacctcatcctcggcctgggcgaaacctccgacgaggtgcgcaccgccctgggcgatctgcgcgacgccggctgcgacatcgttaccatcacccaatacctgcggccgtcggcgcgccaccatccggtcgagcgctgggtgaagcccgaggagttcgtccagttcgcgcgattcgccgaagggctgggcttcgccggggtattggcgggacccctggttaggtcgtcatatcgggcgggccggctctacgaacaggcacgtaactcacgggccttggcatcccgctag

SEQ ID NO: 26775 - protein, 311 aa, Mycobacterium bovis
MSVAAEGRRLLRLEVRNAQTPIERKPPWIKTRARIGPEYTELKNLVRREGLHTVCEEAGCPNIFECWEDREATFLIGGDQCTRRCDFCQIDTGKPAELDRDEPRRVADSVRTMGLRYATVTGVARDDLPDGGAWLYAATVRAIKELNPSTGVELLIPDFNGEPTRLAEVFESGPEVLAHNVETVPRIFKRIRPAFTYRRSLGVLTAARDAGLVTKSNLILGLGETSDEVRTALGDLRDAGCDIVTITQYLRPSARHHPVERWVKPEEFVQFARFAEGLGFAGVLAGPLVRSSYRAGRLYEQARNSRALASR

SEQ ID NO: 26776 - DNA, 945 bp, Mycobacterium leprae
  CDS (1)..(945): transl_table=11
gtgactgttgcgcccgaagactgccgcttactgcgattagaagtgcgcaacgcacagaccccgatcgagcgcaagccgccatggatcaaaacccgggcccgcatgggaccagagtacaccgcgctaaaaaacctggtccgccgtgttgctctgcacacggtctgcgaagaggccggttgccccaacatcttcgaatgctgggaagatcgggaagccacctttctgatcggtggtgatcagtgcacccgccggtgcgacttctgccagatcgacaccgggaagccggctgcgttggaccgcgacgagccccgacgggtcgccgagagcgtgcaaaccatggggctgcggtataccaccgtcactggggtcgcccgcgacgacttgcccgacggcggtgcctggctgtacgccacaaccgtgcgagccattaaagagctcaatccgtcgaccggggtcgaactgttgattccggacttcaacgggcagcccgcgcgactggcggaagtcttcgactcacgcccacaagtgttggcgcacaacgtcgaaaccgtgccacgcatctttaaacggattcggcctgctttcacctaccaacgcagcctggacgtgctcactgcagcgcgcgaggccggcctggtcaccaaaagcaacctgatcctcggcctaggcgaaaccgctgatgaggtgcgcactgccctggccgatttgcgcaaaaccggctgcgacatcgtcaccatcacccaatatctgcgtccgtcgatgcgccaccacccggtcgagcgctgggtcaggcctgaggagttcgtcgagtacacgcaatacgccgaaggtttgggcttctcgggtgtgctgggcgggccgctggtgcggtcatcgtatcgcgccggtcggctctacgagcaggctgcaggcacccggaccgtcggtacctcggtatcccgttaa

SEQ ID NO: 26777 - protein, 314 aa, Mycobacterium leprae
MTVAPEDCRLLRLEVRNAQTPIERKPPWIKTRARMGPEYTALKNLVRRVALHTVCEEAGCPNIFECWEDREATFLIGGDQCTRRCDFCQIDTGKPAALDRDEPRRVAESVQTMGLRYTTVTGVARDDLPDGGAWLYATTVRAIKELNPSTGVELLIPDFNGQPARLAEVFDSRPQVLAHNVETVPRIFKRIRPAFTYQRSLDVLTAAREAGLVTKSNLILGLGETADEVRTALADLRKTGCDIVTITQYLRPSMRHHPVERWVRPEEFVEYTQYAEGLGFSGVLGGPLVRSSYRAGRLYEQAAGTRTVGTSVSR

SEQ ID NO: 26778 - DNA, 924 bp, Mycobacterium paratuberculosis
  CDS (1)..(924): transl_table=11
gtgactgtcgcacccgagggacgcaaactgctgcgcctggaagtgcgcaacgccgagaccccgatcgagcgcaaaccgccgtggatccgggtgcgggcccggatggggccggaatacaccgagctcaagagcctggtccggcgcgaggggctgcacaccgtctgcgaagaggccggctgccccaacatcttcgaatgctgggaggaccgcgaggccaccttcctgatcggcggcgaccagtgcacccgtcgctgcgacttctgccagatcgacaccggcaagccagccgagctggaccgcgacgagccccgccgggtggccgacagcgtgcgcacgatggggctgcgctacgccacggtcaccggggtggcccgcgacgacctgcccgacggcggcgcctggctgtacgccgagacggtgcgcgccatcaaggagctcaacccgtcgaccggtgtcgagctgttgatccccgacttcaacggccggcccgaccggctcgccgaggtgttcgggtcgcgcccggaagtgttggcgcacaacgtcgaaacggtgccgcggatcttcaaacggatccgcccggccttcacctaccggcgcagcctggacgtgctgaccgcggcccgcgaggccgggctggtcaccaagagcaacctcatcctcggcttgggcgaaacccccgacgaggtgcgcaccgcgctggccgacctgcgcggcgccggctgcgacatcatcaccatcacccagtacctgcgcccgtcggcccgccaccacccggtcgagcgctgggtgaagccggaggaattcgtcgagttcgcgcggcatgccgaagagctgggcttctccggggtgctggccgggccgctggtgcgctcgtcgtaccgcgccgggcggctctaccggcagaccgcccgcgcccgcgcctag

SEQ ID NO: 26779 - protein, 307 aa, Mycobacterium paratuberculosis
MTVAPEGRKLLRLEVRNAETPIERKPPWIRVRARMGPEYTELKSLVRREGLHTVCEEAGCPNIFECWEDREATFLIGGDQCTRRCDFCQIDTGKPAELDRDEPRRVADSVRTMGLRYATVTGVARDDLPDGGAWLYAETVRAIKELNPSTGVELLIPDFNGRPDRLAEVFGSRPEVLAHNVETVPRIFKRIRPAFTYRRSLDVLTAAREAGLVTKSNLILGLGETPDEVRTALADLRGAGCDIITITQYLRPSARHHPVERWVKPEEFVEFARHAEELGFSGVLAGPLVRSSYRAGRLYRQTARARA

SEQ ID NO: 26780 - DNA, 984 bp, Neisseria meningitidis serogroup A
  CDS (1)..(984): transl_table=11
atgagtgaaatcaaaaccgacgaccccaaacgcggcatcaaactcagaggcgcggacaaaaccgcccgcatccccatcaaagtcgtcccccttcaggaaaaattaaaaaagcccgaatggatacgcgccaaacttccatcgcgcaaattctttgaaatcaaagacattttgcgcgaacaaaaaatgcacaccgtttgcgaggaagcctcctgccccaacatcggcgaatgcttcagcaaaggcacggcgaccttcatgattatgggcgacatctgcacccgccgctgcccgttctgcgacgtgggacacggccgcccgaatatgctcgaccccgacgaaccgaaaaacctcgccgaatccgtcaaagccatgaacctgcgttacgtcgtcatcacctccgtcgaccgcgacgacctgcgcgacggcggcgcacagcatttcgccgactgcatcaaagccatccgcgaaaccagcccgaacaccaaaatcgaaatcctcgtccccgacttccgaggacgcttggacatcgcactcaaaatccttgccgaaaccccgcccgacgtgatgaaccacaacctagaaacccatccgagcctgtacagaaaagcccgtcccggtgccaattatcaacattctttagacttattaaaacgttataaagaaatgatgccgcacatcccgaccaaatccggcatcatggtcggcttgggcgaaacagacgaagacgtgcgtgaaattatgcgcgatatgcgggcgcacaatatcgaaatgattaccatcggacagtacctccagccttcagacggacacctgcccgtcctgcgctacgttacgcccgagcagttcaaaatctttgaaaaagaagcatacgaactgggcttcagcaatgccgccatcggcgcgatggtacgttccagctaccacgccgacgaacaggctgccgaagccttacgcgaaagccacggcggttgcgggcatcattaa

SEQ ID NO: 26781 - protein, 327 aa, Neisseria meningitidis serogroup A
MSEIKTDDPKRGIKLRGADKTARIPIKVVPLQEKLKKPEWIRAKLPSRKFFEIKDILREQKMHTVCEEASCPNIGECFSKGTATFMIMGDICTRRCPFCDVGHGRPNMLDPDEPKNLAESVKAMNLRYVVITSVDRDDLRDGGAQHFADCIKAIRETSPNTKIEILVPDFRGRLDIALKILAETPPDVMNHNLETHPSLYRKARPGANYQHSLDLLKRYKEMMPHIPTKSGIMVGLGETDEDVREIMRDMRAHNIEMITIGQYLQPSDGHLPVLRYVTPEQFKIFEKEAYELGFSNAAIGAMVRSSYHADEQAAEALRESHGGCGHH

SEQ ID NO: 26782 - DNA, 984 bp, Neisseria meningitidis serogroup B
  CDS (1)..(984): transl_table=11
atgagtgaaatcaaaaccgacgaccccaaacgcggcatcaaactcagaggcgcggacaaaaccgcgcgcatccccatcaaagtcgtcccccttcaggaaaaactgaaaaagcccgaatggatacgcgccaaactcccatcgcgcaaattctttgaaatcaaagacattttgcgcgaacaaaagatgcacaccgtttgcgaggaagcctcctgccccaacatcggcgaatgcttcagcaaaggcacggcgaccttcatgattatgggtgacatctgcacccgccgctgcccgttctgcgacgtgggacacggtcggcccaatatgctcgaccccgacgaaccgagaaacctcgccgaatccgtcaaagccatgaacctgcgttacgtcgtcatcacctccgtcgaccgcgacgacctgcgcgacggcggcgcacagcatttcgccgactgcatcaaagccatccgcgaaaccagcccgaacaccaaaatcgaaatcctcgtccccgacttccgaggacgcttggacatcgcactcaaaatccttgccgaaaccccgcccgacgtgatgaaccacaacctagaaacccatccgagcctgtacagaaaagcccgtcccggtgccaattatcaacattctttagacttattaaaacgttataaagaaatgatgccgcacatcccgaccaaatccggcatcatggtcggcttgggcgaaacagacgaagacgtgcgtgaaattatgcgcgatatgcgggcgcacaatatcgaaatgattaccatcggacagtacctccagccttcagacggacacctgcccgtcctgcgctacgttacgcccgagcagttcaaaatctttgaaaaagaagcatacgaactgggcttcagcaatgccgccatcggcgcgatggtacgttccagctaccacgccgacgaacaggcggcggaagccttgagggaaagccacggcggttgcgggcatcattaa

SEQ ID NO: 26783 - protein, 327 aa, Neisseria meningitidis serogroup B
MSEIKTDDPKRGIKLRGADKTARIPIKVVPLQEKLKKPEWIRAKLPSRKFFEIKDILREQKMHTVCEEASCPNIGECFSKGTATFMIMGDICTRRCPFCDVGHGRPNMLDPDEPRNLAESVKAMNLRYVVITSVDRDDLRDGGAQHFADCIKAIRETSPNTKIEILVPDFRGRLDIALKILAETPPDVMNHNLETHPSLYRKARPGANYQHSLDLLKRYKEMMPHIPTKSGIMVGLGETDEDVREIMRDMRAHNIEMITIGQYLQPSDGHLPVLRYVTPEQFKIFEKEAYELGFSNAAIGAMVRSSYHADEQAAEALRESHGGCGHH

SEQ ID NO: 26784 - DNA, 945 bp, Nitrosomonas europaea
  CDS (1)..(945): transl_table=11
atggccgctgacacccatcaacgaggtgccgccaaaacggcacgcaacccggtcaaaatcgatctggaacaatccggacagttattgcgcaagccttcctggattcgtgtacgttcatccaacagtcagaaatatctggaagtaaaacgtctgctgcgtgaaaacagattacataccgtttgtgaggaagcctcctgcccgaatatcggggaatgcttcggtcgtggcacagcaacattcatgatactcggtgatctgtgcaccagacgctgcccgttttgtgatgtggcacacggccggcctcatgcgcccgatcctgatgagccgatgcacctggccaattccattgcggtactgaagctcaattatgtcgtcattaccagcgtggaccgtgatgacctcagagatggcggtgcgcaacactttgcagactgtatccgcgcaattcgtacccagtctccacaaacacggatcgagattctcgtccccgattttcgcggcagactggaagtggcgctggaaaaactgtctgcctgcccgcctgacgtgatgaaccataatctggagaccgtaccacgcctgtataagcaatgccggccgggcgcagattacatgcattcattacagctgctcaaggatttcaaggcagctttccctcatatcccgaccaagtccggtctgatgcttggactgggagaaaccgatgaagaaatcatcgaggtcatgcgcgatttacgcgcacatcaggttgatatgctgactgttggccaatatctgcagcccagcaaaggacaccaccccgtcatgcgttacgtttcacccgaagatttcaaaaccttcgagcgcatcgctacaaatctgggattcagccatgctgcttgcggtccgatggtgcgttcgagttaccatgctgatcagcaggcgcacgaagctggcattgaataa

SEQ ID NO: 26785 - protein, 314 aa, Nitrosomonas europaea
MAADTHQRGAAKTARNPVKIDLEQSGQLLRKPSWIRVRSSNSQKYLEVKRLLRENRLHTVCEEASCPNIGECFGRGTATFMILGDLCTRRCPFCDVAHGRPHAPDPDEPMHLANSIAVLKLNYVVITSVDRDDLRDGGAQHFADCIRAIRTQSPQTRIEILVPDFRGRLEVALEKLSACPPDVMNHNLETVPRLYKQCRPGADYMHSLQLLKDFKAAFPHIPTKSGLMLGLGETDEEIIEVMRDLRAHQVDMLTVGQYLQPSKGHHPVMRYVSPEDFKTFERIATNLGFSHAACGPMVRSSYHADQQAHEAGIE

SEQ ID NO: 26786 - DNA, 945 bp, Oceanobacillus iheyensis
  CDS (1)..(945): transl_table=11
atgtctaatcaacaaacgcatgtacgtaagccagattggttaaaaacaagaattaatacgaacaaatcgtatcgaaatttaaaaaagttgatgcgtgataatcggttaaacacggtttgtgaagaagcgcgctgtccaaacttacatgaatgctggagcgaacgaaaaacagctacttttatgattttaggagatacatgtacaagaggttgccggttctgtgcagtaaaaacagggttaccaaatgaactagattggggagaaccagaacgtgtggctgattctgtcaccgtaatggggttaaaacatgtggtagtaacagcagtggcgagagatgatttaaatgatggcggtgcagcagtgtttgcggaaactgtccgagctattcgtagaaagaatcctggttgtactattgaaattttgccttcggatatgaaaggagattatgaaagtctccatacattaatggatagtggaccagatatttttaatcataatattgaaaccgtacgaagacttacaaaacgagtgcgagcaagagctatgtacgatcgttctttagagttactacgacgggtaaaagagatagctcctaatacaccgacgaaatcaagtatcatggttggccttggagaagaaaaagatgagattattcaggcgatggatgatttattagcgcataatgtggatattgttacacttggccaatatttacagccaacgaaaaagcatctagaggtagtacgctattaccatccagatgaatttgaagaattgaaaaatatcgccctagaaaaaggcttttctcattgtgaatctggtccattagttcgttcctcataccatgcggatgaacaagtttctaatgcagcagctcaacgaagaattaagtatatgaaaggtgtagaaaagcaagaaaacagtcaattggattttaatttctaa

SEQ ID NO: 26787 - protein, 314 aa, Oceanobacillus iheyensis
MSNQQTHVRKPDWLKTRINTNKSYRNLKKLMRDNRLNTVCEEARCPNLHECWSERKTATFMILGDTCTRGCRFCAVKTGLPNELDWGEPERVADSVTVMGLKHVVVTAVARDDLNDGGAAVFAETVRAIRRKNPGCTIEILPSDMKGDYESLHTLMDSGPDIFNHNIETVRRLTKRVRARAMYDRSLELLRRVKEIAPNTPTKSSIMVGLGEEKDEIIQAMDDLLAHNVDIVTLGQYLQPTKKHLEVVRYYHPDEFEELKNIALEKGFSHCESGPLVRSSYHADEQVSNAAAQRRIKYMKGVEKQENSQLDFNF

SEQ ID NO: 26788 - DNA, 963 bp, Pasteurella multocida
  CDS (1)..(963): transl_table=11
atgggtacaccttttaaaatggaacgtggtgtcaaataccgtgatgctgctaaaacgtccattatcccggtaaaaaatatcgatccaaatcaggaattattaaaaaaaccggaatggatgaaaatcaaactccctgcgaattctgccaaaattgatagcattaaaaacggcatgcgtcgtcatggtttacactcagtgtgtgaagaagcatcgtgcccgaatttacatgaatgttttaatcacggaacagcaaccttcatgattttaggggcaatttgtactcgccgttgtcctttctgtgatgtggcgcatggtaagcctttaccgccagatcctgaagaaccacgtaagttagcggagacaatccaagacatgaaattgcgttatgtggtgattacttctgtggatcgtgatgacttgcctgatcgtggtgcgggtcactttgcagaatgtgtaaaagaaattcgtcagctcaatccaaatatcaaaattgagattttggttcctgattttcgtgggcgaattgagcaagcgttggataaattgaaagacaatccaccagatgtgtttaaccataatttagaaaatgtaccacgtttataccgtgaaattcgtccaggagcagattatcaatggtctttgaaattgcttaaagattttaaagcgatgtttccacatattccgaccaaatcaggtttaatggtggggttaggtgaaactaatgaagagattctgcaagtgatgcaagatctacgcgatcatggtgtgactatgttaaccttaggacaatatttacaaccaagtcgccatcatttacctgttgcacgttatgtacctccggcagagtttgatgagttccgtgataaagcacaagccatgggctttgaacacgctgcttgcggtccgtttgtgcgttcttcttatcatgcagacttgcaagccaaaggcgaaattgtgaaataa

SEQ ID NO: 26789 - protein, 320 aa, Pasteurella multocida
MGTPFKMERGVKYRDAAKTSIIPVKNIDPNQELLKKPEWMKIKLPANSAKIDSIKNGMRRHGLHSVCEEASCPNLHECFNHGTATFMILGAICTRRCPFCDVAHGKPLPPDPEEPRKLAETIQDMKLRYVVITSVDRDDLPDRGAGHFAECVKEIRQLNPNIKIEILVPDFRGRIEQALDKLKDNPPDVFNHNLENVPRLYREIRPGADYQWSLKLLKDFKAMFPHIPTKSGLMVGLGETNEEILQVMQDLRDHGVTMLTLGQYLQPSRHHLPVARYVPPAEFDEFRDKAQAMGFEHAACGPFVRSSYHADLQAKGEIVK

SEQ ID NO: 26790 - DNA, 933 bp, Pelobacter carbinolicus
  CDS (1)..(933): transl_table=11
atggatgttggacaaaaaaaacgtggtgccgataaaacggccctagcgacgactgatgagcaaggcgctttgtccaagccgacctggatccgcgccaaggcgccgatctcgccggaggttggcaggttgacgggaatcctgcgtgatttgcatctgcatacggtgtgcgaagaggccagctgtcccaacctcggcgaatgtttcaagcgtgggacggcaaccttcatgatcatgggcgatgtctgtacgcgtcgttgtcccttttgcgacgtggcacatggccggcctgctgccttggataccgaagagccgggacatctggcggacgccatcggcgccatgaagctcaaatacgtggtgatcacctcggtgaccagggacgatctggaagatggcggcgccgcacatttcgcacagtgtatcgaatccatccgcaagaaaacccgtagggtgtacaaggtggagatcctggtgcctgatttccgggggcatgtcgatgccgccctcaagaacctcggcaactgtctgcccgacgtgtttaaccataatcttgaaacggtaccgcgtctttatgcggagtcacgacctggtgcccgttatcacgaatctttgcggttgttgcagcggtttaaggaaacctatcccggtataccgaccaaatccggcctgatgctgggattgggcgaaacagacgaagagatccttgaagttatgcgggatttgcgggtgcacggttgcgatatgctgaccatcggacagtatctgcgacccagtcgccatcatctgccggttcagcgctatgtaaccccggagcagttcgaggcgtttcgggttgccggtttaaagatgggcttttcccaggtcgcttcagggccgctggtgcgttcttcctatcacgccgatctacaggcaaaagaagttttgcatacatga

SEQ ID NO: 26791 - protein, 310 aa, Pelobacter carbinolicus
MDVGQKKRGADKTALATTDEQGALSKPTWIRAKAPISPEVGRLTGILRDLHLHTVCEEASCPNLGECFKRGTATFMIMGDVCTRRCPFCDVAHGRPAALDTEEPGHLADAIGAMKLKYVVITSVTRDDLEDGGAAHFAQCIESIRKKTRRVYKVEILVPDFRGHVDAALKNLGNCLPDVFNHNLETVPRLYAESRPGARYHESLRLLQRFKETYPGIPTKSGLMLGLGETDEEILEVMRDLRVHGCDMLTIGQYLRPSRHHLPVQRYVTPEQFEAFRVAGLKMGFSQVASGPLVRSSYHADLQAKEVLHT

SEQ ID NO: 26792 - DNA, 966 bp, Photorhabdus luminescens subsp
  CDS (1)..(966): transl_table=11
atgagtaaaccaattcagatggaacgcggagttaagtaccgcgacgcagacaaaatggcgctgatccctgtcaaaacagtgatgaccgaacgtacagaaatcttgcgtaaacctgagtggatgaaaatcaaacttcctgcggattccagccgcattcagggcatcaaatctgccatgcgcaaaaatggcctgcattccgtttgtgaagaagcatcttgccctaacctggcagaatgcttcaatcacggtacagcaacctttatgatccttggcgcaatttgcacccgccgttgccctttctgtgatgttgcgcacggccgcccaatggcacctgacaccaacgaaccggtaaaactggcacaaaccattaaagatatggcactgcgctacgttgtcatcacctccgttgaccgtgatgatctacgtgacggtggtgctcagcactttgctgactgcatctctgctattcgtgaaaaaaatccatccattaagattgaaaccttagttcctgacttccgtggacgtatggatcgtgcacttgaaatactgacagcgacaccgcccgatgtctttaaccataacctggaaaacgtaccccgggtttaccgtcaggtgcgccctggtgcaaactatgagtggtcactaaaattacttgaaaagtttaaagaagcccatcctgatattccaaccaaatcgggtctaatggtcggtcttggtgaaaccaacgaagaaattcttgatgttatgcgtgatctgcgccgccacggtgtgactatgctgactctgggacaatacctacaacctagtcgtcatcatttaccggtacagcgctacgtcagcccacaggaatttgatgaaatgaaagaagaagcgttagctatggggttcacccatgctgcctgtggtccatttgtccgttcttcttatcatgctgacttgcaagccaaaggtgaagaggtcaaataa

SEQ ID NO: 26793 - protein, 321 aa, Photorhabdus luminescens subsp
MSKPIQMERGVKYRDADKMALIPVKTVMTERTEILRKPEWMKIKLPADSSRIQGIKSAMRKNGLHSVCEEASCPNLAECFNHGTATFMILGAICTRRCPFCDVAHGRPMAPDTNEPVKLAQTIKDMALRYVVITSVDRDDLRDGGAQHFADCISAIREKNPSIKIETLVPDFRGRMDRALEILTATPPDVFNHNLENVPRVYRQVRPGANYEWSLKLLEKFKEAHPDIPTKSGLMVGLGETNEEILDVMRDLRRHGVTMLTLGQYLQPSRHHLPVQRYVSPQEFDEMKEEALAMGFTHAACGPFVRSSYHADLQAKGEEVK

SEQ ID NO: 26794 - DNA, 861 bp, Picrophilus torridus
  CDS (1)..(861): transl_table=11
atgaatgcaggtccaataaactacaaggttaaactgccctcgggggaaagatatacttttatcaagagtacattatcggcaagaaatctttacactgtctgcgaggaggcgcactgcccaaacatagccgaatgctgggaaagcggtactgcaacctttatgataatgggttcaaactgctccaggggatgcaggttctgtgccgtcacccatggaaggatgctgcccctggatccaatggagcctgagaaggtttacgagtcagtaaaaatgatgaatcttgattatgttgttattacatcagtagatcgtgatgatcttccggataagggttcatcgcacttcgcagcggtaataagaaggttaaaagaccttaaaataaaaatagaggttttgatcccggacttcagcggcgttcataaatttattgacaaaattatagatgaaaggcctgatgtgatagcacataacattgaaacggttcgcaggcttacaaaaactgtcagggatccaagggccggatatgatcagagtcttaatgttctaaggtatgtaaagtccaggtcaaacatcataacaaaatcgtcgataatgcttggccttggagagaccgatgatgaggttatcgaaacactgcacgacctgcatgatgctggtgttgacattgtaacgattggacaatacctcagaccaacaaagaagcagcttgaggttaaggagtattccccaatggaaagatttaaaaatcttgaggagtccgcctatagcataggtttttcctttgtggcctcgggtccgcttgtaaggacatcttacagggcggctgaggcttttgtcaaggggggttttaaaaatgattga

SEQ ID NO: 26795 - protein, 286 aa, Picrophilus torridus
MNAGPINYKVKLPSGERYTFIKSTLSARNLYTVCEEAHCPNIAECWESGTATFMIMGSNCSRGCRFCAVTHGRMLPLDPMEPEKVYESVKMMNLDYVVITSVDRDDLPDKGSSHFAAVIRRLKDLKIKIEVLIPDFSGVHKFIDKIIDERPDVIAHNIETVRRLTKTVRDPRAGYDQSLNVLRYVKSRSNIITKSSIMLGLGETDDEVIETLHDLHDAGVDIVTIGQYLRPTKKQLEVKEYSPMERFKNLEESAYSIGFSFVASGPLVRTSYRAAEAFVKGGFKND

SEQ ID NO: 26796 - DNA, 849 bp, Porphyromonas gingivalis
  CDS (1)..(849): transl_table=11
atggcgcaacacgtcaagaaacccgaatggttgaaaatacgtcttggtgggaatgagaagtttaccgagactaaaagcattgtcgagggacattgtctgcatacgatctgtacaagtggcaaatgccccaatatgggagagtgctggagtagggggactgctaccttcatgatcggtggtgatatctgtacacgtgcctgtcgattttgcaacactttgacggggcgtcccaaaccgctcaatgaagcagaacctactcacgtcgcattgagtatcaaactgatggggcttaaccatgctgtggtgacgagcgttgaccgcgatgacttgccggattatggtgccgcacactgggttaagaccattcaggaaatcagacggatcaactcgggagtgacactcgaagttctgattcccgacttcaaaggacggatggatttggtggacatgattatcgaggcaagtccggatgttatttcgcataatctggagacggtacgtcggcttacgccatcggtacgcagcgtggctacttacgataccagccttgccgtgcttcgtcacatagctcagtccggaaaaatgcccgcgaaaacaggaatgatgctcggtttgggcgagactgaagaagagatactcgaattgatggatgatgctcttgcggcgggagtctcagttattactataggacagtatctgcaaccgtcgaggaagaatcttcctgtggtggaatacatcacgcccgaacagttcgaacatcttcgactggtgggtatcgaaaaaggcttccgtacgatagagagtgctccgctcgttcgcagttcttaccatgccgaacggcacttataa

SEQ ID NO: 26797 - protein, 282 aa, Porphyromonas gingivalis
MAQHVKKPEWLKIRLGGNEKFTETKSIVEGHCLHTICTSGKCPNMGECWSRGTATFMIGGDICTRACRFCNTLTGRPKPLNEAEPTHVALSIKLMGLNHAVVTSVDRDDLPDYGAAHWVKTIQEIRRINSGVTLEVLIPDFKGRMDLVDMIIEASPDVISHNLETVRRLTPSVRSVATYDTSLAVLRHIAQSGKMPAKTGMMLGLGETEEEILELMDDALAAGVSVITIGQYLQPSRKNLPVVEYITPEQFEHLRLVGIEKGFRTIESAPLVRSSYHAERHL

SEQ ID NO: 26798 - DNA, 1017 bp, Pseudomonas putida
  CDS (1)..(1017): transl_table=11
atgacaactgtgcaagaagccgtgccgaacctgatacctacccaggatgccaccccgcgcccagcgccgaagaaggtggaagctggggtcaagctgcgtggtgccgacaaagtcgcgcgcatcccggtgaagatcatccctaccgatgagctacccaagaagcccgactggattcgcgtgcgtatcccggtgtcgcccgaggtagaccgcatcaaacaactgctgcgcaagcacaaactgcacagcgtgtgcgaagaggcctcctgcccgaacctgggcgagtgcttctcgggtggtaccgccaccttcatgatcatgggtgacatctgcacccgtcgttgcccgttctgcgacgttggtcacggccgaccgaagccgctggatctggacgagccgaaaaacctggctgttgccattgccgacctgcgcctgaagtatgtggtgatcacctcggtggaccgcgacgacctgcgtgacggtggtgcccagcactttgctgactgcatccgggaaatccgcgcgctgtcgccgggcgtgcagttggagaccttggtgcctgactaccgtggccgtatggacgttgccctggagatcaccgcgcaagagccgccggatgtgttcaaccacaacctcgagaccgtaccgcgcctgtacaaggccgcgcgcccgggttcggactatgactggtcgctggacttgctgcagaagttcaagcagttggtgccgcacgtaccgaccaagtcgggcctgatgctcggcctgggcgaaaccgacgaggaagtgatcgaagtgatgcaccgcatgcgcgagcatgacatcgacatgctcaccctcggccagtacctgcagccgtcgcgcagccacttgccggtgcagcgtttcgttcacccggacacctttgcctggttcgccgaggaaggttacaagatgggcttcaagaacgttgcttctggcccgctggtgcgttcttcgtaccacgccgaccagcaggcccacgaagccaagatcaagctctga

SEQ ID NO: 26799 - protein, 338 aa, Pseudomonas putida
MTTVQEAVPNLIPTQDATPRPAPKKVEAGVKLRGADKVARIPVKIIPTDELPKKPDWIRVRIPVSPEVDRIKQLLRKHKLHSVCEEASCPNLGECFSGGTATFMIMGDICTRRCPFCDVGHGRPKPLDLDEPKNLAVAIADLRLKYVVITSVDRDDLRDGGAQHFADCIREIRALSPGVQLETLVPDYRGRMDVALEITAQEPPDVFNHNLETVPRLYKAARPGSDYDWSLDLLQKFKQLVPHVPTKSGLMLGLGETDEEVIEVMHRMREHDIDMLTLGQYLQPSRSHLPVQRFVHPDTFAWFAEEGYKMGFKNVASGPLVRSSYHADQQAHEAKIKL

SEQ ID NO: 26800 - DNA, 957 bp, Pseudomonas syringae pv
  CDS (1)..(957): transl_table=11
gtggcccgtccgaaagtcgaagccggcgtcaagctgcgcggagcggaaaaggttgcgcgcatcccggtcaagatcatcccgactgtagacctgccgaagaagcctgactggattcgcgtgcgcatcccggtttctccggaggtcgaccgtatcaagcaactgctgcgcaagcacaagctgcacagcgtctgcgaagaggcatcctgccccaacctgggcgaatgtttctccggcggcaccgcgacgttcatgatcatgggcgacatctgcacccgtcgctgcccgttctgcgacgtgggccacggccgtccgaaggcgctcgacgccgacgaaccgaagagccttgccatcgcgattgccgatttgcgcttgaaatacgtggtgatcacctcggtagaccgtgatgacctgcgtgacggcggcgctcagcactttgccgactgcatccgcgagatccgcctgctgtcgccgggcattcagctcgaaacactggtgcccgattaccgtgggcgcatggacgtagcgctggaaatcactgcagccgagccgccggatgtgttcaaccacaacctggaaaccgtgccgcgtctgtacaaggccgcgcgtcctggctcggattaccagtggtcgctgaccctgctgcaacgcttcaagcagatggtcccgcacgtaccgaccaaatccggcctgatgctgggtctgggcgagactgacgaagaagtcatcgaagtcatgaagcgcatgcgcgagcacgacatcgacatgctgaccctgggtcagtacctgcagccatcgcgcaatcacctggcggtgcagcgtttcgtccatccggacaccttcgcctggttcgccgaggaaggttacaagatgggcttcaagaacgtcgcttcaggcccgctggtgcgctcgtcgtaccacgccgacgagcaagccaagatcgccaaagcgatgctctga

SEQ ID NO: 26801 - protein, 318 aa, Pseudomonas syringae pv
MARPKVEAGVKLRGAEKVARIPVKIIPTVDLPKKPDWIRVRIPVSPEVDRIKQLLRKHKLHSVCEEASCPNLGECFSGGTATFMIMGDICTRRCPFCDVGHGRPKALDADEPKSLAIAIADLRLKYVVITSVDRDDLRDGGAQHFADCIREIRLLSPGIQLETLVPDYRGRMDVALEITAAEPPDVFNHNLETVPRLYKAARPGSDYQWSLTLLQRFKQMVPHVPTKSGLMLGLGETDEEVIEVMKRMREHDIDMLTLGQYLQPSRNHLAVQRFVHPDTFAWFAEEGYKMGFKNVASGPLVRSSYHADEQAKIAKAML

SEQ ID NO: 26802 - DNA, 873 bp, Pyrobaculum aerophilum
  CDS (1)..(873): transl_table=11
atgattccgtcttgggtttccctaagggccggagattatgaaaaaataattaacgtgaggagggcgttaagcagacacgggatttatacagtgtgcgagggggctaagtgccccaatattttccactgctggggcgaggggacggccaccttcatgattctaggggaggtctgcacaagggcgtgtagattctgcgccgtgcgcactggtaatccgagggggtatgtggactggggcgaggtggataggcttgttgaggctgttagagagctcgggcttaaatacgtcgtggtgacctcagtggctagagacgacctccccgacggaggggcctcggtatttgcggcagttgtgaaaaaactacgcgaggtgggttgcgtcgtggaggttttagtgcccgacttcggcggaagtccggcctcggtaaaaactgtggttagctcgggcccagatgtgttcgcccacaacgtggaaacagtgagacggcttacgccgctagttagagaccgcagggcgggttatgagcgttcgctatctgtgttgaaatacgcaaaagaattcggcgcacccctcactaaatcaggcttgatgttagggcttggggagacgtttgaggaggtggtggagactttagaggatttgaggagggctgatgtggacattgtgactataggccagtatataaaacccagcggctcgcctcgtcatttaaaccccgttaggtacgcgactcccgaagagttcgccaaaattaaagaggtggccgtgtccctgggctttaaggccgttgcctcaggccctttagtgcgtagctcatataaggcttacagtctatatagagaagctttaaaaaatatagtatacttaggttaa

SEQ ID NO: 26803 - protein, 290 aa, Pyrobaculum aerophilum
MIPSWVSLRAGDYEKIINVRRALSRHGIYTVCEGAKCPNIFHCWGEGTATFMILGEVCTRACRFCAVRTGNPRGYVDWGEVDRLVEAVRELGLKYVVVTSVARDDLPDGGASVFAAVVKKLREVGCVVEVLVPDFGGSPASVKTVVSSGPDVFAHNVETVRRLTPLVRDRRAGYERSLSVLKYAKEFGAPLTKSGLMLGLGETFEEVVETLEDLRRADVDIVTIGQYIKPSGSPRHLNPVRYATPEEFAKIKEVAVSLGFKAVASGPLVRSSYKAYSLYREALKNIVYLG

SEQ ID NO: 26804 - DNA, 1002 bp, Ralstonia solanacearum
  CDS (1)..(1002): transl_table=11
atgaccgattccgcctccggcgcctccgcagtcgccaacatcgccaccccgtcgaacgagccgtacgacgcgacccgcaagcagaagtcgctcgacaagaccgcgcgcatccccatcaagatcgtgccggccgagaagctgaagaagccggagtggatccgcgtcaaggccgccaccggcaactcacgcttctacgagatcaaggacatcctgcgcgccaacaacctcgtgacggtgtgcgaggaggcgagctgcccgaacatcggcgagtgcttcggcaagggcacggccaccttcatgatcatgggcgacaagtgcacgcgccgctgcccgttctgcgacgtcggccacggccgccccgacccgctcgatgcgaacgagcccgagaacctggccaagaccatcgcccagctcagactgaactacgtggtcatcaccagcgtggaccgcgacgacctgcgcgacggcggtgcccagcactatgtcgattgcatctcgcgcacgcgcgagctgtcgccggccacgcgcatcgaggtgctggtgccggacttccgcggccggctggaaaaggcgctggacatcctccaggcctgcccgccggacgtgatgaaccacaacatggaaaccgtgccgcgcctgtacaagcaggcccgcccgggcgccgactacgcgcactcgctgaagctgctcaaggacttcaaggcgcgcaacccgaacctcccgaccaagtccggcctgatggtcggcctgggcgagaccgacgaggaaatcctggaggtgatgcgcgacatgcgcgagcacgacatcgacatgctgaccatcggccagtatctcgctccgtcgggccaccatctgccggtgctgcgctacgtgcacccggacaccttcaagatgttcgaggagaaagcctacgagatgggcttcacgcacgccgctgtcggcgccatggtgcgcagctcgtaccacgcggatcagcaggcgcacgaagccggcttcgcctga

SEQ ID NO: 26805 - protein, 333 aa, Ralstonia solanacearum
MTDSASGASAVANIATPSNEPYDATRKQKSLDKTARIPIKIVPAEKLKKPEWIRVKAATGNSRFYEIKDILRANNLVTVCEEASCPNIGECFGKGTATFMIMGDKCTRRCPFCDVGHGRPDPLDANEPENLAKTIAQLRLNYVVITSVDRDDLRDGGAQHYVDCISRTRELSPATRIEVLVPDFRGRLEKALDILQACPPDVMNHNMETVPRLYKQARPGADYAHSLKLLKDFKARNPNLPTKSGLMVGLGETDEEILEVMRDMREHDIDMLTIGQYLAPSGHHLPVLRYVHPDTFKMFEEKAYEMGFTHAAVGAMVRSSYHADQQAHEAGFA

SEQ ID NO: 26806 - DNA, 966 bp, Rhizobium loti
  CDS (1)..(966): transl_table=11
atggttactgtcctcgacgcgatcgccaacgcaccacggttgcggcaccccgagaaggcgcacaagcccgaccaggaggtgttgcgcaagccggactggatccgcgtcaaggcgccggtctcgaagggctatgccgagacgcgcgagatcgtcaaatcccacaagctggtgacggtctgcgaagaggccggttgccccaacatcggcgagtgctgggaaaagaagcacgccaccttcatgatcatgggcgagatctgcacgcgcgcttgcgccttctgcaatgtcgccaccggcattccgaccgcgctggaccccgatgagccggcccgcgtcgcgcatgccgtcaagcagatggggctcagccacgtcgtcatcacctcggtcgaccgcgacgatcttgccgatggcggtgcgcagcattttgccgatgtcatccgggcgatccgcgcggcaacgccgtcgaccacgatcgaaatcctgacgcccgatttcctgcgcaaggacggcgcgcttgagatcgtcgtggcggccaggcccgacgtcttcaaccacaatctcgaaaccgtgccgtcgaactatctgaaggtccggccgggcgcccgctatttccactcgatccggctgttgcagcgggtcaaggaactcgatccgtcgatcttcaccaaatccggcatcatggttggcctgggcgaggagcgaaatgaaatcctgcagctgatggacgatctgcgctcggccaatgtcgacttcatgaccatcggccaatatctgcagccttcgaaaaagcaccatccggtgatccgcttcgtgacgcccgaagagttcaagtccttcgagacgatcggccggaccaagggtttcctgcttgtggcatcgagcccgctgacgcgttcatcgcaccatgccggcgacgatttcgcccggctgcgcgcggcgcgggaagcgcagctccagaaatcggtctag

SEQ ID NO: 26807 - protein, 321 aa, Rhizobium loti
MVTVLDAIANAPRLRHPEKAHKPDQEVLRKPDWIRVKAPVSKGYAETREIVKSHKLVTVCEEAGCPNIGECWEKKHATFMIMGEICTRACAFCNVATGIPTALDPDEPARVAHAVKQMGLSHVVITSVDRDDLADGGAQHFADVIRAIRAATPSTTIEILTPDFLRKDGALEIVVAARPDVFNHNLETVPSNYLKVRPGARYFHSIRLLQRVKELDPSIFTKSGIMVGLGEERNEILQLMDDLRSANVDFMTIGQYLQPSKKHHPVIRFVTPEEFKSFETIGRTKGFLLVASSPLTRSSHHAGDDFARLRAAREAQLQKSV

SEQ ID NO: 26808 - DNA, 969 bp, Rhizobium meliloti
  CDS (1)..(969): transl_table=11
atggtaacggttttcgacgccgtctcggatcgggcgcagcgtgttcgccacccggaaaaggcccaccggcccgacaccgaggtcctgcgcaagccggactggatccgtgtgaaggcaccgacctcgaagggataccaggagacccgctcgatcgtgaagagccacaagctcgttacggtctgcgaggaagccggatgccctaacatcggcgagtgctgggacaagaagcacgcgacgttcatgatcatgggcgagatctgcacgcgtgcctgtgccttctgcaacgtcgcgaccggcaagcccaatgccctcgatctggacgagcccgcaaatgtcgccaaggcggtgaagcagatgggcctgagccatgtcgtcatcacctccgtcgaccgcgacgacctcgacgacggcggcgccgagcatttcgagaaggtcatcttcgcgatccgggaagcctcgccggaaaccacgatcgaaatcctgacgcccgatttcctccgcaagcccggcgcgctggagcgtgtcgtggccgccaagccggacgttatcaaccacaatctcgaaacggttccgtccaactacctgacggtccggccgggcgcgcgctatttccattcgatccggctactgcagcgcgtgaaggaactcgaccccaccatgttcaccaagtcgggcatcatggtcggcctcggcgaggagcgcaacgaagtgctgcagctgatggacgacctgcgtaccgccgatgtcgatttcctgacgatcggccaatatctgcagccgagccgcaagcatcacaaggtcgagaaattcgtcactccggaagaattcaagtcctacgagacggtcgcctacaccaagggcttcctgatggtttcctcaagcccgctgacccgctcgtcccaccatgccggcgacgacttcgcaaggctgaaggcggcgcgcgaaaggaagctggctgcggcggagtag

SEQ ID NO: 26809 - protein, 322 aa, Rhizobium meliloti
MVTVFDAVSDRAQRVRHPEKAHRPDTEVLRKPDWIRVKAPTSKGYQETRSIVKSHKLVTVCEEAGCPNIGECWDKKHATFMIMGEICTRACAFCNVATGKPNALDLDEPANVAKAVKQMGLSHVVITSVDRDDLDDGGAEHFEKVIFAIREASPETTIEILTPDFLRKPGALERVVAAKPDVINHNLETVPSNYLTVRPGARYFHSIRLLQRVKELDPTMFTKSGIMVGLGEERNEVLQLMDDLRTADVDFLTIGQYLQPSRKHHKVEKFVTPEEFKSYETVAYTKGFLMVSSSPLTRSSHHAGDDFARLKAARERKLAAAE

SEQ ID NO: 26810 - DNA, 951 bp, Rhodopirellula baltica
  CDS (1)..(951): transl_table=11
ttgattttttgcctttcatccggacagacgccgatggcttttcgattgccagttgtcgccgaaccagaaatgcctgcgggcaccgacgtcagctcgacgggacggttgccacgttggctcaagcggcccatccccaaatccaactcgaatcatttgaccgattcgttgatggaagaatacgggttggaaaccgtatgcgacaacgccaagtgccccaaccggatggagtgctacagccagcaaacggcgacgttcatggttctggggaatgtttgtacccgcccatgtggtttctgtgccgtcagccgtggacgcccaccggctgcccccgccgtcgatgagccagatcgcatcgccaaagcggccgaacgattggggctgaagcacgttgtcatcaccagcgtcacgcgagatgacttgcccgacggaggtgccgaccatttccacaactgcgtcatcgcagttcgggaacgcaccggggcgaccaccgaagtcctcacgcctgactttgtgcactgcaaggaagcgttggctcgggtcatcgaagcaaaaccgaccgtgttcaatcacaacatggaaaccgtgccacgtctttaccgccgagtccgcggtccaaagagtgactatgcttggacgttggaaatgatgcggcaagtcaaacgctacgacgccgaagtcaaaaccaagagcggtttgatgcttggattgggcgaagaacgaggcgagttgctcgacgctctgtcagatcttcgcgaacacgatgtcgatttcctgacgttgggccagtacctgcaaccgggcgagaaatacttgcccgtcgttcgctatgttccgccagaagaattcgatgaattggccgacatcgccaaatcaatgggattcaaaaaggtcgccagtggcccctttgtgcgaagtagctaccacgcccgtgacatggccgagactgagtga

SEQ ID NO: 26811 - protein, 316 aa, Rhodopirellula baltica
MIFCLSSGQTPMAFRLPVVAEPEMPAGTDVSSTGRLPRWLKRPIPKSNSNHLTDSLMEEYGLETVCDNAKCPNRMECYSQQTATFMVLGNVCTRPCGFCAVSRGRPPAAPAVDEPDRIAKAAERLGLKHVVITSVTRDDLPDGGADHFHNCVIAVRERTGATTEVLTPDFVHCKEALARVIEAKPTVFNHNMETVPRLYRRVRGPKSDYAWTLEMMRQVKRYDAEVKTKSGLMLGLGEERGELLDALSDLREHDVDFLTLGQYLQPGEKYLPVVRYVPPEEFDELADIAKSMGFKKVASGPFVRSSYHARDMAETE

SEQ ID NO: 26812 - DNA, 960 bp, Rhodopseudomonas palustris
  CDS (1)..(960): transl_table=11
atggtcgttctcgtcgatacggtgtccgccaatcccgtccgcccccggcatccggagaaggcggcgcggccggatgcgctgtcgccgaagaagccggactggatccgggtgcgcgcgccgaccacgcgcggctatggcgagacccgcggcatcgtcaaggaaaacggcctgcacacggtgtgcgaggaggccggctgcccgaatatcggcgagtgctgggacaagaagcacgccaccttcatgatcatgggggacacctgcacccgggcgtgcgcgttctgcaacgtcaagaccgggatgccgggcgcactcgacgccaacgagccagcctacgtcgccgaggcgacccgcaagctcgggctgcagcatctggtgattacctcggtcgaccgcgatgatctggccgatggaggcgccgcgcacttcgccgcaacgatccgcgcggtgcgcgaagcctgcccaacgacgacgatcgagatcctgacgccagacttcctgcgcaaggacggcgcgctggaggtggtggtcgccgccaagccggacgtgttcaaccacaatctcgaaaccgtgccgtcgcgctatctgtcggtgcggccgggcgcacgctacttccactcgatccggctgctgcagcgggtcaaggaactcgatcccagcatcttcaccaagtccggcatcatggtcgggctcggcgaggaacgccacgaggtgctgcaggtgatggacgacctgcgctcggcggaggtcgatttcctcaccatcggccagtatctacagccgacccgcaagcaccatgcggtgatgcgctacgtcacgccggacgaatttgccggctatcagaccaccgcctacgctaagggcttcctgatggtgtcggcgagcccgatgacccgctcgtcgcatcacgccggcgacgatttcgccaagctcaaggcggcgcgcgcggcgcgagcccgctaa

SEQ ID NO: 26813 - protein, 319 aa, Rhodopseudomonas palustris
MVVLVDTVSANPVRPRHPEKAARPDALSPKKPDWIRVRAPTTRGYGETRGIVKENGLHTVCEEAGCPNIGECWDKKHATFMIMGDTCTRACAFCNVKTGMPGALDANEPAYVAEATRKLGLQHLVITSVDRDDLADGGAAHFAATIRAVREACPTTTIEILTPDFLRKDGALEVVVAAKPDVFNHNLETVPSRYLSVRPGARYFHSIRLLQRVKELDPSIFTKSGIMVGLGEERHEVLQVMDDLRSAEVDFLTIGQYLQPTRKHHAVMRYVTPDEFAGYQTTAYAKGFLMVSASPMTRSSHHAGDDFAKLKAARAARAR

SEQ ID NO: 26814 - DNA, 891 bp, Rickettsia conorii
  CDS (1)..(891)
atggctaatttaaataaacgacctgattggataaaagtaaaagctcctaattctacagagtactataatacaaaagatttaataaagaatctgagattaaatactgtgtgcgaggaagctgcttgtcctaatattggtgagtgctggtcaaaaaaacatacaactgtgatgattttaggttcggtttgtactagagcttgtaggttttgtaacgttaaaacgggtagaccggatttacttgatccgtatgaaccgcaaaggttagcggaggcggtacaaaagctaaatcttaagcatgtagtaattacttccgtcgatcgtgatgatcttgaggatggcggagcgtcacattttgcggagtgtattagcgaaatccgaaaatcatcgccaaatactactattgagattctaacacccgattttttaagaaaagaaggagcagctgaaataatagcaaacgcaaaacctgacgtttttaaccataatgtcgaaacagtaccgtctttatacaaaacgattagaccgggggctagatattataattctttaagtttactgcataatattaaaaaattatctcctgaaatttttacaaaatccggtatgatggtaggacttggggaagaaataaatgaagtagtacaggttatagatgatttaagagaagcaaaggttgatttcctaactatcgggcagtatctgcagcctaccaaaaatcatgctgaggtcgcaaaatatgttacgccggaagagtttaaatatctagagcgagtagcaaaaacaaaaggattcttgatggtttcggcaagcccgctgacccgttcttcataccatgctgatgaggattttcaaaaattaaaagagaattaccaacaaaaactggtgtcttaa

SEQ ID NO: 26815 - protein, 296 aa, Rickettsia conorii
MANLNKRPDWIKVKAPNSTEYYNTKDLIKNLRLNTVCEEAACPNIGECWSKKHTTVMILGSVCTRACRFCNVKTGRPDLLDPYEPQRLAEAVQKLNLKHVVITSVDRDDLEDGGASHFAECISEIRKSSPNTTIEILTPDFLRKEGAAEIIANAKPDVFNHNVETVPSLYKTIRPGARYYNSLSLLHNIKKLSPEIFTKSGMMVGLGEEINEVVQVIDDLREAKVDFLTIGQYLQPTKNHAEVAKYVTPEEFKYLERVAKTKGFLMVSASPLTRSSYHADEDFQKLKENYQQKLVS

SEQ ID NO: 26816 - DNA, 1113 bp, Schizosaccharomyces pombe
  CDS (1)..(1113)
atgttgaaaataggtcgaaatgctacgatattaaaaaacaatttttggtttgcctccgtgaggtttcaatctggagggttttcagaaaagttggcgaaaggaccatcatttgcagatttcttgaacatggataaaccattgactgctgacgaagctttcgagttagatagaaaagtagagctaccaaatggctctatacacaaaagattgccttcatggcttaaaaccaaagttccactaggaacaaattttaaccgaataaagcatgatttgcggggatctcatctccatacggtttgtgaagaagcgaaatgtccgaatattggagaatgctggggaggtaaagacaaatctcgtgccacagctacgatcatgcttatgggtgatacttgtactcgtggatgtcgcttttgttcggtaaagaccagtcgccgtccaggtcctttagatcccaacgagcctgaaaatacagcagaagccatcaaacaatggaaccttgggtacattgttctcactagtgtcgatagagatgacctgactgaccttggtgccaatcatatagcaaaaacgattcaaaaaattaaagaaaaagccccgcacatcttggtagaagctttgacccccgattttagtggaagaatggatttggttgagattgtagctaaatctggtttggacgtctttgcacacaatgtagaaacggtagaggaacttaccccatttgttcgagatcgacgagccacatatcgacaaagtctgagcgtgctaaaacatgtgaagaaaacatgtcctcaccttatcactaaaaccagtattatgcttggtctaggtgaaaccgatgcggaaattctaacaactcttaaggatctcctggaacataatgtagatgtcgttacctttggtcaatatatgagacctaccaaacgacacctaaaagtgcaagagtatgtacatcctaagaagtttgaatattggaaagaagtggcagagaaattaggattcttatacgtggctagtggtccacttgttcgtagtagctataaggctggcgaatattttatggagaatcttattaaaaagagatcaggaaaccctgcttctatgagtgtttaa

SEQ ID NO: 26817 - protein, 370 aa, Schizosaccharomyces pombe
MLKIGRNATILKNNFWFASVRFQSGGFSEKLAKGPSFADFLNMDKPLTADEAFELDRKVELPNGSIHKRLPSWLKTKVPLGTNFNRIKHDLRGSHLHTVCEEAKCPNIGECWGGKDKSRATATIMLMGDTCTRGCRFCSVKTSRRPGPLDPNEPENTAEAIKQWNLGYIVLTSVDRDDLTDLGANHIAKTIQKIKEKAPHILVEALTPDFSGRMDLVEIVAKSGLDVFAHNVETVEELTPFVRDRRATYRQSLSVLKHVKKTCPHLITKTSIMLGLGETDAEILTTLKDLLEHNVDVVTFGQYMRPTKRHLKVQEYVHPKKFEYWKEVAEKLGFLYVASGPLVRSSYKAGEYFMENLIKKRSGNPASMSV

SEQ ID NO: 26818 - DNA, 966 bp, Shewanella oneidensis
  CDS (1)..(966): transl_table=11
atgaataggcctgaacgtttacaacccggagtcaaattaagagatgccgaaaaggtctcacgtattccggttaaaatcgtgccctctgagcgcgaaaccatgttacgcaaaccagattggttaagggttaaactgcccgcatctaaccaacgcattctcgacattaagcaagcgttacgcgctaacggcctgcactcggtctgtgaagaggcctcctgcccgaacttggcagaatgttttaaccacggcacagcaacctttatgattttgggtgcaatttgtactcgccgttgccccttctgtgacgtggcccatggtcgtcctctcaagcctgatgagcaggaacccgttaagctggcacaaaccatccgcgatatgaagctgaaatacgtggtcatcacctcggttgaccgcgacgacctgcgtgatggcggagcccagcactttgccgactgtatccgcgagatccgcaaactcaatccagaaattaagattgagatcttagtccccgatttccgtggccgtatcgacgccgccctcgacatactgtcgaccgagccgcctgatgtgttcaaccacaacctcgaaaccgcacctatgcactatcgcaaggcgcgtccaggggcgaactatcaatggtccctcgacctactaaaacgctttaaagagcgtcacccaaatgtaccgactaagtcgggactgatgatgggtctaggcgaaaccaacgatgaaatcgcccaagtgctacgcgacttacgtgagcacaaggtcgaaatgctgaccttaggccaatacctgcaaccatctaagttccatctgccggttgagcgttacgtatcacccgcagagtttgatgagctaaaagcccttgccgatgagctgggttttactcacgcagcctgtggtccattagtgcgttcaagctaccatgctgacttacaagcccaaggtaaagaagtgaagtaa

SEQ ID NO: 26819 - protein, 321 aa, Shewanella oneidensis
MNRPERLQPGVKLRDAEKVSRIPVKIVPSERETMLRKPDWLRVKLPASNQRILDIKQALRANGLHSVCEEASCPNLAECFNHGTATFMILGAICTRRCPFCDVAHGRPLKPDEQEPVKLAQTIRDMKLKYVVITSVDRDDLRDGGAQHFADCIREIRKLNPEIKIEILVPDFRGRIDAALDILSTEPPDVFNHNLETAPMHYRKARPGANYQWSLDLLKRFKERHPNVPTKSGLMMGLGETNDEIAQVLRDLREHKVEMLTLGQYLQPSKFHLPVERYVSPAEFDELKALADELGFTHAACGPLVRSSYHADLQAQGKEVK

SEQ ID NO: 26820 - DNA, 918 bp, Staphylococcus aureus
  CDS (1)..(918): transl_table=11
atggcgacaaaaaacgaggaaatattacgtaaaccggattggttgaaaataaaattaaataccaacgaaaactatacaggacttaagaagatgatgagggaaaaaaatcttaatactgtatgtgaagaagctaaatgtcctaatatacatgaatgttggggtgcacgtcgtacagcgacatttatgattttaggtgccgtatgtacaagagcttgtcgtttttgtgcggttaagacaggtttacctaatgaacttgatttaaatgagcctgaacgtgtagctgaatcagttgaattaatgaatttgaaacacgttgttatcactgctgttgcgcgtgatgatttaagagatgctggttcaaatgtttatgctgagacagtacgtaaagttagagaaagaaatccatttacaacgattgaaattttaccatcagatatgggcggggactatgatgcgttagaaacattaatggcgtcaagacctgacattttaaaccataatattgaaactgttcgtcgcttaacaccgagagttcgtgcgcgtgcgacttacgacagaacattagagtttttacgtcgttcaaaagaattacaaccggatatcccaactaaatcaagtattatggttggattaggtgaaactatagaagaaatttatgaaacgatggatgatttacgtgcgaatgatgtagatattttaacgattggtcaatatttacaaccttcacgtaaacatttaaaggttcaaaaatattacacgcctttagagtttggtaaattaagaaaagtggcaatggataaagggtttaaacattgccaagctggacctttagtacgtagttcttatcatgcggatgagcaagtaaatgaagctgctaaagaaaagcaacgccaaggtgaggcacagttaaatagttaa

SEQ ID NO: 26821 - protein, 305 aa, Staphylococcus aureus
MATKNEEILRKPDWLKIKLNTNENYTGLKKMMREKNLNTVCEEAKCPNIHECWGARRTATFMILGAVCTRACRFCAVKTGLPNELDLNEPERVAESVELMNLKHVVITAVARDDLRDAGSNVYAETVRKVRERNPFTTIEILPSDMGGDYDALETLMASRPDILNHNIETVRRLTPRVRARATYDRTLEFLRRSKELQPDIPTKSSIMVGLGETIEEIYETMDDLRANDVDILTIGQYLQPSRKHLKVQKYYTPLEFGKLRKVAMDKGFKHCQAGPLVRSSYHADEQVNEAAKEKQRQGEAQLNS

SEQ ID NO: 26822 - DNA, 915 bp, Staphylococcus epidermidis
  CDS (1)..(915): transl_table=11
atggcgactagaaatgaagaaattttacgtaaaccggattggttaaagattaagcttaacacaaacgataattatactggtcttaagaaaatgatgcgtgagaagaatttacacacagtgtgtgaagaagctaaatgtccaaatattcacgaatgttggggtgcgcgtcgtacagctacatttatgattttaggggcagtatgtacaagagcatgtcgattttgcgcggtaaaaactggtttacctaatgaattagatttaaatgaaccagaacgagttgcagaatcagtagaattaatgaatttaaaacatgttgtaattactgctgttgcacgtgatgatttaagagatcaaggctcaaacgtgtatgcagaaacagtacgtaaagtaagagaaagaaatccatttacaacaatagaaattttaccatctgacatgggtggcgattatgaagcccttgaaacattaatggcttctagaccagacattcttaatcacaacattgaaacggttcgtcgcttaacaccaagagttcgagctcgagcaacttacgatagaactttacaatttttacgtcgttctaaagaattacaacctgatattccaacaaaatcaagtttgatggttgggttaggtgaaacgatggaagaaatttatgaaacgatggatgatttacgcgctaatgatgttgatatcttaactataggtcaatatttacaaccgtctcgaaaacatttgaaagttgagaaatattatacgccattagaatttggtaaaatgagaaagattgcaatggaaaaaggatttaaacattgtcaagcaggacctttagtaagaagctcatatcatgctgatgagcaagtgaatgaagcagctaaagagaaacaacgccaaggtgaagaacaactcaattaa

SEQ ID NO: 26823 - protein, 304 aa, Staphylococcus epidermidis
MATRNEEILRKPDWLKIKLNTNDNYTGLKKMMREKNLHTVCEEAKCPNIHECWGARRTATFMILGAVCTRACRFCAVKTGLPNELDLNEPERVAESVELMNLKHVVITAVARDDLRDQGSNVYAETVRKVRERNPFTTIEILPSDMGGDYEALETLMASRPDILNHNIETVRRLTPRVRARATYDRTLQFLRRSKELQPDIPTKSSLMVGLGETMEEIYETMDDLRANDVDILTIGQYLQPSRKHLKVEKYYTPLEFGKMRKIAMEKGFKHCQAGPLVRSSYHADEQVNEAAKEKQRQGEEQLN

SEQ ID NO: 26824 - DNA, 987 bp, Streptomyces avermitilis
  CDS (1)..(987): transl_table=11
gtgtccgcagtcgcacccgacggacgcaagatgctgcgcctggaggtccggaacgcccagacccccatcgagcgcaagcccgagtggatcaagacccgggcgaaaatgggtcccgaatacacgaagatgcagaacctcgtgaagagcgaggggctgcacacggtctgccaggaggcgggctgtcccaacatctacgagtgctgggaagaccgcgaggccaccttcctcatcggcggcgaccagtgcacccggcgctgcgacttctgccagatcgacaccggcaagcccgaggccctcgaccgcgacgagccgcgccgcgtcggtgagtccgtcgtcacgatggacctgaactacgccacgatcacgggcgtcgcccgcgacgacctcgaggacggcggcgcctggctgtacgcggagacggtccgccagatccacgcgcagacggcgggccgcgaggccggccgcaccaaggtcgagctgctcgcccccgacttcaacgccgagcccgaccagctggccgaggtcttctccgcgcgccccgaggtcttcgcgcacaacgtcgagacggtcccgcggatcttcaagcgcatccgccccggcttccgctacgagcgctccctgaaggtcatcacggaggcccgggactacggtctggtcacgaagtcgaacctcatcctcggcatgggtgagacccgcgaagaggtcagcgaggcgctccggcagctgcacgacgcgggctgcgagctcatcacgatcacgcagtacctgcgcccctccgtgcgccaccaccccgtggagcgctgggtcaagccgcacgagttcgtggaactcaaggaggaggccgaggagatcggcttctccggtgtcatgtcgggcccgctggtccgctcctcgtaccgggccggccgcctgtaccagatggccatggagctgcgtcagtcagccgctccgcagggcggtgcgcaggtcgcctcgcaggcggtctga

SEQ ID NO: 26825 - protein, 328 aa, Streptomyces avermitilis
MSAVAPDGRKMLRLEVRNAQTPIERKPEWIKTRAKMGPEYTKMQNLVKSEGLHTVCQEAGCPNIYECWEDREATFLIGGDQCTRRCDFCQIDTGKPEALDRDEPRRVGESVVTMDLNYATITGVARDDLEDGGAWLYAETVRQIHAQTAGREAGRTKVELLAPDFNAEPDQLAEVFSARPEVFAHNVETVPRIFKRIRPGFRYERSLKVITEARDYGLVTKSNLILGMGETREEVSEALRQLHDAGCELITITQYLRPSVRHHPVERWVKPHEFVELKEEAEEIGFSGVMSGPLVRSSYRAGRLYQMAMELRQSAAPQGGAQVASQAV

SEQ ID NO: 26826 - DNA, 954 bp, Streptomyces coelicolor
  CDS (1)..(954): transl_table=11
gtgtccgcagtcgcacccgacggacgcaagatgctgcgcctggaggtccgcaacagccagacccccatcgagcgcaagcccgagtggatcaagacccgggcgaaaatgggccccgaatacaccaagatgcagaacctcgtgaagagcgagggcctgcacacggtctgccaggaagccggctgtcccaacatctacgagtgctgggaggaccgcgaggcgaccttcctcatcggcggcgaccagtgcacccggcgctgcgacttctgccagatcgacaccggcaagcccgaggcgctcgaccgcgacgagccgcgccgcgtcggcgagtccgtggtcaccatggacctgaactacgccaccatcaccggcgtcgcccgcgacgacctccccgacggcggcgcgtggctgtacgcggagacggtgcgccagatccacgagcagaccgccggccgcgaggccggccgcaccaaggtcgagctgctggccccggacttcaacgccgttccggagctgctccgggaggtcttcgagtcccgccccgaggtcttcgcgcacaacgtcgagaccgtcccgcggatcttcaagcgcatccgcccgggcttccgctacgagcgctccctgaaggtcatcaccgacgcccgcgacttcggcctggtcaccaagtcgaacctgatcctcggcatgggcgagacccgcgaggagatcagcgaggcgctgaagcagctgcacgaggccggctgcgagctgatcaccatcacgcagtacctgcgcccgtccgtgcgccaccacccggtggagcgctgggtcaagccgcaggagttcgtcgagctgaaggaggaggccgagcagatcggcttctccggcgtgatgtcgggcccgctggtccgctcgtcgtaccgggccggacggctctacggaatggccatggagcagcgccggtccgccaccgtgtga

SEQ ID NO: 26827 - protein, 317 aa, Streptomyces coelicolor
MSAVAPDGRKMLRLEVRNSQTPIERKPEWIKTRAKMGPEYTKMQNLVKSEGLHTVCQEAGCPNIYECWEDREATFLIGGDQCTRRCDFCQIDTGKPEALDRDEPRRVGESVVTMDLNYATITGVARDDLPDGGAWLYAETVRQIHEQTAGREAGRTKVELLAPDFNAVPELLREVFESRPEVFAHNVETVPRIFKRIRPGFRYERSLKVITDARDFGLVTKSNLILGMGETREEISEALKQLHEAGCELITITQYLRPSVRHHPVERWVKPQEFVELKEEAEQIGFSGVMSGPLVRSSYRAGRLYGMAMEQRRSATV

SEQ ID NO: 26828 - DNA, 861 bp, Sulfolobus acidocaldarius
  CDS (1)..(861): transl_table=11
atgaaaagcgaagtggtagtaaggattaatgagaacttcaagaaacttagcaggatagtgtctgagaaagggatatccactgtatgcgaggaagctctatgtccaaatatcatggagtgttggggatcaggaactgctacgttcatgataatgggagatatctgcacaagaggttgtaggttttgttatgtaaaaaagggtaaaccagtcctactagaccatgaggagccaataaaagtagcagaggcagtaagggaaatgggtttagactatgttgtcataaccagtgttgacagggatgatttagcagatgggggagcttctcatttttctcaagttgttaaagccgtgaaagagatgaatcctgacgtcatagttgaggtccttacaccagattttatggggaataaagaactagtggagaaagtaatagggtctggcgtagacgtatttgcacacaacgtggaaacggtaagaagcctgactccattagtgagagacgcaagagcatcatacgaacaaagtttaagagtacttagttatgctaagaacgttgtcaaaaaatcctctattcttttaggtcttggggagagcttagaggaagtagttgaaaccatgaaggatttgagaaatgtcggtgtagatattttagtcctttcccagtacatgagacctagcattaaacaactggaagttaagaaacgttataacatggaagagtacaaggaacttgaaaaaatagcttattctttaggtttttcatatgtcgttgcactacctcacgctagaacttcctacagggcaaaagaggcatatttgagggcgatggcaaatgttaagaataataatagatggtcctag

SEQ ID NO: 26829 - protein, 286 aa, Sulfolobus acidocaldarius
MKSEVVVRINENFKKLSRIVSEKGISTVCEEALCPNIMECWGSGTATFMIMGDICTRGCRFCYVKKGKPVLLDHEEPIKVAEAVREMGLDYVVITSVDRDDLADGGASHFSQVVKAVKEMNPDVIVEVLTPDFMGNKELVEKVIGSGVDVFAHNVETVRSLTPLVRDARASYEQSLRVLSYAKNVVKKSSILLGLGESLEEVVETMKDLRNVGVDILVLSQYMRPSIKQLEVKKRYNMEEYKELEKIAYSLGFSYVVALPHARTSYRAKEAYLRAMANVKNNNRWS

SEQ ID NO: 26830 - DNA, 858 bp, Sulfolobus solfataricus
  CDS (1)..(858): transl_table=11
atggagaaaaaagttcaaattgcagtttacgagaatgaaaacttcaaaagagtagcagagattgtaaagaagaaaagtattgctactgtgtgtgaagaggcgctatgcccaaacattatggaatgctggggatctggaactgcaacatttatgatcatggggagcatttgtactagaggttgtaggttttgttatgtgttaaagggaaagccctcaccattggacgatgaagaacctaaaagagttgcagaagcggtaaaggagatggaactggactacgttgtaataaccagtgttgatagagacgacctatccgatgggggagcacaacatttcgctaacgtggtgaaaacagtaaaagaacttaacccgggtataatagttgaagtgttaactccagactttagggggaatattgacgcagttaaaaaagtaattgatgctggagttgacgtatttgcacataacgttgagaccgtaagaagactaacgccaatagtaagggaccctagagcctcatatgagcaaagtctcaatgttttaaaatatgctgaaaacgtgataaaaaaatcctcaatcctcttaggtctcggtgagacttgggatgagatagtagaaacgatgagagatttgagaagtgtaggagttagtatattggtactttcacaatatatgagacctagtcgtaaacaattggaggttaagaagcgttatactttagaagagtttaaggaacttgaggaaatagcctactcaatgggtttctcagctgtgatctccttaccattagctagaacctcttataaggcgaaagaggcctattttagggcgattgaaaatgctaagaatcatagttga

SEQ ID NO: 26831 - protein, 285 aa, Sulfolobus solfataricus
MEKKVQIAVYENENFKRVAEIVKKKSIATVCEEALCPNIMECWGSGTATFMIMGSICTRGCRFCYVLKGKPSPLDDEEPKRVAEAVKEMELDYVVITSVDRDDLSDGGAQHFANVVKTVKELNPGIIVEVLTPDFRGNIDAVKKVIDAGVDVFAHNVETVRRLTPIVRDPRASYEQSLNVLKYAENVIKKSSILLGLGETWDEIVETMRDLRSVGVSILVLSQYMRPSRKQLEVKKRYTLEEFKELEEIAYSMGFSAVISLPLARTSYKAKEAYFRAIENAKNHS

SEQ ID NO: 26832 - DNA, 855 bp, Thermoanaerobacter tengcongensis
  CDS (1)..(855): transl_table=11
ttgacagtgcgaaagcctgaatggcttaaagtgagaattttaagtgaggatttaaacaggatggaagcttttttgaaaaatatggccttaaataccgtatgtcaaagtgcaaactgcccaaacatgggggagtgctttgcaaggagaacagcaacttttatgataatgggcaacatatgtactagaaactgcagattttgtgcagtggaaaaagggcatcctcagccccttgatgaagaagagccgagaagagtggcggaagcagctagaaggttggggttaaggcatgtggtagttacgtctgttacaagggatgatttgccagacggtggggcttcacattttgcgaagacaatatatgagctaaaaaagctgccaggagtcactgttgaagtgcttgtgcctgattttatgggaaatgaagaggcaatcaggactgttgtggaagcaaaacctgatgtaataaatcacaatgtagagacggttccgaggctttactcaagagtgaggccaaaagcggattacattaggtctttaaacctccttaaaaaggtcaaagagctggaccctctaatacttactaaatcagggattatggtgggactgggcgaaacagaagaggaagtaatagaagttatgaaggatttaagagatattgattgcgatatgatgaccataggacagtatctaagaccttctcataagcacatagaagtagctgaatatgtaacccctgaacagtttaaaagatatgaagagataggctacaaattaggatttaagcatgtagcttctgggccgttggttagaagttcttatcatgctgatgtgggtttgagtttagcaagaggatga

SEQ ID NO: 26833 - protein, 284 aa, Thermoanaerobacter tengcongensis
MTVRKPEWLKVRILSEDLNRMEAFLKNMALNTVCQSANCPNMGECFARRTATFMIMGNICTRNCRFCAVEKGHPQPLDEEEPRRVAEAARRLGLRHVVVTSVTRDDLPDGGASHFAKTIYELKKLPGVTVEVLVPDFMGNEEAIRTVVEAKPDVINHNVETVPRLYSRVRPKADYIRSLNLLKKVKELDPLILTKSGIMVGLGETEEEVIEVMKDLRDIDCDMMTIGQYLRPSHKHIEVAEYVTPEQFKRYEEIGYKLGFKHVASGPLVRSSYHADVGLSLARG

SEQ ID NO: 26834 - DNA, 873 bp, Treponema denticola
  CDS (1)..(873): transl_table=11
atgaattttaaggctgggtttatgacttgtaatcaaagaaaacctgattggttaaaaataaaacttcctaccggagaactttcacaggaagtatcgaatacaataaaaatacataaattaaatactatatgtaccagcggcaaatgtcccaatcagggagaatgttggaggtgcggaactgcaacatttatgatttgcggaaatatctgtacgcgtgcatgtaaattctgtaatgtgcctaccggttgcccattgcccctaaatcctaatgagccgatggaaatagctcaatcggttgaggctttaaaattaaaacatgtagttttaacctcggtagatagggacgatataaaagatttcggtgcttcccactgggtaaaggttataagagccgtaaaacaaaaaacaccgaatgttactatggaagttttaattcccgattttcaaggccatgaagatttggtatcgatgattatcgaagcaaaacctgaggtaatttctcataatcttgaaacggtacgcaggctttctccccatgtcaggagcagggctacatatgatacttctctcaaagttttaaaacaaattgcagactccggcttggtatgcaaatcaggtattatgttggggctgggggaaacaagggctgaaattttagaaaccatggacgatttacgcaaaataaactgcaaagttatgaccataggccaatacctcaggccctctataaaaaacattgaggttaaagaatatgtaaggcctgaagtctttgaagaatataaacaaataggtttggagaagggcttttcttttgtggaaagcggtccccttgttcgttccagttatcatgccgaaaagcatgtgttgagctaa

SEQ ID NO: 26835 - protein, 290 aa, Treponema denticola
MNFKAGFMTCNQRKPDWLKIKLPTGELSQEVSNTIKIHKLNTICTSGKCPNQGECWRCGTATFMICGNICTRACKFCNVPTGCPLPLNPNEPMEIAQSVEALKLKHVVLTSVDRDDIKDFGASHWVKVIRAVKQKTPNVTMEVLIPDFQGHEDLVSMIIEAKPEVISHNLETVRRLSPHVRSRATYDTSLKVLKQIADSGLVCKSGIMLGLGETRAEILETMDDLRKINCKVMTIGQYLRPSIKNIEVKEYVRPEVFEEYKQIGLEKGFSFVESGPLVRSSYHAEKHVLS

SEQ ID NO: 26836 - DNA, 1056 bp, Tropheryma whipplei
  CDS (1)..(1056): transl_table=11
atgaacgattctggcaattcaagcaaagttaatgtaaggcccccttcagccggtttgggagcaccctccccgggcaagcgtaagatgctccgcctggaggtacgaaattcgcaggttcctatagaacggaagccctcatggataagggctcgtgcaactattggtacagagtacagaaaggttcaggaacgtgttaagaaacagaatttgcggactgtttgtcaagaagccggatgtccgaatatctacgaatgctgggaggatagagaggcaactttcctgatcggaggatcgcagtgtactcgcaggtgtgatttttgtcagatagacacgggaaaacctgcagagctcgacctggatgagccaaaacgggttggacagtccgtggcgcaaatgaagttacgctatgccaccgtaaccggagtagcacgcgacgacctgcccgatgggggtgtctggctctatgcagaaacaatccgagaaatacacaaacagtgccctggaagtggggttgaaatactcataccagattttaacggtaagccagagttgctccagcaaatcttcgaagcacaaccggaagtgtacgcacacaatatagaaactgttccacggatattcaggcgcattagaccggcattcagatacgacagatcgctggatgttatatcacaaggtcaaaaagctgggatgataacaaaatcaaatcttattcttggaatgggcgagaccggtgaagaggtaacacaggcattgagagacctcaaaagtgccggttgtgacattgtaacaataactcagtatctaagaccatcgcccaggcatttacccgtggcaagatgggtaaaaccacaagagttcatagaatataaagagcaagccaaagagatcggattctcaggcgttttggccggacctttagttagatcatcataccgtgccggaaaactgtgggcacaatctgtgaaagctaagatggttgaaatacccgagcgcgtacggaaactcataaacgaaatcgagatgcaggaaacgtcctttaggcaagcagtctag

SEQ ID NO: 26837 - protein, 351 aa, Tropheryma whipplei
MNDSGNSSKVNVRPPSAGLGAPSPGKRKMLRLEVRNSQVPIERKPSWIRARATIGTEYRKVQERVKKQNLRTVCQEAGCPNIYECWEDREATFLIGGSQCTRRCDFCQIDTGKPAELDLDEPKRVGQSVAQMKLRYATVTGVARDDLPDGGVWLYAETIREIHKQCPGSGVEILIPDFNGKPELLQQIFEAQPEVYAHNIETVPRIFRRIRPAFRYDRSLDVISQGQKAGMITKSNLILGMGETGEEVTQALRDLKSAGCDIVTITQYLRPSPRHLPVARWVKPQEFIEYKEQAKEIGFSGVLAGPLVRSSYRAGKLWAQSVKAKMVEIPERVRKLINEIEMQETSFRQAV

SEQ ID NO: 26838 - DNA, 966 bp, Vibrio cholerae
  CDS (1)..(966): transl_table=11
atgagtaaaccaattcagatggaacgcggcgttaaatatcgtgacgccgacaaaatggctttgattcctatcaagaacatgccgacagagcagaaagaagttctgcgcaaaccagaatggatgaagataaagctacctgcggatagccagcgcattcaagacatcaaggccgccatgcgtaaaaataatcttcactcagtctgtgaagaagcctcctgccctaacttggctgagtgttttaaccatggtacggcgacctttatgattttaggtgctatctgtacccgtcgctgcccattctgtgacgttgcccatggccgccccaatgcaccagaagcggaagagccgaaaaagctcgcacaaaccattcatgatatgaagctcaagtacgtggtaattacttcggtggaccgcgatgacttgcgtgatggtggtgcacaacatttcgccgattgtaaccgtgaaattcgcgctttgaatccgcacatcaagattgaaaccttggtgcctgatttccgtggtcgcatggaagtggctcttgaggccttaaaagacaatccccccgatgtgtttaaccacaatttggaaaccgcgccacgcttgtatcgtaaagtgcgcccaggcgctaactataagtggtcgttagagctgctgcgtcaatttaaagagcagcatcctcatgtaccgactaaatccggtttgatgatgggcttgggtgaaactaaagaagagatcgtcgaagtattgaaagatctccgtgctcatggcgtcaccatgctgactcttggccaatatctcgcacccagtcgccaccatctgccggttgaacgctacgtgccccccgcagagtttgatgagctgaaagaggttgctctagaactcggctttactcatgcagcctgtggaccctttgtacgttcctcttaccatgctgacttacaagccaagggtttagaagtcaaataa

SEQ ID NO: 26839 - protein, 321 aa, Vibrio cholerae
MSKPIQMERGVKYRDADKMALIPIKNMPTEQKEVLRKPEWMKIKLPADSQRIQDIKAAMRKNNLHSVCEEASCPNLAECFNHGTATFMILGAICTRRCPFCDVAHGRPNAPEAEEPKKLAQTIHDMKLKYVVITSVDRDDLRDGGAQHFADCNREIRALNPHIKIETLVPDFRGRMEVALEALKDNPPDVFNHNLETAPRLYRKVRPGANYKWSLELLRQFKEQHPHVPTKSGLMMGLGETKEEIVEVLKDLRAHGVTMLTLGQYLAPSRHHLPVERYVPPAEFDELKEVALELGFTHAACGPFVRSSYHADLQAKGLEVK

SEQ ID NO: 26840 - DNA, 966 bp, Vibrio parahaemolyticus
  CDS (1)..(966): transl_table=11
atgagcaaaccaatccagatggaaaaaggcgttaaatatcgtgacgccgataaaatggcattgattcccgtaaagaacatgcctacagagcagaaagaagtgctacgtaagcctgattggatgaagatcaagctaccagccgacagccaacgaattcaagacatcaaagctgcgatgcgtaagaacaagcttcactccgtatgtgaagaagcgtcttgccctaacctagcggaatgttttaaccacggtacagcaaccttcatgatcctaggtgcaatctgtactcgtcgttgtcctttctgtgacgttgctcatggccgtccattaccaccagaagcagaagagccacaaaaactggcaagaactatcgccgacatgaaactgaagtacgttgttattacttcagtagaccgtgacgacctacgtgatggtggtgcacaacactttgccgattgtaaccgtgagatccgcgagttaaacccagacatcaagatcgaaacactggttcctgacttccgtggtcgtatggacgtagcgcttgacctgatgaaagacaacccgccagatgtcttcaaccacaacctagaaactgcgccgcgtctttaccgtaaagctcgcccaggtgcgaactacaagtggtcacttgagcttcttaagaagttcaaagaacagcatccagatgtaccgaccaaatcaggtctgatgatgggccttggtgaaaccaaagaagaaatcatcgaagtgcttaaagatctgcgtgcacacggtgtaacgatgctgactctaggccagtacctagcgccaagccgtcaccacttgcctgtagaacgttacgttccaccatcagagtttgacgagctaaaagaagtcgcactagagctaggcttcacgcacgcagcatgtggtccatttgttcgctcttcataccatgccgatatgcaggcacaaggtcttgagatcaaataa

SEQ ID NO: 26841 - protein, 321 aa, Vibrio parahaemolyticus
MSKPIQMEKGVKYRDADKMALIPVKNMPTEQKEVLRKPDWMKIKLPADSQRIQDIKAAMRKNKLHSVCEEASCPNLAECFNHGTATFMILGAICTRRCPFCDVAHGRPLPPEAEEPQKLARTIADMKLKYVVITSVDRDDLRDGGAQHFADCNREIRELNPDIKIETLVPDFRGRMDVALDLMKDNPPDVFNHNLETAPRLYRKARPGANYKWSLELLKKFKEQHPDVPTKSGLMMGLGETKEEIIEVLKDLRAHGVTMLTLGQYLAPSRHHLPVERYVPPSEFDELKEVALELGFTHAACGPFVRSSYHADMQAQGLEIK

SEQ ID NO: 26842 - DNA, 951 bp, Wigglesworthia glossinidia brevipalpis
  CDS (1)..(951): transl_table=11
atgaaatcaatatcatatttaaatacaaaagaaaaaaataaaaaaaaattatcaataccatctaaaactatatttgcaaaagaaaatgaatatggtttaaaaaaaccaaattggttaaaaattaaattacctttaaataataaaaaaattaataaaataaaattaataatgagaaaaaataatttacatactgtatgtgaagaagcagcatgtcctaatttagcagaatgttttaatagaggaactgcaacatttatgattttaggatcaatttgtacaagaagatgtcctttttgtaatgtttcgtctggaaggccatctttagtagacacaaaagaacctgaaaatttatcaaaggctgctataaaaatgaaattaaaacatatagtaattacttcggttgatagagatgatttaaaagatggtggttcagaacacttttctaattgtattagatttataagaaaaaaaaatcctgatataaaaatagaaattttagttcctgattttagaggatgtacggagttagcattaaataatattagtacatatcctccagatatttttaatcataatttagaaagcattcctagattatactctaaagtaagacctggagctaattataaaagatctttagaattattggaaaaatttaatctcatcaatccaaacattcctactaaatcaggattaatgcttggattaggagaaaccaaagaagagataattgaagtaatgaaagatttaagaaaatcttatgtaagtatgataactataggtcaatatcttagaccaactaaaaatcatcttactgttaataggtatgttcatccaaaagaatttagagagcttaatttaatagcttttgatttaggatttaaacatgctatgtgcggacctcttgtgagatcttcttatcatgcagaaaatcaaattaattgttattaa

SEQ ID NO: 26843 - protein, 316 aa, Wigglesworthia glossinidia brevipalpis
MKSISYLNTKEKNKKKLSIPSKTIFAKENEYGLKKPNWLKIKLPLNNKKINKIKLIMRKNNLHTVCEEAACPNLAECFNRGTATFMILGSICTRRCPFCNVSSGRPSLVDTKEPENLSKAAIKMKLKHIVITSVDRDDLKDGGSEHFSNCIRFIRKKNPDIKIEILVPDFRGCTELALNNISTYPPDIFNHNLESIPRLYSKVRPGANYKRSLELLEKFNLINPNIPTKSGLMLGLGETKEEIIEVMKDLRKSYVSMITIGQYLRPTKNHLTVNRYVHPKEFRELNLIAFDLGFKHAMCGPLVRSSYHAENQINCY

SEQ ID NO: 26844 - DNA, 864 bp, Wolbachia pipientis wMel
  CDS (1)..(864): transl_table=11
atgcatagcaaacctcaatggctcagagcaaaagctccgaccggtgaagtattcaatgagaccttaaacatcgttaaactgcataacttgcatacagtgtgcgaagaggctgcatgtccaaacattggtgaatgttggaataaacgtcatgctactgtgatgattctcggttctgtttgcactcgtgcttgtgcattttgcaacgttgcaactggcattcctgataaactagatcctcatgaaccagaaaatttagcaaaagcaataaaaaagttaaacttaaaacatgttgtcattacttccgttgatcgtgatgatttgccagatggtggcgcaaatcagtttatacagtgcatagaagaaattagaaagataacttcagaaacaacaatagagattttaactcctgattttttaaataagaaaggagcatttgaagcaatcgctgttgcatcacctgatgtctataaccacaatattgaaacagtgccgagattgtatgcaaaaataagaccacgagctcgctattttcattcactatatttgttgaagatggtaaagcagattaatcctaaagttttcacaaagtcagggcttatggttggtcttggagaaacaaaagaggaaatacttcaggttatggacgatttgcgcagtgctgaggttgattttattacaattggtcaatatctacaaccaactccaaaacatgcaaaacttgataggtatgttaccccagaagagtttgagcattataaatacattgcttactccaaaggtttcttagtggttgcatcaagcccactaactcggtcatcataccacgctgaagaagattttaacaggctcaaggcctgtcgttga

SEQ ID NO: 26845 - protein, 287 aa, Wolbachia pipientis wMel
MHSKPQWLRAKAPTGEVFNETLNIVKLHNLHTVCEEAACPNIGECWNKRHATVMILGSVCTRACAFCNVATGIPDKLDPHEPENLAKAIKKLNLKHVVITSVDRDDLPDGGANQFIQCIEEIRKITSETTIEILTPDFLNKKGAFEAIAVASPDVYNHNIETVPRLYAKIRPRARYFHSLYLLKMVKQINPKVFTKSGLMVGLGETKEEILQVMDDLRSAEVDFITIGQYLQPTPKHAKLDRYVTPEEFEHYKYIAYSKGFLVVASSPLTRSSYHAEEDFNRLKACR

SEQ ID NO: 26846 - DNA, 1014 bp, Xanthomonas axonopodis pv
  CDS (1)..(1014): transl_table=11
atgacccagcctatcgcccgttccattcccttgcaggtcgtctctggcgacaccgccgcgcctgcgccgctgcagactggcgtcaagcagatcggtggcgacaagatcaaccgctcgccggtgcagttcgtggatgcgccggtgctgcggaaaccgtcgtggatccgggtgcggattccgtctggcaatgcggtacagaacctcaaggccaagctgcgcgaaaaccgcctggtcacggtgtgcgaagaagccagctgcccgaacatccacgagtgcttcagccacggcaccgcgaccttcatgattttgggcgaggtgtgcacgcggcgctgctcgttctgcgacgtggcgcatggccggccaaagccgcccgacgcgagcgaacctgccagcctggccgccactgttgccgacatgggcctgaagtacgtggtggtgaccagcgtggatcgtgacgacctgcgcgacggtggcgcgcagcatttcgttgactgcatctcggcgatccggaccagctcgcccaacacgcgtatcgaaatcctgaccccggacttccgcggcaagggccgcatggaccgcgcgctggagatcctggcgctgagcccgccggacgtgttcaaccacaacatcgaaaccgtgccggacctctacccgaatgtgcgccccggcgcggactaccagtggtcgctgacgctgttgcagcgcttcaaggcgcagcatccgtccatcgccaccaagtccggcatcatgctgggcctgggcgagacgatggagcaggtgcaggccacgctgcgcgacctgcgcgcgcacgatgtggacatgatcaccatcggccagtatctgcagccgacgccgcaccatcatccggtgatgcgttactggacgcctgaggaatacaaggcgctggaagactacggcaacgcgctgggcttcagtcatgttgcctccggcccgatggtgcgttcctcgtaccacgccgatcgtcaggccgcaggcgccggcgtcgccgcctga

SEQ ID NO: 26847 - protein, 337 aa, Xanthomonas axonopodis pv
MTQPIARSIPLQVVSGDTAAPAPLQTGVKQIGGDKINRSPVQFVDAPVLRKPSWIRVRIPSGNAVQNLKAKLRENRLVTVCEEASCPNIHECFSHGTATFMILGEVCTRRCSFCDVAHGRPKPPDASEPASLAATVADMGLKYVVVTSVDRDDLRDGGAQHFVDCISAIRTSSPNTRIEILTPDFRGKGRMDRALEILALSPPDVFNHNIETVPDLYPNVRPGADYQWSLTLLQRFKAQHPSIATKSGIMLGLGETMEQVQATLRDLRAHDVDMITIGQYLQPTPHHHPVMRYWTPEEYKALEDYGNALGFSHVASGPMVRSSYHADRQAAGAGVAA

SEQ ID NO: 26848 - DNA, 1014 bp, Xanthomonas campestris pv
  CDS (1)..(1014): transl_table=11
atgacccagcctatcgcccgctccattcccttgcaggtcgtctccggcgacaccgccgcacctgcgtcgctgcagaccggcgtcaagcagatcggtggcgacaagatcaaccgctcgccggtgcagttcgtcgacgcgccggtgctgcgcaagccgtcgtggatccgggtgcggatcccgtccggcaacgcggtgcagaacctcaaggccaagttgcgcgaaaaccgcttggtcacggtctgcgaagaagccagctgcccgaacatccacgagtgcttcagccacggcaccgccaccttcatgatcctgggtgaggtgtgcacgcggcgctgctcgttctgcgacgtggcgcatggtcggcccaagccgccggatgcgagcgagccggccagcctggccaccaccgtggccgacatgggcctgaagtacgtggtggtgaccagcgtggaccgcgacgacctgcgcgacggcggtgcccagcacttcgtcgactgcatctcggcgatccgcgccagcgcgcccaagacccggatcgagatcctgaccccggacttccgtggcaagggccgcatggaccgcgcgctggagatcctggccaccagcccgccggacgtgttcaaccacaacattgaaaccgtgccggacctgtacccgaacgtgcgccccggtgccgattaccagtggtcgctgacgctgctgcagcgcttcaaggcgcagcacccgaccatcgccacgaagtccggcatcatgctcggcctgggcgaaacgatggagcaggtgcaggtcaccctgcgcgacctgcgtgcgcacgatgtggacatgatcacgatcggccaatacctgcagcccacgccgcaccaccacccggtgatgcgctactggacgccggaggaatacaaggcgctggaggagtacggcaatgcgctgggcttcagccacgtggcgtccggcccgatggtgcgttcctcgtaccacgccgaccgccaggctgccggtgccggcgtcgccgcctga

SEQ ID NO: 26849 - protein, 337 aa, Xanthomonas campestris pv
MTQPIARSIPLQVVSGDTAAPASLQTGVKQIGGDKINRSPVQFVDAPVLRKPSWIRVRIPSGNAVQNLKAKLRENRLVTVCEEASCPNIHECFSHGTATFMILGEVCTRRCSFCDVAHGRPKPPDASEPASLATTVADMGLKYVVVTSVDRDDLRDGGAQHFVDCISAIRASAPKTRIEILTPDFRGKGRMDRALEILATSPPDVFNHNIETVPDLYPNVRPGADYQWSLTLLQRFKAQHPTIATKSGIMLGLGETMEQVQVTLRDLRAHDVDMITIGQYLQPTPHHHPVMRYWTPEEYKALEEYGNALGFSHVASGPMVRSSYHADRQAAGAGVAA

SEQ ID NO: 26850 - DNA, 1122 bp, Xylella fastidiosa
  CDS (1)..(1122): transl_table=11
atgactcaacctattgtccgttctatcccgttgcatgttgtctcaaatgatcatccttcatcttccccattgcagcctggagtaaagcaatcgggtgaagacaagattgggcgttcgcctgtgcagtttgcagatgttccggtgttgcgtaaaccatcatggattcgtgttcgcattccatccggcaatgcggtgcaaagtctcaaagccaagctacgtgagaatcgtttagtcacggtgtgtgaggaggctgcctgccctaatatccatgagtgttttagccatggcacagcgacgttcatgattctgggtgaagtgtgcacgcgtcgttgttcgttttgcgatgtggcacatggccgccccaagccaccggacccggaggagccaatcagtttggcacgcaccgtggctgagatgggtttgaagtacgtggtggtgaccagtgtggatcgcgatgatttgcgtgacggtggtgcccagcattttgttgattgcattgctgcgatccgtcagagtgcgccacagacacggatcgagattctgaccccagatttccgaggaaaggggcgcatggatcgtgcattggatattttggcggcatgtccgccggatgtattcaatcataacgttgagacggtgcccgctttgtatcccaatgtgcggccgggagcggattatcaatggtcattgactctcttaaaacgctttaaggcacagcatccgcaggtgcctacgaagtccgggatcatgctcggtttaggggagactctggatcaggtacaggcgacgttgcgtgacttgcgtgctcatgacgtggatatggtcacgattggtcagtatctgcagccgacgtcgcatcatcacccagtgttacggtattggactccagatgagtacaaggcgttggaggagtacggtatggcgttgggtttcagccacgttgcttcaggtccgatggtgcgttcttcgtatcatgccgaccatcaggcgaaagaggcgggcttgggtttcaatgccaccgtttcgctgggctctccagcggtatcgtcgactgaacatcgggagcgccataccatcgcatcaaaatcagcctctaagactgaatcgatccgtcatagatag

SEQ ID NO: 26851 - protein, 373 aa, Xylella fastidiosa
MTQPIVRSIPLHVVSNDHPSSSPLQPGVKQSGEDKIGRSPVQFADVPVLRKPSWIRVRIPSGNAVQSLKAKLRENRLVTVCEEAACPNIHECFSHGTATFMILGEVCTRRCSFCDVAHGRPKPPDPEEPISLARTVAEMGLKYVVVTSVDRDDLRDGGAQHFVDCIAAIRQSAPQTRIEILTPDFRGKGRMDRALDILAACPPDVFNHNVETVPALYPNVRPGADYQWSLTLLKRFKAQHPQVPTKSGIMLGLGETLDQVQATLRDLRAHDVDMVTIGQYLQPTSHHHPVLRYWTPDEYKALEEYGMALGFSHVASGPMVRSSYHADHQAKEAGLGFNATVSLGSPAVSSTEHRERHTIASKSASKTESIRHR

SEQ ID NO: 26852 - DNA, 1122 bp, Xylella fastidiosa
  CDS (1)..(1122): transl_table=11
atgactcaacctattatccgttctatcccgttgcatgttgtctcaaatgatcatccttcatcttccccattgcagcctggagtaaagcaatcgggtgaagacaagattgggcgttcgcctgtgcagtttgcagatgttccggtgttacgtaagccatcatggattcgcgttcgcattccatccggcaatgcggtgcaaagtctcaaagccaagctacgtgagaatcgtttagtcacggtgtgtgaggaggctgcctgccctaatatccatgagtgttttagccatggcacagcgacgttcatgattctgggtgaagtgtgcacgcgtcgttgttcgttttgcgatgtggcgcatggccgccccaaaccgccggacccggaggaaccaatcagtttggcacgcaccgtcgctgagatgggtttgaagtacgtggtggtgaccagtgtggatcgcgatgatttgcgtgacggtggtgcccagcattttgttgattgcattgctgcgatccgtcagagtgcaccacaaacacggatcgagattctgaccccagatttccgaggaaagggacgcatggatcgtgcattggacattttggcggcatgtccgccggatgtattcaatcataacgttgaaacggtgcccgctttgtatcccaatgtgcgacccggagcggattatcaatggtcattgacgctcttaaaacgctttaaggcacagcatccgcaggtgcctacgaagtccgggatcatgctcggtttaggggagactctggatcaggtacaggcgacgttgcgtgacttgcgtgctcatgacgtggatatggtcacggttggtcagtatctgcagccgacgccgcatcatcacccagtgttgcggtattggactccggatgagtacaaggcgttggaagagtacggtatggcgttgggtttcagccacgttgcttcaggtccgatggtgcgttcttcgtatcacgccgaccatcaggcgaaagaggcgggcttaggcttcaatgccaccgtttcgctgggctctccagcggtatcgtcgactgaacatcgggagcgcaataccatcgcatcaaaatcagcctctaagactgaatcgatccatcatagatag

SEQ ID NO: 26853 - protein, 373 aa, Xylella fastidiosa
MTQPIIRSIPLHVVSNDHPSSSPLQPGVKQSGEDKIGRSPVQFADVPVLRKPSWIRVRIPSGNAVQSLKAKLRENRLVTVCEEAACPNIHECFSHGTATFMILGEVCTRRCSFCDVAHGRPKPPDPEEPISLARTVAEMGLKYVVVTSVDRDDLRDGGAQHFVDCIAAIRQSAPQTRIEILTPDFRGKGRMDRALDILAACPPDVFNHNVETVPALYPNVRPGADYQWSLTLLKRFKAQHPQVPTKSGIMLGLGETLDQVQATLRDLRAHDVDMVTVGQYLQPTPHHHPVLRYWTPDEYKALEEYGMALGFSHVASGPMVRSSYHADHQAKEAGLGFNATVSLGSPAVSSTEHRERNTIASKSASKTESIHHR

SEQ ID NO: 26854 - DNA, 966 bp, Yersinia pestis
  CDS (1)..(966): transl_table=11
atgagtaaaccgattcagatggaacgcggcgtaaaataccgtgatgcagacaaaatggcgttaatcccggtaaaaaacgtggtgaccgaacgtcaggagctgttgcgtaaacccgagtggctaaaaatcaagcttccgactgattccagccgcattcagggtatcaaagctgcaatgcgtaagaatggtctgcattcggtttgtgaagaggcctcctgccctaacctgtctgagtgctttaaccacggtacggcaacatttatgatccttggtgcaatttgtacccgccgttgcccattctgtgacgttgcccatggtcgcccagtcacaccggatgctaatgagccagagaagctggcacagacgatccaagacatgggtctgcgctatgttgttatcacgtccgttgaccgtgatgacctacgtgatggtggtgctcagcattttgccgattgtatttcagcgatccgcgccaagaatccaaccatcaaaattgaaacgttagtccctgatttccgtggtcgtatggatcgcgcactcgatattctgaccgcaaccccaccagatgtatttaaccataatttggaaaacgtaccacgtgtttatcggcaggttcgtccaggggcgaactacgattggtcactgaaattacttgagcgcttcaaagaagcacatccagatatcccaactaaatccggcttaatggtcggcttgggcgaaaccaatgccgagattgtcgaggtcatgcatgatttacgccgccacggggtcacgatgttgacgctggggcaatacttgcaaccaagccgccatcatttacccgtacaacgttatgtcagcccggccgagtttgacgaaatgaaagcagaagccatggctatgggctttacccatgcagcctgtggcccatttgttcgctcttcttaccatgcagacctgcaagcgaaaggtatggaagtgaagtaa

SEQ ID NO: 26855 - protein, 321 aa, Yersinia pestis
MSKPIQMERGVKYRDADKMALIPVKNVVTERQELLRKPEWLKIKLPTDSSRIQGIKAAMRKNGLHSVCEEASCPNLSECFNHGTATFMILGAICTRRCPFCDVAHGRPVTPDANEPEKLAQTIQDMGLRYVVITSVDRDDLRDGGAQHFADCISAIRAKNPTIKIETLVPDFRGRMDRALDILTATPPDVFNHNLENVPRVYRQVRPGANYDWSLKLLERFKEAHPDIPTKSGLMVGLGETNAEIVEVMHDLRRHGVTMLTLGQYLQPSRHHLPVQRYVSPAEFDEMKAEAMAMGFTHAACGPFVRSSYHADLQAKGMEVK

SEQ ID NO: 26856 - DNA, 972 bp, Zymomonas mobilis
  CDS (1)..(972): transl_table=11
atgagtaaaattcccgcacctgatgaaaaaaccagccgatccgattctggttcctcgattttgcgtaaaccggactggcttcgtgtccgttctcccggtggcgctgcttttaatgaaacccacggcttgatacggaaactgggtctggccacggtgtgcgaagaagcagcctgtcccaatattggagaatgctggacaaaaaaacaggcaaccgtcatgattttgggggaagtctgtacccgtgcctgtgctttttgcaatgtaaagacaggccatcccgacaaggtcaatcctttggaaccggggcatgttgctgatgtcgctgccgaaatgaatttggagcatattgttatcacatcggttgatcgtgatgacctcgaagacggcggcgcttcgcaatttgtcaaagttatcgaagccgtcagggcaagaaccccgaaaacgacgattgagattctgaccccagatttccgtggtaagccggatcatgcattggatatgatcgtcaaagcccgccccgatgtattcaatcacaatcttgaaacggtgccccgtctttacccaacgattcgtccgggagcgcgctatttcacttccttgcgcttgcttgaaaaagtgcgggaacgggacccctctatctttactaaatccggtttaatgctgggtttaggcgaagatcgtttggaagtgcatcaggtcatggacgacatgcggcaagcggatgtcgacttcttaaccttagggcaatatttgcaacctacgccgcgccatgttcgggtagaagagtttgttacacctgacagcttcaaggcctatgcggcgacagctagagccaagggtttttcaatggtggcatcctctcctttaacgcgttccagctattatgccggtgctgattttgcgcgtttaaaagaagcccgccaaaagaagttggaaaaaatagccgccaaaaatagcgggaagggtgcctaa

SEQ ID NO: 26857 - protein, 323 aa, Zymomonas mobilis
MSKIPAPDEKTSRSDSGSSILRKPDWLRVRSPGGAAFNETHGLIRKLGLATVCEEAACPNIGECWTKKQATVMILGEVCTRACAFCNVKTGHPDKVNPLEPGHVADVAAEMNLEHIVITSVDRDDLEDGGASQFVKVIEAVRARTPKTTIEILTPDFRGKPDHALDMIVKARPDVFNHNLETVPRLYPTIRPGARYFTSLRLLEKVRERDPSIFTKSGLMLGLGEDRLEVHQVMDDMRQADVDFLTLGQYLQPTPRHVRVEEFVTPDSFKAYAATARAKGFSMVASSPLTRSSYYAGADFARLKEARQKKLEKIAAKNSGKGA

SEQ ID NO: 26858 - DNA, 25 bp, Artificial sequence
  Primer sequence
atgagtaaacccattgtgatggaac

SEQ ID NO: 26859 - DNA, 24 bp, Artificial sequence
  Primer sequence
ttacttaacttccatccctttcgc

SEQ ID NO: 26860 - protein, 313 aa, Artificial sequence
  Consensus
  Variant (2)..(2): Xaa in position 2 is any amino acid
  Variant (6)..(19): Xaa in position 6 to 19 is any amino acid
  Variant (20)..(27): Xaa in position 20 to 27 is any or no amino acid
  Variant (30)..(32): Xaa in position 30 to 32 is any amino acid
  Variant (34)..(34): Xaa in position 34 is any amino acid
  Variant (41)..(41): Xaa in position 41 is any amino acid
  Variant (46)..(46): Xaa in position 46 is any amino acid
  Variant (50)..(53): Xaa in position 50 to 53 is any amino acid
  Variant (54)..(64): Xaa in position 54 to 64 is any or no amino acid
  Variant (67)..(67): Xaa in position 67 is any amino acid
  Variant (72)..(73): Xaa in position 72 to 73 is any amino acid
  Variant (77)..(77): Xaa in position 77 is any amino acid
  Variant (79)..(79): Xaa in position 79 is any amino acid
  Variant (82)..(82): Xaa in position 82 is any amino acid
  Variant (84)..(85): Xaa in position 84 to 85 is any amino acid
  Variant (87)..(87): Xaa in position 87 is any amino acid
  Variant (88)..(88): Xaa in position 88 is any or no amino acid
  Variant (90)..(92): Xaa in position 90 to 92 is any amino acid
  Variant (94)..(95): Xaa in position 94 to 95 is any amino acid
  Variant (98)..(99): Xaa in position 98 to 99 is any amino acid
  Variant (102)..(103): Xaa in position 102 to 103 is any amino acid
  Variant (105)..(106): Xaa in position 105 to 106 is any amino acid
  Variant (108)..(108): Xaa in position 108 is any amino acid
  Variant (110)..(110): Xaa in position 110 is any amino acid
  Variant (118)..(118): Xaa in position 118 is any amino acid
  Variant (123)..(123): Xaa in position 123 is any amino acid
  Variant (128)..(129): Xaa in position 128 to 129 is any amino acid
  Variant (131)..(133): Xaa in position 131 to 133 is any amino acid
  Variant (135)..(136): Xaa in position 135 to 136 is any or no amino acid
  Variant (139)..(141): Xaa in position 139 to 141 is any amino acid
  Variant (143)..(150): Xaa in position 143 to 150 is any or no amino acid
  Variant (153)..(153): Xaa in position 153 is any or no amino acid
  Variant (155)..(155): Xaa in position 155 is any or no amino acid
  Variant (159)..(159): Xaa in position 159 is any or no amino acid
  Variant (161)..(175): Xaa in position 161 to 175 is any or no amino acid
  Variant (177)..(178): Xaa in position 177 to 178 is any or no amino acid
  Variant (180)..(184): Xaa in position 180 to 184 is any amino acid
  Variant (187)..(188): Xaa in position 187 to 188 is any amino acid
  Variant (195)..(196): Xaa in position 195 to 196 is any amino acid
  Variant (198)..(199): Xaa in position 198 to 199 is any amino acid
  Variant (200)..(200): Xaa in position 200 is any or no amino acid
  Variant (203)..(204): Xaa in position 203 to 204 is any amino acid
  Variant (205)..(205): Xaa in position 205 is any or no amino acid
  Variant (207)..(207): Xaa in position 207 is any amino acid
  Variant (209)..(210): Xaa in position 209 to 210 is any amino acid
  Variant (213)..(213): Xaa in position 213 is any amino acid
  Variant (216)..(218): Xaa in position 216 to 218 is any amino acid
  Variant (220)..(222): Xaa in position 220 to 222 is any amino acid
  Variant (223)..(226): Xaa in position 223 to 226 is any or no amino acid
  Variant (228)..(228): Xaa in position 228 is any or no amino acid
  Variant (232)..(232): Xaa in position 232 is any amino acid
  Variant (240)..(242): Xaa in position 240 to 242 is any amino acid
  Variant (245)..(247): Xaa in position 245 to 247 is any amino acid
  Variant (249)..(249): Xaa in position 249 is any amino acid
  Variant (253)..(258): Xaa in position 253 to 258 is any amino acid
  Variant (266)..(266): Xaa in position 266 is any amino acid
  Variant (269)..(270): Xaa in position 269 to 270 is any amino acid
  Variant (271)..(272): Xaa in position 271 to 272 is any or no amino acid
  Variant (274)..(275): Xaa in position 274 to 275 is any amino acid
  Variant (277)..(278): Xaa in position 277 to 278 is any amino acid
  Variant (280)..(281): Xaa in position 280 to 281 is any amino acid
  Variant (283)..(284): Xaa in position 283 to 284 is any amino acid
  Variant (286)..(291): Xaa in position 286 to 291 is any amino acid
  Variant (293)..(294): Xaa in position 293 to 294 is any amino acid
  Variant (295)..(296): Xaa in position 295 to 296 is any or no amino acid
  Variant (299)..(304): Xaa in position 299 to 304 is any amino acid
  Variant (307)..(307): Xaa in position 307 is any amino acid
  Variant (312)..(312): Xaa in position 312 is any amino acid
PXWLRXXXXXXXXXXXXXXXXXXXXXXLRXXXLXTVCEEAXCPNIXECWXXXXXXXXXXXXXXXATXMILGXXCTRXCXFCXVXXGXXPXXXDXXEPXXVAXXVXXMXLXYVVITSVXRDDLXDGGAXXFXXXIXXIRXXXPXXXXXXXXIEXLXPDFXGXXXXXXXXXXXXXXXLXXLXXXXXDVXXHNLETVXXLXXXVRXXXAXYXXSLXLLXXXKXXXXXXXIXTKSXLMLGLGEXXXEVXXXMXDLRXXXXXXLTIGQYLXPSXXXXHXXVXXYXXPXXFXXXXXXAXXXXGFXXXXXXPLXRSSYXA

SEQ ID NO: 26861 - protein, 16 aa, Artificial sequence
  Consensus
  Variant (2)..(2): Xaa in position 2 is any amino acid
  Variant (3)..(3): Xaa in position 3 is Ser or Thr
  Variant (6)..(6): Xaa in position 6 is Glu, Gln or Arg
  Variant (7)..(7): Xaa in position 7 is Glu or Ser
  Variant (9)..(9): Xaa in position 9 is any amino acid
  Variant (13)..(13): Xaa in position 13 is Ile, Leu, Met or Val
  Variant (14)..(14): Xaa in position 14 is any amino acid
LXXVCXXAXCPNXXEC

SEQ ID NO: 26862 - protein, 17 aa, Artificial sequence
  Consensus
  Variant (3)..(3): Xaa in position 3 is Phe, Ile, Met or Val
  Variant (4)..(4): Xaa in position 4 is Leu or Met
  Variant (5)..(5): Xaa in position 5 is Ile, Leu or Val
  Variant (6)..(6): Xaa in position 6 is any amino acid
  Variant (8)..(9): Xaa in position 8 to 9 is any amino acid
  Variant (13)..(13): Xaa in position 13 is any amino acid
  Variant (15)..(15): Xaa in position 15 is any amino acid
ATXXXXGXXCTRXCXFC

SEQ ID NO: 26863 - protein, 32 aa, Artificial sequence
  Consensus
  Variant (2)..(2): Xaa in position 2 is Ala, Gly or Pro
  Variant (3)..(5): Xaa in position 3 to 5 is any amino acid
  Variant (6)..(6): Xaa in position 6 is Ala, Gly, Ser or Thr
  Variant (7)..(7): Xaa in position 7 is any amino acid
  Variant (8)..(8): Xaa in position 8 is Ala, Asn, Ser, Thr or Val
  Variant (9)..(13): Xaa in position 9 to 13 is any amino acid
  Variant (14)..(14): Xaa in position 14 is Ile, Leu or Val
  Variant (15)..(15): Xaa in position 15 is any amino acid
  Variant (16)..(16): Xaa in position 16 is His or Tyr
  Variant (17)..(17): Xaa in position 17 is any amino acid
  Variant (18)..(18): Xaa in position 18 is Thr or Val
  Variant (19)..(19): Xaa in position 19 is Ile, Leu, Met or Val
  Variant (21)..(21): Xaa in position 21 is any amino acid
  Variant (22)..(22): Xaa in position 22 is Pro or Val
  Variant (23)..(23): Xaa in position 23 is Ala, Cys, Asp, Asn, Ser, Thr or Val
  Variant (28)..(28): Xaa in position 28 is any amino acid
  Variant (30)..(30): Xaa in position 30 is any amino acid
EXXXXXXXXXXXXXXXXXXTXXXRDDLXDXGA

SEQ ID NO: 26864 - protein, 39 aa, Artificial sequence
  Consensus
  Variant (2)..(2): Xaa in position 2 is Ser or Thr
  Variant (3)..(3): Xaa in position 3 is Gly, Asn or Ser
  Variant (4)..(4): Xaa in position 4 is Ile, Leu or Met
  Variant (5)..(5): Xaa in position 5 is Ile or Met
  Variant (6)..(6): Xaa in position 6 is Ile, Leu, Met or Val
  Variant (8)..(8): Xaa in position 8 is any amino acid
  Variant (11)..(12): Xaa in position 11 to 12 is any amino acid
  Variant (13)..(13): Xaa in position 13 is any or no amino acid
  Variant (15)..(20): Xaa in position 15 to 20 is any amino acid
  Variant (21)..(21): Xaa in position 21 is any or no amino acid
  Variant (23)..(30): Xaa in position 23 to 30 is any amino acid
  Variant (31)..(31): Xaa in position 31 is Ile, Leu, Met or Val
  Variant (32)..(32): Xaa in position 32 is Ala or Thr
  Variant (33)..(33): Xaa in position 33 is Phe, Ile, Leu or Val
  Variant (34)..(34): Xaa in position 34 is Gly or Thr
  Variant (37)..(37): Xaa in position 37 is Ile, Leu or Met
  Variant (38)..(38): Xaa in position 38 is any amino acid
KXXXXXGXGEXXXEXXXXXXXDXXXXXXXXXXXXQYXXP

SEQ ID NO: 26865 - DNA, 1053 bp, Escherichia coli
  CDS (1)..(1053)
atgaattatcagaacgacgatttacgcatcaaagaaatcaaagagttacttcctcctgtcgcattgctggaaaaattccccgctactgaaaatgccgcgaatacggttgcccatgcccgaaaagcgatccataagatcctgaaaggtaatgatgatcgcctgttggtggtgattggcccgtgctcaattcatgatcctgtcgcggctaaagagtatgccactcgcttgctggcgctgcgtgaagagctgaaagatgagctggaaatcgtaatgcgcgtctattttgaaaagccgcgtactacggtgggctggaaagggctgattaacgatccgcatatggataacagcttccagatcaacgacggtctgcgtatagcccgtaaattgctgcttgatattaacgacagcggtctgccagcggcgggtgaattcctcgatatgatcactcctcagtatctcgctgacctgatgagctggggcgcaattggtgcacgtaccacggaatcgcaggtgcaccgcgaactggcgtctggtctttcttgtccggtaggttttaaaaatggcacagacggtacgattaaagtggctatcgatgccattaatgccgccggtgcgccgcactgcttcctgtccgtaactaaatgggggcattcggcgattgtgaataccagcggtaacggcgattgccatatcattctgcgcggcggtaaagagcctaactacagcgcgaagcacgttgctgaagtgaaagaagggctgaacaaagcaggtctgccagctcaggtgatgatcgatttcagccatgctaattcgtccaaacaattcaaaaagcagatggatgtttgtgctgacgtttgccagcagattgccggtggcgaaaaggccattatcggtgtgatggtggaaagtcatctggtggaaggcaatcagagcctggagagcggggagccgctggcctatggtaagagcatcaccgatgcctgcattggctgggaagataccgatgctctgttacgtcaactggcgaacgcagtgaaagcgcgtcgcgggtaa

SEQ ID NO: 26866 - protein, 350 aa, Escherichia coli; identical to SEQ ID NO: 1580

SEQ ID NO: 26867 - DNA, 1092 bp, Mesorhizobium loti MAFF303099
  CDS (1)..(1092): transl_table=11
gtgttgaccaccacagacgacctccgggtcaaggaaatccgagaactgagcacgccggaccaggtgatgcgggaaatcccgcgcacgctgacggcgacgcgcaccgtgagcgcctcacgcaatgcgatccacgctattctgaacggcaccgacgaccggctgcttgtcgtcgtcggtccctgttcgatccacgatccggtcgcggccgttgactatgccagccgtctggcggcgctgcgcgagaccctgtccgaccggcttgagatcgtgatgcgggtgtatttcgagaagccgcgcaccacggtcggctggaagggcctgatcaacgatcccgaccttgacggcagcttcaacatcgacaaggggctcaggatggcacgcaacgtgctttccgccgtcaacaatctcggcctgccggcggccaccgaattcctcgacatgaccacgccgcaatacattgccgacctcgtcgcctggggtgccatcggcgcgcgcaccaccgaaagccaaatccaccgtgagctggcctcgggcctgtcctgcccggtcggtttcaagaacggcaccgacggcaatctcaggatcgccggcgaggcggtgaaatcggccgcccagccgcatcatttcatggcggtgaccaagggcggacgcagcggcatcgccaccaccaccggcaatgaggactgccatgtcatcctgcgcggcggcgttcagcccaactacgacgcggcgagcgtcgaggcggcctcggtcgaactcgcccgcatcggtgtcgcgccgcggctgatgatcgatgtcagccacgccaactccgccaagaagcctgagaaccagccgaaggtggcggccgatgtggccggccaggtggcggcgggcgacgagcgcatcatcggcctgatgatcgagagcaatctcgtcgccggccggcaggacgtggtgcccggcaagccgctcgtctatggccagagcatcaccgatggctgcatcgactgggcgaccaccgagaccgtgctgcatggccttgccggtgccgtcgagtggcgccggtcggcacgccgcgccatgctggaaagccggcagggtgctgcctga

SEQ ID NO: 26868 - protein, 363 aa, Mesorhizobium loti MAFF303099; identical to SEQ ID NO: 1540

SEQ ID NO: 26869 - DNA, 1074 bp, Vibrio cholerae O1 biovar eltor str. N16961; identical to SEQ ID NO: 1343
  CDS (1)..(1074): transl_table=11

SEQ ID NO: 26870 - protein, 357 aa, Vibrio cholerae O1 biovar eltor str. N16961; identical to SEQ ID NO: 1344

SEQ ID NO: 26871 - DNA, 1188 bp, Vibrio cholerae O1 biovar eltor str. N16961
  CDS (1)..(1188): transl_table=11
ttggtcaaatgctcggtttttacttcaatttacacccctttccgcagctgttttcggcgtaatggtttattctcgttgacaaattcgttatctttagcgcttcgcaataaaaggacaggcgctcctatgccactgaaaaccgatgaattaagaacccaagcattgggacctatgcctactccggcagaattaagtcacgcacatcctatcactgatgaagttgcgctacggatcgcgcagtctcgtcgccaaattgaaagcattcttaccggtgaagatgatcgcctattagtgatagtggggccttgttcggtgcatgataccgatgccgcactcgactacgctcgccgccttgctgcgctacaagaaaactatactgatgagctttttgtggtgatgcggacctatttcgaaaaaccacgtactgtggtgggttggaaaggactgatcaccgatccaaacttagatggctcttacgctttagaaaccggtctcaataaagcgcgaaagttgctgcttgatgtaaacaagctcggattggctaccgcgaccgagtttcttgatatgatcacaggccaatacatcgcggaccttatcacgtggggcgcaattggtgcgcgtaccactgagtcgcaaattcaccgtgagatggcctctgcgctctcctgccctgtgggttttaaaaatggcactaacggtaatgtgaaaatcgcgattgatgcgatccgcgcggccaaagcgtcacattacttctattcaccagataagaatggtcgtatgacggtttaccgtaccagtggtaacccatttggtcatattattctgcgtggtggtgatagcggaccaaactttgatgcggcttcgattaatgaagcttgccagcagttggcgcaattcaacttaccagagcgtttagtggtggatttcagccacgcgaactgtcaaaaacaacaccgtaaacaagtggatgtcgcgcgcgatatttgccagcaaattgaagctggcagccacaaaattgcgggcatcatggcggaaagcttccttgtggaaggcaatcagccaatgcacgatctcaataatctgacttatggtctgtcgatcaccgatccttgtttaggatggaaagataccgccaccatgcttgatatgctggctcaatcgatcaaagtccgtcgttctcgtcattaa

SEQ ID NO: 26872 - protein, 395 aa, Vibrio cholerae O1 biovar eltor str. N16961
MVKCSVFTSIYTPFRSCFRRNGLFSLTNSLSLALRNKRTGAPMPLKTDELRTQALGPMPTPAELSHAHPITDEVALRIAQSRRQIESILTGEDDRLLVIVGPCSVHDTDAALDYARRLAALQENYTDELFVVMRTYFEKPRTVVGWKGLITDPNLDGSYALETGLNKARKLLLDVNKLGLATATEFLDMITGQYIADLITWGAIGARTTESQIHREMASALSCPVGFKNGTNGNVKIAIDAIRAAKASHYFYSPDKNGRMTVYRTSGNPFGHIILRGGDSGPNFDAASINEACQQLAQFNLPERLVVDFSHANCQKQHRKQVDVARDICQQIEAGSHKIAGIMAESFLVEGNQPMHDLNNLTYGLSITDPCLGWKDTATMLDMLAQSIKVRRSRH

SEQ ID NO: 26873 - DNA, 1086 bp, Pasteurella multocida subsp. multocida str. Pm70; identical to SEQ ID NO: 1545
  CDS (1)..(1086): transl_table=11

SEQ ID NO: 26874 - protein, 361 aa, Pasteurella multocida subsp. multocida str. Pm70; identical to SEQ ID NO: 1546

SEQ ID NO: 26875 - DNA, 1053 bp, Pasteurella multocida subsp. multocida str. Pm70
  CDS (1)..(1053): transl_table=11
gtgaataaagataacatacataatgtcaatattgttggtgaaaaggtactgattaccccaaaagaattgaaggaaaaactccctctatcccttcctcttcgtagccaaatagcgcaatcacgccgtgatattgcgaatatcatccataaaaaagatcagcgtttattggttgtgattggaccatgttctattcatgatccgatcgcggctttagaatacgcttcacgtttaaaacacttagcagaagaattacaagatcaattgtatattgtgatgcgagtgtattttgaaaaaccaagaacaactgttggctggaaaggattgattaatgatccgaaattggatggttcatttgatgtggaacatggcttacatattgcacgagcattactgctagagctggctgaaatgggactccctttggcaaccgaagcacttgatcccattatgccgcaatatattgctgatctatttagttggtctgcgattggtgcgagaacgacagaatcacaaacgcacagagaaatgtcatcaggtttatccatggcagtgggatttaaaaatggtacggatggcagtttagccaccgcaattaatgcaatgaaagcagcgtcagttggacacagttttattgggattaatcaacaaggtcaagtcaatctattacatacagcgggcaaccctaatgggcatgtgattttgcgtggcggaaaatcaccaaattatgaagctgaacatatcgcactttgtgaacaagaattgcaaaaagcaggtttgacgcaagcaattatgatcgattgtagccatggtaactcgaataaagattaccgtttgcagccgaaagtggcaaaaaatgccgtacagcaaattgtgaagggaaatcgctctattatcgggttgatgttagaaagtcatttatacgcaggtaatcaaagtgctgatcagccattgagtgaaatgcaatatggggtttcgattacggatgcctgtattgattggcagacgacagaacaattattacgtgaaatgacgagcgcattgcgccaaaaataa

SEQ ID NO: 26876 - protein, 350 aa, Pasteurella multocida subsp. multocida str. Pm70; identical to SEQ ID NO: 1544

SEQ ID NO: 26877 - DNA, 1077 bp, Pseudomonas aeruginosa PAO1; identical to SEQ ID NO: 1339
  CDS (1)..(1077): transl_table=11

SEQ ID NO: 26878 - protein, 358 aa, Pseudomonas aeruginosa PAO1; identical to SEQ ID NO: 1340

SEQ ID NO: 26879 - DNA, 1095 bp, Pseudomonas aeruginosa PAO1; identical to SEQ ID NO: 1351
  CDS (1)..(1095): transl_table=11

SEQ ID NO: 26880 - protein, 364 aa, Pseudomonas aeruginosa PAO1; identical to SEQ ID NO: 1352

SEQ ID NO: 26881 - DNA, 1038 bp, Lactococcus lactis subsp. lactis Il1403; identical to SEQ ID NO: 1345
  CDS (1)..(1038): transl_table=11

SEQ ID NO: 26882 - protein, 345 aa, Lactococcus lactis subsp. lactis Il1403; identical to SEQ ID NO: 1346

SEQ ID NO: 26883 - DNA, 1023 bp, Lactococcus lactis subsp. lactis Il1403; identical to SEQ ID NO: 1347
  CDS (1)..(1023): transl_table=11

SEQ ID NO: 26884 - protein, 340 aa, Lactococcus lactis subsp. lactis Il1403; identical to SEQ ID NO: 1348

SEQ ID NO: 26885 - DNA, 1056 bp, Neisseria meningitidis MC58; identical to SEQ ID NO: 2269
  CDS (1)..(1056): transl_table=11

SEQ ID NO: 26886 - protein, 351 aa, Neisseria meningitidis MC58; identical to SEQ ID NO: 2270

SEQ ID NO: 26887 - DNA, 1056 bp, Neisseria meningitidis Z2491; identical to SEQ ID NO: 1329
  CDS (1)..(1056): transl_table=11

SEQ ID NO: 26888 - protein, 351 aa, Neisseria meningitidis Z2491; identical to SEQ ID NO: 1330

SEQ ID NO: 26889 - DNA, 1086 bp, Deinococcus radiodurans R1; identical to SEQ ID NO: 1327
  CDS (1)..(1086): transl_table=11

SEQ ID NO: 26890 - protein, 361 aa, Deinococcus radiodurans R1; identical to SEQ ID NO: 1328

SEQ ID NO: 26891 - DNA, 1143 bp, Xylella fastidiosa 9a5c
  CDS (1)..(1143): transl_table=11
ttgtctcctccgcttggtctatgtctaaatgttctgagattacatcccatgccaccatttaccgacgacctccgtatccgcaaaattgaaccactgacacctcctaaccagctcctattgcaactaccatgcgatgagcaggcatcgctgactgttgcgacctcacgcaacgcactgcacgatatcctgcacggccacaacgaccgtttagccgtcgtgataggcccatgctcaatccatgatccaattgcagccattgattacgcgcaacgtctacacccattgcgtgagatgtacaaggatgcactagagatcgtgatgcgggtttactttcagaaaccgcgcaccaccattggttggaaaggattggtcaacgatccggatcttgatggcagcttccaaatcaataagggcctgcatatcgcgcgcaacctgctacgcgatatcaatcatctcggcttacccgctggtgtggaatttctagacacgatttcgccgcaatatctggctgacttagtcgcctggggtgccattggtgcacgcaccactgagagccaaatacaccgtgaaatggcttcaggtttatcgtgcccgattggctttaaaaacagtaccagtggtgatgtgaaaattgctgctgacgcgattaaagcagcttcgcatccgcaccatttcctttcagtgacaaagacaggtgttgccgcagtcgtcgccacccagggtaaccccgattgtcacgtgattctacgtggaggcagggtcccgaattacgacgcaatcaatgtcgaagctgccagccaaacattgcttaaatccaagctaccggtgcgactgatgattgatgcgagccatgccaatagcggcaaaaacccaaacaatcaacccaaggtgatcgagaacatcgtagaacagcttgaagccggtgaacgccgcatcgtcggtgtcatgattgaaagccacattgttggtggtcggcaagaattagtccttggaaacacacttacctatggacagagcattaccgatgcttgcatcgactgggatacctcggtcgcaatgttagagcagctcgctcaggccgtacgcgtcagacagactctaccaacgaccgctacaactaacaaaacatcaaaaacccaataa

SEQ ID NO: 26892 - protein, 380 aa, Xylella fastidiosa 9a5c; identical to SEQ ID NO: 1604

SEQ ID NO: 26893 - DNA, 1071 bp, Escherichia coli O157:H7
  CDS (1)..(1071): transl_table=11
atgcaaaaagacgcgctgaataacgtacatattaccgacgaacaggttttaatgactccggcacaactgaaggccgcttttccattaagcctgcaacaagaagcccagattgctgactcgcgtaaaaccatttcagatattatcgccgggcgcgatcctcgtctgctggtagtatgtggcccttgttccattcatgatccggaaactgctctggaatatgctcgtcgatttaaagcccttgccgcagaggtcagcgatagcctctatctggtaatgcgcgtctattttgaaaaaccccgtaccactgtcggctggaaagggttaattaacgatccccatatggatggctcttttgatgtagaagccgggctgcagatcgcgcgtaaattgctgcttgagctggtgaatatgggactgccactggcgacggaagcgttagatccgaatagcccgcaatacctgggcgatctgtttagctggtcagcaattggtgctcgtacaacggaatcgcaaactcaccgtgaaatggcctccgggctttccatgccggttggctttaaaaacggcaccgacggcagtctggcaacagcaattaacgctatgcgcgccgccgcccagccgcaccgttttgttggcattaaccaggcagggcaggttgcgttgctacaaactcaggggaatccggacgggcatgtcatcctgcgcggtggtaaagcgccgaactatagccctgcggatgttgcgcaatgtgaaaaagagatggaacaggcgggactgcgcccgtctctgatggtagattgcagccacggtaattccaataaagattatcgccgtcagcctgcggtggcagaatccgtggttgctcaaatcaaagatggcaatcgctcaattattggtctgatgatcgaaagtaatatccacgagggcaatcagtcttccgagcaaccgcgcagtgaaatgaaatacggtgtatccgtaaccgatgcctgcattagctgggaaatgaccgatgccttgctgcgtgaaattcatcaggatctgaacgggcagctgacggctcgcgtggcttaa

SEQ ID NO: 26894 - protein, 356 aa, Escherichia coli O157:H7
MQKDALNNVHITDEQVLMTPAQLKAAFPLSLQQEAQIADSRKTISDIIAGRDPRLLVVCGPCSIHDPETALEYARRFKALAAEVSDSLYLVMRVYFEKPRTTVGWKGLINDPHMDGSFDVEAGLQIARKLLLELVNMGLPLATEALDPNSPQYLGDLFSWSAIGARTTESQTHREMASGLSMPVGFKNGTDGSLATAINAMRAAAQPHRFVGINQAGQVALLQTQGNPDGHVILRGGKAPNYSPADVAQCEKEMEQAGLRPSLMVDCSHGNSNKDYRRQPAVAESVVAQIKDGNRSIIGLMIESNIHEGNQSSEQPRSEMKYGVSVTDACISWEMTDALLREIHQDLNGQLTARVA

SEQ ID NO: 26895 - DNA, 1032 bp, Streptococcus pneumoniae TIGR4; identical to SEQ ID NO: 1349
  CDS (1)..(1032): transl_table=11

SEQ ID NO: 26896 - protein, 343 aa, Streptococcus pneumoniae TIGR4; identical to SEQ ID NO: 1350

SEQ ID NO: 26897 - DNA, 1032 bp, Streptococcus pneumoniae TIGR4
  CDS (1)..(1032): transl_table=11
atggtatttacagcaaaaagctctaaaataaatatagaagaagttcgtgccttgtcaaaattagaaggtcaggctttggagaggaaatcacagcgagatcaagagctagaagccattatacgtggagaagaccagcgaattctcttggtaatcgggccatgctcatctgacaacgaagaagctgtccttgaatacgctaagcgtttggcagtcctacaagaagaagtggcagatcgtatctttatggttatgcgtgtttatactgccaaaccccgtaccaacggagatggctataagggcttgattcaccagcctaacgcgacagaagcgcctagtcttatcaatggaatcaaagccgttcgccatcttcactatcgtgtcatcacagaaacagggatgacaactgctgatgaaatgctttatcctgaaaaccttccgcttgtagatgatttgatttcttacatggcagttggtgcccgttcagttgaagaccagcaacaccgctttgtggcaagtggggcaggattttctactggttttaaaaatccaacctctggaaatctcaatgtcatgtttaatgggatttatgctgctcaaaacaaacaaagtttccttttcttaggaaaagaagtagaaacaactgggaacccgctttcacacgctattcttcgtggtgctcttaatgagtatggaaaaaatattcccaactactattatgacaatttaattgataccattgcccagtatgagaaaatgggcttggaaaatccttttatcatcattgataccaatcatgacaattctggtaagcagtatattgaacagatccgaattgtccgccagaccttgattaaccgtgcttggaatgaaaaaattaagcagttcgttcgtggttttatgattgagtcttatctggaagatggtcgacaaaatgagccagaagtatttggtaagtctatcacagacccttgcctgggttgggataacacagaagctcttgtcagagaaatttacaaaacgttaggagaataa

SEQ ID NO: 26898 - protein, 343 aa, Streptococcus pneumoniae TIGR4; identical to SEQ ID NO: 1590

SEQ ID NO: 26899 - DNA, 1032 bp, Streptococcus pneumoniae R6; identical to SEQ ID NO: 1355
  CDS (1)..(1032): transl_table=11

SEQ ID NO: 26900 - protein, 343 aa, Streptococcus pneumoniae R6; identical to SEQ ID NO: 1356

SEQ ID NO: 26901 - DNA, 1071 bp, Yersinia pestis CO92; identical to SEQ ID NO: 2247
  CDS (1)..(1071): transl_table=11

SEQ ID NO: 26902 - protein, 356 aa, Yersinia pestis CO92; identical to SEQ ID NO: 2248

SEQ ID NO: 26903 - DNA, 1110 bp, Caulobacter crescentus CB15; identical to SEQ ID NO: 1353
  CDS (1)..(1110): transl_table=11

SEQ ID NO: 26904 - protein, 369 aa, Caulobacter crescentus CB15; identical to SEQ ID NO: 1354

SEQ ID NO: 26905 - DNA, 1053 bp, Salmonella typhimurium LT2
  CDS (1)..(1053): transl_table=11
atgaattatcagaacgacgatttacgcattaaagaaatcaacgagttattacctccggtcgcgctgctggaaaagtttcccgccacggaaaatgcagcaaataccgttgctcacgcgcgcaaagccatccataaaattctcaaaggcaatgacgatcgtctgctggtggtgatcggtccttgttcaattcatgatccggcagcggcgaaagagtatgccgcccgtttgctggcgctacgcgatgagcttcaaggcgagcttgaaattgtcatgcgcgtctattttgagaaaccgcgtaccaccgtcggctggaaagggctgattaacgatccgcacatggataacagcttccagattaacgacggtctgcgtattgcgcgcaaactgctgctggatattaacgacagcggcctgcctgccgccggcgaattcctcgatatgatcacgccgcaatatctggccgatctgatgagctggggcgccattggcgcgcggactactgaatcccaggttcatcgcgaattggcgtctggcctctcttgtccggtcggttttaaaaatggtactgatggcacgattaaagtcgccattgacgccatcaacgccgccggcgcgccgcattgcttcctctccgtcactaaatggggtcattcggcgattgtgaataccagcggcaacggcgactgccatatcattctgcgcggcggtaaagcgccaaactatagcgcgcagcatgttgctgaggtgaaagaaggcctcaccaaagcgggactgacgccgcaggtcatgatcgatttcagccatgccaactcctgtaagcaatttcaaaagcagatggaggtttgcgccgatgtctgccagcagatagcgggcggtgaaaaagcgattattggcgtgatggtagagagtcatctggtagaaggaaaccagagtctggaaagcggtcagccgctgacctacggtaaaagcattactgacgcctgtattggctgggaagataccgatgcgctgcttcgtcagttgtcggcagcggtaaaagcccgtcgcggctaa

SEQ ID NO: 26906 - protein, 350 aa, Salmonella typhimurium LT2
MNYQNDDLRIKEINELLPPVALLEKFPATENAANTVAHARKAIHKILKGNDDRLLVVIGPCSIHDPAAAKEYAARLLALRDELQGELEIVMRVYFEKPRTTVGWKGLINDPHMDNSFQINDGLRIARKLLLDINDSGLPAAGEFLDMITPQYLADLMSWGAIGARTTESQVHRELASGLSCPVGFKNGTDGTIKVAIDAINAAGAPHCFLSVTKWGHSAIVNTSGNGDCHIILRGGKAPNYSAQHVAEVKEGLTKAGLTPQVMIDFSHANSCKQFQKQMEVCADVCQQIAGGEKAIIGVMVESHLVEGNQSLESGQPLTYGKSITDACIGWEDTDALLRQLSAAVKARRG

SEQ ID NO: 26907 - DNA, 1131 bp, Nostoc sp. PCC 7120; identical to SEQ ID NO: 1335
  CDS (1)..(1131): transl_table=11

SEQ ID NO: 26908 - protein, 376 aa, Nostoc sp. PCC 7120; identical to SEQ ID NO: 1336

SEQ ID NO: 26909 - DNA, 1179 bp, Ralstonia solanacearum GMI1000; identical to SEQ ID NO: 1531
  CDS (1)..(1179): transl_table=11

SEQ ID NO: 26910 - protein, 392 aa, Ralstonia solanacearum GMI1000; identical to SEQ ID NO: 1532

SEQ ID NO: 26911 - DNA, 1080 bp, Ralstonia solanacearum GMI1000; identical to SEQ ID NO: 1529
  CDS (1)..(1080): transl_table=11

SEQ ID NO: 26912 - protein, 359 aa, Ralstonia solanacearum GMI1000; identical to SEQ ID NO: 1530

SEQ ID NO: 26913 - DNA, 1119 bp, Schizosaccharomyces pombe 972h-; identical to SEQ ID NO: 1371
  CDS (1)..(1119)

SEQ ID NO: 26914 - protein, 372 aa, Schizosaccharomyces pombe 972h-; identical to SEQ ID NO: 1372

SEQ ID NO: 26915 - DNA, 1074 bp, Xanthomonas campestris pv. campestris str. ATCC 33913; identical to SEQ ID NO: 1525
  CDS (1)..(1074): transl_table=11

SEQ ID NO: 26916 - protein, 357 aa, Xanthomonas campestris pv. campestris str. ATCC 33913; identical to SEQ ID NO: 1526

SEQ ID NO: 26917 - DNA, 1074 bp, Xanthomonas axonopodis pv. citri str. 306; identical to SEQ ID NO: 1527
  CDS (1)..(1074): transl_table=11

SEQ ID NO: 26918 - protein, 357 aa, Xanthomonas axonopodis pv. citri str. 306; identical to SEQ ID NO: 1528

SEQ ID NO: 26919 - DNA, 1062 bp, Chlorobium tepidum TLS; identical to SEQ ID NO: 1523
  CDS (1)..(1062): transl_table=11

SEQ ID NO: 26920 - protein, 353 aa, Chlorobium tepidum TLS; identical to SEQ ID NO: 1524

SEQ ID NO: 26921 - DNA, 1077 bp, Yersinia pestis KIM; identical to SEQ ID NO: 1489
  CDS (1)..(1077): transl_table=11

SEQ ID NO: 26922 - protein, 358 aa, Yersinia pestis KIM; identical to SEQ ID NO: 1490

SEQ ID NO: 26923 - DNA, 1047 bp, Yersinia pestis KIM; identical to SEQ ID NO: 1331
  CDS (1)..(1047): transl_table=11

SEQ ID NO: 26924 - protein, 348 aa, Yersinia pestis KIM; identical to SEQ ID NO: 1332

SEQ ID NO: 26925 - DNA, 1053 bp, Yersinia pestis KIM; identical to SEQ ID NO: 1487
  CDS (1)..(1053): transl_table=11

SEQ ID NO: 26926 - protein, 350 aa, Yersinia pestis KIM; identical to SEQ ID NO: 1488

SEQ ID NO: 26927 - DNA, 1062 bp, Thermosynechococcus elongatus BP-1; identical to SEQ ID NO: 1499
  CDS (1)..(1062): transl_table=11

SEQ ID NO: 26928 - protein, 353 aa, Thermosynechococcus elongatus BP-1; identical to SEQ ID NO: 1500

SEQ ID NO: 26929 - DNA, 1008 bp, Streptococcus agalactiae 2603V/R
  CDS (1)..(1008): transl_table=11
atgggatttcatcagttaagtgataaaattaatattgaaatattgaagcagaaaactagcttagatctagaagttagccaaaaaaaattagccaaagaagaagagttaaaaaatatcataaaaggtgaggatcagcggtttctagtaatagtaggtccttgttctgcggataatccaaaggcggtgctaacttatgcaaagcgtttagctaaattggaagctgcctttaaagataaaatgtttttggttatgagagtttataccgctaagccaagaacgaatggtgatggttataaaggcttagttcaccattctgacaaactaggagttttttttcaagcacgtaagatgcactatgacatcattcgagagactggactcctgacagctgatgaattactttatccagagatgttatcagtgatggatgatttagtttcttactatgctattggtgcgcgttcagtggaagatcagggacaccgttttatatcttcaggtatagatgcaccagtaggtatgaaaaatccaacgtctggtaatttaagagtcatgtttaatgcggtctatgcagcacaaaatcaacaggaattattctatcaaaataagcaagttagaacagatggtaatttgctgtcacatgttattttgagaggatatcataatgccgactatcgaagtatccctaattatcattatgaaaaccttttagaaactattactcattatgaagagactgatttgcaaaatccctttattgttgttgatacaaatcatgacaattcaggtaagcaatttttagaacaaattcgcattgtgaaatcagtacttgcagaccgacagtggcatactaaaattagaaactatgttcgtggttttttgatagaatcttatttagaagatggaagacaagataaaccagatgtttttggtaagtctatcacagatccatgtctaggttgggataaaacagaaatgctaattagggatatttacaatagtttgtaa

SEQ ID NO: 26930 - protein, 335 aa, Streptococcus agalactiae 2603V/R
MGFHQLSDKINIEILKQKTSLDLEVSQKKLAKEEELKNIIKGEDQRFLVIVGPCSADNPKAVLTYAKRLAKLEAAFKDKMFLVMRVYTAKPRTNGDGYKGLVHHSDKLGVFFQARKMHYDIIRETGLLTADELLYPEMLSVMDDLVSYYAIGARSVEDQGHRFISSGIDAPVGMKNPTSGNLRVMFNAVYAAQNQQELFYQNKQVRTDGNLLSHVILRGYHNADYRSIPNYHYENLLETITHYEETDLQNPFIVVDTNHDNSGKQFLEQIRIVKSVLADRQWHTKIRNYVRGFLIESYLEDGRQDKPDVFGKSITDPCLGWDKTEMLIRDIYNSL

SEQ ID NO: 26931 - DNA, 1233 bp, Bifidobacterium longum NCC2705; identical to SEQ ID NO: 1519
  CDS (1)..(1233): transl_table=11

SEQ ID NO: 26932 - protein, 410 aa, Bifidobacterium longum NCC2705; identical to SEQ ID NO: 1520

SEQ ID NO: 26933 - DNA, 1134 bp, Bifidobacterium longum NCC2705; identical to SEQ ID NO: 1517
  CDS (1)..(1134): transl_table=11

SEQ ID NO: 26934 - protein, 377 aa, Bifidobacterium longum NCC2705; identical to SEQ ID NO: 1518

SEQ ID NO: 26935 - DNA, 1071 bp, Shigella flexneri 2a str. 301
  CDS (1)..(1071): transl_table=11
atgcataaagacgcgctgaataacgtacatattaccgacgaacaggttttaatgactccggaacaactgaaggccgcttttccattgagcctgcaacaagaagcccagattgctgactcgcgtaaaaccatttcagatattatcgccgggcgcgatcctcgtctgctggtagtatgtggtccttgttccattcatgatccggaaactgctctggaatatgctcgtcgatttaaagctcttgccgcagaggtcagcgatagcctctatctggtaatgcgcgtctattttgaaaaaccccgtaccactgtcggctggaaagggttaattaacgatccccatatggatggctcttttgatgtagaagccgggctgcaaatcgcgcgtaaattgttgcttgagctggtgaatatgggactgccactggcgacggaagcgttagatccgaatagcccgcaatacctgggcgatctgtttagctggtcagcaattggtgctcgtacaacggaatcgcaaactcaccgtgaaatggcctccgggctttccatgccggttggttttaaaaacggcaccgacggcagtctggcaacagcaattaacgctatgcgcgccgccgcccagccgcactgttttgttggcattaaccaggcagggcaggttgcgttgctacaaactcaggggaatccggacgggcatgtgatcctgcgcggtggtaaagcgccgaactatagccctgcggatgttgcgcaatgtgaaaaagagatggaacaggcgggactgcgcccgtctctgatggtagattgcagccacggtaattccaataaagattatcgccgtcagcctgcggtggcagaatccgtggttgctcaaatcaaagatggtaatcgctcaattattggtctgatgatcgaaagtaatatccacgagggcaatcagtcttctgagcaaccgcgcagtgaaatgaaatacggtgtatccgtaaccgatgcctgcattagctgggaaatgactgatgccttgctgcgtgaaattcatcaggatctgaacgggcagctgacggctcgcgtggcttaa

SEQ ID NO: 26936 - protein, 356 aa, Shigella flexneri 2a str. 301
MHKDALNNVHITDEQVLMTPEQLKAAFPLSLQQEAQIADSRKTISDIIAGRDPRLLVVCGPCSIHDPETALEYARRFKALAAEVSDSLYLVMRVYFEKPRTTVGWKGLINDPHMDGSFDVEAGLQIARKLLLELVNMGLPLATEALDPNSPQYLGDLFSWSAIGARTTESQTHREMASGLSMPVGFKNGTDGSLATAINAMRAAAQPHCFVGINQAGQVALLQTQGNPDGHVILRGGKAPNYSPADVAQCEKEMEQAGLRPSLMVDCSHGNSNKDYRRQPAVAESVVAQIKDGNRSIIGLMIESNIHEGNQSSEQPRSEMKYGVSVTDACISWEMTDALLREIHQDLNGQLTARVA

SEQ ID NO: 26937 - DNA, 1059 bp, Shewanella oneidensis MR-1; identical to SEQ ID NO: 1511
  CDS (1)..(1059): transl_table=11

SEQ ID NO: 26938 - protein, 352 aa, Shewanella oneidensis MR-1; identical to SEQ ID NO: 1512

SEQ ID NO: 26939 - DNA, 1092 bp, Shewanella oneidensis MR-1; identical to SEQ ID NO: 1509
  CDS (1)..(1092): transl_table=11

SEQ ID NO: 26940 - protein, 363 aa, Shewanella oneidensis MR-1; identical to SEQ ID NO: 1510

SEQ ID NO: 26941 - DNA, 1065 bp, Shewanella oneidensis MR-1; identical to SEQ ID NO: 1507
  CDS (1)..(1065): transl_table=11

SEQ ID NO: 26942 - protein, 354 aa, Shewanella oneidensis MR-1; identical to SEQ ID NO: 1508

SEQ ID NO: 26943 - DNA, 1035 bp, Streptococcus mutans UA159; identical to SEQ ID NO: 1503
  CDS (1)..(1035): transl_table=11

SEQ ID NO: 26944 - protein, 344 aa, Streptococcus mutans UA159; identical to SEQ ID NO: 1504

SEQ ID NO: 26945 - DNA, 1032 bp, Streptococcus mutans UA159; identical to SEQ ID NO: 1501
  CDS (1)..(1032): transl_table=11

SEQ ID NO: 26946 - protein, 343 aa, Streptococcus mutans UA159; identical to SEQ ID NO: 1502

SEQ ID NO: 26947 - DNA, 1008 bp, Streptococcus agalactiae NEM316; identical to SEQ ID NO: 1505
  CDS (1)..(1008): transl_table=11

SEQ ID NO: 26948 - protein, 335 aa, Streptococcus agalactiae NEM316; identical to SEQ ID NO: 1506

SEQ ID NO: 26949 - DNA, 1170 bp, Corynebacterium efficiens YS-314
  CDS (1)..(1170): transl_table=11
ttgtttccccatatgatttcccccataaacggtttccacaccaccatcaccgcccgaaaggcagaccccagcaccatgagcgccccagtgtccctccccaacccggcatccaccagcaacaaacgggtggttgccttccatgagctgcccagcccggccgaactcaccgccgacaaccccctgagtccacgtcaggcggagaaggttgagcgcgaccgccaggagatcgccgatatcttcgccggcgatgatgaccgcctcgtggttgtggtcggcccgtgttcggtccatgacccggaggctgcgatcgactacgccaaccgcctggcgcccctggccaagcggctggaccaggacctgaagatcgtcatgcgtgtctacttcgagaagccacgcaccaccgtcgggtggaaggggctgatcaatgatccgcacctcaacgagacctacgacatcgccgagggactgcgcctggcacgcaaggtgcttatcgacgttgtgaacctcgacctgcccgtcggttgtgaattcctcgaaccgaacagcccgcagtactacgccgatgccgtggcctggggtgccatcggtgcacgcaccaccgaatcccaggtccaccgccagctcgcctccgggatgtccatgcccatcggtttcaagaacggcaccgacggcaatgtccaggttgccatcgatgcggtggaatccgcccggagcccccacttcttctttggcacctccgaccacggtgcaccctcggtggtgcagaccgcgggtaactccaacagccatatcatcctccgtggtggcaccaccggacccaaccacgatgcggcatccgtggcgcaggccgtggagaagctgggggagggggcacgtctcatgatcgatgcctcccacgccaactcaggcaaggaccatatccgtcaggtcggtgtggtccgtgagatcgccgagcagatcgccgctggtgatgaggccatcgccggcatcatgatcgagtccttcctcgtcggtggcgcccagaacctggatcctgccaggctgaagatcaacggcggtgaggggctggtctacggccagtccgtcaccgacaagtgcatcgacatcgacaccaccgtcgatctgctcggtgagctcgccgcggcggtccgtacccgccggcaggcctga

SEQ ID NO: 26950 - protein, 389 aa, Corynebacterium efficiens YS-314; identical to SEQ ID NO: 1516

SEQ ID NO: 26951 - DNA, 1113 bp, Pseudomonas putida KT2440
  CDS (1)..(1113): transl_table=11
ttggcggccggcacccgtgacctgacgagtaacacgatggctgatttaccgatcgatgacttgaacgttgcctccaacgagaccctgatcacccctgatcagctcaagaaggaaatccccctcagcgccaaggccctgcagaccgtgactgccggccgtgaagtggtgcgcaatattctcgacggcaaggaccatcgcctgttcgtcgtggtcggcccttgctccatccacgacatcaaggcagcccacgaatacgccgagcgcctgaaagtgctggccgaagaagtgtccgatacgctgtacctggtcatgcgcgtgtacttcgaaaagccgcgcaccaccgtcggctggaaaggcctgatcaacgatccgtacctggatgactcgttcaagatccaggacggcctgcacatcggccgcaagttgctgctggacctggccgaaatgggcctgccgaccgccaccgaagcgctcgacccgatttcgccgcagtacctgcaagacctgatcagctggtcggccatcggtgcccgcaccaccgaatcgcaaacacaccgcgagatggcctcgggcctgtcctcggcggtgggtttcaagaacggtaccgatggcggcctgaccgttgccatcaatgccctgcagtcggtgtccaagccgcaccgcttcctgggcatcaaccaggaaggcggcgtgtcgatcgtcaccaccaagggcaacccatacggccacgtggtactgcgcggcggcaatggcaagccgaactacgactcggtcagcgtcgccctgtgcgaacaggacctggccaaggccaagatcaaggccaacatcatggtcgactgcagccatgccaactccaacaaggacccggccctgcaaccgctggtgatggagaacgtcgccaaccagattctcgaaggcaaccagtcgatcatcggcctgatggtcgaaagccacctgaactggggctgtcagtccattccgaaaaacctggacgatttgcagtatggcgtgtcgatcacggacgcctgcatcgactggtcggctaccgagaaaaccctgcgcagcatgcatgccaagctcaaggatgtgctgccgcagcgtaagcgcggctga

SEQ ID NO: 26952 - protein, 370 aa, Pseudomonas putida KT2440; identical to SEQ ID NO: 1484

SEQ ID NO: 26953 - DNA, 1062 bp, Pseudomonas putida KT2440; identical to SEQ ID NO: 1481
  CDS (1)..(1062): transl_table=11

SEQ ID NO: 26954 - protein, 353 aa, Pseudomonas putida KT2440; identical to SEQ ID NO: 1482

SEQ ID NO: 26955 - DNA, 1077 bp, Escherichia coli CFT073
  CDS (1)..(1077): transl_table=11
gtgtgcaatagatggttaagaatagaactttcaggagatacaatgcagtcagtcagtaaatcaatctaccgagggaagttgcttagcagtttacctgctgtgggcgagattcataaagaaatcgcagtatcagaagaaaccgtaacatggatctctctgcaacgagagattatagcgaatattttgctgggaaaagatcctcgcttgcttgtgattgttggtccatgctcaatccatgacgttcaggctgccgttgaatatgcgaaacgattgtccgtattacagaataagtacttatcgcaaatgtacattgtaatgcgcacttattttgagaaacctcgaactcgtaaaggctggaaaggaataatgcacgatcctgatctaaatggaagctataatgttgagaaagggatacgatatgctcgccagtgtttgtcctcaatcacaacaatgcgtgtcgcaaccgctacagaattcctcgatcctttccttactccctatattgctgatttaatatgttggggggctgttggtgccagaactactgaatcacaaacgcatcgtcaacttgcgtctggtttacattgtcctgttggatttaaaaacagcactgatggaaatattaacttagctattgatgctattcttgcagcccgtgaacaacatgttgtatatatgacatctttaacaaaatgtatatctaccctattaaccgatggcaatccacatggacatctcatattacgtggtggtagagagccgaactatggtttgtcggatataacgaaggcagtgaaattaatgcatgatgaaggtatcaatcatcgtctgataattgactgtagccatggtaatagtggtaaagtggctgaacggcaaatctctgttgctcgtgaagtcattgataatcggaaaaagatgccgggatatgtagctggaattatgctggaaagctttttacaaggtggaaaacaatcagacagccttccgcgagagtatggtcagtctgttactgatgagtgtctttcatggcaacagacagaacaattattatcaactctggcagcacaactttaa

SEQ ID NO: 26956 - protein, 358 aa, Escherichia coli CFT073
MCNRWLRIELSGDTMQSVSKSIYRGKLLSSLPAVGEIHKEIAVSEETVTWISLQREIIANILLGKDPRLLVIVGPCSIHDVQAAVEYAKRLSVLQNKYLSQMYIVMRTYFEKPRTRKGWKGIMHDPDLNGSYNVEKGIRYARQCLSSITTMRVATATEFLDPFLTPYIADLICWGAVGARTTESQTHRQLASGLHCPVGFKNSTDGNINLAIDAILAAREQHVVYMTSLTKCISTLLTDGNPHGHLILRGGREPNYGLSDITKAVKLMHDEGINHRLIIDCSHGNSGKVAERQISVAREVIDNRKKMPGYVAGIMLESFLQGGKQSDSLPREYGQSVTDECLSWQQTEQLLSTLAAQL

SEQ ID NO: 26957 - DNA, 1140 bp, Escherichia coli CFT073
  CDS (1)..(1140): transl_table=11
atgtgttatcgttacgtcatcctcgctgaggatcaactatcgcaaacgagcataaacaggatcgccatcatgcagaaagacgcgctgaataacgtacatattaccgacgaacaggttttaatgactccggaacaactgaaggccgcttttccattaagcctgcaacaagaagcccagattgctgactcgcgtaaaaccatttcagatattatcgccgggcgcgatcctcgtctgctggtagtatgtggtccttgttccattcatgatccggaaactgctctggaatatgctcgtcgatttaaagcccttgccgcagaggtcagcgatagcctctatctggtaatgcgcgtctattttgaaaaaccccgtaccactgtcggctggaaagggttaattaacgatccccatatggatggctcttttgatgtagaagccgggctgcagatcgcgcgtaaattgctgcttgagctggtgaatatgggactgccactggcgacggaagcgttagatccgaatagcccgcaatacctgggcgatctgtttagctggtcagcaattggtgctcgtacaacggaatcgcaaactcaccgtgaaatggcctccgggctttccatgccggttggttttaaaaacggcaccgatggcagtctggcaacggcaattaacgctatgcgtgccgccgcccagccgcaccgttttgttggcattaaccaggcagggcaggttgcgttgctacaaactcaggggaatccggacgggcatgtgatcctgcgcggtggtaaagcgccaaactatagccctgcggatgttgcgcaatgtgaaaaagagatggaacaggcgggactgcgcccgtctctgatggtagattgcagccacggtaattccaataaagattatcgccgtcagcctgcggtggcagaatccgtggttgctcaaatcaaagatggcaatcgctcaattattggtctgatgatcgaaagtaatatccacgagggcaatcagtcttccgagcaaccgcgcagtgaaatgaaatacggtgtatccgtaaccgatgcctgcattagctgggaaatgaccgatgccttgctgcgtgaaattcatcaggatctgaacgggcagctgacggctcgcgtggcttaa

SEQ ID NO: 26958 - protein, 379 aa, Escherichia coli CFT073
MCYRYVILAEDQLSQTSINRIAIMQKDALNNVHITDEQVLMTPEQLKAAFPLSLQQEAQIADSRKTISDIIAGRDPRLLVVCGPCSIHDPETALEYARRFKALAAEVSDSLYLVMRVYFEKPRTTVGWKGLINDPHMDGSFDVEAGLQIARKLLLELVNMGLPLATEALDPNSPQYLGDLFSWSAIGARTTESQTHREMASGLSMPVGFKNGTDGSLATAINAMRAAAQPHRFVGINQAGQVALLQTQGNPDGHVILRGGKAPNYSPADVAQCEKEMEQAGLRPSLMVDCSHGNSNKDYRRQPAVAESVVAQIKDGNRSIIGLMIESNIHEGNQSSEQPRSEMKYGVSVTDACISWEMTDALLREIHQDLNGQLTARVA

SEQ ID NO: 26959 - DNA, 1071 bp, Vibrio vulnificus CMCP6; identical to SEQ ID NO: 1497
  CDS (1)..(1071): transl_table=11

SEQ ID NO: 26960 - protein, 356 aa, Vibrio vulnificus CMCP6; identical to SEQ ID NO: 1498

SEQ ID NO: 26961 - DNA, 1053 bp, Vibrio vulnificus CMCP6; identical to SEQ ID NO: 1495
  CDS (1)..(1053): transl_table=11

SEQ ID NO: 26962 - protein, 350 aa, Vibrio vulnificus CMCP6; identical to SEQ ID NO: 1496

SEQ ID NO: 26963 - DNA, 1071 bp, Vibrio vulnificus CMCP6; identical to SEQ ID NO: 1739
  CDS (1)..(1071): transl_table=11

SEQ ID NO: 26964 - protein, 356 aa, Vibrio vulnificus CMCP6; identical to SEQ ID NO: 1740

SEQ ID NO: 26965 - DNA, 1086 bp, Bradyrhizobium japonicum USDA 110
  CDS (1)..(1086): transl_table=11
gtgctgagcacgactgacgatcttcgtatccgtgaactgaaagagctgagcacgccggatgaggtaatgcgggaggtcccgcgcacgctcaccgcaacgcgtgtggtgatggcggcgcgcaacgccatccatgccatcctcaccggccaggacgaccgcctgctggtggtggtcggcccgtgctcggtgcatgatccccgggccgcgctcgactacgctgagcgtctgacaaaactgcgcgaggacctcgccgaccagctcgagatcgtaatgcgggtctatttcgagaagccgcgcaccaccgtcggctggaagggcctgatcaacgaccccgatctcgacggcagcttcgacatcaacaagggcctgcggctggcgcgcaacgtgctgtcagcggtgaacaatctcggcctcccggccggcgccgaattcctggacatgacgacgccgcaatacatcgctgacctcgtgtcctgggccgcgatcggcgcgcgcacgaccgagagccagatccatcgcgagctggcctccgggctgtcctgcccggtcggcttcaagaacggcaccgatggcaatgtgcggatcgcggcggacgcagtgaagtcggcctcgcatccgcatcatttcatggcggtgaccaagctcggccgctcggcgatcgcctcgaccgcgggcaacgaggactgccacatcatcctgcgcggcggcagcacgccgaactacgatgcggcaagcgtcgcggcggcctgcaacgagctggcgaaatccggcgtcgcgccgctggtgatggtggatgcgagccacgccaattcgagcaagaagccggagaaccagccgctggtcatggccgacattgccggccagatttccggtggcgagagccgcatcatgggtgtgatgatcgagagcaatctcgtcgccggccgccaggacgtggttccgggcaagccgctcacctacggccagagcatcacggacggctgtatcgactgggcgaccacggcaactgtgctcgagcagctcgccgatgcggtcgaaatccggcgcaacgcccagcgcgcggggctgcacgagcgctcggcgtaa

SEQ ID NO: 26966 - protein, 361 aa, Bradyrhizobium japonicum USDA 110; identical to SEQ ID NO: 1486

SEQ ID NO: 26967 - DNA, 1143 bp, Xylella fastidiosa Temecula1
  CDS (1)..(1143): transl_table=11
ttgtctcctccgcttggtctatgtctaaatgttctgagattacatcccatgccaccatttaccgacgacctccgtatccgaaaaattgaaccactgacacctcctaacaagctcctcttacaactaccatgcgatgagcaggcatcgctgactgttgcgacctcacgcaacgcactgcacgatatcctgcacggccacaatgaccgtttagccgtcgtgataggcccatgctcaatccatgatccaattgcagccattgattactcgcaacgtctacgcccattgcgtgagatgtacaaggatgcactagaaatcgtgatgcgagtttactttcagaaaccgcgcaccactattggttggaaaggattggtcaacgatccggatcttgatggcagcttccagatcaataagggcttgcatatcgcgcgcaacctgctgcgcgatatcaatcatctcggcttacccgctggtgtggaatttctagacacgatttcgccgcaatatctggctgacttagtcgcctggggtgccattggtgctcgcaccactgaaagccaaatacaccgtgaaatggcttcaggtttatcgtgcccgattggctttaaaaacagtaccagtggtgatgtgaagattgctgctgacgcgattaaagcagcttcgcatccgcaccatttcctttcagtgacaaagacaggtgttgccgcagtcgtcgccacccagggtaaccccgattgtcacgtgattctgcgtggaggcaaggtcccgaattacgacgcaatcaatgtcgaagctgccagccaaacattgcttaaatccaagctaccggtgcgactgatgattgatgcgagccatgccaatagcggcaaaaatccaaacaatcaacctaaggtgatcgagaacatcgtagaacagcttaaagccggtgaacgccgcatcatcggtgtcatgattgaaagccacattgttggtggccggcaagaattagtccttggaaacacacttaactatggacagagcattaccgatgcttgcatcgactgggatacctcggttgcaatgttagaacagctcgctcaggccgtacgcgtcagacagactctaccaacgaccactacagctaacaaaacatcaaaaacccaataa

SEQ ID NO: 26968 - protein, 380 aa, Xylella fastidiosa Temecula1; identical to SEQ ID NO: 1470

SEQ ID NO: 26969 - DNA, 1077 bp, Pseudomonas syringae pv. tomato str. DC3000; identical to SEQ ID NO: 1479
  CDS (1)..(1077): transl_table=11

SEQ ID NO: 26970 - protein, 358 aa, Pseudomonas syringae pv. tomato str. DC3000; identical to SEQ ID NO: 1480

SEQ ID NO: 26971 - DNA, 1083 bp, Pseudomonas syringae pv. tomato str. DC3000; identical to SEQ ID NO: 1477
  CDS (1)..(1083): transl_table=11

SEQ ID NO: 26972 - protein, 360 aa, Pseudomonas syringae pv. tomato str. DC3000; identical to SEQ ID NO: 1478

SEQ ID NO: 26973 - DNA, 1074 bp, Vibrio parahaemolyticus RIMD 2210633; identical to SEQ ID NO: 1475
  CDS (1)..(1074): transl_table=11

SEQ ID NO: 26974 - protein, 357 aa, Vibrio parahaemolyticus RIMD 2210633; identical to SEQ ID NO: 1476

SEQ ID NO: 26975 - DNA, 1053 bp, Vibrio parahaemolyticus RIMD 2210633; identical to SEQ ID NO: 1473
  CDS (1)..(1053): transl_table=11

SEQ ID NO: 26976 - protein, 350 aa, Vibrio parahaemolyticus RIMD 2210633; identical to SEQ ID NO: 1474

SEQ ID NO: 26977 - DNA, 1053 bp, Vibrio parahaemolyticus RIMD 2210633; identical to SEQ ID NO: 1471
  CDS (1)..(1053): transl_table=11

SEQ ID NO: 26978 - protein, 350 aa, Vibrio parahaemolyticus RIMD 2210633; identical to SEQ ID NO: 1472

SEQ ID NO: 26979 - DNA, 1053 bp, Salmonella enterica subsp. enterica serovar Typhi Ty2; identical to SEQ ID NO: 1337
  CDS (1)..(1053): transl_table=11

SEQ ID NO: 26980 - protein, 350 aa, Salmonella enterica subsp. enterica serovar Typhi Ty2; identical to SEQ ID NO: 1338

SEQ ID NO: 26981 - DNA, 1083 bp, Coxiella burnetii RSA 493; identical to SEQ ID NO: 1465
  CDS (1)..(1083): transl_table=11

SEQ ID NO: 26982 - protein, 360 aa, Coxiella burnetii RSA 493; identical to SEQ ID NO: 1466

SEQ ID NO: 26983 - DNA, 1179 bp, Nitrosomonas europaea ATCC 19718; identical to SEQ ID NO: 1463
  CDS (1)..(1179): transl_table=11

SEQ ID NO: 26984 - protein, 392 aa, Nitrosomonas europaea ATCC 19718; identical to SEQ ID NO: 1464

SEQ ID NO: 26985 - DNA, 1053 bp, Rhodopirellula baltica SH 1; identical to SEQ ID NO: 1445
  CDS (1)..(1053): transl_table=11

SEQ ID NO: 26986 - protein, 350 aa, Rhodopirellula baltica SH 1; identical to SEQ ID NO: 1446

SEQ ID NO: 26987 - DNA, 1038 bp, Wigglesworthia glossinidia endosymbiont of Glossina brevipalpis; identical to SEQ ID NO: 1491
  CDS (1)..(1038): transl_table=11

SEQ ID NO: 26988 - protein, 345 aa, Wigglesworthia glossinidia endosymbiont of Glossina brevipalpis; identical to SEQ ID NO: 1492

SEQ ID NO: 26989 - DNA, 1080 bp, Haemophilus ducreyi 35000HP
  CDS (1)..(1080): transl_table=11
gtggattctgtagcaaatcaagatagtttacataatgtaaatatctctactgaaaaagtattacttactccaaaacaactaaaaactgagtttccattacccgatcatttacgtaagcaaattgaaaaatcacgccaagaaattgccgcgattattcataaaaaagatccacgtaaacttattatcatcggaccttgttctattcacgatatctctgccgcattagagtatggccaaaaactaaaaaaattagccgaccaagtaagcgatcaactttatattgtaatgcgggtatattttgaaaaaccgcgcaccaccgtaggatggaagggcttaattaacgatccacaaatagatggcacttttaatgttgaagccggtttacgcattgcacgtaaattgtgcttagatttaactgaactaggcttaccattagccacagaagcactagatccaatgacaccacaatatttagcagatctttttagctggtcagcgattggagcaagaacgactgaatcacaaacacatcgtgaattagcttctggtttatctatggccgttggctttaaaaatggcactgatggcggcctagctgtggcgattaacgccatgcaatctgccgcacaaccgcatcgtttcattggtatcaatcaaaatggacaggtcaatttattaaataccaaagggaatcctgatggccacgtgattttacgtggcggtaaaaaacctaactttgaacaaaaatatgtaatggaatgtgaaactgcattacgtaaagcgggtttagaagaagcaataatgattgattgtagccacggtaattcaaataaagatcacacacgtcaacctatagttgcagaaaatgtactcacgcaattattggcaggtaaccgatcgatcatcggcttaatgattgaaagccatttaaatgcgggtaatcagccctctgaacaatcattccaagagatgaaatacggcatatccattacagatgcttgtattgattggcaaaccactgaacatatacttctcaacttcgccgcaaaattaagaaatcccccatcttcctttcagtaa

SEQ ID NO: 26990 - protein, 359 aa, Haemophilus ducreyi 35000HP; identical to SEQ ID NO: 1456

SEQ ID NO: 26991 - DNA, 1113 bp, Haemophilus ducreyi 35000HP; identical to SEQ ID NO: 1453
  CDS (1)..(1113): transl_table=11

SEQ ID NO: 26992 - protein, 370 aa, Haemophilus ducreyi 35000HP; identical to SEQ ID NO: 1454

SEQ ID NO: 26993 - DNA, 1074 bp, Prochlorococcus marinus subsp. marinus str. CCMP1375; identical to SEQ ID NO: 1451
  CDS (1)..(1074): transl_table=11

SEQ ID NO: 26994 - protein, 357 aa, Prochlorococcus marinus subsp. marinus str. CCMP1375; identical to SEQ ID NO: 1452

SEQ ID NO: 26995 - DNA, 1086 bp, Candidatus Blochmannia floridanus; identical to SEQ ID NO: 1457
  CDS (1)..(1086): transl_table=11

SEQ ID NO: 26996 - protein, 361 aa, Candidatus Blochmannia floridanus; identical to SEQ ID NO: 1458

SEQ ID NO: 26997 - DNA, 1119 bp, Bordetella parapertussis 12822
  CDS (1)..(1119): transl_table=11
ttgacccgtatcgatgacccgctgcacgatcgcgaggccggccaggccgacgcgacgcaagacaccacccgcatcgacgacgtgcgcatcggcgccgtgcgtcccctgatttcgcccgccctgctgcaggacgaactgccggtatcggcgccgctacaggcgctggtcgaggacagccgcgcgcgcatcgccgacgtgctgcacggccgcgacgaccggctggtggtggtggtcggcccctgctccatccacgaccacgaacaggccatggagtacgcgcgccagctcaaggaggcgaccgacacgctggccgacgacctgctcatcgtcatgcgcgtgtacttcgagaagccgcgcaccaccgtgggctggaagggctacatcaacgatccgcgcctggacggcagtttccgcatcaacgaaggcctgcgccgcgcgcgccacctgctgctggaaatcggcgccctgggactgcccatcgccaccgaattcctggacctgctcagcccgcaatacatcgccgacctgatcgcctggggcgcgatcggcgcgcgcaccaccgaaagccccagccaccggcaactggcctcgggcctgagctgcccgctgggtttcaagaacggcaccgacggcggcatccaggtggcggccgacgccatcgtggccgccagcgccccgcatgccttcatgggcatgaccaagatgggcaccgccgccatcttcgagacgcgcggcaacgacgacacccacgtcatcctgcgcggcggcaagcaaggccccaactacgacgcggccgccatcgacgcctgctgtgcggcgctggccaaggccggcctgcgcgagcaggtcatggtcgactgctcgcacgccaattcgaacaagtcgcacgcgcgccaggtcgacgtggcgcgcgacctggcccggcagctggccggcggcgaccgccgcatcatcggcatcatgatcgaaagcaacctcgaggaaggccgccaggatctcaagcccggcgtgccgctcaagcgcggcgtgtccatcaccgacgcctgcctgagctgggcccagaccgagccggtgctggccgagctggcccaggccgtgcgccagcgccgcgaaggctga

SEQ ID NO: 26998 - protein, 372 aa, Bordetella parapertussis 12822
MTRIDDPLHDREAGQADATQDTTRIDDVRIGAVRPLISPALLQDELPVSAPLQALVEDSRARIADVLHGRDDRLVVVVGPCSIHDHEQAMEYARQLKEATDTLADDLLIVMRVYFEKPRTTVGWKGYINDPRLDGSFRINEGLRRARHLLLEIGALGLPIATEFLDLLSPQYIADLIAWGAIGARTTESPSHRQLASGLSCPLGFKNGTDGGIQVAADAIVAASAPHAFMGMTKMGTAAIFETRGNDDTHVILRGGKQGPNYDAAAIDACCAALAKAGLREQVMVDCSHANSNKSHARQVDVARDLARQLAGGDRRIIGIMIESNLEEGRQDLKPGVPLKRGVSITDACLSWAQTEPVLAELAQAVRQRREG

SEQ ID NO: 26999 - DNA, 1074 bp, Bordetella parapertussis 12822
  CDS (1)..(1074): transl_table=11
gtgtcgcacaataccgatgactttcgtatccgtgaaatcaaagagctgaatcctcctgcgcatgtcatgcgcgagtttccgtgctcgaaggatgtttctgaaatcgtctacgccgcccgccagggcatgcatcgcatcctgcatggcatggatgaccgcctgatcgtcgtgatcggcccttgctcgatccacgataccaaggcggcgctcgaatacgcggatcgcctcaagccggtgcgcgaccgcctggccgccgatctcgaggtggtgatgcgcgtctacttcgaaaagccgcgcaccaccgtgggctggaagggcctgatcaacgaccccgacctggatggcagcttcgatatcaacaagggcgtgcgcgtggcgcgcgaactgctgctggacatcaacagccgcggcctgccggcgggttgcgagttcctcgacatgattaccccgcagtacatcgccgacctggtgtcgtggggggcgatcggggcgcggacgaccgaaagccaggttcaccgcgagctggcttccggcctgtcgtgtcctgtcggtttcaagaacggcaccgacggcaatgtgaagatcgccgtcgacgccatcaaggccgcctcgcaaccgcaccatttcctctcggtgaccaagggcgggcattcggccatcgtctcgaccgcgggcaacgaggactgccacgtcattctgcgcggcggcaaggcgcccaactacgatgccgccagcatcgaagcggcctgccaggacatggccaaggccggcctggcccagcgcatcatgatcgacgccagccacgccaacagcagcaagaaacccgagaatcagccgctggtggtcgatgatgtggccaaccagatcgagcagggcgatgcccgcatcgtgggcctgatgatagaaagccatctgctgggcggccgccaggacctggtgcccggccaggccttgacgtacgggcagagcatcaccgacggttgcatcgactgggatgcttcggtgcaggtgctggagcgcctggcccatgcggtgcgcgaacgccggcgcgcgtcgctgagcgccggcaagtag

SEQ ID NO: 27000 - protein, 357 aa, Bordetella parapertussis 12822
MSHNTDDFRIREIKELNPPAHVMREFPCSKDVSEIVYAARQGMHRILHGMDDRLIVVIGPCSIHDTKAALEYADRLKPVRDRLAADLEVVMRVYFEKPRTTVGWKGLINDPDLDGSFDINKGVRVARELLLDINSRGLPAGCEFLDMITPQYIADLVSWGAIGARTTESQVHRELASGLSCPVGFKNGTDGNVKIAVDAIKAASQPHHFLSVTKGGHSAIVSTAGNEDCHVILRGGKAPNYDAASIEAACQDMAKAGLAQRIMIDASHANSSKKPENQPLVVDDVANQIEQGDARIVGLMIESHLLGGRQDLVPGQALTYGQSITDGCIDWDASVQVLERLAHAVRERRRASLSAGK

SEQ ID NO: 27001 - DNA, 1074 bp, Bordetella bronchiseptica RB50
  CDS (1)..(1074): transl_table=11
gtgtcgcacaataccgatgaccttcgtatccgtgaaatcaaagagctgaatcctcccgcgcatgtcatgcgcgagtttccgtgctcgaaggatgtttctgaaatcgtctacgccgcccgccagggcatgcatcgcatcctgcatggcatggatgaccgcctgatcgtcgtgatcggcccttgctcgatccacgataccaaggcggcgctcgaatacgcggatcgcctcaagccggtgcgcgaccgcctggccgccgatctcgaggtggtgatgcgcgtctacttcgaaaagccgcgcaccaccgtgggctggaagggcctgatcaacgaccccgacctggatggcagcttcgatatcaacaagggcgtgcgcgtggcgcgcgaactgctgctggacatcaacagccgcggcctgccggcgggttgcgagttcctcgacatgattaccccgcagtacatcgccgacctggtgtcgtggggggcgatcggggcgcggacgaccgaaagccaggttcaccgcgagctggcttccggcctgtcgtgtcctgtcggtttcaagaatggcaccgacggcaatgtgaagatcgccgtcgacgccatcaaggccgcctcgcaaccgcaccatttcctctcggtgaccaagggcgggcattcggccatcgtctcgaccgcgggcaacgaggactgccacgtcattctgcgcggcggcaaggcgcccaactacgatgccgccagcatcgaagcggcctgccaggacatggccaaggccggcctggcccagcgcatcatgatcgacgccagccacgccaacagcagcaagaagcccgagaatcagccgctggtggtcgatgatgtggccaaccagatcgagcagggcgatgcccgcatcgtgggcctgatgatagaaagccatctgctgggcggccgccaggacctggtgcccggccaggccttgacgtacgggcagagcatcaccgacggttgcatcgactgggatgcttcggtgcaggtgctggagcgcctggcccatgcggtgcgcgaacgccggcgcgcgtcgctgagcgccggcaagtag

SEQ ID NO: 27002 - protein, 357 aa, Bordetella bronchiseptica RB50; identical to SEQ ID NO: 1460

SEQ ID NO: 27003 - DNA, 1119 bp, Bordetella bronchiseptica RB50
  CDS (1)..(1119): transl_table=11
ttgacccgtatcgatgacccgctgcacgatcgcgaggccggccaggccgacgcgacgcaagacaccacccgcatcgacgacgtgcgcatcggcgccgtgcgtcccctgatttcgcccgccctgctgcaggacgaactgccggtatcggcgccgctacaggcgctggtcgaggacagccgcgcgcgcatcgccgacgtgctgcacggccgcgacgaccggctggtggtggtggtcggcccctgctccatccacgaccacgaacaggccatggagtacgcgcgccagctcaaggaggcggccgacacgctggccgacgacctgctcatcgtcatgcgcgtgtacttcgagaagccgcgcaccaccgtgggctggaagggctacatcaacgatccgcgcctggacggcagtttccgcatcaacgaaggcctgcgccgcgcgcgccacctgctgctggaaatcggcgccctgggactgcccatcgccaccgaattcctggacctgctcagcccgcaatacatcgccgacctgatcgcctggggcgcgatcggcgcgcgcaccaccgaaagccccagccaccggcaactggcctcgggcctgagctgcccgctgggtttcaagaacggcaccgacggcggcatccaggtggcggctgacgccatcgtggccgccagcgccccgcatgccttcatgggcatgaccaagatgggcaccgccgccatcttcgagacgcgcggcaacgacgacacccacgtcatcctgcgcggcggcaagcaaggccccaactacgacgcggccgccatcgacgcctgctgtgcggcgctggccaaggccggcctgcgcgagcaggtcatggtcgactgctcgcacgccaattcgaacaagtcgcacgcgcgccaggtcgacgtggcgcgcgacctggcccggcagctggccggcggcgaccgccgcatcatcggcatcatgatcgaaagcaacctcgaggaaggccgccaggatctcaagcccggcgtgccgctcaagcgcggcgtgtccatcaccgacgcctgcctgagctgggcccagaccgagccggtgctggccgagctggcccaggccgtgcgccagcgccgcgaaggctga

SEQ ID NO: 27004 - protein, 372 aa, Bordetella bronchiseptica RB50; identical to SEQ ID NO: 1462

SEQ ID NO: 27005 - DNA, 1068 bp, Prochlorococcus marinus subsp. pastoris str. CCMP1986; identical to SEQ ID NO: 1447
  CDS (1)..(1068): transl_table=11

SEQ ID NO: 27006 - protein, 355 aa, Prochlorococcus marinus subsp. pastoris str. CCMP1986; identical to SEQ ID NO: 1448

SEQ ID NO: 27007 - DNA, 1083 bp, Prochlorococcus marinus str. MIT 9313; identical to SEQ ID NO: 1449
  CDS (1)..(1083): transl_table=11

SEQ ID NO: 27008 - protein, 360 aa, Prochlorococcus marinus str. MIT 9313; identical to SEQ ID NO: 1450

SEQ ID NO: 27009 - DNA, 1068 bp, Synechococcus sp. WH 8102; identical to SEQ ID NO: 1443
  CDS (1)..(1068): transl_table=11

SEQ ID NO: 27010 - protein, 355 aa, Synechococcus sp. WH 8102; identical to SEQ ID NO: 1444

SEQ ID NO: 27011 - DNA, 1059 bp, Chromobacterium violaceum ATCC 12472; identical to SEQ ID NO: 1437
  CDS (1)..(1059): transl_table=11

SEQ ID NO: 27012 - protein, 352 aa, Chromobacterium violaceum ATCC 12472; identical to SEQ ID NO: 1438

SEQ ID NO: 27013 - DNA, 1107 bp, Chromobacterium violaceum ATCC 12472; identical to SEQ ID NO: 1435
  CDS (1)..(1107): transl_table=11

SEQ ID NO: 27014 - protein, 368 aa, Chromobacterium violaceum ATCC 12472; identical to SEQ ID NO: 1436

SEQ ID NO: 27015 - DNA, 1119 bp, Gloeobacter violaceus PCC 7421
  CDS (1)..(1119): transl_table=11
gtgcccggcggctctcgcgatgtcggcgagttcgcctttgagccgctcgacgatttgcggatcgtctcggtgagtgagattcctcctccagtgcaactgcgcgagcaattgcctctggatgcggctgcccagaatacagtgcgccggggccgctcgcagattcgcgctgtattgggcggctttgattcacgcctgttggtggtggtcggcccctgttcggtgcacgacgccgatgcggcgcgcgagtacgcccagaggctggccgagtgcgcccgccgctatgcggacgaactgctcatcgccatgcgcgtttacttcgagaaaccgcgcaccacggtcggctggaaaggactcatcaacgatcccggcctcgacggcagctgtcgtatcggtgagggactgaccaccgcccgcgcgttgctgctcgacattgcccggctcggactgccggcggccaccgaatttctcgacccgatcacccccgagtacatcgtcgatctgatcagttggggggcgattggggcgcgcacggtcgaaagtcaggtgcacaggcaagtggcttcggcgctttcctgtccggtgggttttaaaaacggctcctccggcgacatcgccgttgccgtcgaagcggtgctctcggcgcgcaacgcccatcagttcctttcgcacacccgcgagggtcgcacggctatcgtgctgaccagcggcaatcccgattgccatgtcgtgttgcgcggcggcaaaaacggccccaaccactcggctgaacatctcgcgcaggcagggcggttgttgcgcgaggcgggcttgccggagcgggtgatggtcgactgcagccacgccaacagctccaaagatcaccgccgccagggggaagtctgcaaacagttggcggcacggattgccgagggggatatgcggatgatgggcctgatgatcgaaagtcacctagtcgaagggcggcaggagttaggcgacggctgcaacttgcgccacggtcagagcatcaccgatgcgtgcatcggctgggaacagacagagcaattgcttaccggcctacacgaggcggccggcgctagacggtgtaagccggccgtccgcgccgagttgctggtttga

SEQ ID NO: 27016 - protein, 372 aa, Gloeobacter violaceus PCC 7421; identical to SEQ ID NO: 1434

SEQ ID NO: 27017 - DNA, 1095 bp, Photorhabdus luminescens subsp. laumondii TTO1; identical to SEQ ID NO: 1431
  CDS (1)..(1095): transl_table=11

SEQ ID NO: 27018 - protein, 364 aa, Photorhabdus luminescens subsp. laumondii TTO1; identical to SEQ ID NO: 1432

SEQ ID NO: 27019 - DNA, 1053 bp, Photorhabdus luminescens subsp. laumondii TTO1; identical to SEQ ID NO: 1429
  CDS (1)..(1053): transl_table=11

SEQ ID NO: 27020 - protein, 350 aa, Photorhabdus luminescens subsp. laumondii TTO1; identical to SEQ ID NO: 1430

SEQ ID NO: 27021 - DNA, 1047 bp, Photorhabdus luminescens subsp. laumondii TTO1; identical to SEQ ID NO: 1427
  CDS (1)..(1047): transl_table=11

SEQ ID NO: 27022 - protein, 348 aa, Photorhabdus luminescens subsp. laumondii TTO1; identical to SEQ ID NO: 1428

SEQ ID NO: 27023 - DNA, 1245 bp, Vibrio vulnificus YJ016
  CDS (1)..(1245): transl_table=11
ttgaaaaccaaagcgaggcgctttggtttttttataatgtgtaatttattttttacatttgatgttttttattgtttacggttgatttttaattcaaccctgttaacttgtgttcaaacagatttcgactctcagggatatgagggtgtaaaaaataatatacaggtgagtgtcatgcagaaaagtgaactaagcaatattaatatcagcgatgaacaagtgctgattacgccagaacagctaaaacagaaactgccactgagcgacaacgcccgccgcttcattcaagagtcgcgtaataccgtcgccaatattattcataagcaagatcatcgtctgctggtggtttgtggtccttgttctattcacgatctggacgcggcaaaggattatgcgcgtcgcctaaaagcgctctccgccgagttaagcgatcaactgtatattgtgatgcgtgtttactttgaaaaacctcgtacaactgtgggttggaaagggctcatcaacgaccctcatctggatggtagcttcgatattgagcatggtctgcatgttggccgtcaattgctggtggagctggctgaaatggagatccctctggcgacagaagcactcgacccaattagtccgcaatacttggctgatacattcagttgggctgcgattggtgcgcgtacgacagaatcacaaactcaccgtgaaatggccagtggtttgtctatgccgattggttttaaaaatggcacggatggcagcttgtcaacggcgattaacgcaatgcaagcggcctcttcaagccaccgttttatggggatcaaccgtgaaggccaagtggcattgctgacgactcaaggtaacccaaatggtcacgtgattttgcgtggtggtaagcagaccaactacgattctgtgtcggtggcggagtgtgagcaagacatggccaaagtgggtttagatgcgtcattgatggtggattgtagccatgccaattcgcgcaaagattaccgtcgtcagcctttagtcgccgaagacgtgattcatcaaattcgcgaaggcaacaaatcgatcattggtttgatgattgaaagccacattaatgaaggtaatcaatcctcagatttaccgctttctgagatgcagtacggtgtttctattaccgatgcctgtatcaattggcaggcaactgaggcactattgcgtaaagcacacaaagagttagtgccacatttagaaaaccgtctcaaataa

SEQ ID NO: 27024 - protein, 414 aa, Vibrio vulnificus YJ016
MKTKARRFGFFIMCNLFFTFDVFYCLRLIFNSTLLTCVQTDFDSQGYEGVKNNIQVSVMQKSELSNINISDEQVLITPEQLKQKLPLSDNARRFIQESRNTVANIIHKQDHRLLVVCGPCSIHDLDAAKDYARRLKALSAELSDQLYIVMRVYFEKPRTTVGWKGLINDPHLDGSFDIEHGLHVGRQLLVELAEMEIPLATEALDPISPQYLADTFSWAAIGARTTESQTHREMASGLSMPIGFKNGTDGSLSTAINAMQAASSSHRFMGINREGQVALLTTQGNPNGHVILRGGKQTNYDSVSVAECEQDMAKVGLDASLMVDCSHANSRKDYRRQPLVAEDVIHQIREGNKSIIGLMIESHINEGNQSSDLPLSEMQYGVSITDACINWQATEALLRKAHKELVPHLENRLK

SEQ ID NO: 27025 - DNA, 1053 bp, Vibrio vulnificus YJ016; identical to SEQ ID NO: 2345
  CDS (1)..(1053): transl_table=11

SEQ ID NO: 27026 - protein, 350 aa, Vibrio vulnificus YJ016; identical to SEQ ID NO: 2346

SEQ ID NO: 27027 - DNA, 1053 bp, Vibrio vulnificus YJ016; identical to SEQ ID NO: 1675
  CDS (1)..(1053): transl_table=11

SEQ ID NO: 27028 - protein, 350 aa, Vibrio vulnificus YJ016; identical to SEQ ID NO: 1676

SEQ ID NO: 27029 - DNA, 1071 bp, Vibrio vulnificus YJ016; identical to SEQ ID NO: 1425
  CDS (1)..(1071): transl_table=11

SEQ ID NO: 27030 - protein, 356 aa, Vibrio vulnificus YJ016; identical to SEQ ID NO: 1426

SEQ ID NO: 27031 - DNA, 1095 bp, Rhodopseudomonas palustris CGA009
  CDS (1)..(1095): transl_table=11
gtgttgaccaccacagacgaccttcgccttcagaaaatcaccgagctgagtacgcctgccgaggtgatgggcgagattccgcgcacactgaccgcaacgcgtaccgttgcggcgagccgcagcgcgattcatgccatcctgaacggagccgacgaccggctcctcgtcgtcgtcggcccctgttcgattcacgatccggccgcagccatggactatgccagccgtctggcggcgctgcgcgagaccctggccgaccggctcgagatcgtgatgcgggtgtatttcgaaaagccgcgcaccacggtgggttggaagggactgatcaacgaccccgatctcgatggcagcttccggatcgacaaggggctacggttggcgcgggaagtactctcggccgtgaacaatctcggcctgccagcggcgaccgaattcctcgatctgatcacgcctcaatacatcgcggatctcgtcgcctggggcgcgatcggcgcgcgcaccaccgagagccagatccaccgcgaactcgcgtcaggcctgtcatgcccaatcggcttcaagaatggcaccgacggcaatgtccggatcgccgcggaggcggtgaagtccgcggcgcagccgcatcatttcatggcggtgaccaagggcgggcgcaatgcgatcgcggccaccactggtaacagcgactgccacgtcatcctgcgcggcggcgtcacaccgaactacgatgccgcaagtgtggaagccgccgcagcggtcctcggcaagatcggcctgccgccgcgcctgatgatcgacgccagccacgccaacagcagcaagcagccggacaaccagccgaaggtaacggccgatatcgggcgtcagatggcggctggcgagagccgcatcatcggcgtgatgatcgagagcaatctggtcgccggtcggcaggatgtggcgccgggtcggccgctgcaatacggccagagcatcaccgacggctgtatcgactgggcgacgaccgagacggtgctgcacgagctagccgatgcggtcgagagccggcgagctgcgcggcacgccgcaagcgctcagcagaaaggtgctgcggcgtga

SEQ ID NO: 27032 - protein, 364 aa, Rhodopseudomonas palustris CGA009; identical to SEQ ID NO: 1412

SEQ ID NO: 27033 - DNA, 1068 bp, Geobacter sulfurreducens PCA; identical to SEQ ID NO: 1417
  CDS (1)..(1068): transl_table=11

SEQ ID NO: 27034 - protein, 355 aa, Geobacter sulfurreducens PCA; identical to SEQ ID NO: 1418

SEQ ID NO: 27035 - DNA, 1071 bp, Treponema denticola ATCC 35405; identical to SEQ ID NO: 1415
  CDS (1)..(1071): transl_table=11

SEQ ID NO: 27036 - protein, 356 aa, Treponema denticola ATCC 35405; identical to SEQ ID NO: 1416

SEQ ID NO: 27037 - DNA, 1122 bp, Eremothecium gossypii; identical to SEQ ID NO: 1421
  CDS (1)..(1122)

SEQ ID NO: 27038 - protein, 373 aa, Eremothecium gossypii; identical to SEQ ID NO: 1422

SEQ ID NO: 27039 - DNA, 1095 bp, Eremothecium gossypii; identical to SEQ ID NO: 1419
  CDS (1)..(1095)

SEQ ID NO: 27040 - protein, 364 aa, Eremothecium gossypii; identical to SEQ ID NO: 1420

SEQ ID NO: 27041 - DNA, 1092 bp, Parachlamydia sp. UWE25; identical to SEQ ID NO: 1409
  CDS (1)..(1092): transl_table=11

SEQ ID NO: 27042 - protein, 363 aa, Parachlamydia sp. UWE25; identical to SEQ ID NO: 1410

SEQ ID NO: 27043 - DNA, 1056 bp, Acinetobacter sp. ADP1; identical to SEQ ID NO: 1395
  CDS (1)..(1056): transl_table=11

SEQ ID NO: 27044 - protein, 351 aa, Acinetobacter sp. ADP1; identical to SEQ ID NO: 1396

SEQ ID NO: 27045 - DNA, 1113 bp, Acinetobacter sp. ADP1; identical to SEQ ID NO: 1393
  CDS (1)..(1113): transl_table=11

SEQ ID NO: 27046 - protein, 370 aa, Acinetobacter sp. ADP1; identical to SEQ ID NO: 1394

SEQ ID NO: 27047 - DNA, 1056 bp, Erwinia carotovora subsp. atroseptica SCRI1043; identical to SEQ ID NO: 1391
  CDS (1)..(1056): transl_table=11

SEQ ID NO: 27048 - protein, 351 aa, Erwinia carotovora subsp. atroseptica SCRI1043; identical to SEQ ID NO: 1392

SEQ ID NO: 27049 - DNA, 1047 bp, Erwinia carotovora subsp. atroseptica SCRI1043; identical to SEQ ID NO: 1389
  CDS (1)..(1047): transl_table=11

SEQ ID NO: 27050 - protein, 348 aa, Erwinia carotovora subsp. atroseptica SCRI1043; identical to SEQ ID NO: 1390

SEQ ID NO: 27051 - DNA, 1074 bp, Erwinia carotovora subsp. atroseptica SCRI1043; identical to SEQ ID NO: 1387
  CDS (1)..(1074): transl_table=11

SEQ ID NO: 27052 - protein, 357 aa, Erwinia carotovora subsp. atroseptica SCRI1043; identical to SEQ ID NO: 1388

SEQ ID NO: 27053 - DNA, 1047 bp, Yersinia pseudotuberculosis IP 32953; identical to SEQ ID NO: 1623
  CDS (1)..(1047): transl_table=11

SEQ ID NO: 27054 - protein, 348 aa, Yersinia pseudotuberculosis IP 32953; identical to SEQ ID NO: 1624

SEQ ID NO: 27055 - DNA, 1056 bp, Mannheimia succiniciproducens MBEL55E
  CDS (1)..(1056): transl_table=11
atgaaagatagtatccataatgttcatatcattgatgaaaaagtattaattacacctgccgaattaaaacaaaagctcccgctcccaatcgcactgcgtacacaaattgaaacacatcgccgtgaaattgccgatatagtacacaaaaaagacgatcgcttactggtggtcattgggccttgttccgtacatgacaccaaagcggcaatcgattatgccaaacgtctgaaagcgctttcagatgaattaaaggatcagctttatatcgttatgcgggtttattttgaaaaaccgcgtaccacggtaggctggaaagggctcattaatgacccgcgtatcgacggcacatttaatgtggaagaagggctgcatatcggtcgtaaattattgctggatttagctgaaatgggcttgccgttggcaacggaagcgttggatccgatgacgccgcaatatctcgccgatttattcagttggtcggctatcggcgcgcgtactaccgaatcgcaaactcaccgtgaactggcttccggattatctatggcagtcggctttaaaaacggcaccgacggtagtctggctaccgccattaatgccatgaaagccgcctcaatgggacacagttttatcggtattaaccagcaaggacaggtcaatttattacatacggagggcaatcctgacggtcatgttatcctgcgtggcggcaaaaaaccgaattaccaacaggaatttgtcaaccaatgcgaagaagaattagccaaagcaggtctggaaacggcgattatgatcgattgcagccacggtaattcaaataaagattataaacgccagccttcagttgcgaaagatgcggtaaatcaaattgtggcggggaataaatccattatcggtttaatgattgaaagcaacatcaatgcgggtaaccaaagctcggaacaaaaggtttccgagatgaaatacggtgtttccattaccgatgcctgtattgattgggaaacaacggataatttattacgtaaaattgccgccgcattgaaaaatagagcggagtaa

SEQ ID NO: 27056 - protein, 351 aa, Mannheimia succiniciproducens MBEL55E
MKDSIHNVHIIDEKVLITPAELKQKLPLPIALRTQIETHRREIADIVHKKDDRLLVVIGPCSVHDTKAAIDYAKRLKALSDELKDQLYIVMRVYFEKPRTTVGWKGLINDPRIDGTFNVEEGLHIGRKLLLDLAEMGLPLATEALDPMTPQYLADLFSWSAIGARTTESQTHRELASGLSMAVGFKNGTDGSLATAINAMKAASMGHSFIGINQQGQVNLLHTEGNPDGHVILRGGKKPNYQQEFVNQCEEELAKAGLETAIMIDCSHGNSNKDYKRQPSVAKDAVNQIVAGNKSIIGLMIESNINAGNQSSEQKVSEMKYGVSITDACIDWETTDNLLRKIAAALKNRAE

SEQ ID NO: 27057 - DNA, 1155 bp, Mannheimia succiniciproducens MBEL55E
  CDS (1)..(1155): transl_table=11
ttgataagctttaaagtgcggttaaatttttctatttttcggatgatatacagagagttgattatgcctacaaaaaacaaaaataatattcgtgtcgcaaacgacgataccagaattgccaatatcgaacagttgcttccgccggtcgctttattggaaaaatatccggcaagcaatgtcgccgttaaaacggtcagaaacgcccgcaataaagcccatcaaattattcacggtgaagatgatcgcctgttggtgattatcggtccttgttcgattcatgatcctaaagcggcgcttgaatatgccaaccgcatggcgaaaatgcgcgaaaaatataaagataccttagaaatcatcatgcgcgtttattttgaaaaaccgcgtactaccgtgggttggaaagggttaattaacgatccgtatttaaacgatacctatgcattaaacgacggtttacgtattgcgcgcaaactattatcagacatcaatgatctcggtttgccgactgcgggtgaatttttagacatgatcaccccgcaatatgtggctgatttcatgagctggggcgcaattggcgcccgtaccacggaatcgcaggttcatcgtgaactggcttccggtttgtcttgtgcggtgggctttaaaaacggcacaaacggcggtgtgaaaatcgctttagacgctattggtgcggcggaagcttcccaccatttcttatcggttactaaattcgggcattcggcgattgtttcaacaaaaggtaatctggattgccatattattttacgcggcggtgataaaggtacgaattatgatgcggaaaatatcgcaaaagtttgtgctaatatcgagaaaagcggccgtatcggtcatgtaatgatcgacttcagccatgctaacagcagtaaacagttcaaaaaacaagtggaagtttgtcatgatgtcgcaaaacaaatcgcacagggttcaaaccaaattttcggcgtgatggttgaaagccacttggttgaaggtcgtcaggatttagtaaacggaaaagcggaaacttacggtcaaagtatcaccgatgcctgtatcggctgggatgacacggaaatcgtgttacaagaactgtccgatgcggtagccgctcgtcgcaaagtcaacggcaaataa

SEQ ID NO: 27058 - protein, 384 aa, Mannheimia succiniciproducens MBEL55E
MISFKVRLNFSIFRMIYRELIMPTKNKNNIRVANDDTRIANIEQLLPPVALLEKYPASNVAVKTVRNARNKAHQIIHGEDDRLLVIIGPCSIHDPKAALEYANRMAKMREKYKDTLEIIMRVYFEKPRTTVGWKGLINDPYLNDTYALNDGLRIARKLLSDINDLGLPTAGEFLDMITPQYVADFMSWGAIGARTTESQVHRELASGLSCAVGFKNGTNGGVKIALDAIGAAEASHHFLSVTKFGHSAIVSTKGNLDCHIILRGGDKGTNYDAENIAKVCANIEKSGRIGHVMIDFSHANSSKQFKKQVEVCHDVAKQIAQGSNQIFGVMVESHLVEGRQDLVNGKAETYGQSITDACIGWDDTEIVLQELSDAVAARRKVNGK

SEQ ID NO: 27059 - DNA, 1044 bp, Legionella pneumophila subsp. pneumophila str. Philadelphia 1
  CDS (1)..(1044): transl_table=11
atgagttattccatcttaaaaaaactgccaccaatagaaaaaattatccgggaattgccactatcccaccccgcctatctacaaattgcccaagaccgacaagaggtcaaagctattttggaagggcgagataaacgtcttttgatgatagttggtccttgttcagcatggcctaaaaaagcggtattggaatacgctgagcgtttggtacaactcaacagcaaagtaaaacacgctttaaaattaatcatgcgcgtttacattcaaaagccaagaaccaccaaaggctggactggaccggtgaatcaacccgatttattttcaactcctgatattgaggcaggtataaaatatacccgggacatgatgataaaagtcattcaaatggggctccctatcgctgatgaggctcttttcacccataatgccaaaggatttcttgaacttctgtcctgggttgcaataggcgcccgtagttcagaggatcaagagcatcgaatttttgcctccgcccttgactgtgccgtaggattaaaaaaccctacacatggttcactcgctgtcggagtaaacagcctggttgcatcacagcatcctcatgtcgctgtcttcgatggctatgaagtacaaacccatggtaatcatcatgctcatctcgttctgcgtggttcaaaccaagctcccaattactctgtttctcatctggaggaagtcatgtactacatgggcatgcatcagatagtgaacccttctgtcattattgatgttagccatgacaactgtctggtgaatgggaaaaaaaatcatcagctacaaccagagattgcatttaatattctggaaagcatcaaaaacagacctgatttaaaacaactggtcaagggattcatggtagaaagtttcatcaaagaaggtaatcaaaaattagattctatcaatcccgataacattgatttaagcgggttatccgttaccgatccttgcctcagttgggagaagacagaatcgttcctgttggaactggcagagagggaagcgttatga

SEQ ID NO: 27060 - protein, 347 aa, Legionella pneumophila subsp. pneumophila str. Philadelphia 1
MSYSILKKLPPIEKIIRELPLSHPAYLQIAQDRQEVKAILEGRDKRLLMIVGPCSAWPKKAVLEYAERLVQLNSKVKHALKLIMRVYIQKPRTTKGWTGPVNQPDLFSTPDIEAGIKYTRDMMIKVIQMGLPIADEALFTHNAKGFLELLSWVAIGARSSEDQEHRIFASALDCAVGLKNPTHGSLAVGVNSLVASQHPHVAVFDGYEVQTHGNHHAHLVLRGSNQAPNYSVSHLEEVMYYMGMHQIVNPSVIIDVSHDNCLVNGKKNHQLQPEIAFNILESIKNRPDLKQLVKGFMVESFIKEGNQKLDSINPDNIDLSGLSVTDPCLSWEKTESFLLELAEREAL

SEQ ID NO: 27061 - DNA, 1074 bp, Burkholderia mallei ATCC 23344
  CDS (1)..(1074): transl_table=11
atgcccccgcacaataccgacgacgtccgcatccgtgaactgaaggagctgactccgcccgcccacctgatccgcgaattcgcgctcggcgaggcggtgtcggagctcatctacaacgcgcgccaggcgatgcaccggatcctgcacgggatggacgatcgcctgatcgtcatcatcgggccgtgctcgatccacgacacgaaggcggcgctcgaatacgcgggccggctcgtccaggagcgcgagcgcttcgcaagcgaactcgagatcgtaatgcgcgtgtacttcgagaagccgcgcacgacggtcggctggaaggggctcatcaacgatccgcacctggataacagcttcaagatcaacgacggcctgcgcaccgcgcgcgagctgctgctgcagatcaacgagatggggctgcccgccggcaccgaatacctcgacatgatcagcccgcaatacatcgcggacctgatctcgtggggcgcgatcggcgcgcgcacgaccgaatcgcaggtgcaccgcgagctcgcgtcggggctgtcgtgcccggtcggcttcaagaacggcaccgacggcaacgtgaagatcgcggtcgacgcgatcaaggccgcatcgcagccgcaccatttcctgtcggtgacgaagggcgaccattcggcgatcgtgtcgacggccggcaacgaggactgccacgtgatcctgcgcggcggcaaggcgccgaactacgatgccgacagcgtgaacgccgcgtgcgcggacatcggcaaggccggcctcgccgcgcgcctgatgatcgacgcgagccatgcgaacagctcgaagaagcacgagaaccagattccggtatgcgcggacatcggccgccagatcgccgcgggcgacgagcgcatcgtcggcgtgatggtcgagtcgcacctcgtcgaaggccgccaggacctgaaggaaggctgcccgctcacgtacggccagagcatcaccgatgcatgcatcaactgggacgacagcgtgaaggtgctcgaagggctcgccgaagcggtgaaggcgcggcgcgtcgcgcgcggcagcggcaactga

SEQ ID NO: 27062 - protein, 357 aa, Burkholderia mallei ATCC 23344
MPPHNTDDVRIRELKELTPPAHLIREFALGEAVSELIYNARQAMHRILHGMDDRLIVIIGPCSIHDTKAALEYAGRLVQERERFASELEIVMRVYFEKPRTTVGWKGLINDPHLDNSFKINDGLRTARELLLQINEMGLPAGTEYLDMISPQYIADLISWGAIGARTTESQVHRELASGLSCPVGFKNGTDGNVKIAVDAIKAASQPHHFLSVTKGDHSAIVSTAGNEDCHVILRGGKAPNYDADSVNAACADIGKAGLAARLMIDASHANSSKKHENQIPVCADIGRQIAAGDERIVGVMVESHLVEGRQDLKEGCPLTYGQSITDACINWDDSVKVLEGLAEAVKARRVARGSGN

SEQ ID NO: 27063 - DNA, 1119 bp, Burkholderia mallei ATCC 23344
  CDS (1)..(1119): transl_table=11
atgcaaaacatcgacaatccgcaacgcgatcgggaaaccggcttcgccgacgcgacgcaggacacgacgcgcatcgacgacgtgcgcatcggcgcggtgcgcccgctcatctcgcccgcgctgctgcaggacgaactgccggtgccgagcgccgtccaggcgctcgtcgaagcgagccgcgacgcgatcggcgacgtgctgcacggccgcgacgaccgcctgctcgcgatcgtcggcccgtgctcgatccacgatcacgatcaggcgctcgactacgcgcgccggctgaaaagcgccgccgacgcgctgcgcgacgacctgctgatcgtgatgcgcgtgtatttcgagaagccgcgcacgacggtcggctggaagggctacatcaacgatccgcgcctcgacggcagcttccgcatcaacgaagggctgcgcgccgcgcgccggctgctgatcgacatcaacgcgctcggcctgcccgccggcaccgaattcctcgatctgctgagcccgcagtacatcgcggatctgatcgcctggggcgcgatcggcgcgcgcacgaccgagagccagagccaccggcagctcgcgtcggggctgagctgcccgatcggcttcaagaacggcaccgacggcggcgtgcaggtcgcggccgacgcgatcgtcgcggcgcgcgcgagccacgcgttcatgggcatgacgaagatggggatggccgcgattttcgagacgcgcggcaacgacgccgcgcacgtgatcctgcgcggcggcaagcggggcccgaactacgatcgcgcgagcgtcgacgaggcgtgcgcggtgctgcgcgcggcgggccagcgcgagcaggtgatgatcgactgctcgcacgcgaattcgaacaagtcgcacctgcggcaggtcgacgtcgccgaggacctcgcgcgccagttgtcggacggcgagcgacgcatcaccggcgtgatggtcgagagcaacctggaggccggccggcaggacctgaagcccggcgtgccgctgcaatacggcgtgtcgatcaccgacgcgtgcctgagctgggcgcagaccgagcccgtgctcgacacgctcgcgcaggcggtgcggcggcggcgcgccgcctga

SEQ ID NO: 27064 - protein, 372 aa, Burkholderia mallei ATCC 23344
MQNIDNPQRDRETGFADATQDTTRIDDVRIGAVRPLISPALLQDELPVPSAVQALVEASRDAIGDVLHGRDDRLLAIVGPCSIHDHDQALDYARRLKSAADALRDDLLIVMRVYFEKPRTTVGWKGYINDPRLDGSFRINEGLRAARRLLIDINALGLPAGTEFLDLLSPQYIADLIAWGAIGARTTESQSHRQLASGLSCPIGFKNGTDGGVQVAADAIVAARASHAFMGMTKMGMAAIFETRGNDAAHVILRGGKRGPNYDRASVDEACAVLRAAGQREQVMIDCSHANSNKSHLRQVDVAEDLARQLSDGERRITGVMVESNLEAGRQDLKPGVPLQYGVSITDACLSWAQTEPVLDTLAQAVRRRRAA

SEQ ID NO: 27065 - DNA, 1074 bp, Burkholderia pseudomallei K96243
  CDS (1)..(1074): transl_table=11
atgcccccgcacaataccgacgacgtccgcatccgtgaactgaaggagctgactccgcccgcccacctgatccgcgaattcgcgctcggcgaggcggtgtcggagctcatctacaacgcgcgccaggcgatgcaccggatcctgcacgggatggacgatcgcctgatcgtcatcatcgggccgtgctcgatccacgacacgaaggcggcgctcgaatacgcgggccggctcgtccaggagcgcgagcgcttcgcaagcgagctcgagatcgtgatgcgcgtgtacttcgagaagccgcgcacgacggtcggctggaaggggctcatcaacgatccgcacctggataacagcttcaagatcaacgacggcctgcgcaccgcgcgcgagctgctgctgcagatcaacgagatggggctgcccgccggcaccgaatacctcgacatgatcagcccgcagtacatcgcggacctgatctcgtggggcgcgatcggcgcgcgcacgaccgaatcgcaggtgcaccgcgagctcgcgtcggggctgtcgtgcccggtcggcttcaagaacggcaccgacggcaacgtgaagatcgcggtcgacgcgatcaaggccgcatcgcagccgcaccatttcctgtcggtgacgaagggcggccattcggcgatcgtgtcgacggccggcaacgaggactgccacgtgatcctgcgcggcggcaaggcgccgaactacgatgccgacagcgtgaacgccgcgtgcgcggacatcggcaaggccggcctcgccgcgcgcctgatgatcgacgcgagccatgcgaacagctcgaagaagcacgagaaccagattccggtatgcgcggacatcggccgccagatcgccgcgggcgacgagcgcatcgtcggcgtgatggtcgagtcgcacctcgtcgaaggccgccaggacctgaaggaaggctgcccgctcacgtacggccagagcatcaccgatgcatgcatcaactgggacgacagcgtgaaggtgctcgaagggctcgccgaagcggtgaaggcgcggcgcgtcgcgcgcggcagcggcaactga

SEQ ID NO: 27066 - protein, 357 aa, Burkholderia pseudomallei K96243
MPPHNTDDVRIRELKELTPPAHLIREFALGEAVSELIYNARQAMHRILHGMDDRLIVIIGPCSIHDTKAALEYAGRLVQERERFASELEIVMRVYFEKPRTTVGWKGLINDPHLDNSFKINDGLRTARELLLQINEMGLPAGTEYLDMISPQYIADLISWGAIGARTTESQVHRELASGLSCPVGFKNGTDGNVKIAVDAIKAASQPHHFLSVTKGGHSAIVSTAGNEDCHVILRGGKAPNYDADSVNAACADIGKAGLAARLMIDASHANSSKKHENQIPVCADIGRQIAAGDERIVGVMVESHLVEGRQDLKEGCPLTYGQSITDACINWDDSVKVLEGLAEAVKARRVARGSGN

SEQ ID NO: 27067 - DNA, 1092 bp, Methylococcus capsulatus str. Bath
  CDS (1)..(1092): transl_table=11
atgcccagcgtgtacaacaccgacgatcttcgcatctgcgagatcaaggaagtcattccgcccgtccaggttcatgaggaattcccgatcacggaccgggccgcactcacgacactgaccgcccgccgagggattcacgcaatcctttccaaggaggacgaccgcctgctggtggtgatcgggccctgttcgatccatgaccccaaggccgcgctcgaatacggggagcggctgctgccactccgccagaaactggcgagacatctggaaatcgtgatgcgggtctatttcgagaagccgcgaacgaccgtcggctggaagggcctgatcaatgatcccgatctggacgagagtttcaacatcaacaaaggcttgcgcctcgcccgcaagctgttgctcgatctgaacgaactgggcatgcccgcggccaccgagtacctcgatctcatcaccccgcagtatgtctccgacctgatcgcttggggcgccatcggtgctcgtaccacggagagccagtctcaccgtgaactggcatcggggctgtcatgtccggttggattcaagaacgccaccgacggcacgatcaaggttgctgtcgacgccataggtgcggcacggcggccacatcatttcctgtctttgaccaaggccggtcattcggcgatcttctccacgaccggtaacgccgactgtcacatcatccttcgtggcggagcccggccgaattacgacgcggccagcgtcgaagcggcggccagggcgctggaagccgtcggcctgccgcccaacatcatggtggactgcagccatgccaacagcatgaaggattacctgaagcagctgcgggtggccgaggacgtggccgaacagatagacggcggcgacaggcggatcatcggcttgatggtggaaagtcacctcaagccgggcaatcagaaactccacaagggcatggttcccgaatacggcgtcagcatcaccgatgcctgcatcggctgggatgacagcgtggccgtgctggaacggctcgccgccgcggtggagagccggcgcggccggtcggcaggcatccggaacgtgcggggggcctga

SEQ ID NO: 27068 - protein, 363 aa, Methylococcus capsulatus str. Bath
MPSVYNTDDLRICEIKEVIPPVQVHEEFPITDRAALTTLTARRGIHAILSKEDDRLLVVIGPCSIHDPKAALEYGERLLPLRQKLARHLEIVMRVYFEKPRTTVGWKGLINDPDLDESFNINKGLRLARKLLLDLNELGMPAATEYLDLITPQYVSDLIAWGAIGARTTESQSHRELASGLSCPVGFKNATDGTIKVAVDAIGAARRPHHFLSLTKAGHSAIFSTTGNADCHIILRGGARPNYDAASVEAAARALEAVGLPPNIMVDCSHANSMKDYLKQLRVAEDVAEQIDGGDRRIIGLMVESHLKPGNQKLHKGMVPEYGVSITDACIGWDDSVAVLERLAAAVESRRGRSAGIRNVRGA

SEQ ID NO: 27069 - DNA, 1083 bp, Nocardia farcinica IFM 10152
  CDS (1)..(1083): transl_table=11
atgactaccgcagccgatgtcgacgcgcggcattccgatctcgacgaccagcgcaccctgtcggtgagcccgttgcgctcgcccgccgaggtgcgcatggtgcacccgatcaccgacgacctcgccgataccgtccgggcgggccgtaaggccaccgtcgaggtgctcgacggcaccgacgaccgcctgatggtgatcgtgggcccgtgctcggtgcacgaccccgccgccgccctcgactacgcccggcgcctggccgccaaggccgccgaactcgacgaccgcctgcacgtggtgatgcgggtgtacttcgagaagccgcgcaccagcctgggctggaagggcctggtcaacgatccgcacctggacggctccttcgacgtcaacaccggtctgggcatcggccgcaagttgctggtcgacatcaccgcgctcggcctgccggtcgcgtgcgagttcctcgatccgatcaccccgcagtacatcgccgatctggtgtcctacggcgcgatcggcgcgcgcaccgcggccagccaggtgcaccgccagctcagcagcgcgctgtccatgccggtcggcatcaagaacggcaccgacggtgacgtccaggtcgcggtcgacggtgtgcgggcggccgcggccagccacgtcttccccggtaccgatctcgacgggcgcgccgcgctgatccgcaccaccggcaacccggactgccacgtcatcctgcgcggcggcagcaacggcaccaactacgacgcggcctcggtggccgaggcgtgcctgcggctggagaaggccgggctggcgcgccgggtcgtcgtggacgccagccacggcaacagcaacaaggaccacaacaagcaggtcgacgtggtggccgacatcgccgagcggatcgcgggcggtgagcgcgaggtcgtcggcgtgatgctggagagcttcctggtggcgggccgccaggacctcaccctcggccggtcggcggatctggtctacggccagtcgatcaccgacgcctgcctggactgggagaccaccgccgcacagctcgaccgcctggccgaggccgtcgcggcgcgctag

SEQ ID NO: 27070 - protein, 360 aa, Nocardia farcinica IFM 10152
MTTAADVDARHSDLDDQRTLSVSPLRSPAEVRMVHPITDDLADTVRAGRKATVEVLDGTDDRLMVIVGPCSVHDPAAALDYARRLAAKAAELDDRLHVVMRVYFEKPRTSLGWKGLVNDPHLDGSFDVNTGLGIGRKLLVDITALGLPVACEFLDPITPQYIADLVSYGAIGARTAASQVHRQLSSALSMPVGIKNGTDGDVQVAVDGVRAAAASHVFPGTDLDGRAALIRTTGNPDCHVILRGGSNGTNYDAASVAEACLRLEKAGLARRVVVDASHGNSNKDHNKQVDVVADIAERIAGGEREVVGVMLESFLVAGRQDLTLGRSADLVYGQSITDACLDWETTAAQLDRLAEAVAAR

SEQ ID NO: 27071 - DNA, 1044 bp, Legionella pneumophila str. Paris
  CDS (1)..(1044): transl_table=11
atgagttattccatcttaaaaaagctgccaccaatagaaaaaatcatccgggaattgccactatcccaccccgcctatctacaaattgctcaagaccggcaagagatcaaagctattttggaagggcgagataaacgtcttttgatgatagttggtccttgctcagcatggcctaaaaaagcggtattggaatacgctgagcgtttggtacaactcaacagcaaagtaaaacacgctttaaaattaatcatgcgcgtttacattcaaaagccaagaaccaccaaaggctggactggaccggtgaatcaacccgatttattttcaactcctgatattgaggcaggtataaaatatacccgggacatgatgataaaagtcattcaaatggggctccctatcgctgatgaggctcttttcacccataatgccaaaggatttcttgaacttctgtcctgggttgcaataggcgcccgtagttcagaggatcaagagcatcgaatttttgcctccgcccttgactgtgccgtaggattaaaaaaccctacacatggttcactcgctgtcggagtaaatagcctggttgcatcacagcatcctcatgttgctgtcttcgatggctatgaagtgcaaacccatggtaatcatcatgctcatctcgttctgcgtggttcaaaccaagctcccaattactccgtttctcatctggaggaagtcatgtactacatgggcatgcatcagatagtgaacccttctgtcattattgatgttagccatgacaactgtctggtgaatgggaaaaaaaatcatcagctacaaccagagattgcatttaatattctggaaagcatcaaaaatagacctgatttaaaacaactggtcaaaggattcatggtagaaagtttcatcaaagaaggtaatcaaaaattagattctatcaatcccgataacattgatttaagcgggttatccgttaccgatccttgcctcagttgggagaagacagaatcgttcctgttggaactggcggagagggaagcattatga

SEQ ID NO: 27072 - protein, 347 aa, Legionella pneumophila str. Paris
MSYSILKKLPPIEKIIRELPLSHPAYLQIAQDRQEIKAILEGRDKRLLMIVGPCSAWPKKAVLEYAERLVQLNSKVKHALKLIMRVYIQKPRTTKGWTGPVNQPDLFSTPDIEAGIKYTRDMMIKVIQMGLPIADEALFTHNAKGFLELLSWVAIGARSSEDQEHRIFASALDCAVGLKNPTHGSLAVGVNSLVASQHPHVAVFDGYEVQTHGNHHAHLVLRGSNQAPNYSVSHLEEVMYYMGMHQIVNPSVIIDVSHDNCLVNGKKNHQLQPEIAFNILESIKNRPDLKQLVKGFMVESFIKEGNQKLDSINPDNIDLSGLSVTDPCLSWEKTESFLLELAEREAL

SEQ ID NO: 27073 - DNA, 1056 bp, Photobacterium profundum SS9; identical to SEQ ID NO: 1407
  CDS (1)..(1056): transl_table=11

SEQ ID NO: 27074 - protein, 351 aa, Photobacterium profundum SS9; identical to SEQ ID NO: 1408

SEQ ID NO: 27075 - DNA, 1113 bp, Photobacterium profundum SS9
  CDS (1)..(1113): transl_table=11
ttgccttctactacccagaatagattgaggaaagccaccatgcaaaaagaccaactgaataatgtacatattcaagatgaatgcgtattgatcactcctcaacaactaaaagccaggttgccactcagtgaaacagcactgaacttcattcgtgaatctcgtcaaaccattgcagatattactcacaagcgtgaccaccgtttactcgtggtatgcggaccatgctcaattcacgatattgacgcagcgaaagcgtacgcccaaaaattgaagcagctttctgaagagctaagtgatcaactgtacattgtaatgcgcgtttattttgaaaaaccacgtacaacagttggttggaaaggtcttatcaatgacccgcatcttgatggctcttttgaagtggaagaaggtttacacattggtcgtcagctactcattgacttggttgaaatggggattcctttagcaacagaagcgcttgatccgatcagtcctcaatacttaggtgatttattcagttgggcagccattggtgcacgtaccactgaatcacaaacacaccgtgaaatggcaagtggcctttcaatgcccgttgggtttaaaaatggtactgatggaagtttggcaacggctatcaatgccatgaaagctgcagcttctgggcaccgttttatggggattaatccagaaggtcaggtggcgctgttgaacacccaaggaaaccctgatggccatgtaattttacgtggcggtaagcaaacgaattatgattcagtctcggttactgagtgtgaaaatgagatgcatcagtcaggtctttcaccatccttgatggtagactgtagccatgcgaattcacgtaaagattaccgtcgtcagccattagtcgctgaagatgtacttcatcaaatccgtgaaggtaataaatcgatcattggtttgatgattgaaagccatttaaatgaaggtagtcaaagcgctgatttaccgcgcgaagaaatggcttatggggtatcgattaccgatgcatgtatcagctgggaagatacagaaacactattacgtcgtacgcgtaaagaattaacgcctttcttaaaggatcgctgcgaaggataa

SEQ ID NO: 27076 - protein, 370 aa, Photobacterium profundum SS9; identical to SEQ ID NO: 1406

SEQ ID NO: 27077 - DNA, 1053 bp, Photobacterium profundum SS9; identical to SEQ ID NO: 1403
  CDS (1)..(1053): transl_table=11

SEQ ID NO: 27078 - protein, 350 aa, Photobacterium profundum SS9; identical to SEQ ID NO: 1404

SEQ ID NO: 27079 - DNA, 1083 bp, Photobacterium profundum SS9; identical to SEQ ID NO: 1401
  CDS (1)..(1083): transl_table=11

SEQ ID NO: 27080 - protein, 360 aa, Photobacterium profundum SS9; identical to SEQ ID NO: 1402

SEQ ID NO: 27081 - DNA, 1113 bp, Francisella tularensis subsp. tularensis SCHU S4
  CDS (1)..(1113): transl_table=11
atgataggtgataaaaactttgataaagtttctaatataaatataaaaaaggaaaaagtattgattcctgcagaagttctaatccaagatatacctcttttaaagacttcttttgaaactgtaagaaaatctcgtaaagaaatagctaatatcatccatggaaatgatgatagagttgctgtagttgtaggaccttgctctattcatgatcctgctgctgcaattgagtatgctactaaactcaaagagcaagttaagaaatttcataaagatatacttattataatgagggtatattttgaaaaaccacgtactacgattggttggaaaggatttatcaatgaccctgatttagataactcatataatatcaacaaaggtttacgtcttgcgcgtaatttattatcagatttaactaatatgggactaccgtgtgcaactgaatttctagatgtaattactccacaatactttgctgagctaatcacttggggagcaattggcgctagaactgttgaaagtcaggtacatagagaattagcttctggtctttctgcatcgattggttttaaaaatgccactaatggtgatgtccaagtagctgtagatgctgtaaaatctgccacttatccccatcacttcttaagtacgacaaaatctggttctacagcaatatttgcaactaaaggtaaccaaaatggtcatgtaattcttcgtggtggtgcctctggtcctaactttagtaaagagcatgttgatgactgtattgctaaactaaaaaaagctgatattaatactaaggtaatgattgactgtagtcacggcaatagtcaaaaagatcattctaagcaaattagcgtattagctgatatttgtgagcaaataaagcacagtaacgatatttttggggtaatgatagaaagtaatcttgtggctggtaatcaagatatcaataaaaaacctctcacttatgggcaaagtgtcacagataaatgcgttgactttgaagaaacagttaagatgctagaaatgttagctgaagcagtccaggtaagacgtggttctcaaactaaacaacaagttaaagaagagtcacaattttctttactgtaa

SEQ ID NO: 27082 - protein, 370 aa, Francisella tularensis subsp. tularensis SCHU S4
MIGDKNFDKVSNINIKKEKVLIPAEVLIQDIPLLKTSFETVRKSRKEIANIIHGNDDRVAVVVGPCSIHDPAAAIEYATKLKEQVKKFHKDILIIMRVYFEKPRTTIGWKGFINDPDLDNSYNINKGLRLARNLLSDLTNMGLPCATEFLDVITPQYFAELITWGAIGARTVESQVHRELASGLSASIGFKNATNGDVQVAVDAVKSATYPHHFLSTTKSGSTAIFATKGNQNGHVILRGGASGPNFSKEHVDDCIAKLKKADINTKVMIDCSHGNSQKDHSKQISVLADICEQIKHSNDIFGVMIESNLVAGNQDINKKPLTYGQSVTDKCVDFEETVKMLEMLAEAVQVRRGSQTKQQVKEESQFSLL

SEQ ID NO: 27083 - DNA, 1089 bp, Haemophilus influenzae R2866
  CDS (1)..(1089)
atggctaaagagaaaattgaaattgtcgtggcaaacgacgatacgcgaattgaaaaagtcgatcaggtgttaccacccattgccttattagaaaaatacccagcaagtgaacatgctgcggcgttagtgaagcaaactcgtcatgaggcacataatattattcatggtaaagatgatcgtttattagtcgtgattgggccttgctctattcatgatccgaaagttgccattgaatatgcgactcgtttaaaaccattacgtgaaaaatacaaagatagccttgaaattattatgcgtgtgtattttgagaaaccgcgtacaacggtgggttggaaaggtctaattaatgatccatatttgaatgatacttatcgtttaaatgatgggttacgtattgcacggaaattactttcagatattaatgatcttggtgtgcctgcagcgggcgagtttttagatatgattacacctcagtatttggcagattttatgagctggggggcgattggggctagaacaacagaatcacaagttcatcgtgagttggcttcaggtttatcttgtgctgttgggtttaaaaatgccactaatggtggtgtgaaagtcgctttagatgcaattggtgcggcggaagctccccactatttcttatctgtcactaaatttggtcattctgcaattgtttctacaaaagggaatgaagattgccatattattttacgaggtggagataaaggccctaactatagtgctgaagatgtagaaaaagtttgtgctgatattgaaaaaacagggcgtattccacacgttatggttgattttagccatgcaaacagcagtaaacaatataaaaagcaaatggatgtttgccaagacgtatgtaatcagattgcatttggttctaaacaaatctttggcgtaatggtggaaagccatttagtggaaggtcgtcaagatttagttgatggcaaagcgcagacttatggacaaagtattacggatgcgtgcattggatgggaagattctgaaagattattgcaacaactttctgatgcagttattgctagacgtaaagcgacgagtaattaa

SEQ ID NO: 27084 - protein, 362 aa, Haemophilus influenzae R2866
MAKEKIEIVVANDDTRIEKVDQVLPPIALLEKYPASEHAAALVKQTRHEAHNIIHGKDDRLLVVIGPCSIHDPKVAIEYATRLKPLREKYKDSLEIIMRVYFEKPRTTVGWKGLINDPYLNDTYRLNDGLRIARKLLSDINDLGVPAAGEFLDMITPQYLADFMSWGAIGARTTESQVHRELASGLSCAVGFKNATNGGVKVALDAIGAAEAPHYFLSVTKFGHSAIVSTKGNEDCHIILRGGDKGPNYSAEDVEKVCADIEKTGRIPHVMVDFSHANSSKQYKKQMDVCQDVCNQIAFGSKQIFGVMVESHLVEGRQDLVDGKAQTYGQSITDACIGWEDSERLLQQLSDAVIARRKATSN

SEQ ID NO: 27085 - DNA, 1089 bp, Amycolatopsis orientalis; identical to SEQ ID NO: 1369
  CDS (1)..(1089): transl_table=11

SEQ ID NO: 27086 - protein, 362 aa, Amycolatopsis orientalis; identical to SEQ ID NO: 1370

SEQ ID NO: 27087 - DNA, 1035 bp, Escherichia coli
  CDS (1)..(1035): transl_table=11
atgcagtcagtcagtaaatcaatctaccgagggaagttgcttagcagtttacctgctgtgggcgagattcataaagaaatcgcagtatcagaagaaaccgtaacatggatctctctgcaacgagagattatagcgaatattttgctgggaaaagatcctcgcttgcttgtgattgttggtccatgctcaatccatgacgttcaggctgccgttgaatatgcgaaacgattgtccgtattacagaataagtacttatcgcaaatgtacattgtaatgcgcacttattttgagaaacctcgaactcgtaaaggctggaaaggaataatgcacgatcctgatctaaatggaagctataatgttgagaaagggatacgatatgctcgccagtgtttgtcctcaatcacaacaatgcgtgtcgcaaccgctacagaattcctcgatcctttccttactccctatattgctgatttaatatgttggggggctgttggtgccagaactactgaatcacaaacgcatcgtcaacttgcgtctggtttacattgtcctgttggatttaaaaacagcactgatggaaatattaacttagctattgatgctattcttgcagcccgtgaacaacatgttgtatatatgacatctttaacaaaatgtatatctaccctattaaccgatggcaatccacatggacatctcatattacgtggtggtagagagccgaactatggtttgtcggatataacgaaggcagtgaaattaatgcatgatgaaggtatcaatcatcgtctgataattgactgtagccatggtaatagtggtaaagtggctgaacggcaaatctctgttgctcgtgaagtcattgataatcggaaaaagatgccgggatatgtagctggaattatgctggaaagctttttacaaggtggaaaacaatcagacagccttccgcgagagtatggtcagtctgttactgatgagtgtctttcatggcaacagacagaacaattattatcaactctggcagcacaactttaa

SEQ ID NO: 27088 - protein, 344 aa, Escherichia coli
MQSVSKSIYRGKLLSSLPAVGEIHKEIAVSEETVTWISLQREIIANILLGKDPRLLVIVGPCSIHDVQAAVEYAKRLSVLQNKYLSQMYIVMRTYFEKPRTRKGWKGIMHDPDLNGSYNVEKGIRYARQCLSSITTMRVATATEFLDPFLTPYIADLICWGAVGARTTESQTHRQLASGLHCPVGFKNSTDGNINLAIDAILAAREQHVVYMTSLTKCISTLLTDGNPHGHLILRGGREPNYGLSDITKAVKLMHDEGINHRLIIDCSHGNSGKVAERQISVAREVIDNRKKMPGYVAGIMLESFLQGGKQSDSLPREYGQSVTDECLSWQQTEQLLSTLAAQL

SEQ ID NO: 27089 - DNA, 1086 bp, Amycolatopsis methanolica
  CDS (1)..(1086): transl_table=11
atgtctctcagcgcaggccccgcggaaatttccgaaggcctcgacaaccagcgcaccctcggcgtcagcccgctgatctcccccgccctgctgcggcaggagctgccggtggacgcggcgatcgccaagaccgtcgcgcatggccggtcgtcggccgtcgacatcctccacggcgacgacgaccgcctcatcgtggtcgtcggcccctgctcggtgcacgaccccgcggccgccctcgactacgcccaccggctggccgagcacgccgccggtgtgcgcgacgaactgcacgtgatcatgcgggtgtacttcgagaagccacgcaccacgctgggctggaagggcctcatcaacgacccggacctggacggcagctacgccgtcaacaagggcctgcggatggcgcgcaagctgctgctggacatctccgcactggggctgccggtcgggtgcgagttcctggacccgatcacgccgcagttcatcgccgacaccgtgagctggggatccatcggcgcgcggaccgcggccagccaggtgcaccgccagctgtgcagcgcgctgtccatgccggtggggatcaagaactccactgagggcgatgtgcaggtggcggtggacgcgacccgcgcggcggcggcgagccacgtgttcgcgggcatcaacaacgacggcctggcggcgctgttcaccacggcgggcaacccggactgccacgtcatcctgcgcggcggttccgcaggcccgaactacgacgcggcgacggtggccgacacgctcgcgcggcaggccaaggccgggctgccggagcgggtgatcatcgacgcgagccacggcaacagcggcaaggaccacgtccgccagggcgtggtggccggggagatcgcggaccggatcgccgccggcgagcgcgggatcgccgggatcatgctggagagcttcctcgaggccgggcggcaggacctggtgctggggcacgcgggcgagctgacctacgggcagtcgatcaccgatgcgtgcctggactggcgaagcacgggtgagctgctggaccgcctctcggaggcggtggcggcgcggcggtga

SEQ ID NO: 27090 - protein, 361 aa, Amycolatopsis methanolica; identical to SEQ ID NO: 1414

SEQ ID NO: 27091 - DNA, 1098 bp, Amycolatopsis balhimycina
  CDS (1)..(1098): transl_table=11
gtggccgcgatgacccacaccgtcgccacgaccgacctcgacaaccagcgcatcgagcggatcgtccccctggtcacccccgccctgctgcatcacgaactgccgctcagcgccaccgcggccgagacggtgcgaaagggccgcgagagcgtcgtccgcgtcctcgacggcacggacgaccggctgctcgtgatcaccgggccgtgctccatccacgaccccgccgcggcgctcgactacgccggccacctcgccgccatcgccggcgaggtcgccggcgacctgctcgtcgtcatgcgcgtgtacttcgagaaaccccggacgatcggcggctggaaggggctcatcaacgacccccacctcgacggcaccggcgacgtcaaccacgggctgcgcacggcccggcacctcctgctggagctcgccgaacgcggcctgcccgccgcgtgcgaatggctggacaccaccattcccgcgtacttcgcggacacggtctcgtggggcgccatcggcgcccgcaccgtggaaagccagaaccaccgcatgctcgccagcggcctgtccatgcccgtcggcttcaagaaccgccgcgacggcgacatcaccgtcgccatcgacgcgatccgggccgccgcggtccgccacgtggtccccggcgtcgaccccggcgggttgcccgccatcctgcacacggcgggcaacccggactgccacgtcgtcctgcgcggtggtgacggcgcgcccaaccacgactccgcgtccgtccacaagacactgaccgcgctggaggccgcgggcctgcccggccgggtggtgatcgacgccagccacgacaacagcggcaaggaccaccaccgccagcccctcgtcgcggccgagatcgcgggccaggtcgagaacgggcggaacggcatcgtcggggtgatgctcgagtccaacctccgcgccggccgccaggacctccagccgggccgtccgccggcatacggccagtccatcaccgacgcctgcatcgacgtccccaccacccggacggtcctccacggcctcgccgcggcggccgcggcccggcgaaagctcggcaagcaagcaagctga

SEQ ID NO: 27092 - protein, 365 aa, Amycolatopsis balhimycina; identical to SEQ ID NO: 1424

SEQ ID NO: 27093 - DNA, 1134 bp, Phytophthora infestans
  CDS (1)..(1134)
atgccgagcacccagccgcaccctgcacctgaaaccgaacgtgtgaccaagcgtcagcgtctagaagaccgtaatgtcgtcgccattaagccgctggtgcctcctgcctgcgtcctggaggaactgcccgtgactcctgaggtgcacgaactggtggacgctacgcgcgacgccgtgtcccgcatcctgcacggtcaagatgaccgcctcgtcgtggtcgtcggcccttgctccattcacgacgtggacgctgccatggactacgccaagcgtctgaaaactcttgcgggcgagctgaacggagaacttctggtgatcatgcgcacctacttcgagaagccccgaacgactgtgggctggaagggtctgatcaatgacccggacctcgaccagtctttcaagatcaacaagggtattcgcattgcccgtaagctgttgctggacgtgaattcgctgggtcttcccgtgagtctggagttcctcgacaccatctcgccccagttcacctcagacctcatttcgtggggagccatgggcgcgcgtactaccgagtcccagctgcaccgcgaacttaccagtggcctgtcgattcctgtgggattcaagaatggcacgggcggcaacgccaaggtggcagtggacgctgccgttgcttcgtcgcagcctcacaacttcctcggtctgaacgaacacggattggcatcgattgtgcgcaccaagggcaacaaggactgccacgtcatcctgcgcggcggctccgatggccccaactacgagcaaaagtacattgatgaggctgctgccatgctaaagaaggctaagcagccgtccaaaatcatggtggactgctcgcacggcaactcgcgcaagctgcacgctaaccagcgaaaggtagttagctacctggctggtattgtttccgagggaaacacgaatgtgcttggtgttatgatcgagtccaatatcgtggagggcaaccagtcgcttggcgacgacccgtccaagctcgtctacggccagagcatcacggatgcgtgcatcaactgggatgacacagtcacgacgctgaaggaacttgcaggtgccgtcgcaaagcggcgcaaacttgatgccgcgaacccggccaccaagtag

SEQ ID NO: 27094 - protein, 377 aa, Phytophthora infestans; identical to SEQ ID NO: 1522

SEQ ID NO: 27095 - DNA, 1035 bp, Escherichia coli; identical to SEQ ID NO: 1535
  CDS (1)..(1035): transl_table=11

SEQ ID NO: 27096 - protein, 344 aa, Escherichia coli; identical to SEQ ID NO: 1536

SEQ ID NO: 27097 - DNA, 1086 bp, Stigmatella aurantiaca
  CDS (1)..(1086): transl_table=11
atgaccgctcgcactgaaaatctgaacgtagttggtttcgaccacatgccctccccctccgagatcaaggagcgcgtgccgatgacaagcctcgcagccgacaccgtgctctccggacggcgcgcgctgatggacatcctcaaccgcaaggatccacgcatcttcgtcatcgtgggcccctgctccatacatgatcccaaggccggcatcgagtacgcccgtcgacttcgcaacctctccgacgagatccgggagacgatcctcgtggtgatgcgggtgtacttcgagaaaccgcgcacctccaccggctggaagggcttcatcaacgacccgaggatggacgactccttccacatcgaggaaggcatggagcggggccgccgcttcttgagggacgtggccgaactgggcctgcccgcggcgaccgaagcgctcgatcccattgccccccagtattacggcgacctgatttcctggacggcgattggcgcgcgcacggcggagtcccagacccaccgcgagatggcctcggggctgtcgacgcccgtgggcttcaagaacggaaccgacggctcgctggacgcggcggtcaacggcatcctctccgcctcgcacccccacagcttcctggggctgaacgagggcggtgaggcggcgatcatccgcaccggaggcaatgcctacagccacctggtgctccgaggcggagggggacggcccaactacgacacggtgtccatcgcgctcgccgaacaggcgctcaccaaggccaagctgccggggaacatcgtggtggactgctcccacgccaactcctggaagaagccggagttgcagcccctggtcatgcgcgacgtggtgcaccagatccgcgaaggcaaccgctccgtggtgggtttgatgctcgaaagcttcctggaagcgggcaaccagcccatccccgccgatctctcgaagctgcgctacggctgctcggtgaccgatgcgtgcgtggactggggcaccaccgaagagacgctgcgcaacgcccacaaggtgctgcgcgaggcattgcccacgcggagctcgggccgcccagcgccctga

SEQ ID NO: 27098 - protein, 361 aa, Stigmatella aurantiaca; identical to SEQ ID NO: 1538

SEQ ID NO: 27099 - DNA, 1083 bp, Amycolatopsis mediterranei; identical to SEQ ID NO: 1541
  CDS (1)..(1083): transl_table=11

SEQ ID NO: 27100 - protein, 360 aa, Amycolatopsis mediterranei; identical to SEQ ID NO: 1542

SEQ ID NO: 27101 - DNA, 1125 bp, Emericella nidulans; identical to SEQ ID NO: 1547
  CDS (1)..(1125)

SEQ ID NO: 27102 - protein, 374 aa, Emericella nidulans; identical to SEQ ID NO: 1548

SEQ ID NO: 27103 - DNA, 1062 bp, Vibrio cholerae
  CDS (1)..(1062): transl_table=11
atgccactgaaaaccgatgaattaagaacccaagcattgggacctatgcctactccggcagaattaagtcacgcacatcctatcactgatgaagttgcgctacggatcgcgcagtctcgtcgccaaattgaaagcattcttaccggtgaagatgatcgcctattagtgatagtggggccttgttcggtgcatgataccgatgccgcactcgactacgctcgccgccttgctgcgctacaagaaaactatactgatgagctttttgtggtgatgcggacctatttcgaaaaaccacgtactgtggtgggttggaaaggactgatcaccgatccaaacttagatggctcttacgctttagaaaccggtctcaataaagcgcgaaagttgctgcttgatgtaaacaagctcggattggctaccgcgaccgagtttcttgatatgatcacaggccaatacatcgcggaccttatcacgtggggcgcaattggtgcgcgtaccactgagtcgcaaattcaccgtgagatggcctctgcgctctcctgccctgtgggttttaaaaatggcactaacggtaatgtgaaaatcgcgattgatgcgatccgcgcggccaaagcgtcacattacttctattcaccagataagaatggtcgtatgacggtttaccgtaccagtggtaacccatttggtcatattattctgcgtggtggtgatagcggaccaaactttgatgcggcttcgattaatgaagcttgccagcagttggcgcaattcaacttaccagagcgtttagtggtggatttcagccacgcgaactgtcaaaaacaacaccgtaaacaagtggatgtcgcgcgcgatatttgccagcaaattgaagctggcagccacaaaattgcgggcatcatggcggaaagcttccttgtggaaggcaatcagccaatgcacgatctcaataatctgacttatggtctgtcgatcaccgatccttgtttaggatggaaagataccgccaccatgcttgatatgctggctcaatcgatcaaagtccgtcgttctcgtcattaa

SEQ ID NO: 27104 - protein, 353 aa, Vibrio cholerae; identical to SEQ ID NO: 1552

SEQ ID NO: 27105 - DNA, 942 bp, Neisseria meningitidis
  CDS (1)..(942): transl_table=11
atgacacaccattaccccacagacgatattaagattaaagaagttaaagagttgttgccgccgattgcccatctttacgagctgccgatttccaaagaggcttcgggcttggttcaccgcacccgtcaggaaatttccgatttggttcacggcagggacaagcggctgttggttattatcgggccgtgttcgattcacgatccgaaagcggcgttggaatatgcggagcgtttgttgaaactccgcaagcagtatgaaaacgagcttttgattgtgatgcgcgtttatttcgagaagccgaggacgacggtgggttggaaaggtttgattaacgacccgcatttggacggtacgtttgacatcaatttcggtttgcgtcaggcgcgcagcctgttgttgtcgctgaacaatatgggtatgcctgcctctaccgagtttttggatatgattacgccgcaatattatgcggacttgatttcttggggggcaatcggtgcgcggacgaccgaaagccaagttcaccgcgaattggcaagcgggctgtcctgccccgtcggctttaaaaacggtacggacggcaatttgaagattgccatcgacgcaatcggtgcggcgagccattcgcatcatttcctgtctgtaaccaaggccgggcattccgccattgtccataccggcggcaatcctgactgtcatgtcattttgcgcggcggaaaagagccgaattatgatgcgggacacgtcagcgaggcggcggaacaactgcgtgcggcaggggtaaccgacaagctgatgatagattgcagccacgccaacagccgcaaggattacacccggcagatggaagtggcacaagatattgccgcccaattggaacaggacggcggcaatatcatgggcgtgatggtggaaagccatttggtcgaaggcaggcaggactag

SEQ ID NO: 27106 - protein, 313 aa, Neisseria meningitidis
MTHHYPTDDIKIKEVKELLPPIAHLYELPISKEASGLVHRTRQEISDLVHGRDKRLLVIIGPCSIHDPKAALEYAERLLKLRKQYENELLIVMRVYFEKPRTTVGWKGLINDPHLDGTFDINFGLRQARSLLLSLNNMGMPASTEFLDMITPQYYADLISWGAIGARTTESQVHRELASGLSCPVGFKNGTDGNLKIAIDAIGAASHSHHFLSVTKAGHSAIVHTGGNPDCHVILRGGKEPNYDAGHVSEAAEQLRAAGVTDKLMIDCSHANSRKDYTRQMEVAQDIAAQLEQDGGNIMGVMVESHLVEGRQD

SEQ ID NO: 27107 - DNA, 942 bp, Neisseria gonorrhoeae
  CDS (1)..(942): transl_table=11
atgacacaccattaccccacagacgatattaagattaaagaagttaaagagttgttgccgccgattgcccatctttacgagctgccgatttccaaagaggcttcgggcttggttcaccgcacccgtcaggaaatttccgatttggttcacggcagggacaggcggctgttggtcattatcgggccgtgttcgattcacgatccgaaagcggcgttggaatatgcggaacgtctgttgaaactccgcaagcggtatgaaaacgagcttttgatcgtgatgcgcgtttatttcgagaagccgagaacgacggtgggttggaaaggtttgattaacgacccgcatttggacggtacgttcgacatcaatttcggtttgcgtcaggcgcgcagtctgttgttgtccctgaataatatgggcatgcctgcctctaccgaatttttggatatgattacaccccagtattatgccgacctgatttcttggggggcaatcggcgcgcggacgaccgaaagccaagtccaccgcgaattggcaagcggtctgtcctgccccgtcggctttaaaaacggtacggacggcaatttgaagattgcgatcgacgcaatcggtgcggcgagccattcgcatcatttcttgtctgtaaccaaggccgggcattccgccattgtccataccggcggcaatcccgactgtcatgtcattttgcgcggcggaaaagagccgaattatgatgcgggacacgtcagcgaggcggtggaacaactgcgtgcggcaggggtaaccgacaagctgatgatcgattgcagccacgccaacagccgcaaggattacacccggcagatggaagtggcacaagacattgccgaccaattggaacaggacggcggcaatatcatgggcgtgatggtggaaagccatttggtcgaaggcaggcaggactag

SEQ ID NO: 27108 - protein, 313 aa, Neisseria gonorrhoeae
MTHHYPTDDIKIKEVKELLPPIAHLYELPISKEASGLVHRTRQEISDLVHGRDRRLLVIIGPCSIHDPKAALEYAERLLKLRKRYENELLIVMRVYFEKPRTTVGWKGLINDPHLDGTFDINFGLRQARSLLLSLNNMGMPASTEFLDMITPQYYADLISWGAIGARTTESQVHRELASGLSCPVGFKNGTDGNLKIAIDAIGAASHSHHFLSVTKAGHSAIVHTGGNPDCHVILRGGKEPNYDAGHVSEAVEQLRAAGVTDKLMIDCSHANSRKDYTRQMEVAQDIADQLEQDGGNIMGVMVESHLVEGRQD

SEQ ID NO: 27109 - DNA, 1107 bp, Candida albicans
  CDS (1)..(1107): transl_table=12
atgtttattacaaacgaacacgttggtgacagaagtcgtatggaagattggagaatccgtggttacgatccattaactcctccagatcttttacaacatgaatacccattaactcctgaatcacagaagattatcgttgaaggtagaaatgctgcttgtgatattttgaacggcaaagaccgaagattgattggaccttgttcgattcatgatcctcaagctgccttggattactgtgaaagattatatcaagcttctgaaaaacacaagggtgaattattgattgttatgagagcatacttggaaaaaccaagaaccacagttggttggaaaggtttaattaacgacccagatatcgatggtaccttccatataaataaggggttgagaattgctagaaagttgtttgttcaattaacttcaaaattaccaattgctggtgaaatgttggatacaatctcacctcaatttttatctgatttattctcagtgggggctattggtgcaagaaccaccgaatcgcaattgcacagagagttggcatctggttatcattcccagttggattcaaaaacggtaccgatggtactttgggtgttgccattgacgcctttgagagctgcttctcatccacatcatttcctttcagtcacaaaacctggtgttgttgctattgttgggactgatgggaaccaagactgttttgttatattaagaggtggtaagaagggtacaaactatgatgccaaatccgtacaagaaacacaagaagaattaatcaaatcaaaagttgttaccgaaatgaaacctggtccaagaattatggttgattgttctcatggtaattctaataaagatcatagaaaccaaccgaaagttgcccaagttgttgctgaacaagtggccggtggtgataaatccatatgtggattaatgattgagagtaatataaatgatggaagacaagatgttccaccaaaggaacaaggtggtaaagatgctttgaaatacggtgtttctattaccgatgcttgtattggttgggaaaccacagaagaagttttggaggttttagccaatgctgtcaaaaccagaagatctttatag

SEQ ID NO: 27110 - protein, 368 aa, Candida albicans; identical to SEQ ID NO: 1362

SEQ ID NO: 27111 - DNA, 1071 bp, Escherichia coli; identical to SEQ ID NO: 1333
  CDS (1)..(1071): transl_table=11

SEQ ID NO: 27112 - protein, 356 aa, Escherichia coli; identical to SEQ ID NO: 1334

SEQ ID NO: 27113 - DNA, 1071 bp, Salmonella typhimurium; identical to SEQ ID NO: 2245
  CDS (1)..(1071): transl_table=11

SEQ ID NO: 27114 - protein, 356 aa, Salmonella typhimurium; identical to SEQ ID NO: 2246

SEQ ID NO: 27115 - DNA, 1113 bp, Saccharomyces cerevisiae; identical to SEQ ID NO: 1363
  CDS (1)..(1113)

SEQ ID NO: 27116 - protein, 370 aa, Saccharomyces cerevisiae; identical to SEQ ID NO: 1364

SEQ ID NO: 27117 - DNA, 1113 bp, Candida albicans
  CDS (1)..(1113): transl_table=12
atgagtaaaactcctgttcctaccgaatacgacgacacaagaatattgggttacgatcctttagttccaccagccttattacaacacgaaataaaggcatctgccgaatcattggatgttgttataaaaggccgttacgattctgcccaaatccttaagggtaatgatgacagatgtattgtaattgttggtccatgttcaattcacgatcctccacaagccttagaatatggtaaacgtttgaagaaattggctgatgaattaaaagatgacttggtgattatcatgagagcttatttggaaaaaccaagaactaccgttggttggaaaggtttgatcaatgatcctgatgttgataattcttttgatattaaccgtgggttgaagatatctcgtcaattatattccgatttgactagtgttgttggattaccaattggatcagaaatgttagacaccatttctccacaatacttttccgatttcttgagttttggggccattggagctagaaccaccgaatcacaattacacagagaattagcttctggtttaagcttcccaattggatttaaaaatggtaccgatggtggtttagccgttgccttggatgccgtgcaagcttcttcaaaaggacatcacttcatgggtgtcaccaaaaacggtatggctgccattaccactactaaaggtaacgattgttgtttcattatattaagaggtggtaaaaaaatcaccaattacgatgttgaatcagttaaagctgctaaagaagctattgccaaatgtaccgatccaagtatcaagttgatggttgattgctctcacgacaactcaagaaaagactacagaaaccaacctcaagtattagacagtgttgctgaacaaataagtaatggtgaagactccattattggggttatgattgaatccaatattcatgaaggtaaacaaccaatgcccccagcaggtagtggtaaagaagcattgaaatacggtgtgtctatcaccgatggatgtgtttcttgggaaaccactgttgaaatgttgaccaaattgagtcaagcagtccaaactagaagaagtttaaagaaacaaaaagtttccaattaa

SEQ ID NO: 27118 - protein, 370 aa, Candida albicans; identical to SEQ ID NO: 1554

SEQ ID NO: 27119 - DNA, 1101 bp, Corynebacterium glutamicum
  CDS (1)..(1101): transl_table=11
atgagttctccagtctcactcgaaaacgcggcgtcaaccagcaacaagcgcgtcgtggctttccacgagctgcctagccctacagatctcatcgccgcaaacccactgacaccaaagcaggcttccaaggtggagcaggatcgccaggacatcgctgatatcttcgctggcgacgatgaccgcctcgttgtcgttgtgggaccttgctcagttcacgatcctgaagcagccatcgattacgcaaaccgcctggctccgctggcaaagcgccttgatcaggacctcaagattgtcatgcgcgtgtacttcgagaagcctcgcaccatcgtcggatggaagggattgatcaatgatcctcacctcaacgaaacctacgacatcccagagggcttgcgcattgcgcgcaaagtgcttatcgacgttgtgaaccttgatctcccagtcggctgcgaattcctcgaaccaaacagccctcagtactacgccgacactgtcgcatggggagcaatcggcgctcgtaccaccgaatctcaggtgcaccgccagctggcttctgggatgtctatgccaattggtttcaagaacggaactgacggaaacatccaggttgcagtcgacgcggtacaggctgcccagaacccacacttcttcttcggaacctccgacgacggcgcgctgagcgtcgtggagaccgcaggcaacagcaactcccacatcattttgcgcggcggtacctccggcccgaatcatgatgcagcttcggtggaggccgtcgtcgagaagcttggtgaaaacgctcgtctcatgatcgatgcttcccatgctaactccggcaaggatcatatccgacaggttgaggttgttcgtgaaatcgcagagcagatttctggcggttctgaagctgtggctggaatcatgattgagtccttcctcgttggtggcgcacagaaccttgatcctgcgaaattgcgcatcaatggcggtgaaggcctggtgtacggacagtctgtgaccgataagtgcatcgatattgacaccaccatcgatttgctcgctgagctggccgcagcagtaagggaacgccgagcagcagccaagtaa

SEQ ID NO: 27120 - protein, 366 aa, Corynebacterium glutamicum
MSSPVSLENAASTSNKRVVAFHELPSPTDLIAANPLTPKQASKVEQDRQDIADIFAGDDDRLVVVVGPCSVHDPEAAIDYANRLAPLAKRLDQDLKIVMRVYFEKPRTIVGWKGLINDPHLNETYDIPEGLRIARKVLIDVVNLDLPVGCEFLEPNSPQYYADTVAWGAIGARTTESQVHRQLASGMSMPIGFKNGTDGNIQVAVDAVQAAQNPHFFFGTSDDGALSVVETAGNSNSHIILRGGTSGPNHDAASVEAVVEKLGENARLMIDASHANSGKDHIRQVEVVREIAEQISGGSEAVAGIMIESFLVGGAQNLDPAKLRINGGEGLVYGQSVTDKCIDIDTTIDLLAELAAAVRERRAAAK

SEQ ID NO: 27121 - DNA, 1089 bp, Haemophilus influenzae; identical to SEQ ID NO: 1359
  CDS (1)..(1089): transl_table=11

SEQ ID NO: 27122 - protein, 362 aa, Haemophilus influenzae; identical to SEQ ID NO: 1360

SEQ ID NO: 27123 - DNA, 1113 bp, Saccharomyces cerevisiae
  CDS (1)..(1113)
atgagtgaatctccaatgttcgctgccaacggcatgccaaaggtaaatcaaggtgctgaagaagatgtcagaattttaggttacgacccattagcttctccagctctccttcaagtgcaaatcccagccacaccaacttctttggaaactgccaagagaggtagaagagaagctatagatattattaccggtaaagacgacagagttcttgtcattgtcggtccttgttccatccatgatctagaagccgctcaagaatacgctttgagattaaagaaattgtcagatgaattaaaaggtgatttatccatcattatgagagcatacttggagaagccaagaacaaccgtcggctggaaaggtctaattaatgaccctgatgttaacaacactttcaacatcaacaagggtttgcaatccgctagacaattgtttgtcaacttgacaaatatcggtttgccaattggttctgaaatgcttgataccatttctcctcaatacttggctgatttggtctccttcggtgccattggtgccagaaccaccgaatctcaactgcacagagaattggcctccggtttgtctttcccagttggtttcaagaacggtaccgatggtaccttaaatgttgctgtggatgcttgtcaagccgctgctcattctcaccatttcatgggtgttactaagcatggtgttgctgctatcaccactactaagggtaacgaacactgcttcgttattctaagaggtggtaaaaagggtaccaactacgacgctaagtccgttgcagaagctaaggctcaattgcctgccggttccaacggtctaatgattgactactctcacggtaactccaataaggatttcagaaaccaaccaaaggtcaatgacgttgtttgtgagcaaatcgctaacggtgaaaacgccattaccggtgtcatgattgaatcaaacatcaacgaaggtaaccaaggcatcccagccgaaggtaaagccggcttgaaatatggtgtttccatcactgatgcttgtataggttgggaaactactgaagacgtcttgaggaaattggctgctgctgtcagacaaagaagagaagttaacaagaaatag

SEQ ID NO: 27124 - protein, 370 aa, Saccharomyces cerevisiae; identical to SEQ ID NO: 1366

SEQ ID NO: 27125 - DNA, 1047 bp, Buchnera aphidicola subsp; identical to SEQ ID NO: 1341
  CDS (1)..(1047): transl_table=11

SEQ ID NO: 27126 - protein, 348 aa, Buchnera aphidicola subsp; identical to SEQ ID NO: 1342

SEQ ID NO: 27127 - DNA, 1047 bp, Buchnera aphidicola subsp; identical to SEQ ID NO: 1555
  CDS (1)..(1047): transl_table=11

SEQ ID NO: 27128 - protein, 348 aa, Buchnera aphidicola subsp; identical to SEQ ID NO: 1556

SEQ ID NO: 27129 - DNA, 1047 bp, Buchnera aphidicola subsp; identical to SEQ ID NO: 1557
  CDS (1)..(1047): transl_table=11

SEQ ID NO: 27130 - protein, 348 aa, Buchnera aphidicola subsp; identical to SEQ ID NO: 1558

SEQ ID NO: 27131 - DNA, 1047 bp, Escherichia coli O157
  CDS (1)..(1047): transl_table=11
atgaacagaactgacgaactccgtactgcgcgtattgagagcctggtaacgcccgccgaactcgcgctacggtatcccgtaacgcctggcgtcgccacccatgtcaccgactcccgccgcagaattgaaaaaatactcaatggtgaagataagcgactgttggtcattattggcccctgctcgatccacgatctcaccgctgcaatggagtacgccacccgtctgcagtcgctgcgcaaccagtaccagtcacggctggaaatcgtaatgcgcacctattttgaaaaaccacgaactgttgtcggctggaaaggactaatctccgatccagatttaaacggcagctatcggataaatcacggtctggagctggcgcgcaaattacttttacaggtaaatgagctgggcgtcccaaccgcgactgagttcctcgatatggtgaccggtcagtttattgctgatttaatcagttggggcgcgattggcgcacgtactaccgaaagtcagatccaccgtgaaatggcttcggcactctcctgtccggtaggttttaaaaatggtaccgatggcaatacgcggattgctgtggatgctatccgcgcagcccgcgccagccatatgttcctctcgccagacaaaaatggtcagatgaccatctatcagaccagcggcaacccgtatggccacattattatgcgtggcggcaaaaaaccgaattatcatgccgatgatatcgccgcagcctgcgatacgctgcacgagtttgatttacctgaacatctggtggtggatttcagccacggtaactgccagaagcagcaccgtcgccagttagaagtttgtgaggatatttgtcagcaaatccgcaatggctctacggcgattgctggaattatggcggaaagtttcctgcgcgaaggaacgcaaaaaatcgtcggcggtcagccgctcacttacggtcaatccattaccgacccgtgtctgggctgggaagataccgaacgcctggtcgaaaaactagcctctgcggtagatacccgcttctga

SEQ ID NO: 27132 - protein, 348 aa, Escherichia coli O157
MNRTDELRTARIESLVTPAELALRYPVTPGVATHVTDSRRRIEKILNGEDKRLLVIIGPCSIHDLTAAMEYATRLQSLRNQYQSRLEIVMRTYFEKPRTVVGWKGLISDPDLNGSYRINHGLELARKLLLQVNELGVPTATEFLDMVTGQFIADLISWGAIGARTTESQIHREMASALSCPVGFKNGTDGNTRIAVDAIRAARASHMFLSPDKNGQMTIYQTSGNPYGHIIMRGGKKPNYHADDIAAACDTLHEFDLPEHLVVDFSHGNCQKQHRRQLEVCEDICQQIRNGSTAIAGIMAESFLREGTQKIVGGQPLTYGQSITDPCLGWEDTERLVEKLASAVDTRF

SEQ ID NO: 27133 - DNA, 1047 bp, Escherichia coli O6
  CDS (1)..(1047): transl_table=11
atgaacagaactgacgaactccgtactgcgcgtattgagagcctggtaacgcccgccgaactcgcgctacggtatcccgtaacgcctggcgtcgccacccatgtcaccgactcccgccgtagaattgaaaaaatactgaatggtgaagataagcgactgttggtcattattggcccctgctcgatccacgatctcaccgctgcgatggagtacgccacccgtctgcagtcgctgcgcaaccagtaccagtcacggctggaaatcgtaatgcgcacctattttgaaaaaccacgaacggttgtcggctggaaaggactcatctccgatccagatttaaacggtagctatcgggtaaatcacggtctggagctggcgcgcaaattacttttacaggtaaatgagctgggcgtccctaccgcgactgagttcctcgatatggtgaccggtcagtttattgctgatttaatcagttggggtgcgattggcgcacgtactaccgaaagtcagatccaccgcgaaatggcttcggcactctcctgtccggtgggttttaaaaatggtaccgatggcaacacgcggattgccgtggatgctatccgcgcagcccgcgccagccatatgttcctctcgccagacaaaaatggtcagatgaccatctatcagaccagcggcaacccgtatggccacattattatgcgtggtggcaaaaaaccgaattatcatgccgatgatatcgccgcagcctgcgatacgctgcacgagtttgatttacctgaacatctggtggtggatttcagccacggtaactgccagaagcagcaccgtcgccagttagaagtttgtgaggatatttgtcagcaaatccgcaatggctctacggcgattgctggaattatggcggaaagtttcctgcgcgaaggaacgcaaaaaatcgtcggcggtcagccgctcacttacggtcaatccattaccgacccgtgtctgggctgggaagataccgaacgcctggtcgaaaaactcgcctctgcggtagatactcgcttctga

SEQ ID NO: 27134 - protein, 348 aa, Escherichia coli O6
MNRTDELRTARIESLVTPAELALRYPVTPGVATHVTDSRRRIEKILNGEDKRLLVIIGPCSIHDLTAAMEYATRLQSLRNQYQSRLEIVMRTYFEKPRTVVGWKGLISDPDLNGSYRVNHGLELARKLLLQVNELGVPTATEFLDMVTGQFIADLISWGAIGARTTESQIHREMASALSCPVGFKNGTDGNTRIAVDAIRAARASHMFLSPDKNGQMTIYQTSGNPYGHIIMRGGKKPNYHADDIAAACDTLHEFDLPEHLVVDFSHGNCQKQHRRQLEVCEDICQQIRNGSTAIAGIMAESFLREGTQKIVGGQPLTYGQSITDPCLGWEDTERLVEKLASAVDTRF

SEQ ID NO: 27135 - DNA, 1047 bp, Escherichia coli; identical to SEQ ID NO: 1323
  CDS (1)..(1047): transl_table=11

SEQ ID NO: 27136 - protein, 348 aa, Escherichia coli; identical to SEQ ID NO: 1324

SEQ ID NO: 27137 - DNA, 1047 bp, Salmonella typhi; identical to SEQ ID NO: 1575
  CDS (1)..(1047): transl_table=11

SEQ ID NO: 27138 - protein, 348 aa, Salmonella typhi; identical to SEQ ID NO: 1576

SEQ ID NO: 27139 - DNA, 1047 bp, Shigella flexneri; identical to SEQ ID NO: 2473
  CDS (1)..(1047): transl_table=11

SEQ ID NO: 27140 - protein, 348 aa, Shigella flexneri; identical to SEQ ID NO: 2474

SEQ ID NO: 27141 - DNA, 25 bp, Artificial sequence
  Primer sequence
atgaattatcagaacgacgatttac

SEQ ID NO: 27142 - DNA, 22 bp, Artificial sequence
  Primer sequence
ttacccgcgacgcgcttttact

SEQ ID NO: 27143 - protein, 363 aa, Artificial sequence
  Consensus
  Variant (2)..(3): Xaa in position 2 to 3 is any amino acid
  Variant (5)..(6): Xaa in position 5 to 6 is any amino acid
  Variant (8)..(11): Xaa in position 8 to 11 is any amino acid
  Variant (13)..(20): Xaa in position 13 to 20 is any amino acid
  Variant (22)..(24): Xaa in position 22 to 24 is any amino acid
  Variant (26)..(27): Xaa in position 26 to 27 is any amino acid
  Variant (29)..(30): Xaa in position 29 to 30 is any amino acid
  Variant (33)..(33): Xaa in position 33 is any amino acid
  Variant (35)..(35): Xaa in position 35 is any amino acid
  Variant (37)..(40): Xaa in position 37 to 40 is any or no amino acid
  Variant (54)..(55): Xaa in position 54 to 55 is any amino acid
  Variant (58)..(58): Xaa in position 58 is any amino acid
  Variant (62)..(62): Xaa in position 62 is any amino acid
  Variant (65)..(66): Xaa in position 65 to 66 is any amino acid
  Variant (68)..(74): Xaa in position 68 to 74 is any amino acid
  Variant (75)..(76): Xaa in position 75 to 76 is any or no amino acid
  Variant (78)..(78): Xaa in position 78 is any amino acid
  Variant (83)..(83): Xaa in position 83 is any amino acid
  Variant (91)..(91): Xaa in position 91 is any amino acid
  Variant (92)..(92): Xaa in position 92 is any or no amino acid
  Variant (100)..(100): Xaa in position 100 is any amino acid
  Variant (103)..(103): Xaa in position 103 is any amino acid
  Variant (105)..(106): Xaa in position 105 to 106 is any amino acid
  Variant (108)..(109): Xaa in position 108 to 109 is any or no amino acid
  Variant (111)..(112): Xaa in position 111 to 112 is any or no amino acid
  Variant (115)..(116): Xaa in position 115 to 116 is any amino acid
  Variant (119)..(119): Xaa in position 119 is any amino acid
  Variant (122)..(123): Xaa in position 122 to 123 is any amino acid
  Variant (125)..(127): Xaa in position 125 to 127 is any amino acid
  Variant (128)..(129): Xaa in position 128 to 129 is any or no amino acid
  Variant (132)..(132): Xaa in position 132 is any amino acid
  Variant (134)..(134): Xaa in position 134 is any amino acid
  Variant (136)..(136): Xaa in position 136 is any amino acid
  Variant (139)..(143): Xaa in position 139 to 143 is any amino acid
  Variant (146)..(146): Xaa in position 146 is any amino acid
  Variant (152)..(152): Xaa in position 152 is any amino acid
  Variant (163)..(163): Xaa in position 163 is any amino acid
  Variant (166)..(166): Xaa in position 166 is any amino acid
  Variant (173)..(173): Xaa in position 173 is any amino acid
  Variant (182)..(182): Xaa in position 182 is any amino acid
  Variant (184)..(184): Xaa in position 184 is any amino acid
  Variant (186)..(186): Xaa in position 186 is any amino acid
  Variant (190)..(190): Xaa in position 190 is any amino acid
  Variant (193)..(193): Xaa in position 193 is any amino acid
  Variant (196)..(198): Xaa in position 196 to 198 is any amino acid
  Variant (200)..(200): Xaa in position 200 is any amino acid
  Variant (202)..(205): Xaa in position 202 to 205 is any amino acid
  Variant (206)..(207): Xaa in position 206 to 207 is any or no amino acid
  Variant (209)..(211): Xaa in position 209 to 211 is any or no amino acid
  Variant (213)..(214): Xaa in position 213 to 214 is any amino acid
  Variant (216)..(216): Xaa in position 216 is any amino acid
  Variant (219)..(221): Xaa in position 219 to 221 is any amino acid
  Variant (229)..(230): Xaa in position 229 to 230 is any amino acid
  Variant (231)..(236): Xaa in position 231 to 236 is any or no amino acid
  Variant (240)..(243): Xaa in position 240 to 243 is any amino acid
  Variant (245)..(250): Xaa in position 245 to 250 is any amino acid
  Variant (252)..(256): Xaa in position 252 to 256 is any amino acid
  Variant (257)..(265): Xaa in position 257 to 265 is any or no amino acid
  Variant (270)..(270): Xaa in position 270 is any amino acid
  Variant (274)..(277): Xaa in position 274 to 277 is any or no amino acid
  Variant (280)..(280): Xaa in position 280 is any amino acid
  Variant (282)..(285): Xaa in position 282 to 285 is any amino acid
  Variant (287)..(288): Xaa in position 287 to 288 is any amino acid
  Variant (290)..(292): Xaa in position 290 to 292 is any amino acid
  Variant (294)..(295): Xaa in position 294 to 295 is any amino acid
  Variant (298)..(299): Xaa in position 298 to 299 is any amino acid
  Variant (301)..(301): Xaa in position 301 is any amino acid
  Variant (302)..(306): Xaa in position 302 to 306 is any or no amino acid
  Variant (308)..(308): Xaa in position 308 is any amino acid
  Variant (315)..(315): Xaa in position 315 is any amino acid
  Variant (317)..(318): Xaa in position 317 to 318 is any amino acid
  Variant (320)..(320): Xaa in position 320 is any amino acid
  Variant (322)..(325): Xaa in position 322 to 325 is any amino acid
  Variant (326)..(335): Xaa in position 326 to 335 is any or no amino acid
  Variant (337)..(337): Xaa in position 337 is any or no amino acid
  Variant (340)..(340): Xaa in position 340 is any amino acid
  Variant (345)..(345): Xaa in position 345 is any amino acid
  Variant (348)..(348): Xaa in position 348 is any amino acid
  Variant (350)..(351): Xaa in position 350 to 351 is any amino acid
  Variant (353)..(354): Xaa in position 353 to 354 is any amino acid
  Variant (357)..(358): Xaa in position 357 to 358 is any amino acid
  Variant (360)..(362): Xaa in position 360 to 362 is any amino acid
LXXPXXLXXXXPXXXXXXXXVXXXRXXIXXILXGXDXXXXRLLVVIGPCSIHDXXAAXEYAXRLXXLXXXXXXXXXLXIVMRXYFEKPRTXXVGWKGLIXDPXLXXSXXIXXGLXXARXLLXXLXXXXXLPXAXEXLDXXXXXYIXDLISWXAIGARTTESQXHRXLASGLSXPVGFKNGTXGXLXIAIXAIXAAXXXHXFXXXXXXGXXXIXXTXGNXXXHVILRGGXXXXXXXXPNYXXXXVXXXXXXLXXXXXXXXXXXXXXLMIDXSHAXXXXNSXKXXXXQXXVXXXVXXQIXXGXXXXXXIXGVMIESXLXXGXQXXXXXXXXXXXXXXLXYGXSITDXCIXWXXTXXLLXXLXXXV

SEQ ID NO: 27144 - protein, 25 aa, Artificial sequence
  Consensus
  Variant (2)..(3): Xaa in position 2 to 3 is any amino acid
  Variant (5)..(5): Xaa in position 5 is Ile or Val
  Variant (6)..(6): Xaa in position 6 is any amino acid
  Variant (11)..(11): Xaa in position 11 is Ile or Val
  Variant (14)..(15): Xaa in position 14 to 15 is any amino acid
  Variant (16)..(16): Xaa in position 16 is any or no amino acid
  Variant (18)..(19): Xaa in position 18 to 19 is any amino acid
  Variant (20)..(20): Xaa in position 20 is any or no amino acid
  Variant (22)..(22): Xaa in position 22 is Ala, Cys, Gly or Ser
  Variant (23)..(24): Xaa in position 23 to 24 is any amino acid
  Variant (25)..(25): Xaa in position 25 is Phe, Ile, Leu or Met
RXXVXXGPCSXHDXXXAXXXYXXXX

SEQ ID NO: 27145 - protein, 44 aa, Artificial sequence
  Consensus
  Variant (2)..(3): Xaa in position 2 to 3 is any amino acid
  Variant (4)..(4): Xaa in position 4 is any or no amino acid
  Variant (7)..(7): Xaa in position 7 is Ala, Thr or Val
  Variant (9)..(9): Xaa in position 9 is Phe, Leu or Val
  Variant (10)..(10): Xaa in position 10 is Glu or Gln
  Variant (15)..(16): Xaa in position 15 to 16 is any amino acid
  Variant (21)..(21): Xaa in position 21 is any amino acid
  Variant (22)..(22): Xaa in position 22 is Ala, Ile or Val
  Variant (23)..(23): Xaa in position 23 is any amino acid
  Variant (26)..(26): Xaa in position 26 is any amino acid
  Variant (27)..(27): Xaa in position 27 is Ile, Leu, Met or Val
  Variant (28)..(28): Xaa in position 28 is Asp or Asn
  Variant (29)..(35): Xaa in position 29 to 35 is any amino acid
  Variant (37)..(37): Xaa in position 37 is Ile, Leu, Met or Val
  Variant (38)..(39): Xaa in position 38 to 39 is any amino acid
  Variant (40)..(40): Xaa in position 40 is Ala, Gly or Ser
  Variant (42)..(42): Xaa in position 42 is any amino acid
  Variant (43)..(43): Xaa in position 43 is any or no amino acid
LXXXMRXYXXKPRTXXGWKGXXXDPXXXXXXXXXXGXXXXRXXL

SEQ ID NO: 27146 - protein, 77 aa, Artificial sequence
  Consensus
  Variant (2)..(2): Xaa in position 2 is any or no amino acid
  Variant (8)..(8): Xaa in position 8 is any amino acid
  Variant (11)..(11): Xaa in position 11 is Pro or Gln
  Variant (12)..(12): Xaa in position 12 is any amino acid
  Variant (15)..(15): Xaa in position 15 is any amino acid
  Variant (16)..(16): Xaa in position 16 is Ile, Leu, Met or Val
  Variant (17)..(17): Xaa in position 17 is Ala, Ser, Thr or Val
  Variant (19)..(19): Xaa in position 19 is any amino acid
  Variant (20)..(20): Xaa in position 20 is Phe, Leu, Met or Val
  Variant (21)..(23): Xaa in position 21 to 23 is any amino acid
  Variant (24)..(24): Xaa in position 24 is Ile, Leu or Val
  Variant (26)..(26): Xaa in position 26 is Phe or Tyr
  Variant (29)..(31): Xaa in position 29 to 31 is any amino acid
  Variant (33)..(36): Xaa in position 33 to 36 is any amino acid
  Variant (38)..(39): Xaa in position 38 to 39 is any amino acid
  Variant (40)..(40): Xaa in position 40 is Ala or Gly
  Variant (41)..(42): Xaa in position 41 to 42 is any amino acid
  Variant (43)..(43): Xaa in position 43 is Ala or Ser
  Variant (44)..(44): Xaa in position 44 is Ala, Ser, Thr or Val
  Variant (45)..(47): Xaa in position 45 to 47 is any amino acid
  Variant (49)..(51): Xaa in position 49 to 51 is any amino acid
  Variant (52)..(52): Xaa in position 52 is Ala, Gly, Ser or Val
  Variant (53)..(53): Xaa in position 53 is any amino acid
  Variant (54)..(54): Xaa in position 54 is Ala, Asp, Gly, Asn, Ser or Thr
  Variant (55)..(56): Xaa in position 55 to 56 is any amino acid
  Variant (57)..(57): Xaa in position 57 is Ala, Asp or Gly
  Variant (58)..(63): Xaa in position 58 to 63 is any amino acid
  Variant (64)..(64): Xaa in position 64 is Ser or Thr
  Variant (65)..(65): Xaa in position 65 is any amino acid
  Variant (68)..(70): Xaa in position 68 to 70 is any amino acid
  Variant (71)..(71): Xaa in position 71 is Phe or His
  Variant (72)..(72): Xaa in position 72 is Ile, Leu or Val
  Variant (73)..(73): Xaa in position 73 is Ile or Val
  Variant (74)..(74): Xaa in position 74 is Leu or Met
  Variant (77)..(77): Xaa in position 77 is Ala, Gly or Ser
AXIGARTXESXXHRXXXSXXXXXXGXKNXXXGXXXXAXXXXXXXXXXHXXXXXXXXXXXXXXXXXGNXXXXXXXRGX

SEQ ID NO: 27147 - protein, 46 aa, Artificial sequence
  Consensus
  Variant (2)..(2): Xaa in position 2 is any amino acid
  Variant (5)..(5): Xaa in position 5 is Ala or Gly
  Variant (7)..(7): Xaa in position 7 is Cys or Ser
  Variant (8)..(8): Xaa in position 8 is any amino acid
  Variant (10)..(13): Xaa in position 10 to 13 is any amino acid
  Variant (15)..(16): Xaa in position 15 to 16 is any amino acid
  Variant (18)..(31): Xaa in position 18 to 31 is any amino acid
  Variant (32)..(33): Xaa in position 32 to 33 is any or no amino acid
  Variant (35)..(35): Xaa in position 35 is Ile, Leu, Met or Val
  Variant (37)..(37): Xaa in position 37 is any amino acid
  Variant (40)..(40): Xaa in position 40 is any amino acid
  Variant (41)..(41): Xaa in position 41 is Ile or Leu
  Variant (42)..(43): Xaa in position 42 to 43 is any amino acid
  Variant (45)..(45): Xaa in position 45 is any amino acid
DXSHXNXXKXXXXQXXVXXXXXXXXXXXXXXXXGXMXESXXXXGXQ

SEQ ID NO: 27148 - DNA, 1473 bp, Escherichia coli
  CDS (1)..(1473)
atgtcatcgttgcaaattttgcaaggcacgtttcgtcttagcgacacaaaaacgctgcaattgcctcagctaacgttaaacgcgggtgatagttgggcgtttgtcggttcgaatggaagcgggaaatcggccctggcccgcgcgctggcgggggaacttccgcttttgaaaggtgaacggcaaagccagttttcccacatcactcgtctctccttcgagcaattgcaaaaactcgtcagcgacgaatggcagcggaataacaccgatatgctcggccctggcgaagatgacaccggacgcactacggctgagatcattcaggatgaagtaaaggatgcaccgcgttgcatgcaactggcgcagcagttcggtattaccgccctcctcgaccgacgctttaaatacctttccactggcgagacgcgaaaaaccctgctgtgtcaggcgctgatgtcggagcctgacttgttgattcttgatgagccgttcgatggcctggatgttgcctcacgtcagcagctggctgagcgactcgcctcgttacatcagtccggtattactctggtactggtgctcaatcgcttcgatgagatcccggagtttgtccagtttgctggcgtgctggcggattgcacgttagcggaaactggcgctaaagaggaactgctccaacaagcactcgtcgcgcaactggcgcatagtgaacagcttgaaggtgtgcaactgccggagccggatgaaccttcagcacgtcacgccttacccgccaacgaaccgcgcattgtgctgaacaatggcgtggtttcttataacgatcgccccattcttaataaccttagctggcaggtgaatccaggcgaacactggcaaattgtcgggccaaatggtgcaggaaaatcgacgttattaagcctggttactggcgatcatccgcaaggttacagcaacgatttgacgcttttcggacgacgtcgcggcagcggcgaaaccatctgggatatcaaaaagcatatcggttacgtcagcagtagtttgcatctggattaccgggtcagcactaccgtgcgtaatgtgattctttctggctattttgattcgattggcatttatcaggccgtttcggatcgccagcaaaaactggtgcagcagtggctggatattctcggcattgataaacgcacggctgacgctccgttccatagtctttcctggggacagcagcgtctggcgctgattgtccgcgcactggtgaaacatccgacgttgcttattctcgatgaaccactacaggggcttgatccgctgaatcgccagcttatccgccgttttgttgatgtgctgattagcgaaggtgaaacgcaattgttgtttgtttcgcaccacgctgaagatgcgcctgcctgtattacccatcgtcttgagttcgtgccggacggtggactctatcgctatgtgctgacaaaaatatattga

SEQ ID NO: 27149 - protein, 490 aa, Escherichia coli
MSSLQILQGTFRLSDTKTLQLPQLTLNAGDSWAFVGSNGSGKSALARALAGELPLLKGERQSQFSHITRLSFEQLQKLVSDEWQRNNTDMLGPGEDDTGRTTAEIIQDEVKDAPRCMQLAQQFGITALLDRRFKYLSTGETRKTLLCQALMSEPDLLILDEPFDGLDVASRQQLAERLASLHQSGITLVLVLNRFDEIPEFVQFAGVLADCTLAETGAKEELLQQALVAQLAHSEQLEGVQLPEPDEPSARHALPANEPRIVLNNGVVSYNDRPILNNLSWQVNPGEHWQIVGPNGAGKSTLLSLVTGDHPQGYSNDLTLFGRRRGSGETIWDIKKHIGYVSSSLHLDYRVSTTVRNVILSGYFDSIGIYQAVSDRQQKLVQQWLDILGIDKRTADAPFHSLSWGQQRLALIVRALVKHPTLLILDEPLQGLDPLNRQLIRRFVDVLISEGETQLLFVSHHAEDAPACITHRLEFVPDGGLYRYVLTKIY

SEQ ID NO: 27150 - DNA, 1620 bp, Saccharomyces cerevisiae
  CDS (1)..(1620)
atgagtaccaataagttcgttgtacgaataacgaatgcgctcttcaagtcatcactggctagcaacagtccacctgtttaccctaagaggattaggcatttcgagattttacccaacgaaaaatgggttatatggggacctggaaagggcaagttcttggatgtactgaataacaagtatatttgtgagcccccattatctttgaggtttggatttttgaaggaaagttcgaacatcctgccgaggatagagcaagtggccttcaaaggggttatgccaacggctcatttaagtgctagatatgaatacttcaaagatgactacgatcaaacctgcaaacagtttatatttgataaggcaagcggatcaaatgctgtttcatataaagttgagacgaacaatcggcaaataaacatggagctgtacaatgcattagttgaaaatttaaacctctccagtttacaggataggtgggtaatgggattgagtaatggacaaatgaggagagcaaggttagctcgtagtatactcaaggaaccggatctactacttattgacgacccatttttagggttggatccagccgcaatagcaaccatttcacaatttttagccaaatatgatagtatagaagtcagtggcggatgtccaatcgtcattggtttgaggtatcaagataccattccagcatggtgtactcatatatgttgcgttgatgagaaaaacggtatattgtttgaaggcccaatcgaaaaacttcaaagtaaaatggatgaaaccagatcaagggcactaaaagaactagagcagctcaaaaaagcgtctaattccaaagaggacatttccattaacgatttgatttgtatacatcctatgtatggcaagaaagagcacgaaattatcaaaatgcctcatcttatagaattagacgggttgagcgtttcatacaaaggcgaagctgttttggaaaatctgcactggaaagttcagccgggttcgaaatggcatataagaggtgacaatgggtcaggtaagtcgaccttattatctttgcttacggcggaacatccccaatcgtggaattcgagggtgatagataatggcgtcccacgaagaacaggtaaaacaaactactttgacctaaacagcaaaataggtatgtcatcacccgaattacacgcaatttttttgaagaatgctggaggaaggctaaacattcgggaaagtgttgcaactggctatcatgaggcgtcctccaacaattacctacccatatggaagcgcttggacaaaaatagccaagaaatagtgaatatgtatctgaaatattttggcctggacaaagacgccgatagtgttttatttgaacagttgtccgtaagtgaccagaaactagtcctttttgtcaggtctttaattaagatgccgcaaatattgattctcgatgaggcattttctggaatggaggtagaacctatgatgcgttgtcatgaatttttagaggagtggcctggaacagtccttgtagtggcacacgttgccgaagagacaccaaaatgtgcccattacttaaggctcatatctcctggagagtatgaaataggcgatatggaaaattaa

SEQ ID NO: 27151 - protein, 539 aa, Saccharomyces cerevisiae
MSTNKFVVRITNALFKSSLASNSPPVYPKRIRHFEILPNEKWVIWGPGKGKFLDVLNNKYICEPPLSLRFGFLKESSNILPRIEQVAFKGVMPTAHLSARYEYFKDDYDQTCKQFIFDKASGSNAVSYKVETNNRQINMELYNALVENLNLSSLQDRWVMGLSNGQMRRARLARSILKEPDLLLIDDPFLGLDPAAIATISQFLAKYDSIEVSGGCPIVIGLRYQDTIPAWCTHICCVDEKNGILFEGPIEKLQSKMDETRSRALKELEQLKKASNSKEDISINDLICIHPMYGKKEHEIIKMPHLIELDGLSVSYKGEAVLENLHWKVQPGSKWHIRGDNGSGKSTLLSLLTAEHPQSWNSRVIDNGVPRRTGKTNYFDLNSKIGMSSPELHAIFLKNAGGRLNIRESVATGYHEASSNNYLPIWKRLDKNSQEIVNMYLKYFGLDKDADSVLFEQLSVSDQKLVLFVRSLIKMPQILILDEAFSGMEVEPMMRCHEFLEEWPGTVLVVAHVAEETPKCAHYLRLISPGEYEIGDMEN

SEQ ID NO: 27152 - DNA, 1545 bp, Mesorhizobium loti MAFF303099
  CDS (1)..(1545): transl_table=11
atgagcgcgacggcgcagaaacaggcaagcagccatccggtgctggagatgcggcacatctccaagaccttcggtgcgatccgcgccttgcatgatgtttcactcaccgtccatgccggggagctgcatgctcttatgggcgagaacggcgccggcaagtcgacgctgatgaaggtgctgtcgggcgcctatcggccggatgccggcggcgagatcctgatcgatggcgcgcccgccgcaaccggcgatccgatcaaggcgcgtgccgcaggtatcgcggtgatctatcaggagctgtcgctggcgcccaatctgacggtggcgcagaacatcttcctcggcaacgagccgcggcggttcggcattgtcgaccgcgatcagtgcaaccggcgggcgaacgaaatcatcgcgcggctcggcgtctccttctcggcgcgtgcgctggtctccagcctgtcgctcggcgagcgccagctggtcgagattgcgcgcgcgctgtcgaccaatgcgcgcatcatcgtcatggacgagccgacgacgtcgctgacgtcgcgcgagaccgatagcctgtttgaagtgatcgcgacgctgaagacgcaaggcatcgccatcatctacatcagccatcgcatggaagaggtctaccagctcgccgaccgtgtcagcgtgctgcgcgacagcggctatgtcggcacgctggagcgcgccgacctcaacgcctcgcggctggtgtcgatgatggtcggccgcgatctctccgccttctacaagaaggatcatcgtccgccggacgcgaagcgcgccatcgcactctcggtgcgcggcatgtccgacgggcgcctgctgaagaactgctcgttcgacctgcacaagggcgaggtgctggccctggcgggcctcgtcggctccggccgcaccgagctcgcccggctgatcttcggcgccgacaggcgcagcgccggcacgctggagctcgacggcaaaccgatctccattggctcgccgcgcgaagcgctcgacgccggcattgcctacctgaccgaggaccgcaaggaactcggcctgttcctcgacatgtcgatctccgacaacatcagcatgggcgtgctggccagggacgcgctgaccggcggattgcgcgacttcggcgccgccgaaaggcgcgcggcaaaggcgatcgcggacctgtcgatccgcaccagctcggcgcaggccaatgccggctcgctgtcgggcggcaaccagcagaaggtgctgctcgcccggctgctggagaccgagccgaaagtcgtcatcctcgacgagccgacccgcggcgtcgatgtcggcgccaagtcggaaatctaccggctgatcgacaacctcgccaaccggggcatcgccatcctgatgatctcaagcgaattgcccgaggtgatcggcgtcgccgaccgcgtgctggtgatgcgcgacggcgccatagcaggcgaggtgacggcatccggaggcgagccgctgcgtcaggaggcgatcatggaacttgcgacgggagcggcccaggaatga

SEQ ID NO: 27153 - protein, 514 aa, Mesorhizobium loti MAFF303099
MSATAQKQASSHPVLEMRHISKTFGAIRALHDVSLTVHAGELHALMGENGAGKSTLMKVLSGAYRPDAGGEILIDGAPAATGDPIKARAAGIAVIYQELSLAPNLTVAQNIFLGNEPRRFGIVDRDQCNRRANEIIARLGVSFSARALVSSLSLGERQLVEIARALSTNARIIVMDEPTTSLTSRETDSLFEVIATLKTQGIAIIYISHRMEEVYQLADRVSVLRDSGYVGTLERADLNASRLVSMMVGRDLSAFYKKDHRPPDAKRAIALSVRGMSDGRLLKNCSFDLHKGEVLALAGLVGSGRTELARLIFGADRRSAGTLELDGKPISIGSPREALDAGIAYLTEDRKELGLFLDMSISDNISMGVLARDALTGGLRDFGAAERRAAKAIADLSIRTSSAQANAGSLSGGNQQKVLLARLLETEPKVVILDEPTRGVDVGAKSEIYRLIDNLANRGIAILMISSELPEVIGVADRVLVMRDGAIAGEVTASGGEPLRQEAIMELATGAAQE

SEQ ID NO: 27154 - DNA, 1656 bp, Mesorhizobium loti MAFF303099
  CDS (1)..(1656): transl_table=11
atgaccaatctcgtcgaggtcaggaatctgaggatcgaggcgacgaccgacgccggacgtgtcgttgaaatcatcaagggcgtcagcctcgacatcgccgacggcgagatcgtcgccctgatcggcgagagcggctccggcaagacgacggtggcgctctcgctcatgggctatgcgcggcccggctgccggatcatcggcggcgagatcaatgtaaacggcaagaacatggccgcactgtccgaaaagcagcgcgccaaattgcgcggcaccgacattgcctatgttccgcaaagtgccgccgcctcgttcaacccctcgtccaccatcatggagcaggtgatcgaggttacgcgaatccacgggctgatgccgcccgagcaggcgcgaaagcgcgcggtcgagctgttcagggccttgtcgctgccggacccggaaggaattggcgcgcgttatccgcaccaggtttcgggcgggcaattgcagcggctgtcggcggccatggcgctgatcggcgatcccaagctgatgatcttcgacgagccgaccacggcactcgacgtaacgacacagatcgacgtgctgaaggcattcaagtcggtcatgcgggctggcgggatagcgggggtctatgtttcgcacgacctcgccgtcgtcgcccagatcgccgactgcatcgtggtgctgaaaggcggcgaagtgcaggagaccggcaccacggctgagattctttcggccgcccggcacccctatacgcgcgaactgcttgctgccttcgagccgaagccgcggcaggcgcatgccgacgcggatgccggcgcgaagccgttgctgcgtatcgacaatgtgaccgccggctatggcgcggtgcgagataacgggctgccactcatccgggccgtcgattccgtcagcctggtcgtcgagaagggacgaaatctcggcattatcggcgaatccggctgcggaaaatcgacactggcgcgcgtcatcgccggcatccatccggcggcggccggcgacatcatattcgatggcaaagaactgcagcgagccgcagggaggcgcagccaggaccagctgcgcgagatgcagatcgtgttccagtatgccgataccgcgctcaatccggccaagccggtggaggatatcatctcccggccactggccttctatcacgggctcgacaggcaggcgcgctcgaagcgcgtcgacgaactgctcgacatggttcgcctgcccaggacgctgcgctaccgtcgcccgtcggagctctcgggcggccagaagcagcgcgtgaacttcgcacgcgccctggcggccggccctaagctcatcatctgcgacgaaatcacctcggcgctcgacacggtggtggcggccgccgtgatcgaactgctcaaggagctgcagcgcgagctgggcctttcctacattttcatcagccacgacctttcagtcgtcgaagcgatctgcgacgagatcatggtcatgtacaatggcgagcgggtcgagcagatcacgcccgacaaactgaaggcgcccacccacccttattccaagcttctgttctcctccgtcccgaagcttgacccgacgtggctcgacggcctcgtccgcgatcccgagttggtcagccagtacggccatcgctga

SEQ ID NO: 27155 - protein, 551 aa, Mesorhizobium loti MAFF303099
MTNLVEVRNLRIEATTDAGRVVEIIKGVSLDIADGEIVALIGESGSGKTTVALSLMGYARPGCRIIGGEINVNGKNMAALSEKQRAKLRGTDIAYVPQSAAASFNPSSTIMEQVIEVTRIHGLMPPEQARKRAVELFRALSLPDPEGIGARYPHQVSGGQLQRLSAAMALIGDPKLMIFDEPTTALDVTTQIDVLKAFKSVMRAGGIAGVYVSHDLAVVAQIADCIVVLKGGEVQETGTTAEILSAARHPYTRELLAAFEPKPRQAHADADAGAKPLLRIDNVTAGYGAVRDNGLPLIRAVDSVSLVVEKGRNLGIIGESGCGKSTLARVIAGIHPAAAGDIIFDGKELQRAAGRRSQDQLREMQIVFQYADTALNPAKPVEDIISRPLAFYHGLDRQARSKRVDELLDMVRLPRTLRYRRPSELSGGQKQRVNFARALAAGPKLIICDEITSALDTVVAAAVIELLKELQRELGLSYIFISHDLSVVEAICDEIMVMYNGERVEQITPDKLKAPTHPYSKLLFSSVPKLDPTWLDGLVRDPELVSQYGHR

SEQ ID NO: 27156 - DNA, 1518 bp, Mesorhizobium loti MAFF303099
  CDS (1)..(1518): transl_table=11
atgagcgcgccgctgctttccgtcatcggcgcggtcaagcgcttcggcggcgtccaggcgctgcgcggcgtcgacttcgacctcaaggcgggcgagatccatgccttgcttggcgaaaacggcgccggtaaatcgacgctgatgaacctgttgtcgggcgtctacacgccggacgagggcaccatccacatcgacggcaagcaggtagccttcaacaacccgcgcgaggcgcaggcggccggcatcgccaccatctttcaggaactcgacctggtgccgacactcgacgtcgccgccaaccttttccttggccgcgagttgatgcggccgggcggcttcctcgatgtgccggcgatgcgcagcgaggcccgcaaacggctcgaagccatcgaactggccatcgatccggccagcatggtggcgaacctttcgattggccagcgccaggtcgtagcgatcgtcaaggcactgtcctacgcctcgcgtgtgctgatcatggacgagccgacggcggcactcacggtcggcgaggtcgacaggctgttcgacatcatgcgcaagcttgccgccagcggcgtcggcatcgtctacatctcgcatcgcctcgaggaggtgccgcagatcgccgaccgggtgacggtgatgcgcgacggtcgcgtcgcgggcgtcaccgagccgcacgcgccgcaggccgaactggtccggcttctggtcggccggccgctggatgagctttatcccgaacggtcgacgaaggccggcaggacactgctcagtctgcgcgatgccagcttcaggctcgcccatgaaagcgccggctggcagccgccgagcggcgtctcgctcgacgtcaaggcgggcgagatcgtcgggctggccggcatcatgggggcagggcgcaccgaactgctcagcgcgctctatggcaccggcctgtccggccgttgggaaggtgaggtcgccatcgatggccggccggtaagcctggattcgatcagcgcggcccgctcggccggcatcgccttcgtcacggacgaccggcgcggcagcgggctgatgctcagaatggctgtgggcctcaatttggtcatgtcggtgatccgccgcatctcgcccttcggcctgatgtcgcagcgccgccaggcggacgcggtgaagcagtccttcggccagttcgatatcaggccgaaaaatcccgacatcgccgtcggtgcgctgtccggcggcaaccagcagaaggtggtgctggccaaggagattctcggcaatccccggctgctgctgctcgacgagccgacccgcggcgtcgatgtcggtgccaaaggcgagatctacgcgcgcctgaggcagttggcggcgcaggggctcggcatattggttgcgtccagtgagatgccggagctcatcggcctgtgcgaccggatcgtggtgctgcgcgaagggcgcaacgtggcggaattcatcggcggcgtcgacgagcacacggtgcttgacgcggcaaatggcagggaggcctga

SEQ ID NO: 27157 - protein, 505 aa, Mesorhizobium loti MAFF303099
MSAPLLSVIGAVKRFGGVQALRGVDFDLKAGEIHALLGENGAGKSTLMNLLSGVYTPDEGTIHIDGKQVAFNNPREAQAAGIATIFQELDLVPTLDVAANLFLGRELMRPGGFLDVPAMRSEARKRLEAIELAIDPASMVANLSIGQRQVVAIVKALSYASRVLIMDEPTAALTVGEVDRLFDIMRKLAASGVGIVYISHRLEEVPQIADRVTVMRDGRVAGVTEPHAPQAELVRLLVGRPLDELYPERSTKAGRTLLSLRDASFRLAHESAGWQPPSGVSLDVKAGEIVGLAGIMGAGRTELLSALYGTGLSGRWEGEVAIDGRPVSLDSISAARSAGIAFVTDDRRGSGLMLRMAVGLNLVMSVIRRISPFGLMSQRRQADAVKQSFGQFDIRPKNPDIAVGALSGGNQQKVVLAKEILGNPRLLLLDEPTRGVDVGAKGEIYARLRQLAAQGLGILVASSEMPELIGLCDRIVVLREGRNVAEFIGGVDEHTVLDAANGREA

SEQ ID NO: 27158 - DNA, 1563 bp, Thermotoga maritima MSB8
  CDS (1)..(1563): transl_table=11
gtgtttcccctcctcgctttccggggtgatcgaatggagatactgaaagcaaagggcatagtgaaaagattccctggagttgtggctgtggacaacgtcgattttgaggtttacgaaaacgagattgtctctctgataggtgaaaatggtgctggtaaatccaccctcataaaaattctgacgggtgtcctcaaacctgatgcgggagaaattctggtcaacggcgaaagggtagaatttcactctccggtcgacgcgttcaaaaagggcataagtgttatccatcaggagctgaacctgtgcgacaacatgactgtggcggaaaacatctttctcgcctatgaagctgtcaggggacagaaaagaaccctttccagtagagttgatgagaactatatgtacacaagatctaaagaactgctcgatctcatcggcgccaagttctctccagatgctctggtgagaaacctcaccaccgcccagagacagatggtggaaatatgtaaggcactggttaaagaacccaggatcatcttcatggatgaacccacatcgtcgcttactgtcgaagagacagaaagactcttcgaaatcatagaaatgttgaaaagtagaggtatttctgttgttttcgtttcacatagactggacgaagttatgaggataagtgacaggatcgttgtgatgagagacggaaaaagaatcggcgagttgaaaaaaggagaattcgatgtggacacgatcataaaaatgatggtaggacgtgaagtggagtttttcccacacggaatagagaccagacccggagaaattgcccttgaagtcagaaacctgaagtggaaggataaagtgaagaatgtttcttttgaagtgagaaagggagaagttctgggattcgcgggacttgtgggggctggaagaactgaaacgatgctcttggtgttcggagtgaatcaaaaggaatccggagacatatacgttaacggaaggaaagttgaaataaaaaatccggaagatgctattaagatggggataggactcattcctgaggacagaaaacttcaggggcttgttttgagaatgactgtgaaggacaatatcgtgctcccatcactgaaaaaaatcagcagatgggggctcgtgctcgatgaaagaaaagaagaagagatctcagaagactatgtaaaaagactctccataaaaacgccttccatttatcaaataacagaaaatctatcaggtggaaaccagcagaaagtggtccttgccaaatggctcgccacgaacgcggatattctgatcttcgacgagccaacacgcggaatagacgttggtgcaaaggcagaaatacacaggatgatcagagaactcgccgcacagggcaaagctgtgatcatgatctcttcggaactcccagaaatactgaatctcagcgatagaatagtcgtcatgtgggaaggtgaaatcacagccgttctggacaacagagagaaaagagtcactcaggaagaaataatgtactacgcatctggacagaaaaaacagaacgggagggtcgcataa

SEQ ID NO: 27159 - protein, 520 aa, Thermotoga maritima MSB8
MFPLLAFRGDRMEILKAKGIVKRFPGVVAVDNVDFEVYENEIVSLIGENGAGKSTLIKILTGVLKPDAGEILVNGERVEFHSPVDAFKKGISVIHQELNLCDNMTVAENIFLAYEAVRGQKRTLSSRVDENYMYTRSKELLDLIGAKFSPDALVRNLTTAQRQMVEICKALVKEPRIIFMDEPTSSLTVEETERLFEIIEMLKSRGISVVFVSHRLDEVMRISDRIVVMRDGKRIGELKKGEFDVDTIIKMMVGREVEFFPHGIETRPGEIALEVRNLKWKDKVKNVSFEVRKGEVLGFAGLVGAGRTETMLLVFGVNQKESGDIYVNGRKVEIKNPEDAIKMGIGLIPEDRKLQGLVLRMTVKDNIVLPSLKKISRWGLVLDERKEEEISEDYVKRLSIKTPSIYQITENLSGGNQQKVVLAKWLATNADILIFDEPTRGIDVGAKAEIHRMIRELAAQGKAVIMISSELPEILNLSDRIVVMWEGEITAVLDNREKRVTQEEIMYYASGQKKQNGRVA

SEQ ID NO: 27160 - DNA, 1452 bp, Pasteurella multocida subsp. multocida str. Pm70
  CDS (1)..(1452): transl_table=11
atgtgcagtttacagcttaaagaagccaaatttaaattacatcaacatcaatatttgtatgttcctcaattttgtttatccgcggggcaattttgggctgtcgtggggagtaatggtagtggaaaaactgcttttgcgcttgcattgcagcagcaattagcactagagcatggcgaatattgccattcattccggcaggtagcattattgtcctttgaaaaacaacaacatattattgaagccacttttaaggatcgcaatcatgatggaataagccccgatgattttggtaaaagtgcacgagaaaccatattaaatggcacttcagcgacagcggcttgtgagaaatatgcggaaatcttacagattacgtctttattagatcgcccttttattcacctgtctacaggggaaagccgtaaagtcttgttatgccaagcgttagtgagtcaacctgatcttttgatcttagatgaaccctttgaaggattagaccagcagtcagtgcaagactggcggcatttattggagagattaaaagagaaaatgacattaatgctgatcatcaatcgtttctctgatattccgacacaggcgactcatattgcgattttggataatcgagagttagttttgcaaggcgaacgccaatacattgagcagcaaagtttatttcaacagttgtgttatgccgaaaatgcgcggaatgaacctttgccgacaccttttggtacgccaatacatttgccgacagagatcaatccttttgagttaaaaaacgtcaatattcaatatggtgataaaaagattctcagtgcattaacttggacagttgaaccaaaacaacattggtggattaaaggaccaaatggtgcaggaaaatcgacgctattgtctgtgctgacgggtgatcatccgcaatcttatgcgaatcatgtagtattatttggtcaacaacgtggtagcggtgaaaccatttgggatattaaacaaaaaataggctatgtgagtagtcagttgcatatggattaccgagtgaattgtagcgcattagatgttattctctcgggcttttttgatagtattggcgtgtatcaacaggtatcagaggcactgcgtttgaaggctatgcaatggttgacacgtttacatcttgcaacactggcgaaatccccgtttcgttccttgtcttggggacaacagcgacttttgttgatagctagagccatggtgaaacatccaccaatattgattttagatgaaccttttcagggattggatggggtgaatcgtaagctggtaaaacagtttattgaacaactggtagtaaacagccaaacccagctgatatttgtttcccatcaagatcaggacgcgccaaattgcatgacacatcgttttgaatttatagcagataataatcaatattcttatatacaaagtacgctctaa

SEQ ID NO: 27161 - protein, 483 aa, Pasteurella multocida subsp. multocida str. Pm70
MCSLQLKEAKFKLHQHQYLYVPQFCLSAGQFWAVVGSNGSGKTAFALALQQQLALEHGEYCHSFRQVALLSFEKQQHIIEATFKDRNHDGISPDDFGKSARETILNGTSATAACEKYAEILQITSLLDRPFIHLSTGESRKVLLCQALVSQPDLLILDEPFEGLDQQSVQDWRHLLERLKEKMTLMLIINRFSDIPTQATHIAILDNRELVLQGERQYIEQQSLFQQLCYAENARNEPLPTPFGTPIHLPTEINPFELKNVNIQYGDKKILSALTWTVEPKQHWWIKGPNGAGKSTLLSVLTGDHPQSYANHVVLFGQQRGSGETIWDIKQKIGYVSSQLHMDYRVNCSALDVILSGFFDSIGVYQQVSEALRLKAMQWLTRLHLATLAKSPFRSLSWGQQRLLLIARAMVKHPPILILDEPFQGLDGVNRKLVKQFIEQLVVNSQTQLIFVSHQDQDAPNCMTHRFEFIADNNQYSYIQSTL

SEQ ID NO: 27162 - DNA, 1518 bp, Pasteurella multocida subsp. multocida str. Pm70
  CDS (1)..(1518): transl_table=11
atgcaatccgacaatttagaaacgaaatgcttattagatgcgcgtcatatcagcaagtctttttccggtgtagaagtattaaaagccattgatttttcattgtatgccggtgaagtgcatgccttattaggtggaaatggggcaggtaagtccaccttaatgaaaataattgctgggattcagccgccagatagtggcgaattgctcattaaaggcaaacgacaggcagggctttcaccaaataaagcacatcaactcggtatttatttagtaccacaggaacctttattgtttccaaatttaagtgtgaaagagaatattttatttgggctggcgaacacggcggaaaatgagaaaaaactgaccgcacttttatctgaattgaactcacatttgaaattagatatgcaagccggtttgcttgaagtggcggatcagcaaattgtggaaatcatgcgtggtttaatgcgtaatgccgagattttgattttggatgagcctacggcgtcgttgacaccggccgaaacaaataacttttttcgcaaaattaactcattactcaataaaggtgtggggattgtgtttatttctcataaattacccgaagtttggcaaatttcacatcgtattagtgtgatgcgagatggttatattgccttagctggaaaaacagatgaactcaatcgtgatgaggttatcagtgcgattacgccgaaagccaaatcgactcgcttaacggaagcacagaaactgtggttagagctaccggggcatcatcgggttaaatcaacagatcaacccattcttcgtgttgagaacctgacaggcgaagggtttaagcatgtttccttttcaatttatcccggtgaaattttagggttagcaggtgtcgtgggggcgggacgtaccgagctggctgaaaccctgtatggtttgcgccaaaaaaaatcgggtgaaattgttttcaaccaacaagagattagccaaatgagcatcaagcagcgattggaggaagggattgtctatttaccagaagacagacaggcatctggtctttatttagatgcgccactgacctggaatgcttgtgctttaacctataacaacatgggattgtggattaatacggcacgagaaagcgccattttagaacgttaccatcgtgctatcggaattaagtttagcgatgaacaacaagcggcgagaacgttatcgggtggaaatcaacaaaaagtgttaattgctaagtgtttagaggctgatccggctttattgattgtcgatgaaccaacacgtggtgtagatgtaggggcgcgtgccgatatttatcaattaattcaaagtgtggcgaagcaaaatgtggcggtgctttttatttcttcagatctagaggaaattgaaaaaatgtctgatcgcgtgctagtgatgcatgatgggcagcttagtgaatcgctagtgggatcggcgatcaatacagcgaatattatgaatatggcatttggcgcgacaaaggcataa

SEQ ID NO: 27163 - protein, 505 aa, Pasteurella multocida subsp. multocida str. Pm70
MQSDNLETKCLLDARHISKSFSGVEVLKAIDFSLYAGEVHALLGGNGAGKSTLMKIIAGIQPPDSGELLIKGKRQAGLSPNKAHQLGIYLVPQEPLLFPNLSVKENILFGLANTAENEKKLTALLSELNSHLKLDMQAGLLEVADQQIVEIMRGLMRNAEILILDEPTASLTPAETNNFFRKINSLLNKGVGIVFISHKLPEVWQISHRISVMRDGYIALAGKTDELNRDEVISAITPKAKSTRLTEAQKLWLELPGHHRVKSTDQPILRVENLTGEGFKHVSFSIYPGEILGLAGVVGAGRTELAETLYGLRQKKSGEIVFNQQEISQMSIKQRLEEGIVYLPEDRQASGLYLDAPLTWNACALTYNNMGLWINTARESAILERYHRAIGIKFSDEQQAARTLSGGNQQKVLIAKCLEADPALLIVDEPTRGVDVGARADIYQLIQSVAKQNVAVLFISSDLEEIEKMSDRVLVMHDGQLSESLVGSAINTANIMNMAFGATKA

SEQ ID NO: 27164 - DNA, 2733 bp, Pasteurella multocida subsp. multocida str. Pm70
  CDS (1)..(2733): transl_table=11
atgaacacaattcgtgtcgtgaatgtgacccatacttaccaaaaaacgaccgcacttgatcaagtgtcactctcacttcctgcgggcagtacggttggattaattggacctgacggtgtgggcaaatccactttactttccttactcgcaggcgtgaaaatcctacaacaaggacagatcacggtcttcggtctcagccaagccgagaaagcagagcgtgagtgcttactcaaacgcattgcttttatgccacaagggcttggtcgcaacctttacccgactctctcggtgtatgaaaatatcgaatttcatgcctgcttatttggtctcacgcagacacaacgtcaacaacggattcaacgtttattacttgccacaggactcgccccttttcaaaaacgggccgcgggaaacctttctggtggtatgaaacagaaactgagtttatgttgtgccttggtgcataatcccgatttattaatcttagacgaaccgacaaccggtgtggatcccctttcacgccagcagttctggactttagtcaatgaactccgccacgaaaatcccgctatgactgttctcgtagcgactgcatatattgaagaagccgctcaatttgaacatttaattgcgatggatgagggaaaaattttaatgagtgccccgacacaacaggtattagaagccactatgtcggacaacctcgaacaagcttacattaaattattgccagaaaccaagcaaacccattggcatgccgagcaaattccaccgttctgcgcggatccgacgttaccctttgccatcgaagcagaaggactgaccaaaaaatttggcacctttaccgctgttgaccaagtcagctttaacattccacaaggggaaattttcggttttttaggctcgaatggttgtggcaaaagtaccaccatgaaaatgctaaccggcttacttgatgcaacagaaggcacagcaactttgttgggtgaacccattgattcagggaaaatggagacacgccaacaagtaggctatatgtcgcaggcattttctctttatgaagagctgaccattcgccaaaatttactattacatgccaaactctatgatctcaccggtgaacgtgcaactcaggccgtttcgcaagcgcttgatcaatttcaactcatcgacgtcgcggagaaattaccacgtgacttatccttaggcatacgtcaacgcttacagcttgccgctgcttgtttacatcaccccaaagtcttaattttagatgagccgacttccggagttgaccctgctgcacgggatatgttttggcaatacctcattcaactttcaagagaagaaaaaatcacgatttttgtttcaacgcactttatgaatgaagcactacgttgtgaccgtatttcattaatgcatcgcggtaaagtactcgcagttggcacccccgaatccctctgtcaacaacgtcaaaccgataatttagaagaggcattcattgcatttcttgctgactatcccgaaacagaagtgcccgcgaccgcttcacaggcaccttccagcgtagtagcgccatcccataatcaagacatgacacactcaagctcactctggctttggtttaactcgatttggacctttgctcgacgtgaaagcaaagaaattttacgtgatcatatccgcttaattttcatcattctgggaccgattattttactctttgctggcagttggggactgtcttttgataccaacagccagaattttgcagttctcgatcaagatcaaagtgcagagagtcgccaacttattgaagcattcgaacagtctgcttattttaacgccattgcgccgttaaacgtgcggtctgatttagcgacacttctaaaaacagggcaagcgcggctattaattgaaattccacatcattttgggcgagatttattacaacaacgtcaacctgaaattgccttttatattgacggttcaatgccatttacaggggaaaatatcgtttcctacatacaacaaattttacgccaataccaaacgcaactgtatcagcaacaaggcatcgacttaccacaacttgcacagctagaagtgcgttttatgtataaccaaacgttccgcagtgtgaatgccatttcgcccggtctgattatggtcacattgatgttgattccttccatgatgaccgcacttgccgtggtgcgtgaaaaagaaattggttctatcaccaacctctatgggtcacccgcaagcgttttgcagtatgtgcttggtaaacaactcccttatgtgtttttagctttgaccagttattttttgctagttgctatgaccgtttggattattggagtggacatcactggctctttttgggcaatgacattaggcgccttgtgcttaatcttatccgccactgcctttggcttattggtctctgcctttgtgaaatcacaggtcgctgctatttttgctaccgcgattatcagtatcgttccaacgatcaatttttctggtttgctctacccacgctcaactattacaggtttaggttattggatgggtgtaagttttccaaccagttggtatcacttgatcagtttaggcgcttttactaaaggcttgggaatgaagagttttctgcatttatatctgattttactgctcttttttgccgtttatttagggctgacatgcttccttttgaaaaaacaggagaaataa

SEQ ID NO: 27165 - protein, 910 aa, Pasteurella multocida subsp. multocida str. Pm70
MNTIRVVNVTHTYQKTTALDQVSLSLPAGSTVGLIGPDGVGKSTLLSLLAGVKILQQGQITVFGLSQAEKAERECLLKRIAFMPQGLGRNLYPTLSVYENIEFHACLFGLTQTQRQQRIQRLLLATGLAPFQKRAAGNLSGGMKQKLSLCCALVHNPDLLILDEPTTGVDPLSRQQFWTLVNELRHENPAMTVLVATAYIEEAAQFEHLIAMDEGKILMSAPTQQVLEATMSDNLEQAYIKLLPETKQTHWHAEQIPPFCADPTLPFAIEAEGLTKKFGTFTAVDQVSFNIPQGEIFGFLGSNGCGKSTTMKMLTGLLDATEGTATLLGEPIDSGKMETRQQVGYMSQAFSLYEELTIRQNLLLHAKLYDLTGERATQAVSQALDQFQLIDVAEKLPRDLSLGIRQRLQLAAACLHHPKVLILDEPTSGVDPAARDMFWQYLIQLSREEKITIFVSTHFMNEALRCDRISLMHRGKVLAVGTPESLCQQRQTDNLEEAFIAFLADYPETEVPATASQAPSSVVAPSHNQDMTHSSSLWLWFNSIWTFARRESKEILRDHIRLIFIILGPIILLFAGSWGLSFDTNSQNFAVLDQDQSAESRQLIEAFEQSAYFNAIAPLNVRSDLATLLKTGQARLLIEIPHHFGRDLLQQRQPEIAFYIDGSMPFTGENIVSYIQQILRQYQTQLYQQQGIDLPQLAQLEVRFMYNQTFRSVNAISPGLIMVTLMLIPSMMTALAVVREKEIGSITNLYGSPASVLQYVLGKQLPYVFLALTSYFLLVAMTVWIIGVDITGSFWAMTLGALCLILSATAFGLLVSAFVKSQVAAIFATAIISIVPTINFSGLLYPRSTITGLGYWMGVSFPTSWYHLISLGAFTKGLGMKSFLHLYLILLLFFAVYLGLTCFLLKKQEK

SEQ ID NO: 27166 - DNA, 1566 bp, Pseudomonas aeruginosa PAO1
  CDS (1)..(1566): transl_table=11
atgcagttcggcgccaagccgctgttcgagaacgtttccgtcaagttcggcaacggcaaccgctacggcctgatcggcgccaacggttgcggcaagtcgaccttcatgaagatcctcggtaacgacctggagccgagcgccggccaggtcatgctggaacccaacgtgcgcctgggcaagctgcgccaggaccagttcgcctacgaggacttcagcgtcatcgatacggtgatcatgggccacgaggaactctgggcggtgaaggccgaacgcgaccgcatctactccctgccggaaatgagcgaggcagatggcatggcggtggccgagctggaagtccagttcgccgagttcgacggctacaccgccgagtcccgcgccggcgagctgctgctcggcctgggcatcccgctggagcagcacttcggcccgatgagcgccgtcgctcccggctggaagctgcgcgtactgctggcccaggcgctgttctcggacccggacgtgctgctgctcgacgaaccgaccaaccacctggacatcaacaccatccgctggctggaaggcgtgctcaccgcgcgcaacagcaccatgatcatcatttcccacgatcgccacttcctgaacagcgtctgcacccacatggccgacctggactacggcgagctgcgcctgttcccgggcaactacgacgagtacatgaccgccgccgaacaggcccgcgagcgcctgctgtcggacaacgccaagaagaaggcgcagatcgccgagctgcaatccttcgtcagccgcttctcggccaacgcctccaaggccaagcaggccaccagccgcgcccggcagatcgacaagatccagctggaggaggtcaagccgtccagccgggtcagcccgttcatccgcttcgagcaatacaagaagctgcaccgccaggcggtgaccgtggaaaacatcagcaagggctatgacggcaagccgctgttcaagggcctgagcctgcaggtcgaggccggcgagcgcgtcgccatcatcggccccaacggcatcggcaagaccaccctgttgcgctgcctggtcggcgacctgccggtggacggcggcgaggtgaaatggaccgacagcgccgacgtcggctatttcgcccaagaccatgccgacgacttcgccgacgacatgagcctgttcgactggatggcccagtggacccagggcggcgaacaactggtgcgcggcaccctcggccgcatgctgttctccaacgacgagatcaagaagtcggtgaaagtgatctccggcggcgagcagggccgcatgctgttcggccggctgatcctcaagcgccccaacgtgctggtgatggacgagccgaccaaccacctggacatggagtccatcgaggcgctgaacctggcgctggacaactatccgggcacgctgatcttcgtcagccacgaccgcgaattcgtttcctcactggctacccgcatcatcgagctgggcgagaacggcgtgaccgacttcagcggcagctatgacgactacctgcgcagccagggcgtgatcgtctga

SEQ ID NO: 27167 - protein, 521 aa, Pseudomonas aeruginosa PAO1
MQFGAKPLFENVSVKFGNGNRYGLIGANGCGKSTFMKILGNDLEPSAGQVMLEPNVRLGKLRQDQFAYEDFSVIDTVIMGHEELWAVKAERDRIYSLPEMSEADGMAVAELEVQFAEFDGYTAESRAGELLLGLGIPLEQHFGPMSAVAPGWKLRVLLAQALFSDPDVLLLDEPTNHLDINTIRWLEGVLTARNSTMIIISHDRHFLNSVCTHMADLDYGELRLFPGNYDEYMTAAEQARERLLSDNAKKKAQIAELQSFVSRFSANASKAKQATSRARQIDKIQLEEVKPSSRVSPFIRFEQYKKLHRQAVTVENISKGYDGKPLFKGLSLQVEAGERVAIIGPNGIGKTTLLRCLVGDLPVDGGEVKWTDSADVGYFAQDHADDFADDMSLFDWMAQWTQGGEQLVRGTLGRMLFSNDEIKKSVKVISGGEQGRMLFGRLILKRPNVLVMDEPTNHLDMESIEALNLALDNYPGTLIFVSHDREFVSSLATRIIELGENGVTDFSGSYDDYLRSQGVIV

SEQ ID NO: 27168 - DNA, 2751 bp, Pseudomonas aeruginosa PAO1
  CDS (1)..(2751): transl_table=11
atgaccgctggcgggagcggcgtggcgagcctccggggcgtttcgctgcgctacggcgagacgcgtgcggttgacgacgtcagcctggagatcccggccaaccgcatggtcggcctgatcggtccggacggggtcggcaagtccagcctgctggcgctgctggccggcgcacggaagatgcaggatggcgagatccgcgtgctcgatggcgacatgcgcgaccgccgccaccgccgggcggtctgcccgcgcatcgcctacatgccccaggggctgggcaagaacctctacccgacgctctcggtgttcgagaacgtcgacttcttcggtcggctgttcggccacgacaaggccgagcgcgagcggcgcatcgccgatctgctgcaaagcaccggattggcgccgttcgccgagcgtcctgcgggcaagctgtccggcggcatgaagcagaagctcgggctgtgctgcgcgctgatccacgatcccgacctgctgatcctcgacgagccgaccaccggcgtcgacccgctgtcgcgcaaccagttctgggagctgatcggccgtatccgcgcgggccgcgaaggcatgagcgtgctggtcgccaccgcttacatggaggaagccgagcgcttcgactggctggtggcgatggacgacggaaaggtcctggccaccggtacgccgcaggagttgcgcgagcgtaccgggacgcagagcctcgagtcggcgttcatcgccctgctgccggaaagcaagcgcgccggccaccatcgattggtgatcccgccgcgaccgcagagcgaaggcgcgccgcggatcgccatcgaggccgagggcctgacctgtcgtttcggcgacttcgtcgcggtcgatcacgtcagcttccgtatcgagcgtggggaaatcttcggctttctcggctccaacggctgcggcaagtccaccaccatgaagatgctcaccggcctgctgccggccagcgaaggcacgtgcgcgctgttcggccagccggtggacgccagcgacatggcgacccgtcgccgggtcggctacatgtcccaggccttttccctgtatgccgagctgagcgtgcggcagaacctggtgttgcacgcccggctgttccacctgccggcggatggcatcccggcacgggtcggcgaaatgctccggcgcttcgacctggagaaggtggccgacgagctgcccaacgacctgccgctgggcattcgccagcgtctgtcgttggcggtggcggtgatccacaagccggaaatcctgatcctcgacgagcccacttcgggggtcgacccggtggctcgcgacggcttctgggagctaatggtcgagctgtcgcgccgcgacggggtgaccatcttcatttccacccacttcatgaacgaggcccagcgctgcgatcgcatctcgctgatgcatgccggcaaggtactggccagcgatactcccgatgagctggtgcgccagcgcggcctgccgaccctggaggcgaccttcatcgcgtacctggaagaagccgccggcgccgccgcgccagcgcaaccggccgaggcgccggccgtcgcggagcagcccggcgatggccaggagcgccaggcgcaacgcgaacgcttcagccccctgcggctgttcagctatgcgcgccgcgaagccatggagctgcgccgcgacccgatccgcctgaccctggccctgctcggcaccgcgctgctgatgttcatcatcggctatggcatcaacatggacgtcgaggacctctcctgggcggtcctcgaccgtgaccagaccaccaccagccaggcctacgcgctgaacatcgccggctcgcgctatttcgtcgaacatgcgccgatcaccgacccggacgacctcgaccggcgcctgcgcagcggcgagctgagcctggcggtggagattccgccgaacttcgggcgcgatctcaagcgtggctccgatccggccatcggcgtgtggatcgacggagcgatgccgacccgtgccaacaccgtgctcggctacgtgcagggtctgcacaccagctacctggcggacctctcgcggcaggcgggtggggccgaggccagcgcggcggccagcaccgaggtgcgctatcgctacaaccccgacgtggaaagcctgaaggcgatggtgccggcggtgatcccgctgctgctgatcatgatcccggccatgctcaccgccctcggcgtggtgcgcgaaaaggaactgggttcgatcaccaacctctatgtcaccccggtgacgcgcctggagttcctggttggcaagcagctgccctacgtcgccatgggcatgatcaacttcctgctgatgctggtcctggccatcgtggtatttcgcgtgccgctcaagggcagcttcctggcgttgaccatcggcgctttcctctatgtggtcaccagcactggcctcgggctgttcctctcgacgttcatgcgcagccagatcgccgctgtattcggcgtggcgatcgccaccatgatcccggcgatccagttctccgggctgatccacccggtgtcctcgctggagggtgcggcggcctggatcggcaagctctatccgacctcgcatttcctggtggtcagccgcggcgccttttccaaatcgctgggcctgtccgatctctgggcctactacctgccgcttgccgcttccatcgtggtgctgaccctgctcagcgtggcctgcctgaagaagcaggaggactga

SEQ ID NO: 27169 - protein, 916 aa, Pseudomonas aeruginosa PAO1
MTAGGSGVASLRGVSLRYGETRAVDDVSLEIPANRMVGLIGPDGVGKSSLLALLAGARKMQDGEIRVLDGDMRDRRHRRAVCPRIAYMPQGLGKNLYPTLSVFENVDFFGRLFGHDKAERERRIADLLQSTGLAPFAERPAGKLSGGMKQKLGLCCALIHDPDLLILDEPTTGVDPLSRNQFWELIGRIRAGREGMSVLVATAYMEEAERFDWLVAMDDGKVLATGTPQELRERTGTQSLESAFIALLPESKRAGHHRLVIPPRPQSEGAPRIAIEAEGLTCRFGDFVAVDHVSFRIERGEIFGFLGSNGCGKSTTMKMLTGLLPASEGTCALFGQPVDASDMATRRRVGYMSQAFSLYAELSVRQNLVLHARLFHLPADGIPARVGEMLRRFDLEKVADELPNDLPLGIRQRLSLAVAVIHKPEILILDEPTSGVDPVARDGFWELMVELSRRDGVTIFISTHFMNEAQRCDRISLMHAGKVLASDTPDELVRQRGLPTLEATFIAYLEEAAGAAAPAQPAEAPAVAEQPGDGQERQAQRERFSPLRLFSYARREAMELRRDPIRLTLALLGTALLMFIIGYGINMDVEDLSWAVLDRDQTTTSQAYALNIAGSRYFVEHAPITDPDDLDRRLRSGELSLAVEIPPNFGRDLKRGSDPAIGVWIDGAMPTRANTVLGYVQGLHTSYLADLSRQAGGAEASAAASTEVRYRYNPDVESLKAMVPAVIPLLLIMIPAMLTALGVVREKELGSITNLYVTPVTRLEFLVGKQLPYVAMGMINFLLMLVLAIVVFRVPLKGSFLALTIGAFLYVVTSTGLGLFLSTFMRSQIAAVFGVAIATMIPAIQFSGLIHPVSSLEGAAAWIGKLYPTSHFLVVSRGAFSKSLGLSDLWAYYLPLAASIVVLTLLSVACLKKQED

SEQ ID NO: 27170 - DNA, 1698 bp, Lactococcus lactis subsp. lactis Il1403
  CDS (1)..(1698): transl_table=11
atggaagccttaatttcgttcaaagattttacatttaaatatgatttacaaaaaaatccaactttaaaaaagattaatttggaaatatttcctggggaaaaagtactgattgtcggtccttctggttcaggtaaatcaacgattggttcttgtcttaatgggattttgcctcatttacataaaggagaagcaagtggtaaactctcaattgctggtttgccctttgggacttcaattgctgaattatctgaaaaggtgtcgacgattttgcaggatactgatggccagtttattggtttgagcgttgctgaggatattgcttttgctttggaaaatgatggtctgattcatgatgaactggtcagtaaagtggcctattggtcagacaaaacagaaacaaataaactcttgaatcatcgtccccaagatttgtcgggaggacaaaagcagcgggtttctttagctggtgttttgattgatgaatcgccaattttgctttttgatgaacctttagccaatttggacccgcaaacttgcttagaaacaatggctttgattaaggatattcatgaaaataatgaagtcactacgattatcatcgaacaccgaatcgaagaagttttaccgcttggtattgataaaattgtcgtggtcaacgacggcgaaattgttgcaactggaagtcctgctgaattattaaaaacagaaatttttaatgaaaattcattacgcgagcccctctatctctcagcattaaaagctgcaaatgctacaaaattactgacagatttttctgacctaaaaagtttggaagtcctgtcagcaaaaaaattactgacagattttttagacacttataaatttactgacaaggctgtcagcaaaaataatattctttcagtaaaaaatttatcagtaaattttgctcaacatgaagttctaaaaggcattaatttagaagttcaagaaggagaaaaaatttcaattgtcgggaaaaatggagttggtaaatcaacctttgccaatgcactctgtcattttgttgaagcgagtggcgaaattttataccgagagcaatcgattattgctgattctatttctgaacgtgcgaaaaaaattggctatattatgcaaaatccaaatctgatgatttcgcaaaatattgtcagtgatgaggtggcagctggtttacgacttcgccatgttgatgaaaaaatgattcaagataaagttgaagaaattttgaaagtttgtgggctttatccttttagaaattggccaatttcttctttgagttatggtcagaaaaaaagagtgacgattgctagtattttaatactagaacctgaaattttagtccttgacgagccaacagctgctcaggatttacaatcttatcgggaaatcatggattttcttgacgaacttaaccgccgtcttcatttaacaatgattatgattacgcacgatatgtatttaattacagaatatagtgaccggacccttgtttttgctgacgggaaaattattgctgacagcagtccttatcaaattttagaaaatgaagattttgtaaaaatgggcaatttaagtcaaccaagcctttatcaacttgccagacaaacagataccaatcccgttttactgacaaaagctttcatcaattttcagaatcaggagagattaaagcatgaataa

SEQ ID NO: 27171 - protein, 565 aa, Lactococcus lactis subsp. lactis Il1403
MEALISFKDFTFKYDLQKNPTLKKINLEIFPGEKVLIVGPSGSGKSTIGSCLNGILPHLHKGEASGKLSIAGLPFGTSIAELSEKVSTILQDTDGQFIGLSVAEDIAFALENDGLIHDELVSKVAYWSDKTETNKLLNHRPQDLSGGQKQRVSLAGVLIDESPILLFDEPLANLDPQTCLETMALIKDIHENNEVTTIIIEHRIEEVLPLGIDKIVVVNDGEIVATGSPAELLKTEIFNENSLREPLYLSALKAANATKLLTDFSDLKSLEVLSAKKLLTDFLDTYKFTDKAVSKNNILSVKNLSVNFAQHEVLKGINLEVQEGEKISIVGKNGVGKSTFANALCHFVEASGEILYREQSIIADSISERAKKIGYIMQNPNLMISQNIVSDEVAAGLRLRHVDEKMIQDKVEEILKVCGLYPFRNWPISSLSYGQKKRVTIASILILEPEILVLDEPTAAQDLQSYREIMDFLDELNRRLHLTMIMITHDMYLITEYSDRTLVFADGKIIADSSPYQILENEDFVKMGNLSQPSLYQLARQTDTNPVLLTKAFINFQNQERLKHE

SEQ ID NO: 27172 - DNA, 1521 bp, Lactococcus lactis subsp. lactis Il1403
  CDS (1)..(1521): transl_table=11
atggcaaatgaaactgtcattcaaatgattgatgtcaccaaacgttttggtgattttgtcgctaacgacaaagtcaatcttgagttgaagaaaggtgagattcatgctttgctcggcgaaaatggagccggtaagtcaaccttgatgaacattctctcaggactcctcgagcctagcgaaggtgaagtccacgttaagggaaagctcgaaaatatcgactctccgtctaaagcagcaaacctcggtatcggaatggttcaccaacacttcatgttagttgacgccttcacagttactgaaaacatcatccttggtaatgaagttactaaaggaatcaatctcgatttaaagactgctaagaaaaaaatacttgaactttctgagcgttatggtctttctgttgaacctgatgcgctcatccgtgatatttctgtcggtcagcaacaaagggttgaaatcttaaaaacactctatcgtggagctgatatcttaatttttgatgaaccaacagcggttttgactccagctgaaatttctgaattgatgcaaatcatgaagaatttaattaaagaaggcaagtcaatcatcctcatcacacataaattggatgaaatccgtgcggtatctgaccgtatcacagttattcgtcgtggtaaatcaattgatactgttgaacttggtgacaaaacgaatcaagaacttgcagaattgatggtcggacgctcagtttcattcatcaccgagaaagctcccgctcaacctaaagatattgtcctcgaaattaaggacttaaatatcaaagaaagtcgcggttctctaaaagtaaaaggattatcacttgatgttcgtgccggtgaaattgtaggggttgccggaattgatggaaatggtcaaacagaattagtgaaagctattactggtttgacaaaggttgattccggttctatcaaactccacaataaagatatcaccaaccaacgcccccgtaaaatcacagaacaatctgttgggcatgttccagaagacagacatcgggacggacttgttttggaaatgacagtagccgaaaatattgctttgcaaacctactacaaaccaccaatgagcaaatatggttttcttgattataatcaaataaatagtcacgctcgcaaactcatggaagaatttgacgttcgtggtgctggtgaatgggtttctgctgcctctctttctggtggtaatcagcaaaaagcaattatcgcccgtgaaatcgaccgaaatcctgacctcctaatcgtatcacagcccactcgtggactcgatgttggtgcgattgaatatattcataaacgtttaatccaagctcgtgatgaaggaaaagcagttcttgttatttcttttgaacttgacgaaattctaaatgtttccgaccgaatcgctgttattcacgatggtcaaattcagggaattgtaagccctgaaacaaccacaaaacaagagctcggtattttaatggttggaggaaacataaatgaatag

SEQ ID NO: 27173 - protein, 506 aa, Lactococcus lactis subsp. lactis Il1403
MANETVIQMIDVTKRFGDFVANDKVNLELKKGEIHALLGENGAGKSTLMNILSGLLEPSEGEVHVKGKLENIDSPSKAANLGIGMVHQHFMLVDAFTVTENIILGNEVTKGINLDLKTAKKKILELSERYGLSVEPDALIRDISVGQQQRVEILKTLYRGADILIFDEPTAVLTPAEISELMQIMKNLIKEGKSIILITHKLDEIRAVSDRITVIRRGKSIDTVELGDKTNQELAELMVGRSVSFITEKAPAQPKDIVLEIKDLNIKESRGSLKVKGLSLDVRAGEIVGVAGIDGNGQTELVKAITGLTKVDSGSIKLHNKDITNQRPRKITEQSVGHVPEDRHRDGLVLEMTVAENIALQTYYKPPMSKYGFLDYNQINSHARKLMEEFDVRGAGEWVSAASLSGGNQQKAIIAREIDRNPDLLIVSQPTRGLDVGAIEYIHKRLIQARDEGKAVLVISFELDEILNVSDRIAVIHDGQIQGIVSPETTTKQELGILMVGGNINE

SEQ ID NO: 27174 - DNA, 1590 bp, Escherichia coli O157:H7 EDL933
  CDS (1)..(1590): transl_table=11
atgacgcaaactctgttagcgattgaagatttgtcggtgggttttcgccatcagcaaaccgtacgtacagtagtcaatgatgtttcactacagattgaggctggcgaaacgctggcgctggtgggtgagtcaggttcaggcaaaagcgttaccgcgctgtcaattttacgcctgctcccttccccgccggttgaatatctctccggcgatattcgttttcatggcgaatcgctgcttcatgccagcgaccaaacgttgcgcggtgtacgcggtaataagatcgccatgatttttcaagagccgatggtgtcgttaaatccattgcataccctggaaaaacagctttatgaagtgctttcactccaccgcgggatgcgtcgggaagcggctcgtggcgaaattcttaactgccttgatcgcgttggtatccgccaggcggcaaaacggctgacagattatccgcatcagctctccggcggcgaacgccagcgggtgatgattgcgatggcgctgttaacgcgaccggaattattaattgccgatgaaccgaccaccgcactggacgtctctgtccaggcgcagattttacagctgttgcgcgaactgcaaggcgagttgaatatgggcatgctgtttattactcataacctcagcattgtcagaaaactggcccaccgcgtggcggtaatgcaaaacggtcgctgtgtcgagcaaaattacgccgctacgctatttgcctcacccactcatccttacacacaaaagctactcaacagtgaaccgtcaggcgatccagtgccgttgccagaacctgcctcaacgttgctggatgttgaacagcttcaggttgccttccccattcgcaaagggattttgaagcgcattgtggatcataatgtggtggtgaaaaacatcagttttacgctacgagcgggtgaaacactgggtttagtgggcgagtccggttccgggaaaagcacgacgggactggcgctgctgcgactgattaattctcagggcagcatcatctttgacggtcagccactgcaaaatttaaatcgccgccagctgttacctattcgtcatcgcattcaggtggtatttcaggatccaaactcctcgctcaacccacgactcaacgttttgcasattattgaggaaggcttacgggttcaccagccgacgctttctgccgcacaacgcgaacaacaagtgatagacgtgatgcatgaagtgggattagatcctgaaacacgccaccgttatccggcggagttctctggtggtcagcgacaacgtattgcgattgccagggcattaattcttaagccctcgctgatcatacttgatgaaccgacatcatcactcgacaaaacggtacaggcgcaaatattgacgctattgaaatcattgcaacaaaagcatcaactggcctatttgtttatcagccacgatttgcacgttgtccgcgcgttatgtcatcaggttatcgtactgcgacaaggggaagtagtggaacaaggaccgtgcgcgcgcgtgtttgccacaccgcagcaggagtatacgcgtcagctactggcgttgagctga

SEQ ID NO: 27175 - protein, 529 aa, Escherichia coli O157:H7 EDL933
  misc_feature (383)..(383): Xaa can be any naturally occuring amino acid
MTQTLLAIEDLSVGFRHQQTVRTVVNDVSLQIEAGETLALVGESGSGKSVTALSILRLLPSPPVEYLSGDIRFHGESLLHASDQTLRGVRGNKIAMIFQEPMVSLNPLHTLEKQLYEVLSLHRGMRREAARGEILNCLDRVGIRQAAKRLTDYPHQLSGGERQRVMIAMALLTRPELLIADEPTTALDVSVQAQILQLLRELQGELNMGMLFITHNLSIVRKLAHRVAVMQNGRCVEQNYAATLFASPTHPYTQKLLNSEPSGDPVPLPEPASTLLDVEQLQVAFPIRKGILKRIVDHNVVVKNISFTLRAGETLGLVGESGSGKSTTGLALLRLINSQGSIIFDGQPLQNLNRRQLLPIRHRIQVVFQDPNSSLNPRLNVLXIIEEGLRVHQPTLSAAQREQQVIDVMHEVGLDPETRHRYPAEFSGGQRQRIAIARALILKPSLIILDEPTSSLDKTVQAQILTLLKSLQQKHQLAYLFISHDLHVVRALCHQVIVLRQGEVVEQGPCARVFATPQQEYTRQLLALS

SEQ ID NO: 27176 - DNA, 1590 bp, Escherichia coli O157:H7
  CDS (1)..(1590): transl_table=11
atgacgcaaactctgttagcgattgaagatttgtcggtgggttttcgccatcagcaaaccgtacgtacagtagtcaatgatgtttcactacagattgaggctggcgaaacgctggcgctggtgggtgagtcaggttcaggcaaaagcgttaccgcgctgtcaattttacgcctgctcccttccccgccggttgaatatctctccggcgatattcgttttcatggcgaatcgctgcttcatgccagcgaccaaacgttgcgcggtgtacgcggtaataagatcgccatgatttttcaagagccgatggtgtcgttaaatccattgcataccctggaaaaacagctttatgaagtgctttcactccaccgcgggatgcgtcgggaagcggctcgtggcgaaattcttaactgccttgatcgcgttggtatccgccaggcggcaaaacggctgacagattatccgcatcagctctccggcggcgaacgccagcgggtgatgattgcgatggcgctgttaacgcgaccggaattattaattgccgatgaaccgaccaccgcactggacgtctctgtccaggcgcagattttacagctgttgcgcgaactgcaaggcgagttgaatatgggcatgctgtttattactcataacctcagcattgtcagaaaactggcccaccgcgtggcggtaatgcaaaacggtcgctgtgtcgagcaaaattacgccgctacgctatttgcctcacccactcatccttacacacaaaagctactcaacagtgaaccgtcaggcgatccagtgccgttgccagaacctgcctcaacgttgctggatgttgaacagcttcaggttgccttccccattcgcaaagggattttgaagcgcattgtggatcataatgtggtggtgaaaaacatcagttttacgctacgagcgggtgaaacactgggtttagtgggcgagtccggttccgggaaaagcacgacgggactggcgctgctgcgactgattaattctcagggcagcatcatctttgacggtcagccactgcaaaatttaaatcgccgccagctgttacctattcgtcatcgcattcaggtggtatttcaggatccaaactcctcgctcaacccacgactcaacgttttgcagattattgaggaaggcttacgggttcaccagccgacgctttctgccgcacaacgcgaacaacaagtgatagacgtgatgcatgaagtgggattagatcctgaaacacgccaccgttatccggcggagttctctggtggtcagcgacaacgtattgcgattgccagggcattaattcttaagccctcgctgatcatacttgatgaaccgacatcatcactcgacaaaacggtacaggcgcaaatattgacgctattgaaatcattgcaacaaaagcatcaactggcctatttgtttatcagccacgatttgcacgttgtccgcgcgttatgtcatcaggttatcgtactgcgacaaggggaagtagtggaacaaggaccgtgcgcgcgcgtgtttgccacaccgcagcaggagtatacgcgtcagctactggcgttgagctga

SEQ ID NO: 27177 - protein, 529 aa, Escherichia coli O157:H7
MTQTLLAIEDLSVGFRHQQTVRTVVNDVSLQIEAGETLALVGESGSGKSVTALSILRLLPSPPVEYLSGDIRFHGESLLHASDQTLRGVRGNKIAMIFQEPMVSLNPLHTLEKQLYEVLSLHRGMRREAARGEILNCLDRVGIRQAAKRLTDYPHQLSGGERQRVMIAMALLTRPELLIADEPTTALDVSVQAQILQLLRELQGELNMGMLFITHNLSIVRKLAHRVAVMQNGRCVEQNYAATLFASPTHPYTQKLLNSEPSGDPVPLPEPASTLLDVEQLQVAFPIRKGILKRIVDHNVVVKNISFTLRAGETLGLVGESGSGKSTTGLALLRLINSQGSIIFDGQPLQNLNRRQLLPIRHRIQVVFQDPNSSLNPRLNVLQIIEEGLRVHQPTLSAAQREQQVIDVMHEVGLDPETRHRYPAEFSGGQRQRIAIARALILKPSLIILDEPTSSLDKTVQAQILTLLKSLQQKHQLAYLFISHDLHVVRALCHQVIVLRQGEVVEQGPCARVFATPQQEYTRQLLALS

SEQ ID NO: 27178 - DNA, 1512 bp, Escherichia coli O157:H7
  CDS (1)..(1512): transl_table=11
atgttcacggcaacagaggcagtcccggtagcaaaagtggtggcaggaaataagcgttatcccggcgtcgttgcgttggataacgttaacttcacgctcaataaaggcgaggttcgtgcgctgttaggcaaaaacggcgcgggcaaatcgaccctcattcgaatgcttaccggcagtgaacgtccggatagcggtgaaatctggattggcgagacgcgactggaaggtgacgaagctacgctgactcgccgtgccgctgaactgggggtacgcgcggtttatcaggagttaagtctggtggaagggctgacggtggcggaaaacctctgcctcggtcagtggccccgccgcaacggcatgattgattacctgcaaatggcgcaggatgcccaacgttgcttacaggcgctgggcgttgacgttagtcctgaacaacttgtttcaacactaagcccggcgcataagcagctggtggaaattgcgcgggtgatgaagggcgagccgcgcgtggtcattcttgatgaacctaccagttcgcttgcgagtgcggaagttgaactggtgatcagagcggtgaaaaagatgtcagcactgggcgtggcggtgatttatgtcagccaccggatggaagaaattcgccgcattgcctccagtgccaccgttatgcgcgacgggcaggtggctggcgatgtgatgctcgaaaacacttccacgcatcatattgtgtcgctaatgctagggcgcgatcacgttgatattgcgccggttgcacctcaggaaattgtggatcaggccgtgctggaagtccgtgcgttacgccataagcccaagctggaggatatcagctttacgctacgtcgtggcgaagtgctcggcattgctggtctgctgggggcagggcgcagtgaattgctgaaggcgattgttgggctggagacgtatgaacagggcgaaattgttatcaacggcgagaaaatcacgcgccccgattacggcgacatgctgaaacgcggcattggctatacgccagaaaaccgcaaagaagcggggatcattccctggttgggcgttgacgaaaatacagtgctgaccaatcggcaaaaaatcagcgccaacggagtgctgcaatggtccaccatccgccgcctgaccgaagaagtgatgcagcggatgacggtcaaggccgccagtagcgaaacgcccatcggcacgctttctggcggcaatcagcaaaaagtagtgatcggtcgttgggtctatgccgccagccagattttgttgctcgacgagccaacgcgcggcgtcgatatcgaagccaaacagcagatttaccgtattgtccgtgagctggctgccgaaggaaaaagcgtggtgtttatctccagtgaagtggaggagttgccgttggtgtgtgaccgcatcctgttattacagcacggcacgttctcgcaggagtttcacgctccggtcaatgtggatgagctgatgtccgccattctgtctgtgcactga

SEQ ID NO: 27179 - protein, 503 aa, Escherichia coli O157:H7
MFTATEAVPVAKVVAGNKRYPGVVALDNVNFTLNKGEVRALLGKNGAGKSTLIRMLTGSERPDSGEIWIGETRLEGDEATLTRRAAELGVRAVYQELSLVEGLTVAENLCLGQWPRRNGMIDYLQMAQDAQRCLQALGVDVSPEQLVSTLSPAHKQLVEIARVMKGEPRVVILDEPTSSLASAEVELVIRAVKKMSALGVAVIYVSHRMEEIRRIASSATVMRDGQVAGDVMLENTSTHHIVSLMLGRDHVDIAPVAPQEIVDQAVLEVRALRHKPKLEDISFTLRRGEVLGIAGLLGAGRSELLKAIVGLETYEQGEIVINGEKITRPDYGDMLKRGIGYTPENRKEAGIIPWLGVDENTVLTNRQKISANGVLQWSTIRRLTEEVMQRMTVKAASSETPIGTLSGGNQQKVVIGRWVYAASQILLLDEPTRGVDIEAKQQIYRIVRELAAEGKSVVFISSEVEELPLVCDRILLLQHGTFSQEFHAPVNVDELMSAILSVH

SEQ ID NO: 27180 - DNA, 2685 bp, Escherichia coli O157:H7
  CDS (1)..(2685): transl_table=11
gtgagccagcattatggaaaaaccgttgcgctgaacaatatcacactcgatattccggcccgctgtatggtcgggctgattggtccggatggcgtcgggaagtcgagtttattgtcattgatttccggtgctcgtgtcattgagcagggcaatgtgatcgtgctgggcggcgatatgcgcgacccgaagcatcgccgcgacgtctgcccgcgcatcgcctggatgccgcaggggctgggcaaaaacctctaccacaccttgtcggtgtatgaaaacgtcgattttttcgctcgcctgttcggtcacgacaaagcggagcgggaagtgcgaatcaatgagctgctgaccagcaccgggttagcaccgtttcgcgatcgtccggcagggaaactctccggcgggatgaagcaaaaactggggctgtgctgtgcgttaatccacgacccggaactgttgattcttgatgagcctacgacgggggttgacccgctctcccgcgcccagttctgggatctgatcgacagtattcgccagcggcagagcaatatgagcgttctggtcgccacggcctatatggaagaggcggaacgcttcgactggttggtggcgatgaatgccggagaagtgttggcaactggcagcgccgaagagctgcggcagcaaacgcaaagcgccacgctggaagaagcatttataaatctgttaccgcaagcgcaacgccaggcgcatcaggcggtagtgatcccaccatatcaacctgaaaacgcagagattgccatcgaagcgcgcgatctgaccatgcgttttggttccttcgttgccgttgatcacgtcaatttccgcattccacgcggggagatttttggttttcttggttcgaacggctgcggtaaatccaccaccatgaaaatgcttaccggattgctgcccgccagcgaaggtgaggcgtggctgttcgggcaaccggttgatccaaaagatatcgatactcgccgtcgggtgggctatatgtcgcaggcgttttcgctctataacgagctcaccgtgcggcaaaaccttgagttacatgcccgtttgtttcacatcccggaagcggaaattcccgcaagagtggctgaaatgagcgagcgttttaagctcaacgacgttgaagatgttctgccggagtcattgccgctcggcattcgccagcggctttcgctggcggtggcggtgattcatcgcccggaaatgttaatcctcgatgaacctacttctggcgtcgatccggtggcgagggatatgttctggcagttgatggtcgatctctcgcgccaggacaaagtgactatcttcatctccacccactttatgaacgaagcggaacgctgcgaccgtatctctctgatgcacgccggaaaagtgctcgccagcggtacaccgcaggaactggttgagaaacgcggagccgccagtctggaagaggcatttatcgcctatttgcaggaagcggcaggacagagcaacgaagccgaagcgcctcccgtgatacacgacaccacacacgcgccgcgccagggatttagcctgcgccgtctgtttagctacagccgccgcgaagcgctggaactgcgacgcgatccggtacgttcgacgctggcgctgatgggaacagtgatcctgatgctgataatgggttacggcatcagtatggatgtggaaaacctgcgctttgcggtgcttgaccgcgaccagaccgtcagtagccaggcgtggacgctcaatctctccggttcccgttactttatcgaacagccgctgcttaccagttatgacgagcttgatcgtcggatgcgtgcgggcgatatcacggtggcaattgagatcccgcccaatttcgggcgcgatatcgcgcgtggtacgcctgtggaactcggtgtctggatcgacggtgcgatgccgagccgcgccgaaactgtaaaaggttacgtgcaggccatgcaccagagctggctacaggatgtggcgagccgacaatccacaccctccagccaaagcgggctgatgaatattgagacgcgttatcgctataacccggacgtaaaaagcctgccagcgattgttccggcggtgatcccgcttctgctgatgatgatcccgtcaatgctaagcgcccttagcgtggtgcgggaaaaagagctagggtcgattatcaacctttacgtgacccccaccacccgtagcgaatttttgcttggcaaacagctgccgtacatcgcgctggggatgctgaactttttcctgctctgcggcctgtcggtgtttgtgtttggcgtaccgcataaaggcagtttcctgacgctcaccctggcggcgctgctgtatatcatcatcgccaccggaatggggctgctgatctccacctttatgaaaagccagattgccgccattttcggtacggcgattatcacgttgatcccggcgacacagttttccgggatgatcgatccggtagcttcgctggaagggccgggacgttggatcggcgaggtttacccgaccagtcattttctgactatcgcccgcgggacgttctcgaaagcgctggatctgactgatttgtggcaactttttatcccgttgctgatagccataccgctggtgatgggcttaagcatcctgctgctgaaaaaacaggagggatga

SEQ ID NO: 27181 - protein, 894 aa, Escherichia coli O157:H7
MSQHYGKTVALNNITLDIPARCMVGLIGPDGVGKSSLLSLISGARVIEQGNVIVLGGDMRDPKHRRDVCPRIAWMPQGLGKNLYHTLSVYENVDFFARLFGHDKAEREVRINELLTSTGLAPFRDRPAGKLSGGMKQKLGLCCALIHDPELLILDEPTTGVDPLSRAQFWDLIDSIRQRQSNMSVLVATAYMEEAERFDWLVAMNAGEVLATGSAEELRQQTQSATLEEAFINLLPQAQRQAHQAVVIPPYQPENAEIAIEARDLTMRFGSFVAVDHVNFRIPRGEIFGFLGSNGCGKSTTMKMLTGLLPASEGEAWLFGQPVDPKDIDTRRRVGYMSQAFSLYNELTVRQNLELHARLFHIPEAEIPARVAEMSERFKLNDVEDVLPESLPLGIRQRLSLAVAVIHRPEMLILDEPTSGVDPVARDMFWQLMVDLSRQDKVTIFISTHFMNEAERCDRISLMHAGKVLASGTPQELVEKRGAASLEEAFIAYLQEAAGQSNEAEAPPVIHDTTHAPRQGFSLRRLFSYSRREALELRRDPVRSTLALMGTVILMLIMGYGISMDVENLRFAVLDRDQTVSSQAWTLNLSGSRYFIEQPLLTSYDELDRRMRAGDITVAIEIPPNFGRDIARGTPVELGVWIDGAMPSRAETVKGYVQAMHQSWLQDVASRQSTPSSQSGLMNIETRYRYNPDVKSLPAIVPAVIPLLLMMIPSMLSALSVVREKELGSIINLYVTPTTRSEFLLGKQLPYIALGMLNFFLLCGLSVFVFGVPHKGSFLTLTLAALLYIIIATGMGLLISTFMKSQIAAIFGTAIITLIPATQFSGMIDPVASLEGPGRWIGEVYPTSHFLTIARGTFSKALDLTDLWQLFIPLLIAIPLVMGLSILLLKKQEG

SEQ ID NO: 27182 - DNA, 2793 bp, Agrobacterium tumefaciens str. C58
  CDS (1)..(2793): transl_table=11
gtgagggtggccgcgatggtcacgccctccgcgacgaatactaaaaacgatcccggcgccccggtcgcacggttgacggatgtacggctggcttttggcagcacggttgcgcttgccgatatatcggtcgaaattcccgccggacggatgatcggccttatcgggcctgacggtgtcggcaagtccagtctgctgtctctgatttccggcgcgcgcgccatacagaagggcaatgtggaggttctggccggcgatatgtccgatccgcgccaccgcgaggatacctgcccgcgcatcgcctatatgccgcagggcctcggtaagaacctttatccaaccctctcagtcttcgaaaatatcgactttttcggcaggctgttcgggcaggatggcagggagagaaaggcacgcattgccgagttgctgaaaagtactggtcttgaacgttttgccgaccggccggccatgaagctttccggcggcatgaaacagaagctcgggctctgctgtgcgctgatccacgatcctgacctgctcattctcgatgagccaacaacgggcgtcgatccgctgtcgcgccggcaattctgggaacttatcgattccatccgtgccggtcgtccgggcatgagcgtgattgtcgcgacggcctatatggaagaggccgccggtttcgactggctggtcgccatggatggcggcaagatcctcgccaccggctcccccggcgaacttctcgaacgcacctcgaccgccaatctcgatgccgcctttattgcgcttcttccggaagaaaagcgcaaggactaccacgaggtgcatatcgcgccacgcagggtgacgcatgatggtgactatgccatcgaggcgtcgcatctcagtatgcgcttcggtgatttcaccgccgtcgacaatgtcagcttcaaaatcccgcgcggcgagattttcggctttctcggctctaatggctgcggaaaatccaccaccatgaagatgctgaccgggcttctggctgccagtgaaggcgaggcgaagcttttcggccacaaggtggatgccagcgacatggcgatccgccaccgcgtcggttacatgagccaggccttttcgctctattccgaactcacggtacgacagaacctcgatcttcacgcgcggctgttcaagctgccggaagcgaccattcagccgcgcatcgccgagatggcggagcgctttgatctcggcaccgtcatggatacgctgccggacgacctgccgcttggcatccggcaaagactgtcgcttgcggtggcgatgatccattcgcccgacattcttatcctcgatgagccgacttcgggtgtcgacccggtggcgcgcgacggcttctggcaaatcctcgctgatctctcccgcaacgacaatgtcaccatcttcatctccacccatttcatgaatgaggcggagcgttgcgaccggatttcgttgatgcatgccggcaaggtgctgatcagcgatacgcctgacgcgattaccaaaagccgtaatgccgaaacgctggaagaggcttttgtcgcctatctcgaggatgcctcgggtgtcaaaaaggcggagcctgcaatagcgcccgctccggcaacggaggtggttccgacccaacacgcaacacctgcccgcaaacggtttttcgatgtccggcgcatgttcagctatacccgccgagaggcgctggaactgcagcgagatcccattcgcggcacattggcggttctcggcagcgtcatcctgatgttcgtgatcggttacggcatcaatctcgatgttgaggacctgtccttcgcggtactggaccgtgacgattccaccatcagccgcgattacgtgctcgacatagccggttcccgttatttcatcgagaaagagccgatccgcgactatgccgatatggaccggcgaatgcgcgacggggaactcagcctcgccatcgaaattccacccggtttcggccgcgatgtcctgcgcggcaagacggtggaggtcggcgcctggatcgacggcgccatgccgcagcgggcagaaaccgtgcgcggttacgtgcagggaatgcaccagacatggctggcgcgcaaggcgagcgaaatctatggcaatgcagcgacgcaaagtagtttcagcatcgaaacgcgctatcgttacaatcccgatgtcaaaagcctcgtcgccatggtcccggcggtcattccgctgctgctgatgctcattcctgccatgctggcggccctcagcgtcgtccgggaaaaagagcttggctccatcgtcaacctctacgtgacgccgaccacgcggctggaattcctgataggaaaacagcttccctatgtggcgctcggaatgctcaatttcctgctgctgaccgcatttgcgatattcatcttccaggtgccgtttaccggcagttatctcgcttacgcgacgggagctttgctcttcgtcatcatcgccacgtccatcggtctcgtcatgtcttcctttatgaagagccagatcgcggcgatcttcggcacggccttgctgacgctcattccggccacacaatattcgggcatgatcgatcccgtttcgtcgctgcagggggcgggggcctttatcggtaacatctatcccgccacctatttcatgactatttcacgcggcaccttttccaaggggctggatttcgccggtctttccggttctttcctgccgcttctcattgccattccgctgctgctcatcgccggtgctgctcttttgaggaaacaggcgtcatga

SEQ ID NO: 27183 - protein, 930 aa, Agrobacterium tumefaciens str. C58
MRVAAMVTPSATNTKNDPGAPVARLTDVRLAFGSTVALADISVEIPAGRMIGLIGPDGVGKSSLLSLISGARAIQKGNVEVLAGDMSDPRHREDTCPRIAYMPQGLGKNLYPTLSVFENIDFFGRLFGQDGRERKARIAELLKSTGLERFADRPAMKLSGGMKQKLGLCCALIHDPDLLILDEPTTGVDPLSRRQFWELIDSIRAGRPGMSVIVATAYMEEAAGFDWLVAMDGGKILATGSPGELLERTSTANLDAAFIALLPEEKRKDYHEVHIAPRRVTHDGDYAIEASHLSMRFGDFTAVDNVSFKIPRGEIFGFLGSNGCGKSTTMKMLTGLLAASEGEAKLFGHKVDASDMAIRHRVGYMSQAFSLYSELTVRQNLDLHARLFKLPEATIQPRIAEMAERFDLGTVMDTLPDDLPLGIRQRLSLAVAMIHSPDILILDEPTSGVDPVARDGFWQILADLSRNDNVTIFISTHFMNEAERCDRISLMHAGKVLISDTPDAITKSRNAETLEEAFVAYLEDASGVKKAEPAIAPAPATEVVPTQHATPARKRFFDVRRMFSYTRREALELQRDPIRGTLAVLGSVILMFVIGYGINLDVEDLSFAVLDRDDSTISRDYVLDIAGSRYFIEKEPIRDYADMDRRMRDGELSLAIEIPPGFGRDVLRGKTVEVGAWIDGAMPQRAETVRGYVQGMHQTWLARKASEIYGNAATQSSFSIETRYRYNPDVKSLVAMVPAVIPLLLMLIPAMLAALSVVREKELGSIVNLYVTPTTRLEFLIGKQLPYVALGMLNFLLLTAFAIFIFQVPFTGSYLAYATGALLFVIIATSIGLVMSSFMKSQIAAIFGTALLTLIPATQYSGMIDPVSSLQGAGAFIGNIYPATYFMTISRGTFSKGLDFAGLSGSFLPLLIAIPLLLIAGAALLRKQAS

SEQ ID NO: 27184 - DNA, 1593 bp, Staphylococcus aureus subsp. aureus Mu50
  CDS (1)..(1593): transl_table=11
atgtcaaatttattagaagtcaacagtctgaatgtacaattcaattatgatgaaactacagttcaagcggtaaaaaatgtctctttcgaattacgaaaaaaacatatcctaggtattgttggtgaatcaggatcaggaaaaagtattactgctaaatctattttagggctactaccagattatccagatcacacattaacaggagaaattatttttaatgggcaatcgttaaataatttatcaacttcagcgttacaacaaattcgaggtaaggatatttcaatgatttttcaagatccactctcttcgttgaatccaagattaacgattggcaaacaaattacagaagtactatttcaacataaacgtgtatctaaatctgaagcaaagtcgatgacaataaacattttagaaaaagtaggtataaaacatgcaactcgacaatttgatgcttatccacatgaactttctggtggtatgcgtcaacgtgtcatgatagcaatggcattgattttaaagccacaaattttaatcgcagatgaaccaacaacggcattagatgccagtacacaaaatcaattactgcagttaatgaagtccctttatgagtacacagaaacatctattatttttatcactcacgatttaggcgctgtgtatcaattttgcgacgatgtgattgtaatgaaagatggaagtgtcgttgaaagtggcacggttgaaagtatttttaaatcgccacaacatacctatacaaaacgcttaatagatgcgattcctgatattcatcaaacgcgtccgccaagaccgttaaacaatgatattttattaaaattcgatcgcgtgagcgtggattacacatcaccgagtggcagcctataccgagcagttaatgatattaacttggctattagaaaaggcgaaacattaggcattgtcggtgaatcagggtcagggaaatcgacattagctaagacggtcgtcggtctaaaggaagtgtcagaaggctttatttggtataacgaattaccattaagtttatttaaagatgatgaattgaaatctttacgacaagagatacaaatgatttttcaagatccattcgcatctattaatccaagatttaaagtcattgatgtgattaaacgaccactaatcattcatgggaaagtcaaagataatgatgacattattaaaactgtcgtatcgttgttagaaaaggttggcctagatcaaagtttcttatatcgctatccacacgaattatctggtgggcaacgtcagcgtgtaagtatcgcgagagcacttgctgtagaacctaaagtgattgtttgcgacgaggcagtgtccgctttagacgtttcaattcaaaaagatatcatcgagttattaaaacaattacagttagacttcggcatcacttatttattcatcacacatgacatgggtgttatcaatgaaatatgtgatcgcgttgcagttatgaaaaatggcgaaatcgttgaactgaataacacagaagatattatcaaacatccgcaatcagactatgcaaagcaacttatttcagaagtagcagttattgctaaataa

SEQ ID NO: 27185 - protein, 530 aa, Staphylococcus aureus subsp. aureus Mu50
MSNLLEVNSLNVQFNYDETTVQAVKNVSFELRKKHILGIVGESGSGKSITAKSILGLLPDYPDHTLTGEIIFNGQSLNNLSTSALQQIRGKDISMIFQDPLSSLNPRLTIGKQITEVLFQHKRVSKSEAKSMTINILEKVGIKHATRQFDAYPHELSGGMRQRVMIAMALILKPQILIADEPTTALDASTQNQLLQLMKSLYEYTETSIIFITHDLGAVYQFCDDVIVMKDGSVVESGTVESIFKSPQHTYTKRLIDAIPDIHQTRPPRPLNNDILLKFDRVSVDYTSPSGSLYRAVNDINLAIRKGETLGIVGESGSGKSTLAKTVVGLKEVSEGFIWYNELPLSLFKDDELKSLRQEIQMIFQDPFASINPRFKVIDVIKRPLIIHGKVKDNDDIIKTVVSLLEKVGLDQSFLYRYPHELSGGQRQRVSIARALAVEPKVIVCDEAVSALDVSIQKDIIELLKQLQLDFGITYLFITHDMGVINEICDRVAVMKNGEIVELNNTEDIIKHPQSDYAKQLISEVAVIAK

SEQ ID NO: 27186 - DNA, 1704 bp, Sinorhizobium meliloti 1021
  CDS (1)..(1704): transl_table=11
atgagcgcctccgtcctgtctgtccgcgacctgaccgtgaaggcgcatctccagggagagacgcgcacgctgctggatggcatctcgctcgacctcgccaagggcgagatcctcggcctcgtcggcgaaagcggatcgggcaagagcctgttctgccgcgcgctggttcgcctcctgccatcatccctgctgaagatcgaaggcggtgcggttctcctcggagggcgcgacctcacggccgtcaccgacgccgagatgctggaggtgcgcggcgccgagatcggcatgatcttccagaacccgaccagccacctcgacccggtcatgcgcatcggcgaccagatcgccgagggcatccgctaccatcagggcctcggcggccgcgatgcgcgggcggcagcggtcgagatactggggcagatcgggttccctgaacccgtccgccagtacgacagctacccgcacgagctttccggcggcatgcgtcagcgggccatgatcggcgtggcactgtcctgcaatccgcaaatcctcatagccgacgaaccgacgaccgccctcgacgtgacgatccaggcgcagatcctgaaactcctgatggacatccgcgacaggcgcggcctgtcgatcatcctcattacccatgatctcggcatcgtggcgcagacctgcgaccgcattgccgtgatgcgcggcggaaagctgctggaacagggtcctaaacggacgatcctgtccgcaccgcaggacccgtatacagttcggctcatccacagccatccatccatgcccgaggcggtgctccccgccaccagtctcccagcgccctcacatggagcgacaaggtcgcttctggagatcgatgacttgcatgtgcgcttcccgtcgggcggcagccttttcaggggaaagaacgccagggccgtcagcgccgtttcggggatcagcctgcggatcatgcccggcgaaacggtcggtatcgtcggcgaatccggcagcggcaaaagtacgcttgcccgcgccatgctgggcctgacgccgatttccgccggtcacgtcagcttcgacggtatcgatctttctcagcagaggggtgcgggtctcaccaggctgcgacacgagtccgccatggtctttcaggatccgttcaatgcattgaacccgcgcctgaccatcggccagactcttgctgaagttctgaaagtgcagaaaaagatcggcggagccgacattccggcacgcatcggcgagctgctggaccttgtcggcctcgagcgcgaattcgcccatcgcaaaccgcgcagcatgagcggcggccagtgccagagggcgggcatcgcccgtgcccttgccgtcgacccgagactgattatcgccgacgaatgcgtcgcagcactcgatgtcacgatccaggcgcagatcgtcgacctcttccgcaagctcgcccgcgaccttaacctcacgctgatcttcatcgcccatgacctcgcgatcgtgcgcaacctgtgcgaacgcaccgtggtgatgcatcgcggagagatcatcgaggagggccgctccgaggacgtcttctcccggccgaaacatccctacaccgccgcattgatcgccgcgatccccgacatcgatcccgacaggtcattactcggccataccgatgcgccgccggtggaaccgatccagtccgtcaaacgcctgccataa

SEQ ID NO: 27187 - protein, 567 aa, Sinorhizobium meliloti 1021
MSASVLSVRDLTVKAHLQGETRTLLDGISLDLAKGEILGLVGESGSGKSLFCRALVRLLPSSLLKIEGGAVLLGGRDLTAVTDAEMLEVRGAEIGMIFQNPTSHLDPVMRIGDQIAEGIRYHQGLGGRDARAAAVEILGQIGFPEPVRQYDSYPHELSGGMRQRAMIGVALSCNPQILIADEPTTALDVTIQAQILKLLMDIRDRRGLSIILITHDLGIVAQTCDRIAVMRGGKLLEQGPKRTILSAPQDPYTVRLIHSHPSMPEAVLPATSLPAPSHGATRSLLEIDDLHVRFPSGGSLFRGKNARAVSAVSGISLRIMPGETVGIVGESGSGKSTLARAMLGLTPISAGHVSFDGIDLSQQRGAGLTRLRHESAMVFQDPFNALNPRLTIGQTLAEVLKVQKKIGGADIPARIGELLDLVGLEREFAHRKPRSMSGGQCQRAGIARALAVDPRLIIADECVAALDVTIQAQIVDLFRKLARDLNLTLIFIAHDLAIVRNLCERTVVMHRGEIIEEGRSEDVFSRPKHPYTAALIAAIPDIDPDRSLLGHTDAPPVEPIQSVKRLP

SEQ ID NO: 27188 - DNA, 1491 bp, Yersinia pestis CO92
  CDS (1)..(1491)
atgtctgagttgcaaatatcgcaaggttgttttcgcctgagtgacacacagacactcatcttgccagcgctacatatccaggcgggtgactgttgggcatttgtcggggccaatggcagtggtaaatctgcgttagccaaggccctgtctggagaactggccctgctggagggcagccgccaaagccacttccgccatggtgtgcgtttatcattcgaacaactacagcaactggtcaatgaagagtggcaacgtaataataccgacctgctcagtgctgatgaagatgacactggccgtactaccgccgaaattattcaggaagcggcccgtgacccgcagcgctgtcaacaactggcagcgctatttggaatcagccacttgctttctcgccgcttcaaatacctttctacgggggaaacccgtaaaacattgctgtgtcaggcgctgatgccgcaaccggacctgctgattctggatgagccctttgatggcctggatgtcgcggctcgggcgcagttagccgagatgctatccacactttcggcccaaggcgtcaccctggtattggtcctcaaccgctttgatgatatccctgattttgtgcagtacgttggcgtattggctgattgccacctgacccacatggggccgcgccagcagattctgtcggaagcgttaattgcccaattggcacacagtgaaaatctggatgggctgtcactgccggaaacggaggatccacagcaccacctacgaataccgaaaaatgaacccttgatcatactgaatgacggggtggtggagtacaacgaccgccctatcctgcataacctgagctggcaagtgaaccccggtgaacactggcagattatcggccagaatggtgcagggaaatccaccttactcagcctgataactggcgaccatccccaaggatacagtaatgatttaacgctgtttggccgccgccgtggcagtggtgaaaccatctgggacatcaaacgccatattggttatgtcagcggcagcctccatctggactaccgggttagcacccgtgtacgtaccgtgattttatccggttttttcgattcgattggtctttaccaagcagcctctgatcgtcaacaacaattagcagatcaatggctgtctttactggggttttccacctccgtcgccaaccaacctttccacagcttatcttgggggcaacagcgtctggtcttgatcgcccgagcattggttaagcacccagcgctcctgatcctggatgaacccttacaagggctggatccgcttaaccgtttgttagtgcgccgttttattgatgtgatgatcggtgaaggagaaacccaattattgttcgtttctcaccatgccgaggatgcaccccagtgtattacgcaccgcttaacctttgtgccatttggcgatatttatcactatcaacaagaaaaatcaccaagccaaccacaggtaaaataa

SEQ ID NO: 27189 - protein, 496 aa, Yersinia pestis CO92
MSELQISQGCFRLSDTQTLILPALHIQAGDCWAFVGANGSGKSALAKALSGELALLEGSRQSHFRHGVRLSFEQLQQLVNEEWQRNNTDLLSADEDDTGRTTAEIIQEAARDPQRCQQLAALFGISHLLSRRFKYLSTGETRKTLLCQALMPQPDLLILDEPFDGLDVAARAQLAEMLSTLSAQGVTLVLVLNRFDDIPDFVQYVGVLADCHLTHMGPRQQILSEALIAQLAHSENLDGLSLPETEDPQHHLRIPKNEPLIILNDGVVEYNDRPILHNLSWQVNPGEHWQIIGQNGAGKSTLLSLITGDHPQGYSNDLTLFGRRRGSGETIWDIKRHIGYVSGSLHLDYRVSTRVRTVILSGFFDSIGLYQAASDRQQQLADQWLSLLGFSTSVANQPFHSLSWGQQRLVLIARALVKHPALLILDEPLQGLDPLNRLLVRRFIDVMIGEGETQLLFVSHHAEDAPQCITHRLTFVPFGDIYHYQQEKSPSQPQVK

SEQ ID NO: 27190 - DNA, 1593 bp, Yersinia pestis CO92
  CDS (1)..(1593)
atggcgacctcaccactattggatatccaaaacctcagtgttgcgtttagtcaggcaggcgttcagcgtgaggttgtcagcgaactgtcattacaaatcaacgctggagaaacactggcgctggtcggggaatcaggatcggggaaaagcgtcaccgcgttgtccgtgttacgtttgctaccatcaccgccagtagtgtatcccacaggtgatattctgtttgcgggcagctcattgctacatgctgatgagccaacactacggcgcattcgtggtaatcagatttcgatgatcttccaagaaccgatggtgtcactcaacccgctgcataatattgaaaaacagttggcagaagtgctctcactgcaccggggtatggggcaagaagcggcgcgggctgaaattatccaatgcctcgacagagttggcattcgtaatgccaaagggcgattagccgattttccccatcaactttctggcggtgaacgccagcgagtgatgattgccatggcggtattaacccaacccaaattattgattgccgatgagccaaccaccgcactggatgtttctgttcaggcgcaaattctgagcttgctgaaagagttaaagcaagagatgaacatgagcctgctgtttatcacccataacctgaatatcgtgcgccgattagcggataacgtggcggtgatgcgggaaggccgtaaagtggagcagaacaaccggcaggcgctcttcagtgccccgcaacacccctacactcgccagttactggatgctgagtcacaggatgccccgttgccactcgcgcagaatacccagccactgcttgtggttaaagagttgcaagttgccttcccgatcaaacgtggtttactgcgccgcaccgtcgatcaccactatgcgctaaaaagcctcagttttgacctgaagcccggcgaaagtctgggcttggtgggggagtccggttcgggtaaaagtacctccggtctggccttgttacgcttattgccatcacagggtgaaatctggtttagcgggcaaccgctgcaccaatttacccccaaacagatgctgccctatcgcagccgtattcaggtggtcttccaggacccttactcagcattgaacccacgtttgaatgtgcaacagatcattgcggagggcctggaagtgcatcaaaaactcagtgcagcgcaacgtgaagagcgagtgattaaggcaatggaagaagtcggattggatccagccacccgctctcgttatccaactgaattctcgggggggcagcgtcagcgcattgcgattgcccgcgcgctgatcctgcaaccccaactgttgatccttgatgaaccaacgtcttcactggataaatcggtacaggcgcaaattttggccctactgaaatcccttcagcagcgttaccaactcagctacttgtttattagccatgacttgcaggtcgtgcgttcgctctgccatcaggtgattgtcttaagacaaggagaagtggtggaacaaggtgattgtcaggcaatatttgcggcaccaaaacaactatatactcagcaattattagaattagcagactaa

SEQ ID NO: 27191 - protein, 530 aa, Yersinia pestis CO92
MATSPLLDIQNLSVAFSQAGVQREVVSELSLQINAGETLALVGESGSGKSVTALSVLRLLPSPPVVYPTGDILFAGSSLLHADEPTLRRIRGNQISMIFQEPMVSLNPLHNIEKQLAEVLSLHRGMGQEAARAEIIQCLDRVGIRNAKGRLADFPHQLSGGERQRVMIAMAVLTQPKLLIADEPTTALDVSVQAQILSLLKELKQEMNMSLLFITHNLNIVRRLADNVAVMREGRKVEQNNRQALFSAPQHPYTRQLLDAESQDAPLPLAQNTQPLLVVKELQVAFPIKRGLLRRTVDHHYALKSLSFDLKPGESLGLVGESGSGKSTSGLALLRLLPSQGEIWFSGQPLHQFTPKQMLPYRSRIQVVFQDPYSALNPRLNVQQIIAEGLEVHQKLSAAQREERVIKAMEEVGLDPATRSRYPTEFSGGQRQRIAIARALILQPQLLILDEPTSSLDKSVQAQILALLKSLQQRYQLSYLFISHDLQVVRSLCHQVIVLRQGEVVEQGDCQAIFAAPKQLYTQQLLELAD

SEQ ID NO: 27192 - DNA, 1596 bp, Yersinia pestis CO92
  CDS (1)..(1596)
atgctaagtactaacaatatcaccatgcaattcggcagcaagccgctgtttgaaaacatttcagtcaaattcggtggcggtaaccgctatggcctgatcggcgctaatggttgtggtaaatccacattcatgaagattctggggggcgatctggtccctagcggcggtaacgtcttccttgacccgaatgagcgtctgggtaaacttcgtcaggatcaattcgcctttgaaaacaatacagtgctggataccgttattatgggacacggcgaactgtgggaagtaaaagaagagcgtgaccgcatttatgccatggctgaaatgagcgaagaagatggctataaagttgctgatctggaagttgcctacggtgaaatggatggctacagcgcagaagcccgtgctggtgagttgttgctgggcgtgggtattcccgttgaacagcattatggcttgatgagcgaaatcgcacccggttggaagttacgtgtattgctggcgcaagccctgttctccgatccagaaattttgttacttgatgagccaaccaacaacctggatatcgatactatccgttggttagagcaggtgctaaacgaacgtaacagcaccatgattattatttcccatgaccgtcacttccttaacatggtgtgtacgcatatggcggatctggattacggcgaactgcgcgtttatccaggtaactatgatgagtatatgaccgcagcgactcaagctcgcgagcgtttgttgtcagataatgcgaagaaaaaagcccaaatatctgaactgcaatctttcgttagccgctttagcgccaacgcctctaaatctaagcaggcaacttcacgtgctcgccagattgataaaattcagcttgatgaggtaaaagcctccagccgccagaacccgtttattcgcttcgatcaggatagaaaactgttccgtaatgcgctggaagttgagatgttgaccaaaggttttgataacggtccgctgtttaaaaatctgactctccgcctggaagtgggtgagaaagtggctatcctcgggccgaacggtattggtaagtctactttgctgaaaaccctgctaggggagtatgaatctgatgctgggaccgtaaaatggtctgaaaacagtaagattggttactacgcacaggatcacgccagtgattttgacatcgatctgacggtgtttgactggatgagccagtggaagcaagagaaagacgatgagcaggcggttcgcagtgtgctggggcgtttgttgtttagccaggatgacatcaagaaaaaagttagcgtgctgtctggtggtgagaaagggcggatgttgtttggtaagttgatgatgcagcgccctaacattttagtcatggatgaaccaaccaaccacttggatatggagtccattgaatctctcaatatggcattggaaatgtacgaagggacattaatcttcgtctcccatgaccgcgagtttgtgagttcactggcaacccgcgtgattgaaatgacgccgaataagcttatcgactttaccggtaactacgaagattatctgagtagccaagggattcactcataa

SEQ ID NO: 27193 - protein, 531 aa, Yersinia pestis CO92
MLSTNNITMQFGSKPLFENISVKFGGGNRYGLIGANGCGKSTFMKILGGDLVPSGGNVFLDPNERLGKLRQDQFAFENNTVLDTVIMGHGELWEVKEERDRIYAMAEMSEEDGYKVADLEVAYGEMDGYSAEARAGELLLGVGIPVEQHYGLMSEIAPGWKLRVLLAQALFSDPEILLLDEPTNNLDIDTIRWLEQVLNERNSTMIIISHDRHFLNMVCTHMADLDYGELRVYPGNYDEYMTAATQARERLLSDNAKKKAQISELQSFVSRFSANASKSKQATSRARQIDKIQLDEVKASSRQNPFIRFDQDRKLFRNALEVEMLTKGFDNGPLFKNLTLRLEVGEKVAILGPNGIGKSTLLKTLLGEYESDAGTVKWSENSKIGYYAQDHASDFDIDLTVFDWMSQWKQEKDDEQAVRSVLGRLLFSQDDIKKKVSVLSGGEKGRMLFGKLMMQRPNILVMDEPTNHLDMESIESLNMALEMYEGTLIFVSHDREFVSSLATRVIEMTPNKLIDFTGNYEDYLSSQGIHS

SEQ ID NO: 27194 - DNA, 1515 bp, Yersinia pestis CO92
  CDS (1)..(1515)
atgactcatatttctgatgttgatagagacgtgccgcttatcacgttaaaagcgctgtccaaaagctttggcggtcatcaggcactgaaaaatatcacgttgacgttgaataaaggcgaagttcactgtctggccggggctaatggttgcggaaaaagtacgctgattaagacgattagtggcgtttatgccccagatgacggcagtgaaattatcattgatgaaaaatcttatcaccgcctgacgcctgatcgcgcacgcgctttgggcgtacaggtgatttatcaagacctttcgctgttccctaacctgacggtagccgaaaatattgccttcgaatataacttgaaaggttacttcggctggttcaacaagcagaaaatcaaacaaaaagcctgccagatcttgcatgaactggcttttagtctcgatcccgatgcgctggtacaacatttacccattgcccaacgccagcaggtggctatctgccgtgcgttggttgccgatgcgcgcttggtgattatggatgagcctaccgcctctttgacgcgcaccgaagtgaatcaattattacgcacagtaaattacctgcgagataagcacattaccgtggtcttcgtcagccaccgattagatgaagtgaaagagatttcggatcgcattacggtgatccgcgatggcgaaaaagtggggacctggccagccactgagctttctaccgggcgtattaccgagttgatgaccggcctgaccctcacccacgagcagaaattacccaatgccgaattaggcaaagtggtgctgcaactggaaaacctaagccgtaaagggcaattcgacgatatctcgtttagcctgcatcgcggcgaagtgctcggcctgtgtggtttgctggggtccgggcgaaccgaattggcccttagcctatttggcatcacccatcctgatagcggcaagattaccattgacggtaacccggtgtgcattaaagacaatacccgtgccattgagctaggtattggctatgtatctgaagatcgcctgaccctcggtgccgtattgcaacaatctatcgccgacaacatggtgctgtcgattctgcaacgcatccgtactccactttatctggttgatgacgctaaacagaacgcgctggtgcaagaatgggtgaaggatttggacatcaaaatcacggatgctgataacgcgctgtcaacattgtcagggggcaatcagcaaaaagtggtgctggcaaaatggatcctaaccaaaccgaaagtgttaattctcgattcacctactgtgggggtcgatatcggtgccaaagacagtatttacaagctgatccatcgtctctccggggtgggtatctcggtgttgctgctctctgatgaaatccccgaagcctattacaactgcgatcgcatcctgcatatgcagcaggggcgtatcgtcaatgaactgatcccgaatcaaatgactgaacaacagctggcggaggtcatcaatggctaa

SEQ ID NO: 27195 - protein, 504 aa, Yersinia pestis CO92
MTHISDVDRDVPLITLKALSKSFGGHQALKNITLTLNKGEVHCLAGANGCGKSTLIKTISGVYAPDDGSEIIIDEKSYHRLTPDRARALGVQVIYQDLSLFPNLTVAENIAFEYNLKGYFGWFNKQKIKQKACQILHELAFSLDPDALVQHLPIAQRQQVAICRALVADARLVIMDEPTASLTRTEVNQLLRTVNYLRDKHITVVFVSHRLDEVKEISDRITVIRDGEKVGTWPATELSTGRITELMTGLTLTHEQKLPNAELGKVVLQLENLSRKGQFDDISFSLHRGEVLGLCGLLGSGRTELALSLFGITHPDSGKITIDGNPVCIKDNTRAIELGIGYVSEDRLTLGAVLQQSIADNMVLSILQRIRTPLYLVDDAKQNALVQEWVKDLDIKITDADNALSTLSGGNQQKVVLAKWILTKPKVLILDSPTVGVDIGAKDSIYKLIHRLSGVGISVLLLSDEIPEAYYNCDRILHMQQGRIVNELIPNQMTEQQLAEVING

SEQ ID NO: 27196 - DNA, 1536 bp, Sinorhizobium meliloti 1021
  CDS (1)..(1536): transl_table=11
atgatcccccgcctcgaactgcgcagcattaccaaatgttatcccggcaccgtcgcgaacgacgccgtctcgctgtcgatcctgccgggagagatacacgccgtcctcggagagaacggcgccggcaaatcgacgctgatgaagatcatctatggcgcggctcaagccgattcgggcgagatctattgcgacggcagacggatcgaagcgcacaatcccgcaatctcgcgttcgctcggcatcgagatggtctaccagcatttcgcgctcttcgaatccgtctcggtggtcgagaatatcgccctggcggtcaaaggcactttcgacctcgaccggctcgcggccgagatcaagaccctctcggcacgctacggcatgccgatcgatccgcaccgcagggtgcacgatctctccgtcggcgagcggcagcgcgtggagatcgtgcgatgcctcctgcagtcacccaaacttctgatcctggacgagccgacctcagtgcttacgccgcaagccgtggtgaagctcttcgaaacgcttcgccaactggcaagcgaaggctgcagcatcgtctatatcagccacaagctcgatgaagtgcaggaactttgcgacaccgccacggtgctgcgcaacggcaaggtgaccggcacggcaaaacccaaggaatcgacgtcgctggagctcgcccggatgatggtcggctcgcagcttccgcaaatgcatgtcagtccttcagccccgagcgccaagccgctgctggaagttcgcgggctgtccgctcccgcccgggacaagtacggcaccgagctgacggatgtatccctcgaggtgcatggcggcgagatcgtcggactggccggtgtgtcgggcaatggccaggcggagttgatcgcgctgttgagcggcgagcggacccatccgcgtgcggagacgatcctcatcggcggcagaccgtccggccatctcaacgccggcgaacggcgcaagctcggcatggccttcgtcccggaggaacgcctcggccgtggcgcggttccgccccatgccctatgggaaaacgcagtgctgacggcccaccgggcgggcctcgtgcgcaacgctctcgtcgaccgcaggcgggccggcgagttcgcgaggcacattatcgagcgcttcaaggtgaaggcgaatggaccgcaagcgagcgcgcaaagcctctccggcggcaacctgcagaaattcatcgtcggccgcgaactcaccctggagccgaagattcttctcgtgtcccagccgacctggggcgtggatgtcggtgcagctgccttcatccgccagacgcttgtcgatctaagccgcggcggcgccgcggtgctcgtcgtatcggaggagctcgatgaactgttcgagatttgcgaccgtttgctggtcatttccaacggccgcgtttcccctccattgatcagaaagcagaccaatcgcgaagagatcggcctgttgatgacccgggtcggccatggcgaaacgaggagaagcgaagttgcgcttgaggattga

SEQ ID NO: 27197 - protein, 511 aa, Sinorhizobium meliloti 1021
MIPRLELRSITKCYPGTVANDAVSLSILPGEIHAVLGENGAGKSTLMKIIYGAAQADSGEIYCDGRRIEAHNPAISRSLGIEMVYQHFALFESVSVVENIALAVKGTFDLDRLAAEIKTLSARYGMPIDPHRRVHDLSVGERQRVEIVRCLLQSPKLLILDEPTSVLTPQAVVKLFETLRQLASEGCSIVYISHKLDEVQELCDTATVLRNGKVTGTAKPKESTSLELARMMVGSQLPQMHVSPSAPSAKPLLEVRGLSAPARDKYGTELTDVSLEVHGGEIVGLAGVSGNGQAELIALLSGERTHPRAETILIGGRPSGHLNAGERRKLGMAFVPEERLGRGAVPPHALWENAVLTAHRAGLVRNALVDRRRAGEFARHIIERFKVKANGPQASAQSLSGGNLQKFIVGRELTLEPKILLVSQPTWGVDVGAAAFIRQTLVDLSRGGAAVLVVSEELDELFEICDRLLVISNGRVSPPLIRKQTNREEIGLLMTRVGHGETRRSEVALED

SEQ ID NO: 27198 - DNA, 1647 bp, Sinorhizobium meliloti 1021
  CDS (1)..(1647): transl_table=11
atggctgaacatctgctcgaggtccgtaacctctccgtcgaattccacaccgcggcgggcgtggtccatgcggtgaagtcgatctcctatcacctcgacaaaggcgagacgctggcaatcctcggcgaaagcggttccggcaagtccgtctcgtcctcggcgatcatgaacctcatcgacatgccgccgggccgcatcagtagcggcgaaatcctgctcgacggcagggacctgctgacgatgcctgccgaggaacggcgcgaagtcaacggccgccgggtcgccatgatctttcaggatccgctcagccacctcaatccggtctacagcgtcggctggcagatctccgaagccatgaccactcacgggctcgccggcagcaaggcgcgcgaagaggcgctgcggctccttcgccgcgtcggaatccccgagcccgagcgggcaatgcgcaaatatccgcacgaattctccggcggtcagcgccagcgcgtcatgatcgccatggcgctggcgctccggccggacctcctgatcgccgacgaaccgaccaccgcgctcgacgtgaccgtgcaggcggaagtgctgaagcttctgaaggaactgcagcgcgaaacgggcatggcggtgctgatcatcacccacgatctcggcgtcgtctccgagatcgccgaccgggtcgtcgtgatggaaaagggcgccatcgtcgaagcgggaaccgtgcgcgagatctacaagaacccgcagcatccctatacgcagaagctcatcgccgccgcccccggcaagggcgcgatgcacgaacccggcgcgcgcgccgaacccctgctcagcgtgcgcgacgtgcgcaagacctacggctccttcgaagcgctgaagggcatctccttcgatctgatgcccggcgagaccatggctgtcgtcggagagagcggctccggcaaatcgacgcttgcccgggcccttttgcgtctcgacgagccggacagcggcacggcgctctggaagggccgcgacctgttcgcgctttcgccggcagagctctacaagctcaggcgcgacctccagatggtgttccaggacccgacccagtcgctcaacccgcgcatgacggtctaccagctgatctccgaggcatgggtcatccatccggacatcctgcccaaggcaaagtggcgtgaacgcgtcgcggagctcctggtgcaggtcggtctttcggccgagcacatgagccgctatccgcaccagttttccggcggccagcggcagcgcatcgccattgcccgggcgcttgcgctcgagccgcagctgatcatctgcgacgaggccgtttccgcgctcgacgtctccgtccaggcgcaggtgatcgagcttctcgacaggctgcgccgcgagatggggatcgccttcatcttcatcgcccatgacctgccggtcgttcgcgatttcgccgattacgtcatggtcatgcagcagggagaggtcgtcgagctcggcaccgtccgcgaggtcttcgatacgccgcggcaggcctatacccgcgcccttctcgcggccagcctcagtcccgatccggatgcaaaggccggccacctagcatcggtgccggccgaggctgccgacattcttatcccaaagcggagtcactga

SEQ ID NO: 27199 - protein, 548 aa, Sinorhizobium meliloti 1021
MAEHLLEVRNLSVEFHTAAGVVHAVKSISYHLDKGETLAILGESGSGKSVSSSAIMNLIDMPPGRISSGEILLDGRDLLTMPAEERREVNGRRVAMIFQDPLSHLNPVYSVGWQISEAMTTHGLAGSKAREEALRLLRRVGIPEPERAMRKYPHEFSGGQRQRVMIAMALALRPDLLIADEPTTALDVTVQAEVLKLLKELQRETGMAVLIITHDLGVVSEIADRVVVMEKGAIVEAGTVREIYKNPQHPYTQKLIAAAPGKGAMHEPGARAEPLLSVRDVRKTYGSFEALKGISFDLMPGETMAVVGESGSGKSTLARALLRLDEPDSGTALWKGRDLFALSPAELYKLRRDLQMVFQDPTQSLNPRMTVYQLISEAWVIHPDILPKAKWRERVAELLVQVGLSAEHMSRYPHQFSGGQRQRIAIARALALEPQLIICDEAVSALDVSVQAQVIELLDRLRREMGIAFIFIAHDLPVVRDFADYVMVMQQGEVVELGTVREVFDTPRQAYTRALLAASLSPDPDAKAGHLASVPAEAADILIPKRSH

SEQ ID NO: 27200 - DNA, 1602 bp, Sinorhizobium meliloti 1021
  CDS (1)..(1602): transl_table=11
atgacagagatgaaggactccattctcgctgtacgtggcctgaaggtcgacttttacacccccgacggcaccgtcgaagcggtcaagggcatcgatctcgacgtccgttccggcgagacgctcgcggtcgtcggcgaatccggctcgggcaagagccagaccatgatgggaatcatgggcctgctcgccaagaacggcacggtgaccggttcggcgcgctatcgcggccaggaactcgtagggctcgcaccgaaggccctgaacaaggtgcgcggctcgaagatcaccatgatcttccaggagccgatgacctcgctcgatccgctctacaccatcggccgtcagatcgccgagccgatcgtccatcaccgcggcggcagcttcaaggaggctcgcaggcgcgtcctcgagctcctggagctcgtcggcattcccgagccggggcggcgcatcgacagctatccgcacgagctttccggcggccagcgccagcgtgtcatgatcgccatggcgcttgccaacgagccggatatcctgatcgccgacgagccgacgaccgcccttgacgtgaccatccaggcccagatcctcgatctgctcaaatcgctgcaaaggcgcttcggcatggcgatcgtgctgatcacccacgacctcggcatcgtcaagtacttcgccgaccgtgtcgcggtcatgcgccggggcgaggtcgtggagcaggggatgacggctgatatcttcgagcggccgaagggggactataccaggatgctgctggaggccgaaccgagcgggcgcaaggcttcgccccccgacaacgccccgatcatcctggagggtcgcaatgtcgcggtggactatacgatcccaggcggcctcttccgcggggcctcggccgctttccgtgccgtcgacggcgtcaatcttaggctcaggcagggtcagacgatcggcatcgtcggcgaatccggctccgggaaatcgacgctcggcagggcgctgctgaggcttctgccgagcagcggttactaccgtttcggctcgaccgacatttccggctttgaccgcggcgcgatgcggccgctgcgccgccagctgcagctcgtctttcaggacccctacgggtcgctctcgccgcgccggaccgtgggggagatcatcaccgaaggcctccatgtgcatgagcccgacctgagccgtgccgatcgcgaccgcagggccatcgccgcgttgaaggaagtcggcctcgatcccgcgtcgcgcaaccgctatccgcatgaattctccggcggacagcgccagcgcatcgcaatcgcccgcgcgatcatcctgaagccgaaggtcgtcattctcgacgagccgacttcggccctcgaccggtcggtgcaggggcaggtgatcgaactcctgcgcgatctgcaggaaaagcacggtctctcctacatcttcatcagccacgatctttcggtggtgaaggcgatgtctgactatgtgatcgtgatgaagaacggccggatcgtcgaagagggagaaacggacgcgatcttcgatgcgccgagggagccctatacgaagacgctgatcggcgcggcgttcaacgtgtga

SEQ ID NO: 27201 - protein, 533 aa, Sinorhizobium meliloti 1021
MTEMKDSILAVRGLKVDFYTPDGTVEAVKGIDLDVRSGETLAVVGESGSGKSQTMMGIMGLLAKNGTVTGSARYRGQELVGLAPKALNKVRGSKITMIFQEPMTSLDPLYTIGRQIAEPIVHHRGGSFKEARRRVLELLELVGIPEPGRRIDSYPHELSGGQRQRVMIAMALANEPDILIADEPTTALDVTIQAQILDLLKSLQRRFGMAIVLITHDLGIVKYFADRVAVMRRGEVVEQGMTADIFERPKGDYTRMLLEAEPSGRKASPPDNAPIILEGRNVAVDYTIPGGLFRGASAAFRAVDGVNLRLRQGQTIGIVGESGSGKSTLGRALLRLLPSSGYYRFGSTDISGFDRGAMRPLRRQLQLVFQDPYGSLSPRRTVGEIITEGLHVHEPDLSRADRDRRAIAALKEVGLDPASRNRYPHEFSGGQRQRIAIARAIILKPKVVILDEPTSALDRSVQGQVIELLRDLQEKHGLSYIFISHDLSVVKAMSDYVIVMKNGRIVEEGETDAIFDAPREPYTKTLIGAAFNV

SEQ ID NO: 27202 - DNA, 1476 bp, Salmonella typhimurium LT2
  CDS (1)..(1476): transl_table=11
atgtcatcgttgcaaatttcgcaaggcacgtttcgtctgagcgatacaaaaacacttcatctggattcgctgacgctcaatgcgggcgatagctgggcattcgttggggctaacgggagcgggaagtcggcgctcgcccgcgcgctggcgggcgaactgccgttattaacaggcgagcgccagtgtcggtttacccgcattactcgtctgtcctttgaacaattgcaaaagctggtcagcgatgagtggcaacgtaataacaccgatatgctcagtcctggcgaagacgataccgggcgcactaccgcggaaattattcaggatgatgttcaccatcctgcccgctgtgcgatactggcgcagcagttcggcatttccgctttactcgacaggcgttttaaatacctttctaccggcgagacgcgaaaagcgctgctgtgtcaggcgctgatgtctgagccagagttattgatccttgatgaaccgttcgacgggcttgacgtgaccgcccgtcaacaactggcgcaacgcctgacggcgttgaaccaggcgggtatgaccctggcgctggtactcaaccgttttgatgagatcccggacttcgtgcagtttgccggcgtgcttgccgactgtacgctggcggagaccggaacgacggcggagttgctgcaacgggcgttggttgctcaactcgcgcacagcgagcgtctgaccgacgtacaattacccgaaccggacgaaccttccgcccgccatgcgttacccgatggcgaaccacggatcgtacttaacgatggagtagtctcgtataacgatcgccctatcctccaccacttaagctggcgagtcaatccgggcgaacactggcagatcgtcggtcctaacggagcgggtaagtctacgttgcttagccttattactggcgatcatccgcaaggctacagcaacgatcttacgctgttcgggcggcggcgaggaagcggcgaaacaatctgggatatcaaaaaacatatcggctacgtcagcagcagtttacatctggattaccgcgtcagtaccacggtacgcaatgtcattctctccggctatttcgattctatcggcatttaccaggccgtttcagacaggcaacgaaaactggcgcaacagtggctggatattctgggaatcgataagcgtacggcggatgcccccttccacagtctctcctggggacagcagcggctggcgctaatcgtgcgcgcgctggttaagcatccgacagtgttgattctggatgagccgctgcaagggttggacccgctgaaccgccaactggtacgccgttttgtagatgtattaattcgccagggagagacccaactgctgttcgtttcccatcatgcagaggatgcgcctgcctgtattacccaccggctggaatttgtaccagagggcgaacgttataagtacgtttccggacgatgcaataattaa

SEQ ID NO: 27203 - protein, 491 aa, Salmonella typhimurium LT2
MSSLQISQGTFRLSDTKTLHLDSLTLNAGDSWAFVGANGSGKSALARALAGELPLLTGERQCRFTRITRLSFEQLQKLVSDEWQRNNTDMLSPGEDDTGRTTAEIIQDDVHHPARCAILAQQFGISALLDRRFKYLSTGETRKALLCQALMSEPELLILDEPFDGLDVTARQQLAQRLTALNQAGMTLALVLNRFDEIPDFVQFAGVLADCTLAETGTTAELLQRALVAQLAHSERLTDVQLPEPDEPSARHALPDGEPRIVLNDGVVSYNDRPILHHLSWRVNPGEHWQIVGPNGAGKSTLLSLITGDHPQGYSNDLTLFGRRRGSGETIWDIKKHIGYVSSSLHLDYRVSTTVRNVILSGYFDSIGIYQAVSDRQRKLAQQWLDILGIDKRTADAPFHSLSWGQQRLALIVRALVKHPTVLILDEPLQGLDPLNRQLVRRFVDVLIRQGETQLLFVSHHAEDAPACITHRLEFVPEGERYKYVSGRCNN

SEQ ID NO: 27204 - DNA, 1593 bp, Salmonella typhimurium LT2
  CDS (1)..(1593): transl_table=11
gtgttagtttccagcaacgttaccatgcagttcggcagtaagccgctgttcgaaaacatttccgtcaaatttggcggcggcaaccgttacggcctgatcggcgccaacggtagcggaaagtccacttttatgaaaatcctcggcggcgacctggagccgacgctgggcaatgtttccctcgatccgaatgagcgcatcggtaagctgcgtcaggaccagttcgcttttgaaacattcaccgtacttgatactgtcattatggggcatggcgaactgtgggaagtcaagcaggagcgcgaccgtatctacgccttgccggaaatgagcgaagaagacggctataaagtcgccgatctggaagtaaaatacggcgagatggacggttattccgctgaggcgcgcgcgggcgaactgctgttgggggtgggcatcccgctggagcagcattacggtctgatgagtgaagtcgcgccaggctggaaattacgtgtgctgctggcgcaggcgttattctctaatccggacatcctgttgctcgacgaaccgaccaacaacctggatattgatactatccgttggctggagcaggtgctgaacgagcgcgacagcacgatgatcatcatttcgcacgaccgtcacttcctgaacatggtttgtacgcatatggcggatctggattatggcgacttgcgcgtctatccgggtaactatgatgagtatatgacggcggcgacccaggcgcgtgaacgtctgttggccgataatgcgaagaaaaaagcgcaaattgccgagctgcaatcttttgttagccgttttagcgccaatgcctctaaatcgcgtcaggcaacgtcgcgcgcgcggcagattgataaaatcaagctggaagaggtgaaagcctccagccgtcagaacccgttcatccgttttgagcaggataaaaaactgttccgtaacgctctggaagtggaggcgctgacgaaaggttttgataacggtccgctgtttaaaaatgtcaatttgctgctcgaagtcggcgagaagctggcggtactcggcaccaatggcgtgggtaaatctacgctgctgaagacgctggttggcgatctggacgccgatcacggcaccgttaaatggtcggaaaacgcgcgtattggttactacgcgcaggaccacgaatatgaattcgaaaatgacctgacggtgtttgaatggatgagtcagtggaaacaggaaggcgacgacgagcaggcagtgcgcagtattctgggccgcctgctatttagccaggatgatatcaaaaagcctgccaaagtcctctccggtggcgagaagggccgtatgctgttcggcaaactgatgatgcaaaagccgaatatcctgatcatggacgaaccgactaaccacctggatatggagtcgatcgaatcgctgaatatggcgctggaactgtatcagggcacgctgatctttgtttcgcacgaccgtgagttcgtcagctcgctggcaacccgcgtcattgaaattacgccggagcgcgtggtggacttcagcggcaactacgacgattatttgcgtagtaaagggatcgagtaa

SEQ ID NO: 27205 - protein, 530 aa, Salmonella typhimurium LT2
MLVSSNVTMQFGSKPLFENISVKFGGGNRYGLIGANGSGKSTFMKILGGDLEPTLGNVSLDPNERIGKLRQDQFAFETFTVLDTVIMGHGELWEVKQERDRIYALPEMSEEDGYKVADLEVKYGEMDGYSAEARAGELLLGVGIPLEQHYGLMSEVAPGWKLRVLLAQALFSNPDILLLDEPTNNLDIDTIRWLEQVLNERDSTMIIISHDRHFLNMVCTHMADLDYGDLRVYPGNYDEYMTAATQARERLLADNAKKKAQIAELQSFVSRFSANASKSRQATSRARQIDKIKLEEVKASSRQNPFIRFEQDKKLFRNALEVEALTKGFDNGPLFKNVNLLLEVGEKLAVLGTNGVGKSTLLKTLVGDLDADHGTVKWSENARIGYYAQDHEYEFENDLTVFEWMSQWKQEGDDEQAVRSILGRLLFSQDDIKKPAKVLSGGEKGRMLFGKLMMQKPNILIMDEPTNHLDMESIESLNMALELYQGTLIFVSHDREFVSSLATRVIEITPERVVDFSGNYDDYLRSKGIE

SEQ ID NO: 27206 - DNA, 1872 bp, Salmonella typhimurium LT2
  CDS (1)..(1872): transl_table=11
gtgccgcacagcgatgaactggatagccgcgatgttctgtccgtcagtggcctgaatatcgcgtttcaccacgaagggcaacaggtagacgccgtgcgtaatgtgtcattacgcctgaagcgtggagagactctggcgattgtcggcgagtcgggatcgggaaaatcggtgacggcgctggcgttaatgcggctgattgagcagtcgggcgcgaacgtgcgctgcggcgaaatgctgttgcgtcggcgtaatcgtcaggtgattgagctgtctgagcagagtgacgcgcagatgcggcgtgtgcgcggcgcggatatcgccatgattttccaggagccaatgacctcgctcaacccggtatttaccgttggcgagcaaattgccgaatctattcgtttgcatcagggggccagccacgaagaggcgctggcggaagcgaaacgtatgctcgatcaggtacggatcccggagtcgcaggcgattttatcgcgttatccgcatcagctttccggcgggatgcgccagcgagtcatgatcgcgatggcgctatcctgccgtccggcggtattgattgccgatgaacccaccacggcgctggatgtcactatccaggcgcaaattctgcaacttatcaaagtgttgcagcaagagatgtcgatgggcgtgatttttatcacccacgacatgggcgtcgtggcggatatcgccgatcgcgtgctggtgatgtatcagggcgaggccgtggaaaccggcagcgtagagcagattttccatgcgccgacgcatccttatacccaaacgttactggccgccgtccctcagcttggcgcgatgcgaggccactcgctgccacgccgtttcccgttgatttccgctgacgaaccggccctttatgaatcgcagattgagcaagacacggtggtggaaggcgaacctattctccaggttcgggggctggtgacgcgattcccgctgcgtagcggtctctttaaccgcgttacgcgtgaagttcatgccgttgagaatatcagtttcgatctctggcccggcgaaacgttatcgctggtgggcgagtccggtagcggaaaatcgacgaccggacgcgcgctgctgcggttggttgaatcccggcagggggagattatctttaacggccagcgcattgacacgctgtctgcgggtaaactccagccgttgcgccgcgatattcagtgtattttccaggacccttacgcctcgctcgacccgcgccagaccgtggggtattccattatggaacctttacggattcatggcctggggcagggggacgctgcggcaaagcgcgtggcctggttgcttgagcgtgtcggattacgtcctgaacatgcctggcgttatccgcacgagttttccggcggtcaacgtcagcgcatctgcatagctcgcgcgctggcattgaatcctaaagtgattattgccgatgaggcggtctccgcgctggatgtttccgttcgcgggcagatcattaatttactgctcgatttacaacgggaaatggggatcgcctacctgtttatttcgcatgatatggcggtcgtggagcgaattagccatcgcgtggcggtgatgtatcttggtcaaattgttgagatggggccgcggcgcgccgtttttgaaaatccgcagcatccttatacgcgtaaattgatggcggcggtgccggttgccgatccctccagacaccggccgcggcgcgttctgctatcagatgatatacccagcaatattcataaacgtggcgaagagacgcccgccgtttcattacagttggtcgggccgggacattatgttgcgcggccgctgcaggataatgcgctctcgcgcttataa

SEQ ID NO: 27207 - protein, 623 aa, Salmonella typhimurium LT2
MPHSDELDSRDVLSVSGLNIAFHHEGQQVDAVRNVSLRLKRGETLAIVGESGSGKSVTALALMRLIEQSGANVRCGEMLLRRRNRQVIELSEQSDAQMRRVRGADIAMIFQEPMTSLNPVFTVGEQIAESIRLHQGASHEEALAEAKRMLDQVRIPESQAILSRYPHQLSGGMRQRVMIAMALSCRPAVLIADEPTTALDVTIQAQILQLIKVLQQEMSMGVIFITHDMGVVADIADRVLVMYQGEAVETGSVEQIFHAPTHPYTQTLLAAVPQLGAMRGHSLPRRFPLISADEPALYESQIEQDTVVEGEPILQVRGLVTRFPLRSGLFNRVTREVHAVENISFDLWPGETLSLVGESGSGKSTTGRALLRLVESRQGEIIFNGQRIDTLSAGKLQPLRRDIQCIFQDPYASLDPRQTVGYSIMEPLRIHGLGQGDAAAKRVAWLLERVGLRPEHAWRYPHEFSGGQRQRICIARALALNPKVIIADEAVSALDVSVRGQIINLLLDLQREMGIAYLFISHDMAVVERISHRVAVMYLGQIVEMGPRRAVFENPQHPYTRKLMAAVPVADPSRHRPRRVLLSDDIPSNIHKRGEETPAVSLQLVGPGHYVARPLQDNALSRL

SEQ ID NO: 27208 - DNA, 1590 bp, Salmonella typhimurium LT2
  CDS (1)..(1590): transl_table=11
atgacatctccattgcttgcgattgaaaatttatcggtaggtttccgtcagcaacagcacgtgcgccctgtcgttaacgccatttcgttacaggtgaacgccggggaaacgctggcgctggtcggcgagtcagggtcagggaaaagcgtgacggcgctttccattctgcgtcttttgcctacccctcccgccgtctacctctccggcgatattcgctttcacggcgaatcattgcttcatgccagcgagcagacgttacgcggcgtgcgcggcaataaaatcgccatgatttttcaggaaccgatggtttcacttaacccactgcatacgctggaaaaacagctctatgaagtgctgtcgctccatcggggaatgagtcgggaggcggcaagggcggagatgatcggttgtctggatcgggtcggtatccgccaggcgagccagcgtctgcgcgattatccgcatcagctttccggcggcgaacgccagcgcgtcatgatagccatggcgctgttaacacggccggaattactgatcgccgatgagccgaccaccgccctcgacgtctccgtacaggcgcagatcttatctctactgcgggaactccagcgcgagctcaatatgggattgctgtttatcacccataacctcagcattgtaaaaaaactggcggattcagtggcggtaatgcaacacggcaagtgcgtagagaaccaacgcgccgacacgctgctctccgcgccgacccatccgtacacgcaaaaactactcaacagcgaacccactggcgatccggttccgctccccgccgggcaggcgccgttgctggaagtggacaagctgcgcgtcgccttcccaatccgcaaaggcattctgaagcgcgtcgtggatcataatgtggtggttaacaatatcagtttcaccctgcatccaggcgaaacgctgggtctggtcggcgagtcaggatcgggaaaaagcaccaccggtctggcgctgttacggcttatccgctccgaaggccgcatcgtgtttgacggtcaatcgctggatacgttaaaccgccgccagcttttacctgttcgccaccgtatccaggtcgtattccaggacccgaactcatcgctaaacccgcgtttaaacgtattgcaaattatcgaagaaggcctgcgcgtccaccagcctacgctttcaggcgcgcagcgcgaacagcaggtgaaagcggtcatgatggaagtcggcctggacccggaaacgcggcatcgttaccccgctgagttttccggcggccagcgtcaacgtatcgccgtcgccagggcactgattttaaaaccgtcgcttattattctggatgaaccgacctcatcgctggataaaaccgttcaggcgcagattcttgccctcctgaaatcgctccagcaaaagcaccgtctggcctatatcttcattagccacgatctgcatgtagtacgcgcgctgtgccatcaggttattgtgctgcggcagggggaggtggttgaacaggggcaatgcgagcgcgtgtttaccgcaccgcaacaggcctatacgcgtcagctactcgcgttaagctga

SEQ ID NO: 27209 - protein, 529 aa, Salmonella typhimurium LT2
MTSPLLAIENLSVGFRQQQHVRPVVNAISLQVNAGETLALVGESGSGKSVTALSILRLLPTPPAVYLSGDIRFHGESLLHASEQTLRGVRGNKIAMIFQEPMVSLNPLHTLEKQLYEVLSLHRGMSREAARAEMIGCLDRVGIRQASQRLRDYPHQLSGGERQRVMIAMALLTRPELLIADEPTTALDVSVQAQILSLLRELQRELNMGLLFITHNLSIVKKLADSVAVMQHGKCVENQRADTLLSAPTHPYTQKLLNSEPTGDPVPLPAGQAPLLEVDKLRVAFPIRKGILKRVVDHNVVVNNISFTLHPGETLGLVGESGSGKSTTGLALLRLIRSEGRIVFDGQSLDTLNRRQLLPVRHRIQVVFQDPNSSLNPRLNVLQIIEEGLRVHQPTLSGAQREQQVKAVMMEVGLDPETRHRYPAEFSGGQRQRIAVARALILKPSLIILDEPTSSLDKTVQAQILALLKSLQQKHRLAYIFISHDLHVVRALCHQVIVLRQGEVVEQGQCERVFTAPQQAYTRQLLALS

SEQ ID NO: 27210 - DNA, 1536 bp, Salmonella typhimurium LT2
  CDS (1)..(1536): transl_table=11
atgcaaatcagtcacaatactgcatcccctctgatttgtgtgcagaacatttataaaagttattccggcgtcgaagtactaaagggaattgactttactctgcatgcgggagaggtgcacgcattgcttggcggcaatggtgcgggtaaatcaacattaatgaagattattgccggtatagtcccgccagatggagggactatcgatattgctggtgtgcgttgcagtcatttaacgcctctgaaggcgcaccagtatggcatttacctggttccccaggagcctctgttatttccgagtttatctgtgcgggaaaatatcttgtttggcttgcagggacgtcaggcctccacggaaaaaatgcagcagctattaaaggcgatgggatgccaactcgatccggcgagcgctgcgggtacgcttgatgttgcagaccgccagatcgttgaaattatgcgcggcttgatgcgcgactcgcgaatcttaattcttgatgagcccacggcgtcgttaacgccagccgaaactgatcggttatttacgcgtctgcaagagttgctgaaaaagggtgtcggaattgtatttatttctcataagctaccagaaattagacagttagctcactgcgttagcgtgatgcgtgacggtaaaatcgcattattcggaaaaacgcatgacctttctaccgacgagattattcaagctatcaccccggcaacgcagggcgtcagtctttccgcgaatcaaaagttgtggctggaattgcctggcagccgcccgcagaacgaacgcggcgcgacagtattagcgctggagtcactgacgggcgaaggttttatgaatatcaaccttgaggtgcgggcaggcgaaatccttggtctggccgggttggtcggcgcgggacgcacagaactggctgaaacgctgtacggtattagaccggtcaatgcggggcggatgctgttcaatggtcaagaaattaacgccctgacaacccaacagcggttgcagctcggcctggtctatttgccggaagatcggcagtcatccgggctgtatcttgacgcttccctggcatggaatgtctgttcgctgacccacaaccaaaaaggattttggataaagccccagcgggataacgccacccttgaacgttaccaccgcgcgttaaatatcaaactcaataatgccgaacaggcggcgcgtactttatccggcggtaaccagcaaaaagtattgattgccaaatgcctggaggcctctccgcaattactgattgtcgatgaaccgacccgcggtgtcgatgtctccgcccgcagcgatatttatcagctgttgcgcagtatcgcgcaacaaaatgtcgcggtgctatttatttcctccgatctggaagagatagagcagatggccgatcgcgtatatgtcatgcaccagggggaactgggggggcctgcgttatgcggcgaggaaattaacgttgataccatcatgcacgttgcgtttggcgaacatggtgcgtcggaggcaacatgttga

SEQ ID NO: 27211 - protein, 511 aa, Salmonella typhimurium LT2
MQISHNTASPLICVQNIYKSYSGVEVLKGIDFTLHAGEVHALLGGNGAGKSTLMKIIAGIVPPDGGTIDIAGVRCSHLTPLKAHQYGIYLVPQEPLLFPSLSVRENILFGLQGRQASTEKMQQLLKAMGCQLDPASAAGTLDVADRQIVEIMRGLMRDSRILILDEPTASLTPAETDRLFTRLQELLKKGVGIVFISHKLPEIRQLAHCVSVMRDGKIALFGKTHDLSTDEIIQAITPATQGVSLSANQKLWLELPGSRPQNERGATVLALESLTGEGFMNINLEVRAGEILGLAGLVGAGRTELAETLYGIRPVNAGRMLFNGQEINALTTQQRLQLGLVYLPEDRQSSGLYLDASLAWNVCSLTHNQKGFWIKPQRDNATLERYHRALNIKLNNAEQAARTLSGGNQQKVLIAKCLEASPQLLIVDEPTRGVDVSARSDIYQLLRSIAQQNVAVLFISSDLEEIEQMADRVYVMHQGELGGPALCGEEINVDTIMHVAFGEHGASEATC

SEQ ID NO: 27212 - DNA, 1656 bp, Ralstonia solanacearum GMI1000
  CDS (1)..(1656): transl_table=11
atgacccgcgtcgacctgcgctcggctaagcccgactacgatggcccgctgctgcggctggacgacctgtccgtgcgcttcgaggccgagcacaacgagtggatcgaggccgtcaggcacgtctcgttcgacctgcacgccggcgagcgctttgcgctggtgggcgagtcgggctccggcaagacggtcacggcgctgtcgatcatgcgcctgctggccgacgcgcattacagcggccgcatcctgttcgaggggcgcgacctgctggccgcgagcgagcgccagatgcgcggcctgcgcggcgccgacgtcgcgatggtgttccaggagccgatgacggcgctcaacccgctgtacaccatcggcaaccagatcgtcgagacgctggagctgcacgaaggcctggacaagcgcgccgccaaggcccgcgcgatcgcgctgctggagcacaccggcatcgccgaggcaccgcgccgcttcgatgctttcccgcaccagctgtccggcggccagcggcagcgtgccatgatcgccatggcgctcgcctgcagccccaagctgctggtcgccgacgagcccaccaccgcgctggacgtgaccgtgcgcatgcagatcctgcagctgctgcgcgacctgcaggccgaatacggcatggccgtgatgctgatcacgcacgacctgaacatggtgcgcgcctttgctgagcgcgtgggcgtgatggagcggggcgtgctggtggaaaccggcgagacggcgaccgtcttcagcgcgccgcagcatccctacacagtgcgcctgctggaaagccgcccgcagcgcgatgtgctgccgctggtgccgctcgctcccgtgctgctggaggccgaccaactgacggtcacctacgatcgccatcgccccgggtttgccggctggttccgcgccgatccgttcaccgccgtcgaccaggtctcgctgcagttgcgcgagggcgagaccctgggcatcgtcggcgagtccggttcgggcaagacgacgctggcgcagacgctgctcgggctgcagcgtccgaaggcgggcgatctgcgcttcctcggcagttcgctgctgggccaaacgcgcgacgagcgccgcgcggtgcgtgcccgcatgcaggtggtgtttcaggacccgttcggttcgctctcgccgcgcatgaccatcgagcagatcgtcggcgaggggttggcgctgcatcagccgcacgtcaacgacgccgagcgccgccagcgcgtgatcgaggcgctgcgcgaggtcggcctggaccgcaccgccctgggacgctatccgcatgagttctccggcgggcagcgccagcgcatcgccattgcgcgggtgctgatcctcaagccccaggtcctggtgctggatgagccgacttcggcactcgacgtgtcgatccagcagcaggtgctgtcgttgctgtccgcccttcagaaaaagtacaacctgtcgtacctgttcatcagccacgacctcgccgtgatccgtgccatgtcgcaccgggtgatggtgatgaaggacgggaaggtggtggaggcgggcgacacggaagccgtgctggagtcaccgtcccacccctacacctgcaagctgatggcggctgcggcgctcaagccgcttcagccgccgggctga

SEQ ID NO: 27213 - protein, 551 aa, Ralstonia solanacearum GMI1000
MTRVDLRSAKPDYDGPLLRLDDLSVRFEAEHNEWIEAVRHVSFDLHAGERFALVGESGSGKTVTALSIMRLLADAHYSGRILFEGRDLLAASERQMRGLRGADVAMVFQEPMTALNPLYTIGNQIVETLELHEGLDKRAAKARAIALLEHTGIAEAPRRFDAFPHQLSGGQRQRAMIAMALACSPKLLVADEPTTALDVTVRMQILQLLRDLQAEYGMAVMLITHDLNMVRAFAERVGVMERGVLVETGETATVFSAPQHPYTVRLLESRPQRDVLPLVPLAPVLLEADQLTVTYDRHRPGFAGWFRADPFTAVDQVSLQLREGETLGIVGESGSGKTTLAQTLLGLQRPKAGDLRFLGSSLLGQTRDERRAVRARMQVVFQDPFGSLSPRMTIEQIVGEGLALHQPHVNDAERRQRVIEALREVGLDRTALGRYPHEFSGGQRQRIAIARVLILKPQVLVLDEPTSALDVSIQQQVLSLLSALQKKYNLSYLFISHDLAVIRAMSHRVMVMKDGKVVEAGDTEAVLESPSHPYTCKLMAAAALKPLQPPG

SEQ ID NO: 27214 - DNA, 1524 bp, Agrobacterium tumefaciens str. C58
  CDS (1)..(1524): transl_table=11
atgtccgaaactgcaccacttctggaagcacgcgccatcggtaaatcctttctggggatcacggcgctggacggcgttgatttttcgcttgcacgcggtgaaatccatgcgcttctcggcgaaaacggcgcgggcaagtcgacgctcatcaaaatcctgaccggcgtttaccaccgcgacagcggctcgatctttctcgacggaagcgagatatcgcccgccaatgtcggcgaggcacaggcgctcggtatcggcaccgtttatcaggaagtaaaccttctcgaaaatctcacggttgcggaaaacctatttctcggccgccagccgcatcgcttcggcatgatcgaccgggcctcgatgcagaagcagtcccaggcgctgctaacacaatacgggctttccatcgacgtcaacgccctgctgtccagctattccgtcgccatccgccagatcatcgccattgcccgcgctgtcgatctttccggcaaggtgctggtgctggacgagccgaccgccagtctcgacgcccatgaggtcgagatgttgttcggcgtgctgaaaaacctgcgcgcgcgcggcatcggtatcatcatcatcacccatttcctcaatcaggtctatgatatcgccgaccgcgtgacggttctgcgcaatggtcgtctcgtcggcacgcgcgatatcggcagcctgcccagatccgaactcatcgcgatgatgctgggccgcgaattgcagcacatcacccacgaacatcaggcggcggatgatacggtcgttgatggcgaaccgcctatccatttcgaaggttacggcaaacgcggcagcatcgcccctttcgaccttggcattcgtcccggcgaaatcgtcggcgtcgccggtcttctcggctccggccgcaccgaaacggctttcctgctgttcggcgtcgacaagcccgataccggcaaggccacgatagacggaaagacggtggcgatttcctcacccgaagccgccatcaccgccggcttcggcttctgtccggaagagcgcaagacggacggcatcatcggcgatttttcggtgaccgacaatattgcgctggcacttcaggcccgtcagggctgggcacggccattgtcccgtcggcaaaaagcggagcttgccgaaagcttcatcaaatcgctcgatatccgtcccgccgatcccaaccggccgataaaattcctgtccggcggcaaccagcagaaagccattctggcacgctggctcgccacccatccccggcttctgattctcgatgaaccaacccgcggcatcgatatcggcgcccatgcagaaattctcaaaatgatcgaaaaactctgtaccgagggcatgtcgcttgtggtcatctcgtccgaactcgaagagctgaccgccgttgcccatcgcgtcgtcgtgctctccgaccgccgccacgtcagcgaattgaagggtggtgacgtcaccgccgataacatcatgcgggcgatcgccgaggcggcgaaaacggaggcggcatga

SEQ ID NO: 27215 - protein, 507 aa, Agrobacterium tumefaciens str. C58
MSETAPLLEARAIGKSFLGITALDGVDFSLARGEIHALLGENGAGKSTLIKILTGVYHRDSGSIFLDGSEISPANVGEAQALGIGTVYQEVNLLENLTVAENLFLGRQPHRFGMIDRASMQKQSQALLTQYGLSIDVNALLSSYSVAIRQIIAIARAVDLSGKVLVLDEPTASLDAHEVEMLFGVLKNLRARGIGIIIITHFLNQVYDIADRVTVLRNGRLVGTRDIGSLPRSELIAMMLGRELQHITHEHQAADDTVVDGEPPIHFEGYGKRGSIAPFDLGIRPGEIVGVAGLLGSGRTETAFLLFGVDKPDTGKATIDGKTVAISSPEAAITAGFGFCPEERKTDGIIGDFSVTDNIALALQARQGWARPLSRRQKAELAESFIKSLDIRPADPNRPIKFLSGGNQQKAILARWLATHPRLLILDEPTRGIDIGAHAEILKMIEKLCTEGMSLVVISSELEELTAVAHRVVVLSDRRHVSELKGGDVTADNIMRAIAEAAKTEAA

SEQ ID NO: 27216 - DNA, 1764 bp, Brucella melitensis 16M
  CDS (1)..(1764): transl_table=11
ttgccgacaagcgccaccgccagtcggcttatccgcgcattgcctatatgccgcaagggcttggcaagaacctttatcccacgctttcggtgttcgagaatattgatttcttcgggcggctctttggccacgacagggcggaacggggagtgccgcattgccgatcttctggcgcgcactggtatgtcggcctttgccaaccggccggcgggaaagctttcaggcggcatgaagcagaaaacgagcctctgctgctcgctcatccacgatccggatctcctcattctggacgagcccaccacgggcgtcgatcccttgtcgcgccgccagttctgggagctgatcgacgatatccgcaaggatcgtccgggaatgagcgtcatcgttgcgacggcctatatggaagaagcggagcgtttcgactggctggtggcgatgaatgacggccagattctggcgaccggcacgccgcaggaattgctggagcgcaccgatacgcccaatctcgatgccgctttcatcgcacttctgccggaagaacagcggcggggccatagggaaatacatattccgccgcgcgcgcctgcctctgataccgcaattgccatcgaagcggagcatgtcacggttcggttcggtgattttaccgcagtcgataatgtgagttttcgtattccgcgcggggagatattcggctttctcggctccaacggttgcggcaagaccacaaccatgaaggtcttgaccgggcttttgcccgcaagcgagggcacggcccggcttttcggacgtgaggttgacccgaaggatatcgatatacgccgccatgtcggctacatgtcgcaagcgttttcactttattcggaactgaccgttcatcagaaccttgagcttcatgccaggcttttcggcatggagccggatgtcacggcgcggcggataaaggaactgacggcgcgtttcgaccttgcggatgtgatggatgaattacccgatgccatgccgcttggcattcgccagcgcctgtcgctggctgtggcgctgattcattcgccggatatcctgatcctcgatgagccgacgtcaggtgtcgatcccgtggcgcgggatgccttctggcaaatccttgcggatttgtcgcgccgggacaatgtgacaatttttgtctccacccacttcatgaacgaggcggagctttgcgatcgcatctcgcttatgcacgcgggcaaggtgctgatcagcgatacgccgaaggcaattaccgaaagccgcaatgcggccacgctggaagacgcctttgtcgcctttttgcaggatgcgatcggcgagggtgaacaatccgcgccgcaaaagattgaaaaagatagtgcggagccgaaggcgcaacaccgaaaggcatggccaagctggctgccgaacctgcgccggatgtttgcctatacgcggcgtgaggcgctggaactgaaacgtgatccgatacgggccacgcttgccattctgggcagcgtcattctcatgttcgttatcggctacggcatcaatctcgacgtcgagaagctgacatttgcggttcttgaccgcgatgatacgacgatcagccgcgaatatacgcagcagatcgcgggatcgcgctatttcatcgaaaagccgccgatcaccgattatgacgatctcgaccggcgaatgcgcgaaggcgaaatcagcctcgccattgaaataccgccgaatttcgcagctaatgtcatgcggggggcggcaggttga

SEQ ID NO: 27217 - protein, 587 aa, Brucella melitensis 16M
MPTSATASRLIRALPICRKGLARTFIPRFRCSRILISSGGSLATTGRNGECRIADLLARTGMSAFANRPAGKLSGGMKQKTSLCCSLIHDPDLLILDEPTTGVDPLSRRQFWELIDDIRKDRPGMSVIVATAYMEEAERFDWLVAMNDGQILATGTPQELLERTDTPNLDAAFIALLPEEQRRGHREIHIPPRAPASDTAIAIEAEHVTVRFGDFTAVDNVSFRIPRGEIFGFLGSNGCGKTTTMKVLTGLLPASEGTARLFGREVDPKDIDIRRHVGYMSQAFSLYSELTVHQNLELHARLFGMEPDVTARRIKELTARFDLADVMDELPDAMPLGIRQRLSLAVALIHSPDILILDEPTSGVDPVARDAFWQILADLSRRDNVTIFVSTHFMNEAELCDRISLMHAGKVLISDTPKAITESRNAATLEDAFVAFLQDAIGEGEQSAPQKIEKDSAEPKAQHRKAWPSWLPNLRRMFAYTRREALELKRDPIRATLAILGSVILMFVIGYGINLDVEKLTFAVLDRDDTTISREYTQQIAGSRYFIEKPPITDYDDLDRRMREGEISLAIEIPPNFAANVMRGAAG

SEQ ID NO: 27218 - DNA, 1464 bp, Schizosaccharomyces pombe 972h-
  CDS (1)..(1464)
atggcgtcttttgtcaaatttgccaatacgacattcttagatgcgcgatttccccttttcaagaatgtgtcttttgaactagctcgaaagcaaaattgggccattattggaaacactggaagtggtaggactacattcttgcgctgtatacaaggttcctttacaccctcaccctccactagtttttcatatccattcttgaaaggcaaatctgatagcccatggcaagcaatccaattgcttgattttaaaagttctggacagcagcgtgccgcatactactctgaaagatatcattcctttagagacaaagaacatgacactacattggagaagtggcttttgggcgcttatcgagggaatgagaagtttgcttctcaacatgtacaagaggccgcatctatgactcagttatctcatttacttccttcgagtttaataaatttgagcaatggacaatctagaagagcgatgcttgcatcgaaacttgtgcaaaggccgcagcttcttttacttgatgaaccttacgctggacttgatgttacttcaagatctgttttgtcttcacttttaggtgaaatgtcaaaccattgttcgccaaagattgtactttccttacgtcctcaggacaaaattcccgactttatcacacatgtattggaattgaaaaataaaaaaatcacatatcaagggcccaaggaacagtatattcctatgaccagtcactcaactaacatacctgtcaagccccagatgaaaaaaagcaagcctattacaataggcaagcctttaatttccatggaacatctcaactgtgtttactggggacgaaaagtactctctgacataaattggactattagagaaggagaaagatgggctttaacaggtagcaatggaagcggtaaaactacacttttagcatatgtagttggagaccaccccaagttatttgctagcaatattaaattttttggaaaaagcattgggcccggcactggaatttctatattcgatatccaagaaaacatagggcattgttctccagagatacacaatcatttcccgaagcaacatacatgctttgaagctcttcttagcgcctggagcaccacctttaccatcccaaagttaaccgaaactcggttggcagcaattagtagcatcttagaggaatttgaactaaaggatattaaagataaaccattaagcagtatctcggttggcatgcagagatttattttgttttgtcgtgctattgtcaaacaacctcgcttagttgttttggacgagcctttccagggagtagataccaaatatgtccatatggcgcataattacttaaatgaaaagctctctccttcccaagccatggttataatttctcattacgaagatgaactccctgcctgcgtaaatagaagggctcacattgataatggaaaacttgtcatacatgcttga

SEQ ID NO: 27219 - protein, 487 aa, Schizosaccharomyces pombe 972h-
MASFVKFANTTFLDARFPLFKNVSFELARKQNWAIIGNTGSGRTTFLRCIQGSFTPSPSTSFSYPFLKGKSDSPWQAIQLLDFKSSGQQRAAYYSERYHSFRDKEHDTTLEKWLLGAYRGNEKFASQHVQEAASMTQLSHLLPSSLINLSNGQSRRAMLASKLVQRPQLLLLDEPYAGLDVTSRSVLSSLLGEMSNHCSPKIVLSLRPQDKIPDFITHVLELKNKKITYQGPKEQYIPMTSHSTNIPVKPQMKKSKPITIGKPLISMEHLNCVYWGRKVLSDINWTIREGERWALTGSNGSGKTTLLAYVVGDHPKLFASNIKFFGKSIGPGTGISIFDIQENIGHCSPEIHNHFPKQHTCFEALLSAWSTTFTIPKLTETRLAAISSILEEFELKDIKDKPLSSISVGMQRFILFCRAIVKQPRLVVLDEPFQGVDTKYVHMAHNYLNEKLSPSQAMVIISHYEDELPACVNRRAHIDNGKLVIHA

SEQ ID NO: 27220 - DNA, 1734 bp, Corynebacterium glutamicum ATCC 13032
  CDS (1)..(1734): transl_table=11
atgaccaccaacatcccacaaacccccaaccacgagggtgaacagccactgctcgagctgaaggatctaaagatttccttcacctcctccaccggtgttgtcgacgctgtccgtggcgcaaacctcaccatttatcctggccaatctgttgccatcgtgggtgaatccggttcaggtaaatcgaccacggcaatgtcgatcatcggtctgcttccaggcaccggcaaagtgaccgaaggttccatcatgtttgatggccaagacatcacaggcttgagtaacaagcagatggaaaagtaccgcggttcagaaatcggactggtcccccaggatccgatgaccaacttgaacccggtgtggcgcatcggcacccaggtcaaggaatccctccgagccaaccacgtggttccaggctcagagatggacaagcgcgtggcagaagttctggccgaggcaggtcttcctgatgctgagcgtcgcgcaaagcagtacccacatgagttctctggcggtatgcgccagcgcgcactgatcgccattggtttggcggcacgcccgaagctcttgatcgccgacgagcccacctctgcgctggatgtcaccgtgcagcgccaaatccttgatcaccttgaaacactgaccaaggatctcggcaccgcagtgctatttattacccacgacttgggccttgccgctgagcgcgcggagcacctcgtggtgatgcaccgcggacgcatcgtggagtccgggccatcattgaagattctgcgcaatccacagcacccatatacccaacgcttggttaaggctgcgccgtctctggcttctgcacgtattcaaagtgcgcaggaacaaggcattgaatctgcagaactgctctctgcaacggccgttgctgagggcactattccagagatggaagaaaaagttatcgaggtgaaaaacctcacccgcgaatttgatatccgcggtgcccgtggcgataagaagaagctgaaggccgttgatgatgtgtccttcttcgtacgtaaaggcaccaccaccgcacttgtgggtgaatccggttcgggtaaatccaccgtggccaacatggtgctcaaccttctcgagccaaccagcggagaggtgctctacaacggcaccgatcttacgtccttgagccacaaggaaatcttccaaatgcgacgcaaactgcaggtggtgttccagaacccctacggctcgcttgatccgatgtactccatctaccggtgtattgaggaaccgctgaccatccacaaggttggtggagaccgcaaggcacgcgaagctcgcgtcgctgaacttctcgatatggtgtccatgcccaggtccaccatgcgccgctaccccaacgagctttccggtggccaacgtcagcgcatcgccatcgcccgtgcattggcactgaatccagaagtgatcgtgttggatgaagcggtttccgctttggacgtgttggttcagaaccagatcctcaccctgcttgcagaacttcagcaggaactgaagctcacctatttgttcatcacccacgacttggccgttgttcgacaaaccgccgacgatgttgtggtgatgcaaaagggacgaatcgttgaaaagggtcgtaccgacgacatcttcaacgatcctcagcagcactacacccgcgatttgatcaatgcggtacctggtctgggaatcgagttgggtactggagaaaacctggtttaa

SEQ ID NO: 27221 - protein, 577 aa, Corynebacterium glutamicum ATCC 13032
MTTNIPQTPNHEGEQPLLELKDLKISFTSSTGVVDAVRGANLTIYPGQSVAIVGESGSGKSTTAMSIIGLLPGTGKVTEGSIMFDGQDITGLSNKQMEKYRGSEIGLVPQDPMTNLNPVWRIGTQVKESLRANHVVPGSEMDKRVAEVLAEAGLPDAERRAKQYPHEFSGGMRQRALIAIGLAARPKLLIADEPTSALDVTVQRQILDHLETLTKDLGTAVLFITHDLGLAAERAEHLVVMHRGRIVESGPSLKILRNPQHPYTQRLVKAAPSLASARIQSAQEQGIESAELLSATAVAEGTIPEMEEKVIEVKNLTREFDIRGARGDKKKLKAVDDVSFFVRKGTTTALVGESGSGKSTVANMVLNLLEPTSGEVLYNGTDLTSLSHKEIFQMRRKLQVVFQNPYGSLDPMYSIYRCIEEPLTIHKVGGDRKAREARVAELLDMVSMPRSTMRRYPNELSGGQRQRIAIARALALNPEVIVLDEAVSALDVLVQNQILTLLAELQQELKLTYLFITHDLAVVRQTADDVVVMQKGRIVEKGRTDDIFNDPQQHYTRDLINAVPGLGIELGTGENLV

SEQ ID NO: 27222 - DNA, 1644 bp, Corynebacterium glutamicum ATCC 13032
  CDS (1)..(1644): transl_table=11
atgactactcccttgttagagatcaacgatctggttgtctcctatcaaactgctaaaggtttggtgcatgctgtcaacaatgtcagcctggaggtgcaccctggccaaatcaccgcgattgttggtgagtccggttctggtaagtccaccaccgctcaggccgtgattggtttgctggctgataatgctgaagtggattctggtcggatttctttcaacggccgttcccttgttggcttgaacgcacgtgagtggaaaaacgttcgcggtaccaaaattggtttgattccgcaggaccccaacaactctctgaacccggtgaaaactatcggcgcttcagtgggggagggcttggctatccacaagcgtggaaccgccgccgagcgcaaaaagaaggtcattgagcttctagagcgcgtgggtattgataacccagaggtccgctatgaccagtacccgcatgagctgtctggtggcatgaagcagcgcgcgttgattgccgctgccattgcacttgaaccagagctgatcattgccgatgagcccacatctgcgctggatgtgaccgtgcagaaaattattctcgatctgctggaagacatgcagcgtgaattgggcatgggtattttgttcattactcacgatctagccgtggcaggcgatcgggcggatcgcatcgtcgtcatgcaaaaaggcgaggtgcgcgaaagtggttacgcggcttcggtcttgaccgacccccagcatgagtattccaagaagttgcttgccgacgcgccctccctcaccatcggcgagatccccacgcgagttccggccgtagatccggaggtagcgcaggccaaaggcccgcttctggtagtggataaattccgcaaggaacaccaacgaggcaaagaaggagcatttgttgccgcaaatgatatttccttcgaagtactgcctggcaccacgcatgccatcgtcggtgaatccggttctggtaaaaccacgcttggccgcgcgatcgcgatgtttaatacgccgacctctggttccatttcagtaagtggcaaggacatcaccaacctgtccaaggcccagcagcgggaactgcgccagcaaatccagctggtgtaccaaaacccgtattcttccctggatcctcgccaaaccattggctccaccatcgcggaacctctgcgcaatttcaccaaggtgagcaagcaggaagccgacgaaaaggtggcacactacctggaactggtggcgcttgacccggctcttgccacccgtcgcccacgtgagctctctggtggtcagcgccagcgcgtcgccattgctcgtgccatgattttggaacctgaattggtggttttcgacgaagccgtatccgcgttggatgtgactgtgcaggcacaaatcctgcgcctgctcgacgatctgcaacgagagctaggcttgacttacgtgtttatttcccacgacctggctgtggtccgtgaaatctctgacactgtgtctgtgatgagtcgcggcaaccaggtggaacttggaaaaaccgcagaagtatttaacaacccgcaaaccgatttcactcgccgactcatcgacgcgatcccaggatcgcgctatcgtggtggcgaactcaatcttggactatag

SEQ ID NO: 27223 - protein, 547 aa, Corynebacterium glutamicum ATCC 13032
MTTPLLEINDLVVSYQTAKGLVHAVNNVSLEVHPGQITAIVGESGSGKSTTAQAVIGLLADNAEVDSGRISFNGRSLVGLNAREWKNVRGTKIGLIPQDPNNSLNPVKTIGASVGEGLAIHKRGTAAERKKKVIELLERVGIDNPEVRYDQYPHELSGGMKQRALIAAAIALEPELIIADEPTSALDVTVQKIILDLLEDMQRELGMGILFITHDLAVAGDRADRIVVMQKGEVRESGYAASVLTDPQHEYSKKLLADAPSLTIGEIPTRVPAVDPEVAQAKGPLLVVDKFRKEHQRGKEGAFVAANDISFEVLPGTTHAIVGESGSGKTTLGRAIAMFNTPTSGSISVSGKDITNLSKAQQRELRQQIQLVYQNPYSSLDPRQTIGSTIAEPLRNFTKVSKQEADEKVAHYLELVALDPALATRRPRELSGGQRQRVAIARAMILEPELVVFDEAVSALDVTVQAQILRLLDDLQRELGLTYVFISHDLAVVREISDTVSVMSRGNQVELGKTAEVFNNPQTDFTRRLIDAIPGSRYRGGELNLGL

SEQ ID NO: 27224 - DNA, 1524 bp, Thermoanaerobacter tengcongensis MB4
  CDS (1)..(1524): transl_table=11
atgggtgccccgcttatagagcttgtaaacgtcaataaaagtttctctggtgtgcaggtgttgttcaatgtcaattttagggtatatcctaaagaaattcactgtttggtaggagaaaacggagcaggcaaaagtaccctgatgaagattttaagcggggtctacccttatggcgaatatgaaggagaaatcctcatagagggtaaccctgtgagatttttcagcataaaagacagtgaaagggctggaatttctataattcatcaggagttgtctcttgttccagagatgacagtgtatgaaaacgtatttttgggaaacgaaatcagaaaaggtgcagtggtcgatgtaatggaggaaatagttaggacaaaggaattgcttaaaaaagtcaaaggagaagaaatcagcccaacagcgaaagctaaggatttgagtgtcagcatgcagcagctggtagagatagcaaaagctctttcaaaaaatccaaaagtcctcatattggatgaacctacttctgcccttagtgaaacagaaagtgagaatctactctctctcttgaaagaacttaaagagcagggagtgacgataatactcataagtcacaggttaaaggaagtattaaaagttgcggattctataacggtattaagagacggaaggactgtagcttattttgactgtaaaaaagaagaagtagacgagcaaaagataataaagcacatggtggggagggagataacaaacctgtaccctcctcccctctctaagccttctgatgaggttgtaatggaagtaaaaaactggagtgttgtcgacccaaagacagggcggtatcttgtgaaggatgtgaatttaaaggttagaaaaggagaaatagttgggctatttggtttagtaggggcaggtcgtacagaactggggcttagcctttttggcaatccttacaggtattttgtgcagggagagatatttttaaacggccaaagggttcatttcagaaaaccagcagatgctataaggtataaattgctatacctcacagaggacagaaaacaaaaagggctgattctcataaacacggtcaaagaaaacattacgctttcaaacttaaagactttgacgaagcagatggttatagatgagctggaggaaatagctgttgcacagaatttccaaaaaaaattgggaataaaggctaggcatgtagaggtgaaggtgtctacgctaagcggtgggaatcagcagaaggttttagtggccaaagggctttttgttgagcctgaggtgataatactggatgaacctactagaggcgttgatgttggtgcaaagtacgaaatatacactttgataaggcaactggctatggaaggaaaggcaatcttacttatttcttcggagctgccagagatattggggttgagcgataggatatacgtcatgagcaaaggaaggataacaggagagctcaaaggagacgaagcaaatcaggaaaaagtaatggcctacgcagtcatctga

SEQ ID NO: 27225 - protein, 507 aa, Thermoanaerobacter tengcongensis MB4
MGAPLIELVNVNKSFSGVQVLFNVNFRVYPKEIHCLVGENGAGKSTLMKILSGVYPYGEYEGEILIEGNPVRFFSIKDSERAGISIIHQELSLVPEMTVYENVFLGNEIRKGAVVDVMEEIVRTKELLKKVKGEEISPTAKAKDLSVSMQQLVEIAKALSKNPKVLILDEPTSALSETESENLLSLLKELKEQGVTIILISHRLKEVLKVADSITVLRDGRTVAYFDCKKEEVDEQKIIKHMVGREITNLYPPPLSKPSDEVVMEVKNWSVVDPKTGRYLVKDVNLKVRKGEIVGLFGLVGAGRTELGLSLFGNPYRYFVQGEIFLNGQRVHFRKPADAIRYKLLYLTEDRKQKGLILINTVKENITLSNLKTLTKQMVIDELEEIAVAQNFQKKLGIKARHVEVKVSTLSGGNQQKVLVAKGLFVEPEVIILDEPTRGVDVGAKYEIYTLIRQLAMEGKAILLISSELPEILGLSDRIYVMSKGRITGELKGDEANQEKVMAYAVI

SEQ ID NO: 27226 - DNA, 1593 bp, Staphylococcus aureus subsp. aureus MW2
  CDS (1)..(1593): transl_table=11
atgtcaaatttattagaagtcaacagtctgaatgtacaattcaattatgatgaaactacagttcaagcggtaaaaaatgtctctttcgaattacgaaaaaaacatatcctaggtattgttggtgaatcaggatcaggaaaaagtattactgctaaatctattttagggctactaccagattatccagatcacacattaacaggagaaattatttttaatgggcaatcgttaaataatttatcaacttcagcgttacaacaaattcgaggtaaggatatttcaatgatttttcaagatccactctcttcgttgaatccaagattaacgattggcaaacaaattacagaagtactatttcaacataaacgtgtatctaaatctgaagcaaagtcgatgacaatagacattttagaaaaagtaggtataaaacatgcaactcgacaatttgatgcttatccacatgaactttctggtggtatgcgtcaacgtgtcatgatagcaatggcattgattttaaagccacaaattttaatcgcagatgaaccaacaacggcattagatgccagtacacaaaatcaattactgcagttaatgaagtccctttatgagtacacagaaacatctattatttttatcactcacgatttaggcgctgtgtatcaattttgcgacgatgtgattgtaatgaaagatggaagtgtcgttgaaagtggcacggttgaaagtatttttaaatcgccacaacatacctatacaaaacgcttaatagatgcgattcctgatattcatcaaacgcgtccgccaagaccgttaaacaatgatattttattaaaattcgatcgcgtgagcgtggattacacatcaccgagtggcagcctataccgagcagttaatgatattaacttgggtattagaaaaggcgaaacattaggcattgtcggtgaatcagggtcagggaaatcgacattagctaagacggtcgtcggtctaaaggaagtgtcagaaggctttatttggtataacgaattaccattaagtttatttaaagatgatgaattgaaatctttacgacaagagatacaaatgatttttcaagatccattcgcatctattaatccaagatttaaagtcattgatgtgattaaacgaccactaatcattcatgggaaagtcaaagataatgatgacattattaaaactgtcgtatcgttgttagaaaaggttggcctagatcaaagtttcttatatcgctatccacacgaattatctggtgggcaacgtcagcgtgtaagtatcgcgagagcacttgctgtagaacctaaagtgattgtttgcgacgaggcagtgtccgctttagacgtttcaattcaaaaagatatcatcgagttattaaaacaattacagttagacttcggcatcacttatttattcatcacacatgacatgggtgttatcaatgaaatatgtgatcgcgttgcagttatgaaaaatggcgaaatcgttgaactgaataacacagaagatattatcaaacatccgcaatcagactatgcaaagcaacttatttcagaagtagcagttattgctaaataa

SEQ ID NO: 27227 - protein, 530 aa, Staphylococcus aureus subsp. aureus MW2
MSNLLEVNSLNVQFNYDETTVQAVKNVSFELRKKHILGIVGESGSGKSITAKSILGLLPDYPDHTLTGEIIFNGQSLNNLSTSALQQIRGKDISMIFQDPLSSLNPRLTIGKQITEVLFQHKRVSKSEAKSMTIDILEKVGIKHATRQFDAYPHELSGGMRQRVMIAMALILKPQILIADEPTTALDASTQNQLLQLMKSLYEYTETSIIFITHDLGAVYQFCDDVIVMKDGSVVESGTVESIFKSPQHTYTKRLIDAIPDIHQTRPPRPLNNDILLKFDRVSVDYTSPSGSLYRAVNDINLGIRKGETLGIVGESGSGKSTLAKTVVGLKEVSEGFIWYNELPLSLFKDDELKSLRQEIQMIFQDPFASINPRFKVIDVIKRPLIIHGKVKDNDDIIKTVVSLLEKVGLDQSFLYRYPHELSGGQRQRVSIARALAVEPKVIVCDEAVSALDVSIQKDIIELLKQLQLDFGITYLFITHDMGVINEICDRVAVMKNGEIVELNNTEDIIKHPQSDYAKQLISEVAVIAK

SEQ ID NO: 27228 - DNA, 1497 bp, Yersinia pestis KIM
  CDS (1)..(1497): transl_table=11
atgactcaggccaccgcatttatcactcttgaaaatatcagcaagcgattccctggcgtattagcgctggatggggtgaatctcacgttgaacaaaggagaagtgcactgtctggcaggccaaaatggctgcggcaaaagcaccattatcaaagtgatttcaggagtttatcagccagagaaaggcgcaagtatcctgatagacggcaagctgcttcatcagcttacgccgcaactctcattctattatggcgtgcaggtgatttatcaagatctgtcgctattcccgaatttaaccgtagcagaaaatattgccgtccaccgttatctgcccggcggagatttttgggtaaaacgtaaaagtatgcgtgaacgggcgctggcggcgatgcagcgcgtcggggtgacgctggatctggataaaaaagttgaacagctctctattgctgaccgccaattagtggcaatttgccgtgctatcgccgccgatgcccgcttggtgattatggatgagccaacagcctcactcaccagccaggaagtcaaaggcttgttgaatgtggtccgtgacctgaaatcacaaggcatttgtgtggtgtttgtcagccaccgtctggatgaagtgatggaagtggccgatcggatcagcgtgatgcgcgatggcaaatgggtcgggacctggcaagccagcgagttagacagccatgaactggcgtttctaatgacgggccagcgcttcacttaccgtccgttaccgccgttggcggccaaagcggcaccgctgctggagatcaggaaactgagccgtggtgagcagttccgtaatatcgatctgacgttacatcagggtgaaattgtttctatcaccggtttgctgggggcagggagaacggagttatgcctcagtctgttcggtatgacgcaacccgaaagcggcgaaatattcgtggccggtgagccggtgcgttttcgtcataaccgtgatgcgatccgccatggcatcggttatgtctctgaggatcgcctgactcaggggttgatcatggagcagtcgatctatgacaacactatcgtgtcagtttttgaccaattacacacccgcagtggcttgctggatcacagcaaggccgccgcactggtaaataagctggtgcaggacctgaatatcaaagtctcggacaccgcgctgccggtgaaaaccttgtctggcggtaatgctcagcgcattgctattgccaaatgggtcgcgacacaaccgcgtattttgatccttgattcgcctaccgtcggtgtcgatatcgccaacaaagaagggatttaccatattgccaaggcattggcagagcaagggatggcggtattgatgatttgcgatgagatcccagaggcgtattacaacagccaccgggtgctggtgatgcgtaaaggcgaattgatcgccgagttttatcctcatcagtgtaccgaacaacagatcgccgaggtggtcaatggataa

SEQ ID NO: 27229 - protein, 498 aa, Yersinia pestis KIM
MTQATAFITLENISKRFPGVLALDGVNLTLNKGEVHCLAGQNGCGKSTIIKVISGVYQPEKGASILIDGKLLHQLTPQLSFYYGVQVIYQDLSLFPNLTVAENIAVHRYLPGGDFWVKRKSMRERALAAMQRVGVTLDLDKKVEQLSIADRQLVAICRAIAADARLVIMDEPTASLTSQEVKGLLNVVRDLKSQGICVVFVSHRLDEVMEVADRISVMRDGKWVGTWQASELDSHELAFLMTGQRFTYRPLPPLAAKAAPLLEIRKLSRGEQFRNIDLTLHQGEIVSITGLLGAGRTELCLSLFGMTQPESGEIFVAGEPVRFRHNRDAIRHGIGYVSEDRLTQGLIMEQSIYDNTIVSVFDQLHTRSGLLDHSKAAALVNKLVQDLNIKVSDTALPVKTLSGGNAQRIAIAKWVATQPRILILDSPTVGVDIANKEGIYHIAKALAEQGMAVLMICDEIPEAYYNSHRVLVMRKGELIAEFYPHQCTEQQIAEVVNG

SEQ ID NO: 27230 - DNA, 1515 bp, Yersinia pestis KIM
  CDS (1)..(1515): transl_table=11
atgactcatatttctgatgttgatagagacgtgccgcttatcacgttaaaagcgctgtccaaaagctttggcggtcatcaggcactgaaaaatatcacgttgacgttgaataaaggcgaagttcactgtctggccggggctaatggttgcggaaaaagtacgctgattaagacgattagtggcgtttatgccccagatgacggcagtgaaattatcattgatgaaaaatcttatcaccgcctgacgcctgatcgcgcacgcgctttgggcgtacaggtgatttatcaagacctttcgctgttccctaacctgacggtagccgaaaatattgccttcgaatataacttgaaaggttacttcggctggttcaacaagcagaaaatcaaacaaaaagcctgccagatcttgcatgaactggcttttagtctcgatcccgatgcgctggtacaacatttacccattgcccaacgccagcaggtggctatctgccgtgcgttggttgccgatgcgcgcttggtgattatggatgagcctaccgcctctttgacgcgcaccgaagtgaatcaattattacgcacagtaaattacctgcgagataagcacattaccgtggtcttcgtcagccaccgattagatgaagtgaaagagatttcggatcgcattacggtgatccgcgatggcgaaaaagtggggacctggccagccactgagctttctaccgggcgtattaccgagttgatgaccggcctgaccctcacccacgagcagaaattacccaatgccgaattaggcaaagtggtgctgcaactggaaaacctaagccgtaaagggcaattcgacgatatctcgtttagcctgcatcgcggcgaagtgctcggcctgtgtggtttgctggggtccgggcgaaccgaattggcccttagcctatttggcatcacccatcctgatagcggcaagattaccattgacggtaacccggggtgcattaaagacaatacccgtgccattgagctaggtattggctatgtatctgaagatcgcctgaccctcggtgccgtattgcaacaatctatcgccgacaacatggtgctgtcgattctgcaacgcatccgtactccactttatctggttgatgacgctaaacagaacgcgctggtgcaagaatgggtgaaggatttggacatcaaaatcacggatgctgataacgcgctgtcaacattgtcagggggcaatcagcaaaaagtggtgctggcaaaatggatcctaaccaaaccgaaagtgttaattctcgattcacctactgtgggggtcgatatcggtgccaaagacagtatttacaagctgatccatcgtctctccggggtgggtatctcggtgttgctgctctctgatgaaatccccgaagcctattacaactgcgatcgcatcctgcatatgcagcaggggcgtatcgtcaatgaactgatcccgaatcaaatgactgaacaacagctggcggaggtcatcaatggctaa

SEQ ID NO: 27231 - protein, 504 aa, Yersinia pestis KIM
MTHISDVDRDVPLITLKALSKSFGGHQALKNITLTLNKGEVHCLAGANGCGKSTLIKTISGVYAPDDGSEIIIDEKSYHRLTPDRARALGVQVIYQDLSLFPNLTVAENIAFEYNLKGYFGWFNKQKIKQKACQILHELAFSLDPDALVQHLPIAQRQQVAICRALVADARLVIMDEPTASLTRTEVNQLLRTVNYLRDKHITVVFVSHRLDEVKEISDRITVIRDGEKVGTWPATELSTGRITELMTGLTLTHEQKLPNAELGKVVLQLENLSRKGQFDDISFSLHRGEVLGLCGLLGSGRTELALSLFGITHPDSGKITIDGNPGCIKDNTRAIELGIGYVSEDRLTLGAVLQQSIADNMVLSILQRIRTPLYLVDDAKQNALVQEWVKDLDIKITDADNALSTLSGGNQQKVVLAKWILTKPKVLILDSPTVGVDIGAKDSIYKLIHRLSGVGISVLLLSDEIPEAYYNCDRILHMQQGRIVNELIPNQMTEQQLAEVING

SEQ ID NO: 27232 - DNA, 1557 bp, Yersinia pestis KIM
  CDS (1)..(1557): transl_table=11
ttgacatttttcgtctttccgcttatccctaacatctttactacgttgcaaaatatgggaaagatgatgtctgagttgcaaatatcgcaaggttgttttcgcctgagtgacacacagacactcatcttgccagcgctacatatccaggcgggtgactgttgggcatttgtcggggccaatggcagtggtaaatctgcgttagccaaggccctgtctggagaactggccctgctggagggcagccgccaaagccacttccgccatggtgtgcgtttatcattcgaacaactacagcaactggtcaatgaagagtggcaacgtaataataccgacctgctcagtgctgatgaagatgacactggccgtactaccgccgaaattattcaggaagcggcccgtgacccgcagcgctgtcaacaactggcagcgctatttggaatcagccacttgctttctcgccgcttcaaatacctttctacgggggaaacccgtaaaacattgctgtgtcaggcgctgatgccgcaaccggacctgctgattctggatgagccctttgatggcctggatgtcgcggctcgggcgcagttagccgagatgctatccacactttcggcccaaggcgtcaccctggtattggtcctcaaccgctttgatgatatccctgattttgtgcagtacgttggcgtattggctgattgccacctgacccacatggggccgcgccagcagattctgtcggaagcgttaattgcccaattggcacacagtgaaaatctggatgggctgtcactgccggaaacggaggatccacagcaccacctacgaataccgaaaaatgaacccttgatcatactgaatgacggggtggtggagtacaacgaccgccctatcctgcataacctgagctggcaagtgaaccccggtgaacactggcagattatcggccagaatggtgcagggaaatccaccttactcagcctgataactggcgaccatccccaaggatacagtaatgatttaacgctgtttggccgccgccgtggcagtggtgaaaccatctgggacatcaaacgccatattggttatgtcagcggcagcctccatctggactaccgggttagcacccgtgtacgtaccgtgattttatccggttttttcgattcgattggtctttaccaagcagcctctgatcgtcaacaacaattagcagatcaatggctgtctttactggggttttccacctccgtcgccaaccaacctttccacagcttatcttgggggcaacagcgtctggtcttgatcgcccgagcattggttaagcacccagcgctcctgatcctggatgaacccttacaagggctggatccgcttaaccgtttgttagtgcgccgttttattgatgtgatgatcggtgaaggagaaacccaattattgttcgtttctcaccatgccgaggatgcaccccagtgtattacgcaccgcttaacctttgtgccatttggcgatatttatcactatcaacaagaaaaatcaccaagccaaccacaggtaaaataa

SEQ ID NO: 27233 - protein, 518 aa, Yersinia pestis KIM
MTFFVFPLIPNIFTTLQNMGKMMSELQISQGCFRLSDTQTLILPALHIQAGDCWAFVGANGSGKSALAKALSGELALLEGSRQSHFRHGVRLSFEQLQQLVNEEWQRNNTDLLSADEDDTGRTTAEIIQEAARDPQRCQQLAALFGISHLLSRRFKYLSTGETRKTLLCQALMPQPDLLILDEPFDGLDVAARAQLAEMLSTLSAQGVTLVLVLNRFDDIPDFVQYVGVLADCHLTHMGPRQQILSEALIAQLAHSENLDGLSLPETEDPQHHLRIPKNEPLIILNDGVVEYNDRPILHNLSWQVNPGEHWQIIGQNGAGKSTLLSLITGDHPQGYSNDLTLFGRRRGSGETIWDIKRHIGYVSGSLHLDYRVSTRVRTVILSGFFDSIGLYQAASDRQQQLADQWLSLLGFSTSVANQPFHSLSWGQQRLVLIARALVKHPALLILDEPLQGLDPLNRLLVRRFIDVMIGEGETQLLFVSHHAEDAPQCITHRLTFVPFGDIYHYQQEKSPSQPQVK

SEQ ID NO: 27234 - DNA, 1542 bp, Bifidobacterium longum NCC2705
  CDS (1)..(1542): transl_table=11
atgacagataaaaaccccatcgtcgtaatgaaaggcattacgattgaattcccgggcgtcaaggccttggatggtgttgatttgactctctacccgggcgaagttcacgccctgatgggtgagaacggtgcaggcaagtccaccatgattaaggctctgaccggtgtgtacaagatcaacgccggctccattatggtggacggcaagcctcagcagttcaacggcaccctcgacgcacaaaacgccggtatcgccaccgtgtatcaggaagtgaacctgtgcaccaacctttccgtcggtgagaacgtgatgctgggccacgaaaagcgcggccccttcggcatcgactggaagaagacccacgaggccgccaagaagtatttggcacagatgggcctcgaatccattgacccgcacactccgctgagctccatctccatcgctatgcagcagctggtcgccatcgcccgcgctatggttatcaacgccaaggtgctgattctcgatgagccgacctcttcgctggatgccaacgaggtcagggacctgttcgcgatcatgcgcaaggtgcgtgactcgggcgtggccatcctcttcgtctcccacttcctcgatcagatttatgagattaccgatcgtctgaccattctgcgtaacggccagttcatcaaggaggtcatgaccaaggacaccccgcgcgacgaactcatcggcatgatgattggtaagtccgccgccgagctgtcccagattggtgccaagaaggctcgccgtgaaatcacccctggcgagaagccgatcgtcgatgtcaagggcctcggcaagaagggcaccatcaacccggttgatgttgacatctacaagggtgaggtcgttggcttcgctggcctgctgggctccggtcgtaccgagcttggtcgactcctgtatggtgccgacaagccggattcgggtacctacacgctcaacggcaagaaggtcaacatctccgatccgtacacggctttgaagaacaaaatcgcgtactccaccgaaaaccgtcgtgatgagggcatcatcggcgacctgaccgtccgccagaacatccttatcgccctgcaggcaacgcgcggtatgttcaagccgattcccaagaaggaagcggacgccatcgttgacaagtacatgaaggaactcaacgttcgtcccgccgacccggatcgcccggtcaagaatctctccggcggcaaccagcagaaggtgctcattggccgttggctggccacgcaccccgagctgctgattctggacgagccgacccgtggtatcgatatcggtgccaaggctgaaattcagcaggtcgtgcttgacctggcttctcagggcatgggcgttgtcttcatctcctccgagcttgaagaggtcgtgcgtctgtccgacgacatcgaggttctcaaggaccgccacaagatcgcagaaatcgaaaacgacgacaccgtctctcaggcgaccatcgtcgaaaccatcgctaacaccaacgtaaacaccggaaaggaggcatga

SEQ ID NO: 27235 - protein, 513 aa, Bifidobacterium longum NCC2705
MTDKNPIVVMKGITIEFPGVKALDGVDLTLYPGEVHALMGENGAGKSTMIKALTGVYKINAGSIMVDGKPQQFNGTLDAQNAGIATVYQEVNLCTNLSVGENVMLGHEKRGPFGIDWKKTHEAAKKYLAQMGLESIDPHTPLSSISIAMQQLVAIARAMVINAKVLILDEPTSSLDANEVRDLFAIMRKVRDSGVAILFVSHFLDQIYEITDRLTILRNGQFIKEVMTKDTPRDELIGMMIGKSAAELSQIGAKKARREITPGEKPIVDVKGLGKKGTINPVDVDIYKGEVVGFAGLLGSGRTELGRLLYGADKPDSGTYTLNGKKVNISDPYTALKNKIAYSTENRRDEGIIGDLTVRQNILIALQATRGMFKPIPKKEADAIVDKYMKELNVRPADPDRPVKNLSGGNQQKVLIGRWLATHPELLILDEPTRGIDIGAKAEIQQVVLDLASQGMGVVFISSELEEVVRLSDDIEVLKDRHKIAEIENDDTVSQATIVETIANTNVNTGKEA

SEQ ID NO: 27236 - DNA, 2433 bp, Bifidobacterium longum NCC2705
  CDS (1)..(2433): transl_table=11
atgaccgttgcaccccattccttcgacgccgacgagttccacgattctgccgaacctcacgcttccgccgagcctgcctcccccgccgccgtgctcaaggacattcgtttcagctatgaccgcggcacctcatgggctttggatggcgtttcactcacggtccatgccggcgagcgcctatgcttggtcggtccgaacgggtcgggcaaatccacgttagcccgtctgattgcgggattgaccgcgccggacggtggtgaagtgacgttactggggcaacgcgtgtacgcagccggcccgaatgccgatgcctatcgtgctgcccgccacggcatcggtatggtgttccagaatcccgaggatcagctggtcaccaccgtgttggaggatgacgtggcctttggcccggagaatctcgggctggagcgcgagctcatcggcgagcgtatcgttgattcattgcaggccgtggggttggcgaacttacgccagtccgacccgacccgtatgagcggcgggcagcagcaacgcgcctccatcgccggcatgctggccatgaacccggcaatgctggtattggatgagccgaccgccatgctggacgaatccgcacgcgccgaagttatgcgcattttggatgatttgcaggcgcgcggcaccactattgtgcatgtcacgcatcatccagatgaaaccgttcatgccgatcgcatcgtgcacatggaggccgggcgaatcattggtatcactgcagccgtcgataatcgatccccgctagcggaggctgtctcgcaaagcgagactgagggtagtatcggcacagaagccgcccccagtcgccctacgaacgacagcccccgccagcgggagcgcgaagacggctccgaactgccgctgctctccgatggcatcggtgatatgacgaaccccattattcgcgtctcgcatctgacctatcgctatccttcggccaaacgggcggttatcgatgacctgtcgttcaccatcgcgcgcggtgaaaccgtggcactgatgggcgtgaatggttcgggcaagtcgacgctggtgcgcatgttgtgcgcactgactgcgccgaccgccggcagcatcgaagtggccggtgttccggtggcctcgaccggcaagcgcggtcgcaacgtgcgcccgaagtcggcgaatcgcaagcaattagcgcaattgcgccggcatgtgggttacgtgatgcagcatccagagcatcagctgttcgctgacacggtagccgaggacgtggcgtacggcccacgcaaccaagggcttggcgagaccgaggtagccgaccgcgtgcgcgaatcactggaactgctgcatatcgggcatcttgccgaccgctcccccttcgacctgtccggcgggcaacaacgattggcagccattgccggcgtgctggcttgcaatcctgacgtgctcatcatggacgagccgaccgcgagtctggacgcccaagccaagaagcgtatccatgagctgttgcgcacgctcaaatcgcgtggcgtgaccgtgctcatcatcacccatgaccgggaggaggccgagcaaatcgccgaccgcgtggtccgtatgccgattgccgcccccgcatccggcggccccgtcacggccaccgtcaccgagccggccgtatcctccaacggccctgcgcactcagtgatacaccgacttgacccgcgcgtgaagatggtgggcttcctggccgccatgttcacgatgttcgcggtgaacacgccaacccagctcgcgctgggcatcgccatcaccctggccgttatcgcggcggcacgcctgaacccgttacgggtgcttgaatccattcatccgattctgatcctgctggtgctgatgggcgtggtcaatctgtttgtggtacgcaccggcacgccggtggtggcgcttggcccgctaagcatcaccgatcagggcgtgaccatagccgtgctgtacgcctgccgtttcgcattggtaatcattctgggcgcggtgttcctcactaccaccacgcctaccgccatgaccgacgccttcgccaccttgatcagtccgctcaaccggctcggtatccatgcccaagaaatcgcgctggtcatgagtctggcattgcgattcattccaacgctgaccgacgaaacccgcgccatcgtcgacgcccaatccgcgcgtggcggttccatcgaaaccggttcactggcccagcgcatcaaggcgatgagcgcgattatcgtgccgattttcgccggcacgttgcgtcacgcggacaacctgagcctcgcacttgacgcccgctgctacgaggagggcatccgccgcacccactggcgtgccctgaccatcgccgcgcgagatctcatattcgccgctgccgtcatcatctacatcgcggccatcatcgcgctgtag

SEQ ID NO: 27237 - protein, 810 aa, Bifidobacterium longum NCC2705
MTVAPHSFDADEFHDSAEPHASAEPASPAAVLKDIRFSYDRGTSWALDGVSLTVHAGERLCLVGPNGSGKSTLARLIAGLTAPDGGEVTLLGQRVYAAGPNADAYRAARHGIGMVFQNPEDQLVTTVLEDDVAFGPENLGLERELIGERIVDSLQAVGLANLRQSDPTRMSGGQQQRASIAGMLAMNPAMLVLDEPTAMLDESARAEVMRILDDLQARGTTIVHVTHHPDETVHADRIVHMEAGRIIGITAAVDNRSPLAEAVSQSETEGSIGTEAAPSRPTNDSPRQREREDGSELPLLSDGIGDMTNPIIRVSHLTYRYPSAKRAVIDDLSFTIARGETVALMGVNGSGKSTLVRMLCALTAPTAGSIEVAGVPVASTGKRGRNVRPKSANRKQLAQLRRHVGYVMQHPEHQLFADTVAEDVAYGPRNQGLGETEVADRVRESLELLHIGHLADRSPFDLSGGQQRLAAIAGVLACNPDVLIMDEPTASLDAQAKKRIHELLRTLKSRGVTVLIITHDREEAEQIADRVVRMPIAAPASGGPVTATVTEPAVSSNGPAHSVIHRLDPRVKMVGFLAAMFTMFAVNTPTQLALGIAITLAVIAAARLNPLRVLESIHPILILLVLMGVVNLFVVRTGTPVVALGPLSITDQGVTIAVLYACRFALVIILGAVFLTTTTPTAMTDAFATLISPLNRLGIHAQEIALVMSLALRFIPTLTDETRAIVDAQSARGGSIETGSLAQRIKAMSAIIVPIFAGTLRHADNLSLALDARCYEEGIRRTHWRALTIAARDLIFAAAVIIYIAAIIAL

SEQ ID NO: 27238 - DNA, 1593 bp, Shigella flexneri 2a str. 301
  CDS (1)..(1593): transl_table=11
gtgttagtttccagtaacgtcaccatgcagttcggcagtaagccgttgtttgaaaacatttccgtcaaattcggcggcggcaaccgttacggcctgattggcgcgaacggtagtggtaaatccacctttatgaagattctcggcggcgaccttgagccgacgctgggtaacgtttccctcgatcccaacgagcgcattggtaagctgcgtcaggatcagtttgcctttgaagagttcactgtgctggatacggtgatcatggggcataaagagttgtgggaagtgaagcaggagcgcgaccgcatctatgctttgccggaaatgagtgaagaagacggctataaagtggccgatctggaagtgaaatacggcgaaatggacggttactctgcggaagctcgcgccggtgaactgttgcttggcgtgggaattccagtggaacagcactacggcccgatgagtgaagttgctcctggctggaagctgcgtgtgcttctggcgcaggcgctgtttgctgagccggatattctcctgctcgacgaaccgaccaacaacctcgacatcgacaccattcgctggctggaacaggtgctgaacgagcgtgacagcaccatgatcatcatctcgcacgaccgtcacttccttaacatggtctgtacccacatggcggatctggattacggcgagctgcgcgtttatccgggtaactacgatgagtacatgacggcggcgacccaggcgcgtgaacgtctgctggccgataacgccaagaagaaagcgcagattgctgagttgcaatctttcgttagccgctttagcgccaacgcctcgaaatctcgccaggcaacttcgcgcgcgcgccagattgataaaatcaaactggaagaggtgaaagcctccagccgtcagaacccgtttatccgttttgaacaggataagaaactgttccgtaacgcgctggaagtggaaggtctgaccaaagggtttgataacggtccactgtttaaaaatctcaacctgctgctggaggtcggtgaaaaacttgcggtactgggtaccaacggcgtcggtaaatcaacgctgctgaaaacgctggtgggcgatctgcaaccggacagcggcaccgtaaaatggtctgaaaacgcgcgcattggttactacgcccaggaccacgaatatgagtttgaaaatgatctgaccgtgttcgaatggatgagtcagtggaagcaggaaggcgatgacgagcaggcggtacgcagcattctcggtcgtttgctgttcagccaggacgacatcaaaaagccagctaaagtgctttccggtggggaaaaagggcggatgctgtttggtaagttaatgatgcagaagccgaacattctgatcatggacgaaccgaccaaccacctggatatggaatccatcgagtcactgaacatggcgctggaactgtatcagggcacgctgatctttgtttcacacgaccgtgagttcgtaagctccctggcgacccgcattctggaaatcaccccggaacgcgtgatcgactttagcggtaattacgaagattacctgcgtagtaaagggatcgagtaa

SEQ ID NO: 27239 - protein, 530 aa, Shigella flexneri 2a str. 301
MLVSSNVTMQFGSKPLFENISVKFGGGNRYGLIGANGSGKSTFMKILGGDLEPTLGNVSLDPNERIGKLRQDQFAFEEFTVLDTVIMGHKELWEVKQERDRIYALPEMSEEDGYKVADLEVKYGEMDGYSAEARAGELLLGVGIPVEQHYGPMSEVAPGWKLRVLLAQALFAEPDILLLDEPTNNLDIDTIRWLEQVLNERDSTMIIISHDRHFLNMVCTHMADLDYGELRVYPGNYDEYMTAATQARERLLADNAKKKAQIAELQSFVSRFSANASKSRQATSRARQIDKIKLEEVKASSRQNPFIRFEQDKKLFRNALEVEGLTKGFDNGPLFKNLNLLLEVGEKLAVLGTNGVGKSTLLKTLVGDLQPDSGTVKWSENARIGYYAQDHEYEFENDLTVFEWMSQWKQEGDDEQAVRSILGRLLFSQDDIKKPAKVLSGGEKGRMLFGKLMMQKPNILIMDEPTNHLDMESIESLNMALELYQGTLIFVSHDREFVSSLATRILEITPERVIDFSGNYEDYLRSKGIE

SEQ ID NO: 27240 - DNA, 1512 bp, Shigella flexneri 2a str. 301
  CDS (1)..(1512): transl_table=11
atgttcacggcaacagaggcagtcccggtagcaaaagtggtggcaggaaataagcgttaccccggcgtcgttgcgctggataacgttaacttcacgctcaataaaggcgaagttcgtgcgctgttaggtaaaaacggcgcgggcaaatcgactctcattcgaatgcttaccggcagcgaacgcccggatagcggtgatatctggattggcgagacgcgactggaaggtgacgaagctacgttgactcgccgtgccgctgaactgggggttcgtgcggtttatcaggaattaagtctggtggaagggctgacggtggcagaaaacctctgccttggtcaatggcctcgccgcaacggcatgattgattacctgcaaatggcgcaggatgcccaacgttgcttacaggcgctgggcgttgacgttagtcctgaacaacttgtttcaacgctaagcccggcgcaaaagcaactggtggaaattgcacgggtgatgaagggcgagccgcgcgtggtcattcttgatgaacccaccagctcgcttgccagtgcagaagttgaactggtgatcagtgcggtgaaaaagatgtcggcactgggcgtggcggtgatttatgtcagccaccggatggaagaaatccgccgcattgcctcctatgccaccgttatgcgcgatggtcaggtggcgggcgatgtgatgctcgaaaacacctccacgcatcatattgtgtcgctaatgctagggcgtgatcacgttgatattgcgccggttgcccctcaggaaattgtggatcaggccgtactggaagtccgtgcgttacgccataagcccaagctggaggatatcagctttacgctacgtcgtggcgaagtgcttggcattgctggcctgctgggggcagggcgcagtgaattgctgaaggcgattgttgggctggagacgtatgaacagggcgaaattgttatcaacggcgagaaaatcatgcgccccgattacggcgacatgctgaaacgcggcattggctatacgccagaaaaccgcaaagaagcggggatcattccctggctaggcgttgacgaaaatacagtgctgaccaatcggcaaaaaatcagcaccaacggtgtgctgcaatggtccaccatccgccgcctgaccgaagaggtgatgcagcggatgacggtcaaggctgccagtagcgaaacacccatcggcacgctttctggtggcaatcagcaaaaagtggtgatcggtcgttgggtctatgccgccagccagattttgttgctcgacgagccaacgcgcggcgtcgatatcgaagccaaacagcagatttaccgtattgtccgtgagctggctgccgaaggaaaaagcgtggtgtttatctccagtgaagtggaggaattgccgctggtgtgtgaccgcatcctgttattacagcacggcacgttctcgcaggagtttcactcgccggtcaatgtggatgagctgatgtccgccattctgtctgtgcactga

SEQ ID NO: 27241 - protein, 503 aa, Shigella flexneri 2a str. 301
MFTATEAVPVAKVVAGNKRYPGVVALDNVNFTLNKGEVRALLGKNGAGKSTLIRMLTGSERPDSGDIWIGETRLEGDEATLTRRAAELGVRAVYQELSLVEGLTVAENLCLGQWPRRNGMIDYLQMAQDAQRCLQALGVDVSPEQLVSTLSPAQKQLVEIARVMKGEPRVVILDEPTSSLASAEVELVISAVKKMSALGVAVIYVSHRMEEIRRIASYATVMRDGQVAGDVMLENTSTHHIVSLMLGRDHVDIAPVAPQEIVDQAVLEVRALRHKPKLEDISFTLRRGEVLGIAGLLGAGRSELLKAIVGLETYEQGEIVINGEKIMRPDYGDMLKRGIGYTPENRKEAGIIPWLGVDENTVLTNRQKISTNGVLQWSTIRRLTEEVMQRMTVKAASSETPIGTLSGGNQQKVVIGRWVYAASQILLLDEPTRGVDIEAKQQIYRIVRELAAEGKSVVFISSEVEELPLVCDRILLLQHGTFSQEFHSPVNVDELMSAILSVH

SEQ ID NO: 27242 - DNA, 2736 bp, Shigella flexneri 2a str. 301
  CDS (1)..(2736): transl_table=11
atgacgcatctggaactggttcccgtcccgcctgtcgcgcaactggcgggcgtgagccagcattatggaaaaaccgttgcgctgaacaatatcactctcgatattccggcccgttgcatggtcgggctgattggtccggatggcgtcgggaagtcgagtttattgtcactgatttccggtgcccgcgtcattgagcagggcaatgtggtggtgctgggtggcgatatgcacgacccgaagcatcgccgagacgtctgcccgcgcatcgcctggatgccgcaggggctgggcaaaaacctctaccacaccttgtcggtgtatgaaaatgtcgattttttcgctcgcctgttcggtcacgataaagcggagcgggaagtgcgaattaatgagctgctgaccagcaccgggttagcaccgtttcgcgatcgtccggcaggtaaactctccggcgggatgaagcaaaaacttgggctgtgctgcgcgttaatccacgacccggaactgttgatccttgatgagccaacaacgggggttgacccgctctcccgcgcccagttctgggatctgatcgacagtattcgccagcggcagagcaatatgagcgtgctggtcgccaccgcctatatggaagaggccgaacgcttcgactggctggtagcgatgaatgccggagaagtgctggcaaccggcagcgccgaagagctgcggcagcaaacgcaaagcgccacgctggaagaagcatttattaatctgttaccgcaagcgcaacgccaggcgcatcaggcggtagtgatcccaccgtatcaacctgaaaacgcagagattgccatcgaagcgcgcgatctgaccatgcgttttggttccttcgttgccgttgatcacgtcaatttccgcattccacgcggggagatttttggattccttggttcgaacggctgcggtaaatccaccaccatgaaaatgcttaccggactgctgcccgccagcgaaggtgaggcgtggctatttgggcaaccggttgatccaaaagatatcgatacccgccgtcgtgtgggctatatgtcgcaggcgttttcgctctataacgaactcaccgtgcggcaaaacctggagttacatgcccgtttgtttcacatcccggaagcggaaattcccgcgcgagtggctgaaatgagcgagcgttttaagctcaacgacgttgaagatgttctgccggagtcattgccgctcggcattcgccagcggctttcgctggcggtggcggtgattcatcgcccggagatgttaatcctcgatgagcctacttctggtgtcgatccggtggcgagggatatgttctggcagttgatggtcgatctctcgcgccaggacaaagtgactatcttcatctccacccactttatgaacgaagcggaacgttgcgaccgcatctcactgatgcacgccggaaaagtgcttgccagcggtacaccgcaggaactggttgagaaacgcggagccgccagtctggaagaggcatttatcgcctatttgcaggaagcggcagggcagagcaacgaagccgaagcgccgcccgtggtacacgacaccacccacgcgccgcgtcagggatttagcctgcgccgtctgtttagctacagccgccgcgaagcgctggaactgcgacgcgatccagtacgttcgacgctggcgctgatgggaacggtgatcctgatgctgataatgggttacggcatcagtatggatgtggaaaacctgcgctttgcggtgctcgaccgcgaccagaccgtcagtagccaggcgtggacactcaacctctccggttcccgttactttatcgaacagccgccgctcaccagttatgacgagcttgatcgtcggatgcgtgcgggcgatatcacggtggccattgagatcccgcccaatttcgggcgcgatatcgcgcgtggtacgcctgtggaactcggcgtctggatcgacggagcgatgcccagtcgtgccgaaacggtaaaaggttacgtgcaggcaatgcaccagagttggcttcaggatgtggcgagccgacaatcgacacccgccagccaaagcgggctgatgaacattgagacgcgttatcgctataacccggacgtaaaaagcctgccagcgattgttccggcggtgatcccgcttctgctgatgatgatcccgtcaatgctaagcgcccttagcgtggtgcgggaaaaagagctagggtcgattatcaacctttacgtgacccccaccacccgtagcgaatttttgcttggcaaacagctgccgtacatcgcgctggggatgctgaactttttcctgctctgcggcctgtcggtgtttgtgtttggcgtaccgcataaaggcagtttcctgacgctcaccttggcggcgctgctgtatatcatcattgccactggaatggggctgctgatctccacctttatgaaaagccagattgccgccattttcggaacggcgattatcacattgatcccggcgacacagttttccgggatgatcgatccggtagcttcgctggaagggcctggacgttggatcggcgaggtttacccgaccagtcattttctgactatcgcccgcggaacgttctcgaaagcgctggatctgactgatttgtggcaactttttatcccgttgctgatagccatcccgctggtgatgggcttaagcatcctgctgctgaaaaaacaggagggatga

SEQ ID NO: 27243 - protein, 911 aa, Shigella flexneri 2a str. 301
MTHLELVPVPPVAQLAGVSQHYGKTVALNNITLDIPARCMVGLIGPDGVGKSSLLSLISGARVIEQGNVVVLGGDMHDPKHRRDVCPRIAWMPQGLGKNLYHTLSVYENVDFFARLFGHDKAEREVRINELLTSTGLAPFRDRPAGKLSGGMKQKLGLCCALIHDPELLILDEPTTGVDPLSRAQFWDLIDSIRQRQSNMSVLVATAYMEEAERFDWLVAMNAGEVLATGSAEELRQQTQSATLEEAFINLLPQAQRQAHQAVVIPPYQPENAEIAIEARDLTMRFGSFVAVDHVNFRIPRGEIFGFLGSNGCGKSTTMKMLTGLLPASEGEAWLFGQPVDPKDIDTRRRVGYMSQAFSLYNELTVRQNLELHARLFHIPEAEIPARVAEMSERFKLNDVEDVLPESLPLGIRQRLSLAVAVIHRPEMLILDEPTSGVDPVARDMFWQLMVDLSRQDKVTIFISTHFMNEAERCDRISLMHAGKVLASGTPQELVEKRGAASLEEAFIAYLQEAAGQSNEAEAPPVVHDTTHAPRQGFSLRRLFSYSRREALELRRDPVRSTLALMGTVILMLIMGYGISMDVENLRFAVLDRDQTVSSQAWTLNLSGSRYFIEQPPLTSYDELDRRMRAGDITVAIEIPPNFGRDIARGTPVELGVWIDGAMPSRAETVKGYVQAMHQSWLQDVASRQSTPASQSGLMNIETRYRYNPDVKSLPAIVPAVIPLLLMMIPSMLSALSVVREKELGSIINLYVTPTTRSEFLLGKQLPYIALGMLNFFLLCGLSVFVFGVPHKGSFLTLTLAALLYIIIATGMGLLISTFMKSQIAAIFGTAIITLIPATQFSGMIDPVASLEGPGRWIGEVYPTSHFLTIARGTFSKALDLTDLWQLFIPLLIAIPLVMGLSILLLKKQEG

SEQ ID NO: 27244 - DNA, 1413 bp, Shewanella oneidensis MR-1
  CDS (1)..(1413): transl_table=11
atgcaacattgggccatttttgcaaccgatagctatagcggctcactccttgggcggatgttagcggcggatattcagcccgatgaagggcagatctgcaacttgccagcgcgcgttggttgggtgtctctggggttgcaacaggcactacttgagcgcgagctagcaaaggatgaactggattacggttcaacggtcgaggccttagtgctcgaatgctgtcaagatagcgcacagctacctgcattattacaaaaggtgggtcttgaacctttgcggcagcggggttttcggcagttatccacgggtgaaacgcgacgagtgatgctggcacgtgcgctggcgatgttaccgcaactgctgattttagatgatccttacgcagggcttgatgctgagcatcaagggagtttatccgagctattatgcgaagtcgccgcacatagccagttgcttgttatcacctcccgccaagaagaattaccgccgtgcattagccacgtggcactgtttaatagtgagatgcttaaatctggccagcatgtgcataagctcagtgcacctatgtcgattgagcagtggcatagtcaccctgtgatggcgcagctcaatgcactttcggccagccgcagtgacgagcttttagcgctgatggagcgtcaacgccacaatgccgaagcctttgatcccttagtcgagattaaaaacggcaaggtggagtatgttagctgcttgatttttaaaggcgtgaattggcggattaatgcgggccaacattggcaagtgcggggaccaaatggttgcggtaagagtactttgctcgggctgattttgggggatcatccccaatgctacagtaacgatatcactctctttggccgtccccgtggcagcggtgaaagtatttggcagattaaacaacggattggcatagtgtcatcggccttgcatttgcaataccgagtgagttgttcggcgctcgatgtattgctgtcggggttttatgattccattggcctttaccataaacccactaaacctcaggtcgatttggcgaaggaatggctggcaattttacatatgaatgagtttgccagtacgggttttaagcaattggattacggccagcagcggctattgctgattggtagagccttgattaaacagcccttactgttgattttagacgagccgtatcaaggattagattttattaatcgcactttagtgatgcgggcgctggagatgattgccgagcatcatctgagtcaattgctgtatgtctcccaccatagggaagatgccttgccagccattaaaaactttgtcgattttatcaagcaagataacggctattcggttgaggtgagtcatcgccctaatgagttggctcaaaggatgccaatcccataa

SEQ ID NO: 27245 - protein, 470 aa, Shewanella oneidensis MR-1
MQHWAIFATDSYSGSLLGRMLAADIQPDEGQICNLPARVGWVSLGLQQALLERELAKDELDYGSTVEALVLECCQDSAQLPALLQKVGLEPLRQRGFRQLSTGETRRVMLARALAMLPQLLILDDPYAGLDAEHQGSLSELLCEVAAHSQLLVITSRQEELPPCISHVALFNSEMLKSGQHVHKLSAPMSIEQWHSHPVMAQLNALSASRSDELLALMERQRHNAEAFDPLVEIKNGKVEYVSCLIFKGVNWRINAGQHWQVRGPNGCGKSTLLGLILGDHPQCYSNDITLFGRPRGSGESIWQIKQRIGIVSSALHLQYRVSCSALDVLLSGFYDSIGLYHKPTKPQVDLAKEWLAILHMNEFASTGFKQLDYGQQRLLLIGRALIKQPLLLILDEPYQGLDFINRTLVMRALEMIAEHHLSQLLYVSHHREDALPAIKNFVDFIKQDNGYSVEVSHRPNELAQRMPIP

SEQ ID NO: 27246 - DNA, 1380 bp, Streptococcus agalactiae NEM316
  CDS (1)..(1380): transl_table=11
gtgattgaattaaaaggggttaatttcaaatataaaaacaccaaaaacagctgcttagacaatatagatttggaaataaaaaagggagaattcgtcttaatttccggtgcttcaggttctggaaaaacatctataacgagagttataaataagctgattccttattattacgaaggtgaattagaaggcacagtaaaaataaacaacgatttagtatctagctaccaaatgtttgagctttcagaaatagtaggtagtgtttttcagaatcctagaacacaatttttcaatgtggacacaaatagtgaaatagtttttggtttagaaaatcaaggggtttctagagacattttaaaaaaaagattaaaagagacttgtgagacgttggatataaacaaattgcagaataggaatatctttcatctgtcaggaggggaaaagcagaagattgcttttgcgtcggtgtatgcaatgaatcccgatatttatttactggatgaaccctcatctaatttggatataccaacgatagaggtgctaaaaagacatttgtctgttttaaaaaacagtggcaaaacggttattatatctgaacatcgaatctactatttgatggatttggttgacaaagttatatatatgaaaaatggacaaattcaaaaaagttattcaaaagaagattttttgaatttgtctgaagatgaaattaaagctatggctttaagatgcagaaaaaaaacaaaactgaatatagaaatgtctaataatgaaaaacatccatatttacaagtgaatgatttttctatatacaggaaagataattgcattataaataacatgaacttttctgcgaacaaaggcgatattgttgcggttataggttcgaatggtgttggtaaaacaacatttttaagaactctttgtggtctgcatgacaactataaaggtgatgtgttgttgaattctaaaaaaacagatgcaaaaaaaagaagacaaaaaaactatatggttatgcaagatgtgaattatcaattatttgccgagagtgtctttgctgaatgtaaattaggaatagaaaatgtgagcgatgatcttatagaagaaatactaaatgaatttgatttgagcgactataaaaataatcatccaaacaccttatccggaggacaaaaacaaagattggcaatagccgtaggactaatatgcaaaaaagaaatttttgtgttagatgaaccaactagtggacttgactatacgaatatggtaaagactgtagaattgttaaaacgttattccaaagacaaaattatttttattgctacgcatgataccgaatttgctaatttgatttgtaatcgggtattggacttagaaaaatag

SEQ ID NO: 27247 - protein, 459 aa, Streptococcus agalactiae NEM316
MIELKGVNFKYKNTKNSCLDNIDLEIKKGEFVLISGASGSGKTSITRVINKLIPYYYEGELEGTVKINNDLVSSYQMFELSEIVGSVFQNPRTQFFNVDTNSEIVFGLENQGVSRDILKKRLKETCETLDINKLQNRNIFHLSGGEKQKIAFASVYAMNPDIYLLDEPSSNLDIPTIEVLKRHLSVLKNSGKTVIISEHRIYYLMDLVDKVIYMKNGQIQKSYSKEDFLNLSEDEIKAMALRCRKKTKLNIEMSNNEKHPYLQVNDFSIYRKDNCIINNMNFSANKGDIVAVIGSNGVGKTTFLRTLCGLHDNYKGDVLLNSKKTDAKKRRQKNYMVMQDVNYQLFAESVFAECKLGIENVSDDLIEEILNEFDLSDYKNNHPNTLSGGQKQRLAIAVGLICKKEIFVLDEPTSGLDYTNMVKTVELLKRYSKDKIIFIATHDTEFANLICNRVLDLEK

SEQ ID NO: 27248 - DNA, 1740 bp, Corynebacterium efficiens YS-314
  CDS (1)..(1740): transl_table=11
atgaccgatccacgcaccaccaccccgaacacccctgatcaccccggtgaccagcccctgctggaactccgcgacctggagatctccttcaccagctctaccggtgtggtcaacgccgtgcgcggcgccaacctgaccatctatcccggtcagtccgtggccatcgtgggtgaatccggttccggaaaatccaccaccgccatgtccatcatcggcctgctgcctggtaccggaaaggtcaccggcggcaagatcatcttcaacggcgaggacatcaccggtctgtccaacaaacagatggagaaataccgcggttcggagatcggtctggttccccaggaccccatgaccaacctgaacccggtgtggaagatcggatcccaggtcaaggagtccctcaaggccaacaacgtggtcccgggttcggagatggatgcccgcgtcactgaagtcctggaggaggcgggcctgcccgacgcggagcgtcgtgccaaacagtatccccatgagttctccggcggcatgcgccagcgtgccctgatcgccatcggtctggcagcccgcccgaaactgctcatcgccgatgaacccacctccgccctggatgtcaccgtccagcgccagatcctcgaccacctggagggactgacccgggacctgggcaccgcggtgctgttcatcacccatgacctgggtctggcggcggaacgcgccgagcacctggtggtgatgcaccgtgggcgcatcgtcgaatccggcccgtccctgcagatcctgcgcaacccccggcatccctacacccagcgcctggtccaggcggcgccgtccctggcatccgcccgcatccagagcgcccaggccaagggcatggagtccgctgagctgctcaccgccggtgccactgcagacacggtggacctgacgacggaggaacgtgtcatcgaagtcaggaacctcaccagggagttcaacatccggggttcacgtggggataagaaaaccctccgggccgtggatgatgtgtcgttctatgtccgaaagggcaccaccacggcgctggtcggtgaatcgggttccggtaagtccaccgtggccaacatggtgctgagcctgttggaacccaccagtgggcaggtgctgtacaacggcacggacctgtccacgttgagccgcagggatctgttcaacatgcgccgcaaactgcaggtggtgttccagaacccctatggatcgctggatccgatgtactccatctaccgctgcatcgaggaaccactggtcatccataaagtcggtggggaccgcaaggcacgcgagaagcgggtcgcggagctgctggacatggtgtccatgccgcgttcggcgatgcgccgctacccaaatgagctctccggcgggcagcgccagcgcatcgccatcgcccgcgcactcgccctcaaccccgaggtcatcgtgctcgatgaggcggtgtccgccctggatgtgctggtgcagaaccagatcctgcgtctgttggcggagttgcagcatgaactgtccctgacctacctgttcatcacccatgacctcgcggtggtccgccagaccgccgatgacgtggtggtgatgaagaaggggcaggtggtggaagctggccccaccgatgacatcttcaacgatccccagcaggattacacccgcaacctcatcaactcggttccgggcctgggtattgagctgggcaccggggtgaccgagtag

SEQ ID NO: 27249 - protein, 579 aa, Corynebacterium efficiens YS-314
MTDPRTTTPNTPDHPGDQPLLELRDLEISFTSSTGVVNAVRGANLTIYPGQSVAIVGESGSGKSTTAMSIIGLLPGTGKVTGGKIIFNGEDITGLSNKQMEKYRGSEIGLVPQDPMTNLNPVWKIGSQVKESLKANNVVPGSEMDARVTEVLEEAGLPDAERRAKQYPHEFSGGMRQRALIAIGLAARPKLLIADEPTSALDVTVQRQILDHLEGLTRDLGTAVLFITHDLGLAAERAEHLVVMHRGRIVESGPSLQILRNPRHPYTQRLVQAAPSLASARIQSAQAKGMESAELLTAGATADTVDLTTEERVIEVRNLTREFNIRGSRGDKKTLRAVDDVSFYVRKGTTTALVGESGSGKSTVANMVLSLLEPTSGQVLYNGTDLSTLSRRDLFNMRRKLQVVFQNPYGSLDPMYSIYRCIEEPLVIHKVGGDRKAREKRVAELLDMVSMPRSAMRRYPNELSGGQRQRIAIARALALNPEVIVLDEAVSALDVLVQNQILRLLAELQHELSLTYLFITHDLAVVRQTADDVVVMKKGQVVEAGPTDDIFNDPQQDYTRNLINSVPGLGIELGTGVTE

SEQ ID NO: 27250 - DNA, 1476 bp, Corynebacterium efficiens YS-314
  CDS (1)..(1476): transl_table=11
gtgatggcctgcgtgatgccaccgacccgaaacgtgaggtgggccgtgcttgaggtgagtgatctgaccatcggtgacggcctggtgcgggatgtctccttcaccatcgcacccggggaacgggtgggcctgatcggtgaatccgggtcgggtaagaccctgacggcgctggcggtcatggggttgaccgacctgccgcggtccggcaccacgcttgtcgacggcatctcctcctggacacaccgtgggaggaagatcaccatgatcttccaggaacccatgaccgccctcaaccccctcatgcgggtgggtgcccagatcaaggagatcatgcgcatccacggtgtggggaggcgggaggcgcgtgagcgcaccgcccggatggtggaggatgtcgcgctgccccagcgggcactacgtgcctacccacatgaactctcgggcgggcagcgtcaacgcgccctgatcgccatggcgatggtgaacaacccggatgtacttatctgtgatgaacccaccaccgcactcgatgtcacggtgcaacagcagatcactgacctgctgctgcgcctggcggaccagcggggcacctccctgctgttcatcacccatgatctcggcctggtggcgcgcacctgtcagcgggtgatggtgatgcaacagggccggatcgtcgaacgtgggccggtggcagaggtgctgtcgaccccctcgcatgactacacccgcaccctgctgtctgcctcccggctggacacccccgtcattgaggagaactacggtgggacggtcgtggaggtcgatcgtgtcaccagggtgttcaggaagatgacggcgctggagtcggtgtcgctcacggtgcgttccggtgaacgcctgggcatcgtcggtgggtcagggtccggcaagaccaccctgctgaagctgctggcgggtctggatgaaccgacctccggcaccgtccgggtgcagggcgggacccagatggtgttccaggatccactgtccagtctcaatccccggatgcggatcgcggacatcgtcgccgaacccctcatcgggtggtcggccgcacagaaacacgcccgtgtggtggaggtgctaggtgaggtggggctgggacctgaggtgctgggccgctacccacatgaattctccggtgggcagcgccagcgcatctccatcgcccgggcgctgggcccgaaacccgcgatcctgcttgccgacgaacccgtctccgccctcgatgtctccgtgcgcaaacaggtcctcgatctactggccgacctcgtcgcggaatacggcatcaccctggtgttcgtctcccatgatctcgccgtggtccggcacgtgtgcaccagcgtggtggtcatggatcagggccgcatcatcgaacgcggacgggtggatgaggtctacgccgatccccagcatgactacacccgcaccctcctggaggcggttccccggttgtag

SEQ ID NO: 27251 - protein, 491 aa, Corynebacterium efficiens YS-314
MMACVMPPTRNVRWAVLEVSDLTIGDGLVRDVSFTIAPGERVGLIGESGSGKTLTALAVMGLTDLPRSGTTLVDGISSWTHRGRKITMIFQEPMTALNPLMRVGAQIKEIMRIHGVGRREARERTARMVEDVALPQRALRAYPHELSGGQRQRALIAMAMVNNPDVLICDEPTTALDVTVQQQITDLLLRLADQRGTSLLFITHDLGLVARTCQRVMVMQQGRIVERGPVAEVLSTPSHDYTRTLLSASRLDTPVIEENYGGTVVEVDRVTRVFRKMTALESVSLTVRSGERLGIVGGSGSGKTTLLKLLAGLDEPTSGTVRVQGGTQMVFQDPLSSLNPRMRIADIVAEPLIGWSAAQKHARVVEVLGEVGLGPEVLGRYPHEFSGGQRQRISIARALGPKPAILLADEPVSALDVSVRKQVLDLLADLVAEYGITLVFVSHDLAVVRHVCTSVVVMDQGRIIERGRVDEVYADPQHDYTRTLLEAVPRL

SEQ ID NO: 27252 - DNA, 2721 bp, Pseudomonas putida KT2440
  CDS (1)..(2721): transl_table=11
atgaacgccccggcactgctggccgaaggcatcagccaccgttacggcgacctgatagccctccacccactaggcttcagccttcctgtgggtacccgatgcgcgctgatcggccctgacggggctggcaaatcgaccctgctggggctgatcgccggcgtgaaacgcctacagcagggagagctgcaggtgctgggtggctcgatccgccaacgccgccatcgcacggcgctctaccccaaagtggcgttcatgccgcaggggctgggcaacaacctgtacccggaactgtcgatcagcgagaacatccgttttttcgccaccctgttcgggctgggccgccgcgagtgtgaacagcgcatggccaatctgttgcaggccaccgacctgcagcactttgcccagcgcccggccggcaagctgtcgggtggcatgaagcagaagctgggcctttgctgcgcgctgatccacgagccagacctgcttatcctggacgagccgaccaccggcgttgacccactgtcgcggcggcgcttctgggagctggttgaacaggttcgcgcacaacgcccgcaactgaccctgctggtggctaccgcctacatggaagaagccgaacagttcgagcattgcctgatgctcgatggcggccggctgctggccgccggccctagccacgaactggctgcagtcacctcgagcggcaaactggatgatgcctttacccattaccagggcgcgggcaaggcgcagcatcaaccactggcaatcccgccgcgccaagccacggacggcccggtcgccatcgaggcacacgacctgaccctgcgctttggcgacttcacagcggtgaacaaggtcagtttcgccattggccgcggggagatcttcggcttcctgggttccaacggttgcggcaagaccaccaccatgaaagtgctcaccggcctgatgccggccagcgagggcagcgccagcctgctgggtcgcccggtggacgccagcgacctggctacacgcaagcgggtcggcttcatgtcgcagagtttctctctgtatggcgagctcagcacccggcagaacctggccctgcatgcccgcctgttcgacttgcccaaagccgagagcgcccagcgcatcgatgagctgatcgagcgcttcgacctcgccgctatcgccgaccaaccgtctggcgccctgccccttggtttgcgccagcgcctgtcgctggcagtggcggttctgcatcgcccggaagtcttgatcctcgacgaaccgacctccggcgtcgaccccgccgcccgcgacgacttctggcgcctgctggtagaactgtcccgcgagcagggcgtgaccattttcctctccacccacttcatgaacgaagcccagcgctgcgatcgtatttcgctgatgcacgccgggcgggtgctggcctgcgacacgcccgatgccctgcagcaccagtaccagggcgacacgctggaagacgcgttcgtccgctgcctggaacaggcccaggaactggcgccagccgccaccgacagcaacgtgctggaacaggcgtccacccccaccctaccgctacgccggggcttcagcctgcgccgcctgctggcagtggccgtccgtgagggcaaggagttgctgcgcgacaaggtgcgcctggccttcgccttactgggcgcagtgttcatgatggtgatcttcggctacggcatttcactggatgtggaaaacctcgccttcgccgtgcacgatcaggaccagagcccgcaaagtcgtgcctacctcgaagccttccgtggctcacgctacttcgccgaacaggcgccgatccgcgacagcagcgagctgcaccagcgcctgcaacgctcggaaatcaaactggcactggaaattccgcccggctttggtcgcgacctgtacgcaggacgccagccggtggtggctgcctggctcgacggtggcatgccgttccgcgccgaaaccagccgcaactacgtggaagccgtgcaccaggccaacctggagcaactggcaaaggccagcccacaaccgcagccacgccaggacccggtgcgcctggaaacgcgtttccgctacaaccaggatgtggtcagcgtgaacgccatcggcccgggcgtgatggcactgatactggccttcattccggccatgctcacggcactgggcatcgtgcgcgagaaggagctcggctccatcaccaacttctacgccacacccctcacccgcctggaattcctgcttggcaagcagatgccctacctggctgtgagcctggtcaacctggcgctgctggtggcgatgaaccgctggctgttcgccgtaccgctcaagggcagcgtactggctttggcatgtggcggcgtggcctacctgctggcaaccaccagcctgggcctgctgatttcggcattcacccgcacccagatcgccgccattctcggcaccatgatcattaccagcctgccgaccatccagttttccgggctgatcgtgccacgctcgtcgctggacggcgcggcagcggtgatgggccagttgttcccggcgggctacttcctcgacatcgcagtcggcaccttcaccaaggccttaggcctgcgcgagttgtggccgcagtgcctgatcctgctgagcttctttgccgcgttcaccggcctgagcctggcaatgctgaaaaagcaggaggcctga

SEQ ID NO: 27253 - protein, 906 aa, Pseudomonas putida KT2440
MNAPALLAEGISHRYGDLIALHPLGFSLPVGTRCALIGPDGAGKSTLLGLIAGVKRLQQGELQVLGGSIRQRRHRTALYPKVAFMPQGLGNNLYPELSISENIRFFATLFGLGRRECEQRMANLLQATDLQHFAQRPAGKLSGGMKQKLGLCCALIHEPDLLILDEPTTGVDPLSRRRFWELVEQVRAQRPQLTLLVATAYMEEAEQFEHCLMLDGGRLLAAGPSHELAAVTSSGKLDDAFTHYQGAGKAQHQPLAIPPRQATDGPVAIEAHDLTLRFGDFTAVNKVSFAIGRGEIFGFLGSNGCGKTTTMKVLTGLMPASEGSASLLGRPVDASDLATRKRVGFMSQSFSLYGELSTRQNLALHARLFDLPKAESAQRIDELIERFDLAAIADQPSGALPLGLRQRLSLAVAVLHRPEVLILDEPTSGVDPAARDDFWRLLVELSREQGVTIFLSTHFMNEAQRCDRISLMHAGRVLACDTPDALQHQYQGDTLEDAFVRCLEQAQELAPAATDSNVLEQASTPTLPLRRGFSLRRLLAVAVREGKELLRDKVRLAFALLGAVFMMVIFGYGISLDVENLAFAVHDQDQSPQSRAYLEAFRGSRYFAEQAPIRDSSELHQRLQRSEIKLALEIPPGFGRDLYAGRQPVVAAWLDGGMPFRAETSRNYVEAVHQANLEQLAKASPQPQPRQDPVRLETRFRYNQDVVSVNAIGPGVMALILAFIPAMLTALGIVREKELGSITNFYATPLTRLEFLLGKQMPYLAVSLVNLALLVAMNRWLFAVPLKGSVLALACGGVAYLLATTSLGLLISAFTRTQIAAILGTMIITSLPTIQFSGLIVPRSSLDGAAAVMGQLFPAGYFLDIAVGTFTKALGLRELWPQCLILLSFFAAFTGLSLAMLKKQEA

SEQ ID NO: 27254 - DNA, 1485 bp, Escherichia coli CFT073
  CDS (1)..(1485): transl_table=11
atgggatataaaatgtcatcgttgcaaattttgcaaggcacgtttcgtcttggcaacacaaaaacgctgcaattgcctcggctaacgttaaacgcgggtgatagttgggcgtttgtcggttcgaatggaagcgggaaatcggcgctggcccgcgcgctgtcgggggaacttccgcttttgaaaggtgaacggcaaagccagttttcccacatcactcgtctctccttcgagcaattgcaaaagctcgtcagcgacgaatggcagcggaataacaccgatatgctcggccctggcgaagatgacaccgggcgtaccacggctgagatcattcaggatgaagtaaaggatactccgcgttgcatgcaactggcgcagcagttcggtattaccgccctcctcgaccgacgctttaaatacctttccactggcgagacgcgaaaaaccctgctgtgtcaggcgctgatgtcggagcctgacttgttgattcttgatgagccgttcgatggcctggatgttgcctcacgtcagcagctggctgagctactcgcctcgttacatcagtccggtattactctggtattggtgctcaatcgcttcgatgagatcccagaatttgtccagtttgctggcgtgctggcggattgcacgttagcggaaactggcgctaaagaagaactgctccaacaagcactcgttgcgcaactggcgcatagcgaacagcttgaaggtgtgcaactgccggagccggatgaaccttcagcacgtcacgccttacccgccaacgaaccgcgcattgtgctgaacaatggcgtggtttcttataacgaacgccccattcttaataaccttagctggcaggtgaatccaggcgaacactggcaaattgtcgggccaaatggcgcgggaaaatcgacgttattaagcctgattactggcgatcatccgcaaggttacagcaacgatttgacgcttttcggacgacgtcgcggcagcggcgaaaccatctgggatatcaaaaagcatatcggttacgtcagcagtagtttgcatctggattaccgggtcagcactactgtgcgtaatgtgatcctttctggctattttgattcgattggcatttatcaggccgtttcggatcgccagcaaaaactggtgcagcagtggctggatgttctcggcattgataaacgcacggctgacgctccgttccatagtctttcctggggacagcagcgtctggcgctgatcgtccgcgcgctggtgaaacatccgacgttgcttattctcgatgaaccactacaggggcttgatccgctcaatcgccagcttatccgccggtttgttgatgtgctgattagcgaaggtgaaacgcaattgttgtttgtttcgcaccacgctgaagatgcgcctgcctgtattacccatcgtcttgagttcgtgccggacggtgacttttatcgctatgcgctgacaaaaataaactga

SEQ ID NO: 27255 - protein, 494 aa, Escherichia coli CFT073
MGYKMSSLQILQGTFRLGNTKTLQLPRLTLNAGDSWAFVGSNGSGKSALARALSGELPLLKGERQSQFSHITRLSFEQLQKLVSDEWQRNNTDMLGPGEDDTGRTTAEIIQDEVKDTPRCMQLAQQFGITALLDRRFKYLSTGETRKTLLCQALMSEPDLLILDEPFDGLDVASRQQLAELLASLHQSGITLVLVLNRFDEIPEFVQFAGVLADCTLAETGAKEELLQQALVAQLAHSEQLEGVQLPEPDEPSARHALPANEPRIVLNNGVVSYNERPILNNLSWQVNPGEHWQIVGPNGAGKSTLLSLITGDHPQGYSNDLTLFGRRRGSGETIWDIKKHIGYVSSSLHLDYRVSTTVRNVILSGYFDSIGIYQAVSDRQQKLVQQWLDVLGIDKRTADAPFHSLSWGQQRLALIVRALVKHPTLLILDEPLQGLDPLNRQLIRRFVDVLISEGETQLLFVSHHAEDAPACITHRLEFVPDGDFYRYALTKIN

SEQ ID NO: 27256 - DNA, 1512 bp, Escherichia coli CFT073
  CDS (1)..(1512): transl_table=11
atgttcacggcaacagaggcagtcccggtagcaaaagtggtggcaggaaataagcgttaccccggcgtcgttgcgctggataacgttaacttcacgctcaataaaggcgaagttcgcgcgctgttaggcaaaaacggtgcgggaaaatcgaccctcattcgaatgcttaccggtagcgaacgtccggatagcggtgatatctggattggcgagacgcgactggaaggtgacgaagctacgctgactcgccgtgccgctgaactgggggttcgtgcggtttatcaggagttaagtctggtggaagggctgacagtggcggaaaacctctgcctcggtcagtggccccgccgcaacggcatgattgattacctgcaaatggcgcaggacgcccaacgttgcttgcaggcgttgggcgttgacgttagtcctgaacaacttgtttcaacactaagcccggcgcaaaagcaactggtggaaattgcgcgggtgatgaagggcgagccgcgcgtggtcattcttgatgaacccaccagctcgcttgccagtgcggaagttgaactggtgatcagcgcggtgaaaaagatgtcggcactgggcgtggcggtgatttatgtcagccaccggatggaagaaattcgccgcattgcctcctgtgccaccgttatgcgcgatggtcaggtggcgggcgatgtgatgctcaaaaacacctctacgcatcatattgtgtcgctaatgctcgggcgcgatcacgttgatattgcgccggttgcccctcaggaaattgtggatcaggccgtgctggaagtccgtgcgttacgccataagcccaagctggaggatatcagttttacactacgtcgtggcgaagtgctcggcattgctggtctgctgggggcagggcgcagtgaattgctgaaggcgattgttgggctggagacgtatgaacagggcgaaattgttatcaacggcgagaaaatcacgcgccccgattacggcgacatgctgaaacgcggcattggctatacgccagaaaaccgcaaagaagcggggatcattccctggttgggcgttgacgaaaatacagtgctgaccaatcggcaaaaaatcagcgccaacggtgtactgcaatggtccaccatccgccgcctgaccgaagaggtgatgcagcggatgacggtcaaggccgccagtagcgaaacgcccatcggcacgctttctggcggcaatcagcaaaaagtggtgatcggtcgttgggtctatgccgccagccagattttgttactcgacgagccaacgcgcggcgtcgatatcgaagccaaacagcagatttaccgtattgtccgcgagctggctgccgaaggaaaaagcgtggtgtttatctccagtgaagtggaggagttgccgctggtgtgtgaccgcatcctgttattacagcacggcacgttctcgcaggagtttcactctccggtcaatgtggatgagctgatgtccgccattctgtctgtgcactga

SEQ ID NO: 27257 - protein, 503 aa, Escherichia coli CFT073
MFTATEAVPVAKVVAGNKRYPGVVALDNVNFTLNKGEVRALLGKNGAGKSTLIRMLTGSERPDSGDIWIGETRLEGDEATLTRRAAELGVRAVYQELSLVEGLTVAENLCLGQWPRRNGMIDYLQMAQDAQRCLQALGVDVSPEQLVSTLSPAQKQLVEIARVMKGEPRVVILDEPTSSLASAEVELVISAVKKMSALGVAVIYVSHRMEEIRRIASCATVMRDGQVAGDVMLKNTSTHHIVSLMLGRDHVDIAPVAPQEIVDQAVLEVRALRHKPKLEDISFTLRRGEVLGIAGLLGAGRSELLKAIVGLETYEQGEIVINGEKITRPDYGDMLKRGIGYTPENRKEAGIIPWLGVDENTVLTNRQKISANGVLQWSTIRRLTEEVMQRMTVKAASSETPIGTLSGGNQQKVVIGRWVYAASQILLLDEPTRGVDIEAKQQIYRIVRELAAEGKSVVFISSEVEELPLVCDRILLLQHGTFSQEFHSPVNVDELMSAILSVH

SEQ ID NO: 27258 - DNA, 2736 bp, Escherichia coli CFT073
  CDS (1)..(2736): transl_table=11
atgacgcatctggaactggttcccgtcccgcctgtcgcgcaactggcgggcgtgagccagcattatggaaaaaccgttgcgctgaacaatatcacactcgatattccggcccgttgcatggtcgggctgattggaccggatggtgtcggtaaatcgagcttgttgtcgctgatttccggtgctcgcgtcattgagcagggcggcgtgatggtgctgggcggcgatatgcgcgacccgaagcatcgccgcgacgtctgcccgcgcatcgcctggatgccgcaggggctgggcaaaaatctctaccacaccttgtcggtgtatgaaaacgtcgattttttcgcccgcctgttcggtcacgacaaagcggagcgggaagtgcgaattaatgagctgctgaccagcaccggattagcaccgtttcgcgatcgtccggcagggaaactctccggcgggatgaagcaaaaacttgggctgtgctgtgcgttaatccacgacccggaattgttgattcttgatgagccaacaacgggggttgacccgctctcccgcgcccagttctgggatctgatcgacagcattcgccagcggcagagcaatatgagcgtgctggttgccaccgcctatatggaagaggcggaacgcttcgactggctggtagcgatgaatgccggagaagtgctggcaactggcagcgccgaagagttgcggcagcaaacgcaaagcgccacgctggaagaagcatttataaatctgttaccgcaagcacaacggcaggcgcatcaggcggtagtgatcccaccgtatcaacctgaaaacgcagagattgccatcgaagcgcgcgatctgaccatgcgttttggttccttcgttgccgttgatcacgtcaatttccgcattccacgcggggagatttttggttttcttggttcgaacggctgtggtaaatccaccaccatgaaaatgcttaccggattgctgcccgccagcgaaggtgaggcgtggctgttcgggcaaccggttgatccaaaagatatcgatactcgtcgccgggtgggctatatgtcgcaggcgttttcgctctataacgaactcaccgtgcggcaaaacctggagttacatgctcgtctgtttcatatcccggaagcggaaattcccgcgcgagtggctgaaatgagcgagcgttttaagctcaacgacgtcgaagatgtattgccggagtcattgccgctcggcattcgccagcggctatcgctggcggtggcggtgattcatcgcccggagatgttaatccttgatgaaccgacttctggcgtcgatccggtggcgagggatatgttctggcagttgatggtggatctctcgcgccaggacaaagtgactatcttcatctccacccactttatgaacgaagcggaacgttgtgaccgtatctcactgatgcacgccggaaaagtgctcgccagcggtacaccgccggaactggttgagaaacgcggagccgccagtctggaagaggcatttatcgcttatttgcaggaagcggcagggcagagcaacgaagctgaagcgccgccggtggtacacgacaccacccacgcgccacgtcagggattcagcctgcgccgtctgtttagctacagccgccgcgaagcgctggaactgcgacgcgatccggtacgttcgacgctggcgctgatgggaacggtgatcctgatgctgataatgggttacggcatcagtatggatgtggaaaacctgcgctttgcggtgcttgaccgcgatcaaaccgtcagtagccaggcgtggacgctcaatctctccggttcccgttactttatcgaacagccaccgctcaccagttatgacgagcttgatcgtcggatgcgtgcgggcgatatcacggtggcaattgagatccctcccaatttcgggcgcgatatcgcgcgtggtacgcccgtggaactcggtgtctggatcgacggtgcgatgccgagccgcgccgaaacggtaaaaggttacgtgcaggccatgcaccagagctggctacaggatgtggcgagccgacagtccacacccgccagccaaagcgggctgatgaatattgagacgcgctatcgctataacccggacgtaaaaagcctgccggcgattgttccggcggtgatcccgcttctgctgatgatgatcccgtcaatgctaagcgcccttagcgtggtgcgggaaaaagagctagggtcgattatcaacctttacgtgacccccaccacccgtagcgaatttttacttggcaaacagctgccatacatcgcgctggggatgctgaactttttcctgctctgcgccctgtcggtgtttgtgtttggcgtaccgcataaaggcagtttcctgactctcaccctggcggcgctgctgtatatcatcatcgccaccggaatggggctgctgatctccacctttatgaaaagccagattgccgccattttcggtacggcaattatcacgttgatcccggcgacacagttttccgggatgatcgatccggtagcttcgctggaaggtccaggacgttggatcggcgaggtttatcccaccagtcattttctgactatcgcccgcggaacgttctcgaaagcgctggatctgactgatttgtggcaactttttatcccgttgctgatagccataccgctggtgatgggcttaagcatcctgctgctgaaaaaacaggagggatga

SEQ ID NO: 27259 - protein, 911 aa, Escherichia coli CFT073
MTHLELVPVPPVAQLAGVSQHYGKTVALNNITLDIPARCMVGLIGPDGVGKSSLLSLISGARVIEQGGVMVLGGDMRDPKHRRDVCPRIAWMPQGLGKNLYHTLSVYENVDFFARLFGHDKAEREVRINELLTSTGLAPFRDRPAGKLSGGMKQKLGLCCALIHDPELLILDEPTTGVDPLSRAQFWDLIDSIRQRQSNMSVLVATAYMEEAERFDWLVAMNAGEVLATGSAEELRQQTQSATLEEAFINLLPQAQRQAHQAVVIPPYQPENAEIAIEARDLTMRFGSFVAVDHVNFRIPRGEIFGFLGSNGCGKSTTMKMLTGLLPASEGEAWLFGQPVDPKDIDTRRRVGYMSQAFSLYNELTVRQNLELHARLFHIPEAEIPARVAEMSERFKLNDVEDVLPESLPLGIRQRLSLAVAVIHRPEMLILDEPTSGVDPVARDMFWQLMVDLSRQDKVTIFISTHFMNEAERCDRISLMHAGKVLASGTPPELVEKRGAASLEEAFIAYLQEAAGQSNEAEAPPVVHDTTHAPRQGFSLRRLFSYSRREALELRRDPVRSTLALMGTVILMLIMGYGISMDVENLRFAVLDRDQTVSSQAWTLNLSGSRYFIEQPPLTSYDELDRRMRAGDITVAIEIPPNFGRDIARGTPVELGVWIDGAMPSRAETVKGYVQAMHQSWLQDVASRQSTPASQSGLMNIETRYRYNPDVKSLPAIVPAVIPLLLMMIPSMLSALSVVREKELGSIINLYVTPTTRSEFLLGKQLPYIALGMLNFFLLCALSVFVFGVPHKGSFLTLTLAALLYIIIATGMGLLISTFMKSQIAAIFGTAIITLIPATQFSGMIDPVASLEGPGRWIGEVYPTSHFLTIARGTFSKALDLTDLWQLFIPLLIAIPLVMGLSILLLKKQEG

SEQ ID NO: 27260 - DNA, 1578 bp, Escherichia coli CFT073
  CDS (1)..(1578): transl_table=11
atgccgcgtgaattgattggcttaggtggagtcgttatgccttatctacttgaaatgaagaacattaccaaaaccttcggcagtgtgaaggcgattgataacgtcagcttgcggttgaatgctggcgaaatcgtctcactctgtggggaaaatgggtcaggtaaatcaacgctgatgaaagtgctgtgtggtatttatccccatggttcctacgaaggcgaaattatttttgcgggagaagagattcaggcgagtcacatccgcgataccgaacgcaaaggtatcgccattattcaccaggaattggcgctggtgaaagaactgaccgtgctggaaaatatcttcctgggtaacgaaataacccataatggcattatggattatgacctgatgacgctacgctgtcagaagctgctcgcacaggtcagtttatccatttcacctgatacccgcgttggcgatttaggacttgggcaacaacaactggttgaaattgccaaggcacttaataaacaggtgcgtttgttaattctcgatgagccgacagcctcattaactgagcaggaaacgtcggttttactggatattattcgcgatctacaacagcacggtatcgcctgtatttatatttcgcacaaactcaacgaagtcaaagcgatttccgatacgatttgcgttattcgcgacggtcagcacattggcacgcgtgatgctgctggaatgagtgaagacgatattatcaccatgatggtcgggcgagagttaaccgcgctttaccctaatgaaccacataccaccggagatgaaatattacgtattgaacatctgacggcatggcatccggttaatcgtcatattaaacgagttaatgatgtctcgttttccctgaaacgtggcgaaatactgggtatcgccggactcgttggtgccggacgtaccgagactattcagtgcctgtttggtgtgtggcccggacaatgggaagggaaaatttatattgacggcaaacaggtagatattcgtaactgtcagcaagccatcgcccaggggattgcgatggtacccgaagacagaaagcgcgacggcatcgttccggtaatggcggttggtaaaaatattaccctcgccgcactcaaaaaatttaccggtagtattagccagcttgatgacgcggcagagcaaaaatgtattctggaatcaatccagcaactcaaagttaaaacgtcgtcccccgaccttgctattggacgtttgagcggcggcaatcaacaaaaagcgatcctcgctcgctgtctgttacttaacccgcgcattctcattcttgatgaacccaccaggggtatcgatattggcgcgaaatacgagatctacaaattaattaaccaactcgtccagcagggtattgccgttattgtcatctcttccgaattacctgaagtgctcggccttagcgatcgtgtactggtgatgcatgaagggaaactaaaagccaacctgataaatcataacctgactcaggagcaggtgatggaagccgcattgaggagcgaacatcatgtcgaaaagcaatccgtctga

SEQ ID NO: 27261 - protein, 525 aa, Escherichia coli CFT073
MPRELIGLGGVVMPYLLEMKNITKTFGSVKAIDNVSLRLNAGEIVSLCGENGSGKSTLMKVLCGIYPHGSYEGEIIFAGEEIQASHIRDTERKGIAIIHQELALVKELTVLENIFLGNEITHNGIMDYDLMTLRCQKLLAQVSLSISPDTRVGDLGLGQQQLVEIAKALNKQVRLLILDEPTASLTEQETSVLLDIIRDLQQHGIACIYISHKLNEVKAISDTICVIRDGQHIGTRDAAGMSEDDIITMMVGRELTALYPNEPHTTGDEILRIEHLTAWHPVNRHIKRVNDVSFSLKRGEILGIAGLVGAGRTETIQCLFGVWPGQWEGKIYIDGKQVDIRNCQQAIAQGIAMVPEDRKRDGIVPVMAVGKNITLAALKKFTGSISQLDDAAEQKCILESIQQLKVKTSSPDLAIGRLSGGNQQKAILARCLLLNPRILILDEPTRGIDIGAKYEIYKLINQLVQQGIAVIVISSELPEVLGLSDRVLVMHEGKLKANLINHNLTQEQVMEAALRSEHHVEKQSV

SEQ ID NO: 27262 - DNA, 1542 bp, Vibrio vulnificus CMCP6
  CDS (1)..(1542): transl_table=11
gtgtccggctctttgaccatcaacggtcaagaaacggcgacgttcgccatgcaccaattcaccgaacaggttgggacagtgctgcaagacaccgacagccaatttgtcggtttaagcatcggtgaagacatcgcgtttgcacttgaaaaccagctcacctcgaacattgagatgtactcgctggtcaaagccaccgcgaagatggtggaccttgagcaaatgttgcaacgctcgccacacgatctctcgggcggacagaaacaacgtgtttcactggcaggtattctcgtggatgatgtcgatattctgctgtttgatgaacctttggcagcgctcgatccaaaaaccggcaaacgcaccattgaaatcattgatgagctccatcgcaagacaggcaaaaccgtggtcatcatcgagcaccgtctcgaggatgtgctgcatcgtcacgtcgaccgcatcattctgatggatgacggtgagatcatggctgataccacgccagacgagctgcttgcttcgccattattggcacaatatggtattcgcgagccgctttacctaacggcgctaaaatccgcaggctgccatcttgcgctagacgatcacccctcaagcttaagcgagttgcccttggccaattatcagcacgcaatggcagattggtttcaccaagcgaacacgacaagcaaccacattcgttcagagactttgcttgacgtgcgcaacttaacctactcctacgatggtgagaaaaacgcattagaaggggtaagtttcaatgtgcaacgcggcgaatttgtctcgatattgggcaaaaatggttccggtaaatcgaccatcaccaagctgatcatgggcgtgattgaacccgatgacggcgcgatttacttaaacggccaagatcttagcgagctgaccattttcgagcgcagtcaaaaagtgggtgtggtgatgcaaaaccctaaccacatgatttcgcaccatatgatttttgacgaagtcgcatttggcctgcgcaatcgaggttgggacgagcagcaagtcaacgacaaggtgcttgaagtgctcgaattgtgtggtctaagcaaatatcgtcattggccaattgaagcgctcagctacggccaaaagaaacgcgtcaccatcgcttcgattctcgccctagagcctgaactgttgatcctcgacgagcccactgcaggtcaggactaccgcaactacacctcaatgctgagtttcattgaaaagctcaatcgagagctaggcatcaccgtcgtgatcatttctcatgacatgcacttggtactggaatacaccacacgctcaatcgtgattgcagatagccagcttgtggccgacgcgccgatgacggatgttttcagtaaccctgcattgctagaccaagcgaacctaaccaccaccagcctgtatgagcttgcgacgcgcttaaacatggctgaaaccaacgcctttatgcagcattttattgatgtcgaaaaagcctctcgcttagagaaaaccgttgagagaaatgtggcatga

SEQ ID NO: 27263 - protein, 513 aa, Vibrio vulnificus CMCP6
MSGSLTINGQETATFAMHQFTEQVGTVLQDTDSQFVGLSIGEDIAFALENQLTSNIEMYSLVKATAKMVDLEQMLQRSPHDLSGGQKQRVSLAGILVDDVDILLFDEPLAALDPKTGKRTIEIIDELHRKTGKTVVIIEHRLEDVLHRHVDRIILMDDGEIMADTTPDELLASPLLAQYGIREPLYLTALKSAGCHLALDDHPSSLSELPLANYQHAMADWFHQANTTSNHIRSETLLDVRNLTYSYDGEKNALEGVSFNVQRGEFVSILGKNGSGKSTITKLIMGVIEPDDGAIYLNGQDLSELTIFERSQKVGVVMQNPNHMISHHMIFDEVAFGLRNRGWDEQQVNDKVLEVLELCGLSKYRHWPIEALSYGQKKRVTIASILALEPELLILDEPTAGQDYRNYTSMLSFIEKLNRELGITVVIISHDMHLVLEYTTRSIVIADSQLVADAPMTDVFSNPALLDQANLTTTSLYELATRLNMAETNAFMQHFIDVEKASRLEKTVERNVA

SEQ ID NO: 27264 - DNA, 1485 bp, Bradyrhizobium japonicum USDA 110
  CDS (1)..(1485)
atgatggatatgaggctttcaaaccgggccgtgctcgaagtccgcggtctgaccaagcgcttcggcggcctgaccgcggtgaagaatctcggcttcgaggtcaacagcggcgagatctttggcctgatcgggccgaacggctcgggcaagtcgaccgcgatgaagagcgtgatgggcatcgagcgcccgacatcaggcgaagtggtcttcgagggcgaggacgtcgcgggcctccccgcgcacaagatcgcgcgcaagggctttggcatggtgttccagcactcgcggccgctgaaccggcagaccgtgctggagaacatcatggtggcgctgctgccggacagcctgttcatgctgtttccggacaaggcgctgatcgagcgcgccaagtggatcgccgaccgcgtgggcttaggcaacgtcatgaaccgccgcccgccgacgctgccgttcgctgatctgcgccggctcgagctcgccaaggctatcgcccgcgatccaaaagtcgtgctggtggacgagccctttgccgggctgacgcgggccgaggtcgatatcttctccgacctgatccgcagcttccgcgatgacggccgcgcggtgatgctggttgaccacaacgtcaagagcgtcgcagcgctggtcgaccgcgtgctcgcgatgtatctcggcgaggagatcgtcaccggcagggccgaggacgtcatgaagaacgagacggtgcgacgggtctatctcggcggcgccatcgagacccatgcgcggcccgagaccagcttcaaggacaaggtgccgctgctccaggtcgagaatgtcagcgtgttctacggcaaggcgcaggcgctggacaacgtctcgatccacgtccacgaaggcgagttcgtctcggtcgtcggcctcaacggcgccggcaagaccacgctgttcaacaccatctccggcttcctgccctatagcggcgagatcgtgcgcggcggcgacaggctgcgcggcacgagcccggccaggatcgcgcgcagcggtctcgtgcagtgcccggaatcgcgcgagctgttcggcgagatgagcgtgcgcgaaaatctcgatctcggcggccagcatctgtccgacgacaagcgcgcggcgcagctcgcctggctgttcgagctgttcccgatcctgaaggagcgccagggccagatggcgcagacgctatccggcggcgagcagcagatgctggcgatcggccgcgccctgatgatgcagccgcagatcctgatcctggacgagccgacgctgggccttgcccccgtcatcctcgagcaattgtccaaggcgctgacgaagctgcggcagaccacgtcgatcacggtgctgctcggcgagcagaacgtcactttcgcgctaccgcacgccgatcgcgtctatgtgctcgaacacgccaggatcgtctgggagggcgatcccggccgcttcgcgagcgaggccggcgccgattttctttaa

SEQ ID NO: 27265 - protein, 494 aa, Bradyrhizobium japonicum USDA 110
MMDMRLSNRAVLEVRGLTKRFGGLTAVKNLGFEVNSGEIFGLIGPNGSGKSTAMKSVMGIERPTSGEVVFEGEDVAGLPAHKIARKGFGMVFQHSRPLNRQTVLENIMVALLPDSLFMLFPDKALIERAKWIADRVGLGNVMNRRPPTLPFADLRRLELAKAIARDPKVVLVDEPFAGLTRAEVDIFSDLIRSFRDDGRAVMLVDHNVKSVAALVDRVLAMYLGEEIVTGRAEDVMKNETVRRVYLGGAIETHARPETSFKDKVPLLQVENVSVFYGKAQALDNVSIHVHEGEFVSVVGLNGAGKTTLFNTISGFLPYSGEIVRGGDRLRGTSPARIARSGLVQCPESRELFGEMSVRENLDLGGQHLSDDKRAAQLAWLFELFPILKERQGQMAQTLSGGEQQMLAIGRALMMQPQILILDEPTLGLAPVILEQLSKALTKLRQTTSITVLLGEQNVTFALPHADRVYVLEHARIVWEGDPGRFASEAGADFL

SEQ ID NO: 27266 - DNA, 1518 bp, Clostridium tetani E88
  CDS (1)..(1518): transl_table=11
atgaaaaaagaaaatttagaagagaagccctttttacaaatgaaaggaatttccaagtttttttctggtgtacaagctctagacaatgtagaacttaaagtatatagaggagaagtactagctctattaggagagaatggagcaggtaaatctacattgatgaaaatattaagcggtgtatatacaaaagatgaaggagatatttttatagatgaaaagaaagtagatataaaggggataaaagaagcagaagaattgggaatatctataatacatcaagaattaagtctgctttcaaatttaaaaatatatgaaaatatatttttaggtagcgaaaaatataaaggaatttttaataaacttgataaggattacatgaggtcagagagtgaaaaactgctatcaactataggatttacagcagatgtagatattttagctaaggatataaatataggtgaaatgcaaatgatagaaattattaaggctatttctaagaaatctaaattgataataatggatgaacctactactgctttaactgaagtagaaacagaaaggttatttaaagttataaataaattaaagtcagaaggaatttgtataatatatatatcccatagattagatgaaatctttcaaatatgtgatagagtaaacgtattaagagatggtaaatatgtaggagaggttaaagtaaaagatacaacaaaagatgatttaataactatgatggttggaagaaagctagaagaacaatttccatataaaaaggttaaaaagggagatgcattattagcagtaaataatttatcctacaaaaataaggtgaaaaatatttcttttgaagtaagggcaggagaaatattaggattggcgggacttatgggatctggaagaacagaattagctaagactatatttggagagtataaaaaaagtagtggtgatatatatataaatgataaaaaaattaatataacttcccctaaagaagctatagagaatggcatagcttatttatcagaagatagaaaaaaagaagggcttattttaaatatgtctgtaggtaataatataagtctttgtaacttaaagaaatatgaaaatagtataaaaaagataaataaagaaaaagaatcaaaagaaatagatgattacataaaaaaattatccgtaaaaacaccttcggctaatcagataattaaaaacttaagtggaggtaatcaacaaaaggctattatagcaaaatggattatgatttccccaaatattttaataatagacgaacctacaagaggaatagatgtaggtgctaaaaaagaaatatatgaagttttaaatgaaatcaaaagtttaggtaaagccataattatgatatcttctgatatgcctgaagtattgggaataagtgatagaatattagttatgagtgaaggaaatttgtcaggagaattatcaagagaagaagctacacaggaaaagattatgaaatatgcagtagctttttctaattaa

SEQ ID NO: 27267 - protein, 505 aa, Clostridium tetani E88
MKKENLEEKPFLQMKGISKFFSGVQALDNVELKVYRGEVLALLGENGAGKSTLMKILSGVYTKDEGDIFIDEKKVDIKGIKEAEELGISIIHQELSLLSNLKIYENIFLGSEKYKGIFNKLDKDYMRSESEKLLSTIGFTADVDILAKDINIGEMQMIEIIKAISKKSKLIIMDEPTTALTEVETERLFKVINKLKSEGICIIYISHRLDEIFQICDRVNVLRDGKYVGEVKVKDTTKDDLITMMVGRKLEEQFPYKKVKKGDALLAVNNLSYKNKVKNISFEVRAGEILGLAGLMGSGRTELAKTIFGEYKKSSGDIYINDKKINITSPKEAIENGIAYLSEDRKKEGLILNMSVGNNISLCNLKKYENSIKKINKEKESKEIDDYIKKLSVKTPSANQIIKNLSGGNQQKAIIAKWIMISPNILIIDEPTRGIDVGAKKEIYEVLNEIKSLGKAIIMISSDMPEVLGISDRILVMSEGNLSGELSREEATQEKIMKYAVAFSN

SEQ ID NO: 27268 - DNA, 1407 bp, Lactobacillus plantarum WCFS1
  CDS (1)..(1407): transl_table=11
atggctagtatcgcgctgaataatttaacttacacctatccacaggcgtcgacacccattctggatcgcgttaacctaacactaccacggcaaagcttcatcctattgacagggccatcgggaacaggtaagtcgacgctcctaaagctgattgcaggcttactacccctgactccagatgacggcaccattacctttgatggtcaggcattaactgctagcaccgctaatcagcgcgctcagcacgttgccatgatgtttcagaatcctaatcagcagtttgccatggataccgttgaaaatgaactaattttcgcacttgagaacttacaagtgccccgtgaccaaataccggcccgcttacttagtgcgcttgactttgttggtatccgaaatttacagtcacgactattaaatcatttatccggtggcgagaaacagaaagtggcccttgcaatcattgtcgctatggatagcgatgtcatcctactagatgagccctttgccagtgtcgatccgaccgcacgagccgtcttgttagaccgactcgtggaactacgcaatcaacatgggaagacaatcatcttggcggatcatgacctatcaggttacgaacagctcgtcgatcaagtcgtccaaatcaaggaccagcacttacagctcattgatcgcaccacctggtctgagttattttcagcctttactgagcagccacaacggtcatggtcagcaccgcaacgcgttgaacgcccttgttttcaacttgatcacgtcactttacaggcaggtgatcgtcaactattagtaccgacaacgcgtcaattgttagcacaacacaatacgctgatcacgggtcctaacggtagcggtaaatccacgttatttgaagccctcgtccgtctgcacccttatactggcgaaattcgttacgaagggacacctatcgacaagctaaaacgcaaacgctatgctcgccacgtcgccttgctttttcaggacgctgagacccagtttttaaacatcacggtcgctgaagaactggctcaaagtaaacgctatgcgtatggcgactactttaccgcagaccgtattcaaacggccttagtgcaactcaacttatccggtcgtgatgaacaagtcatctatactttgagtgagggacagaaaaagaaactacaaattctgctcatgttaatcatgcagtcaccagttctactcatggatgaacccttaaaagggctagatttgcattcgatcaatgccctggtcgcgttattacagaccacccaagcggcaactaagcagacgctgattattattagtcaccagttaaccggcctgatgccattgattgactatcagctacactttgaaaatcaccatttagattgggtggtgcgatcatga

SEQ ID NO: 27269 - protein, 468 aa, Lactobacillus plantarum WCFS1
MASIALNNLTYTYPQASTPILDRVNLTLPRQSFILLTGPSGTGKSTLLKLIAGLLPLTPDDGTITFDGQALTASTANQRAQHVAMMFQNPNQQFAMDTVENELIFALENLQVPRDQIPARLLSALDFVGIRNLQSRLLNHLSGGEKQKVALAIIVAMDSDVILLDEPFASVDPTARAVLLDRLVELRNQHGKTIILADHDLSGYEQLVDQVVQIKDQHLQLIDRTTWSELFSAFTEQPQRSWSAPQRVERPCFQLDHVTLQAGDRQLLVPTTRQLLAQHNTLITGPNGSGKSTLFEALVRLHPYTGEIRYEGTPIDKLKRKRYARHVALLFQDAETQFLNITVAEELAQSKRYAYGDYFTADRIQTALVQLNLSGRDEQVIYTLSEGQKKKLQILLMLIMQSPVLLMDEPLKGLDLHSINALVALLQTTQAATKQTLIIISHQLTGLMPLIDYQLHFENHHLDWVVRS

SEQ ID NO: 27270 - DNA, 1629 bp, Tropheryma whipplei str. Twist
  CDS (1)..(1629): transl_table=11
atgaatacggttgagcccccacttctggatgttagaaatctacagatcgaattttctacacctacccgcgcaataaaggccgttgatggcgtcagttttacccttgaaaaaggtgacacgctcgctgttgtcggtgagtcgggttctggaaagtcaacccttgcacattctgtaataggtctcttgccgggtacgggaagaatcaccgaggggcaaataaattatgccgggcgggaccttgtaaagttgtcccagaaacagctcgagggcgtccgcggacataatataggttttgttccacaggacccgatgcagagccttaatcctgttctgcgaatcggcgctcaggtagaggaggccattcgcgcaaatgcgcttgcatcagataataaagagatcagaaagttggcaatccaggctctagagaatgcgggtttgcccaacccctctgacagaatacgctcatatccgcaccaactttcaggtggcatgcaacaaagggtgttgatcggtatagcgctttcctgtcacccaggtcttcttatcgctgacgagccaacaagtgcattggatgtaacagttcagaaggttatccttgatcacatagctgagcgtacttcttctctcggcactgccgttatgctgattacgcacgaccttgccttagctgctgaacgggcgaggcgtcttctggttatgtacaaaggaaaagtagttgaactgggttcatctgaggagattctaaaaaaccctcgccatccttataccaagaaattactgggcgcagctgcaagggcacgacgctctccccttaggtcgaaagagcaagacactgcccctcctgcagttgttgtagacagtctggtaaaaagatatccaatacggtcagggacctttagtacctcacttcttaccgctgttgatggcgtgagcttttcgattcccagcgggtctacggttgctcttgtcggtgagtcgggttctggcaagtccactatcgcaaagataattcttgggtttgaaaagccgacgcgggggactgtaaccatagccggtgttaatacaagctcgctatctgcatctggcttgcgccgtatggctgcgaggatccagccggtatttcaaaatccgtatggcagcctggatccgcttcgcaatattgcatcaattatttctgagcctttgagtatccataaggttggaaacagggccagccgtaaagcccgcgttgtggagcttcttgaccaagtcgcactgccgcagtttattgcgactcgttatcccggtgagttgtctggcggtcagcgccagagggttgcaatagcccgtgctctagccctaaaaccagagataatgattctagatgaggcggtcagcgctctggatgctcttgttcagtcgcagatcttagatcttttggatagcttacagaaacagctttcggttagttatctatttatcacacatgatcttgctgttgcacgggctatctctgactttgtgtgtgttatgcaccagggcaagctggttgaacaaggcccggctgagcgtatcttcaacaatccggagagtaagtatacaaggactcttttggagtcgatacctggacgcctgttttcttggggttga

SEQ ID NO: 27271 - protein, 542 aa, Tropheryma whipplei str. Twist
MNTVEPPLLDVRNLQIEFSTPTRAIKAVDGVSFTLEKGDTLAVVGESGSGKSTLAHSVIGLLPGTGRITEGQINYAGRDLVKLSQKQLEGVRGHNIGFVPQDPMQSLNPVLRIGAQVEEAIRANALASDNKEIRKLAIQALENAGLPNPSDRIRSYPHQLSGGMQQRVLIGIALSCHPGLLIADEPTSALDVTVQKVILDHIAERTSSLGTAVMLITHDLALAAERARRLLVMYKGKVVELGSSEEILKNPRHPYTKKLLGAAARARRSPLRSKEQDTAPPAVVVDSLVKRYPIRSGTFSTSLLTAVDGVSFSIPSGSTVALVGESGSGKSTIAKIILGFEKPTRGTVTIAGVNTSSLSASGLRRMAARIQPVFQNPYGSLDPLRNIASIISEPLSIHKVGNRASRKARVVELLDQVALPQFIATRYPGELSGGQRQRVAIARALALKPEIMILDEAVSALDALVQSQILDLLDSLQKQLSVSYLFITHDLAVARAISDFVCVMHQGKLVEQGPAERIFNNPESKYTRTLLESIPGRLFSWG

SEQ ID NO: 27272 - DNA, 1557 bp, Tropheryma whipplei str. Twist
  CDS (1)..(1557): transl_table=11
ttgcgcgagtcagagggtgtcatgcttcaaatgaccggtataaccaagtcgttttctggggttaaagtccttgaggatatctccttttctctccgaaaaggtgaagtgcacgccatatgtggtgaaaatggcgcaggaaagtctaccttaatgaaaattctctctggcgtgattcctgatggatcatatgatggtgaaataatccttgagaataaaaaaaggcgttttaaaaaccttgctgccagtcaggcggccggggtggttatgattcaccaagagcttaccctcatacccgaaatgtccattgcggagaatatatttttgggtaatgagcagagatattccggacctttttctgggcaaatagactttacaaaaacccgcacaaaagctgtggaacttatgaaacttgttcatctaacagaatccccagacactcttattaaagatctcggggttggaaaacagcagcttgttgagatatgcaaggcgcttggtaaaaatgcaaagattctcgtttttgatgaaccaactgctgttttgaatgagtctgattctgaacatctcctgaatcttatgaagaaattcaagacccaaggtctgtcatccataatgatcagtcacaaattgaatgaggtaaaaaatgttgcagataccgtgactgttttacgagatggcaaaaaaatagataccatacctgccgacgcaacgacggaagatgatatcattcgcaaaatggcaggcagaagcttgtccacgcgcttccctgagctttcaccttctattggtaagggtgcctggcaaataaaggattggactgttatacatcccattaggcgagagatatacgtttcgaataacatctctcttacggttcacgatggtgaaattgtgggtcttgctggccttgtcggtgctgggagaacagagcttgcgcggtcaatatttggtcgtcagttcggaatctatacttctggaaaaatatgcaggaacaacaaagaacttaagataaacaaagtcagccaggcgatcggtaatcatattgcatatgtcacagaagatagaaaatcttttggcttcaatcagtttgatgatgtgaagaatacgattgcctctgcctcactgaaacagtttttaggtaaacaccattttttggatgatggcaaattgcacactgttgctgaggattaccgcaaaaagctaaaaataaagacggccagtgttgctgcaccaattacctctctgtctggaggcaaccagcagaaggttattttggccaaatggatttgtacgggacctgattttttgattcttgatgagccaacacgaggtatagatgtagccgccaaatacgagatttactctatcatcggagaacttgctgcctccgggaagtctattttgtttatttcttcagagcttcccgaactgttaggtatgacaaatcgtatatatactctgtttgagggtaaagtaactggggagtttaaaacttcagaggctagccaggagctacttatgcgttatatgacttcatatggaaataatgaaaattaa

SEQ ID NO: 27273 - protein, 518 aa, Tropheryma whipplei str. Twist
MRESEGVMLQMTGITKSFSGVKVLEDISFSLRKGEVHAICGENGAGKSTLMKILSGVIPDGSYDGEIILENKKRRFKNLAASQAAGVVMIHQELTLIPEMSIAENIFLGNEQRYSGPFSGQIDFTKTRTKAVELMKLVHLTESPDTLIKDLGVGKQQLVEICKALGKNAKILVFDEPTAVLNESDSEHLLNLMKKFKTQGLSSIMISHKLNEVKNVADTVTVLRDGKKIDTIPADATTEDDIIRKMAGRSLSTRFPELSPSIGKGAWQIKDWTVIHPIRREIYVSNNISLTVHDGEIVGLAGLVGAGRTELARSIFGRQFGIYTSGKICRNNKELKINKVSQAIGNHIAYVTEDRKSFGFNQFDDVKNTIASASLKQFLGKHHFLDDGKLHTVAEDYRKKLKIKTASVAAPITSLSGGNQQKVILAKWICTGPDFLILDEPTRGIDVAAKYEIYSIIGELAASGKSILFISSELPELLGMTNRIYTLFEGKVTGEFKTSEASQELLMRYMTSYGNNEN

SEQ ID NO: 27274 - DNA, 1629 bp, Tropheryma whipplei TW08/27
  CDS (1)..(1629): transl_table=11
atgaatacggttgagcccccacttctggatgttagaaatctacagatcgaattttctacacctacccgcgcaataaaggccgttgatggcgtcagttttacccttgaaaaaggtgacacgctcgctattgtcggtgagtcgggttctggaaagtcaacccttgcacattctgtaataggtctcttgccgggtacgggaagaatcaccgaggggcaaataaattatgccgggcgggaccttgtaaagttgtcccagaaacagctcgagggcgtccgcggacataatataggttttgttccacaggacccgatgcagagccttaatcctgttctgcgaatcggcgctcaggtagaggaggccattcgcgcaaatgcgcttgcatcagataataaagagatcagaaagttggcaatccaggctctagagaatgcgggtttgcccaacccctctgacagaatacgctcatatccgcaccaactttcaggtggcatgcaacaaagggtgttgatcggtatagcgctttcctgtcacccaggtcttcttatcgctgacgagccaacaagtgcattggatgtaacagttcagaaggttatccttgatcacatagctgagcgtacttcttctctcggcactgccgttatgctgattacgcacgaccttgccttagctgctgaacgggcgaggcgtcttctggttatgtacaaaggaaaagtagttgaactgggttcatctgaggagattctaaaaaaccctcgccatccttataccaagaaattactgggcgcagctgcaagggcacgacgctctccccttaggtcgaaagagcaagacactgcccctcctgcagttgttgtagacagtctggtaaaaagatatccaatacggtcagggacctttagtacctcacttcttaccgctgttgatggcgtgagcttttcgattcccagcgggtctacggttgctcttgtcggtgagtcgggttctggcaagtccactatcgcaaagataattcttgggtttgaaaagccgacgcgggggactgtaaccatagccggtgttaatacaagctcgctatctgcatctggcttgcgccgtatggctgcgaggatccagccggtatttcaaaatccgtatggcagcctggatccgcttcgcaatattgcatcaattatttctgagcctttgagtatccataaggttggaaacagggccagccgtaaagcccgcgttgtggagcttcttgaccaagtcgcactgccgcagtttattgcgactcgttatcccggtgagttgtctggcggtcagcgccagagggttgcaatagcccgtgctctagccctaaaaccagagataatgattctagatgaggcggtcagcgctctggatgctcttgttcagtcgcagatcttagatcttttggatagcttacagaaacagctttcggttagttatctatttatcacacatgatcttgctgttgcacgggctatctctgactttgtgtgtgttatgcaccagggcaagctggttgaacaaggcccggctgagcgtatcttcaacaatccggagagtaagtatacaaggactcttttggagtcgatacctggacgcctgttttcttggggttga

SEQ ID NO: 27275 - protein, 542 aa, Tropheryma whipplei TW08/27
MNTVEPPLLDVRNLQIEFSTPTRAIKAVDGVSFTLEKGDTLAIVGESGSGKSTLAHSVIGLLPGTGRITEGQINYAGRDLVKLSQKQLEGVRGHNIGFVPQDPMQSLNPVLRIGAQVEEAIRANALASDNKEIRKLAIQALENAGLPNPSDRIRSYPHQLSGGMQQRVLIGIALSCHPGLLIADEPTSALDVTVQKVILDHIAERTSSLGTAVMLITHDLALAAERARRLLVMYKGKVVELGSSEEILKNPRHPYTKKLLGAAARARRSPLRSKEQDTAPPAVVVDSLVKRYPIRSGTFSTSLLTAVDGVSFSIPSGSTVALVGESGSGKSTIAKIILGFEKPTRGTVTIAGVNTSSLSASGLRRMAARIQPVFQNPYGSLDPLRNIASIISEPLSIHKVGNRASRKARVVELLDQVALPQFIATRYPGELSGGQRQRVAIARALALKPEIMILDEAVSALDALVQSQILDLLDSLQKQLSVSYLFITHDLAVARAISDFVCVMHQGKLVEQGPAERIFNNPESKYTRTLLESIPGRLFSWG

SEQ ID NO: 27276 - DNA, 1557 bp, Tropheryma whipplei TW08/27
  CDS (1)..(1557): transl_table=11
ttgcgcgagtcagagggtgtcatgcttcaaatgaccggtataaccaagtcgttttctggggttaaagtccttgaggatatctccttttctctccgaaaaggtgaagtgcacgccatatgtggtgaaaatggcacaggaaagtctaccttgatgaaaattctctctggcgtgattcctgatggatcatatgatggtgaaataatccttgagaataaaaaaaggcgttttaaaaaccttgctgccagtcaggcggccggggtggttatgattcaccaagagcttaccctcatacccgaaatgtccattgcggagaatatatttttgggtaatgagcagagatattccggacctttttctgggcaaatagactttacaaaaacccgcacaaaagctgtggaacttatgaaacttgttcatctaacagaatccccagacactcttattaaagatctcggggttggaaaacagcagcttgttgagatatgcaaggcgcttggtaaaaatgcaaagattctcgtttttgatgaaccaactgctgttttgaatgagtctgattctgaacatctcctgaatcttatgaagaaattcaagacccaaggtctgtcatccataatgatcagtcacaaattgaatgaggtaaaaaatgttgcagataccgtgactgttttacgagatggcaaaaaaatagataccatacctgccgacgcaacgacggaagatgatatcattcgcaaaatggcaggcagaagcttgtccacgcgcttccctgagctttcaccttctattggtaagggtgcctggcaaataaaggattggactgttatacatcccattaggcgagagatatacgtttcgaataacatctctcttacggttcacgatggtgaaattgtgggtcttgctggccttgtcggtgctgggagaacagagcttgcgcggtcaatatttggtcgtcagttcggaatctatacttctggaaaaatatgcaggaacaacaaagaacttaagataaacaaagtcagccaggcgatcggtaatcatattgcatatgtcacagaagatagaaaatcttttggcttcaatcagtttgatgatgtgaagaatacgattgcctctgcctcactgaaacagtttttaggtaaacaccattttttggatgatggcaaattgcacactgttgctgaggattaccgcaaaaagctaaaaataaagaccgccagtgttgctgcaccaattacctctctgtctggaggcaaccagcagaaggttattttggccaaatggatttgtacgggacctgattttttgattcttgatgagccaacacgaggtatagatgtagccgccaaatacgagatttactctatcatcggagaacttgctgcctccgggaagtctattttgtttatttcttcagagcttcccgaactgttaggtatgacaaatcgtatatatactctgtttgagggtaaagtaactggggagtttaaaacttcagaggctagccaggagctacttatgcgttatatgacttcatatggaaataatgaaaattaa

SEQ ID NO: 27277 - protein, 518 aa, Tropheryma whipplei TW08/27
MRESEGVMLQMTGITKSFSGVKVLEDISFSLRKGEVHAICGENGTGKSTLMKILSGVIPDGSYDGEIILENKKRRFKNLAASQAAGVVMIHQELTLIPEMSIAENIFLGNEQRYSGPFSGQIDFTKTRTKAVELMKLVHLTESPDTLIKDLGVGKQQLVEICKALGKNAKILVFDEPTAVLNESDSEHLLNLMKKFKTQGLSSIMISHKLNEVKNVADTVTVLRDGKKIDTIPADATTEDDIIRKMAGRSLSTRFPELSPSIGKGAWQIKDWTVIHPIRREIYVSNNISLTVHDGEIVGLAGLVGAGRTELARSIFGRQFGIYTSGKICRNNKELKINKVSQAIGNHIAYVTEDRKSFGFNQFDDVKNTIASASLKQFLGKHHFLDDGKLHTVAEDYRKKLKIKTASVAAPITSLSGGNQQKVILAKWICTGPDFLILDEPTRGIDVAAKYEIYSIIGELAASGKSILFISSELPELLGMTNRIYTLFEGKVTGEFKTSEASQELLMRYMTSYGNNEN

SEQ ID NO: 27278 - DNA, 1584 bp, Pseudomonas syringae pv. tomato str. DC3000
  CDS (1)..(1584): transl_table=11
atgcaagacaacctgattgaaattcgcgacctgcgggtcgccttcaacggccacgaagtggtgcatggcatcagccttgatatccgccgtggcgaatgcctggcgctggtgggcgaatccggttccggcaaatcagtgaccgcgcattcgattctgcgcttgctgcccccgaaaaacgtcagtacccagggttcgattcgctatgacgggctggatctggtcacggccagcgacaagcaattgcgcagtctgcgcggcaaccgggtggcgatgatttttcaggagcccatgagctcgctgaacccgctgcacacggtcgaaaagcaaattggcgaaatcctcgtcacgcacaagggcctgaagggcaaggccgcgctgagccggacgctggagctgctggagctggtcggcattcgcgaaccgttgttgcggctcaaggcttatccgcatcaactgtcgggcgggcaacgccagcgggtcatgatcgccatggcgctggccaacgaacctgacttgctgatcgctgacgagccgaccaccgcgctggatgtgacggtgcaggtgaagattctcgagttgcttaaatcgctgcaacagcggctgaacatgtcgctgctgctgatcagccacgacctcaatctggtccggcgcatcgctcagcgagtctgtgtgatgcgtgagggcgagatcgtcgagcaggctgattgccaagccctgttcgataacccgcagcacccttacagccgtctgctgatcaatgccgagccggatggcgaaccggtgccgtccacgcacagcaatacgctgctgtcggtgcaggacctgaaggtctggttcccgctgggcaaagcctggttccagcgcgagcagcagtacgtgaaggcggtggacggggtcagtttcgagctgctcaagggcaagacgctgggcattgtcggcgagtccggttcgggcaaatcgacgctgggccaggcgattttgcggctggtggattcagagggcagcatccgctttggcaccaaggaactgagcttgcacagtcagcacctgatgcgcccgttgcgtcgccagctgcaggtggtgtttcaggacccgttcggcagcctgagcccgcgcatgaccgtagagcagatcatcgccgagggcttggtgacgcataaaatcggcacgcccaaagaacgtgagcagacggtgattcgggtgttgcaggaagtggggctcgatccggcgacgcggcatcgttacccgcatgagttttccggtggccagcgccagcgcatttccatcgccagggcattggtgcttgaaccggatctgatcctgctggacgagccgacgtcagccctcgaccgcaccgtgcagaagcagatcgtcgcactgttgcgcgacctgcaaatccgtcatggcctgacgtacctgttcatcagccatgacctggcggtggtgcatgcgctggcccatgacctgatcgtgatcaaggacggcaaagtggtcgaacaaggcccgtcccgcgagatcttcgccgcgccgcagcaggcctacacacaggaactgctgcgctcgtcggggctagtgtttgcctga

SEQ ID NO: 27279 - protein, 527 aa, Pseudomonas syringae pv. tomato str. DC3000
MQDNLIEIRDLRVAFNGHEVVHGISLDIRRGECLALVGESGSGKSVTAHSILRLLPPKNVSTQGSIRYDGLDLVTASDKQLRSLRGNRVAMIFQEPMSSLNPLHTVEKQIGEILVTHKGLKGKAALSRTLELLELVGIREPLLRLKAYPHQLSGGQRQRVMIAMALANEPDLLIADEPTTALDVTVQVKILELLKSLQQRLNMSLLLISHDLNLVRRIAQRVCVMREGEIVEQADCQALFDNPQHPYSRLLINAEPDGEPVPSTHSNTLLSVQDLKVWFPLGKAWFQREQQYVKAVDGVSFELLKGKTLGIVGESGSGKSTLGQAILRLVDSEGSIRFGTKELSLHSQHLMRPLRRQLQVVFQDPFGSLSPRMTVEQIIAEGLVTHKIGTPKEREQTVIRVLQEVGLDPATRHRYPHEFSGGQRQRISIARALVLEPDLILLDEPTSALDRTVQKQIVALLRDLQIRHGLTYLFISHDLAVVHALAHDLIVIKDGKVVEQGPSREIFAAPQQAYTQELLRSSGLVFA

SEQ ID NO: 27280 - DNA, 1455 bp, Vibrio parahaemolyticus RIMD 2210633
  CDS (1)..(1455): transl_table=11
atggctattcgctttagtcagcttgctgtacaaggacataccaccacactttccattgatgaatgggcaatcgataacaatgactcttggggcatcttcagtgcagaaggcgacatcggctccctgctaggcgatctgctttgtggcgaactgaaacccacacaagggacgttggatcttggtgaattgaaagtcgcgcaagtatcgctttcagagcaacaacgactacttgaacgtgagctagaaaaggacgacaccgattttctcgatcgtatcgaccaaggcagtaccgtttatgctttgatttttgagtgctgccaagatgcagcaacaacggaaagactgcttgaagagctcgaccttcaccatttaaaacagagcggttttcgtgttttatcgactggcgagaccagacgagtcatgctcgctagagcgttggcaacccaacctgaccttgtgcttctggataatccttttgtcggtctagatgttgcccaccgcgcttcactcgcaacctatttgcgctcgctttcacaatccgtccagatgttgattacgttttctcgcgagtccgacgtgccagaatggatagatcatgtggcgctatttaatgccggcagtcttgacagcacaatgaataaagaaagttgggacaaccacccgataatcgaacaaatcaagtcacaatcccaaaaacaaagcgaagagatgatggggttgatacgacgtcaccaacactctacgcacttcgatgatcctattttcgaactaaaaaatggccaagttgaatacactgaaaaacgtattttcactgacctgaattggcgcatagataaaggacaacactggcaagttaaaggaccaaacggctgtggtaaaagtacgttattggggctgatatttggcgatcatccacaatgctacagtaacgacatccacatcttcggcaagaagcgaggctctggcgaaagcatctgggagataaaacagcatattggcatggtctcctctgcgctgcatcttcaataccgagtgaattgcagcgcgttagaggtcattctgtctgggttctacgactcgattggcttgtataatcagccttcgcgtaaagagattgacgtagctaaagagtggcttgatatcttacacatgcgtcactacgaaaaaacgtctttcaaacagttggaatacggtcagcaacgtttgctgttgatcgcacgcgctatagtgaagcagccaacactactcattttggatgagccctatcaaggtctcgactttttaggacgacgcttggtaaaaaacacgttggaactgattgcacgtgaaaatctcagccaattgctttacgtctcccattaccaagaagacagccttgagagcatcaaaaacgatcttgagtttgtcttcgatgacgaagcgcagtgttatcgcgctcaaattcatcactggtaa

SEQ ID NO: 27281 - protein, 484 aa, Vibrio parahaemolyticus RIMD 2210633
MAIRFSQLAVQGHTTTLSIDEWAIDNNDSWGIFSAEGDIGSLLGDLLCGELKPTQGTLDLGELKVAQVSLSEQQRLLERELEKDDTDFLDRIDQGSTVYALIFECCQDAATTERLLEELDLHHLKQSGFRVLSTGETRRVMLARALATQPDLVLLDNPFVGLDVAHRASLATYLRSLSQSVQMLITFSRESDVPEWIDHVALFNAGSLDSTMNKESWDNHPIIEQIKSQSQKQSEEMMGLIRRHQHSTHFDDPIFELKNGQVEYTEKRIFTDLNWRIDKGQHWQVKGPNGCGKSTLLGLIFGDHPQCYSNDIHIFGKKRGSGESIWEIKQHIGMVSSALHLQYRVNCSALEVILSGFYDSIGLYNQPSRKEIDVAKEWLDILHMRHYEKTSFKQLEYGQQRLLLIARAIVKQPTLLILDEPYQGLDFLGRRLVKNTLELIARENLSQLLYVSHYQEDSLESIKNDLEFVFDDEAQCYRAQIHHW

SEQ ID NO: 27282 - DNA, 1632 bp, Vibrio parahaemolyticus RIMD 2210633
  CDS (1)..(1632): transl_table=11
atgtcttctcaaaccattctttcggtgaacaacttgtctgtcagctttacgacaaacgatgggatcgtcgatgcagtaaagaatgttagcttcgagctacaagcgggtgaaacgctgtctatcgtcggcgaatctggttccggcaaatcagtttccaccaacgctttaatgacgctgctaccagacaacgccattgtccatccagactcgtcaatcatgtttgaaggcgaatccattctggacaaaactgagcgacaaatgcagcgcattcgcggcgatcgcatcggaatgatattccaagagccgatgacttcactgaatccgtacatgcgggtcggtattcaagtggcggaagccatgatgtgtcatcgctcagtcaatcagcgcaaagccaaagaacgtgtgcttgaactgtttgatttggttcatttgccgaacccgcaacaagcctatgataagtatccacatgagttttctggtggtcagttacaacgcatcatgattgccatggcgctaattaacgaaccagacatcttaattgccgatgaaccgacaaccgcgcttgacgttactgttcaggcggaagtgctactgctgattaaagagattcaagcaaaaatggggatggctattttatttatcacccatgacctaggcgtggtgaaacactttgccgatcgtgtgttggtgatgtgcaaaggtgaggtcgttgaagaaggcatcactgagcacttgttttctgaacctcagcatgaatacaccaaaatgctgattaactcgattccgaaaggaagcaaaacccccgttgatgagaaagcgtcggaattgctcaacgctgaagacattcgtgtgaagtttttggtgaagcctcactttatcgcaagcaaaaacgagtacttcgaagcggtaaaaggcatctcgttacaactaaaacagggcgaaacactaggcattgttggtgaatccggttcgggtaaatccacgttagggcgtgcgttgatcggtttgctaccgtctaccggaaaaattgagtttaaaggtcaaaacatggcctcactcagtgataaagagcggttcgatctgaaaaaagacgtacaaatggtgttccaagatccatacggttcgctttcaccacgtatgaccatcggggaaatcatcactgaaggattaaccgtccaccgaccatatttaaacaagaaagaacgcatgcaaaaagcacgtgatgttctgcgcgaagtacgtttggatcccgcatctataaaccgctatccgcacgaattttccggtgggcaacgtcaacgtattgcgattgcacgagccttgattttggaaccgtcgtttatcttgcttgatgagccgacctcagccttagatcgctcagtacaactcactgtcatcgatcttctcaaagacttgcagaaaaaacacaatatcggttatttgttcataagccatgatttatcagtggttaaggcgctttctgatcgcgtattagtgatgcaaaaaggagaagtgatggagcaaggaagcgcacaagagattttccatcacccaaaaagtgagtacactagaaaactgattgatgcctcatttgatcttgaaaacaatgaaaatcaaaatgatgctgcttag

SEQ ID NO: 27283 - protein, 543 aa, Vibrio parahaemolyticus RIMD 2210633
MSSQTILSVNNLSVSFTTNDGIVDAVKNVSFELQAGETLSIVGESGSGKSVSTNALMTLLPDNAIVHPDSSIMFEGESILDKTERQMQRIRGDRIGMIFQEPMTSLNPYMRVGIQVAEAMMCHRSVNQRKAKERVLELFDLVHLPNPQQAYDKYPHEFSGGQLQRIMIAMALINEPDILIADEPTTALDVTVQAEVLLLIKEIQAKMGMAILFITHDLGVVKHFADRVLVMCKGEVVEEGITEHLFSEPQHEYTKMLINSIPKGSKTPVDEKASELLNAEDIRVKFLVKPHFIASKNEYFEAVKGISLQLKQGETLGIVGESGSGKSTLGRALIGLLPSTGKIEFKGQNMASLSDKERFDLKKDVQMVFQDPYGSLSPRMTIGEIITEGLTVHRPYLNKKERMQKARDVLREVRLDPASINRYPHEFSGGQRQRIAIARALILEPSFILLDEPTSALDRSVQLTVIDLLKDLQKKHNIGYLFISHDLSVVKALSDRVLVMQKGEVMEQGSAQEIFHHPKSEYTRKLIDASFDLENNENQNDAA

SEQ ID NO: 27284 - DNA, 1590 bp, Salmonella enterica subsp. enterica serovar Typhi Ty2
  CDS (1)..(1590): transl_table=11
atgacatctccattgcttgcgattgaaaatttatcggtaggtttccgtcagcaacagcacgtgcgccctgtcgttaacgccatttcgttacaggtgaacgccggggaaacgctggcgctggtcggcgagtcagggtcaggaaaaagcgtgacggcgctttccattctgcgtcttttgcctacccctcccgccgtctacctctccggcgatattcgctttcacggcgaatcattgcttcatgccagcgagcagacgctacgcggcgtacgcggcaataaaatcgccatgatttttcaggaaccgatggtttcacttaacccactgcatacgctggaaaaacagctctatgaagtgctgtcgctccatcggggaatgcgtcgggaggcggcaagggcggagatgatcggttgtctggatcgggtcggtatccgccaggcgagccagcgtctgcgcgattatccgcatcagctttccggcggcgaacgccagcgcgtcatgatagccatggcgctgttaacacggccggaattactgatcgccgatgagccgaccaccgccctcgacgtctccgtacaggcgcagatcttatctctactgcgggaactccagcgtgagctcaatatgggattgctgtttatcacccataacctcagcattgtaaaaaaactggcggattcagtggcggtaatgcaacacggcaagtgcgtagagaaccaacgcgccgacacgctgctctccgcgccgacccatccgtacacgcaaaaactactcaacagcgaacccactggcgatccggttccgctccccgccgggcaggcgccgttgctggaagtggacaagctgcgcgtcgccttcccaatccgcaaaggcattctgaagcgcgtcgtggatcataatgtggtggttaacaatatcagtttcaccctgcatccaggcgaaacgctgggtctggtcggcgagtcaggatcgggaaaaagcaccaccggtctggcgctgttacggcttatccgctccgaaggccgcatcgtgtttgacggtcaatcgctggatacgttaaaccgccgccagcttttacctgttcgccaccgtatccaggtcgtattccaggacccgaactcatcgctaaacccgcgtttaaacgtattgcaaattatcgaagaaggcctgcgcgtccaccagcctacgctttcaggcgcgcagcgcgaacagcaggtgaaagcggtcatgatggaagtcggcctggacccggaaacgcggcatcgttaccccgctgagttttccggcggccagcgtcaacgtatcgccgtcgccagggcgctgattttaaaaccgtcgcttattattctggatgaaccgacctcatcgctggataaaaccgttcaggcgcagattcttgccctcctgaaatcgctccagcaaaagcaccgtctggcctatatcttcattagccacgatctgcatgtagtacgcgcgctgtgccatcaggttatcgtgctgcgacagggggaggtggttgaacaggggcaatgcgagcgcgtgtttaccgcaccgcaacaagcgtatacgcgtcagctactcgcgttaagctga

SEQ ID NO: 27285 - protein, 529 aa, Salmonella enterica subsp. enterica serovar Typhi Ty2
MTSPLLAIENLSVGFRQQQHVRPVVNAISLQVNAGETLALVGESGSGKSVTALSILRLLPTPPAVYLSGDIRFHGESLLHASEQTLRGVRGNKIAMIFQEPMVSLNPLHTLEKQLYEVLSLHRGMRREAARAEMIGCLDRVGIRQASQRLRDYPHQLSGGERQRVMIAMALLTRPELLIADEPTTALDVSVQAQILSLLRELQRELNMGLLFITHNLSIVKKLADSVAVMQHGKCVENQRADTLLSAPTHPYTQKLLNSEPTGDPVPLPAGQAPLLEVDKLRVAFPIRKGILKRVVDHNVVVNNISFTLHPGETLGLVGESGSGKSTTGLALLRLIRSEGRIVFDGQSLDTLNRRQLLPVRHRIQVVFQDPNSSLNPRLNVLQIIEEGLRVHQPTLSGAQREQQVKAVMMEVGLDPETRHRYPAEFSGGQRQRIAVARALILKPSLIILDEPTSSLDKTVQAQILALLKSLQQKHRLAYIFISHDLHVVRALCHQVIVLRQGEVVEQGQCERVFTAPQQAYTRQLLALS

SEQ ID NO: 27286 - DNA, 1596 bp, Salmonella enterica subsp. enterica serovar Typhi Ty2
  CDS (1)..(1596): transl_table=11
gtgttagtttccagcaacgttaccatgcagttcggcagtaagccgctgttcgaaaatatttccgtcaaatttggcggcggcaaccgttacggcctgatcggcgccaacggtagcggaaagtccacttttatgaaaatcctcggcggcgacctggagccgacgctgggcaatgtttccctcgatccgaatgagcgcatcggtaagctgcgtcaggaccagttcgcttttgaaacattcaccgtacttgatactgtcattatggggcatggcgaactgtgggaagtcaagcaggagcgcgaccgtatctatgccttgccggaaatgagcgaagaagacggctataaagtcgccgatctggaagtaaaatacggcgagatggacggttattccgctgaggcgcgtgcgggcgaactgctgttgggggtgggcatcccgctggagcagcattacggtctgatgagtgaagtcgcgccaggctggaaattgcgtgtgctactggcgcaggcgttattctctaatccggacatcctgttgctcgacgaaccgaccaacaacctggatattgatactatccgttggctggagcaggtgctgaacgagcgcgatagcacgatgatcatcatttcgcacgaccgtcacttcctgaacatggtttgtacgcatatggcggatctggattacggtgacttgcgcgtctatccgggtaactatgatgagtatatgacggcggcgacccaggcgcgtgaacgtctgttggccgataatgcgaagaaaaaagcgcaaattgccgagctgcaatcttttgttagccgttttagcgccaatgcctctaaatcgcgtcaggcaacgtcgcgcgcgcggcagattgataaaatcaagctggaagaggtgaaagcctccagccgtcagaacccgttcatccgttttgagcaggataaaaaactgttccgtaacgctctggaagtggaggcgctgacgaaaggttttgataacggtccgctgtttaaaaatgtcaatttgctgctcgaagtcggcgagaagctggcggtactcggcaccaatggcgtgggtaaatctacgctgctgaagacgctggttggcgatctggacgccgatcacggcaccgttaaatggtcggaaaacgcgcgtattggttactacgcgcaggaccacgaatatgaattcgaaaatgacctgacggtgtttgaatggatgagtcagtggaaacaggaaggcgacgacgagcaggcagtgcgcagtattctgggccgcctgttatttagccaggatgatatcaaaaagcctgcgaaagtcctctccggtggcgagaagggccgtatgctgttcggcaaactgatgatgcaaaagccgaatatcctgatcatggacgaaccgactaaccacctggatatggagtcgatcgaatcgctgaatatggcgctggagctgtatcagggcacgctgatctttgtttcgcacgaccgtgagttcgtcagctcgctggcaacccgcgtcattgaaattacgccggagcgcgtggtggacttcagcggtaactacgacgattatttgcgtagtaaagggattgaaagctaa

SEQ ID NO: 27287 - protein, 531 aa, Salmonella enterica subsp. enterica serovar Typhi Ty2
MLVSSNVTMQFGSKPLFENISVKFGGGNRYGLIGANGSGKSTFMKILGGDLEPTLGNVSLDPNERIGKLRQDQFAFETFTVLDTVIMGHGELWEVKQERDRIYALPEMSEEDGYKVADLEVKYGEMDGYSAEARAGELLLGVGIPLEQHYGLMSEVAPGWKLRVLLAQALFSNPDILLLDEPTNNLDIDTIRWLEQVLNERDSTMIIISHDRHFLNMVCTHMADLDYGDLRVYPGNYDEYMTAATQARERLLADNAKKKAQIAELQSFVSRFSANASKSRQATSRARQIDKIKLEEVKASSRQNPFIRFEQDKKLFRNALEVEALTKGFDNGPLFKNVNLLLEVGEKLAVLGTNGVGKSTLLKTLVGDLDADHGTVKWSENARIGYYAQDHEYEFENDLTVFEWMSQWKQEGDDEQAVRSILGRLLFSQDDIKKPAKVLSGGEKGRMLFGKLMMQKPNILIMDEPTNHLDMESIESLNMALELYQGTLIFVSHDREFVSSLATRVIEITPERVVDFSGNYDDYLRSKGIES

SEQ ID NO: 27288 - DNA, 1536 bp, Salmonella enterica subsp. enterica serovar Typhi Ty2
  CDS (1)..(1536): transl_table=11
atgcaaatcagtcacaatactgcatcccctctgatttgtgtgcagaacatttataaaagttattccggcgtcgaagtactaaagggaattgactttactctgcatgcgggagaggtgcacgcattgcttggcggcaatggtgcgggtaaatcaacattaatgaagattattgccggtatagtcccgccagatggagggactatcgatattgctggtgtgcgttgcagtcatttaacgcctctgaaggcgcaccagtatggcatttacctggttccccaggagcctctgttatttccgagtttatctgtgcgggaaaatatcttgtttggcttgcagggacgtcaggcctccacggaaaaaatgcagcagctattaaaggcgatgggatgccaactcgatccggcgagcgctgcgggtacgcttgatgttgcagaccgccagatcgttgaaattatgcgcggcttgatgcgcgactcgcgaatcttaattcttgatgagcccacggcgtcgttaacgccagccgaaactgaccggttatttacgcgtctgcaagagttgctgaaaaagggtgtcggaattgtatttatttctcataagctgccagaaattagacagttagctcactgcgttagcgtgatgcgtgacggtaaaatcgcattattcagaaaaacgcatgacctttctaccgacgagattattcaagctatcaccccggcaacgcagggcgtcagtctttccgcgagtcaaaagttgtggctggaattgcctggcagccgcccgcagaacgaacgcggcgcgacggtattagcgctggagtcactgacgggcgaaggttttatgaatatcaaccttgaggtgcgggcaggcgaaatccttggtttggccgggttggtcggcgcgggacgcacagaattggctgaaacgctgtacggtattagaccggtcaatgcggggcggatgctgttcaatggtgaagaaattaacgccctgacaacccaacagcggttgcagctcggcctggtctatttgccggaagatcggcagtcatccgggctgtatcttgacgcttccctggcatggaatgtctgttcgctgacccacaaccaaaaaggattttggataaagccccagcgggataacgccacccttgaacgttaccaccgcgcgttaaatatcaaactcaataatgccgaacaggcggcgcgtactttatccggcggtaaccagcaaaaagtattgattgccaaatgcctggaggcctctccgcaattactgattgtcgatgaaccgacccgcggtgtcgatgtctccgcccgcagcgatatttatcagctgttgcgcagtatcgcgcaacaaaatgtcgcggtgctgtttatttcctccgatctggaagagatagagcagatggccgatcgcgtatatgtcatgcaccagggggaactgggggggcctgcgttatgcggcgaggaaattaacgttgataccatcatgcacgttgcgtttggcgaacatggtgcgtcggaggcaacatgttga

SEQ ID NO: 27289 - protein, 511 aa, Salmonella enterica subsp. enterica serovar Typhi Ty2 [sequence omitted]

SEQ ID NO: 27290 - DNA, 2742 bp, Salmonella enterica subsp. enterica serovar Typhi Ty2
  CDS (1)..(2742): transl_table=11
atgacgtcgctgacgctggtgcctgttcctcccgtggcgcagcttgagggggtgagccagcattacggaaaaacggtcgcgctgaacaatatcacgctggacattcccgcccgtagtatggtcgggctgattggtccggacggggtgggtaagtcgagcctgctgtcgctgatttctggcgcgcgggtgattgagcaagggaacgttatcgtcctgggcggcgatatgcgcgatgcgaaacatcgccgcgacgtctgtccgcgcatcgcctggatgccgcaggggctggggaaaaacctttatcacacgctatcggtttatgagaacgtcgattttttcgctcgtctctttggtcatgacaaagctgaacgcgaagcgcgtattaccgagctgctgaacagcaccggcctggcgccgtttcgtgatcgtcctgccgggaagctgtccggtgggatgaaacaaaagctggggctgtgctgtgcgctgattcatgacccggaattactgattcttgatgagcctaccaccggcgtggactcgctctcccgcgctcagttctgggacttaatcgacagtatccgccaacggcagaccaatatgagcgtgttggtcgcaacggcctatatggaagaggcggagcgttttgactggctggtggcgatgaatgcgggcgagatactggcaaccggcagcgcgcagcaactgcgggcaaaaacccatagcgcgacgctggagcaggcgtttatcgccctgttgccagaagcgcagcgccaggcgcataagccagtggtgatcccgccgtatcacgctgagcaggaagagattgccattgaggcgaaagatctgaccatgcgcttcggtaagttcgtcgcggttgaccatgttaatttccgcattccgcgcggcgagatttttggcttcctcggttcaaacggctgcggcaaatcgaccaccatgaaaatgctgaccggtctgcttcccgccagcgaaggccaagcctggctatttggccagccggtagacccgaacgacatcgatacccgtcgccgggtcgggtatatgtcgcaggctttttcgctctataacgaactcaccgtgcggcagaatctggaacttcatgcccgcctgtttcatattccgccagcggagatcccggcgcgcgttgcgcagatgatcgaacgctttatgctaacggaggtggaagatacgctccccgcttcgttgccgctcggtatccgccagcgtttatcgttggcggtagcggtgatccatcgcccggaaatgctgattcttgatgagccaacgtccggcgttgatccggtcgccagggatatgttctggcagcttatggtcgatctttcgcgtcaggataaagtgacgatttttatctcgacccattttatgaacgaagcggaacgttgcgaccgaatgtcattgatgcacgccggtaaagtgctcgccagcggtacgccgcaggaattggtgcaacagcggggcgcggccaatctggaagcggcgtttatttcctggctacaggaagctgcgggagcggcgcctgaaaccccaataccgccatcccagacgcccgccgcgtcagataaaccgtcgcggcagggattgagcttccggcgtttgttcagctacagtcgccgcgaagcgctggagctacgccgcgatccggtacgctcgacgctggcgctgctgggaacggtaattctgatgctgattatgggctatggcatcagtatggacgtggagaacctgcgttttgccgtactcgaccgcgatcaaaccgtcagcagccaggcatggtcgctcaatctggcgggatcgcgctattttatcgaacagccgccgctcgccagctatgacgagcttgaccggcggatgcgttcgggagagttggcggttgccattgagatcccgcctaattttggccgcgatattgctcgcggtacgccagcgcagattggcgtctgggtggatggcgccatgcccagccgcgccgagacggtgaaggggtacgttcaggcgatgcaccaaagctggctgcaggaggcggcaagtcgtcagccgaacccggttaaacaaaccgggctgctcaacattgaaacgcgctatcgctataacccggatgtgaaaagtctgcccgctatcgttccggcggtcattccgctgctgctcatgatgatcccgtcaatgcttagcgccctgagcgtggtgcgggagaaagagctggggccgatgattaatctgtacgtaacgccgacgacgcgcagtgaatttttgctgggtaaacaactgccgtatatcgcgctgggtatgctgaacttcttgctactgtgcgcgctgtcggtctttgtgttcggcgtgccgctgaaaggcagctttctcacgcttaccctcgcggcgctgctttacgtcatcatcgccaccggtctggggctgctgatctccacgtttatgaagagccaaatcgccgctatttttgggacgtcgattattaccctcattccggcaacacaattttccggcatgatcgatccggtggcttcgctggaaggaccgggaagatggatcggcgagatctacccgaccagccattttctgacgatcgcgcgcgggacgttttccaaagcgttggatctgtccgatctctggtcgttatttatgccgttactgattgccgtcccggtggtgatgggtctgagcattctgctgctgaaaaaacaggaggggtaa

SEQ ID NO: 27291 - protein, 913 aa, Salmonella enterica subsp. enterica serovar Typhi Ty2
MTSLTLVPVPPVAQLEGVSQHYGKTVALNNITLDIPARSMVGLIGPDGVGKSSLLSLISGARVIEQGNVIVLGGDMRDAKHRRDVCPRIAWMPQGLGKNLYHTLSVYENVDFFARLFGHDKAEREARITELLNSTGLAPFRDRPAGKLSGGMKQKLGLCCALIHDPELLILDEPTTGVDSLSRAQFWDLIDSIRQRQTNMSVLVATAYMEEAERFDWLVAMNAGEILATGSAQQLRAKTHSATLEQAFIALLPEAQRQAHKPVVIPPYHAEQEEIAIEAKDLTMRFGKFVAVDHVNFRIPRGEIFGFLGSNGCGKSTTMKMLTGLLPASEGQAWLFGQPVDPNDIDTRRRVGYMSQAFSLYNELTVRQNLELHARLFHIPPAEIPARVAQMIERFMLTEVEDTLPASLPLGIRQRLSLAVAVIHRPEMLILDEPTSGVDPVARDMFWQLMVDLSRQDKVTIFISTHFMNEAERCDRMSLMHAGKVLASGTPQELVQQRGAANLEAAFISWLQEAAGAAPETPIPPSQTPAASDKPSRQGLSFRRLFSYSRREALELRRDPVRSTLALLGTVILMLIMGYGISMDVENLRFAVLDRDQTVSSQAWSLNLAGSRYFIEQPPLASYDELDRRMRSGELAVAIEIPPNFGRDIARGTPAQIGVWVDGAMPSRAETVKGYVQAMHQSWLQEAASRQPNPVKQTGLLNIETRYRYNPDVKSLPAIVPAVIPLLLMMIPSMLSALSVVREKELGPMINLYVTPTTRSEFLLGKQLPYIALGMLNFLLLCALSVFVFGVPLKGSFLTLTLAALLYVIIATGLGLLISTFMKSQIAAIFGTSIITLIPATQFSGMIDPVASLEGPGRWIGEIYPTSHFLTIARGTFSKALDLSDLWSLFMPLLIAVPVVMGLSILLLKKQEG

SEQ ID NO: 27292 - DNA, 1470 bp, Bacteroides thetaiotaomicron VPI-5482
  CDS (1)..(1470): transl_table=11
atggaaaaaggagaacccatagtcgttgtaaaggaaatcagcaagagctacgggaaagtagaggcactgaaagaggtttcttttgcggtagagcagggagaagttttcgggctgatcggtcctgacggggcggggaagagtaccttattccgcatcctgaccactttactgttggctgataaaggtacggcaactgtcaacggactggatgtggtgacggattacaaacagattcgtacgaaagtaggatatatgcccggacggttctcgctttatcaggacctttccgtagaagagaatctggaattttttgctacggtatttcatacgttgatacaggaaaactatgatttgattaaagatatttatcagcagatcgagccttttaaaaaaagaagggcaggcgctttgtcgggaggtatgaagcagaagctggcattgagctgttccctgattcataaacctgatattttatttctggatgaaccgactacgggtgtagatcctgtgtctcggaaagaattttggcagatgctccgtaatttgagaaaacaggggattacgatcattgtttccactcctattatggatgaggctcgtcaatgcgaccggattgcttttattaatcacgggcaggtgcacggaatcgatacgcccgaacggattcttcagaagtttgcttccattctttgtccgccacccttggaacgggaggaggcgcaacagatggcagctcctgttatcgaggtggagcagctgaccaaatccttcggacattttacggcagtcgatcatatctcttttcaagtgcagcggggagaaattttcggttttcttggagccaatggagcaggtaagacgactgcgatgcgtatgctttgcggattgagccgtccgacttcgggagtaggaaaggtggcaggctatgacatctttcgggaagccgaacaagtcaaaaggcatatcggatatatgagtcagaaattctctttgtatgaggatcttaaagtctgggagaatatccgtctctttgccggaatttatgggatgaaggagatggagattgaagaaaagacagatgaattgttagaacgcctgggatttgcagacgaacgggatacgttggtgaaaaaccttcctttgggttggaaacagaaactggccttttctgtctctatcttccatgagccgaaaatagtcttccttgatgaaccgaccggaggagttgatcctgctactcgcaggcagttctgggagctgatttatcaggctgccgatcgtggaatcactgtatttgttaccacacactatatggatgaagcggaatattgcaaccggatatcgattatggtggacggccagatcaaggcactggatacgccggcccggctgaaagaacagtttggtgtggagacaatggatgatgtgtttcaacaacttgcccgccatgcggtgcgtaaagcggattga

SEQ ID NO: 27293 - protein, 489 aa, Bacteroides thetaiotaomicron VPI-5482
MEKGEPIVVVKEISKSYGKVEALKEVSFAVEQGEVFGLIGPDGAGKSTLFRILTTLLLADKGTATVNGLDVVTDYKQIRTKVGYMPGRFSLYQDLSVEENLEFFATVFHTLIQENYDLIKDIYQQIEPFKKRRAGALSGGMKQKLALSCSLIHKPDILFLDEPTTGVDPVSRKEFWQMLRNLRKQGITIIVSTPIMDEARQCDRIAFINHGQVHGIDTPERILQKFASILCPPPLEREEAQQMAAPVIEVEQLTKSFGHFTAVDHISFQVQRGEIFGFLGANGAGKTTAMRMLCGLSRPTSGVGKVAGYDIFREAEQVKRHIGYMSQKFSLYEDLKVWENIRLFAGIYGMKEMEIEEKTDELLERLGFADERDTLVKNLPLGWKQKLAFSVSIFHEPKIVFLDEPTGGVDPATRRQFWELIYQAADRGITVFVTTHYMDEAEYCNRISIMVDGQIKALDTPARLKEQFGVETMDDVFQQLARHAVRKAD

SEQ ID NO: 27294 - DNA, 1455 bp, Bacteroides thetaiotaomicron VPI-5482
  CDS (1)..(1455): transl_table=11
atgattcaaaatacattcaacatagcggggggcgtagcacgcaacccgcttgtgcgtttagctgctcccatcacggcaacgatttcagccggagaacacattgcgattgtaggtcccaacggaggaggaaaaagtctttttgtcgatacgctgatcggtaaatacccattgcgtgaagggacgctgcaatatgacttttctcctgctgccacccagaccgtctatgataatgtgaagtacatcgctttccgtgacacttacggggctgccgatgctaattattactatcagcaacgctggaacgcccacgatcaggacgaagcacccgatgttcgtgaaatgctgggagaaattaaggacgaacaactgaaacaagaactgtttgagctttttcgcattgagccgatgctcgataagaaaataattcttctctccagtggcgaactgcgtaaattccagctggtcaaaactctgctgacagctccccgtgtattgattatggacaatccgtttattggtctggatgcacctacccgcgagttgctgttttctttactcgatcgcttgacaaaaatgtcgtccgtacagattattctggtattgtcaatgctggatgatattccttcatttattacccatgtaattcctgtggataaaatgacggtgtaccccaaaatggaacgtgaggcctatctggaagcttttcgttccagagatgcagccgtttcttttgatgagttacagcagcgtatcgtcaatttgccctatgatggcaataattacgattctgatgaagtggtcaaactgaataaagtcagcattcgctatgatgaccgcactattctgaaagatctcgactggacggtgcggcgtggtgagaaatgggcattgagcggtgaaaacggggccggaaaatctactttgttaagccttgtctgtgcggataatccgcaatcatatgcttgtgacatcagccttttcgggcggaagcggggtacaggggagagtatttgggaaattaaaaagcatattggctatgtaagtccggagatgcatcgtgcttatctcaaaaatctgccggctattgaaatcgtggccagtgggcttcatgacagcatcgggctttacaaacgtccccagccggaacaaatggccatctgcgaatggtggatggatatatttggtattgcggaattgaaagacaacccttttttgcaactttccagtggagaacaacggctggcattgctggcacgtgcttttgtgaaggacccggagctgctgattctggatgaaccgcttcacggtctggatacttacaaccgtcgtcgggtaaagaagattattgaggctttctgccatcgcaaagacaagacgatgattatggtgactcactacgaatcagagttgccgggcactattacagaccgtattttcctgaagagaaaccgatga

SEQ ID NO: 27295 - protein, 484 aa, Bacteroides thetaiotaomicron VPI-5482
MIQNTFNIAGGVARNPLVRLAAPITATISAGEHIAIVGPNGGGKSLFVDTLIGKYPLREGTLQYDFSPAATQTVYDNVKYIAFRDTYGAADANYYYQQRWNAHDQDEAPDVREMLGEIKDEQLKQELFELFRIEPMLDKKIILLSSGELRKFQLVKTLLTAPRVLIMDNPFIGLDAPTRELLFSLLDRLTKMSSVQIILVLSMLDDIPSFITHVIPVDKMTVYPKMEREAYLEAFRSRDAAVSFDELQQRIVNLPYDGNNYDSDEVVKLNKVSIRYDDRTILKDLDWTVRRGEKWALSGENGAGKSTLLSLVCADNPQSYACDISLFGRKRGTGESIWEIKKHIGYVSPEMHRAYLKNLPAIEIVASGLHDSIGLYKRPQPEQMAICEWWMDIFGIAELKDNPFLQLSSGEQRLALLARAFVKDPELLILDEPLHGLDTYNRRRVKKIIEAFCHRKDKTMIMVTHYESELPGTITDRIFLKRNR

SEQ ID NO: 27296 - DNA, 1425 bp, Enterococcus faecalis V583
  CDS (1)..(1425): transl_table=11
gtgaaagaattgtttgaatttaacaatgtttctttttcatataaggatgttaaggaacaagcgcttgttgaccttaatttttcaataaaaaaaggtagtcttacattgattactggttcttctgggagtgggaaatccacactattaaagttaatgaatggacttattccaagactttatgacggaaaattggttggggaaattttatttgaaaataactcgctacaatccttaacacaagaaagtatatcaaaaaatattggctacgtaagtcaagatcctagaggacaattctttacaacaaatacaacgagtgagttagtattttcgatggaaaactttggatttacaaaagagcatatggataaaagaatcaatgaattagctgaattattagatctttcaaatatattagataaaaacattttttcgctatcaagtggtgaacggcagaaaatttctattggatgtagtttatcgctaaactctaaattaattatattggatgaaccgtcttcaaatttggacttccaagcgactaagaaacttgctgacttactttgtgatttaaaaaataaaggatttactattgttatagctgaacatcgtttttattatttgaaagaattaattgatcaagttctatttgttaaaaatagaactgtaaaaactacaactattcagttgttaaaaactgaaaacaataacgcattaaggaaatttgacatttttaatagttcgattgaagttccctatatcgaaaaggcaagtgcagatgtattaaaagttgaagaaattacttatgaaaatattctaaaagacataaattttgatgtcaaagttggagatgttattggtttggtagggaaaaacggtgtggggaaaacaaccttactaagaatactcatgaagattattcgccctaccaaaggaaagataatcgaaaataaaaaaaatttgtcatcgccgtttttagtaatgcaagaaatggattaccaatttttcacagaatcagttaggagcgagttagccctggggaatgaaatagttagtaaagatcagcaagaaaaaattttaaaaaaaatggaactttataaaatgaaagatcaattaccgtttgatttatccggtggagaaaaacaaagattattggtttctatagcttcattgtcaaaaactaatttatttctatttgatgaacctacaagtgggttggattatatcaatatggaaaggattgctgaccttattaaagatttaaaagaaaagggtgcagtagtcatagccactcatgatccggaatttctttataaaatatgcaatagaattatttatttaaaaaatggtggaataaaaaaagatataaaacttagagtagaagattcaactttgatagaacagatttttaatgacataacgaaatag

SEQ ID NO: 27297 - protein, 474 aa, Enterococcus faecalis V583
MKELFEFNNVSFSYKDVKEQALVDLNFSIKKGSLTLITGSSGSGKSTLLKLMNGLIPRLYDGKLVGEILFENNSLQSLTQESISKNIGYVSQDPRGQFFTTNTTSELVFSMENFGFTKEHMDKRINELAELLDLSNILDKNIFSLSSGERQKISIGCSLSLNSKLIILDEPSSNLDFQATKKLADLLCDLKNKGFTIVIAEHRFYYLKELIDQVLFVKNRTVKTTTIQLLKTENNNALRKFDIFNSSIEVPYIEKASADVLKVEEITYENILKDINFDVKVGDVIGLVGKNGVGKTTLLRILMKIIRPTKGKIIENKKNLSSPFLVMQEMDYQFFTESVRSELALGNEIVSKDQQEKILKKMELYKMKDQLPFDLSGGEKQRLLVSIASLSKTNLFLFDEPTSGLDYINMERIADLIKDLKEKGAVVIATHDPEFLYKICNRIIYLKNGGIKKDIKLRVEDSTLIEQIFNDITK

SEQ ID NO: 27298 - DNA, 1542 bp, Streptomyces avermitilis MA-4680
  CDS (1)..(1542)
atggcgggacccgtcctggaaatgcgctcgatcgtcaagacctttcccggcgtcaaggcgctctcggacgtcaccctgaccgtccgtccgggcgaggtccacgccatctgcggggagaacggcgccggcaagtccaccctgatgaaggtgctctccggcgttcacccgcacgggagttacgagggcgaggtcctcttcgagggggagacctgccgcttcaaggacatccgggcgagcgagcagcacggcattgtgatcatccaccaggagctggcgctggtgccgtacctctccatcgcggagaacatcttcctcggcaacgaacacgccgcgcgcggggtcatcagctggaacgacacgctgaagcacgcgagccggctgatgcgccgggtcggtctcgacgatcacccgcagacccgtgtcgccgacatcggcgtgggcaagcagcagctcgtcgagatcgcgaaggccctggcgaaggaggtgaagctgctgatcctcgacgagccgaccgcggcgctcaacgacgaggacagcggcaaactcatcgatctcatcctggagttgaagaaccagggcatcacctcgatcatcatctcccacaagctcaacgagatcgagcgggtcgccgactcggtgacgatcctccgggacggccggaccatcgagaccctcgatgtgaaggccccggagaccaccgaggagcggatcatcaacggcatggtcggccgtgacctcgaccaccgcttcccggagcgcaccccgcaccagccggaagcggacgcggcaccggccctggagatccgcaactggaccgtgcaccacccgatcgaccagcagcgcaaggtggtcgatgatgtgtcactctccgtgcggcgcggggagatcgtcggcatcgcgggtctgatgggcgcgggccgcaccgagctcgcgatgagcgtcttcgggcgcacctacggccggtacgcgcagggcaccgtcctcaaggacggcaaggagatccgtacgaagaccgtccccgaggcggtcgcccacggcatcgcgtacgtcaccgaggaccgcaagcactacgggctcaacctcatggacaccatcggccgcaacatctcgctcagcgcgctgggcaaggtcgccaaacggggtgtcgtcgacgaccacgaggaacgcaaggtcgccgagggcttccggaagtccatgaacatcaaggcacccaccgtcttcgagccggtcggccggctgtcgggcggcaaccagcagaaggtcgtcctcagcaagtggatcttcgcgggtcccgatgtgctgatcctggacgagccgacccgcgggatcgacgtgggcgccaagtacgagatctacacggtcatcgaccagctggccgccgagggcaaggcggtcgtcttcatctcctccgaactccccgaactgctcggcatgtgcgaccgcatctacaccatggcagccgggcggctcaccggtgaggttccgcgttccgaagcgacgcaggaagtgctgatgcgccacatgaccaaggacaagaggtag

SEQ ID NO: 27299 - protein, 513 aa, Streptomyces avermitilis MA-4680
MAGPVLEMRSIVKTFPGVKALSDVTLTVRPGEVHAICGENGAGKSTLMKVLSGVHPHGSYEGEVLFEGETCRFKDIRASEQHGIVIIHQELALVPYLSIAENIFLGNEHAARGVISWNDTLKHASRLMRRVGLDDHPQTRVADIGVGKQQLVEIAKALAKEVKLLILDEPTAALNDEDSGKLIDLILELKNQGITSIIISHKLNEIERVADSVTILRDGRTIETLDVKAPETTEERIINGMVGRDLDHRFPERTPHQPEADAAPALEIRNWTVHHPIDQQRKVVDDVSLSVRRGEIVGIAGLMGAGRTELAMSVFGRTYGRYAQGTVLKDGKEIRTKTVPEAVAHGIAYVTEDRKHYGLNLMDTIGRNISLSALGKVAKRGVVDDHEERKVAEGFRKSMNIKAPTVFEPVGRLSGGNQQKVVLSKWIFAGPDVLILDEPTRGIDVGAKYEIYTVIDQLAAEGKAVVFISSELPELLGMCDRIYTMAAGRLTGEVPRSEATQEVLMRHMTKDKR

SEQ ID NO: 27300 - DNA, 1533 bp, Bacillus cereus ATCC 14579
  CDS (1)..(1533): transl_table=11
atggaatacgtaattgagatgaataacattacgaaagtattcccaggcattgtagcgaatgatgatattacgctgcaagtaaagcagggtgagatacatgctttacttggagaaaatggtgcagggaaatccacattgatgaatgtactatttggtttgtaccaaccagagcagggtgaaattaaaattaaaggtaaacctgtaaaaatcacaaatccgaatatagcaaatgaccttggtattggaatggtccatcaacactttatgcttgttcataattttacagttacagagaatattattctcggaaatgaaccgaagaaaaaagggaaaattgctgttgaggaagctgctaaagaaattcaaaaactgtctgaacaatacggtttatctgtagatccatatgcgaaaatacaggatatttcagttggtatgcagcagcgtgttgagattttgaaaactctttaccgcggtgcagaaattttaatatttgatgaaccaacagctgtgttaacaccgcaagaaattcatgagctaattcaaattatgaaaaagcttgtgcaagaaggaaaatctattgttcttattacacataagttgaaagaaattatggaagtttgcgatcgttgtacgattattcgtaaaggaaaagggattggaacggttgacgttgcaaatacggatgaaaataaacttgcagaattaatggtcggacgtcaagtgaattttaaaacagaaaaaatagacgcgaagccaaaagaagaggtactttcaattgcaaaccttgttgttcacgatgcacgtcaactacctgctgtaaaaggccttgacttaactgttcgtgcgggggaaattgttgggattgcagggattgatggaaacggacaaagtgaattaatagaagcaattactggtttacgaaaagttgagtcaggttctattgcaattaaaggaaaagaaataacaaattggcttgttagaagaataacagaagaaggaattggtcatattccagaagatcgtcataaacacggactcgttcttgatttttctgttagagataatatagttctgcaaacgtattataaaaatccattttcaaagaaagggattttaaatttcagcaaaattacagaaaaagcaaaggctcttattgaacagtttgatgtgcgtacacctagtgagcaaacgttagcacgcgctctatctggggggaatcaacaaaaagcaattattgcacgtgaagtagaccgaaatccagatttattaattgcggcacagccaacacgtggtttagatgtaggagcaattgaatttattcataagagattaatagagcaaagggataaaggaaaaggtgtattacttttatcattagagttagatgaaatcttaaatgttagcgatcgaattgctgttatttatgaaggggaaattgtagcaatagttgatgcgaaagaaacgaatgaacaacagcttggattgttaatggctggaggaacaaagaaggagcaggtgggtacaaatggctaa

SEQ ID NO: 27301 - protein, 510 aa, Bacillus cereus ATCC 14579
MEYVIEMNNITKVFPGIVANDDITLQVKQGEIHALLGENGAGKSTLMNVLFGLYQPEQGEIKIKGKPVKITNPNIANDLGIGMVHQHFMLVHNFTVTENIILGNEPKKKGKIAVEEAAKEIQKLSEQYGLSVDPYAKIQDISVGMQQRVEILKTLYRGAEILIFDEPTAVLTPQEIHELIQIMKKLVQEGKSIVLITHKLKEIMEVCDRCTIIRKGKGIGTVDVANTDENKLAELMVGRQVNFKTEKIDAKPKEEVLSIANLVVHDARQLPAVKGLDLTVRAGEIVGIAGIDGNGQSELIEAITGLRKVESGSIAIKGKEITNWLVRRITEEGIGHIPEDRHKHGLVLDFSVRDNIVLQTYYKNPFSKKGILNFSKITEKAKALIEQFDVRTPSEQTLARALSGGNQQKAIIAREVDRNPDLLIAAQPTRGLDVGAIEFIHKRLIEQRDKGKGVLLLSLELDEILNVSDRIAVIYEGEIVAIVDAKETNEQQLGLLMAGGTKKEQVGTNG

SEQ ID NO: 27302 - DNA, 2772 bp, Nitrosomonas europaea ATCC 19718
  CDS (1)..(2772): transl_table=11
atgagtgtggatatctctacgaaaccggtcatccgtgtacagaatgtcaatttacgttacggtgacactctcgcactcgatgctctcgacgtagagattcccgcccattgcatggcagggttgatcggtccggatggagtcggcaaatccagtctgatgtcgttactgaccggtgcgcgagtaatgcagcagggtcagatcgaagtcctgggaggcgatatcgcagatccggcacatcgtcgtgtggtctgcccacggattgcttacatgccacagggattgggcaggaatctgtaccacacgctctcggtattcgaaaatatcgatttcttcggtcagttgttcggtcacgaacagatcgaacgtcatcagcgtatcgacgaattgctcgaaagtaccgggctggcccctttccgggatcgccctgccggtaaattatcgggtggaatgaaacagaaactcggcttgtgctgtgcactgattcacgaccccgattttctggtgctggatgaaccgactactggtgtcgatccactatcacgtgcgcagttctgggagctgatcagtcgtttgcgtacacaacacgtcaatatgagtgtactggtttctactgcctatatggacgaggcagaacgctttgactggctggcagcaatggatgccggcaaaattcttgctaccgggactgcagccgagctgcgtacacgtactgacaccgactcgctggaagccgccttcatccggttattgccggcagaaaaacgcagaggttaccgagagatcattatcccgccacgcgatatccgggatgatcaggaaattgccatcgaggcacacgatctgaccatgcgttttggcgattttgtcgcggttgatcgggtcaatctgcatatttcgcgtggtgagatctttggttttctcggctccaacggttgtggtaaatccaccaccatgaaaatgctgaccggcctgctaccccccagtgaaggagaagcgtggctattcggtcaggtcatcgatgccggtaatctggctacccgtaaacgagtcggctatatgtctcaggcgttttcactctactccgagctgactgtgcgacagaatctggagctgcatgcaaagctgttccacctgcctgatgccgatattcctgcgcgtgtcaccgaaatggctgaacgttttctgctcgaagcagtcatggacagctttcccgatgctctgccgctgggtatgcgtcagcggttgtcactggcagtcgcagtcattcatcagccggatctgctgattctcgacgaaccgacctccggtgtcgatccaatcgcacgggacatgttctgggagctgatcatcggcctggctcgccgtgatcaggtaaccatcttcatttccacccatttcatgaacgaggccgagcgctgcgatcgtatctcgctgatgcatgccggcaagattctcgccagtgatacccctgccgcactgatcgagcgtagcggccattccacactggaagctgctttcatcagttacctgaaacaggcaagtggcatcagtgataaaccggtgaaaatgcctgttccctccactacccaggcccaggcgacggttgcgccagaggagactcacgctgtcatgacactcaatacccgtttcagtctgttacgcctgttcagctacaccttgcgcgaagcactggaactgcgccgtgatccgatccgcggttcaatcgcattattcgggactgtattactgatgttcatcatgggatacggtatcagtatggatgtcgagaatctgcgctttgccgtactggatcgcgaccagaccacactcagccggaactatatactcgatctcagcggctcacgttatttcatcgaacagccaccaatcactgattatggcgagctcgatcaacgtatgcgcagcggtgagttgagtctcgcattggaaattcccccgaatttcgcacgtgatctggcacgcggtgataacgtcagaatcggcgcctggatcgatggcgcaatgcccacacgcgccgagaatatacttggttatgtacaggcgatgcatcaaaactggctgctcgagcaggcacgccatcatgccacagatcatttacctgccgggctgatgacgatcgaaacacgttttcgctataaccctgacgtcaaaagtttgccggctatcgtccctgcggtgatacctatgttgctgatgctgattctggccatgctcagcgcactcagtgtcgtacgggaaaaggagctgggttccattctcaatctgtatgtcacgcccgtgaccagactggaatttctccttggcaagcagcttccttacattgccctggggatgatcaacttttttctattgtgcatactggctgtattcgttttcggcgtaccgcacaagggggatttcctgttactgacagtggcagcattattgtatgtgaccgccgctaccggtctcggcttgctggtttcagcctttacacgcagccagattgccgccatcttcgcgacatcgctggctaccatcatcccttcttcacgcttttccggcatgatcgatccggtttcttcgctggaaggcggtgcacgactggttggtgagatttttcccgccacgtactttctgacgatcagtcgaggaactttttccaaagcgctgggatttgctgagcttggctctttgttgctgccccttgcactcgccattcctgtcatcaccagtctggcggtcatactgttgaagaaacaggaacgttag

SEQ ID NO: 27303 - protein, 923 aa, Nitrosomonas europaea ATCC 19718
MSVDISTKPVIRVQNVNLRYGDTLALDALDVEIPAHCMAGLIGPDGVGKSSLMSLLTGARVMQQGQIEVLGGDIADPAHRRVVCPRIAYMPQGLGRNLYHTLSVFENIDFFGQLFGHEQIERHQRIDELLESTGLAPFRDRPAGKLSGGMKQKLGLCCALIHDPDFLVLDEPTTGVDPLSRAQFWELISRLRTQHVNMSVLVSTAYMDEAERFDWLAAMDAGKILATGTAAELRTRTDTDSLEAAFIRLLPAEKRRGYREIIIPPRDIRDDQEIAIEAHDLTMRFGDFVAVDRVNLHISRGEIFGFLGSNGCGKSTTMKMLTGLLPPSEGEAWLFGQVIDAGNLATRKRVGYMSQAFSLYSELTVRQNLELHAKLFHLPDADIPARVTEMAERFLLEAVMDSFPDALPLGMRQRLSLAVAVIHQPDLLILDEPTSGVDPIARDMFWELIIGLARRDQVTIFISTHFMNEAERCDRISLMHAGKILASDTPAALIERSGHSTLEAAFISYLKQASGISDKPVKMPVPSTTQAQATVAPEETHAVMTLNTRFSLLRLFSYTLREALELRRDPIRGSIALFGTVLLMFIMGYGISMDVENLRFAVLDRDQTTLSRNYILDLSGSRYFIEQPPITDYGELDQRMRSGELSLALEIPPNFARDLARGDNVRIGAWIDGAMPTRAENILGYVQAMHQNWLLEQARHHATDHLPAGLMTIETRFRYNPDVKSLPAIVPAVIPMLLMLILAMLSALSVVREKELGSILNLYVTPVTRLEFLLGKQLPYIALGMINFFLLCILAVFVFGVPHKGDFLLLTVAALLYVTAATGLGLLVSAFTRSQIAAIFATSLATIIPSSRFSGMIDPVSSLEGGARLVGEIFPATYFLTISRGTFSKALGFAELGSLLLPLALAIPVITSLAVILLKKQER

SEQ ID NO: 27304 - DNA, 1533 bp, Bacillus anthracis str. Ames
  CDS (1)..(1533): transl_table=11
atggaatacgtaattgagatgaacaatattacaaaagtattcccaggcattgtagcgaatgacgatattacgctgcaagtaaaacagggagagatacatgctttacttggagaaaatggtgcagggaaatcaacgctgatgaatgtgttgttcggtttgtatcaaccagaacagggagagattaaaattaaaggaaatcctgttaaaattacaaatccgaatatagcaaatgaccttggtattgggatggtccatcagcattttatgcttgttcataattttacagttacagagaatattattctgggaaatgaaccgaagaaaaacgggaaaattgctgttgaagaggctgcaaaagaaattaagcaattatctgaacagtacggtttagctgttgatccacatgcgaaaattgaagatatttctgttgggatgcagcaaagggttgaaatattaaagactctttatcgtggtgcggagattttaatatttgatgaaccaactgcggtgttaactcctcaagaaattcatgagttgattcaaattatgaaaaagcttgtgcaagaggggaaatctatcattcttattacacataagttaaaagaaattatggaagtttgcgatcgttgtacaattattcgtaaaggtaaggggattggtactgttaatgtagcggaaactgatgagcataaacttgcagagttaatggtcggacgtcaagtgaattttaaaacagaaaaaatagaagctaaaccaaaggaagaagtactatctattgcaaacctaattgttcatgatacgcgcaagttacctgctgtaaaaggccttgacttaactgttcgtgcaggagaaatcgttgggattgcagggattgatggaaatggtcaaagtgaattaatagaggcgattactggtttacgaaaagttgagtcaggttctattgcaattaaaggaaaagaaataacaaattggcctgttcgaagaataacagaagaggggattggtcatattcctgaagaccgtcataaacacggacttgttctcgatttttctgttcgggacaatattgttttacaaacatactataaaaatccattttcaaagaaagggattttaaattttagtaaaatcacacaaaaagcaaaagcgcttattgaacagtttgatgtacgtacacctagtgaacaaacgttagctcgcgctctatctggtggaaaccaacaaaaggcaattattgcacgtgaagtagatcgtaatccagatttattaattgcagcgcagccaacccgtggtttagatgtaggtgccattgaatttattcataaaaaattgattgagcagagagataatggtaaggcagtattgcttttatctttagagctagatgaaattttaaatgtaagtgatcgagttgctgttatatatgaagggaaaattgtagcaattgtggatgcaaaagagacaaacgaacaacagcttggattattaatggccggcgggacagggaaagagaaggtgaacacaaatggctaa

SEQ ID NO: 27305 - protein, 510 aa, Bacillus anthracis str. Ames
MEYVIEMNNITKVFPGIVANDDITLQVKQGEIHALLGENGAGKSTLMNVLFGLYQPEQGEIKIKGNPVKITNPNIANDLGIGMVHQHFMLVHNFTVTENIILGNEPKKNGKIAVEEAAKEIKQLSEQYGLAVDPHAKIEDISVGMQQRVEILKTLYRGAEILIFDEPTAVLTPQEIHELIQIMKKLVQEGKSIILITHKLKEIMEVCDRCTIIRKGKGIGTVNVAETDEHKLAELMVGRQVNFKTEKIEAKPKEEVLSIANLIVHDTRKLPAVKGLDLTVRAGEIVGIAGIDGNGQSELIEAITGLRKVESGSIAIKGKEITNWPVRRITEEGIGHIPEDRHKHGLVLDFSVRDNIVLQTYYKNPFSKKGILNFSKITQKAKALIEQFDVRTPSEQTLARALSGGNQQKAIIAREVDRNPDLLIAAQPTRGLDVGAIEFIHKKLIEQRDNGKAVLLLSLELDEILNVSDRVAVIYEGKIVAIVDAKETNEQQLGLLMAGGTGKEKVNTNG

SEQ ID NO: 27306 - DNA, 1623 bp, Prochlorococcus marinus subsp. marinus str. CCMP1375
  CDS (1)..(1623): transl_table=11
ttgctaaaatttatgaattgttctcaaaaggatgtcttaaatattaaagatttgagtatccgttatgtagatagcaaaacatgggtacttgaaggactgaacttgaaacttgggcgtggagaacgtcttgctctaattggtagttctgggtctggcaaaagtacttttgcaaaggttttgttacagatcattccttcaggcagtttttgtagaggagaacttcttttaaatggggtcgatcttatgagcttgtctcataatgatttagaaaagttgagaggtgaaatgatcgggttggtttttcaggaccctggctcaagacttaacccattaatgaccattggagaacatcttctggatactctgcgtgctcatcaacctgatcaatcttcttcgtggatgaaaaatagatcagaagaattgttggaaaaggttgggattaatccacttcgctttgatgcttatcctcacgaatttagtggagggatgcgtcaacgagttgctattgctttggccatagcattaaacccacctttgatcattgctgatgaaccaacatcaagtcttgatgttgcaatagctcatcagatcatgggtgaattaagtaatctttgtgatgagattgggagctctctgttattaataagtcacgacttggcacttgcttctagatggtgtcaaaaaatggctatccttgacgaaggtaaaattgttgaagaaggatacactcacaaaatattaactgctcctaaatctctttttgctaataggttgataaatgctgctagagccagggaagatttaatgcttctttctgagccaactcaagaagttgttttagaagtagaaagcttacgttgttggcatcctgtaggaggtgtgccatggcgagtgaactggttaaaagctattaatgaagttagttttgttttgaaagtaggagaaactcttgggattgtaggagtttcaggctgtggaaaaagtactttatgtagagctcttttaggactcttgccaacaaggggtgggcaggtgaaattgcttggaaaaaatcttgaaaatttgaaaggaaaagctttgaaagtcgctagacaatcagtgcaaatggtttttcaagacccttttgcttctttaaatcccaagatgaatgtcttggaaacagttgctgaccctcttttgattcataatataactagtcgagtcgctgcaaaagaacgagccagagatctcttgaaacaagtagggttatttccagttgaaaactttcagaaacgtttcccacatcagctttcaggaggtcagcaacaaagagtagctattgcacgtgcacttgctctaaatcctaaaatccttctttgcgatgaaagtgtcagtatgttagatgctgagattcaggcggatatattaaatttgttacgttctttgcaagagaagcttggcttggcaattatttttattacgcacgatctttctgtggcaagttcgttttgccatagagtaattgttttagatcaaggaagaattgcagaagaaggccctgctgatcaaataattcgtagccctaagtctgttcttgctagaaaattagtgagtgcttctccaagaataatttcaattaattag

SEQ ID NO: 27307 - protein, 540 aa, Prochlorococcus marinus subsp. marinus str. CCMP1375
MLKFMNCSQKDVLNIKDLSIRYVDSKTWVLEGLNLKLGRGERLALIGSSGSGKSTFAKVLLQIIPSGSFCRGELLLNGVDLMSLSHNDLEKLRGEMIGLVFQDPGSRLNPLMTIGEHLLDTLRAHQPDQSSSWMKNRSEELLEKVGINPLRFDAYPHEFSGGMRQRVAIALAIALNPPLIIADEPTSSLDVAIAHQIMGELSNLCDEIGSSLLLISHDLALASRWCQKMAILDEGKIVEEGYTHKILTAPKSLFANRLINAARAREDLMLLSEPTQEVVLEVESLRCWHPVGGVPWRVNWLKAINEVSFVLKVGETLGIVGVSGCGKSTLCRALLGLLPTRGGQVKLLGKNLENLKGKALKVARQSVQMVFQDPFASLNPKMNVLETVADPLLIHNITSRVAAKERARDLLKQVGLFPVENFQKRFPHQLSGGQQQRVAIARALALNPKILLCDESVSMLDAEIQADILNLLRSLQEKLGLAIIFITHDLSVASSFCHRVIVLDQGRIAEEGPADQIIRSPKSVLARKLVSASPRIISIN

SEQ ID NO: 27308 - DNA, 1635 bp, Bordetella pertussis Tohama I
  CDS (1)..(1635): transl_table=11
atgactgagaacacaccgaagcaacgggtgctggaggtgtccggcctggccatccgcgccggcgcgcggacactggtgcaggacgtcacgctgagcctggcccagggagaaatcctgtgcctggtgggcgaatcggggtcgggcaagtcgctgacggcgtcggccgtcatggggctgctgccgggcaacctgggcgtgggcgccggcagcatccggctcgatggcgaagacctgaccgcggcgtcgccggcgcgcatgcaggcgctgcgcggcgaccgcatggccatggtgttccaggaacccatgacctcgctcaatccgctgatgcgcgtgggacgccagatcgcggaggtgttgcaggtgcaccggccggacctgggcgccgggcaagtgcgggcacgggtgctggagctgatgggcgatgtgcacctgcccacccccgaggcgctcatggacgccttcccgcatcagttgtcgggcgggcagcgccagcgcatcatgatcgcgatggcgctggcgctggagcctgcgctgatcatcgccgacgaacccaccacggcgctcgacgtcacgacccaggtgcaggtgctcaagctgtttcgccagttgctggccaagcattcgagcgcggtgctgttcatcacgcatgacttcgatgtggtgcgcgatatcgccgaccacgtggccgtgatgcagctgggccgcatcgtcgaacaggggccggccgggcaggtgctggacgcgccccgccacgactacacccgcaagctgctggccgcggtgccgagcggcgtgcccaagacgcagcagaacgcgtcgtccgatgaactgctgtcggtaagcggcctgaacctggtctacgagtcgcgcggcctgctgggcccggcgcggcgcacgcatgccgtcgccgatgtcggcttcacgctgaaaaagggcgagaccctgggcgttgtcggcgagtcgggctcgggcaagtccaccctggggcgctgcatcacgcgggcgcatgcccccacgtcgggccggatcgtcttcgacggcgtggacatcgcggggctgtcgggcaaggcgctgcgggcggtgcgccgccgcgtgcagatggtgttccaggatccctaccggtcgctgaacccgcgccgcaggattctgcatgccttgatcgaaggcccgatcgaaagcggggtggaccgcaagacggcctgcgcgcgcgcggccgagctgatggccctggtgggcttgccggccgacggcctgcagcgttatccgcaccagttctcgggcgggcagcggcaacgcatctgcattgcgcgcgccctggcgatggagcccgacctgatcgtcgcggacgaggccgtgtcggcgctggacgtgtcggtgcaggcgcaggtgctggagctgttcgaagacctccagaagcggctgggattcgccatgatcttcattacccacgacttgcgcgtggccgcgcaggtctgcgaccgcatcggcgtgatgcagaaaggacgcctgctcgagctgggcccggtgcggcaggtcatccatgcgccccagcacccctatacccgccacttgttcgattcgctgcccggccgcgtgggccagacggcggaacccgccatggagctacaggcatga

SEQ ID NO: 27309 - protein, 544 aa, Bordetella pertussis Tohama I
MTENTPKQRVLEVSGLAIRAGARTLVQDVTLSLAQGEILCLVGESGSGKSLTASAVMGLLPGNLGVGAGSIRLDGEDLTAASPARMQALRGDRMAMVFQEPMTSLNPLMRVGRQIAEVLQVHRPDLGAGQVRARVLELMGDVHLPTPEALMDAFPHQLSGGQRQRIMIAMALALEPALIIADEPTTALDVTTQVQVLKLFRQLLAKHSSAVLFITHDFDVVRDIADHVAVMQLGRIVEQGPAGQVLDAPRHDYTRKLLAAVPSGVPKTQQNASSDELLSVSGLNLVYESRGLLGPARRTHAVADVGFTLKKGETLGVVGESGSGKSTLGRCITRAHAPTSGRIVFDGVDIAGLSGKALRAVRRRVQMVFQDPYRSLNPRRRILHALIEGPIESGVDRKTACARAAELMALVGLPADGLQRYPHQFSGGQRQRICIARALAMEPDLIVADEAVSALDVSVQAQVLELFEDLQKRLGFAMIFITHDLRVAAQVCDRIGVMQKGRLLELGPVRQVIHAPQHPYTRHLFDSLPGRVGQTAEPAMELQA

SEQ ID NO: 27310 - DNA, 1761 bp, Bordetella bronchiseptica RB50
  CDS (1)..(1761)
atgaacgaggcgcccgtcatcgaggcgcgggacctggccaagcgccttggccagacgctcgcgctcgatgcgctgacgctgtcggtcgcgcgcggccggctgaccgcgctggtcgggcccgacggagcgggcaagaccaccttgctgcggctgatcgcgggcctgatgcggcccgacgccggcacgctgcgcgtgctgggcatcgatgccgtccaatcgccccaggcggtgcaggaccgcatcagctacatgccgcaacgcttcggcctgtacgaagacctcagcgtgcaggaaaacctcgacctgtacgccgacctgcacggcgtgcccgcgcgcgagcgccgcgaacgctacgcgcgcctgctggccatgaccgacctggcgcgctttaccgagcggccggccggcaagctgtcgggcggcatgaagcagaagctggggctggcctgcaccctggtgcgctcgcccgacctgctgctgctggacgaaccgaccgtgggcgtggatccgctgtcgcgccgcgagctgtggcagatcgtccagcaactggtcgagcaaacgcggctcagcgtgctggtcagcaccgcctacctcgacgaagcgcagcattgcgcgcaagtccacgtgctgtaccgcggcacgctgctcgcgcagggcgcgccgcaggccttgcgcgagccggcccagggcctgtgctttctcgccgcgccgccggcaggcgtgccggcgcgcaccttgcaggcgcgcctgctcgacgacagcgcgcagatcatcgacgccgtgcccgagggcggcgcggtgcgctacatccagcgccccgacgccgacccggcacgcctgcgcgccctgctcggcggcgcgcaggcccacgccacgccggcgcgcctggaagacggcgtgcagatgctgctgcgcgcgcgcctggcggccgacgcgcccgcggccacggccgcgccgcgcccggtcccgccggcgccgcgcgccagcgacgccccggacgcggcccagcccgccatcgaagtccatgacctggtgcgcaagttcggcgcgttcaccgccgtggccagcacctcgttcagcgtgcgccgcggcgagatcttcggcctgctcggccccaacggcgccggcaagaccaccacgttccgcatgctgtgcggcctgctgccggccagcagcggccagctgcgggtggccggcgtgaacctgcgcaacgcgccggcgcgggcgcggcgccacatcggctatgtatcgcagaagttcgccctgtacggcaacctgacggtggccgagaacctcgccttcttcggcggcgtctacgggctgggcggcgcggcgctgcgccggcgcatcgacgccgtgctggacgagttcggcctgcgcggccatgcccaggcgcgcagcggcgagctgcccggcggctaccagcaacgcctggccatggccaccggcctgctgcacgaacccgagatcctgttcctggacgaacccaccagcggcatcgacccgctggcgcggcgcgcgttctggcgccgcatcaccgcgctggccctggacggcaccaccatcatcgtcaccacgcacttcatggaggaggccgaatactgcgaccgcatcgccatccaggacgccggccggctgctggcgctgggcacgcccgacgcggtgcgccgccaggcgggcaatgccggcgacatgaacacggccttcatcggcatcgtcgaacaggcgcgcgcccgccagggccgggagacgcggccatga

SEQ ID NO: 27311 - protein, 586 aa, Bordetella bronchiseptica RB50
MNEAPVIEARDLAKRLGQTLALDALTLSVARGRLTALVGPDGAGKTTLLRLIAGLMRPDAGTLRVLGIDAVQSPQAVQDRISYMPQRFGLYEDLSVQENLDLYADLHGVPARERRERYARLLAMTDLARFTERPAGKLSGGMKQKLGLACTLVRSPDLLLLDEPTVGVDPLSRRELWQIVQQLVEQTRLSVLVSTAYLDEAQHCAQVHVLYRGTLLAQGAPQALREPAQGLCFLAAPPAGVPARTLQARLLDDSAQIIDAVPEGGAVRYIQRPDADPARLRALLGGAQAHATPARLEDGVQMLLRARLAADAPAATAAPRPVPPAPRASDAPDAAQPAIEVHDLVRKFGAFTAVASTSFSVRRGEIFGLLGPNGAGKTTTFRMLCGLLPASSGQLRVAGVNLRNAPARARRHIGYVSQKFALYGNLTVAENLAFFGGVYGLGGAALRRRIDAVLDEFGLRGHAQARSGELPGGYQQRLAMATGLLHEPEILFLDEPTSGIDPLARRAFWRRITALALDGTTIIVTTHFMEEAEYCDRIAIQDAGRLLALGTPDAVRRQAGNAGDMNTAFIGIVEQARARQGRETRP

SEQ ID NO: 27312 - DNA, 1476 bp, Photorhabdus luminescens subsp. laumondii TTO1
  CDS (1)..(1476): transl_table=11
atgtctgaattgcaaataacgcaaggctgtttccgtttaagtgatacccgtaccttgcagttatcatcactaaaaatagcctccggcgaaaattgggcttttattggtgcaaatggtagcggaaaatcatcattggcccgtgcgctttcaaatgaattagtcctgctttccggcgaacgaaattgctcatttcgcaagtgcgcccgcgtctctctagaacaattacaaaaactgacggaagaagagtggcaacgtaataatagtgatatgctcagtgatgatgaagatgataccggccgcactgcggcagaaattatccagctttatcataaagataatgaactttgcctggaactggcaaaacagttcggtattatggatttactttcccgtcgttttaaatatctttctactggtgaaacccacaagacattactttgccaggcactgatgacttcacctgatttgctgattcttgatgaaccttttaatggccttgatctattttcccgtggtcaattcactgaattactggaaaaattgtcatcaaaaggaatcgttttggtacttatccttaaccggttcagtgaaatcccagattttgttgatcagattggcgtactagcagattgccagctaacctctattggcaccaaagaaaaagtgatggcagattccttggtggctcaactggcacacagtgaaaaactgaacggtattcatttacctgaaacagatgaatttcctgtcgataatcagctaccgcccgatcaaccgctgattattctacgtaatggtatcgttcagtataatgatcagccaattttgcatgggctagattggcaagtgaattcaggtgaacattggcaaattattggcccaaatggtgccggaaaatcaacgcttctgagtttgattaccggagatcatcctcaaggctacagtaataagctgatcctgtttggccgtcaacgcggtagcggcgaaaccatttgggatatcaaacgccatattggctatattagcaacagcattcatctggaatatcgtgtcagtatcagcgttcgtaatgtgattctgtccggtttcttcgattcaattggtctttatcagacagtatcagatcgccagcagcaacttgctgatgaatggctggctttactgggcttatctgctcagattgccaacggcccgtttcaccgcctttcatggggacaacaacgacttgttctgatagctcgcgcactggttaaacatccggctttattaatccttgatgaacctctccaagggcttgatccactcaaccgccagttagtattacgttttattgatgtcatgatcgctgacggtgatactcagctactgtttgtttctcatcatcaagaagatgcgccgcaatgcattactcaccgactaatatttatccctgatggtgatctatactgctacaaaacagagaaagtttctgattga

SEQ ID NO: 27313 - protein, 491 aa, Photorhabdus luminescens subsp. laumondii TTO1
MSELQITQGCFRLSDTRTLQLSSLKIASGENWAFIGANGSGKSSLARALSNELVLLSGERNCSFRKCARVSLEQLQKLTEEEWQRNNSDMLSDDEDDTGRTAAEIIQLYHKDNELCLELAKQFGIMDLLSRRFKYLSTGETHKTLLCQALMTSPDLLILDEPFNGLDLFSRGQFTELLEKLSSKGIVLVLILNRFSEIPDFVDQIGVLADCQLTSIGTKEKVMADSLVAQLAHSEKLNGIHLPETDEFPVDNQLPPDQPLIILRNGIVQYNDQPILHGLDWQVNSGEHWQIIGPNGAGKSTLLSLITGDHPQGYSNKLILFGRQRGSGETIWDIKRHIGYISNSIHLEYRVSISVRNVILSGFFDSIGLYQTVSDRQQQLADEWLALLGLSAQIANGPFHRLSWGQQRLVLIARALVKHPALLILDEPLQGLDPLNRQLVLRFIDVMIADGDTQLLFVSHHQEDAPQCITHRLIFIPDGDLYCYKTEKVSD

SEQ ID NO: 27314 - DNA, 1596 bp, Photorhabdus luminescens subsp. laumondii TTO1
  CDS (1)..(1596): transl_table=11
gtgttaagtacaaacaacatcaccatgcagtttggcagtaagcccctgtttgaaaacatttctgtcaagtttggcaacggtaaccgttatggtctgattggcgctaatggttctggtaaatccacttttatgaaaattctgggaggtgatctgacaccctctgtcggcaatgtcagcaccgatcccaatgaacgtattggtaaactgcgtcaggatcagtttgcttttgaagagttcacggtgttggataccgtgattatggggcacacggaactgtggcaggtaaagcaggagcgtgaccgcatctatgccatggcagaaatgagtgaagaggatggctatcgcgttgccgatctggaagtcgcttatggcgagatggatggttatagtgccgaagcgcgtgccggagagttgttgttaggtgttggtattccagtagaacagcattacggtttgatgagcgaagtggcaccaggctggaaattgcgtgtattgctggctcaagcgctgttttctaatcctgatgttctgttattggatgaaccgacgaataacctggatattgatactattcgttggttagagcaaatactgaatgaacgaaacagcaccatgattattatttcccatgatcgtcacttcctgaatacagtttgtactcatatggccgatcttgattacggtgagttgcgtctgttccccggtaattatgatgaatatatggttgccgccactcaggctcgtgaacgtctgctagctgataatgcgaagaagaaagcacagattgcggaattgcagtcttttgtcagccgttttagtgctaatgcttctaaatcaaaacaggcgacttcgcgtgctcgtcagattgataaaatccagttggaagaagttaaagcatccagccgtcagaatccttatatccgttttgagcaagataagaaattgttccgtaatgctctggaattggaaggttttactaaaggctatgataatggccctctgtttaaaaatcttaatctcctgctggaagttggtgaaaaactcgctgttattggtgctaacggtattggtaaaacaactttcttgaaaacgctcgttggtgaaacagagccaaccagtggtgtagttaagtggtctgaaaatagtagcattgggtactatgctcaggatcatgccagtgattttgactgtgatctgacagtttttgactggatgagtcaatggaagagagaaggggatgatgaacaagctgttcgtagtgtattaggccgtttgttgttcagccaggatgacattaagaaaaaagtcaaagtattatcgggtggcgaaaaaggacggatgttatttggtaagttgatgatgcaacagccaaatattctgataatggatgaaccaacaaaccacttggatatggaatctattgaatctttgaaccttgcgcttgaattgtataaaggtactttgatatttgtttctcatgatcgggaatttgttagctcattggcaagccgagtgatggaaattaaatctgataaggtcattgatttcaaaggtacttatgatgaatatctaagaagtcagggaattattgagtaa

SEQ ID NO: 27315 - protein, 531 aa, Photorhabdus luminescens subsp. laumondii TTO1
MLSTNNITMQFGSKPLFENISVKFGNGNRYGLIGANGSGKSTFMKILGGDLTPSVGNVSTDPNERIGKLRQDQFAFEEFTVLDTVIMGHTELWQVKQERDRIYAMAEMSEEDGYRVADLEVAYGEMDGYSAEARAGELLLGVGIPVEQHYGLMSEVAPGWKLRVLLAQALFSNPDVLLLDEPTNNLDIDTIRWLEQILNERNSTMIIISHDRHFLNTVCTHMADLDYGELRLFPGNYDEYMVAATQARERLLADNAKKKAQIAELQSFVSRFSANASKSKQATSRARQIDKIQLEEVKASSRQNPYIRFEQDKKLFRNALELEGFTKGYDNGPLFKNLNLLLEVGEKLAVIGANGIGKTTFLKTLVGETEPTSGVVKWSENSSIGYYAQDHASDFDCDLTVFDWMSQWKREGDDEQAVRSVLGRLLFSQDDIKKKVKVLSGGEKGRMLFGKLMMQQPNILIMDEPTNHLDMESIESLNLALELYKGTLIFVSHDREFVSSLASRVMEIKSDKVIDFKGTYDEYLRSQGIIE

SEQ ID NO: 27316 - DNA, 1536 bp, Photorhabdus luminescens subsp. laumondii TTO1
  CDS (1)..(1536): transl_table=11
atgttacataacaacaccgcagtaccaccgctattagaagtcagtggcatcagtaagcaattttccggcgtaatggtactgaaacatattgattttactctgtttccagggcagatacaggctctgttagggggtaatggtgcgggcaaatcaacactgatgaagattattgctggtctcgaacagccggataaaggcacgctcaagattagcggtcatcatgttagccatcttaatcccactaaagcccaccaattcggtatttatctgataccacaagaaccactgttatttccgaatttgtctgtacaggaaaacatcctgtttcgtttgccaaagcatcaggtagataagtctaaaatgaaacagctactggcattacttggctgtcaattagatctacatgtcagtgctggcagccttaatgttgccgatcaacaactggtcgaaattatgcgtggcctgatgcgtaattcgaaaatcttaatccttgatgaacctaccgcctccctgacaccagtagaaaccgaacgcttatttgcccagctccgtgagctacaacagcaaggtgtcggcatcatttttatttcccacaaaatccctgaaatttaccaactagcagatcaggtcagtgtcatgcgtgacggcactattgccttaagtggcaaaatccgcgattacacaacggatgacattattcaggctattacaccggccgcaaaagatcagccattaaatggcaccccaaaattgggtctggatcttagcaataaccagcaccagacagtacctgatcgaccaatactgacagtcaccaagctgagcggtgagggtttcagcaatatctcattctcagtgaaaccgggtgaaattcttggtttggccggggttgttggtgctggccgtacagaactggctgaaacactttatggcctgcgccctgcggtatccggcgaaattaagttaaaacaacatactgttaatgggctaaaaactgctcaacgtctggcccaaggtttggtttatttgccggaagatcgacagtcatcaggattatttctggattcatcactcggctggaatatctgctcactaacccacaaccgcaatacattctggatacgccctgcctatgatacagcggtacttgaacgctattgccaaatcctaaatatcaaattcagccatatcaaccaaccaatcaaaacgctgtccggtggtaatcaacaaaaaattctgattgctaaatgtctggaagctcaccccgccgtcctgattattgatgaacctacacgtggtgtggatgtcgcggcacgcaatgatatttaccaactgattcgtcatatcgcccaacagcaagtggccattatttttatttcatcggatctggatgaagtggttcgaatcgctgatcgggtattagtcatgcatcagggagaaatcaatggcgagttaactaagcaacagatggatgttgacaccattatgcatatcgctttcggcgaacataaaccacaacaggcggcatcatgttga

SEQ ID NO: 27317 - protein, 511 aa, Photorhabdus luminescens subsp. laumondii TTO1
MLHNNTAVPPLLEVSGISKQFSGVMVLKHIDFTLFPGQIQALLGGNGAGKSTLMKIIAGLEQPDKGTLKISGHHVSHLNPTKAHQFGIYLIPQEPLLFPNLSVQENILFRLPKHQVDKSKMKQLLALLGCQLDLHVSAGSLNVADQQLVEIMRGLMRNSKILILDEPTASLTPVETERLFAQLRELQQQGVGIIFISHKIPEIYQLADQVSVMRDGTIALSGKIRDYTTDDIIQAITPAAKDQPLNGTPKLGLDLSNNQHQTVPDRPILTVTKLSGEGFSNISFSVKPGEILGLAGVVGAGRTELAETLYGLRPAVSGEIKLKQHTVNGLKTAQRLAQGLVYLPEDRQSSGLFLDSSLGWNICSLTHNRNTFWIRPAYDTAVLERYCQILNIKFSHINQPIKTLSGGNQQKILIAKCLEAHPAVLIIDEPTRGVDVAARNDIYQLIRHIAQQQVAIIFISSDLDEVVRIADRVLVMHQGEINGELTKQQMDVDTIMHIAFGEHKPQQAASC

SEQ ID NO: 27318 - DNA, 1683 bp, Corynebacterium diphtheriae NCTC 13129
  CDS (1)..(1683): transl_table=11
atgtctgagaaaaaacaacagccgcttctagagatgcgagacgttcgcatcgcgtttacgtccaccaccggaaccgttgaagcagtccgtggaattgatctaactatttacccaggacaatcggtcgcaatcgttggtgagtctggatcaggtaaatctacaacggcgatgtccatcatcgggttgctgcccggtaccggcaaagttaccgatggtcagatcatttttgatggccaagacatcaccaaatacagcgaaaagcagatgcaggagctgcgtggctcccatattggtctggtgccgcaggacccgatgagcaacctcaaccctgtgtggcgcattggcacgcaggtgaaagaatccctcaaagccaacaatgtggtgccgggctcccaaatggacgagcgtgtaacccagctattggaagaagcagggcttcccgacgctgcccgccgcgctaagcagtaccctcacgaattttctggtggtatgcgccagcgcgccttgatcggtatcggcctggccgcacgtcctaagctcttgattgccgacgagccgacctctgctctcgacgttaccgtgcaaaagcgtatcctcgatcacttggaaaatctcacccacgagctaggcaccgcggtgcttttcattacccacgacctcggactagctgccgagcgtgcagagcacctcgtggtcatgcaccgtggtcgtatcgtggaatcaggcccgtcgcttgatatcttgcgaaaccctcagcacccctacacccgtcgattggtcaaagctgcaccatcattggcatcagcgcgcatccaatctgctcaagaaaagggcgttgaaagctcggagatccttgcaacggaaaagaagaccgatgaggaaatcatccgcgttgaaaacctcaccaagattttcaacgttcgcggccaacgcggagacaaagctgaactcaaagcagttgatgacgtcagcttcagtctgaaaaagggcaccacattggcgctggtgggtgagtcaggatccggaaaatccaccgtggccaacatggtgctcaacctcatcgatcccacgacgggcaaggtctattacaaaggcaccgatctttccacactaggaaagaaggagcttttcgacatgcgccgcaaactccaagtggtgttccagaacccttatggatccctagacccgatgtattcgattttccgctgtatcgaagaacccctcctagtgcacaaggtgggtagccgaaaagagcgggagaagcgtgtagctcagctgctcgacatggttgctatgccacgctctgcgatgcgtcgataccccaacgagctctctggtggtcagcgccagcgcatcgccgtcgcgcgagcactcgcgctgaaccccgaggtgatcgttctcgatgaggcagtctcggcccttgacgttcttgttcagaaccagatcctgcagctgctggcggatctccagcaggagctggatttgagctacttgtttatcacccatgaccttgcggttgtgcgtcaaacagcagatcaagtcgtggtgatgcaaaaaggtcgcgtcgtagaacaaggaaccaccgatgagttgttcctcaacgcacgcgaagattacacccgtgatctgatcaactctgttccaggtcttggcgttgagctcggtacgggagaaaacctgtaa

SEQ ID NO: 27319 - protein, 560 aa, Corynebacterium diphtheriae NCTC 13129
MSEKKQQPLLEMRDVRIAFTSTTGTVEAVRGIDLTIYPGQSVAIVGESGSGKSTTAMSIIGLLPGTGKVTDGQIIFDGQDITKYSEKQMQELRGSHIGLVPQDPMSNLNPVWRIGTQVKESLKANNVVPGSQMDERVTQLLEEAGLPDAARRAKQYPHEFSGGMRQRALIGIGLAARPKLLIADEPTSALDVTVQKRILDHLENLTHELGTAVLFITHDLGLAAERAEHLVVMHRGRIVESGPSLDILRNPQHPYTRRLVKAAPSLASARIQSAQEKGVESSEILATEKKTDEEIIRVENLTKIFNVRGQRGDKAELKAVDDVSFSLKKGTTLALVGESGSGKSTVANMVLNLIDPTTGKVYYKGTDLSTLGKKELFDMRRKLQVVFQNPYGSLDPMYSIFRCIEEPLLVHKVGSRKEREKRVAQLLDMVAMPRSAMRRYPNELSGGQRQRIAVARALALNPEVIVLDEAVSALDVLVQNQILQLLADLQQELDLSYLFITHDLAVVRQTADQVVVMQKGRVVEQGTTDELFLNAREDYTRDLINSVPGLGVELGTGENL

SEQ ID NO: 27320 - DNA, 1443 bp, Corynebacterium diphtheriae NCTC 13129
  CDS (1)..(1443): transl_table=11
atgaccttgctgaacatgtccaacgttcagatcatggacgttgtccaagccctatctctgtctatcgaacgcggcgaacgcgtcggcctgatcggggaatctggctcgggtaaaaccatcaccgcgatgtctatcctgcggttaattccctcaagcggcagcattgtattcgatggtgctgatatccaagggctcagcgaaaaacaaatgtgtgccctgcgtggaaagcgcatctccatggtgttccaagaacccatgacagcgctcgatccgctgatgaaagtgggaacccagatcagtcacgccatcaggattcactcctcagtatctcgtgctcaagcccgcaaaaaggcggacgctttgctgcacagtgttgaacttgatcccgagctgcgatcgcgctacccacacgagctttccggcgggcaacgccaacgcatactcattgccatggcgctcgcccacgatcctgatttgctcatttgcgacgagcccaccacagccttggatgtgacttcccaaaaagcaatcgtggatctcattttgagactcgtcgccgaacgcggcaccggattgctatttattacccacgacctggggcttgtggcacgcacctgtgaacgtgtgctcgtcatgcgcgaggggcgcattattgaatcgggcacggttgaagacgtattgaaaaacccgcgtgaagactacaccgccatgctcgtccaagcatcgacactagctcctgcaccccaggtagcgcttagtgacgacgaagtgctgcacatcgacaatgtgaccaaaaagtatcgcggcaccacagcggtcgaagatgtgactcttacagttcaccgtggcgaacgcctcggaatcgttggtggctccggctccggaaaaaccaccctgctgaaaatgatctcaggacttagctctcctaccagcggacacattaacactgaaggatctatgcgcattgtcttccaagaccccatgcaatccctcgacccccacatgtccatcgccgacatcgtatccgagccactagggcatcgggacctcaaggctgtggaacgtgcgctcgaagaagtggggctcgatgcaggcatgatgaatcgtttgcctcatgagttttccggtggtcagcgtcaacgcatttctattgcgcgtgcgctcgtgtcctcccccgacattttgcttgccgacgaacccgtctcagcactcgatgtttccgtgcgagccaaagtgctagccctcctcgaccgattggtcagcgaacgccacctcaccatgctttttgtctcgcacgacctgcacgtggtgcggtccctttgcaccaccgtcgcggtcatgcgagaaggaaaaatcgtagaatacggccccaccgaggatgtgtttaacaatcctcaacacgagtacacaaaggcactcatcgaggcgatccctagcctttaa

SEQ ID NO: 27321 - protein, 480 aa, Corynebacterium diphtheriae NCTC 13129
MTLLNMSNVQIMDVVQALSLSIERGERVGLIGESGSGKTITAMSILRLIPSSGSIVFDGADIQGLSEKQMCALRGKRISMVFQEPMTALDPLMKVGTQISHAIRIHSSVSRAQARKKADALLHSVELDPELRSRYPHELSGGQRQRILIAMALAHDPDLLICDEPTTALDVTSQKAIVDLILRLVAERGTGLLFITHDLGLVARTCERVLVMREGRIIESGTVEDVLKNPREDYTAMLVQASTLAPAPQVALSDDEVLHIDNVTKKYRGTTAVEDVTLTVHRGERLGIVGGSGSGKTTLLKMISGLSSPTSGHINTEGSMRIVFQDPMQSLDPHMSIADIVSEPLGHRDLKAVERALEEVGLDAGMMNRLPHEFSGGQRQRISIARALVSSPDILLADEPVSALDVSVRAKVLALLDRLVSERHLTMLFVSHDLHVVRSLCTTVAVMREGKIVEYGPTEDVFNNPQHEYTKALIEAIPSL

SEQ ID NO: 27322 - DNA, 2715 bp, Rhodopseudomonas palustris CGA009
  CDS (1)..(2715): transl_table=11
atgaccggcttcgccgcgcgtctcacgcatgtcactcacacctatggtgcgacacatgcgctggacgacgtcacgctggaattgcctgccggcaagatggtcggtctgatcgggcccgacggcgtcggcaaatcgacgctgctggccttgatcgccggcgtgcgccggatccagagcggcgaggtgctggcgctggacggcgatatgcgtgacgcccgccatcgagcccagagtgcggcgcggatcgcctatatgccgcagggcctcggacgtaatttgtatccgacgctgtcggtgttcgagaatctggatttcttcggccggctgtttggccagggcgctgccgagcgcaacgcgcgcattgccgacctgctccgcgccaccgggctgtcgccattcggtgatcggccggcgggcaaattgtccggcggcatgaagcagaagttgtcgctgtgctgcgcgctgatccacgatccagatctgctcatcctcgatgagccgacgaccggcgtcgacccgctgtcgcgacggcagttctgggagctgatcgatcgcatccgcaaacggcggccgcagatgagcgtcctggttgccaccgcctatatggaagaggccgaacggttcgattggctcgctgctctgaatgacggcaaggtcatcggcgccggtacgcccgccgagctgcgggcgcagaccaagcaaccgacactggacgccgccttcatcgcgctgctgccggccgagatgcgcgccaactacgccgacgtggtactgccgccgctgccgaacagcggcgatggctacgcgatcgaagccgagaacctgacctgtcggttcggcgatttcaccgcggtcgaccacgtcaacttccagatcaagcgcggcgagatcttcggcttcctcggctccaacggttgcggcaagtcgacgacgatgaagatgctcaccggcctgctgacgccgaccgaaggcgaggcgcggctgttcggcgaggtgctcgacgcctccgacatggcgacccgcaagcgcgtcggctacatgtcgcagagcttctctctctactcggaactgacggtccggcagaacctgttgctacacgcgcaactgttcgaacttccgagcgcgcagattcctgatcgcgttgccgaaatgctgacgcggttcgaccttgccgacgccgccgattcccggcccgacagcctgccgctcggtatgcgccagcggctgcagctcgcggttgcggtgatccatcgccccgaggtgctgattctcgacgagccgacttccggcgtagatccggtggctcgggattcgttctggcggatgctgattgcgctgtcgcgggaggatggcgtcaccatcttcatctcgacccacttcatgaacgaggccgagcgctgcgatcggatttcactgatgcacgccggcaaggtgctggcggtcggtgcgccgcatgaactggtcgagcgccgcggcgctgccgatctcgaacagacctttatcgcttacctcgaagaagcgaccggcgcgcagcgcgacggcgaagagaccagcttcgcagcaccgcgcgaggccgacaccaggcagcgctggttcgatccggcgcggctctgggcctatgcccgccgcgagaccatggagatcctccgcgaccggttgcgacttgctttcgcgatccttggcccgctggtgctgatgctgaccttcggcttcggcatctcgttcgacgtcgagaacctgacctacgcggtgtacgaccaggacaacacgctggaaagcagagaactgctcgagagcttctccgggtcgcgctacttccagcaggcaccggatatcaaatccgcggcggagatcgatcgccgacttgccagcggtgaattgaagctggtgatcgaagtcccccacggtttcggacgcgacctgttgaccaacaagtcgccggaagtggcggtgtggatcgacggtgcgatgccgttccgcgccgagaccattcgatcctacgtcaccggcttgtcgcaggcctatctggccgagcagtatcggcggcatgcaatggcctcgccgaccgcgccgatcaacatcgaaacccggttccgctacaaccaggcattcaagagcgtgtactcgatcattcccggcgtgattacgctgatcctgatgctgatcccggcgatgctcaccgccgtcggcgtggtccgcgagaaggaagtcggctcgatcacgaacttccgttcgacacctgtgaccgcgacggaattcctgctcggcaagcagatcccttacgcgctgctgtcgttcttcagcttcctgctgttgctgctcggggcaatcgtgatcttcggtgttccggtgcgaggctcggtcattgcactggtcggcggcgcgctgctctatgtgttctccactacggcgctgggtgtgctgttctcatcgttcctgagcacccagatcgctgcgatcttcatcgtcgcgatcatctcgatcattccggccgtcaacttctcgggtctgttggtgccagtgtcgtcgttgtcgcaggtcgggcggctgttcggcgaggcgttccctgccgcctggtttcaagaggttagcatcggcgccttcaccaaaggcatgggtttctggatgctggcgccgaacctgctgatcctgttcggttttggcctcgtctatctgattggtgcgatccttgcgttgcgcaagcaggaggcatga

SEQ ID NO: 27323 - protein, 904 aa, Rhodopseudomonas palustris CGA009
MTGFAARLTHVTHTYGATHALDDVTLELPAGKMVGLIGPDGVGKSTLLALIAGVRRIQSGEVLALDGDMRDARHRAQSAARIAYMPQGLGRNLYPTLSVFENLDFFGRLFGQGAAERNARIADLLRATGLSPFGDRPAGKLSGGMKQKLSLCCALIHDPDLLILDEPTTGVDPLSRRQFWELIDRIRKRRPQMSVLVATAYMEEAERFDWLAALNDGKVIGAGTPAELRAQTKQPTLDAAFIALLPAEMRANYADVVLPPLPNSGDGYAIEAENLTCRFGDFTAVDHVNFQIKRGEIFGFLGSNGCGKSTTMKMLTGLLTPTEGEARLFGEVLDASDMATRKRVGYMSQSFSLYSELTVRQNLLLHAQLFELPSAQIPDRVAEMLTRFDLADAADSRPDSLPLGMRQRLQLAVAVIHRPEVLILDEPTSGVDPVARDSFWRMLIALSREDGVTIFISTHFMNEAERCDRISLMHAGKVLAVGAPHELVERRGAADLEQTFIAYLEEATGAQRDGEETSFAAPREADTRQRWFDPARLWAYARRETMEILRDRLRLAFAILGPLVLMLTFGFGISFDVENLTYAVYDQDNTLESRELLESFSGSRYFQQAPDIKSAAEIDRRLASGELKLVIEVPHGFGRDLLTNKSPEVAVWIDGAMPFRAETIRSYVTGLSQAYLAEQYRRHAMASPTAPINIETRFRYNQAFKSVYSIIPGVITLILMLIPAMLTAVGVVREKEVGSITNFRSTPVTATEFLLGKQIPYALLSFFSFLLLLLGAIVIFGVPVRGSVIALVGGALLYVFSTTALGVLFSSFLSTQIAAIFIVAIISIIPAVNFSGLLVPVSSLSQVGRLFGEAFPAAWFQEVSIGAFTKGMGFWMLAPNLLILFGFGLVYLIGAILALRKQEA

SEQ ID NO: 27324 - DNA, 2796 bp, Rhodopseudomonas palustris CGA009
  CDS (1)..(2796): transl_table=11
atgaccgttcaaacgtccgccgccgggctggtcggatcgactcaacccgtcgtacgtcttgccgcggtcgatcttgcctatggcggcaaccacgcgcttcagggcatcacgctcgacgtgcccgccggttgcatggtcggcttgattggccccgatggcgtgggaaagtccagcctgttgtcgctgatcgcgggcgcgcgcgccatccagactggaaccgtggcggtgctcggcggcgatatggccgataccgcccatcgtcgctcggtttgtccgcggatcgcctacatgccgcaggggctcggcaagaacctctatccgacgctgtcggtattcgacaatgtcgatttcttcggacggttgttcggccagggcaaggaggagcgggagcgtcgaattcgtgaactcctgcaaagcaccggtctggccgcatttgctgacaggccagcgggcaagctttcgggcggcatgaaacagaagttgggtctctgctgcgcgttgatccacgatccggatctgctgatcctggacgaacccaccaccggcgttgacccgctatcgcgccgccagttctgggaactcatcgacagcattcgcgccgaacgcgccggcatgagcgtcatcgttgcgacggcctacatggaagaggccgcacgcttcgattggctggcggcgatggacgccggccgggttctcgccaccggcggcccggccaatctgctgacgcagaccggtgccgtcacgctcgatgccgccttcatcgcgctacttccggagcagcaacgccgcggctataccgaggtggtgatcccgccgcgtccggtgggcgtcgacgacgacattgccattgaagccgaacacctcaccatgcggttcgacgatttcaccgctgtcgatgacgtgagtttccggatcggccgcggcgaaatcttcggctttctcggttcgaacggttgcggcaagaccacgaccatgaagatgctgacaggactgctgccagccagcgaaggcaaagccaagctgtttgggcgcgaggtcgatccccaagacatggaggtccgccgccgcgtcggctacatgtcgcaggcgttctcgctgtattccgaactcacggtacggcagaatctcgagctgcacgcgcggctgttccggatgacgcccgcggctattccggggcggatcgacgagatgttgcaaggtttcgacctggccgaggtgatcgatcaactgcccgacgcgctgccgctcggcattcggcagcggctgtcgctggcggtggcgatgatccactcgcccgacatcctgattctcgacgagccgacctccggcgtcgatccggtcgcacgtgacggcttttggcggatcctgtccgacctctcgcgcaaggacaacgtcaccatctttgtctcgacccatttcatgaacgaggccgagcgctgcgaccgcatctcactgatgcacgccggcagggtgctggtcagcgacacgccgcgggcgatcgtcgcggggcgcaacgcgtcgaatctcgaagaggcgttcatcaactatctcgaggacgcgatcggtgcgacgcccggcgaagcgccagcaacggccgcgccgaagccttccgctgacgccgttgagcccggcggcgacggcgccgttgcgcgaaaggcctcccgacgctggttcgatctgcgacggatgttcgcctacacgaggcgcgaggcgctggaattgcgccgcgatccgatccgcgccacgctggcactgatcggcagcgtggtgctgatgttcgtgcttggttatggcatcaacctcgacgtcgaacacctgtcgttcgcggcactcgatcgcgacgacacggcaatcagccgcgactacatcctgcagatctccggctcgcgctacttctccgaacaggctccgatcgtcgattatgccgacctagaccgccgcatgcgcagcggcaaattgaccctggcaatcgagattccgcccgggttcggtcgtgatgtggcgcgcggccgtaatgtcgagatcggcgcctggatcgacggcgcgctgccggcgcgggcggagaccacgcagggctatgtgcaggccatgcatctgagttggctgacccaaaaggcccgcgaactctatggcgccgccgccgttgccggcagtttcgagatcgcgctgcgctaccgttacaatcccggcatcaagagtctggtcgcgatggcgccagcggtgatcccgctcttgctgatgatgatcccggcgatgctggcggtgctgagcgtggttcgcgagaaagagctcggctcgatcatcaatttctacaccacaccgacaacgcgcctggaattcctaatcggcaagcagttgccttacgtcgcattggcgatgttgaactgcctgctgctcacggcgtttgccatcctggtgtttcaggtgccgttcaccggaagcttcctcgccttcgcttgcggcgcgctgctttatgtcgtgatcgcgacggggatcgggctgcttctctcgaccttcatgagcagccagatcgccgcgattttcggcaccgcgctgatcacgctgattccggccatccaattctccggactgatcgacccggtgtcttcgctgcagggattcggcgccgtcgttggcaggatctatccgaccacctatttcgtcaacatcacccgcggtaccttctcgaaggggctggactttgtcgatctgtggggctcgttcctgccgctgctgatcgcggtgccgtcgctgctcggcctcggtgcgctgttgctcaagaagcaggcgcgctga

SEQ ID NO: 27325 - protein, 931 aa, Rhodopseudomonas palustris CGA009
MTVQTSAAGLVGSTQPVVRLAAVDLAYGGNHALQGITLDVPAGCMVGLIGPDGVGKSSLLSLIAGARAIQTGTVAVLGGDMADTAHRRSVCPRIAYMPQGLGKNLYPTLSVFDNVDFFGRLFGQGKEERERRIRELLQSTGLAAFADRPAGKLSGGMKQKLGLCCALIHDPDLLILDEPTTGVDPLSRRQFWELIDSIRAERAGMSVIVATAYMEEAARFDWLAAMDAGRVLATGGPANLLTQTGAVTLDAAFIALLPEQQRRGYTEVVIPPRPVGVDDDIAIEAEHLTMRFDDFTAVDDVSFRIGRGEIFGFLGSNGCGKTTTMKMLTGLLPASEGKAKLFGREVDPQDMEVRRRVGYMSQAFSLYSELTVRQNLELHARLFRMTPAAIPGRIDEMLQGFDLAEVIDQLPDALPLGIRQRLSLAVAMIHSPDILILDEPTSGVDPVARDGFWRILSDLSRKDNVTIFVSTHFMNEAERCDRISLMHAGRVLVSDTPRAIVAGRNASNLEEAFINYLEDAIGATPGEAPATAAPKPSADAVEPGGDGAVARKASRRWFDLRRMFAYTRREALELRRDPIRATLALIGSVVLMFVLGYGINLDVEHLSFAALDRDDTAISRDYILQISGSRYFSEQAPIVDYADLDRRMRSGKLTLAIEIPPGFGRDVARGRNVEIGAWIDGALPARAETTQGYVQAMHLSWLTQKARELYGAAAVAGSFEIALRYRYNPGIKSLVAMAPAVIPLLLMMIPAMLAVLSVVREKELGSIINFYTTPTTRLEFLIGKQLPYVALAMLNCLLLTAFAILVFQVPFTGSFLAFACGALLYVVIATGIGLLLSTFMSSQIAAIFGTALITLIPAIQFSGLIDPVSSLQGFGAVVGRIYPTTYFVNITRGTFSKGLDFVDLWGSFLPLLIAVPSLLGLGALLLKKQAR

SEQ ID NO: 27326 - DNA, 2793 bp, Geobacter sulfurreducens PCA
  CDS (1)..(2793): transl_table=11
atgaacgcgcgggaaccggcagccgccgagcagccccccgtggtccggctgaagggggtcggtctccgttacggcaagaccccggcgcttgagaatatctcccttgatctccccgccggctgcatggtcggattcatcggccccgacggggtgggtaaatcgagcctcttctcgctcatcgccggttcccgggcggtccagtccggtgccgtggaggtgctcggggggagcatggccgaccgtggccaccggcgcacagtctgcccccgggtggccttcatgccccaggggctcggcaggaatctctatcccaccctgtcggtcttcgagaatgccgatttcttcgcccgccttttcggccacggccgccgggagcgggagcgccgcatccttgagctgttgcgggcaacgggccttgagcctttttccgatcggccggcgggcaaactgtccggcggcatgaagcagaagctgggtctgtgctgcgccctgattcacgaccctgatcttctggtcctggacgagcccaccaccggcgtcgaccccctgtcgcgccgccaattctgggagctcatcgaccgcatccgcgccaaacggccagggatgagcgtgctggtggccaccgcctacatggaagaagcggcacgtttcgactggctggtggccatgaacggggggcgagtcctggccacgggctctccggccgaacttctggcccaaaccggcactgccgccctggaagaggcgttcatcgcccttcttcccccatcccagcgggaaggtcatcggccggtagaggtttttccccgggaaaccgacgtttccgccgaggcagccatcgaggcccatggccttaccatgcgctttggcgagttcacggccgtcgaccacgtgagcttccgcatcgggcggggggagatcttcggcttcctgggctccaacggctgcggcaaaacgaccaccatgaagatgctgaccggcctcctgccggccagcgaaggggaggcgtggctcttcggccgtcccgtggactcccaggacatcgatacccgccgccgggtcggctacatgacccagtctttctccctttacggcgaactgacggtgcggcagaacctggtgctccacgcccgtctcttcaggctgccggaaaaggggatcccggcccgggtgaaggagatggcggagcgattcggtttggtggaggtgatggagagcctccccgatgccctgcccctggggcagcgccagcggctttccctggcggtggccatgatccacggcccggagatgctgattctggacgagcccacctcgggggtcgatccggtggcccgcgatgcgttctggcatatcatgctcgacctggcgcgccgggacggggtcaccatcttcatctcaacccacttcatgaacgaggccgagcgttgcgaccgcatctcgttgatgcacgcggggcgggtgctggtgagcgacaccccggctgccctgatcgaaagacggggggcagcgagcctggaagaggccttcatcggctaccttgaggaggcggccacggactccgatgccatggcgccgcctctgcaagagcacgccctttcccctcaaccgcgcgctccctctgacctcggtccggccagggagggaggacccgaagggggcggcttcttcagcctgcgccgcctgttcagctacacccggcgcgaggcattggaactgcgccgggatccgatccgcctgaccctggcgctcctggggagcgttatcctcatgctcgtcataggatatggcatcaacctggacgtggagaatctttccttcgcggtcctcgaccgggaccagaccaccctcagccgcgattacgcccttaacctcgccggttcacgctacttcaacgaacgtcctcccatcatcgactatggcgacctggaccggcgcatgcgggccggcgagatcagcctggccatcgagatcccccccggcttcggccgagacctgcgcaggggggctccggtgacggtgggggcctggatcgacggcgccatgcccacccgtgccgagacggtgcgcggctacgtgcaggggatgcatgcgcagtggctgtcggtcctggcccgggagcatgccacggctctctccggggccggggctgccaccattgaaacgcgcttccgctacaaccccgacgtgaaaagcctgccggccatggtgccggcggtcattccgctgctgctcatgatgattccggccatgctgaccgctctgtccgtggtgcgggaaaaggagctgggctccatcgtcaatctctacgtcactccggtcacccggctggaattcctcctcggcaagcagggtccatacgtggcactggccatgctcaactttctcctcctcaccgccctggccgtcttcgtgttccaggttcccctgaaggggagcttcccaacccttgccacggccgcgttcctctacgtaaccgctgccaccgcgctgggactggtgatctccaccttcatgcggagccagatagcggccctcttcggaacggcgctcctgaccctcctgcctgcggtccagttttccggcatgatcgacccggtttcctccctcgaaggggcaggggccatgatcggcagggcgtaccccaccacccatttcctgaccatcgcccggggcaccttttcaaaagggctcgatttccatgacctctactcctcattcctttccctggcactggctgtccccatcctgaccggcctcgggggagcattgctcaggaaacaggagcactga

SEQ ID NO: 27327 - protein, 930 aa, Geobacter sulfurreducens PCA
MNAREPAAAEQPPVVRLKGVGLRYGKTPALENISLDLPAGCMVGFIGPDGVGKSSLFSLIAGSRAVQSGAVEVLGGSMADRGHRRTVCPRVAFMPQGLGRNLYPTLSVFENADFFARLFGHGRRERERRILELLRATGLEPFSDRPAGKLSGGMKQKLGLCCALIHDPDLLVLDEPTTGVDPLSRRQFWELIDRIRAKRPGMSVLVATAYMEEAARFDWLVAMNGGRVLATGSPAELLAQTGTAALEEAFIALLPPSQREGHRPVEVFPRETDVSAEAAIEAHGLTMRFGEFTAVDHVSFRIGRGEIFGFLGSNGCGKTTTMKMLTGLLPASEGEAWLFGRPVDSQDIDTRRRVGYMTQSFSLYGELTVRQNLVLHARLFRLPEKGIPARVKEMAERFGLVEVMESLPDALPLGQRQRLSLAVAMIHGPEMLILDEPTSGVDPVARDAFWHIMLDLARRDGVTIFISTHFMNEAERCDRISLMHAGRVLVSDTPAALIERRGAASLEEAFIGYLEEAATDSDAMAPPLQEHALSPQPRAPSDLGPAREGGPEGGGFFSLRRLFSYTRREALELRRDPIRLTLALLGSVILMLVIGYGINLDVENLSFAVLDRDQTTLSRDYALNLAGSRYFNERPPIIDYGDLDRRMRAGEISLAIEIPPGFGRDLRRGAPVTVGAWIDGAMPTRAETVRGYVQGMHAQWLSVLAREHATALSGAGAATIETRFRYNPDVKSLPAMVPAVIPLLLMMIPAMLTALSVVREKELGSIVNLYVTPVTRLEFLLGKQGPYVALAMLNFLLLTALAVFVFQVPLKGSFPTLATAAFLYVTAATALGLVISTFMRSQIAALFGTALLTLLPAVQFSGMIDPVSSLEGAGAMIGRAYPTTHFLTIARGTFSKGLDFHDLYSSFLSLALAVPILTGLGGALLRKQEH

SEQ ID NO: 27328 - DNA, 1347 bp, Lactobacillus johnsonii NCC 533
  CDS (1)..(1347): transl_table=11
atgtcatccaaacaaatcaaaattaaccaactctcttttcaataccaagacaaattaatttttaagaatttagattttactattaaccaaggcgactttatcttattaacgggtccaagtggcagcggaaaatctacccttttaaaattagttgctggtcttgaacctacttctaacagcaaaattactactggctctttaaatcagccatttactaattggggtatggtctttcaagaccctaatcgtcaattcaccatggcaacaccaagagaagagttaatttttgctttagaaaatagactaattgatcgagttactgctcaaaagattatcgatgaggttagccataaaacgaatatttcgcatttgttagaccgtcccttccttcatctctcaggcggtgaaaagcagcatgtagccttagccgtcttaattgcaatgcaaagtgacctcttcttattagatgagccatttgctaattgcgactctcataatcgaaattttctgcttaactgcttagattcactccatcaagaaggtaaaacgattttgattagtgatcataactttgctaattatgaaaaaatcgatcccaaaatttttgctatcaaaaatcaaagaattcaaactactcctctaccttctcaagaagaagtagtaaccaatttttctcttcctcatccaaagcaagaatcagtatattcttttaattctttttcactatcatttccagaaaaagagttactttcttcaactaatttaaaaatctattctgggaaagcaaccctcttaactggagagaatggtagtggtaaaacttctttatttaaggccttaagcaaggttattacttatcagggagaactactctttaaagataaagaggttaaaaaatggcgtcgccgcccttatttgtcaaaagtaggacaaatttttcaaaatccagacgaccaattcttaaatgttacggtaaaagaagaattagattttagcttaaaatacaatcaaaatccttctttaaatgagtctaaacttcagtctatcctaactaaacttaatttagaaaatatggatgatcaagtcgtttattctctctctggtggtcaaaaaaggaagcttcaaattctcgtcatgttaatggcctatccggacgttttattactagatgaaccatttagtggtttagatcaaaaaagcgtctcagaagtcatttttttactaaagaactacttcttagatgaaaaccatagcttaatcgtaattagtcaccagctcgatcagattcaaaatctatgtgactatcatcttgttttaaaagaccaacaacttttctacgctaaatag

SEQ ID NO: 27329 - protein, 448 aa, Lactobacillus johnsonii NCC 533
MSSKQIKINQLSFQYQDKLIFKNLDFTINQGDFILLTGPSGSGKSTLLKLVAGLEPTSNSKITTGSLNQPFTNWGMVFQDPNRQFTMATPREELIFALENRLIDRVTAQKIIDEVSHKTNISHLLDRPFLHLSGGEKQHVALAVLIAMQSDLFLLDEPFANCDSHNRNFLLNCLDSLHQEGKTILISDHNFANYEKIDPKIFAIKNQRIQTTPLPSQEEVVTNFSLPHPKQESVYSFNSFSLSFPEKELLSSTNLKIYSGKATLLTGENGSGKTSLFKALSKVITYQGELLFKDKEVKKWRRRPYLSKVGQIFQNPDDQFLNVTVKEELDFSLKYNQNPSLNESKLQSILTKLNLENMDDQVVYSLSGGQKRKLQILVMLMAYPDVLLLDEPFSGLDQKSVSEVIFLLKNYFLDENHSLIVISHQLDQIQNLCDYHLVLKDQQLFYAK

SEQ ID NO: 27330 - DNA, 1425 bp, Treponema denticola ATCC 35405
  CDS (1)..(1425): transl_table=11
atgatacggatggaaaatgtaagttttcattatgaaaacagtgaaagaggtgtatcaaacataaaccttacaattaacgaaggcgaatgtacggttctaaccgggccgtcgggcggcggaaaaacgacaatattgcgccttttaaacggattagcaccgggttattacagtggagcgctttcaggaaatatctctatcggcggaaaagatatgtcttctaccccattatgggagaggggcaaatttataggcagcgtatttcaggagccgcagagccagtttttttcttccgagcttgcaggtgagattgctttttcatgcgaaaattacggactggcacaacacgagatcatcgcccgcacggagggggcaatcgaagcatttcatcttgcaacattacgagaccatacgcttgacacattttcaagcggagaaaaacagcgcgctgcaatcgcttcggtctatgccctctcgccttcaatatacgtatgtgatgagccgactgctaatctcgatgaagaaagcgccgtaaggctttctcatgttttaaagaagctcaaagaagaagggcgtactctgattattgcagaacataggttaagctggctgtatggaattgccgaccgttttatctatatagatggagggacaatacagtggtcgcatacggctgaagaaatgcagaaaatgacgcttgagcaaaaaaagctttttggattgaggtcatttacgcctgctttaaaaccggatcttccccctccttcatcaagagccttatcttccggtacggcaaacgaacccttactgcaagcagacgggatataccgcaaagaaaaggggaaccttattttgcaaacagtatcttttcccgtatcgcgcggacagattattgcgcttaccggtaaaaacggagttggaaaaacaacgctcggccttattttgagcgggcttaataaagagtcgggcggcacggtattccttaacggaaaaaaatgcgggctttgggcgcgccgcaaagcggtatggtacagcgccaacgatactggaacgcaattctttaccgaaagcgtttccgaagaaattttattgagtatgatgaacacccctgataagcttgaacgggcgcggaatatcttacagaccatggggctctatgacctcaaagatgttcaccctgcaacgctttccggaggacaaaaacagagactttccgttgcctgcgccctgctgtccggccgcgatatcctcattttcgatgagccgaccagcggtttggacggctatcatgcggacatccttgcaaaagcttttttggacgcggcagctcgcggtaaaacgattatcgttattacgcacgactttgaacttatcgctgcatgctgcagctttgaaatcatgcttgaggaagaagctcaaacgaaataa

SEQ ID NO: 27331 - protein, 474 aa, Treponema denticola ATCC 35405
MIRMENVSFHYENSERGVSNINLTINEGECTVLTGPSGGGKTTILRLLNGLAPGYYSGALSGNISIGGKDMSSTPLWERGKFIGSVFQEPQSQFFSSELAGEIAFSCENYGLAQHEIIARTEGAIEAFHLATLRDHTLDTFSSGEKQRAAIASVYALSPSIYVCDEPTANLDEESAVRLSHVLKKLKEEGRTLIIAEHRLSWLYGIADRFIYIDGGTIQWSHTAEEMQKMTLEQKKLFGLRSFTPALKPDLPPPSSRALSSGTANEPLLQADGIYRKEKGNLILQTVSFPVSRGQIIALTGKNGVGKTTLGLILSGLNKESGGTVFLNGKKCGLWARRKAVWYSANDTGTQFFTESVSEEILLSMMNTPDKLERARNILQTMGLYDLKDVHPATLSGGQKQRLSVACALLSGRDILIFDEPTSGLDGYHADILAKAFLDAAARGKTIIVITHDFELIAACCSFEIMLEEEAQTK

SEQ ID NO: 27332 - DNA, 1509 bp, Treponema denticola ATCC 35405
  CDS (1)..(1509): transl_table=11
atggcagatagtattgttgattttgatgatgtaagttttagctatggaacacaaacagagggttctttaaagcatatcaatcttaaaatagaagaaggagaatgtattgtcctcacaggacaatccggctgcggaaaaacaactattatgaggttgataaacggtttaatacctcatttttttgaaggcagtttgacaggatgtgtgaaaattcttggtaaagacacaaaaactacttctgtaggagagctcggcagaaacattgcttccatatttcaaaatccgaggagtcaattttttacaacaaacaccacggcagaagcggcatttgcttgtgaaaattacggaatagagagagccgaaatgataaagggcgttgacaatgcgttttatgattttgacgctaaatgccttatgaatagagatatgttctctttgtcaagcggagaaaaacaaaagattgctattattgctgcaaaaactttaaatcctaacatatatgtttttgatgagccatctgccaacttggatattcatgcaattatgcagttacaagaaatgatacggaagctgaaagaagcaggacatacggttattgtttcggaacatcgcttattttatttaaaaaacttatgtgatagatgttttatcatgagtaacggaaatatcgttaaagaattatgtaaaagtgatattgaaaatatgaatacagccgatttgacaaactataaactgagaacatttaatatagaagaaatcgggttgaatagggaaaataaaacagaatatgagagaagcgacaacataaaacttgaaattaaaaaattatctttttcatataaccattctaagaagcttttagacaatatcaatataacggcttatgcaggggagaccattgcaattatcggacaaaacggtgaaggtaaaactactttagggaaaattattgcaggcttattaaaatccgctcatggccgatttttccttgacggcaaacaggtaaaacaaaaagaattatataaaagtgtttattttgtcatgcaggaatctgattatcaattatattcagattctgttttatccgagctatatgtaagttccggattatccagcaaaaggaatacgcaaaaaatcgaatgtataatgaaattattacatatctttgcatataaagaaaagcatccatgggcactatcagggggtcagaagcagcgggtaactattgcggcagcgatggcttcaaataaatctattcttatttttgatgagccgacttccgggcttgattacgaaaatatgaaagcagtttcaaaagcaataaacattctgagccgacaaggaaccgtaaactttgttatttcccatgatttggaatttcttagccgagttgcaacaagagccgtttttatagcaaacggtacaatcggcggaagtatcagtttaaaaaacaatcgagactttagaaccgtaaaagattttttgttacggaatggggttgcaaagtaa

SEQ ID NO: 27333 - protein, 502 aa, Treponema denticola ATCC 35405
MADSIVDFDDVSFSYGTQTEGSLKHINLKIEEGECIVLTGQSGCGKTTIMRLINGLIPHFFEGSLTGCVKILGKDTKTTSVGELGRNIASIFQNPRSQFFTTNTTAEAAFACENYGIERAEMIKGVDNAFYDFDAKCLMNRDMFSLSSGEKQKIAIIAAKTLNPNIYVFDEPSANLDIHAIMQLQEMIRKLKEAGHTVIVSEHRLFYLKNLCDRCFIMSNGNIVKELCKSDIENMNTADLTNYKLRTFNIEEIGLNRENKTEYERSDNIKLEIKKLSFSYNHSKKLLDNINITAYAGETIAIIGQNGEGKTTLGKIIAGLLKSAHGRFFLDGKQVKQKELYKSVYFVMQESDYQLYSDSVLSELYVSSGLSSKRNTQKIECIMKLLHIFAYKEKHPWALSGGQKQRVTIAAAMASNKSILIFDEPTSGLDYENMKAVSKAINILSRQGTVNFVISHDLEFLSRVATRAVFIANGTIGGSISLKNNRDFRTVKDFLLRNGVAK

SEQ ID NO: 27334 - DNA, 1446 bp, Treponema denticola ATCC 35405
  CDS (1)..(1446): transl_table=11
atgggcatagtagaagcaagaataaaaaacttcacctatgaaaatgatgaaagtcccacgctccatgccattgatttgagcattgaagaaggcgagctcgttgtgcttacgggtttttccggctgcgggaagactaccttaacgcggatattaaacggcttaattccctatcattacggcggaatactcgacggtgaggtgcgcattttagggaagaacatcttggattataaaaagggcgaattggcaaagtacatcggcaatgtgtttcaaaatccgagtgatcagttttttgctaccattgcagaggaagaggttgcctttgccggagaaaatctcggtatggattctcaaaccctgtgcgaaaaaaccgatgctgcttttcaaacgatgcagatagaatcgcttaaaggtgcaaaactttcagagctttccggcgggcaaaaacaaaaggtcgccatcgcttccacactcatctatgacacaaagctgctttttttcgatgagccttcttccaatctcgactatgagggtattgtgcaatttcaagcgatgatacgggatttaaaggcgatgggaaaaacgattatcattgccgagcaccgtttatttttcttaaatgaattgtacgataagctcatctacatgaaagacggcactatcgaaaaaatctttttgaaaggtgaactgacaacagaggattgcaggcggtacggactgagggcaatacggtatgacagtcttgtctgcgaaaacccttcggtaccgaaacaagcggttacgcatatcgagggtttgagcgtttctatcggcagacgagaacttatcaaaaatctttcgtttgatgtacacgcaggagagattaccgccgttatcggaaaaaacggtataggaaagaccacactcggcaaagctttaggcgggcttttgtcttgcaaggggcagatcggttacgggaagcggcggcggcagcgcttaagaaatgcgtattatatgatgcaggatgttgactatcagattttttttgatacggtagaaaacgagcttattccttcttcaaaacggaaggatgaatcctatttgcaacaagcggctgagtacctgcgcacaattgacctttgggaaaaaaggcttgaccatccgcaggaactttcaggcggacaaaagcagcggctcgcccttgcaacggcatttttgagcggcaggcgcatcatcatcttagacgagccgaccagcggcctcgactacaaacgcatggacgaaatcgcaaagctcatcttacactgcgctcaagaagtttccgtcctcatcatcacccacgacttggaactcttattcaaagtctgcaacaccgccctcctgctcggtgaaaacgcatacaagaaaattccggtaaacggaaatgaaggtgaaattattgggtttatggggaaactttcaatataa

SEQ ID NO: 27335 - protein, 481 aa, Treponema denticola ATCC 35405
MGIVEARIKNFTYENDESPTLHAIDLSIEEGELVVLTGFSGCGKTTLTRILNGLIPYHYGGILDGEVRILGKNILDYKKGELAKYIGNVFQNPSDQFFATIAEEEVAFAGENLGMDSQTLCEKTDAAFQTMQIESLKGAKLSELSGGQKQKVAIASTLIYDTKLLFFDEPSSNLDYEGIVQFQAMIRDLKAMGKTIIIAEHRLFFLNELYDKLIYMKDGTIEKIFLKGELTTEDCRRYGLRAIRYDSLVCENPSVPKQAVTHIEGLSVSIGRRELIKNLSFDVHAGEITAVIGKNGIGKTTLGKALGGLLSCKGQIGYGKRRRQRLRNAYYMMQDVDYQIFFDTVENELIPSSKRKDESYLQQAAEYLRTIDLWEKRLDHPQELSGGQKQRLALATAFLSGRRIIILDEPTSGLDYKRMDEIAKLILHCAQEVSVLIITHDLELLFKVCNTALLLGENAYKKIPVNGNEGEIIGFMGKLSI

SEQ ID NO: 27336 - DNA, 1509 bp, Treponema denticola ATCC 35405
  CDS (1)..(1509): transl_table=11
atgaatacggcagtagaattaaaagatgtttcttttatatatgaatcctcaaaagacggaagagcaaatttaaaaaagacttctcttaatatcaaaaaaggagaattcttacttgttacgggcataagcggctgcggaaaatctacgctgacaaaatgcatcaatggccttattcctcggttttacgaaggagaattttcaggttccgtttttatcaatgaaaaagatatttcgaatttcagcatagatgaaatttcaaaagacataggctcggtttttcagtctcccaagagtcagttttttaccgatgacgtaatttcggaactcagctttccttgcgaaaactacggaatttcccgcgatgaaattatagaaaggattgccgaagtttgttccattttacatatcgaaaatcttttaaccgaaaaacttgagagcctctcgaacgggcaaaaacaaaaaatagccattgcctcgattttaaccttgaggcctaagattatagtccttgatgaaccctcgtccaatctggattttaactctatccttatcctggccgatattttaaaaattttaaaacaaagaggttttaccgtaatcatagcggagcaccgccttcattatctaaaagatctttttgacagagttatctatataaatgaaggaagtatacaaaacgaatacactcgtgaagaatttttagcccttacaaatacggagttaaattctaaaggtttaagaagtttacatctttttacaaatgaaaatgaagcggaacccatcggccctgtacataataaatttaactccgatacggaagccgaaaaaatatgcagcctttcggatatttcgttttcgtttaaggacggaaccgaaattttaaactcggttaatttagacctttacaaaaacgacattgccgcccttaccggaaaaaacggagcgggaaaaacaactctcgcaaaaatcatatcgggtatttaccgccaatctgccggaagcattaaattcggagaaaaaattttaaacgaaaaggaaagagtgagccgcacaaattttgttcttcaagatgttgaatatcagcttttcggtgccgatgttttttccgagcttttgataggaaacaaacagcttgaaaacgtaaacgaaaaaatagaaaaagccttaaagaaactcaacctttacgattataaagatgagcatcccttttctctttcgatgggacaaaaacagaggcttataatagcggccacctatgttcgaggctgcccgcttacaattctcgatgaaccgacaagcggcttggattacggaaatatggtcagggtaggagaacttatcgaagagatagccgagacttcggcagtgcttataataacccatgattttgaatttatctcgaagatatgcaacaggctgattcttttaaaggataaaaaaatagccttagattcaaggcttgaaaaaaacgataaaaaactggaaagtattttttccacatatttataa

SEQ ID NO: 27337 - protein, 502 aa, Treponema denticola ATCC 35405
MNTAVELKDVSFIYESSKDGRANLKKTSLNIKKGEFLLVTGISGCGKSTLTKCINGLIPRFYEGEFSGSVFINEKDISNFSIDEISKDIGSVFQSPKSQFFTDDVISELSFPCENYGISRDEIIERIAEVCSILHIENLLTEKLESLSNGQKQKIAIASILTLRPKIIVLDEPSSNLDFNSILILADILKILKQRGFTVIIAEHRLHYLKDLFDRVIYINEGSIQNEYTREEFLALTNTELNSKGLRSLHLFTNENEAEPIGPVHNKFNSDTEAEKICSLSDISFSFKDGTEILNSVNLDLYKNDIAALTGKNGAGKTTLAKIISGIYRQSAGSIKFGEKILNEKERVSRTNFVLQDVEYQLFGADVFSELLIGNKQLENVNEKIEKALKKLNLYDYKDEHPFSLSMGQKQRLIIAATYVRGCPLTILDEPTSGLDYGNMVRVGELIEEIAETSAVLIITHDFEFISKICNRLILLKDKKIALDSRLEKNDKKLESIFSTYL

SEQ ID NO: 27338 - DNA, 1743 bp, Yersinia pestis biovar Medievalis str. 91001
  CDS (1)..(1743): transl_table=11
atgaatggaattcaacatatcattactctggaggcggttgaaaaacggttcagcggactggatcaccctgcggttgccagcctgactacggagatccgcagcggagctgtgacgggattagtcgggccggacggtgccggtaaaaccacgttattacgtatgctggccgggttgctaaaacccactcagggtaagataaccgtggtcgggctagatccgttgaaagatgatcgccagctacatgccattctcggttatatgccgcagaaatttggcctgtatgaagatttaacggtcatggaaaacctgtcgctgtatgccgatttgcgtggcgtgaccggtgaacttcggcgccagacatttgagcgcctgctgacatttaccgatttaacccgcttcacatcacgtctggcgggtaagttgtcgggtggcatgaagcaaaagttagggttagcctgtaccttggtcggccaacccaaagtgctcctcttggatgagccgggtgttggtgtcgatcccatctctcgccgtgaactgtggcgcatggtgcatgagctggcagacgacggcatgctcattttgtggagtacctcttatctggatgaagcagaacaatgtcgtgaagtgttgctgcttaatgaaggcaaattcctgtacagcggcgcaccacaaaccctgacgcagcgcatgagcgggcggactattttggtggccgcccaacgtggcaccaatcgccagttgctacaacatgccctgaccctgccccaagtcagtgacggggtgatccaaggtaaatatgtccggctgatccttaagccagatgtcgatcacagccagttattacaatggctaaatcaacccgatgcagaaatgaaggaggcggaaccccgttttgaagacgcctttattgacctgttaggtggtggcccggacagcgagtccgcactggcaaaaattatgcccagagtggctggcaaccctggtgaaaccgttattgaagcacaagcgctaaccaagaaatttggcgattttgccgcgactgaccatgtgaattttcaggttaaacgcggtgaaatatttggcctgctcgggccaaatggggccggtaaatccacgacgtttaaaatgatgtgtggcttattggtacccagtgatggaaaagccttggtactggggatggatctgaaaaccagctcgggtaaagctcgccaacatctgggctatatggcacaaaaattttcgctgtacggcaacctgaccgttgagcaaaatctgaaatttttctccggggtttatggtctgaaaggcaaaatccagcgcgacaaaattgccgatatgatttcggcatttaacttcaccccgatcctgaaacaaacaccagactccctgccattagggtttaagcagcggcttgcactggcctgcgccttgatgcatgagccagatatcctgtttcttgatgagccaacctccggtgtcgatccgctcactcgccgtgaattctggttacacatcaatggaatggtagacaaaggcgtcaccgtcatggtgaccacccactttatggatgaagcggaatattgtgaccgtattgggctggtttatcgcggcaagattatcgccgccggtacgcccgatgaactgaaacaacaggttgccagtgatgatgaccccaatccgtcaatggaaacggcgtttatcgaattggttctgcgttatgaccaacagcatgataaggagtaa

SEQ ID NO: 27339 - protein, 580 aa, Yersinia pestis biovar Medievalis str. 91001
MNGIQHIITLEAVEKRFSGLDHPAVASLTTEIRSGAVTGLVGPDGAGKTTLLRMLAGLLKPTQGKITVVGLDPLKDDRQLHAILGYMPQKFGLYEDLTVMENLSLYADLRGVTGELRRQTFERLLTFTDLTRFTSRLAGKLSGGMKQKLGLACTLVGQPKVLLLDEPGVGVDPISRRELWRMVHELADDGMLILWSTSYLDEAEQCREVLLLNEGKFLYSGAPQTLTQRMSGRTILVAAQRGTNRQLLQHALTLPQVSDGVIQGKYVRLILKPDVDHSQLLQWLNQPDAEMKEAEPRFEDAFIDLLGGGPDSESALAKIMPRVAGNPGETVIEAQALTKKFGDFAATDHVNFQVKRGEIFGLLGPNGAGKSTTFKMMCGLLVPSDGKALVLGMDLKTSSGKARQHLGYMAQKFSLYGNLTVEQNLKFFSGVYGLKGKIQRDKIADMISAFNFTPILKQTPDSLPLGFKQRLALACALMHEPDILFLDEPTSGVDPLTRREFWLHINGMVDKGVTVMVTTHFMDEAEYCDRIGLVYRGKIIAAGTPDELKQQVASDDDPNPSMETAFIELVLRYDQQHDKE

SEQ ID NO: 27340 - DNA, 2085 bp, Neurospora crassa
  CDS (1)..(2085)
atgcgcttcccaccaccagggaccactgtccgtccccccatcatacgcatcaccaacggcaccttctaccggcaccaaccttcctcccacggccacggtcatggtcaccccaacccaccactcttctctaacctcaccctcgatatcccctcccacccttcgtctccgcacaactgggccatcctcggtccctcccaatccggcaagaccagcttcctgcaactcctccgcggccaatacctctgcttcccacccaccgctcgctcctttccctatctctctaccgaagacgtccccacccggctgagaggaaacccagccaaagcgattcagtatgtcgggttcgacgccacttccacgtccgggggtcttggggcagcggcatccagttacatctctgcgcggtacgaaagtcacagggaacagacggacttttcagtgaaggattggttgttgggcaacacggaacttaacccgacttcgatgccgggggattacaaagtggacgaaaagttgtttgaacgggtggttgttgatttgcggctggacacccttctcgacctccccgtctcgtttctttccaacggacagggccgtagggccaggatcgcgcgagcactcttcaaagacccggaggtcttgttgctggatgaacccttcatgggactcgacccagctacggtcgcgggcttgagtcccttgctgcaaagtctagcggagaagaagagcccacggctggtgctggccgcgagaccacaggatcccttgccggagtggatcacgcacctggtgtatctgcggacggacagccaggtgggcgcgatgggcgagcgggggaccgtactggatggtttgagggcctacgtgcgcggagtatggaagggtggactttctgaagacgaaacaatgcctgttcatgctctcatcgacatcggccgcaccttgacgaaagagggtatcaaaggggagggcctagccgaggcacttacccgctccccgaccaaccaagcacccatcatcgactccgcgcctggtcccgagaagaccgcaccagaagaagcagaaaaagaacctctagtcgaaatgtccggcgtcaccgtccgctacggctccaagaccgtccttggcaactggccttcgggcctccactggaccgtccgccgcggctcccgctggggtgtcttcggtcccaacggtagcggcaaaaccaccatcgtctcgctactctgctccgaccatccacagacttactccctccccatcaaactctttggacgatcccgcttgcctgaacccggatccggtcaacgccccttaaccttctgggacatccaatcgcgcgtcggccactccagtcccgaaatccaccagtacatgcctcgccggctaaccgtccgctccgttctcgagtccgcatgggccgacacgttcagctctgtccccaaactcacccctgaagcaacgggaaaagtagacgctactctatcctggttcgcacacgaactgaacccgtcctttgccaaacgttcgcaccacactcccgtcgaactcgcagagaccgatgccgacgacgaagcaagtctgaagtgggcaaaagattaccaattcggcgaattacctttttcttctcagcgcttactcctctttttgcgcgctatcgtcaaaaaccccgatattgtcgttctcgacgaggcgtttagcgggatggacgatgccgtccgcgacaaatgcatgttgtttctcatgcacggagagaacaagacttttgcttcttcttcttcttcttcttcttctagtacttctgctcctacgaccaagaccaagaatggtctatcggtagctcctgtggaagtagtagatagcgagcaagccaaggctggtaaagtcaaggtgcacgggttgacggacgagcaggccttgatttgcattagccacattaaggaggaagtgcctgattgcgtaagggagtgggtgtgtttgccggaggcgagcagtgggcaggaggcgaggtttgggaggttggatggcccgttgaggttgagtggtagaaggtggggggaggtttggggggttaatgggaattaa

SEQ ID NO: 27341 - protein, 694 aa, Neurospora crassa
MRFPPPGTTVRPPIIRITNGTFYRHQPSSHGHGHGHPNPPLFSNLTLDIPSHPSSPHNWAILGPSQSGKTSFLQLLRGQYLCFPPTARSFPYLSTEDVPTRLRGNPAKAIQYVGFDATSTSGGLGAAASSYISARYESHREQTDFSVKDWLLGNTELNPTSMPGDYKVDEKLFERVVVDLRLDTLLDLPVSFLSNGQGRRARIARALFKDPEVLLLDEPFMGLDPATVAGLSPLLQSLAEKKSPRLVLAARPQDPLPEWITHLVYLRTDSQVGAMGERGTVLDGLRAYVRGVWKGGLSEDETMPVHALIDIGRTLTKEGIKGEGLAEALTRSPTNQAPIIDSAPGPEKTAPEEAEKEPLVEMSGVTVRYGSKTVLGNWPSGLHWTVRRGSRWGVFGPNGSGKTTIVSLLCSDHPQTYSLPIKLFGRSRLPEPGSGQRPLTFWDIQSRVGHSSPEIHQYMPRRLTVRSVLESAWADTFSSVPKLTPEATGKVDATLSWFAHELNPSFAKRSHHTPVELAETDADDEASLKWAKDYQFGELPFSSQRLLLFLRAIVKNPDIVVLDEAFSGMDDAVRDKCMLFLMHGENKTFASSSSSSSSSTSAPTTKTKNGLSVAPVEVVDSEQAKAGKVKVHGLTDEQALICISHIKEEVPDCVREWVCLPEASSGQEARFGRLDGPLRLSGRRWGEVWGVNGN

SEQ ID NO: 27342 - DNA, 2052 bp, Magnaporthe grisea 70-15
  CDS (1)..(2052)
atgagggctttatattcatcggtccgcgcaccgatattacgcatcagtagaggcacgttctaccgacaccatccttctgcgcaggtgtcgcaccctaacccgccgctgttcaaggatctcgactttgagctttcctccaccgcccagttggccaatggagaaaagcaacagcactggtgcatagtcggtccttctctcagcgggaagaccacatttcttgaggttctgcgtggttttcacctcagcatacctcccacggccaggtcgtacccgtacctgtcaacagatgccttcccttgccacctgaggacgccgcaccaggcgattcagtatgtggggtttgatgcaagcagctcgtccggccttggccctccgacgagcacttatctcgctgcgaggtacgaatctcgccgtgaggatacagacttttcgctccgggactatctgctcggaaacaccgagcttaaccccgctgagaaacccggtcagtccgccgctgaagaggagaagctcctggggcgcgttgttcacgacttgaagcttgcgcccctactcgaactcccggtttcatttctctccaacggccaaggttgtagggcacgtattgctagggcattgctgcgaacccctgaggtcctgttgttggacgagccgttcatgggcctcgaccctcccactgtggtagctcttagtccgttcctgcgtggattggcagagcaagcggctcccaggctagtcctcagcattcgaccccaggatcccttgccatcatggattagccatatcgtgtatttgggcaacaactgtcaggttgcttcgataggtcagaaggaggatgtcatggaccaactaaggtcctatgttagtcgagtagctgactccaagacacccgaggaccctacgctccctgtatctgcgctgagggagatggggaggacattaacggacgacggggttgagggggtcgttttcgatgctgttgggttgcagagcagtatcgccatgcctgaacttcccagagcggccatcaatggggcaactagtattggagagcccttggtagagatgaatggggttcaagtcgggtatggcgataagattgtactcggcaactgggacaacgatactataactggccaaaccggtcaaaagggcttggtttggacagttcgtcggggcgaacgctggggtatctttggagcaaacggctcgggcaagacaactctcttcagcctgctgggctcagaccatcctcagtgttattcacaaccggtgaaactgtttgggcgcagtcgacttcccgagccagggtctggccagccgccgttgactttctgggacatacaagaacgcatcgggcactccagtcctgagatacacggcgctataccccggcgactcagcgtgcgccgtgtactcgagacggcatgggccgagacgttcatcagcacaccgaagttggaaaagaacgctagtgagaaggtggaagcgactcttgtctggttcgaacgagagctgaaccccgcggtgcgccgcgagaatgagcaaacaaaccatggctcaggctctagcactttgaaatgggccgacgattatctgttcggtgagctttccttcagcgctcaacgcgtgttactactccttagggcaatcatcaaaagcccagacattgtggtgctcgatgaggccttcagcggcatggacgaggcggtccgggacaagtgcatgcttttcatcgcgcacggcgaggagaagattctcgctgccagaggcggcaggcaggttatggtggacagtcaagccaagcaggatggcaatgtccgcgtcacgggtctctcggatcggcaggcgttcatctgcatcagtcatgtcaaggaggaagtgccagactttgtgagggagtggctttgtctgccagaggccacttctcggttgccggcgcgattcgggcgtctggacgggcctttgaggctggatgggaagcgatgggatgatatatggggaatgggacgaggtgcaaggaaaggcttagaaaacggccagcttttctag

SEQ ID NO: 27343 - protein, 683 aa, Magnaporthe grisea 70-15
MRALYSSVRAPILRISRGTFYRHHPSAQVSHPNPPLFKDLDFELSSTAQLANGEKQQHWCIVGPSLSGKTTFLEVLRGFHLSIPPTARSYPYLSTDAFPCHLRTPHQAIQYVGFDASSSSGLGPPTSTYLAARYESRREDTDFSLRDYLLGNTELNPAEKPGQSAAEEEKLLGRVVHDLKLAPLLELPVSFLSNGQGCRARIARALLRTPEVLLLDEPFMGLDPPTVVALSPFLRGLAEQAAPRLVLSIRPQDPLPSWISHIVYLGNNCQVASIGQKEDVMDQLRSYVSRVADSKTPEDPTLPVSALREMGRTLTDDGVEGVVFDAVGLQSSIAMPELPRAAINGATSIGEPLVEMNGVQVGYGDKIVLGNWDNDTITGQTGQKGLVWTVRRGERWGIFGANGSGKTTLFSLLGSDHPQCYSQPVKLFGRSRLPEPGSGQPPLTFWDIQERIGHSSPEIHGAIPRRLSVRRVLETAWAETFISTPKLEKNASEKVEATLVWFERELNPAVRRENEQTNHGSGSSTLKWADDYLFGELSFSAQRVLLLLRAIIKSPDIVVLDEAFSGMDEAVRDKCMLFIAHGEEKILAARGGRQVMVDSQAKQDGNVRVTGLSDRQAFICISHVKEEVPDFVREWLCLPEATSRLPARFGRLDGPLRLDGKRWDDIWGMGRGARKGLENGQLF

SEQ ID NO: 27344 - DNA, 1965 bp, Gibberella zeae PH-1
  CDS (1)..(1965)
atgagacctcttacaagttgtcctccgatcattcggatcgccaatggcactttctatcgccatcacccaaacactactactacatcattgcggccaaatccacctctttttagtgacttgaatttcgagctgccttctacatcaaactcgcctcggaattggtgtatcgttggaccatcgctatcaggaaagactacattcctacaggctttgaaaggaagatatctttgcgacccacccatcgcaagatcctatccatacctttcttctgagaacgttcctaaacggttacgcacgccgcaaaaggcgattcagtatgtgggtttcgatgcagaacaaactggtggcggcttaggcagtagtgttgccacaagtgcgtacttgtcggcgaggtatgagtcgagacgtgagattacagacttttctctcagggactttcttctaggaaacacagagcttaatcctatgaagacggaacaaggcgatgacgatgcttccataccacttggcctactgtcccgagttattaaggatttaaagttggagaaccttcttgatctgcctgtctcgtttcttagcaatggccaaggtcgaagagcacgtattgctcgtgctcttctgacgaagccggaagttctattactcgacgagccttttatgggactggatcctcctacagtctctggtttaagtcctctgctatattcactatctgaaaaggcaagtcctcgtctcgttctaagcgcgagaccgcaggaccccgtgcctgactggattactcacttggtgtatctgagaacagactgccaagtaggctcaatgggccccaaggaggaggtccttgaaggtctgaagaaatatgtacatggtgttcgcaaaggaggtcttgttgaggacgagaaacttccattgcactcgcttgtcgacattggccgtgtgctaccctcagctgcttctacggaaggctcaggtcatacagagcaatcatcgttcaaggagctagaaccaagtaagcctggtgctgagcctctcgttgagatggatggctgcagggttcagtatcgtggaaaggttgcccttggtaactgggcacagcaaactgctgatggttccaaagatggcttgatttggacggttcgacgtggcgagcggtggggtgttttcggtcccaacgggtcaggcaagacgacgatagtctcactgctctgctctgatcaccctcaatcttactccctccccatcaagttattcggacgatctcgtcttccagaacctggctctagtcaacggccgctcactttctgggatatccaatcacgaatcggacactctagtcccgaggttcatcagcatatgcctcgaagcctgactattcgtcagactatcgagaatgcatggtcggaaacgttccgtgcgaagccgaaattaaatgacgctgctaaggaaaaggtcgaggcggctctccgatggtttgcgcctgagctacatccagcttattcttcatcgtcgcacgagaacctctcgtgggcggatgattacatgtttggtggtctctcattcagtgcacagcgtatcgcgctttttatccgctccatgatcaagagtccagatgtcgtggtcctcgatgaggccttcagtggcatggatgatgcagtgcgggacaagtgcacactgttcctcgaacaaggcgaatctaggacataccgtggcgaagatatcgttgagagtgacgcatcaaagtctggtcaggtcaaaatcactggtctttctgacgagcaggcgctgatttgcattgcccatgttaaggaggaagtgccggactgtgtgagggagtggttatgtcttcctgaggctaatacgggaagtccagcgaggtttggaagattggatggcccattgagaaccgatgagaagagatggcatgagcacaccgtgaagttgaaggtgattcatgtcatggaatag

SEQ ID NO: 27345 - protein, 654 aa, Gibberella zeae PH-1
MRPLTSCPPIIRIANGTFYRHHPNTTTTSLRPNPPLFSDLNFELPSTSNSPRNWCIVGPSLSGKTTFLQALKGRYLCDPPIARSYPYLSSENVPKRLRTPQKAIQYVGFDAEQTGGGLGSSVATSAYLSARYESRREITDFSLRDFLLGNTELNPMKTEQGDDDASIPLGLLSRVIKDLKLENLLDLPVSFLSNGQGRRARIARALLTKPEVLLLDEPFMGLDPPTVSGLSPLLYSLSEKASPRLVLSARPQDPVPDWITHLVYLRTDCQVGSMGPKEEVLEGLKKYVHGVRKGGLVEDEKLPLHSLVDIGRVLPSAASTEGSGHTEQSSFKELEPSKPGAEPLVEMDGCRVQYRGKVALGNWAQQTADGSKDGLIWTVRRGERWGVFGPNGSGKTTIVSLLCSDHPQSYSLPIKLFGRSRLPEPGSSQRPLTFWDIQSRIGHSSPEVHQHMPRSLTIRQTIENAWSETFRAKPKLNDAAKEKVEAALRWFAPELHPAYSSSSHENLSWADDYMFGGLSFSAQRIALFIRSMIKSPDVVVLDEAFSGMDDAVRDKCTLFLEQGESRTYRGEDIVESDASKSGQVKITGLSDEQALICIAHVKEEVPDCVREWLCLPEANTGSPARFGRLDGPLRTDEKRWHEHTVKLKVIHVME

SEQ ID NO: 27346 - DNA, 2004 bp, Ustilago maydis 521
  CDS (1)..(2004)
atgccagtaaagatggcatctatatccagggccgcatctgtgaatatcagagttggtggtcgtccgcccaatcgttggctgccacgctcaatcacatcaaccaccccgactgttagcccctctcgtttctcatcgacagctccatcccagacacgaccgccgatcctcaagcttgacaatgctcttctcagaactcagacctccccaacagtctcaagcacctcaacgagcccaccatcaactctgcaatggaccgtcaacgatgcgggcgccgatgaatgctgggccatcatcgcaccagcctccgaacaaggcggggctgttcgtgctgaactcatcgatatcctctctggtcgccttcgccctcgcaagcatccaaacaatttgcagcatccgcccgtacatccgttcttacaagacgcatcacagcccgatactagtccacgctcctccgtcaaggcaatcaagcacgtctcattcgcaaccaaaatcggctccacctcgtcctctgccgacttcaccaactactctgcccgctacggtgctatccgcgaccaagatcgtgtgacgctctacgagcggctgatggatatcctagactgccctgttggcctcgtggctgctgccaaactcgttcctgacccctttgcccctccagacgcgtcgagccaagtaggacggttcaagtacaaatccgaatgtgagcgaaaagctgctctgtcaaaagcgcagcaagctgacaaggtcatcaaacagatggcgccgctggtgctcatcacggacgagctgctgcatcgacctgtaatcgcgctctcaaacggtcaaacaagacgcgcaaggattttgagcagcttgatcacgggcgcagagctggtggtactggaagagcctttttctggcatcgatctggagacgagacagaaattgagcgttctgtttgcacaactgcatgcggctaggaggccgaggctcgtgctagtgctgagggagcaggattccataccggagcttgtcacacatatcctcaaagtggacgatgaggggcgaatcacttggattggcccgcgaaaaagtgatactgcttttcctcacgataccaactctgctgcaaacagcgacaactcgccagcgcaaggaggctaccatcttgtcctctccaactctaaatcatcgatcggtgtcggtgacacatgctcggcaccgctcgtctcgctttgctcggtctcgattcagtacggctcgaaacttgtgctcgattccatcaacctctctctctacccggggctccgcctcattctggctggagacaacggttccggcaagacaacgttgctcgcgcttctgcttggcgatcatccaaagtcgttctccttctcggcctcttctttgtcgctcttctcacacgcacgcgaccacgctcttaacgcacgagcgctgctcaaccgtcgattgggccacgtctcacccgagctgttcaacgcattcccacgcaagccgttgagcgccggtggcttgacggtgggcgaagtggtggcatctggtttcgagaatgtgtttgcgcgacgaaagtactcggaccaacaaaaacagagggtctggtcgttgttggcgttatttggcgacttgatcaagtcgcgtcagcgaggttgcatgaccgatagcgcggatggtgtgcaggcgatatccgatcttgcattttcgtcgttgagccatggaagtcaagcggtggtcctgttcctgcgcgctgtggtgggcaatcctcctgtattggtgttggacgaaccgtttcaagggatggataccaagcaggtacagaggacgagagcgttcattgactttcccgagcacttttccatcgggcctactccactggacaagcaaaacgacttgcacgagagacgaagaatggcaatcgtgctcgtcagccattacgaatccgagtggcccaccagctttggttcgctgctgcgtctgcgtcaaggaaaggcggtggaacacttttga

SEQ ID NO: 27347 - protein, 667 aa, Ustilago maydis 521
MPVKMASISRAASVNIRVGGRPPNRWLPRSITSTTPTVSPSRFSSTAPSQTRPPILKLDNALLRTQTSPTVSSTSTSPPSTLQWTVNDAGADECWAIIAPASEQGGAVRAELIDILSGRLRPRKHPNNLQHPPVHPFLQDASQPDTSPRSSVKAIKHVSFATKIGSTSSSADFTNYSARYGAIRDQDRVTLYERLMDILDCPVGLVAAAKLVPDPFAPPDASSQVGRFKYKSECERKAALSKAQQADKVIKQMAPLVLITDELLHRPVIALSNGQTRRARILSSLITGAELVVLEEPFSGIDLETRQKLSVLFAQLHAARRPRLVLVLREQDSIPELVTHILKVDDEGRITWIGPRKSDTAFPHDTNSAANSDNSPAQGGYHLVLSNSKSSIGVGDTCSAPLVSLCSVSIQYGSKLVLDSINLSLYPGLRLILAGDNGSGKTTLLALLLGDHPKSFSFSASSLSLFSHARDHALNARALLNRRLGHVSPELFNAFPRKPLSAGGLTVGEVVASGFENVFARRKYSDQQKQRVWSLLALFGDLIKSRQRGCMTDSADGVQAISDLAFSSLSHGSQAVVLFLRAVVGNPPVLVLDEPFQGMDTKQVQRTRAFIDFPEHFSIGPTPLDKQNDLHERRRMAIVLVSHYESEWPTSFGSLLRLRQGKAVEHF

SEQ ID NO: 27348 - DNA, 1635 bp, Candida glabrata CBS138
  CDS (1)..(1635)
atgagcaaaagcgtattgaagatatccaatgcgctgtttaggtcttctctgatgaagaatgtgccgccagtgttcagcaagccggttaaagatttcgagatactcactggtgagaaatgggtcatctggggtaacggtaaggccaaattcatgaatgtgttgtctaacaagtacctatgtgaccccccactgtcgttacagtacaatgtctcaaaagatggtgttacgctgcctcgcattgagcaggttcaatttaaaggtgccattccaactgcgcatctcagtgctcgttatgagttcttcaaggatgaattcgatcagacttgtaagaagtttatcctagacaatgccattggctcgaatgcagtggagtacgatgtcagtacaactgatagggtagtggatatgggactctatgattttttggtccgggaactcaagcttgaagagttacagaatagatgggccatgggactgagtaatgggcagatgaggagagcccgtttggctagaagtttactgaaacagccagatttgatactggtggatgatcctttcttagggctggatcccacagccacagcaatcatctccaagttcttgagcaattggggtggtgctggcaaagaaaacagctatcattctcctgttgtgataggtctacggtaccaggatacaattccaagttggtgtacacacatatgctgtgtcgaccccgagtctggcatcaagttccaaggaccaattaacgaatatagagacgctatcgaaaacaagagggcctctgtgattgaggacttaaagaatgccaaaacgcaaaggaggaaagagattggactttctggtgcgagtgaggaatactctattgacgatctgatatcgccacacccaatgtacaattgtgcctcccacgagatgatcaagatgccacccacaattgaattgaaggggctaggtgttacatacaagggtgagcccgtgttggaaaatctgcattggcaagtcaaaccgggatccaagtggcatatcaggggcgacaacggtactggcaagtctacgctgctgtcgcttttgaccgctgagcacccgcaatcgtggaactccaaagttgtagagaacggggagccccgccggacaggcaaatccaactacttcgacatcaacagcaggatcggcatgtcctctcctgaactgcatgccattatcctgaacaactgcgccgacagactaacggtccgcgaattcatagccactgggttccaccaggggtcatccaacaacttcctccccctttgggacaagctggacgatagccagaagcgcatagtgaatatgtacatgaactactttgagctggacctgatcgcgcgcgacaagaccatcaaccagctcagtgtcagtgagcagaaactggcgctcctggtgagaagtctagtgaagatgccagagatactggtcctagacgaagcattctctggtatggaagtcacgccaatgttgaaatgccacgagttcctagaccactggcccggcacagtgcttgtggtcgcacacgtcgcggaagagacaccggcctgccaccactacctccgcctgatctccccaggccagtacgagattggagacatagtatga

SEQ ID NO: 27349 - protein, 544 aa, Candida glabrata CBS138
MSKSVLKISNALFRSSLMKNVPPVFSKPVKDFEILTGEKWVIWGNGKAKFMNVLSNKYLCDPPLSLQYNVSKDGVTLPRIEQVQFKGAIPTAHLSARYEFFKDEFDQTCKKFILDNAIGSNAVEYDVSTTDRVVDMGLYDFLVRELKLEELQNRWAMGLSNGQMRRARLARSLLKQPDLILVDDPFLGLDPTATAIISKFLSNWGGAGKENSYHSPVVIGLRYQDTIPSWCTHICCVDPESGIKFQGPINEYRDAIENKRASVIEDLKNAKTQRRKEIGLSGASEEYSIDDLISPHPMYNCASHEMIKMPPTIELKGLGVTYKGEPVLENLHWQVKPGSKWHIRGDNGTGKSTLLSLLTAEHPQSWNSKVVENGEPRRTGKSNYFDINSRIGMSSPELHAIILNNCADRLTVREFIATGFHQGSSNNFLPLWDKLDDSQKRIVNMYMNYFELDLIARDKTINQLSVSEQKLALLVRSLVKMPEILVLDEAFSGMEVTPMLKCHEFLDHWPGTVLVVAHVAEETPACHHYLRLISPGQYEIGDIV

SEQ ID NO: 27350 - DNA, 1566 bp, Kluyveromyces lactis NRRL Y-1140
  CDS (1)..(1566)
atgacacttaataagcaagttgttaagatcactgatgcctttttcaaatcatccttaaggaaaggttctccatatgtatttccgaacaagatccggtttgagatcaatgaaggtgagaagtggtgtatttggggtccatcaaaggagaagttcattgatattttgtctaacaagtacataagtgatcctttttcggcagttacttatgcgaaagttgtaaagggtcggttaccacggattgaacaagttaaatttaaaggtgtgatgcctacagcccatttgagtgcccgttatgagttcttcaaggacgaatttgatcagacatgcgagaagtttattcttgataattcaatgggatctcgtgcagtaaattatgaggttgagactacgaacagatacgtggatccagagctattaacgtatttgttgaaagagttaaaacttattgacatcaaagataggtgggctatggggttgagtaatggacaaatgagacgtactaggcttgcgcgctcgttattgaaggaacctgacttaacaattattgacgatccatttttgggattggatccatctgcgtgttcgatcatatcaaaattcttgtccaaatatgataaaggtacatcagtcatcatagggttgaggtatcaagatcaaataccagactggtgtacgcacgtggtgtgtgtggacaaggatggtatagagttccaaggtcccatggagcagtatagagaccaagttgaatcaatgaggttgcaattgttagaagtactacagctaaacaaacctaagagtaagtatactattgaggatttgatttcgccacataagtactataaaagcccacatcatgatgtgatgaagattccatcagtagtcacgctagaaggtctgtcggttacatacagtggcgaaccagtattaaaagatatttactgggatgtcaaacaaggttccaaatggcatattcaaggaaataatggtgctggtaagtcaaccttgctatctttgatcactgcagaccatccacagtcttggaactccaaatttgttgaccacggcgttcctagaagaaccggaagcactaacttctttgacattaataaaaggattggtctttcttcgccagagatgcacgctctctttttgaagaacgctggtgacctctctgtgttagaaacagtggcatcagggttccatgcagtcagttccaacaactttttaaaagcgcataacacacttacagacgaacagaaaagaattgttgatatgtatatcgattatttccatttggacccgaagaaaacattcgcatccctatctgttagcgaacagaagattgcattattcgttagggctgcggttaagatgccggaaattatgatacttgacgaagcgttctccggaacagagactgatcaactcataagggcccatgagttcctcgagcaatggccaggaactgtttttgtcgtatcgcatgttcaggaagagacaccaaaatgcaatcactacctaagattaatcgaacctggacaatacgaaatcggagacgtcaattga

SEQ ID NO: 27351 - protein, 521 aa, Kluyveromyces lactis NRRL Y-1140
MTLNKQVVKITDAFFKSSLRKGSPYVFPNKIRFEINEGEKWCIWGPSKEKFIDILSNKYISDPFSAVTYAKVVKGRLPRIEQVKFKGVMPTAHLSARYEFFKDEFDQTCEKFILDNSMGSRAVNYEVETTNRYVDPELLTYLLKELKLIDIKDRWAMGLSNGQMRRTRLARSLLKEPDLTIIDDPFLGLDPSACSIISKFLSKYDKGTSVIIGLRYQDQIPDWCTHVVCVDKDGIEFQGPMEQYRDQVESMRLQLLEVLQLNKPKSKYTIEDLISPHKYYKSPHHDVMKIPSVVTLEGLSVTYSGEPVLKDIYWDVKQGSKWHIQGNNGAGKSTLLSLITADHPQSWNSKFVDHGVPRRTGSTNFFDINKRIGLSSPEMHALFLKNAGDLSVLETVASGFHAVSSNNFLKAHNTLTDEQKRIVDMYIDYFHLDPKKTFASLSVSEQKIALFVRAAVKMPEIMILDEAFSGTETDQLIRAHEFLEQWPGTVFVVSHVQEETPKCNHYLRLIEPGQYEIGDVN

SEQ ID NO: 27352 - DNA, 1641 bp, Debaryomyces hansenii CBS767
  CDS (1)..(1641)
atgatacctacagtaaggttgttgaactcacaggtagatcaatgtttgttgagaattaaggatgggtttttcaagaacagtggaaagaaaacgctggatttgaaagattatgtctttagaaagcccattgaaaaatttgaaatttacagacttaataatgagaataagccatcgttatggtcaataacaggtccagcgaaatcgcaattcttaggtgtggtatcgggaaagtatattccgtatcctccactttccagaacatatccatttatgctggacagctacaaatacgaccagatccaatttttgaatttcaaagaggcttccgggttggataaagtacatttatccgctagatatgaatcttattcttacaagggaagcttggaaatgtcggatgacgtcaattctgtccgcaattatattactggtgctaataattataatagtaatacgacttctggtgtgagggaagatttcgtgaatcaacttttggatttattcaacttgaatcacttgtcgaacaagtggattaactcgttatctaatgggcaattgagaagggcaaggttagcgaaagcattgattaacaagcccagcttattcataattgatgatccgtttttgggattggaccctcaagcaaccaagttagtatccaattcgttgcttagagtcagccaggacttgaacacgagtgttgttttaggattgagaattcaggacgatattccggagtggcttacccatgttggctatgtcactacagaggatggattaaaaatgtcaggtgctaaggaagatatacttcctcttctcgaacaggaattgaagtctgccacttctattcatcaccaacacgaaataaagctgaaaaataaaaagagtactccaatctccaacgagactttatgtacttctggtgaaactccccacatagaattccgcaatgcatcggttgtctacaaagatttgcccatattcgccaactttgactggaaaattcctcgtgggtcgaaatggcgtatcttaggagataacggtaccgggaagacaacgttgctctcgttgatcacggccgaccatccgcagtcgtggagatcagtgttgagcatagacggtgttctcaggaaaaccggaaacggagtgtcattttttgacgtcaatgacaagataggcatttcgtcacccgaactccacgctctagttcccggaaacaagactatgatgcaggtcatcatgaacggtctagttccaaacgtcgccaactcaaatttcacgtttattgcacccaaagaactgctcactccccatgcccgcacccttctcggcaaattcgacgacattcttgcggcccatgctaacgacagcttctctgacttgtccgtcaccaaccagaagcttacattgttccttagggccgtcataaaaaatcccgaaattctcattctcgacgaagccttctcttgcatggacgaagaacaaattatggtcagatgccacgacatcgtagaaaacgacttgaaagatactacagttctagcaatagcccacatagactgggagatccccgcctgcgactacgttttgaagctacatggtgatgaactgagatcatacggaatcctgaagtatggttga

SEQ ID NO: 27353 - protein, 546 aa, Debaryomyces hansenii CBS767
MIPTVRLLNSQVDQCLLRIKDGFFKNSGKKTLDLKDYVFRKPIEKFEIYRLNNENKPSLWSITGPAKSQFLGVVSGKYIPYPPLSRTYPFMLDSYKYDQIQFLNFKEASGLDKVHLSARYESYSYKGSLEMSDDVNSVRNYITGANNYNSNTTSGVREDFVNQLLDLFNLNHLSNKWINSLSNGQLRRARLAKALINKPSLFIIDDPFLGLDPQATKLVSNSLLRVSQDLNTSVVLGLRIQDDIPEWLTHVGYVTTEDGLKMSGAKEDILPLLEQELKSATSIHHQHEIKLKNKKSTPISNETLCTSGETPHIEFRNASVVYKDLPIFANFDWKIPRGSKWRILGDNGTGKTTLLSLITADHPQSWRSVLSIDGVLRKTGNGVSFFDVNDKIGISSPELHALVPGNKTMMQVIMNGLVPNVANSNFTFIAPKELLTPHARTLLGKFDDILAAHANDSFSDLSVTNQKLTLFLRAVIKNPEILILDEAFSCMDEEQIMVRCHDIVENDLKDTTVLAIAHIDWEIPACDYVLKLHGDELRSYGILKYG

SEQ ID NO: 27354 - DNA, 1503 bp, Yarrowia lipolytica CLIB99
  CDS (1)..(1503)
atgactcgattgccgctgatatcgataaaagacgcgaagttccgcatgattggggccctggcctcgtcaggatccaacccttacattttccccaatcccatttcgctgacaatcaacccggatgagaaatgggtcatcagtggacctcgaaagtcgcaattgatgtccattctggccgccaaacatgtatcagatccacctctgggccggcagtaccctttcctcaagaaaaaacgggttcccagccaagtcatccagacgctggagttccgaggatcaatcaacatgggtcacttgtcagctcgatatgagttcttcaaggacgagttcgacatgactctcatcgaggagctcaagcgagcctcccgtgatcccgcaaccgcgatggacgacattccccagttgctgaagatgttggagctggaccaaattggtgatcgatggtttggagctctttccaacgggcagacccggcgatctcgaatcgccaaggctctcatgaagcatcccgagcttctgctcatcgacgaccccttccttggtctcgatcccggtgccgctgaccttgtcagcaatgtctgcaaggaattgcctgagaccagaggtacacacgccattctgggtctgagatcccacgagacggtccccgactggatcacccacgtggcttacgccgataagtctggaatcgtggttgcaggagagaaatctctttctggtgagcttctcgagaaggcaaagactaagcatgacgaaaagatctttctccgaggagaacgagccaaacaggcccgggagaaactggcctctgatcaggacgccccctctgtactgaccatgaactccgtggatgtaacttactccggaaagcctgttctctccagcctgtcgtgggacgtcaagcctggacaaaagtggcatctgcgaggagtcaatggagctggaaaatctactctcctatctctgatcacagctgaccaccctcagtcctggaacgagaagattgtcatgtgcggaactcctcgagaagttggaaaccactcttacttctctatcaataatagaattggccatacctctcccgaaatccacgctctgttccccaagactcagaccgtgactgaagctattgacacggggtacattgttggaagtaacattcctcccaagaacctcactcccgagcagaaagagaagcgagatagtcttatttcgcactttgagcttgacgctgagcgagacacgcccttcaacgacctgactgttagccagcagaaggtggttctcttcatcagagctgtcatcaaaaacccagacattctgattctcgatgaggctctttctggtatggacgacgacgctgtcgatctctgtaaggagatgatggagtcttggcctggctctgtgattgccgttgctcatctggacgaagagctccccagctgcacccattatatccagctcaagcccaacgctgagcctgccgaaaccggccagctgtaa

SEQ ID NO: 27355 - protein, 500 aa, Yarrowia lipolytica CLIB99
MTRLPLISIKDAKFRMIGALASSGSNPYIFPNPISLTINPDEKWVISGPRKSQLMSILAAKHVSDPPLGRQYPFLKKKRVPSQVIQTLEFRGSINMGHLSARYEFFKDEFDMTLIEELKRASRDPATAMDDIPQLLKMLELDQIGDRWFGALSNGQTRRSRIAKALMKHPELLLIDDPFLGLDPGAADLVSNVCKELPETRGTHAILGLRSHETVPDWITHVAYADKSGIVVAGEKSLSGELLEKAKTKHDEKIFLRGERAKQAREKLASDQDAPSVLTMNSVDVTYSGKPVLSSLSWDVKPGQKWHLRGVNGAGKSTLLSLITADHPQSWNEKIVMCGTPREVGNHSYFSINNRIGHTSPEIHALFPKTQTVTEAIDTGYIVGSNIPPKNLTPEQKEKRDSLISHFELDAERDTPFNDLTVSQQKVVLFIRAVIKNPDILILDEALSGMDDDAVDLCKEMMESWPGSVIAVAHLDEELPSCTHYIQLKPNAEPAETGQL

SEQ ID NO: 27356 - DNA, 1632 bp, Cryptococcus neoformans var. neoformans JEC21
  CDS (1)..(1632)
atgcccccctcatctctacctctcgtaaggctacccccaaaagctgtcgtacatcgtttcggtgcacctacttcagctcctccttcatcggctttacttagatttccggttcaaggatggactatcaacagagaatcagcaaaacctgaaggatgggcaatcgtaggagatgctgacggtcgcaaggttgctgtggagacgctgttgagcagacatcgaatccaacctttttccccgcctccaggcccgttcccttatataacctcgctcatctcctcttccacagactcctggtcttctactactgaagcaccctcgaaacctatccgtcacctggcatttgcacgcccaccaacgacaggtgaatttacagattttactgctcgctatggagctctccttgaagaagacaggctgtcttacagggaaaacttgcagaaccttcacccgagaccgagtgatgaggatattgagagggttgcaaagctcatgaggatagggcacttgctcgatctccctactgtttcattctcatctggtcagactagacggggtagaatcgcaagtgccctgttgacaagacctgttttgttgctgttggaggatcctatggcaggtttggatgttcccagtcgaaaggaagtctccaaccttttgggagagctcaatgcaagtgaaactatcaagattgtcctcatccttagaggtaagggtggtgaagagatgccaacgtggatcacggatgtggccgaggtcagaaatggagaagtatggattggcaaacgggatgaatatgagcagaagcatgcagaagagcaggtccggaatcaggcgaaggtcgagcaggtggctgagaagagtgatgaagttcctggagaacccgtcatcaaacttgatggagtgtctgtatcatatggagagggcaccagacaagttctcaaggatatcaaatggaccgtcaagcccggagagaaatggcatctcattggggccaacggctccggtaagacgacactcctctcgctcattttaggacaccatccacgctcatactccttgcctgcttcatccctccttctcttctccaagcctcgtcgctccatccctagccctactcttcggactttgattggacacacctctccggaaatcttcgcctctttcccaagagggatggggctgagtgctttggaggctgtcggcagtggttttgaaggcattttctctaggagaaatcttacctcggagcaaaaggaacgagttaaatatcttttgggacaatttaaagaccttttgaaaccgtcttctctttctgggaagcccgcaccggatgtgactgtccaagaaattgccaaccgaaactttgctcacttcactccccctcagcaaggtctccttcttttcctccgtgccattgtacggaaaccaaagcttcttatccttgacgaacctagtcagggcatggacgaagtaatctgggaacgatgtaagggcttattggagaaagagtgggaagatgagggtaagggtatggctgttatcgtggtgagccattatgaagacgaggttccatggaaaaagggtagaggaaaggtcctcaaactcgatcaaggagtcgctactgtacaataa

SEQ ID NO: 27357 - protein, 543 aa, Cryptococcus neoformans var. neoformans JEC21
MPPSSLPLVRLPPKAVVHRFGAPTSAPPSSALLRFPVQGWTINRESAKPEGWAIVGDADGRKVAVETLLSRHRIQPFSPPPGPFPYITSLISSSTDSWSSTTEAPSKPIRHLAFARPPTTGEFTDFTARYGALLEEDRLSYRENLQNLHPRPSDEDIERVAKLMRIGHLLDLPTVSFSSGQTRRGRIASALLTRPVLLLLEDPMAGLDVPSRKEVSNLLGELNASETIKIVLILRGKGGEEMPTWITDVAEVRNGEVWIGKRDEYEQKHAEEQVRNQAKVEQVAEKSDEVPGEPVIKLDGVSVSYGEGTRQVLKDIKWTVKPGEKWHLIGANGSGKTTLLSLILGHHPRSYSLPASSLLLFSKPRRSIPSPTLRTLIGHTSPEIFASFPRGMGLSALEAVGSGFEGIFSRRNLTSEQKERVKYLLGQFKDLLKPSSLSGKPAPDVTVQEIANRNFAHFTPPQQGLLLFLRAIVRKPKLLILDEPSQGMDEVIWERCKGLLEKEWEDEGKGMAVIVVSHYEDEVPWKKGRGKVLKLDQGVATVQ

SEQ ID NO: 27358 - DNA, 1638 bp, Candida albicans SC5314
  CDS (1)..(1638): transl_table=12
atgagtaagacctcaactttaaaaaaatgtttggtgtcttttcaaaatgccaaatttaaaaaggatactttactgaaaactccttacatttaccccaatccaatatcaaatataaacatttatccagctaatgtccaaaatggctcgtcaatgtgggccgttactggtaactctaaaaccacaatgttaaaaattatagctggtgaatatattctgtacccaccattatcaaggcaatatccattaattaacgatcgaccaacacaattacagtttctcaattttagagatggatctgggttggataaagtgcatatgtcggcgagatacgaaacgtattcgtataaaggtgtattggaaatgctggatgatgtgaactcagtgtataattatgtcacagggttgaacaattataacactcagcacacatcaatatcccaggaatttgtcaatgaattgttggattatttcaagttacaacacttgaaacacaaatggattaacagtttgagtaatggacaattaagacgtgcaagaattgccaaatcgttgattaataaacccaagttgttaatcattgatgatccgtttttaggcttagatcccattaacactcaaggagttagtgaagcattgaagacagtgagtgaagaattggatacaagtattgttttaggattacgagtacaggacgatatacctgattggatcaatagtttatgttatgttgatgaatcaggggttaaattatctgggaataaactggaaattttaaatgagtataacgaattagtgagtcaaattacgacaacccataaatcacacgttagtcgtcacaataaacaacaacaacaacaacaatcaaaaccaattgaaatttcaaaaaataatcatttcacagagaatgacatccatattgagtttcaaaatgcttcagttgcctataaacaattagttatatttgatgattttaattggaaaataccaagggggagtaaatggagaattttaggagacaatggtactggaaaaacaacattattatctattattactgctgatcatcctcaatcatggaaatcggtgattaaagtgaatggtatattaaggaaaactggatcaggagttacatttttcgatatcaataacaaaataggtatttcatcccctgaattgcatgcattggttcctcaacacaataaaactatgaaagatattatttataatggattagttaaaaatgtgggtaattccaatttttatttcaaaggtgatcctaataatatcactgcaagaggacaaaagtatctacaatattttgcggacagaattgataaatacggagataccatatttaacgaattgagtttaacggatcagaaattagcattgtttttaagagcaattattaaagaaccagaattgttgattttggatgaagcattttcttgtatggacgatgaaaatgtaatgatcaaatgtcatgaattgatagaaaaagaattaaacgatactacagtgatatctattggtcatttagaatgggaattgtgcaaatacgattatatgatccaattgattaacgataataatggtagagattacaaaacattcaaaatcaattgggagatggcttag

SEQ ID NO: 27359 - protein, 545 aa, Candida albicans SC5314
MSKTSTLKKCLVSFQNAKFKKDTLSKTPYIYPNPISNINIYPANVQNGSSMWAVTGNSKTTMLKIIAGEYISYPPLSRQYPLINDRPTQLQFLNFRDGSGLDKVHMSARYETYSYKGVLEMSDDVNSVYNYVTGLNNYNTQHTSISQEFVNELLDYFKLQHLKHKWINSLSNGQLRRARIAKSLINKPKLLIIDDPFLGLDPINTQGVSEALKTVSEELDTSIVLGLRVQDDIPDWINSLCYVDESGVKLSGNKSEILNEYNELVSQITTTHKSHVSRHNKQQQQQQSKPIEISKNNHFTENDIHIEFQNASVAYKQLVIFDDFNWKIPRGSKWRILGDNGTGKTTLLSIITADHPQSWKSVIKVNGILRKTGSGVTFFDINNKIGISSPELHALVPQHNKTMKDIIYNGLVKNVGNSNFYFKGDPNNITARGQKYLQYFADRIDKYGDTIFNELSLTDQKLALFLRAIIKEPELLILDEAFSCMDDENVMIKCHELIEKELNDTTVISIGHLEWELCKYDYMIQLINDNNGRDYKTFKINWEMA

SEQ ID NO: 27360 - DNA, 1899 bp, Desulfovibrio vulgaris subsp. vulgaris str. Hildenborough
  CDS (1)..(1899): transl_table=11
atgaaacaactgaccgttcctctggtcgtggcccatcggcttcgcgtcactctcggtggacgcacggccctcgatggcgtcgacctcgtggtgcacgaaggcgcacaccttgccgtgctggggcccaacggggcgggcaagtccacgttgctacgcgccctgcgcggccagatgcagccggacatgcgccacggcggccgcctgctgtggcgcgccgtatccgcccctgacgggggtgtgcccgtatccggccagaggcgacacgcagggcagacggaccagacagggaaggcagggcacggcggggcacatcccacgcccggactctcgtcgcagaccgacgctggcacgtccgcctgggcggattccatccatggcgtgtcgtggcaggacaccatccccgcctccggtcacgtccacggcatggatgacgcgccactcacgggccgcgccctcgccgccctcgtgtctgcggcccagcaggaacagcatgtcaggcgagggtggaacatcacaggcgaagaactcgtactcggtggcctcttcgacacgcccatgccctacgaggaaccgacgccggaacaacacgcacgtctcgcgcccctcatggcacgcctcgacgcccacgacctcatgcacaccgccgtcccctcgctttcgcaggggcagctgcggctgttgctggtcgcccgcgccctgatacgtgccccccgcctgctgcttctcgacgaagtctgcgacgggctggacgccatggcacgtgcacgggtgctctacgccctgacgcaggccgcggatatgggcacgacactggtcgtggccgcccaccgtgccgtcgacctgccagaatgcgtcgtcgacggcatacggcttcacgccggacgcatcgtggcgcgtggtcctgcgacgtcgctgcttgcatcggaagagacccacgcaacgccccctccgggcatcgacgctggaaccccgcctcaccccgacaccgacaccgaagaatgctccgggcaatccgcagagacatcaccacgtaaggtcggcactccggatacggcacaccctgccccccccgaccgtcatgcaggtacacggcccggtgcgcggcaaggcggcgggcatgacgaccggtcagacgtccttccagatgaagagcacgacggcggacaggacgacatcctcgtgctggtgtcgaacgccaccgtcttcgtggaacgaacccccgtgctgcacaacgtggactggaccatccgccggggcgagcagtggctggtggccgggcccaacggggcgggcaagtcgacgctcctgcgcctgctggcgggcgaggagttcgctgcagcgggtggcgatgtccgcctcatgccccggacgtgcggcgaggcggcccgtggactcatggccttgcgccgtcatgtttccatcgtatccgacaggttgcaggccacctacgcctacgatgtcagcgtggaggattgtgtcctctcaggtgtcgaaggcaccatcggcctctacgaacagccttctcccgaagaacacgacagggccatgtactggatggacatcctcggcatcacgcatctggctggcagacacatccgcagcctttcgacagggcaggctcgccgtgtgttccttgcgcgtgccctgactgggtctccggtgctgcttctgctcgatgaaccgtgttccggccttgacgacgcaaaccgccacgccctgctgcaaacccttggcacacttacccgccacggggtgcacctcgtactggtaacacatcatgaggccgacatcatcccggagacgacacaccggctgcaactcgaagcggggcgcgtcgtgcacgccgggccatggaacccgctcaacggcggaggcatcgccgggggtgaaagagcatga

SEQ ID NO: 27361 - protein, 632 aa, Desulfovibrio vulgaris subsp. vulgaris str. Hildenborough
MKQLTVPLVVAHRLRVTLGGRTALDGVDLVVHEGAHLAVLGPNGAGKSTLLRALRGQMQPDMRHGGRLLWRAVSAPDGGVPVSGQRRHAGQTDQTGKAGHGGAHPTPGLSSQTDAGTSAWADSIHGVSWQDTIPASGHVHGMDDAPLTGRALAALVSAAQQEQHVRRGWNITGEELVLGGLFDTPMPYEEPTPEQHARLAPLMARLDAHDLMHTAVPSLSQGQLRLLLVARALIRAPRLLLLDEVCDGLDAMARARVLYALTQAADMGTTLVVAAHRAVDLPECVVDGIRLHAGRIVARGPATSLLASEETHATPPPGIDAGTPPHPDTDTEECSGQSAETSPRKVGTPDTAHPAPPDRHAGTRPGARQGGGHDDRSDVLPDEEHDGGQDDILVLVSNATVFVERTPVLHNVDWTIRRGEQWLVAGPNGAGKSTLLRLLAGEEFAAAGGDVRLMPRTCGEAARGLMALRRHVSIVSDRLQATYAYDVSVEDCVLSGVEGTIGLYEQPSPEEHDRAMYWMDILGITHLAGRHIRSLSTGQARRVFLARALTGSPVLLLLDEPCSGLDDANRHALLQTLGTLTRHGVHLVLVTHHEADIIPETTHRLQLEAGRVVHAGPWNPLNGGGIAGGERA

SEQ ID NO: 27362 - DNA, 1527 bp, Bacillus anthracis str. Sterne
  CDS (1)..(1527): transl_table=11
atggaatacgtaattgagatgaacaatattacaaaagtattcccaggcattgtagcgaatgacgatattacgctgcaagtaaaacagggagagatacatgctttacttggagaaaatggtgcagggaaatcaacgctgatgaatgtgttgttcggtttgtatcaaccagaacagggagagattaaaattaaaggaaatcctgttaaaattacaaatccgaatatagcaaatgaccttggtattgggatggtccatcagcattttatgcttgttcataattttacagttacagagaatattattctgggaaatgaaccgaagaaaaacgggaaaattgctgttgaagaggctgcaaaagaaattaagcaattatctgaacagtacggtttagctgttgatccacatgcgaaaattgaagatatttctgttgggatgcagcaaagggttgaaatattaaagactctttatcgtggtgcggagattttaatatttgatgaaccaactgcggtgttaactcctcaagaaattcatgagttgattcaaattatgaaaaagcttgtgcaagaggggaaatctatcattcttattacacataagttaaaagaaattatggaagtttgcgatcgttgtacaattattcgtaaaggtaaggggattggtactgttaatgtagcggaaactgatgagcataaacttgcagagttaatggtcggacgtcaagtgaattttaaaacagaaaaaatagaagctaaaccaaaggaagaagtactatctattgcaaacctaattgttcatgatacgcgcaagttacctgctgtaaaaggccttgacttaactgttcgtgcaggagaaatcgttgggattgcagggattgatggaaatggtcaaagtgaattaatagaggcgattactggtttacgaaaagttgagtcaggttctattgcaattaaaggaaaagaaataacaaattggcctgttcgaagaataacagggattggtcatattcctgaagaccgtcataaacacggacttgttctcgatttttctgttcgggacaatattgttttacaaacatactataaaaatccattttcaaagaaagggattttaaattttagtaaaatcacacaaaaagcaaaagcgcttattgaacagtttgatgtacgtacacctagtgaacaaacgttagctcgcgctctatctggtggaaaccaacaaaaggcaattattgcacgtgaagtagatcgtaatccagatttattaattgcagcgcagccaacccgtggtttagatgtaggtgccattgaatttattcataaaaaattgattgagcagagagataatggtaaggcagtattgcttttatctttagagctagatgaaattttaaatgtaagtgatcgagttgctgttatatatgaagggaaaattgtagcaattgtggatgcaaaagagacaaacgaacaacagcttggattattaatggccggcgggacagggaaagagaaggtgaacacaaatggctaa

SEQ ID NO: 27363 - protein, 508 aa, Bacillus anthracis str. Sterne
MEYVIEMNNITKVFPGIVANDDITLQVKQGEIHALLGENGAGKSTLMNVLFGLYQPEQGEIKIKGNPVKITNPNIANDLGIGMVHQHFMLVHNFTVTENIILGNEPKKNGKIAVEEAAKEIKQLSEQYGLAVDPHAKIEDISVGMQQRVEILKTLYRGAEILIFDEPTAVLTPQEIHELIQIMKKLVQEGKSIILITHKLKEIMEVCDRCTIIRKGKGIGTVNVAETDEHKLAELMVGRQVNFKTEKIEAKPKEEVLSIANLIVHDTRKLPAVKGLDLTVRAGEIVGIAGIDGNGQSELIEAITGLRKVESGSIAIKGKEITNWPVRRITGIGHIPEDRHKHGLVLDFSVRDNIVLQTYYKNPFSKKGILNFSKITQKAKALIEQFDVRTPSEQTLARALSGGNQQKAIIAREVDRNPDLLIAAQPTRGLDVGAIEFIHKKLIEQRDNGKAVLLLSLELDEILNVSDRVAVIYEGKIVAIVDAKETNEQQLGLLMAGGTGKEKVNTNG

SEQ ID NO: 27364 - DNA, 1593 bp, Staphylococcus aureus subsp. aureus MRSA252
  CDS (1)..(1593): transl_table=11
atgtcaaatttattagaagtcaacagtctgaatgtacaattcaattatgatgaaactacagttcaagcggtaaaaaacgtctctttcgaattacgaaaaaaacatatcctaggtattgttggtgaatcaggatcaggaaaaagtattaccgctaaatctattttagggctactaccagattatccggatcacacgttaacaggagaaattatttttaatgggcaatcgttaactaatttatcaacttcagcgttacaacaaattcgaggcaaggatatttcaatgatttttcaagatccactctcttcgttgaatccaagattaacgattggcaaacaaattacagaagtactatttcaacataaacgtgtatctaaatctgaagcaaagtcgatgacaatagacattttagaaaaagtaggtataaaacatgcaactcgacaatttgatgcttatccgcatgaactttctggtggtatgcgtcaacgtgtcatgatagcaatggcattgattttaaagccacaaattttaatcgcagatgaaccaacaacggcattagatgccagtacacaaaatcaattactgcagttaatgaagtccctttatgagtacacagaaacgtctattatttttatcactcacgatttaggtgctgtgtatcaattttgcgacgatgtgattgtaatgaaagatggaagtgtcgttgaaagtggcacggttgaaagtatttttaaatcgccacaacatacctatacgaaacgcttaatagatgcgattcctgatattcatcaaacgcgtccgccaagaccgttaaacaatgatattttattaaaattcgatcgcgtgagcgtggattacacatcaccgagtggcagcctataccgagcagttaatgatattaacttggctattagaaaaggcgaaacgttaggcattgtcggtgaatcagggtcagggaaatcgacattagctaagacggtcgtcggtctaaaggaagtgtcagaaggctttatttggtataacgaattaccattaagtttatttaaagatgatgaattgaaatctttacgacaagagatacaaatgattttccaagatccattcgcatctattaatccaagatttaaagtcattgatgtgattaaacgaccactaatcattcatgggaaagtcaaagataatgacgacattattaaaactatcgtatcgttgttagaaaaagttggcctagatcaaagtttcttatatcgctatccacacgaattatctggtgggcaacgccagcgtgtaagtatcgcaagagcacttgctgtagaacctaaagtgattgtttgcgacgaggcagtatcagctttagacgtttcaattcaaaaagatatcatcgagttattaaaacaattacagttagacttcggcatcacttatttattcatcacacatgacatgggtgttatcaatgaaatatgtgatcgagttgcagttatgaaaaatggcgaaatcgttgaacttaataacacagaagatattatcaaacatccgcaatcagactatgcaaagcaacttatttcagaagtagcagttattgctaaataa

SEQ ID NO: 27365 - protein, 530 aa, Staphylococcus aureus subsp. aureus MRSA252
MSNLLEVNSLNVQFNYDETTVQAVKNVSFELRKKHILGIVGESGSGKSITAKSILGLLPDYPDHTLTGEIIFNGQSLTNLSTSALQQIRGKDISMIFQDPLSSLNPRLTIGKQITEVLFQHKRVSKSEAKSMTIDILEKVGIKHATRQFDAYPHELSGGMRQRVMIAMALILKPQILIADEPTTALDASTQNQLLQLMKSLYEYTETSIIFITHDLGAVYQFCDDVIVMKDGSVVESGTVESIFKSPQHTYTKRLIDAIPDIHQTRPPRPLNNDILLKFDRVSVDYTSPSGSLYRAVNDINLAIRKGETLGIVGESGSGKSTLAKTVVGLKEVSEGFIWYNELPLSLFKDDELKSLRQEIQMIFQDPFASINPRFKVIDVIKRPLIIHGKVKDNDDIIKTIVSLLEKVGLDQSFLYRYPHELSGGQRQRVSIARALAVEPKVIVCDEAVSALDVSIQKDIIELLKQLQLDFGITYLFITHDMGVINEICDRVAVMKNGEIVELNNTEDIIKHPQSDYAKQLISEVAVIAK

SEQ ID NO: 27366 - DNA, 1476 bp, Erwinia carotovora subsp. atroseptica SCRI1043
  CDS (1)..(1476)
atgtcattgttgaaaatcacgcaaggattgtttcgtctcagcgatacccgcatgttgcgtttggacgaactgacgcttgaacaaaaccagtgctgggcctttgtcggggccaacggaagtggtaaatcggcactggcgcgggcgctatctggcgaactgccattattgagtggtgaacgaacaacggggtttcagcatcctgttcgcctgtcgtttgaacaattgcaaaagctggtttccgacgaatggcaacgcaataacaccgatctcctgagtgaaggtgaagatgacaccggccgcactacggcagaagtgattcaggatagcctcaacgatcccacacgttgccaacagttggcatgccagtttggtattgcgcatttgctagagcgtcgcttcaagtacctctcgacgggggaaacacgcaaggcaatgctttgtcaggcactgatgcctcagcccgatctgctgatccttgatgagccttttgatgggctggacgtcacctcccgccagcagcttgccgatgagctacggaagctggtagacacgggctatacgctggtactcattctgaaccggtttgacgacatccctgattttatcaaccatattggtgtgctggcagactgtacgctgacccgcattggtgagcgtgaagctattctctctgaagcgctggtggcacagctcgcttttagcgaaaaactgtcgggaagttcgctgccagaacccgaagatccacaacggcatgtgacacttcccgccgatgaagcacatattctgctacgcaacggcgtggtgcagtacaacgatcgccccattctgcatgagctgacatgggaagtgtttcccggccagcattggcagattatcgggccaaatggcgcagggaaatcgacgctgctcagcctgattaccggcgatcacccgcaaggctatagcaatgatctcaccctatttggccgtaagcgcggcagcggtgaaaccatctgggatatcaagcgccacatcggctacgttagcagcagcttgcatttggattaccgcgtcagcaccagcgtacgcaacgtcatcctgtctggtttttttgactctatcggtatttatcaggccgtctccgatcgtcaacgtcacctgaccgaacagtggctaatcctgcttgggctcagtggcgcgatcgccgatacgccgtttcaatcgctctcctggggccagcagcgtctgacgctgattgcccgcgcgttagtcaaacacccagcgctgctcatccttgacgaacctctacaggggcttgatccgctcaatcgccaactggttcgccgctggctggatatcttgattggcgagggagaaacgcagctactctttgtctctcaccacgcagaagacgcgcccgagtgcatcacacaccggctcactttcgtcccacacaatgacatctatcgctaccagattgatgaattatgtaaataa

SEQ ID NO: 27367 - protein, 491 aa, Erwinia carotovora subsp. atroseptica SCRI1043
MSLLKITQGLFRLSDTRMLRLDELTLEQNQCWAFVGANGSGKSALARALSGELPLLSGERTTGFQHPVRLSFEQLQKLVSDEWQRNNTDLLSEGEDDTGRTTAEVIQDSLNDPTRCQQLACQFGIAHLLERRFKYLSTGETRKAMLCQALMPQPDLLILDEPFDGLDVTSRQQLADELRKLVDTGYTLVLILNRFDDIPDFINHIGVLADCTLTRIGEREAILSEALVAQLAFSEKLSGSSLPEPEDPQRHVTLPADEAHILLRNGVVQYNDRPILHELTWEVFPGQHWQIIGPNGAGKSTLLSLITGDHPQGYSNDLTLFGRKRGSGETIWDIKRHIGYVSSSLHLDYRVSTSVRNVILSGFFDSIGIYQAVSDRQRHLTEQWLILLGLSGAIADTPFQSLSWGQQRLTLIARALVKHPALLILDEPLQGLDPLNRQLVRRWLDILIGEGETQLLFVSHHAEDAPECITHRLTFVPHNDIYRYQIDELCK

SEQ ID NO: 27368 - DNA, 1617 bp, Erwinia carotovora subsp. atroseptica SCRI1043
  CDS (1)..(1617)
atgtccagttcacctttattgcagatagatgatctcagcattgccttccgcaaaggcgatcaggagcagcgtgttgtcgaccagctttcactggcggtgaatgcgggtgagacgctggcgctggtcggcgagtcaggttcggggaaaagcgtcactgcactgtcggttttacgcttgctcccttccccacccgtggtttatccgcagggagatatccgctttgcggggcaatcgctgctacatgccgatgaaaaaacactgcgtcagatacgcggtaaccgaattgcgatgatctttcaggaaccgatggtgtcgcttaaccccctgcaaagcattgagaaacagctaattgaagtgctttcgctccattgtggcatgcgcaccgaggcggcccgtagcgaagtcatctcctgtctggatcgcgtgggtattcggcaggctaaaagccgattgaatgatttcccacaccagctttccggcggggaacgccagcgcgtcatgattgcaatggcgctgctgactcagcccgatttactcattgctgatgagccgacaacagcactggacgttaccgttcaggcgcaaatactgaaattgctgaacgagctgaagcgggaaatggggatgagcttactgttcatcacccacgatctgaatatcgtccgtcaattggcggataacgtgtcggttatgaaatcgggtaaagccgtggagcacaacagctgtcagcagcttttcagcgctccgcagcatccttacacacgccaattactggacgcagagccatcaggcgagccgcttccggtagaggatgacggtggccccctcctgcgggtggagcatttgcacgtttcattccctatcaaacgcggccttttgcgccgtaccgttgacgaaaagcaggtcgttaataatattagtttcaccttacggcgcggtgaaagcctgggtttggtaggggaatcgggttcagggaaaagcactaccggattagcgctacttcgcctgattcaatcacgcggtgatatctggtttgatggtcaacccttgcaagggctaacccgtaagcaaatgctgcccttccgtcaccggattcaggtcgtttttcaggacccgaactccgcgctgaacccacggctgaatgtggagcaaatcattgctgagggattgatcgttcatcacaaattgagtaaagaggcgcaagaacaacgcgtggtggcggtgatgcaggaagtcgggctggatcccaccactcgttaccgttatccctccgagttttccggcggtcagcgccagcgtatcgctatcgctcgggcactaatactgcaaccggaactgctgattctcgatgaacctacgtcgtcgctggacagaacggttcaggcgcaaattctggccctgctgaagtcattacaggaaaagcacaaaatcgcctacctgttcatcagccatgatttacaagttatccgctcactgtgtcatcaggttatcgtgttacgacagggtgaagtcgtcgaacagggggagtgtaaacaggtattcacgcatcctgccgagcattacacgcgggagctgctacagttttcatctggcatgacggaaacgcaatcggcataa

SEQ ID NO: 27369 - protein, 538 aa, Erwinia carotovora subsp. atroseptica SCRI1043
MSSSPLLQIDDLSIAFRKGDQEQRVVDQLSLAVNAGETLALVGESGSGKSVTALSVLRLLPSPPVVYPQGDIRFAGQSLLHADEKTLRQIRGNRIAMIFQEPMVSLNPLQSIEKQLIEVLSLHCGMRTEAARSEVISCLDRVGIRQAKSRLNDFPHQLSGGERQRVMIAMALLTQPDLLIADEPTTALDVTVQAQILKLLNELKREMGMSLLFITHDLNIVRQLADNVSVMKSGKAVEHNSCQQLFSAPQHPYTRQLLDAEPSGEPLPVEDDGGPLLRVEHLHVSFPIKRGLLRRTVDEKQVVNNISFTLRRGESLGLVGESGSGKSTTGLALLRLIQSRGDIWFDGQPLQGLTRKQMLPFRHRIQVVFQDPNSALNPRLNVEQIIAEGLIVHHKLSKEAQEQRVVAVMQEVGLDPTTRYRYPSEFSGGQRQRIAIARALILQPELLILDEPTSSLDRTVQAQILALLKSLQEKHKIAYLFISHDLQVIRSLCHQVIVLRQGEVVEQGECKQVFTHPAEHYTRELLQFSSGMTETQSA

SEQ ID NO: 27370 - DNA, 1380 bp, Desulfotalea psychrophila LSv54
  CDS (1)..(1380): transl_table=11
atggactttattaacttttctcactcaggcctgaaaatcaaagaactcaccattactccgggggatacctggtgcttttatggaggaaatctctcgggcagtgaagcgttcctccaactacttactggcaacctcggtcacgaaggaaaaaaacacccagccgtcctgcctcaggcgagcgtggtctcctttgataaactccaagaggtttttgaagcggaactggccaaggatgattcagatttccttgactaccttgatcccggtacagttgccggagacttcctgccccatggtagcctctaccacccccttgtcagcatcctgggaatgaaggaaaagctggaaaccggttttaagcagctcagctcaggtcaggcaagaaaactgcttctcctggaggccatccttggtgggaaaaaacatattattctgcacaccccctacgacggtttagacagcaaaagttgcctagagctcaaccttgccctccaggccctacccgaaaacctgaccctgctcctctttgttcataacatagatgacatacctgactggtgcagccacattggctggtttaaggacaatgccctctaccgccagggagactacaaagagattatcggcgatattcgaagtgaagagctggagatacgagagataaacctgcccagccagagccgtccctcctccgaagagctactctatcttcgggcaggatttggcagctaccagggaaaaaatgtctttaccggccttaatctacacatccactccggcgaccacctccttattaccggggccaacggctgcggcaagtcgaccctcctccagatcatcaccggagaccatcccgactgctacgtcaacgacctccgtctctttgcccataaacgaggcagcggcgagtctatctgggatatcaaaaaacagatgggtattgtctcccctgatctacatcgaaaccacagatgcccgggttctgccctgcatattgttatcagcggtctctatgacaccataggtctttatgtacgtcccagtcagcaggagattaaagagggattaaaatggattgcctggttgggcctagaggagaaagcggaaaagccatttcgcagcctgagctttgccgagcaacgactgatcctcatcgcccgaggtctaataaagattcctcgcctcctcatcctcgacgaggcaagtcagggactggacgaaagctaccgggaacagtttatgaccgttatagaaaaaattgcccgggaacagctctccaccatcctctttgtcagccaccgggaagatgaacatcgcgattttttcaaataccacataaaactgggtcagtatagcccgctaaacagagaggagaagtaa

SEQ ID NO: 27371 - protein, 459 aa, Desulfotalea psychrophila LSv54
MDFINFSHSGLKIKELTITPGDTWCFYGGNLSGSEAFLQLLTGNLGHEGKKHPAVLPQASVVSFDKLQEVFEAELAKDDSDFLDYLDPGTVAGDFLPHGSLYHPLVSILGMKEKLETGFKQLSSGQARKLLLLEAILGGKKHIILHTPYDGLDSKSCLELNLALQALPENLTLLLFVHNIDDIPDWCSHIGWFKDNALYRQGDYKEIIGDIRSEELEIREINLPSQSRPSSEELLYLRAGFGSYQGKNVFTGLNLHIHSGDHLLITGANGCGKSTLLQIITGDHPDCYVNDLRLFAHKRGSGESIWDIKKQMGIVSPDLHRNHRCPGSALHIVISGLYDTIGLYVRPSQQEIKEGLKWIAWLGLEEKAEKPFRSLSFAEQRLILIARGLIKIPRLLILDEASQGLDESYREQFMTVIEKIAREQLSTILFVSHREDEHRDFFKYHIKLGQYSPLNREEK

SEQ ID NO: 27372 - DNA, 1491 bp, Yersinia pseudotuberculosis IP 32953
  CDS (1)..(1491): transl_table=11
atgtctgagttgcaaatatcgcaaggttgttttcgcctgagtgacacacagacactcatcttgccagcgctacatatccaggcgggtgactgttgggcatttgtcggggccaatggcagtggtaaatctgcgttagccaaggccctgtctggagaactggccctgctggagggcagccgccaaagccacttccgccatggtgtgcgtttatcattcgaacaactacagcaactggtcaatgaagagtggcaacgtaataataccgacctgctcagtgctgatgaagatgacactggccgtactaccgccgaaattattcaggaagcggcccgtgacccgcagcgctgtcaacaactggcagcgctatttggaatcagccacttgctttctcgccgcttcaaatacctttctacgggggaaacccgtaaaacattgctgtgtcaggcgctgatgccgcaaccggacctgctgattctggatgagccctttgatggcctggatgtcgcggctcgggcgcagttagccgagatgctatccacactttcggcccaaggcgtcaccctggtattggtcctcaaccgctttgatgatatccctgattttgtgcagtacgttggcgtattggctgattgccacctgacccacatggggccgcgccagcagattctgtcggaagcgttaattgcccaattggcacacagtgaaaatctggatgggctgtcactgccggaaacggaggatccacagcaccacctacgaataccgaaaaatgaacccttgatcatactgaatgacggggtggtggagtacaacgaccgccctatcctgcataacctgagctggcaagtgaaccccggtgaacactggcagattatcggccagaatggtgcggggaaatccaccttactcagcctgataactggcgaccatccccaaggatacagtaatgatttaacgctgtttggccgccgccgtggcagtggtgaaaccatctgggacatcaaacgccatattggttatgtcagcggcagcctccatctggactaccgggttagcacccgtgtacgtaccgtgattttatccggttttttcgattcgattggtctttaccaagcagcctctgatcgtcaacaacaattagcagatcaatggctgtctttactggggttttccacctccgtcgccaaccaacctttccacagcttatcttgggggcaacagcgtctggtcttgatcgcccgagcattggttaagcacccagcgctcctgatcctggatgaaccattacaagggctggatccgcttaaccgtttgttagtgcgccgttttattgatgtgatgatcggtgaaggagaaacccaattattgttcgtttctcaccatgccgaggatgcaccccagtgtattacgcaccgcttaacctttgtgccatttggcgatatttatcactatcaacaagaaaaattaccaagccaaccacaggtaaaataa

SEQ ID NO: 27373 - protein, 496 aa, Yersinia pseudotuberculosis IP 32953
MSELQISQGCFRLSDTQTLILPALHIQAGDCWAFVGANGSGKSALAKALSGELALLEGSRQSHFRHGVRLSFEQLQQLVNEEWQRNNTDLLSADEDDTGRTTAEIIQEAARDPQRCQQLAALFGISHLLSRRFKYLSTGETRKTLLCQALMPQPDLLILDEPFDGLDVAARAQLAEMLSTLSAQGVTLVLVLNRFDDIPDFVQYVGVLADCHLTHMGPRQQILSEALIAQLAHSENLDGLSLPETEDPQHHLRIPKNEPLIILNDGVVEYNDRPILHNLSWQVNPGEHWQIIGQNGAGKSTLLSLITGDHPQGYSNDLTLFGRRRGSGETIWDIKRHIGYVSGSLHLDYRVSTRVRTVILSGFFDSIGLYQAASDRQQQLADQWLSLLGFSTSVANQPFHSLSWGQQRLVLIARALVKHPALLILDEPLQGLDPLNRLLVRRFIDVMIGEGETQLLFVSHHAEDAPQCITHRLTFVPFGDIYHYQQEKLPSQPQVK

SEQ ID NO: 27374 - DNA, 1743 bp, Yersinia pseudotuberculosis IP 32953
  CDS (1)..(1743): transl_table=11
atgaatggaattcaacatatcattactctggaggcggttgaaaaacggttcagcggactggatcaccctgcggttgccagcctgactacggagatccgcagcggagccgtgacgggattagtcgggccggacggtgccggtaaaaccacgttattacgtatgctggccgggttgctaaaacccactcagggtaagataaccgtggtcgggctagatccgttgaaagatgatcgccagctacatgccattctcggttatatgccgcagaaatttggcctgtatgaagatttaacggtcatggaaaacctgtcgctgtatgccgatttacgtggcgtgaccggtgaacttcggcgtcagacatttgagcgcctgctgacatttaccgatttaacccgcttcacatcacgtctggcgggtaagttgtcgggtggcatgaagcaaaagttggggttagcctgtaccttggtcggccaacccaaagtgctcctcttggatgagccgggggttggtgtcgatcccatctctcgccgtgaactgtggcgcatggtgcatgagctggcagacgacggcatgctcattttgtggagtacctcttatctggatgaagcagaacaatgtcgtgaagtgttgctgcttaatgaaggcaaattcctgtacagcggcgcaccacaaaccctgacgcagcgcatgagcgggcggactattttggtggccgcccaacgtggcaccaatcgccagttgctacaacatgccctgaccctgccccaagtcagtgacggggtgatccaaggtaaatatgtccggctgatccttaagccagatgtcgatcacagccagttattacaatggctaaatcaacccgatgcagaaatgaaggaggcggaaccccgttttgaagacgcctttattgacctgttaggtggtggcccggacagcgagtccgcactggcaaaaattatgcccagagtggctggcaaccctggtgaaaccgttattgaagcacaagcgctaaccaagaaatttggcgattttgccgcgactgaccatgtgaattttcaggttaaacgcggtgaaatatttggcctgctcgggccaaatggggccggtaaatccacgacgtttaaaatgatgtgtggcttattggtacccagtgatggaaaagccttggtactgggtatggatctgaaaaccagctcgggtaaagctcgccaacatctgggctatatggcacaaaaattttcgctgtacggcaacctgaccgttgaacaaaatctgaaatttttctccggggtttatggtctgaaaggcaaaacccagcgcgacaaaattgccgatatgatttcggcatttaacttcaccccgatcctgaaacaaacaccagactccctgccattagggtttaagcagcggcttgcactggcctgcgccttgatgcatgagccagatatcctgtttcttgatgagccaacctccggtgtcgatccgctcactcgccgtgaattctggttacacatcaatggaatggtagacaaaggcgtcaccgtcatggtgaccacccactttatggatgaagcggaatattgtgaccgtattgggctggtttatcgcggcaagattatcgccgccggtacgcccgatgaactgaaacaacaggttgccagtgatgatgaccccaatccgtcaatggaaacggcgtttatcgaattggttctgcgttatgaccaacagcatgataaggagtaa

SEQ ID NO: 27375 - protein, 580 aa, Yersinia pseudotuberculosis IP 32953
MNGIQHIITLEAVEKRFSGLDHPAVASLTTEIRSGAVTGLVGPDGAGKTTLLRMLAGLLKPTQGKITVVGLDPLKDDRQLHAILGYMPQKFGLYEDLTVMENLSLYADLRGVTGELRRQTFERLLTFTDLTRFTSRLAGKLSGGMKQKLGLACTLVGQPKVLLLDEPGVGVDPISRRELWRMVHELADDGMLILWSTSYLDEAEQCREVLLLNEGKFLYSGAPQTLTQRMSGRTILVAAQRGTNRQLLQHALTLPQVSDGVIQGKYVRLILKPDVDHSQLLQWLNQPDAEMKEAEPRFEDAFIDLLGGGPDSESALAKIMPRVAGNPGETVIEAQALTKKFGDFAATDHVNFQVKRGEIFGLLGPNGAGKSTTFKMMCGLLVPSDGKALVLGMDLKTSSGKARQHLGYMAQKFSLYGNLTVEQNLKFFSGVYGLKGKTQRDKIADMISAFNFTPILKQTPDSLPLGFKQRLALACALMHEPDILFLDEPTSGVDPLTRREFWLHINGMVDKGVTVMVTTHFMDEAEYCDRIGLVYRGKIIAAGTPDELKQQVASDDDPNPSMETAFIELVLRYDQQHDKE

SEQ ID NO: 27376 - DNA, 1593 bp, Yersinia pseudotuberculosis IP 32953
  CDS (1)..(1593): transl_table=11
atggcgacctcaccactattggatatccaaaacctcagtgttgcgtttagtcaggcaggcgttcagcgtgaggttgtcagcgaactgtcattacaaatcaacgcaggagaaacactggcgctggtcggggaatcaggatcggggaaaagcgtcaccgcgttgtccgtgttacgtttgctaccatcaccgccagtagtgtatcccacaggtgatattctgtttgcgggcagctcattgctacatgctaatgagccaacactacggcgcattcgtggtaatcagatttcgatgatcttccaagaaccgatggtgtcactcaacccgctgcataatattgaaaaacagttggcagaagtgctctcactgcaccggggtatggggcaagaagcggcgcgggctgaaattatccaatgcctcgacagagttggcattcgtaatgccaaagggcgattagccgattttcctcatcaactttctggcggtgaacgccagcgagtgatgattgccatggcggtattaacccaacccaaattattgattgccgatgagccaaccaccgcactggatgtttctgttcaggcgcaaattctgagcttgctgaaagagttaaagcaagagatgaacatgagcctgctgtttatcacccataacctgaatatcgtgcgccgattagcggataacgtggcggtgatgcgggaaggccgtaaagtggagcagaacaaccggcaggcgctcttcagtgccccgcaacacccctacactcgccagttactggatgctgagtcacagggtgccccgttgccactcgcgcagaatacccagccactgcttgtggttaaagagttgcaagttgcattcccgatcaaacgtggtttactgcgccgtaccgttgatcaccactatgcgctaaaaagcctcagttttgacctgaagcccggcgaaagtctgggcttggtgggggagtccggttcgggtaaaagtacctccggtctggccttgttacgcttattgccatcacagggtgaaatctggtttagcgggcaaccgctgcaccaatttacccccaaacagatgctgccctatcgcagccgtattcaggtggtcttccaggacccttactcagcattgaacccacgtttgaatgtgcaacagatcattgcggagggcctggaagtacatcaaaaactcagtgcagcgcaacgtgaagagcgagtgattaaggcaatggaagaagtcggattggatccagccacccgctctcgttatccaactgaattctcgggggggcagcgtcagcgcattgcgattgcccgcgcgctgatcctgcaaccccaactgttgatccttgatgaaccaacgtcttcactggataaatcggtacaggcgcaaattttggccctactgaaatcccttcagcagcgttaccaactcagctacttgtttattagccatgacttgcaggtcgtgcgttcgctctgccatcaggtgattgtcttaagacaaggagaagtggtggaacaaggtgattgtcaggcaatatttgcggcaccaaaacaactatatactcagcaattattagaattagcagactaa

SEQ ID NO: 27377 - protein, 530 aa, Yersinia pseudotuberculosis IP 32953
MATSPLLDIQNLSVAFSQAGVQREVVSELSLQINAGETLALVGESGSGKSVTALSVLRLLPSPPVVYPTGDILFAGSSLLHANEPTLRRIRGNQISMIFQEPMVSLNPLHNIEKQLAEVLSLHRGMGQEAARAEIIQCLDRVGIRNAKGRLADFPHQLSGGERQRVMIAMAVLTQPKLLIADEPTTALDVSVQAQILSLLKELKQEMNMSLLFITHNLNIVRRLADNVAVMREGRKVEQNNRQALFSAPQHPYTRQLLDAESQGAPLPLAQNTQPLLVVKELQVAFPIKRGLLRRTVDHHYALKSLSFDLKPGESLGLVGESGSGKSTSGLALLRLLPSQGEIWFSGQPLHQFTPKQMLPYRSRIQVVFQDPYSALNPRLNVQQIIAEGLEVHQKLSAAQREERVIKAMEEVGLDPATRSRYPTEFSGGQRQRIAIARALILQPQLLILDEPTSSLDKSVQAQILALLKSLQQRYQLSYLFISHDLQVVRSLCHQVIVLRQGEVVEQGDCQAIFAAPKQLYTQQLLELAD

SEQ ID NO: 27378 - DNA, 1764 bp, Yersinia pseudotuberculosis IP 32953
  CDS (1)..(1764): transl_table=11
atgtctgcttgtcacacccgtcttcacctacttttctgccactctgctgagatttcgtgcaaaactggaggcgatactctcgccatcttgtggcataatgcgcgccgaatcacattttttattcttcttgaatatccctattcagtcatcaaatcgagagcgagctctgtgctaagtactaacaatatcaccatgcaattcggcagcaagccgctgtttgaaaacatttcagtcaaattcggtggcggtaaccgctatggcctgatcggcgctaatggttgtggtaaatccacattcatgaagattctggggggcgatctggtccctagcggcggtaacgtcttccttgacccgaatgagcgtctgggtaaacttcgtcaggatcaattcgcctttgaaaacaatacagtgctggataccgttattatgggacacggcgaactgtgggaagtaaaagaagagcgtgaccgcatttatgccatggctgaaatgagcgaagaagatggctataaagttgctgatctagaagttgcctacggtgaaatggatggctacagcgcagaagcccgtgctggtgagttgttgctaggcgtgggtattcccgttgaacagcattatggcttgatgagcgaaatcgcacccggttggaagttacgtgtattgctggcgcaagccctgttctccgatccagaaattctgttacttgatgagccaaccaacaacctggatatcgatactatccgttggttagagcaggtgctaaacgaacgtaacagcaccatgattattatttcccatgaccgtcacttccttaacatggtgtgtacgcatatggcggatctggattacggcgaactgcgcgtttatccaggtaactatgatgagtatatgaccgcagcgactcaagctcgcgagcgtttgttgtcagataatgcgaagaaaaaagcccaaatatctgaactgcaatctttcgttagccgctttagcgccaacgcctctaaatctaagcaggcaacttcacgtgctcgccagattgataaaattcagcttgatgaggtaaaagcctccagccgccagaacccgtttattcgcttcgatcaggatagaaaactgttccgtaatgcgctggaagttgagatgttgaccaaaggttttgataacggcccgttgtttaaaaatctgactctccgcctggaagtgggtgagaaagtggctatcctcgggccgaacggtattggtaagtctactttgctgaaaaccctgctaggggagtatgaatctgatgctgggaccgtaaaatggtctgaaaacagtaagattggttactacgcacaggatcacgccagtgattttgacatcgatctgacggtgtttgactggatgagccagtggaagcaagagaaagacgatgagcaggcggttcgcagtgtgctggggcgtttattgtttagccaggatgacatcaagaaaaaagttagcgtgctgtctggtggtgagaaagggcggatgttgtttggtaagttgatgatgcagcgccctaacattttagtcatggatgaaccaaccaaccacttggatatggagtccattgaatctctcaatatggcattggaaatgtacgaagggacattaatcttcgtctcccatgaccgcgagtttgtgagttcactggcaacccgcgtgattgaaatgacgccgaataagcttatcgactttaccggtaactacgaagattatctgagtagccaagggattcagtcataa

SEQ ID NO: 27379 - protein, 587 aa, Yersinia pseudotuberculosis IP 32953
MSACHTRLHLLFCHSAEISCKTGGDTLAILWHNARRITFFILLEYPYSVIKSRASSVLSTNNITMQFGSKPLFENISVKFGGGNRYGLIGANGCGKSTFMKILGGDLVPSGGNVFLDPNERLGKLRQDQFAFENNTVLDTVIMGHGELWEVKEERDRIYAMAEMSEEDGYKVADLEVAYGEMDGYSAEARAGELLLGVGIPVEQHYGLMSEIAPGWKLRVLLAQALFSDPEILLLDEPTNNLDIDTIRWLEQVLNERNSTMIIISHDRHFLNMVCTHMADLDYGELRVYPGNYDEYMTAATQARERLLSDNAKKKAQISELQSFVSRFSANASKSKQATSRARQIDKIQLDEVKASSRQNPFIRFDQDRKLFRNALEVEMLTKGFDNGPLFKNLTLRLEVGEKVAILGPNGIGKSTLLKTLLGEYESDAGTVKWSENSKIGYYAQDHASDFDIDLTVFDWMSQWKQEKDDEQAVRSVLGRLLFSQDDIKKKVSVLSGGEKGRMLFGKLMMQRPNILVMDEPTNHLDMESIESLNMALEMYEGTLIFVSHDREFVSSLATRVIEMTPNKLIDFTGNYEDYLSSQGIQS

SEQ ID NO: 27380 - DNA, 1689 bp, Symbiobacterium thermophilum IAM 14863
  CDS (1)..(1689): transl_table=11
atgagccgtctgaccgccgaacaggtgaccctcgcctacggatcccaccccgtgatcaccggcctgagcctgtgcatcccggacggcgccgtgaccaccctcatcgggcccaacgggtgcggcaagtccaccctgctccgggcgctggcacgcctcttgcgcccccggggcggggcggtgctgctggacgggcaggccatccaccggctgcccacgaagcaggtggcccggcagctgggcctgctcagccaggaggccgccgtgcccgaggcgctgacggtggaggagctggttgagcgggggcggtacccccaccagtccccgcttcagccggcgacggccgtggaccgggcggcggtggagcgcgcccttgccctggtcgggctggccgacctccgggaccggcccgtcgaccggctctcgggcggccagcggcagcgggcctggatcgccatggccctggcccaggagacgccgatcctgctgctggatgagcccaccacctacctggacgtcgcccagcagcaggaggtcctctccctggtccagcagctgagccggaccgaaggccgcacggtggtgatggtgctgcacgacgtgaacgaggccgcccgggcgagcgaccacctggtggcgctgcgtgacggtgcggtcgtcgcggagggtccccccggggacgtcctgcagccggagctgctggagcagctcttcggcgtgccgtgctatgtggtctgccatccgcgcacgggtgcgcgcctctgcgtgccctgcggacgttggacagagatgctgcggaagggcatccccgtctcgacggcggagcggccgcccggggactcgccgtcccggggggcggcgctgcaggcggaagggctccgggtgggttacgaggggcgcatcgtcgtgaacgacctgtccgtctcgttcccggcgggccgggtgagcgccatcatcgggccgaacggctgcgggaagtcgacgctcctgaaggcgctggcccgcctcctcccccacgccgggggaaccgccctcctggacgggcggcccatcaccgccggcagccagcggtccttcgcccggcggctggccgtcctgagccagggcgccgcggcgccgccggaggtcacggtggaagagctggtggccatgggccgcttcccccaccagacctggtaccggcagtggagccgggccgaccaggaagccgtggagcgcgccctggaggccaccggcctcacgcacctgcggtcgcggccgctggcgagcctctccggcggccagcggcagcgggcctggctggcgatggccctggcccaggagaccccggtgctcctgctggacgagccgaccaccttcctggacgtcgtccaccaggtggaggtgctggatctggtacgggagctcaaccggaccgacaggaagacgatcatcatggtgctgcacgacctgtcccaggcgagccagtacgccgactacctggtggccatgaaggacggccgcgccgtcgcggcgggcactccccaggaggtactgtcctaccacctggtgcgggaggtgttcggcgtggaaagcgtggtgattccggacccgctgacccggcgccccctcgtcctgccgggccggtctgcggcgccctgcggtgagccgcaactccttcccctgcaggcggcggcccgggacgggggctga

SEQ ID NO: 27381 - protein, 562 aa, Symbiobacterium thermophilum IAM 14863
MSRLTAEQVTLAYGSHPVITGLSLCIPDGAVTTLIGPNGCGKSTLLRALARLLRPRGGAVLLDGQAIHRLPTKQVARQLGLLSQEAAVPEALTVEELVERGRYPHQSPLQPATAVDRAAVERALALVGLADLRDRPVDRLSGGQRQRAWIAMALAQETPILLLDEPTTYLDVAQQQEVLSLVQQLSRTEGRTVVMVLHDVNEAARASDHLVALRDGAVVAEGPPGDVLQPELLEQLFGVPCYVVCHPRTGARLCVPCGRWTEMLRKGIPVSTAERPPGDSPSRGAALQAEGLRVGYEGRIVVNDLSVSFPAGRVSAIIGPNGCGKSTLLKALARLLPHAGGTALLDGRPITAGSQRSFARRLAVLSQGAAAPPEVTVEELVAMGRFPHQTWYRQWSRADQEAVERALEATGLTHLRSRPLASLSGGQRQRAWLAMALAQETPVLLLDEPTTFLDVVHQVEVLDLVRELNRTDRKTIIMVLHDLSQASQYADYLVAMKDGRAVAAGTPQEVLSYHLVREVFGVESVVIPDPLTRRPLVLPGRSAAPCGEPQLLPLQAAARDGG

SEQ ID NO: 27382 - DNA, 1533 bp, Bacillus cereus E33L
  CDS (1)..(1533): transl_table=11
atggaatacgtaattgagatgaacaatattacaaaagtattcccaggcattgtagcgaatgacgatattacgctgcaagtaaaacagggagagatacatgctttacttggagaaaatggtgcagggaaatcaacactgatgaatgtgttgttcggtttgtatcaaccagaacagggagagattaaaattaaaggaaatcctgttaagattacaaatccgaatatagcaaatgaccttggtattgggatggtccatcagcattttatgcttgttcataattttacagttacagagaatattattctgggaaatgaaccgaagaaaaacggaaaaattgctgttgaagaggctgcaaaagaaattaagcaattatctgaacagtacggtttagctgttgatccacatgcgaaaattgaagatatttctgttgggatgcagcaaagggttgaaatattaaagactctttatcgtggtgcggagattttaatatttgatgaaccaactgcggtgttaactcctcaagaaattcatgagttgattcaaattatgaaaaagcttgtgcaagaggggaaatctatcattcttattacacataagttaaaagaaattatggaagtttgcgatcgttgtacaattattcgtaaaggtaaggggattggtactgttaatgtagcggaaactgatgagcataaacttgcagagttaatggtcggatgtcaagtgaattttaaaacagaaaaaatagaagctaaaccaaaggaagaagtactatctattgcaaacctaattgttcatgatacgcgcaagttacctgctgtaaaaggccttgacttaactgttcgtgcaggagaaatcgttgggattgcagggattgatggaaatggtcaaagtgaattaatagaggcgattactggtttacgaaaagttgagtcaggttctattgcaattaaaggaaaagaaataacaaattggcctgttcgaagaataacagaagaggggattggtcatattcctgaagaccgtcataaacacggacttgttctcgatttttctgttcgggacaatattgttttacaaacatactataaaaatccattttcaaagaaagggattttaaattttagtaaaatcacacaaaaagcaaaagcgcttattgaacagtttgatgtacgtacacctagtgaacaaacgttagctcgcgctctatctggtggaaaccaacaaaaggcaattattgcacgtgaagtagatcgtaatccagatttattaattgcagcgcagccaacccgtggtttagatgtaggtgccattgaatttattcataaaaaattgattgagcagagagataatggtaaggcagtattgcttttatctttagagctagatgaaattttaaatgtaagtgatcgagttgctgttatatatgaagggaaaattgtagcaattgtggatgcaaaagagacaaacgaacaacagcttggattattaatggccggcgggacagggaaagagaaggtgaacacaaatggctaa

SEQ ID NO: 27383 - protein, 510 aa, Bacillus cereus E33L
MEYVIEMNNITKVFPGIVANDDITLQVKQGEIHALLGENGAGKSTLMNVLFGLYQPEQGEIKIKGNPVKITNPNIANDLGIGMVHQHFMLVHNFTVTENIILGNEPKKNGKIAVEEAAKEIKQLSEQYGLAVDPHAKIEDISVGMQQRVEILKTLYRGAEILIFDEPTAVLTPQEIHELIQIMKKLVQEGKSIILITHKLKEIMEVCDRCTIIRKGKGIGTVNVAETDEHKLAELMVGCQVNFKTEKIEAKPKEEVLSIANLIVHDTRKLPAVKGLDLTVRAGEIVGIAGIDGNGQSELIEAITGLRKVESGSIAIKGKEITNWPVRRITEEGIGHIPEDRHKHGLVLDFSVRDNIVLQTYYKNPFSKKGILNFSKITQKAKALIEQFDVRTPSEQTLARALSGGNQQKAIIAREVDRNPDLLIAAQPTRGLDVGAIEFIHKKLIEQRDNGKAVLLLSLELDEILNVSDRVAVIYEGKIVAIVDAKETNEQQLGLLMAGGTGKEKVNTNG

SEQ ID NO: 27384 - DNA, 1470 bp, Mannheimia succiniciproducens MBEL55E
  CDS (1)..(1470): transl_table=11
atgagtaagttggctatgcggaatgcgcaattcgagctgcaccaaaataatttattaagtataccgcactttgaaattcattcttgtgatttctgggttgttatgggttataacggcagcggcaaaacggcattttctttggcgttggaaaagaaactttctttatacaacggagaatatcaaaatcagtttgacagcatcagtttgctctcttttgagaaacaacagaaaattctggagcagacatttaaagacttaaataatgatgaggcgcccgatgatttcggtaaaaccgctcgtgaaattattttaaacggtacggataaaaataatttatgtgaattttatgcgcagtatttgcatattgaaaaattattagaccgtccttttaccaagctttcaacgggtgaaagccgtaaggtgttattagcgcaggcattggtcagtgagcctgatttgttaattttagatgatccgtttgaaggcttagatcggcaatccgtgcaggattggctcaaattacttgaatcgttaaaaggcaaattggcattagttttgattgtaaatcggttttccgacattccaagtatagcggattttgtggcgattttagataataagcaaatgattttagcgggcaaacggcaggatattgaagggcaaagcgtttaccaacagttgaaatatgccgaagatgccgaagatgtgccgctaccaggcagcgcctcaccgttaatccgcttgccggaagggcagaatccttttgaattgaaaaatgtgactattcaatatggcgataaagttattttgaataacttaaactggacggtaaaagcaaaacagaattggtggattaaaggccctaatggtgcgggaaaatccaccttgctttcaattatcaccggcgatcatccgcaggcttttgccaatcatgtggttttgttcggtaagcggcgaggcagcggcgaaaccctgtgggatattaaacagaaaatcggttatgtcagcagtcagcttcatatggattaccgggtaaacagtaccgcgattgatgtgattatttcgggtttctttgatagtatcggagtataccggcaggttcccgacgctttacgtatcaaagcgatgcaatggttgtcccgtttaaatatggattcgctcgccaagaaaccttttcgttccctttcctgggggcaacaacgtttattattgattaccagagcgatggtgaagcatccgccggttttaatccttgacgaaccgctgcaagggctggacggcataaaccgtaaattggttaaaagttttattgaacagttggtctcaaacagtgaaacccaattactgtttgtttcccatcaagatcaggacgcgccgaattgcattacccatttatttgagtttataccgcaggaagaaggctattgctatcaacaaaaaacattggaatctgcggatattatggaataa

SEQ ID NO: 27385 - protein, 489 aa, Mannheimia succiniciproducens MBEL55E
MSKLAMRNAQFELHQNNLLSIPHFEIHSCDFWVVMGYNGSGKTAFSLALEKKLSLYNGEYQNQFDSISLLSFEKQQKILEQTFKDLNNDEAPDDFGKTAREIILNGTDKNNLCEFYAQYLHIEKLLDRPFTKLSTGESRKVLLAQALVSEPDLLILDDPFEGLDRQSVQDWLKLLESLKGKLALVLIVNRFSDIPSIADFVAILDNKQMILAGKRQDIEGQSVYQQLKYAEDAEDVPLPGSASPLIRLPEGQNPFELKNVTIQYGDKVILNNLNWTVKAKQNWWIKGPNGAGKSTLLSIITGDHPQAFANHVVLFGKRRGSGETLWDIKQKIGYVSSQLHMDYRVNSTAIDVIISGFFDSIGVYRQVPDALRIKAMQWLSRLNMDSLAKKPFRSLSWGQQRLLLITRAMVKHPPVLILDEPLQGLDGINRKLVKSFIEQLVSNSETQLLFVSHQDQDAPNCITHLFEFIPQEEGYCYQQKTLESADIME

SEQ ID NO: 27386 - DNA, 2736 bp, Mannheimia succiniciproducens MBEL55E
  CDS (1)..(2736): transl_table=11
atggcggatacattacttgccgtgcaggtggataagcttaaacatagttacggaaaaaccaccgcactttgcgacctgtcattacagattccgcgcggtaaaatcatcggcttgatcggtcccgacggcgtgggtaaatccacgctgttgtcgctgattgccggcgtaaaaattattcaatccggcagcgtaaccgtcttcggtctcaatgtagcggaaaaaaaggcgcgcgacctgttatcccacaaaattgcctttatgccgcagggtctgggtaaaaatctttatctgactttatcaatttatgaaaatattgattttcacgcccgtcttttcgggctgcccaaagcccatcgcaaagcgcgcatcgaacgtcttttaaacgcgaccggtctggcgccctttgcggatcgcgcggcgggcaaactgtccggcgggatgaaacaaaaactcagtctttgttgcgccttggtacacagtcccgatttacttattttagacgaacctaccaccggtgtagaccccctctcccgtcgccaattctggcaattggtggaggatctgcgtcgggaaacgccgggcatgacggtgatcgtcgcgaccgcctatattgacgaggcggaaggttttgaacaggtcattgccatggatgacggcaagctgattgcctataagccgaccaaacagctgattgcggaaaccgaaagcgaaaatctggaacaggcctatgtaaaattgctgccggcggacaaacgcgggtcggggaagggcttgaccattccgcctttcgaagtcgatgcgaacgagccgcccgttattgttgcgaaaggattaaccaaacgtttcggtgattttacttcggtggataatgtcagttttaccattcctaaaggagaaatcttcggctttttgggttccaacggctgcggcaaatccaccaccatgaaaatgctcaccggtttactcgaccctagcgaaggtacggcaaccttattgggacagcccattgacgccagcaatatagatacccgcaaacgagtgggttatatgtcgcaggcattctcgttatatgaagaattgacggtacgcgagaacctggaattgcacgcaaaactgttccagattccgccggcacaatggaatacctatgttcattccgccatggaacaattcgatctcgccgatctggcggatgaaaaaccctcttccctgcccttgggcattcgtcagcgtttacaactcgccgccgcctgtttgcacaaacccgaactgttaattttagacgaacccacctccggcgtggatcctgcggcacgggatatgttctgggaatatttgatcaaactctcccgcgaggatcgcatcaccattttcgtcaccacccattttatgaacgaagcggcacgctgcgaccgcatttcctttatgcaccgcggacgcgtactggctgtaggaacgccggaagaattacgaaccggcaaaaacgcagcgaccctggaagaagcttttatcatttatctggaagaacaggcggacgacatcaccgcgccaagcaatgaaaccggccaaagtgcggtcaaaaatgacgaagttttaccgcccgctgaaggattatgggcatggtggtctttaatctggacctttgccgtgcgtgaaggtaaagagctgctgcgggataatatccgcttattctttgctttattaggtccgattattatgcttatcgccatggcatccagcatttcttttgatattaatccgatgaaatttgccgtattggatcatgacaattcttcggcaagccgtcacttagttgaatattttagcggttcgagatatttcattcgtcaggcggatttgcattcggtggatgaaatcaactccaatattcaaagtgcaaaagttaaaatggtgcttgaaattccgacggattacggtaaaaaattacttaactggcagcaaccggaaataggtgtttttatagacggtgccttcccttctacggctgaaaatcttaacggttcggttatcggtgtgttgacccaatatcaacgggaaatatcgaaacatatcgacatgtcggtttcctctaccgtcttattggaacctcgctttgtatataatcaggatttcaaaagtatttttgccatgacgccgggcattattatgcttgccatgattttagtaccttcaatgatgaccgcgctcggtgtagtgcgtgaaaaagaaatgggctccattatgaatctttacggttcccccgcaagccctttgcaatttctactcggcaaacagatcccctacattattcttgcttttgtaagttatttagccgccgtttgcgtcgcgattatagtctttaaggtgccgattaaaggttcggtccttgcgatgttcttcggcgtgattctcgctttgctcgccaccacggcattcggcttattcgtttccgcttttgtgaaaacgcaaattgcagcgatctttgctacggcaattatttccatgatccctgccctgaacttttcaggcatgatttatcccgttaccacactaccggatacaatttatacggctgctcgtacctttcccggttattggttgcagcttgtgagtttgggcggttttaccaagggcctgaactttaccgatttcttcgattgttatttggctttaagtactatttttgccgtctacatcacattggcaacattattgctgaaaaaacaggaggtataa

SEQ ID NO: 27387 - protein, 911 aa, Mannheimia succiniciproducens MBEL55E
MADTLLAVQVDKLKHSYGKTTALCDLSLQIPRGKIIGLIGPDGVGKSTLLSLIAGVKIIQSGSVTVFGLNVAEKKARDLLSHKIAFMPQGLGKNLYLTLSIYENIDFHARLFGLPKAHRKARIERLLNATGLAPFADRAAGKLSGGMKQKLSLCCALVHSPDLLILDEPTTGVDPLSRRQFWQLVEDLRRETPGMTVIVATAYIDEAEGFEQVIAMDDGKLIAYKPTKQLIAETESENLEQAYVKLLPADKRGSGKGLTIPPFEVDANEPPVIVAKGLTKRFGDFTSVDNVSFTIPKGEIFGFLGSNGCGKSTTMKMLTGLLDPSEGTATLLGQPIDASNIDTRKRVGYMSQAFSLYEELTVRENLELHAKLFQIPPAQWNTYVHSAMEQFDLADLADEKPSSLPLGIRQRLQLAAACLHKPELLILDEPTSGVDPAARDMFWEYLIKLSREDRITIFVTTHFMNEAARCDRISFMHRGRVLAVGTPEELRTGKNAATLEEAFIIYLEEQADDITAPSNETGQSAVKNDEVLPPAEGLWAWWSLIWTFAVREGKELLRDNIRLFFALLGPIIMLIAMASSISFDINPMKFAVLDHDNSSASRHLVEYFSGSRYFIRQADLHSVDEINSNIQSAKVKMVLEIPTDYGKKLLNWQQPEIGVFIDGAFPSTAENLNGSVIGVLTQYQREISKHIDMSVSSTVLLEPRFVYNQDFKSIFAMTPGIIMLAMILVPSMMTALGVVREKEMGSIMNLYGSPASPLQFLLGKQIPYIILAFVSYLAAVCVAIIVFKVPIKGSVLAMFFGVILALLATTAFGLFVSAFVKTQIAAIFATAIISMIPALNFSGMIYPVTTLPDTIYTAARTFPGYWLQLVSLGGFTKGLNFTDFFDCYLALSTIFAVYITLATLLLKKQEV

SEQ ID NO: 27388 - DNA, 1461 bp, Bacteroides fragilis YCH46
  CDS (1)..(1461): transl_table=11
atgaaaccagctgtatctgtaaatgacgtgacgaaacgttacggggaggtagaagccctgaaaagtgctaccttttctgtaaatcccggcgaattattcggtattatcggcccggacggagcaggtaagagcactctcttccggatattgaccacattgttgctggccgatagcgggacagctacagtgaacggactcgatgtcgtgaaagactacaaacaaatccggcaacaagtgggatatatgcccggacgcttttcgctctatcaggatctgacagtggaggagaatcttgactttttcgctaccgtgtttcatacgaccattcgtgaaaactacgatctggtgaaagatatctatcagcaaatagagcctttccgtaaacgcagggcaggagctttatccgggggaatgaagcaaaaacttgctctgagttgtgcgttgattcataagccggagattctttttctggacgagccgactaccggtgtggatcctgtttcgcgcaaggagttctgggaaatgctgaggcatcttaaggatcaaggtatcacaattcttgtttccactccgatcatggacgaagcccgtcaatgcgaccgtatcgcttttatcaatgagggcgagatacaaggtatcgatgtgccggaacgtatcctgcaacgtttcagccatattctttgcccgcccggtctggaacgtacggaagtgcacgccggaaacgattttgccatcgaggtggatcaattgaccaagtgtttcggtcattttaccgcagtcgatcatatctcctttcgggtaaaccgtggagagatcttcggatttctcggagcaaacggtgcagggaagaccactgctatgcgcatgctttgcggactgagtaagcctacttcgggcatggcgcgggtagcaggttttgatgtagcggctcaccccgaagaggtaaagaagaatatcggttatatgagccagaagttttcgttgtatgaggaccttaaagtgtgggagaacatccgcctctttgccggaatttacggaatgcaggatcgggaaatagccgaaaagacagatgctcttcttgatcgcttgggcttcagcggagagcgtgacacacttgtgaaaagcctgcctttgggatggaaacagaaactggccttttccgtttcaatcttccacaatccccggatcgtgtttcttgatgaaccgacgggaggagtcgatccggctacccgccgtcagttctgggaactgatttatcaggctgccgaccgggggataacggtctttgtgactacccattacatggatgaagcagaatattgtaaccgtgtatctatcatggtggacggacgtatcgaagcacttgacaccccccgtgggttgaaggcgcattttcatgccgatacgatggatgatgtattccaacaactggcccgtaaggcagtgcgtaaagctgattag

SEQ ID NO: 27389 - protein, 486 aa, Bacteroides fragilis YCH46
MKPAVSVNDVTKRYGEVEALKSATFSVNPGELFGIIGPDGAGKSTLFRILTTLLLADSGTATVNGLDVVKDYKQIRQQVGYMPGRFSLYQDLTVEENLDFFATVFHTTIRENYDLVKDIYQQIEPFRKRRAGALSGGMKQKLALSCALIHKPEILFLDEPTTGVDPVSRKEFWEMLRHLKDQGITILVSTPIMDEARQCDRIAFINEGEIQGIDVPERILQRFSHILCPPGLERTEVHAGNDFAIEVDQLTKCFGHFTAVDHISFRVNRGEIFGFLGANGAGKTTAMRMLCGLSKPTSGMARVAGFDVAAHPEEVKKNIGYMSQKFSLYEDLKVWENIRLFAGIYGMQDREIAEKTDALLDRLGFSGERDTLVKSLPLGWKQKLAFSVSIFHNPRIVFLDEPTGGVDPATRRQFWELIYQAADRGITVFVTTHYMDEAEYCNRVSIMVDGRIEALDTPRGLKAHFHADTMDDVFQQLARKAVRKAD

SEQ ID NO: 27390 - DNA, 1455 bp, Bacteroides fragilis YCH46
  CDS (1)..(1455): transl_table=11
atggaacaatacacattcaatatagcgggtggcgtggcacgcaacccgcttgtgcgtttggcacaacctgtcacagcacaaatcgctaccggcgaacatatcgccatcgtaggacccaatgggggagggaaaagcttgtttgtagacacgcttttgggtaaatatcctttgcgtgagggtacattggactacgatttttctccttcttctacccggacggtatatgataacgtgaaatatattgctttccgtgacacctatggggcggcggatgccaactattactatcagcaacgctggaatgcccacgatcaggaagatgcccctacggtgcgggagatgttgggagagatcaaggatgaaagactgaaagaggaattgttcgaacttttccacatcgagccattgttggacaagaagatcattcttctttccagtggcgaattacgtaaatttcaactgactaaaaccctcctgacagctccccaggtattgattatggacaatccttttatcggtttggatgcacctacccgtgaattgcttttctcgctgctcgaacgtctcacccgcttgtcatccgtgcaaatcattcttgtgctttcgatgctcgatgatatcccttcgttcattacccatgtgattccggtagaagacctgcacgtgcttccgaaaatggaaagggaggcttatctggcttcattttgtgtgaccgatgaggcagaagtcctggacgcactgcaacagcgtatagccgaattaccttatgacggagcaaactatgactccggggaggtggtaaaattaaataaggtaagtattcgttatgatgaccgcaccatcctgaaggagctcgactggacagtccgccgaggtgaaaagtgggcattgagtggagaaaacggtgccggtaaatctacactgctcagcttggtttgtgcggacaaccctcagtcgtacgcctgtgacatcagtcttttcggacgtaagcggggtacgggcgaaagcatttgggagattaaaaaacacatcggttacgtcagtcctgaaatgcaccgtgcctatctcaaaaatctgccggccattgagattgtggcttccggattgcatgacagcatcggtttgtacaaacgcccgcaggaaagccagatggctgcctgcgagtggtggatggatgtgttcggcattgtggctctgaaggacaaaccttttcttcagctgtcgagcggtgagcagcgcctggcattattggcccgtgcttttgtgaaagatccggaattgcttattctggacgagccgctgcacggactcgatacgtacaatcgccggcgggtgaaaaagattatcgaagctttttgccgtcggcaggacaagacgatgattatggtaacccattacgaatcggaactcccttctaccatcaccgaccgccttttcctgaaaagaaatcgttga

SEQ ID NO: 27391 - protein, 484 aa, Bacteroides fragilis YCH46
MEQYTFNIAGGVARNPLVRLAQPVTAQIATGEHIAIVGPNGGGKSLFVDTLLGKYPLREGTLDYDFSPSSTRTVYDNVKYIAFRDTYGAADANYYYQQRWNAHDQEDAPTVREMLGEIKDERLKEELFELFHIEPLLDKKIILLSSGELRKFQLTKTLLTAPQVLIMDNPFIGLDAPTRELLFSLLERLTRLSSVQIILVLSMLDDIPSFITHVIPVEDLHVLPKMEREAYLASFCVTDEAEVLDALQQRIAELPYDGANYDSGEVVKLNKVSIRYDDRTILKELDWTVRRGEKWALSGENGAGKSTLLSLVCADNPQSYACDISLFGRKRGTGESIWEIKKHIGYVSPEMHRAYLKNLPAIEIVASGLHDSIGLYKRPQESQMAACEWWMDVFGIVALKDKPFLQLSSGEQRLALLARAFVKDPELLILDEPLHGLDTYNRRRVKKIIEAFCRRQDKTMIMVTHYESELPSTITDRLFLKRNR

SEQ ID NO: 27392 - DNA, 1650 bp, Burkholderia mallei ATCC 23344
  CDS (1)..(1650): transl_table=11
atgagcgccgcgcagatcgcgcgcggcgccggcgcgccgccgtcgccgtcgacgccgccgcatgagccgttgctgtcgatcgagcggctgcgcgtgcgcttcggcggcacgctcgccgtcgacgacgtatcgcttgcgatcggccgcggcgagcgcgtcgcgctcgtcggcgaatcgggctccggcaagagcgtcaccgcgctggcgatcctgcgcctgctgcgcgacgccgacgtgagcggcgcgatccgcttcgcgggcgagacgctcgccgacaagagcgagcgcgagatgcgcgcgctgcgcggcgcggacatcgcgatgatcttccaggagccgatgaccgcgctcaatccgctcttcacgatcggcgagcagatcggcgagacgatcgagttgcacgatggcgtatcgaagcgcgacgcgcgcgcgcgggcgatcgcgctgctcgcgcgcaccgggatcgaccggccggacgagcgcgtcgacagctacccgcaccagttgtcgggcggccagcggcagcgcgcgatgatcgcgatggcgctcgcatgccggccgcgcctgttgctcgccgacgagccgaccaccgcgctcgacgtgacgatccgcgcgcagatcgtcgagctgctgctcgaactgcagcgtgacgcggcggccgagcgcgggatggcggtgctgctcatcacgcacgatctgaatctcgtgcggcgcttcgccgagcgggtcgcggtgatggagaagggccggctcgtcgagtgcgggccggtcgagcggatcttcgatgcgcccgagcacccgtacacgcagcgcctgttgcacagccggccgcagcgcacggtgtcgcccgtgttgccgatcgcgcccgtcgtgctcgacgcgcgcggggtcaccgtgcagttcaggcagaagctgccgggcttcgcgggctggctccgctcggggcgcttcaccgcggtgtcggacgcgagcgtgtcggtgcggcagggcgagacgctcggcatcgtcggcgaatcgggctccggcaagtcgacgctcgcgatggcgctcctcgggctgcagcgggtcgcgcacggcgacatcgaattcgagggccgttcgctcgcgagctttcgcgggcgcgagcgcgtcgcgctgcgcgcgaacatgcaggtggtatttcaggatcccttcagctcgctttcgccgcggcagacgatcgggcggatcgtgtccgaagggctcgaactgcatcgccctcggctcacggccgacgcgcgccgcgacaaggtgatcgcggtgctgcgcgaagtcggcctcgatcggacggtgctgcatcgctatccgcacgagttctcgggcggccagcgccagcggatcgcgatcgcgcgcgcgctcgtgctggagccgcgcgtgctcgtgctcgacgagccgacgagcgcgctcgacgtgtcgatccaacaacaagtgttgaagctgctgtcgaatctgcaacgaaagtacaacctgggctacgtgttcatcagccacgatctggaggtgatcggcgcgatggcgcaccgggtggcggtgatgcagggcggggcgatcgtcgagacgggcgacgtcgagcgcatcttcaccgaaccggtgcatccttacacgcaaaaattgctgaaagccgttcgttaa

SEQ ID NO: 27393 - protein, 549 aa, Burkholderia mallei ATCC 23344
MSAAQIARGAGAPPSPSTPPHEPLLSIERLRVRFGGTLAVDDVSLAIGRGERVALVGESGSGKSVTALAILRLLRDADVSGAIRFAGETLADKSEREMRALRGADIAMIFQEPMTALNPLFTIGEQIGETIELHDGVSKRDARARAIALLARTGIDRPDERVDSYPHQLSGGQRQRAMIAMALACRPRLLLADEPTTALDVTIRAQIVELLLELQRDAAAERGMAVLLITHDLNLVRRFAERVAVMEKGRLVECGPVERIFDAPEHPYTQRLLHSRPQRTVSPVLPIAPVVLDARGVTVQFRQKLPGFAGWLRSGRFTAVSDASVSVRQGETLGIVGESGSGKSTLAMALLGLQRVAHGDIEFEGRSLASFRGRERVALRANMQVVFQDPFSSLSPRQTIGRIVSEGLELHRPRLTADARRDKVIAVLREVGLDRTVLHRYPHEFSGGQRQRIAIARALVLEPRVLVLDEPTSALDVSIQQQVLKLLSNLQRKYNLGYVFISHDLEVIGAMAHRVAVMQGGAIVETGDVERIFTEPVHPYTQKLLKAVR

SEQ ID NO: 27394 - DNA, 3216 bp, Burkholderia mallei ATCC 23344
  CDS (1)..(3216): transl_table=11
gtgagcgcgccgagcgtcgttcgtttttccgacgtcagcctgcgctacggcaagaccgtcgcgctcgagcggatcacgctcgagatcccggccggtctcacgatcgggctgatcgggccggacggcgtcggcaaatcgagcctgctcgcgctcgcggccggcgcgcgcgcgctgcagacgggcgcggtcgacgcgctcggcggcgacatgcgctcgcgccgccatcgcgagcgcgtgtgccggcgcatcgcgtacatgccgcaggggctcggcaagaacctgtatccgacgctctccgtcgaggaaaacctgcagttcttcgcgcgcctgttcggccacgacgccgacgagcgccgccgccggatcgacgcgctcacgcggagcaccggcctctttgcgttcctgtcgcggcccgcgggcaagctctcgggcgggatgaagcagaagctcggcctatgctgcgcgctgatccacgatcccgacctgctgatcctcgacgagccgacgaccggcgttgatccgctcgcgcgcgcgcagttctgggatctgatcgcgcgcattcgctcggagcggccggcgatgagcgtgatcgtcgcgaccgcgtacatggacgaggcgcaacgcttcgactggctgatcgcgatggacgcgggccgcgtgctcgcgacgggcgcgcccgccgagctgctcgcgcgcaccggctgcgattcgctcgaggcggccttcatcgcactgttgcccgaagacgaacggcgcggccacaagccggtgacgctcgagccgctgcgcgccgacgcgcaaaccggcaccgcgatcgaggcgcgcgggctgacgatgcgcttcggcgatttcaccgcggtcgatcacgtgagcttccggatccggcgcggcgagatcttcggctttctcggctcgaacggctgcggcaagtcgacgacgatgaagatgctcaccggcctgctgcccgcgaccgagggcaccgcgcagctgttcggcaagacagtcgatccgaaggacatcaatacgcgccggcgcgtcggctacatgtcgcaggccttctcgctgtatagcgaactgacggtgcggcagaacctcgtgctgcacgcgcggctgttcggcgtgccggccgccgagatcgacgcgcgcgtcgacgagatggcgcgccgcttcggcctcgccgacatctacgacatgctgccggacagcctgccgctcgggatgcggcagcggctgtcgctcgcggtggcgatggtgcacaagccggagctgctgatcctcgacgagccgacctcgggcgtcgatcccgtcgcgcgcgacagcttctggcagttgatgatcgacctcgcgcgccgcgatcgggtgacgatcttcatctcgacgcacttcatgaacgaggcgcagcgctgcgaccggatctcgctgatgcacgcgggccgcgtgctcgcgagcgatgcgccggcggcgctcgtgcgcgcgcgcggcgcggcgacgctcgaggaggccttcatcggctatctcgtcgacgcttcggcgcaggaggcgcaggaggcgcagggcggcgcgggcgagcgccccggcgcgggcgagcgcgcggcgggcgaaagcgtggccggtcgcggcgcggcgaccgatggcgatgccgacggcgcgcatgcgcggcccgccgcgtacgcgaacggcgcggcgcaacatcgcgcgcccgatgcggacgcggccggcaccgacgtcgccgccgagacgggcgcacgcgacgacgcgcgcaccgcacacgcggccggacattccgccggaaacgacgtacgcgccacggtgggctccgaagtcggctccgaagtcgcctccgaagccggcctcgcagccagcgccgaaagcggctccgaacgcggcgtcgcccacggcgccgaacgtgcacgcgaacccgcggcggatgccggcgccgcaatcgacgtcgaaccgggcgcgagcgcggaatcggccacggccgccgtcgccccggctcgccacgccgaatccgccgccacgtcaccccgcgcagggaacgcgccggccggcacgccgttcgccgccgcgccggccgagccgccccatcgcgcattcagcgcgcagcgcgcgctcagctacatgtggcgcgagatgctggagctgcgccgcgatcccgttcgcgcgacgctcgcgctgatcggctcgctcgtgctgatgtgcgtgatcggcatcggcatcagcctcgacgtcgaggatctgacctacgcggtgctcgaccgcgatcaaaccgagctgagccacgactacgcgctgaacctgtccggctcgcgctacttcgtcgagcggccgccgatcgccgattacgcggcgctcgaccgccggatgcgcgacggcgagctgtcgctcgcgatcgagattccgccgaacttcgcgcgcgacgtcgagcgcggcgcgcccgcgcagatcggcatgtggatcgacggcgcgatgccgcagcgcgccgagacgatccgcggctacgcgatcggcatgcacacgatgtggctcgccgacaaggcgcggcaccgcctcggcgtgacgctcgcgccgcgcgcggaagtggtcacgcgctaccgctacaacccggacgtgaagagcctgccggcgatgatccccgccgtgatgccgctgctgctgctgatgttgcccgcgatgctcaccgcgctcgccgtcgttcgcgaacgcgagctcggctcgatcctgaatctgtacgtgacgcccgtcacgcgcaccgagttcctgatcggcaagcaggtgccgtacgtcgtgctggcgatgctgaacttcctgctgatgacgatgctcgcgcgcatcgcgttcgacgtgcccgtcaagggcagcttcatgacgctgctgctcgcggtgctgatcttcaacgtcgtcgccacgggcatcggcctgctcgcgtcgacgttcacgcgcagccaggtggccgcgatcgtgatgacgatcatcggcacgatgatcccgaccgtgcagttcgcggggctgctcacgccgctgtcgtcgctcgagggcaccgggcgcttgatcggcctcgtctatccggccacctacatgctgtcgatcagccgcggcgtgttcaacaaggcgctgtcgctccacgagctctactcgcagttctggccgctcgccgcctgcgtaccggtgatcctcggcgcgaccatactgctcttgaaaaaacaggaacgctga

SEQ ID NO: 27395 - protein, 1071 aa, Burkholderia mallei ATCC 23344
MSAPSVVRFSDVSLRYGKTVALERITLEIPAGLTIGLIGPDGVGKSSLLALAAGARALQTGAVDALGGDMRSRRHRERVCRRIAYMPQGLGKNLYPTLSVEENLQFFARLFGHDADERRRRIDALTRSTGLFAFLSRPAGKLSGGMKQKLGLCCALIHDPDLLILDEPTTGVDPLARAQFWDLIARIRSERPAMSVIVATAYMDEAQRFDWLIAMDAGRVLATGAPAELLARTGCDSLEAAFIALLPEDERRGHKPVTLEPLRADAQTGTAIEARGLTMRFGDFTAVDHVSFRIRRGEIFGFLGSNGCGKSTTMKMLTGLLPATEGTAQLFGKTVDPKDINTRRRVGYMSQAFSLYSELTVRQNLVLHARLFGVPAAEIDARVDEMARRFGLADIYDMLPDSLPLGMRQRLSLAVAMVHKPELLILDEPTSGVDPVARDSFWQLMIDLARRDRVTIFISTHFMNEAQRCDRISLMHAGRVLASDAPAALVRARGAATLEEAFIGYLVDASAQEAQEAQGGAGERPGAGERAAGESVAGRGAATDGDADGAHARPAAYANGAAQHRAPDADAAGTDVAAETGARDDARTAHAAGHSAGNDVRATVGSEVGSEVASEAGLAASAESGSERGVAHGAERAREPAADAGAAIDVEPGASAESATAAVAPARHAESAATSPRAGNAPAGTPFAAAPAEPPHRAFSAQRALSYMWREMLELRRDPVRATLALIGSLVLMCVIGIGISLDVEDLTYAVLDRDQTELSHDYALNLSGSRYFVERPPIADYAALDRRMRDGELSLAIEIPPNFARDVERGAPAQIGMWIDGAMPQRAETIRGYAIGMHTMWLADKARHRLGVTLAPRAEVVTRYRYNPDVKSLPAMIPAVMPLLLLMLPAMLTALAVVRERELGSILNLYVTPVTRTEFLIGKQVPYVVLAMLNFLLMTMLARIAFDVPVKGSFMTLLLAVLIFNVVATGIGLLASTFTRSQVAAIVMTIIGTMIPTVQFAGLLTPLSSLEGTGRLIGLVYPATYMLSISRGVFNKALSLHELYSQFWPLAACVPVILGATILLLKKQER

SEQ ID NO: 27396 - DNA, 3225 bp, Burkholderia pseudomallei K96243
  CDS (1)..(3225): transl_table=11
gtgagcgcgccgagcgtcgttcgtttttccgacgtcagcctgcgctacggcaagaccgtcgcgctcgagcggatcacgctcgagatcccggccggtctcacgatcgggttgatcgggccggacggcgtcggcaaatcgagcctgctcgcgctcgcggccggcgcgcgcgcgctgcagacgggcgcggtcgacgcgctcggcggcgacatgcgctcgcgccgccatcgcgagcgcgtgtgccggcgcatcgcgtacatgccgcaggggctcggcaagaacctgtatccgacgctctccgtcgaggaaaacctgcagttcttcgcgcgcctgttcggccacgacgccgacgagcgccgccgccggatcgacgcgctcacgcggagcaccggcctctttgcgttcctgtcgcggcccgcgggcaagctctcgggcgggatgaagcagaagctcggcctgtgctgcgcgctgatccatgatcccgacctgctgatcctcgacgagccgacgaccggcgtcgatccgctcgcgcgcgcgcagttctgggatctgatcgcgcgcattcgctcggagcggccggcgatgagcgtgatcgtcgcgaccgcgtacatggacgaggcgcaacgcttcgactggctgatcgcgatggacgcgggccgcgtgctcgcgacgggcgcgcccgccgagctgctcgcgcgcaccggctgcgattcgctcgaggcggccttcatcgcactgttgcccgaagacgaacggcgcggccacaagccggtgacgctcgagccgctgcgcgccgacgcgcaaaccggcaccgcgatcgaggcgcgcgggctgacgatgcgcttcggcgatttcaccgcggtcgatcacgtgagcttccggatccggcgcggcgagatcttcggctttctcggctcgaacggctgcggcaagtcgacgacgatgaagatgctcaccggcctgctgcccgcgaccgagggcaccgcgcagctgttcggcaagacagtcgatccgaaggacatcaatacgcgccggcgcgtcggctacatgtcgcaggccttctcgctgtatagcgaactgacggtgcggcagaacctcgtgctgcacgcgcggctgttcggcgtgccggccgccgagatcgacgcgcgcgtcgacgagatggcgcgccgcttcggcctcgccgacatctacgacatgctgccggacagcctgccgctcgggatgcggcagcggctgtcgctcgcggtggcgatggtgcacaagccggagctgctgatcctcgacgagccgacctcgggcgtcgatcccgtcgcgcgcgacagcttctggcagttgatgatcgacctcgcgcgccgcgatcgggtgacgatcttcatctcgacgcacttcatgaacgaggcgcagcgctgcgaccggatctcgctgatgcacgcgggccgcgtgctcgcgagcgatgcgccggcggcgctcgtgcgcgcgcgcggcgcggcgacgctcgaggaggccttcatcggctatctcgtcgacgcttcggcgcaggaggcgcagggcggcgcgggcgggcgccccggcgcgggcgagcgcgcggcgggcgaaagcctggccggtcgcggcgcggcgaccgatggcgatgccgacggcgcgcatgcgcggcccgccgcgtacgcgaacggcgcggcgcaacatcgcgcgcccgatgcggacgcggccggcaccgacgtcgccgccgagacgggcgcacgcgacgacgcgcgcaccgcacacgcggccggacattccgccggaaacgacgtacgcgccacggtgggctccgaagtcggctccgaagtcgcctccgaagccggcctcgcagccagcgccgaaagcggctccgaacgcggcgtcgcccacggcgccgaacgtgcacgcgaacccgcggcggatgccggcgccgcaatcgacgtcgaaccgggcgcgagcgcggaatcggccacggccgccgtcgccccggctcgccacgccgaatccgccgccacgtcaccccgcgcagggaacgcgccggccggcacgccgttcgccgccgcgccgccgtcgcacgccgcgccggccgagccgccccatcgcgcattcagcgcgcagcgcgcgctcagctacatgtggcgcgagatgctggagctgcgtcgcgatcccgttcgcgcgacgctcgcgctgatcggctcgctcgtgctgatgtgcgtgatcggcatcggcatcagcctcgacgtcgaggatctgacctacgcggtgctcgaccgcgatcagaccgagctgagccacgactacgcgctgaacctctccggctcgcgctacttcgtcgagcggccgccgatcgccgattacgcggcgctcgaccgccggatgcgcgacggcgagctgtcgctcgcgatcgagattccgccgaacttcgcgcgcgacgtcgagcgcggcgcgcccgcgcagatcggcatgtggatcgacggcgcgatgccgcagcgcgccgagacgatccgcggctacgcgatcggcatgcacacgatgtggctcgccgacaaggcgcggcaccgcctcggcgtgacgctcgcgccgcgcgcggaagtggtcacgcgctaccgctacaacccggacgtgaagagcctgccggcgatgatccccgccgtgatgccgctgctgctgctgatgttgcccgcgatgctcaccgcgctcgccgtcgttcgcgaacgcgagctcggctcgatcctgaacctgtacgtgacgcccgtcacgcgcaccgagttcctgatcggcaagcaggtgccgtacgtcgtgctcgcgatgctgaacttcctgctgatgacgatgctcgcgcgcatcgcgttcgacgtgcccgtcaagggcagcttcatgacgctgttgctcgcggtgctgatcttcaacgtcgtcgccacgggcatcggcctgctcgcgtcgacgttcacgcgcagccaggtggccgcgatcgtgatgacgatcatcggcacgatgatcccgaccgtgcagttcgcggggctgctcacgccgctgtcgtcgctcgagggcaccgggcgcttgatcggcctcgtctatccggccacctacatgctgtcgatcagccgcggcgtgttcaacaaggcgctgtcgctccacgatctctactcgcagttctggccgctcgccgcctccgtaccggtgatcctcggcgcgaccatactgctcttgaaaaaacaggaacgctga

SEQ ID NO: 27397 - protein, 1074 aa, Burkholderia pseudomallei K96243
MSAPSVVRFSDVSLRYGKTVALERITLEIPAGLTIGLIGPDGVGKSSLLALAAGARALQTGAVDALGGDMRSRRHRERVCRRIAYMPQGLGKNLYPTLSVEENLQFFARLFGHDADERRRRIDALTRSTGLFAFLSRPAGKLSGGMKQKLGLCCALIHDPDLLILDEPTTGVDPLARAQFWDLIARIRSERPAMSVIVATAYMDEAQRFDWLIAMDAGRVLATGAPAELLARTGCDSLEAAFIALLPEDERRGHKPVTLEPLRADAQTGTAIEARGLTMRFGDFTAVDHVSFRIRRGEIFGFLGSNGCGKSTTMKMLTGLLPATEGTAQLFGKTVDPKDINTRRRVGYMSQAFSLYSELTVRQNLVLHARLFGVPAAEIDARVDEMARRFGLADIYDMLPDSLPLGMRQRLSLAVAMVHKPELLILDEPTSGVDPVARDSFWQLMIDLARRDRVTIFISTHFMNEAQRCDRISLMHAGRVLASDAPAALVRARGAATLEEAFIGYLVDASAQEAQGGAGGRPGAGERAAGESLAGRGAATDGDADGAHARPAAYANGAAQHRAPDADAAGTDVAAETGARDDARTAHAAGHSAGNDVRATVGSEVGSEVASEAGLAASAESGSERGVAHGAERAREPAADAGAAIDVEPGASAESATAAVAPARHAESAATSPRAGNAPAGTPFAAAPPSHAAPAEPPHRAFSAQRALSYMWREMLELRRDPVRATLALIGSLVLMCVIGIGISLDVEDLTYAVLDRDQTELSHDYALNLSGSRYFVERPPIADYAALDRRMRDGELSLAIEIPPNFARDVERGAPAQIGMWIDGAMPQRAETIRGYAIGMHTMWLADKARHRLGVTLAPRAEVVTRYRYNPDVKSLPAMIPAVMPLLLLMLPAMLTALAVVRERELGSILNLYVTPVTRTEFLIGKQVPYVVLAMLNFLLMTMLARIAFDVPVKGSFMTLLLAVLIFNVVATGIGLLASTFTRSQVAAIVMTIIGTMIPTVQFAGLLTPLSSLEGTGRLIGLVYPATYMLSISRGVFNKALSLHDLYSQFWPLAASVPVILGATILLLKKQER

SEQ ID NO: 27398 - DNA, 1641 bp, Methylococcus capsulatus str. Bath
  CDS (1)..(1641): transl_table=11
gtgccggtcggggccacaccctctcactcctttctctcggtaatcattttgatctctacagccaacgtcaccatgcagttcggcgtcaagccgctgttcgaaaacgtctccgtcaagttcggcgagggcaaccgttatggcctgatcggggccaacggctgcggcaagtcgaccttcatgaaaatcctcggcggcgatctggagccgaccgccggtaatgtttcgctcgacctcaacgtgcgtttgggcaagctgcgccaggatcagttcgccttcgaggaccagcgggtgctggacgtcgtgatgatggggcacaccgagatgtgggcggcgatgtccgagcgcgatgcgatctacgccaatccggacgcgagcgaggacgactacatgcgggcggcggagctggaggccgcctttgccgaatatgacggctataccgcggaagcccgtgccggcgaactgctgttgggtgtgggcattccgctggagcagcacgacgggccgatgagcgccgtggcgccgggctggaagctgcgcgtgttgctggcccaggcgctgttttccaacccggatatcctgctgctggacgaaccgaccaacaacctggacatcaacaccatccgctggctggaaaacgtgctgaacgcccgcaacagcaccatgatcatcatttcccacgaccggcacttcctcaacagcgtctgcacgcacatggcggacatggactatggcgagctgcggatctatccgggcaactacgacgattacatgatcgcctccacccaggcgcgcgaacgccagctggccgagaacgccaagaagaaggcccagatcgccgaactgcaggccttcgtcagccgcttctcggccaacgcctccaaggcccggcaggccacctcccgagcccgccagatcgagaagatcaagctggaggacatcaaaccctccagccgggtgaaccccttcatccgcttcaaccaggacaggaagctccatcgcctggccctggaagtggaagggctggccaagggctacggggaagagcccctgttccagggcctgaacctgatggtggaggcgggcgagcgggtggcggtgatcggccccaacggcatcggcaagaccaccctgctgcgctgcctggtgggcgacctggaggcggacgccggccaggtaaagtgggcggaaaacgccagcctgggctatttcgcccaggatcatgccgccgatttcgccgaggacatcagcctcttggactggatgggccggtggaagcgggaggcggacgacgagcagacggtgcgcggcaccctgggccgcctgctgttctcccaggacgagatcaagaaatcggtcaaggtgctctcgggcggagagcagggccgcatgctgttcggcaagctgatactgcgccagcccaacgtcatggtgctggacgagccgaccaaccacctcgacatggaatccatcgagtcgctcaacaccgcgctggaacactaccccggcaccctgatcttcgtcagccacgaccgcgagttcgtctcctccctggcgacccgtatcatcgagctgacgccgcagggcgtggtcaattaccgcggcacctatgacgagtacctgcagtcgcagggtctggaatag

SEQ ID NO: 27399 - protein, 546 aa, Methylococcus capsulatus str. Bath
MPVGATPSHSFLSVIILISTANVTMQFGVKPLFENVSVKFGEGNRYGLIGANGCGKSTFMKILGGDLEPTAGNVSLDLNVRLGKLRQDQFAFEDQRVLDVVMMGHTEMWAAMSERDAIYANPDASEDDYMRAAELEAAFAEYDGYTAEARAGELLLGVGIPLEQHDGPMSAVAPGWKLRVLLAQALFSNPDILLLDEPTNNLDINTIRWLENVLNARNSTMIIISHDRHFLNSVCTHMADMDYGELRIYPGNYDDYMIASTQARERQLAENAKKKAQIAELQAFVSRFSANASKARQATSRARQIEKIKLEDIKPSSRVNPFIRFNQDRKLHRLALEVEGLAKGYGEEPLFQGLNLMVEAGERVAVIGPNGIGKTTLLRCLVGDLEADAGQVKWAENASLGYFAQDHAADFAEDISLLDWMGRWKREADDEQTVRGTLGRLLFSQDEIKKSVKVLSGGEQGRMLFGKLILRQPNVMVLDEPTNHLDMESIESLNTALEHYPGTLIFVSHDREFVSSLATRIIELTPQGVVNYRGTYDEYLQSQGLE

SEQ ID NO: 27400 - DNA, 2724 bp, Methylococcus capsulatus str. Bath
  CDS (1)..(2724): transl_table=11
atgagcgccatcatccgggtcgaggagtgccgccaccgttatggcaaggtcgaagcgctcgcgggtatctcgctggaattgtccgccggcgggctgaccggcttcgtcggtccggacggggtggggaaatcgaccctgctgggtttgatcgccggcgtccgggcgctgcaggccgggcgtatcgaagtgttcggagcggacatcgccgatcccaaggcgcatcggcgcttgcgccaccgtatcgcctacatgccgcagggtctggggcacaacctgtatgcgacgctctcggtgtgggagaacgccgagtttttcggccggctgttcgggtttgacggaaaggagcggcgccggcggatcgagcgcctgctggcggcggttggactggcgccgttccgggatcgcccggcaggcaagctttccggcgggatgaggcagaagctcggcctctgctgcgccttgctgcatgagccggagctgttgatcctcgatgagccgaccaccggtgtcgatccgctgtcgcgtcggcagttctgggagctgatcgatacgctgaggcaggagcggcccggcatgaccgtcctggtcgccaccgcctacatggaggaggccgcgcgcttcgaccgtctggttgccatggacgccggccgcgttctggcgagcgggaccgcggcggaactgctggatcgcaccggcactgccgatatggagtcggcctacgtggccctgctgccgccggagaaaaggcgggggcatgaggcgctcgtgatcccgccgcgccggaacggccggggcgaggcggcgatcgaggccgtcgggctcacccgccgctttggcgatttcctggccgtggacggcgtgagcttccggatcgagcgcggcgaaatcttcggtttcctcggctccaacggctgcggcaagaccacgaccatgaagatgctcgccggactcctgccggccagcgccggctcggcctcgctgttcggccagccggtggcgtcggggaatgcggcgatgcgccgccgcatcggcttcatgtcgcagggattttcgctctacaccgagctgacggtcaggcagaacctggaactgcatgcccatatcttcggactggcgccttccgcgctcgaagcccggatcgcagagctggcggcccgcatgcatctggccgggcacctcgatgctctggccgaatcgctgccgctgggtatccgccagcgtctgtcactggcagtggcgctggtccacgatcccgagctgctgatcctggacgagccgacttcgggcgtcgatccggtcgcccgcgatcgtttctgggagctactggtggagctgtcgcgcgagaaaggcgtgacgatcttcatctcgacccatttcatgaacgaggcggcgcgctgcgaccgcatctcgctgatgcacgcgggacgggtgctcgcccagggcgcgcccgccgagctggtgcgggaggcgggggcgccctcgctggaggacgccttcatcgcttgcctggagcgggagagcgctcccacggccggtgtcgccgcggtggttccttccctcgctccggaagttgccggaccggcgcccgccgccagcccctggttcagtccccgccgcttcaacgcatacgtctggcgcgaaaccatggaactggcgcgcgatccgatccgcctcgccttcgcgctgctcgggccgatgctgctgatggtggtcatgggctacgggatttcgctggacgtcgagcatctgccctacgcggtcctcgactacgaccggacgccggaaagccgccgatatctggagcacttcgcccattcgcgctatttcgaggagcaggccccgctgcaagacgacgacgatatctcgagacggatggcgaggggccagctcaacttcgccgtggagattccgccgggtttcgggcgcgacctcaaggccgggcgtccggtcgaggtgggcgtccgcatcgacggcagcatcccgttccgcgccaacacggtgcaaggctatgtggaggccgtgcacgcccgtttccgcagcgacatgatggatgaaagcccggctcgcgcagcggccccgccgctgcgggtggaaacccgtttccgctacaatccggatctgaagagcgtctacgccctggtaccgggcgtgatcgcggtgatgctggcggtgattccgccgattctcacggcggtcagcgtggtgcgggaaaaagagatcggttcgatcacgaatctgtatgccacgccctcgacccgtctggagttcctgctgggcaagcagcttccctacgtcgtggtgggcctcgtcaacgccttgtccttgattgcgctggctctgtggttgttcggcgtaccggtgaagggggacctgtcggctctgttgctgggggccatgctggccgtcgccggaaccaccggctggggactgctgatttcggcgttcacgcgctcgcagatcgccgccctgttcgccgcgttcctgctgtccatcgtgcccgccatcaatttttcaggattcctggcgccggtggcctcccagaccggcgcggcggccgtgatgggctacgggtttccgacttcctggttcttgtccatcagcgtcggagtgttcaccaaggccttgggcttccccgaactctaccccaaccacgtcgtgctgctggccttcgtgctgggctatctggggctcagcctcgcgctgctccccagccggggacgttga

SEQ ID NO: 27401 - protein, 907 aa, Methylococcus capsulatus str. Bath
MSAIIRVEECRHRYGKVEALAGISLELSAGGLTGFVGPDGVGKSTLLGLIAGVRALQAGRIEVFGADIADPKAHRRLRHRIAYMPQGLGHNLYATLSVWENAEFFGRLFGFDGKERRRRIERLLAAVGLAPFRDRPAGKLSGGMRQKLGLCCALLHEPELLILDEPTTGVDPLSRRQFWELIDTLRQERPGMTVLVATAYMEEAARFDRLVAMDAGRVLASGTAAELLDRTGTADMESAYVALLPPEKRRGHEALVIPPRRNGRGEAAIEAVGLTRRFGDFLAVDGVSFRIERGEIFGFLGSNGCGKTTTMKMLAGLLPASAGSASLFGQPVASGNAAMRRRIGFMSQGFSLYTELTVRQNLELHAHIFGLAPSALEARIAELAARMHLAGHLDALAESLPLGIRQRLSLAVALVHDPELLILDEPTSGVDPVARDRFWELLVELSREKGVTIFISTHFMNEAARCDRISLMHAGRVLAQGAPAELVREAGAPSLEDAFIACLERESAPTAGVAAVVPSLAPEVAGPAPAASPWFSPRRFNAYVWRETMELARDPIRLAFALLGPMLLMVVMGYGISLDVEHLPYAVLDYDRTPESRRYLEHFAHSRYFEEQAPLQDDDDISRRMARGQLNFAVEIPPGFGRDLKAGRPVEVGVRIDGSIPFRANTVQGYVEAVHARFRSDMMDESPARAAAPPLRVETRFRYNPDLKSVYALVPGVIAVMLAVIPPILTAVSVVREKEIGSITNLYATPSTRLEFLLGKQLPYVVVGLVNALSLIALALWLFGVPVKGDLSALLLGAMLAVAGTTGWGLLISAFTRSQIAALFAAFLLSIVPAINFSGFLAPVASQTGAAAVMGYGFPTSWFLSISVGVFTKALGFPELYPNHVVLLAFVLGYLGLSLALLPSRGR

SEQ ID NO: 27402 - DNA, 1446 bp, Mycoplasma hyopneumoniae 232
  CDS (1)..(1446): transl_table=4
atgaatttagaactttataaaggcgcagcagtcgccctaattggcgaaaatggggctggaaaatcaagtctgatgaaagttttaagtggggtttatcaacctgattcagggaaaatgaacttttgtagtgataatatttgcaatcaaaaagttgaattttccggggtaattaattcccaaaaacaaggaattgccattattcaccaagagcaaaatttagttgaaagcctaagtgtttcccagaacattttcctgggacgggaatttcggaattcctttggacttttagattataaaaaacaagatgaagaagcaaaaaaacttttagatactttaggggctgaatttagtccaaaagcacttgtttcttcgctttcgatctcacaaaagcaatttatcgaaatcgccaaagctttatcccaaaaaccggaaattatcatttttgatgaaccgacttcggttctaaccgaaaaagatacccaaaaactttatctgcttgttgaaaaacttaaaaaacaaggaattgcaatcgtctgaattacccatagaatggaagaaattaagaaaacttgtgaatttatcactgtgattcgaaacggaatgtatattgaaagtaagccaataaatgaatttaaaaacgaagatgagattatttctttaatggtcggttttgatatcgagcagcgttatcccgaaaaaacgccggttagaagtaaaaaaccatcgtttttagttagaaatttatcaaatgataaagtttctaatatcagttttgaaatcaaaccaggtgaaattttagttttttatggccttgtaagttcaggtcgaactgaattagctagaactttaattggcgatatgccttatttgaatggtcatattgaactaaatggtcaagaatttcgcccaaaaaatattaaggacagtcttgatcatggaatttattatctttctgaaaataggaaacaaattggtctaaatgttaatttaccaattaattttaatatcacaatttcttctcttggctcaaatcagattttttctttccttccttttgtctcaaaagcaaaaataactaaaactacaaatcattatattaaacaattaaagatcaaaacaacttcacaagatactccattaacttctttatcaggtggaaatcaacaaaaagtctcacttgcaaaagggcttgcaactcaaccgcaagttttcatcctcgatgaaccaactcgcggagtcgatgttggagcaagaaaggaaatttataatttaattcaccaattaaaacaagaaaataaaacaattatgataatttcttcggatatgcaagaagttatcggaatcgctgatcgggtaattacaatgtatgaaggcagaattacaagtgaattagttggcccgcaaattaccgatcaaaatataatgaaatattcacttaatttatag

SEQ ID NO: 27403 - protein, 481 aa, Mycoplasma hyopneumoniae 232
MNLELYKGAAVALIGENGAGKSSLMKVLSGVYQPDSGKMNFCSDNICNQKVEFSGVINSQKQGIAIIHQEQNLVESLSVSQNIFLGREFRNSFGLLDYKKQDEEAKKLLDTLGAEFSPKALVSSLSISQKQFIEIAKALSQKPEIIIFDEPTSVLTEKDTQKLYLLVEKLKKQGIAIVWITHRMEEIKKTCEFITVIRNGMYIESKPINEFKNEDEIISLMVGFDIEQRYPEKTPVRSKKPSFLVRNLSNDKVSNISFEIKPGEILVFYGLVSSGRTELARTLIGDMPYLNGHIELNGQEFRPKNIKDSLDHGIYYLSENRKQIGLNVNLPINFNITISSLGSNQIFSFLPFVSKAKITKTTNHYIKQLKIKTTSQDTPLTSLSGGNQQKVSLAKGLATQPQVFILDEPTRGVDVGARKEIYNLIHQLKQENKTIMIISSDMQEVIGIADRVITMYEGRITSELVGPQITDQNIMKYSLNL

SEQ ID NO: 27404 - DNA, 1686 bp, Nocardia farcinica IFM 10152
  CDS (1)..(1686): transl_table=11
atgagtgggtcagcggccggaggcggcagcgcagcatcaccacacaggccgccccactcaggcggaatcgggcacagtatgagcgaactgctgcggatcgaccagctgcgggtgacctatcgcagcggcggcggcgcggtgaccgcgctggccggcgcctcgctgacggtcgctcccggcgaggtggtggcgttggtcggcgaatccggttcgggcaaatcgacgctcgcgcacgcggtgatcggcctgctgccgcgggccgcgcgaatcggcggtggccacatcgagttcgccgggctgcgcgtcgacaccgccgacgagcgcacgctgcggcggctgcggggggccaggatcggcttcgtcccccaggatcccgggctgtcgctgaacccggtgcggcgggtgggcgatcagatcgccgaagcgctgcgcgtgcacggcctggccgatccgcgcaccgcccgcgcccgtgtcctcgacctgctcgacgaggtgggcctggagcggtcgcagcgctgggagcggcgctatccgcacgagctgtccggcggccaacgccagcgggtgctcatcgccatcgcactggcctgcggaccggagctgatcatcgccgacgaacccaccagtgccctggacgcgacggtggcacgccgggtgctcgaccggctggccgagcggatcggcgcgcgcggcaccgccgtgctgctgatcacccacgatctggcgatggccgccgagcgcgccgaccggctcgtagtgctggtcgacggggagatcgtggagtccggccgtcccgccgacctgctcaccgcgccacggcatccctacaccgcgcgcttgctggccgcctcgccgagcctgcgctccgcgcccccgcgcccggcccgcccggcgaccggtgcgccgctgctggtgctgcgggaggtgcacaagcgctaccgcacgcccgcgggcacggtcaccgccgtggacggggtcggcttcgagctgcgccgcggggaaacgctggcgctggtcggcgaatccgggtcgggcaagtccaccacggcgcggatcgcgttgcggctgaccggcgccgaccgtggcagcgtgaccttcgacgggcacgacatcaccgcggtgcgcggcgcacggttgcgtgcgctgcgcaggcgcttccaggtggtgtaccagaacccctacggctcgctggatccacgccagtcgctggccacgatcatcgccgagccgttgcgcgccttcggcatcggcgaccgggccgcccgccgggcccgggtgcgggaactgctcggacaggtcgcgttgcccgagcactacgccgtccgccgtccggccgaactctccggcggccaacgtcaacgcgtcgcgatcgcccgcgcgctggcgctgcaccccgacctgctggtcctcgacgaaccggtctcggccttggacgcctcggtgcaggcccagatcctcgacctgctcgaacgcctgcaatccgagctggatgtgagctacctgttcatctcccacgacctcgcggtggtccggcgcatcagcgaccacgtggcggtgatgcggcacgggaaggtcgtcgaatccgggccgacggcggcgatattcgacgcgccgcgccacgagtacaccgccgagctgctcgcggcgatcccccacccccagctgtcccggaaaggaccgtcctga

SEQ ID NO: 27405 - protein, 561 aa, Nocardia farcinica IFM 10152
MSGSAAGGGSAASPHRPPHSGGIGHSMSELLRIDQLRVTYRSGGGAVTALAGASLTVAPGEVVALVGESGSGKSTLAHAVIGLLPRAARIGGGHIEFAGLRVDTADERTLRRLRGARIGFVPQDPGLSLNPVRRVGDQIAEALRVHGLADPRTARARVLDLLDEVGLERSQRWERRYPHELSGGQRQRVLIAIALACGPELIIADEPTSALDATVARRVLDRLAERIGARGTAVLLITHDLAMAAERADRLVVLVDGEIVESGRPADLLTAPRHPYTARLLAASPSLRSAPPRPARPATGAPLLVLREVHKRYRTPAGTVTAVDGVGFELRRGETLALVGESGSGKSTTARIALRLTGADRGSVTFDGHDITAVRGARLRALRRRFQVVYQNPYGSLDPRQSLATIIAEPLRAFGIGDRAARRARVRELLGQVALPEHYAVRRPAELSGGQRQRVAIARALALHPDLLVLDEPVSALDASVQAQILDLLERLQSELDVSYLFISHDLAVVRRISDHVAVMRHGKVVESGPTAAIFDAPRHEYTAELLAAIPHPQLSRKGPS

SEQ ID NO: 27406 - DNA, 783 bp, Streptococcus thermophilus LMG 18311
  CDS (1)..(783): transl_table=11
atgtcacttatacgcttagaaaatgtcagcttggctcgccaaggaaaaacactcttgtccaatcttaactggtcagttgaaaaaggccagacctgggctatccttggacttaatggtgcaggaaaatcaacacttctacgcttattgacagctgagttctttccttccgaaggtcatgctgaaatacttggctatacctttggtaatggagacatcacgggtcttcgcaaacatatcggtattgtcagttccttcatcactgagcgtctgcctaagcatatgactgcagaaaaaatcgtccttactggtaaatacaagagctcaatcctctacaaggcatatggggataaggagttgcaagaagctaaggacatgctgacctcacttggtgctggggatttgataggtcgtaaataccatggcctctctcaaggagaaaaacaaatttgtttgattgctcgcagtctcatggaagatcctgacatcattattcttgatgaagcgactgttggcttggacctatttgctcgtgaaaaactcttgcgtcagattgatcgtatcacctcgcttcctcatgctccactggttctttacgtcactcaccacgctgaggaaatcactgaaaacatggaccatattctcctactccgtcaaggaaaaatcgtagcacaaggacccaaaaatgatgtcatcacaccagaagtcttagctgacttctatcaaaatcctgttcaaattattccaattgacgaccatcgtttttacattaaccctcttttatag

SEQ ID NO: 27407 - protein, 260 aa, Streptococcus thermophilus LMG 18311
MSLIRLENVSLARQGKTLLSNLNWSVEKGQTWAILGLNGAGKSTLLRLLTAEFFPSEGHAEILGYTFGNGDITGLRKHIGIVSSFITERLPKHMTAEKIVLTGKYKSSILYKAYGDKELQEAKDMLTSLGAGDLIGRKYHGLSQGEKQICLIARSLMEDPDIIILDEATVGLDLFAREKLLRQIDRITSLPHAPLVLYVTHHAEEITENMDHILLLRQGKIVAQGPKNDVITPEVLADFYQNPVQIIPIDDHRFYINPLL

SEQ ID NO: 27408 - DNA, 1707 bp, Streptococcus thermophilus CNRZ1066
  CDS (1)..(1707): transl_table=11
ttgatatctcttctctttgttagtagaaacatggataaatacattagttttaatcagtttacatttcaatatgatgcgcaagcagaagcgacgcttaaagatatcagctttgatattgccaaaggcgagaaagtgctcattttaggcccttctggtagcggaaagtcgacccttgctcagtgtctcaatggtatcatacctaatatccataaaggtcaggcaaaaggccaggtaaggatagatggtcaggatattttcaagcaatctatctatgataagtcacagtcggtatctacggtattgcaggatccagatggtcagtttattggcctaacagtagccgaggatttggcttttgctttggagaatgattgtgctaatcaaagtgagatgaaggataaggtagcactctgggctgaacgtctagacttgacttctctttttaatcaccgccctcaagacttatcaggtggccaaaaacaacgagttagtttggctggagtcttgattgatgagagccctattcttttatttgatgagcctctagcaaatttagatcctaaatcaggacaggaaaccattgacctcattgataaaatccacaaggaggtgggagctacaacaattcttattgagcaccgtctagaagatgttctttatcgtcccgttgaccgtattttgctagtcaatgatgggcaacttctctttaacggtagcccagatgagcttttatcaagtactctcttactggaaaatgggattcgcgaacctctatatgtgacggttttacgtcagttgggatttgatacaactagagcacaaaatcttagccaactagatgctttggatttgtctggattaggtatcccagatagcgttttgaaagataaaagagacagttcaagtgattctattttgaaggttgaggggcttagcgtttcctatggggataatccagcgattatagaggatatgtcttttagcttgaaaaaaggtgagcgactagcgattgtcggtaaaaatggagctggaaagtcgacgcttgctaaagctctatgcggttttgtccctagtcaagggaaattaacttacgagggtcaggatatcagtcaggatagcatcgccgagcgttcagagcgtataggctttgttttgcaaaaccctaatcagatgattagccaaactatgatttttgatgaagtggctctaggtttacgcttgcgagggattgaagaaactgaggttgaagagcgtgttcatgaggtactgaagacttgtggcctttatagttttcgtaaatggcccatttctgcgctttcctttggtcagaaaaagcgtgtgaccattgcgtctatcttggtcttgagacctgaaatcattatcttggatgagccaacagctggtcaagattacaagacttacacggatatcatgaatttcttggacagtcttcagaagcaaggtcatacgattgtgatgattacccatgacatgcagctcatgttggaatatagcgatcgttgtctcgttgtggttgaggggaaaatcattgcagacgacaatcctgttacaattcttaatcagaaggatttacttgagtcagctaatctcaagcagacatctctgtatactttgggtcagaaattgtcaagtaatccagtagaagtaacccagtattatatcgaaaaaggaggtcctaatgtctaa

SEQ ID NO: 27409 - protein, 568 aa, Streptococcus thermophilus CNRZ1066
MISLLFVSRNMDKYISFNQFTFQYDAQAEATLKDISFDIAKGEKVLILGPSGSGKSTLAQCLNGIIPNIHKGQAKGQVRIDGQDIFKQSIYDKSQSVSTVLQDPDGQFIGLTVAEDLAFALENDCANQSEMKDKVALWAERLDLTSLFNHRPQDLSGGQKQRVSLAGVLIDESPILLFDEPLANLDPKSGQETIDLIDKIHKEVGATTILIEHRLEDVLYRPVDRILLVNDGQLLFNGSPDELLSSTLLLENGIREPLYVTVLRQLGFDTTRAQNLSQLDALDLSGLGIPDSVLKDKRDSSSDSILKVEGLSVSYGDNPAIIEDMSFSLKKGERLAIVGKNGAGKSTLAKALCGFVPSQGKLTYEGQDISQDSIAERSERIGFVLQNPNQMISQTMIFDEVALGLRLRGIEETEVEERVHEVLKTCGLYSFRKWPISALSFGQKKRVTIASILVLRPEIIILDEPTAGQDYKTYTDIMNFLDSLQKQGHTIVMITHDMQLMLEYSDRCLVVVEGKIIADDNPVTILNQKDLLESANLKQTSLYTLGQKLSSNPVEVTQYYIEKGGPNV

SEQ ID NO: 27410 - DNA, 1590 bp, Salmonella enterica subsp. enterica serovar Paratyphi A str. ATCC
  CDS (1)..(1590): transl_table=11
atgacatctccattgcttgcgattgaaaatttatcggtaggtttccgtcagcaacagcacgtgcgccctgtcgttaacgccatttcgttacaggtgaacgccggggaaacgctggcgctggtcggcgagtccgggtcaggaaaaagcgtgacggcgctttccattctgcgtcttttgcctacccctcccgccgtctacctctccggcgatattcgctttcacggcgaatcattgcttcatgccagcgagcagacgctacgcggcgtgcacggcaataaaatcgccatgatttttcaggaaccgatggtttcacttaacccgctgcatacgctggaaaaacagctctatgaagtgctgtcgctccatcggggaatgcgtcgggaggcggcaagagcggagatgatcggttgtctggatcgggtcggtatccgccaggcgagccagcgtctgcgcgattaccctcatcagctttccggcggcgaacgccagcgcgtcatgatagccatggcgctgttaacacggccggaattactgatcgccgatgagccgaccaccgccctcgacgtctccgtacaggcgcagattttatctctactgcgggaactccagcgcgagctcaatatgggattgctgtttatcacccataacctcagcattgtaaaaaaactggcggattcagtggcggtaatgcaacacggcaagtgcgtagagaaccaacgcgccgacacgctgctctccgcgccgccccatccgtacacgcaaaaactactcaacagcgaacccactggcgatccggttccgctccccgccgggcagacgccgttgctggaagtggacaggctgcgcgtcgccttcccgatccgcaaaggcattctgaagcgcgtcgtggatcataatgtggtggttaacaatatcagtttcaccctgcatccaggcgaaacgctgggtctggtcggcgagtcaggatcgggaaaaagcaccaccggtctggcgctgttacggcttatccgctccgaaggccgcatcgtatttgacggtcaatcgctggatacgttaaaccgccgccagcttttacctgttcgccaccgtatccaggtcgtattccaggacccgaactcatcgctaaacccgcgtttaaacgtgttgcaaattatcgaagaaggcctgcgcgtccaccagcctacgctttcaggcgcgcagcgcgaacagcaggtgaaagcggtcatgatggaagtcggcctggacccggaaacacggcatcgttaccccgctgagttttccggcggccagcgtcaacgtatcgccgtcgccagggcgctgattttaaaaccgtcgcttattattctggatgaaccgacctcatcgctggataaaaccgttcaggcgcagattcttgccctcctgaaatcgctccagcaaaagcaccgtctggcctatatcttcattagccacgatctgcatgtagtacgcacgctgtgccatcaggttatcgtgctgcggcagggggaggtggttgaacaggggcaatgcgagcgcgtgtttaccgcaccgcaacaggcctatacgcgtcagctactcgcgttaagctga

SEQ ID NO: 27411 - protein, 529 aa, Salmonella enterica subsp. enterica serovar Paratyphi A str. ATCC
MTSPLLAIENLSVGFRQQQHVRPVVNAISLQVNAGETLALVGESGSGKSVTALSILRLLPTPPAVYLSGDIRFHGESLLHASEQTLRGVHGNKIAMIFQEPMVSLNPLHTLEKQLYEVLSLHRGMRREAARAEMIGCLDRVGIRQASQRLRDYPHQLSGGERQRVMIAMALLTRPELLIADEPTTALDVSVQAQILSLLRELQRELNMGLLFITHNLSIVKKLADSVAVMQHGKCVENQRADTLLSAPPHPYTQKLLNSEPTGDPVPLPAGQTPLLEVDRLRVAFPIRKGILKRVVDHNVVVNNISFTLHPGETLGLVGESGSGKSTTGLALLRLIRSEGRIVFDGQSLDTLNRRQLLPVRHRIQVVFQDPNSSLNPRLNVLQIIEEGLRVHQPTLSGAQREQQVKAVMMEVGLDPETRHRYPAEFSGGQRQRIAVARALILKPSLIILDEPTSSLDKTVQAQILALLKSLQQKHRLAYIFISHDLHVVRTLCHQVIVLRQGEVVEQGQCERVFTAPQQAYTRQLLALS

SEQ ID NO: 27412 - DNA, 1572 bp, Salmonella enterica subsp. enterica serovar Paratyphi A str. ATCC
  CDS (1)..(1572): transl_table=11
atgcagttcggcagtaagccgctgttcgaaaacatttccgtcaaatttggcggcggcaaccgttacggcctgatcggcgccaacggtagcggaaagtccacttttatgaaaatcctcggcggcgacctggagccgacgctgggcaatgtttccctcgatccgaatgagcgcatcggtaagctgcgtcaggaccagttcgcttttgaaacattcaccgtacttgatactgtcattatggggcatggcgaactgtgggaagtcaagcaggagcgcgaccgtatctacgctttgccggaaatgagcgaagaagacggctataaagtcgccgatctggaagtaaaatacggcgagatggacggttattccgctgaggcgcgcgcgggcgaactgctgttgggggtgggcatcccgctggagcagcattacggtctgatgagtgaagtcgcgccaggctggaatttgcgtgtgctgctggcgcaggcgttattctctaatccggacatcctgttgctcgacgaaccgaccaacaacctggatattgatactatccgttggctggagcaggtgctgaacgagcgcgatagcacgatgatcatcatttcgcacgaccgtcacttcctgaacatggtttgtacgcatatggcggatctggattacggcgacttgcgcgtctatccgggtaactatgatgagtatatgacggcggcgacccaggcgcgtgaacgtctgttggccgataatgcgaagaaaaaagcgcaaattgccgagctgcaatcttttgttagccgttttagcgccaatgcctctaaatcgcgtcaggcaacgtcgcgcgcgcggcagattgataaaatcaagctggaagaggtgaaagcctccagtcgtcagaacccgttcatccgttttgagcaggataaaaaactgttccgtaacgctttggaagtggaagcgttgacgaaaggttttgataacggtccgctgtttaaaaatgtcaatttgctgctcgaagtcggcgagaagctggcagtactcggcaccaatggcgtgggtaaatctacgctgctgaagacgctggttggcgatctggacgccgatcatggcaccgttaaatggtcggaaaacgcgcgtattggttactacgcgcaggaccacgaatatgaattcgaaaatgacctgacggtgtttgaatggatgagtcagtggaagcaggaaggcgacgacgagcaggcagtgcgcagtattctgggccgcctgctatttagccaggatgatatcaaaaagcctgcgaaagtcctctccggtggcgagaagggccgtatgctgttcggcaaactgatgatgcaaaagccgaatatcctgatcatggacgaaccgactaaccacctggatatggagtcgatcgaatcgctgaatatggcgctggagctgtatcagggcacgctgatctttgtttcgcacgaccgtgagttcgtcagctcgctggcaacccgcgtcattgaaattacgccggagcgcgtggtggacttcagcggcaactacgacgattatttgcgtagtaaagggattgaaagctaa

SEQ ID NO: 27413 - protein, 523 aa, Salmonella enterica subsp. enterica serovar Paratyphi A str. ATCC
MQFGSKPLFENISVKFGGGNRYGLIGANGSGKSTFMKILGGDLEPTLGNVSLDPNERIGKLRQDQFAFETFTVLDTVIMGHGELWEVKQERDRIYALPEMSEEDGYKVADLEVKYGEMDGYSAEARAGELLLGVGIPLEQHYGLMSEVAPGWNLRVLLAQALFSNPDILLLDEPTNNLDIDTIRWLEQVLNERDSTMIIISHDRHFLNMVCTHMADLDYGDLRVYPGNYDEYMTAATQARERLLADNAKKKAQIAELQSFVSRFSANASKSRQATSRARQIDKIKLEEVKASSRQNPFIRFEQDKKLFRNALEVEALTKGFDNGPLFKNVNLLLEVGEKLAVLGTNGVGKSTLLKTLVGDLDADHGTVKWSENARIGYYAQDHEYEFENDLTVFEWMSQWKQEGDDEQAVRSILGRLLFSQDDIKKPAKVLSGGEKGRMLFGKLMMQKPNILIMDEPTNHLDMESIESLNMALELYQGTLIFVSHDREFVSSLATRVIEITPERVVDFSGNYDDYLRSKGIES

SEQ ID NO: 27414 - DNA, 1476 bp, Salmonella enterica subsp. enterica serovar Paratyphi A str. ATCC
  CDS (1)..(1476): transl_table=11
atgtcatcgttgcaaatttcgcaaggcacgtttcgtctgagcgatacaaaaacacttcatctggattcgctgacgctcaatgcgggcgatagctgggcattcgttggggctaacgggagcgggaagtcggcgctcgcccgcgcgctggcgggtgaactgccgttattaacaggcgagcgccagtgtcggtttacccgcattactcgtctgtcctttgaacaattgcaaaagctggtcagcgatgagtggcaacgtaataacaccgatatgctcagtcctggcgaagacgataccgggcgcactaccgcggaaattattcaggatgaagttcaccatcctgcccgctgtgcgatgctggcgcagcagttcggcatttccgctttactcgacaggcgttttaaatacctttctaccggcgagacgcgaaaagcgctgctgtgtcaggcgctgatgtctgagccggagttattgatccttgatgaaccgttcgacgggcttgacgtggccgcccgtcaccaactggcgcaacgcctgacggcgttgaaccaggcgggcattaccttggcgctggtactcaaccgttttgatgaaatcccggacttcgtgcagtttgccggcgtgcttgccaactgtacgctggcggagaccggaacgacggcagagttgctgcaacgggcgttggtcgctcaactcgcgcacagcgagcgtctggccgacgtacaattacccgaaccggacgaaccttccgcccgccatgcgttgcccgatggcgaaccacggatcgtacttaacgatggcgtagtctcgtataacgatcgccctatcctccaccacctaagctggcgagtaaatccaggcgaacactggcagatcgtcggtcctaacggggcgggtaagtctacgctgcttagccttattactggcgatcatccgcaaggctacagcaacgatctcacgctgttcgggcggcggcgaggaagcggcgaaacaatctgggatatcaaaaaacatatcggctacgtcagcagcagtttacatctggattaccgcgtcagtaccacggtgcgcaatgtcattctctccggctatttcgattctatcggcatttaccaggccgtttcagacaggcaacgaaaactggcgcaacagtggctggatattctgggaatcgataagcgtacggcggatgcccccttccacagtctctcctggggacagcagcggctagcgctgatcgtgcgcgcgctggttaagcatccgacagtgttgattctggatgagccgctgcaagggttggacccgctgaaccgccaactggtacgtcgttttgtggatgtattaattcgccagggagagactcaactgctgttcgtttcccatcatgcagaggatgcgcctacctgtattacccaccggctggaatttgtaccagagggcgaacgttataagtacgtttccggacgatgcaataattaa

SEQ ID NO: 27415 - protein, 491 aa, Salmonella enterica subsp. enterica serovar Paratyphi A str. ATCC
MSSLQISQGTFRLSDTKTLHLDSLTLNAGDSWAFVGANGSGKSALARALAGELPLLTGERQCRFTRITRLSFEQLQKLVSDEWQRNNTDMLSPGEDDTGRTTAEIIQDEVHHPARCAMLAQQFGISALLDRRFKYLSTGETRKALLCQALMSEPELLILDEPFDGLDVAARHQLAQRLTALNQAGITLALVLNRFDEIPDFVQFAGVLANCTLAETGTTAELLQRALVAQLAHSERLADVQLPEPDEPSARHALPDGEPRIVLNDGVVSYNDRPILHHLSWRVNPGEHWQIVGPNGAGKSTLLSLITGDHPQGYSNDLTLFGRRRGSGETIWDIKKHIGYVSSSLHLDYRVSTTVRNVILSGYFDSIGIYQAVSDRQRKLAQQWLDILGIDKRTADAPFHSLSWGQQRLALIVRALVKHPTVLILDEPLQGLDPLNRQLVRRFVDVLIRQGETQLLFVSHHAEDAPTCITHRLEFVPEGERYKYVSGRCNN

SEQ ID NO: 27416 - DNA, 1536 bp, Salmonella enterica subsp. enterica serovar Paratyphi A str. ATCC
  CDS (1)..(1536): transl_table=11
atgcaaatcagtcacaatactgcatcccctctgatttgtgtgcagaacatttataaaagttattccggcgtcgaagtactaaagggaattgactttactctgcatgcgggagaggtgcacgcattgcttggcggcaatggtgcgggtaaatcaacattaatgaagattattgccggtatagtcccgccagatggagggactatcgatattgctggtgtgcgttgcagtcatttaacgcctctgaaggcgcaccagtatggcatttacctggttccccaggagcctctgttatttccgagtttatctgtgcgggaaaatatcttgtttggcttacagggacgtcaggcctccacggaaaaaatgcagcagctattaaaggcgatgggatgccaactcgatccggcgagcgctgcgggtacgcttgatgttgcagaccgccagatcgttgaaattatgcgcggcttgatgcgcgactcgcgaatcttaattcttgatgagcctacggcgtcgttaacgccagccgaaactgaccggttatttacgcgtctgcaagagttgctgaaaaagggtgtcggaattgtatttatttctcataagctaccagaaattagacagttagctcactgcgttagcgtgatgcgtgacggtaaaatcgcattattcggaaaaacgcatgacctttctaccgacgagattattcaagctatcaccccggcaacgcagggcgtcagtctttccgcgaatcaaaagttgtggctggaattgcctggcagccgcccgcagaacgaacgcggcgcgacggtattagcgctggagtcactgacgggcgaaggttttatgaatatcaaccttgaggtgcgggcaggcgaaatccttggtctggccgggttagtcggcgcgggacgcacagaactggctgaaacgctgtacggtattagaccggtcaatgcggggaggatgctgttcaatggcgaagaaattaacgccctgacaacccaacagcggttgcagctcggcctggtctatttgccggaagatcggcagtcatccgggctgtatcttgacgcttccctggcatggaatgtctgttcgctgacccacaaccaaaaaggattttggataaagccccagcgggataacgccacccttgaacgttaccaccgcgcgttaaatatcaaactcaataatgccgaacaggcggcgcgtactttatccggcggtaaccagcaaaaagtattgattgccaaatgcctggaagcctctccgcaattactgattgtcgatgaaccgacccgcggtgtcgatgtctccgcccgcagcgacatttatcagctgttgcgcagtatcgcgcaacaaaatgtcgcagtgctgtttatttcctccgatctggaagagatagagcaaatggccgatcgcgtatatgtcatgcaccagggggaactgggggggcctgcattatgcggcgaggaaattaacgttgataccatcatgcacgttgcgtttggcgaacatggtgcgtcggaggcaacatgttga

SEQ ID NO: 27417 - protein, 511 aa, Salmonella enterica subsp. enterica serovar Paratyphi A str. ATCC
MQISHNTASPLICVQNIYKSYSGVEVLKGIDFTLHAGEVHALLGGNGAGKSTLMKIIAGIVPPDGGTIDIAGVRCSHLTPLKAHQYGIYLVPQEPLLFPSLSVRENILFGLQGRQASTEKMQQLLKAMGCQLDPASAAGTLDVADRQIVEIMRGLMRDSRILILDEPTASLTPAETDRLFTRLQELLKKGVGIVFISHKLPEIRQLAHCVSVMRDGKIALFGKTHDLSTDEIIQAITPATQGVSLSANQKLWLELPGSRPQNERGATVLALESLTGEGFMNINLEVRAGEILGLAGLVGAGRTELAETLYGIRPVNAGRMLFNGEEINALTTQQRLQLGLVYLPEDRQSSGLYLDASLAWNVCSLTHNQKGFWIKPQRDNATLERYHRALNIKLNNAEQAARTLSGGNQQKVLIAKCLEASPQLLIVDEPTRGVDVSARSDIYQLLRSIAQQNVAVLFISSDLEEIEQMADRVYVMHQGELGGPALCGEEINVDTIMHVAFGEHGASEATC

SEQ ID NO: 27418 - DNA, 1614 bp, Idiomarina loihiensis L2TR
  CDS (1)..(1614): transl_table=11
atgatcctggatgttgactacgtgatttctgctgcaaatatcaccatgcaatttggtgcaaagcctctttttgaaaatatttctgttaaattcggcaatggtaaccgttatggcctgataggcgctaatggctgcggtaagtcgacctttatgcgtatattaagtggtgagcaggagccttcggctggcaatgtgtcgctggaacccaatattcgcatcggtaagttgcgtcaggatcaatttgcttacgaagactacagtgtcgttgatgccgttattatgggccacgaagagctgtgggcggtaaaagaagaacgggaccgcatttacagcagcggcgaaatgagcgaagaagacggcatgcgtgtggccgatctggaaaccgaatttgctgaaatggacggttatactgcggagtcacgcgccggtgagttattgctggggctgggcataccggtagagcagcactttggactgatgtcggcgctggcgccgggtgtaaaaattcgggtgttactggcgcaggtactgttttccgagccggatattatgttgctggacgagccgaccaacaacctcgatattaacactattcgctggctggaaggcgtattagccgaaaagcaaagtaccatgattattatttcgcacgaccgtcactttctgaacacggtttgtacgcatatggccgatattgactatggcgagctgcgcgtctacccgggtaactatgacgaatacatgtttgccgccactcaggcgcgcgagcagttaatgagcgataacgccaagaaaaaagagaaaattgccgagctgcagagctttgttagccgcttctcagcgaacgcgtcaaaagctaaacaggcaacgtcgcgtcagaaacaaatggagaaaattcagctggacgaggttaaagcctccagtcgtgttaatccgtacattcgttttactcaggaaaagaaactctaccggttagcgcttgaaaccgagaacgtgcgtaagagcttcgaagacgaagcggtcttaaaaggcttgagtacctcgatagaagtgggtgaaaaagtcgctattattggtgccaacggtattggtaaaacgaccttgctgaaatgtttgatgggcgagtacacgccggactcaggcagcatcaaatggtctgaaaatgcggcgataggttactacgcgcaggatcacgcccactggtttaaacaggatatgaccgtttacgagtggatgtatcagtggaaaaaaccgggtgacgacgagcaggctattcggggtgtgttgggccgtatgctgttctcttctgatgacattcaaaagccggtatcgattttgtctggtggtgaaaaaggccggatgattttcggtaaactgattttgcagcgcccgaatattctggtgatggacgaaccgactaaccatttggatatggaatcgatagagtcgctgaacctggcactggagcagtttgaaggcactttgttgtttgtcagccatgaccgcgagttcgtctcgactctggctactcgtattatcgaaattaccgacaaaggcttacgtgactttgccggcagttacgatgaatatctggcgcagttggctgcggcttaa

SEQ ID NO: 27419 - protein, 537 aa, Idiomarina loihiensis L2TR
MILDVDYVISAANITMQFGAKPLFENISVKFGNGNRYGLIGANGCGKSTFMRILSGEQEPSAGNVSLEPNIRIGKLRQDQFAYEDYSVVDAVIMGHEELWAVKEERDRIYSSGEMSEEDGMRVADLETEFAEMDGYTAESRAGELLLGLGIPVEQHFGLMSALAPGVKIRVLLAQVLFSEPDIMLLDEPTNNLDINTIRWLEGVLAEKQSTMIIISHDRHFLNTVCTHMADIDYGELRVYPGNYDEYMFAATQAREQLMSDNAKKKEKIAELQSFVSRFSANASKAKQATSRQKQMEKIQLDEVKASSRVNPYIRFTQEKKLYRLALETENVRKSFEDEAVLKGLSTSIEVGEKVAIIGANGIGKTTLLKCLMGEYTPDSGSIKWSENAAIGYYAQDHAHWFKQDMTVYEWMYQWKKPGDDEQAIRGVLGRMLFSSDDIQKPVSILSGGEKGRMIFGKLILQRPNILVMDEPTNHLDMESIESLNLALEQFEGTLLFVSHDREFVSTLATRIIEITDKGLRDFAGSYDEYLAQLAAA

SEQ ID NO: 27420 - DNA, 2919 bp, Azoarcus sp. EbN1
  CDS (1)..(2919): transl_table=11
gtgagccaagcgctcggcgacgcagccccgagcgctgcgccgcgccccacctcgcggacgaccccgactgcgcccacgcaggcgaacgcgtcggcgccgccggtggtgcgcttgatcgacgtccgccaccggtacggcgacacgcttgcggccgacggcatcacgctccaccttccggccgggcgaatgatcggcttcatcgggccggacggcgtgggcaagtccaccttgctgagcctgatcgccggcgcgcgcaggatccagcacggcacggtggaagtgctcggcggcgacatcgccgatgcacgccaccgcacacgggtgtgccctcgcatcgcctacatgccgcaggggctgggcaagaacctctatcccacgctatcggtgttcgagaacatcgacttcttcggccgcctgttcggccagtcgcgcaccgagcgcgcacgccgcatcgccgaactgctcgccgccaccggcatgtcggccttcgccaaccgcccggccaacaagctctccggcggcatgaagcagaagctcggcctgtgctgcgcgctgatccacgaccccgatctgctgatcctcgacgagcccaccaccggcgttgatccgctgtcgcgccgccagttctgggaactcatcgcgcgcatccgcgcaggccgccccggcatgagcgtgctgatcgccactgcatatatggaagaggccgaaggctacgactggctggtggcggtggacgccggccgcgtgctcgccaccggcacgcccgacgaattgcgtaccgccggcggcgccgacaccctggaagaagccttcatcgcgctgctgcccaagacccgccgccaggaccaccgtcggctcgagatcccgccacacactgcaggcgagatcgtgatcgaggcgcgtgcactgcagatgcgcttcggcgacttcgtcgcggtcgatgatgtcaatctcgcggtgcggcgcggcgagatcttcggcttcctcggctccaacggctgcggcaagtcgaccacgatgaagatgctcaccggcctgctcgagcccagtgcgggtgaggccctgctgctcggcggtaaactggacgcgaagaacctggaaacccgccgtcgcgtgggttacatgtcgcaggccttctcgctgtatggcgaattgtccgtgcggcagaacctcgacctgcacgcccgcctgttcgacctcgccgacgacgaggccgagtcccgcatcggcgagctcgcccgccgcttcgacctcgacccggtgatgaacgtgccgccggacgcgctgccgctcggcatccgccagcgcctgcaactcgcggtggcggtgctgcaccgaccggatgtgctgatcctcgacgaacctacctcgggcgtcgacccggtggcgcgcgatcatttctgggaactgatcgtcgacctgtcgcgcaacgacggcgtgaccatcttcatcaccacccatttcatgaacgaggcgcagcgctgcgaccgcatctcgctgatgcacgccggtcgcatcctcgccagcgacaccccggcggcgctcgtcgaacgccgtggcaccgccagcctggaggacgcgtttgtcgcttggctgcaggacgcgatcgacggcgaaccgccgtctcgggcaacgcccgacccccacgccacgctgccgcaagcaacgctgccgcccgcgaccgtcccgcaagccggggctgccaccgtatccgtgcccgcacccgtaccggccgcaccgcatccgacgccagactcagcccaagcctcatcctcaaccagcaaacgccacgccggcttcagccttgcccgcctgctcagcctgtcggcgcgcgaagcgaccgagttgcgccgcgacccggtgcggctcacgctcgcactggtcggcacgctggtgctgatgctggtcatgggctacggcatcaacatggacgtggagaacctcagcttcgcggtgctcgaccacgaccgcagcgtggccagccagcgctacacgctgcgcatcgccggctcgcgctacttcaccgaacgccccgcactcgacagccatgtcgacctcgaccagcgcatgcgcagcggccggctgacgatggcgatcgaggtcccgcccggcttcggccgcgacctcgcgcgcggcaaggcgccacagatcgcagtgtggctcgacggctcgatgccgctgcgcgccgaactcgcacgcgcctacgtgagcggcgtgcatgggcagacgctcgccgacgcggtcgccgaatcgggcgcgagcgcctctgccgcgcccgccactatcgaagtgcgctaccgctacaaccccgaattgcgcagcctggtgtcgatggtgccgatggtgatcccgctgctgctggtgttcatcccggcgatgctgaccgcgctcggcgtagtgcgcgagaaggagctcggctccatcctcaacctctacaccaccccggtgacccgcttcgaattcctcgtcggcaagcagttgccctacatcgggctgtcgctgttcaacttcgtgctgctcttcatcttcgcggtcacgctattccaggtgccattcaagggcagcttcctcgccctggcctgcggcgccctgctctacgtcaccgccaccaccggactgggcctgctcgcttcgacgatgaccagcagccaggtggccgcgctcgccggcacctcgatcggcaccttgctgccggcgatccagttctccgggctgatggacccggtgtcctcgctcgagggcggcggcgcgctgatcggcgcgatctacccgaccacgcacttcctcaccatctcgagcggcaccttctccaaggcgctcggcttcgccgacctcggcggctcgttcctgccgctggcgacggcgatcccggtgctgaccctgctgtcggtcctgctgctgaaaaagcaggcccgatga

SEQ ID NO: 27421 - protein, 972 aa, Azoarcus sp. EbN1
MSQALGDAAPSAAPRPTSRTTPTAPTQANASAPPVVRLIDVRHRYGDTLAADGITLHLPAGRMIGFIGPDGVGKSTLLSLIAGARRIQHGTVEVLGGDIADARHRTRVCPRIAYMPQGLGKNLYPTLSVFENIDFFGRLFGQSRTERARRIAELLAATGMSAFANRPANKLSGGMKQKLGLCCALIHDPDLLILDEPTTGVDPLSRRQFWELIARIRAGRPGMSVLIATAYMEEAEGYDWLVAVDAGRVLATGTPDELRTAGGADTLEEAFIALLPKTRRQDHRRLEIPPHTAGEIVIEARALQMRFGDFVAVDDVNLAVRRGEIFGFLGSNGCGKSTTMKMLTGLLEPSAGEALLLGGKLDAKNLETRRRVGYMSQAFSLYGELSVRQNLDLHARLFDLADDEAESRIGELARRFDLDPVMNVPPDALPLGIRQRLQLAVAVLHRPDVLILDEPTSGVDPVARDHFWELIVDLSRNDGVTIFITTHFMNEAQRCDRISLMHAGRILASDTPAALVERRGTASLEDAFVAWLQDAIDGEPPSRATPDPHATLPQATLPPATVPQAGAATVSVPAPVPAAPHPTPDSAQASSSTSKRHAGFSLARLLSLSAREATELRRDPVRLTLALVGTLVLMLVMGYGINMDVENLSFAVLDHDRSVASQRYTLRIAGSRYFTERPALDSHVDLDQRMRSGRLTMAIEVPPGFGRDLARGKAPQIAVWLDGSMPLRAELARAYVSGVHGQTLADAVAESGASASAAPATIEVRYRYNPELRSLVSMVPMVIPLLLVFIPAMLTALGVVREKELGSILNLYTTPVTRFEFLVGKQLPYIGLSLFNFVLLFIFAVTLFQVPFKGSFLALACGALLYVTATTGLGLLASTMTSSQVAALAGTSIGTLLPAIQFSGLMDPVSSLEGGGALIGAIYPTTHFLTISSGTFSKALGFADLGGSFLPLATAIPVLTLLSVLLLKKQAR

SEQ ID NO: 27422 - DNA, 2829 bp, Zymomonas mobilis subsp. mobilis ZM4
  CDS (1)..(2829): transl_table=11
atgttcggacagagccttcggcacaatggccaagcctcaagtcggatcggggatgatacaatggcaaaaaattttgccgcttccgatttcgccgtttctatccagaatctgactcatcattatggcgataacgaagccttgcatcagattgatctggatctgccagccggtcaaactatcggcttggtcgggcccgatggcgtaggcaaatcgacactgcttggtattatttcgggggtaaaacgccttcaatccggcaaagtcaccacacttgatgcggatataggacaaaaaaaacaacgcgaagccgttctgcctcgggttgctttcatgccgcaaggtttggggcataacctctatccgactttgtcagtacaggaaaatatcgactttttcgcaagactgttcggtctcgatgccgaatatcggaaaacccgtattgcccagcttttggaagcgaccagcctcgcccctttttttgatcgtccggccggaaaattatccggtggtatgaagcaaaaggtcagcctctgctgcgctcttgtccataatcccgatttgcttattctcgacgaaccgaccaccggcgtggatcctctgtcgcggcaacaattctgggaattggtcgatgccttacaagccggtaatccctcgatgacggtaattgtctccactgcctatatggaggaggcggctcgtttttcatggctggttgctatggatgacgggaaagttttggcaaatggcaaaacgatagatattctaaaacaaaccggccaagatacggttgaaaaagcctatatttctcttctgccagaagaaaaacgtacccaagccagcggtttttcaattcctccctatcaaaataccgatccaaaacccgctatcgaggctaataacctcacttgtcgctttggctcttttacagcggtagataatgtcagctttcgtattggtcgaggcgagattttcggctttctcggctccaatggctgcggcaaatcgacaacgatgaaaatgctgacgggtctgctggacgcgaccagcggtacggccaaattattcggcaagccagtctctgcgggggatctcaatacacgtatgcggattggctatatgtcacaggccttttcgctttatgaagaattgacggtcaaacaaaatctggtgctgcaatcgcgcctttatcgggcaactgaaaaagaaaccgaacagcgtgttgatgatgcgctggataattttgaattacgcccctttgccgatatcagtccggctgatctccctttgggtatccggcaacgtttgcagcttgccgctgcttgtatcaatacccctgatattctcattcttgacgaaccgacctcgggcgttgatccggccgcgcgagatatgttctggcatcatctgatcgatctttcccgtaacaagcatgtaaccattttcgtctcaacccatttcatgaatgaagcggcctgttgtgaccgtatttccctgatgcatcgcggccatgtgctggcggttggcacaccagatgaattgatgaaaaagcggggagaaaaatcactcgaagccgcgtttatcgactatctccaagaccaaatgtcacaagacaaagataaccgtgacaaccagacctcttcctcgaatgtctctcttgagaatatttcggataataaaaaaaaggcgacgccctcgcctctctggcattggttgtcttatgtctgggcttttgcaaggcgcgaaagccttgaactattaagggataaattacgcctgacctttgcagttgcagggcccattatcctgcttttggtctcggcctatagtatttcctttgacatcaataaaatcagcttcaccgtctgcgaccaagatcaaagcaacgaaagccgcagcttggtcaaaaccttccaaggctcatcctatttcacagaaaaagcggcctcttccagcatcgctgaaatgaacaaacgccttagtgatgggacagcacagatgacgcttgatattcctgccggtttcggtcgggatatcgaggccggtcgccatccctctctcggtatcgggatcagcggtgcgatgccttttcttggggcaaatattcaatcctatgccacgaatgccctgttacaatatgcccaattatcggcacagggattaacgcataatgcgccttcttcgctgcctttttcgattgaaccccgctttgtctataatcaagaatttctcagcatttatacgatggtgccagataccatcatgctggccttaattctaatcccgaccatgctgacggcgcttggcgtcgttcgggaaaaagaaattggttcaattatcaatctctatgcctctccggcttcaactcgacaatatcttatcgggaaacagcttccctatgttgctattgcgatgctggcctatctctcgctggtggtgctgtcagtcacgattttaggcgttcctttgaaagggtcttttttagcactttccctaggcgcattgctctataatcttgctgcaaccggcctcggccttttgatctcgacttttgtcagctcccaagtcgcagcgattttcggaacggccattttgtgcctcattccggcagtcaatttttcggggctgctataccctgtttcaacattaacgggcatttcctatcatgttggacgctgttttccggcatcatggttccagctaatcagtcttggcagttttaccaagggtcttggttttacggcctttttgacgatgtatggggctttaacgggatttgcccttctctatctcgcccttgcctgcgtcctccttcggaaacaggagctataa

SEQ ID NO: 27423 - protein, 942 aa, Zymomonas mobilis subsp. mobilis ZM4
MFGQSLRHNGQASSRIGDDTMAKNFAASDFAVSIQNLTHHYGDNEALHQIDLDLPAGQTIGLVGPDGVGKSTLLGIISGVKRLQSGKVTTLDADIGQKKQREAVLPRVAFMPQGLGHNLYPTLSVQENIDFFARLFGLDAEYRKTRIAQLLEATSLAPFFDRPAGKLSGGMKQKVSLCCALVHNPDLLILDEPTTGVDPLSRQQFWELVDALQAGNPSMTVIVSTAYMEEAARFSWLVAMDDGKVLANGKTIDILKQTGQDTVEKAYISLLPEEKRTQASGFSIPPYQNTDPKPAIEANNLTCRFGSFTAVDNVSFRIGRGEIFGFLGSNGCGKSTTMKMLTGLLDATSGTAKLFGKPVSAGDLNTRMRIGYMSQAFSLYEELTVKQNLVLQSRLYRATEKETEQRVDDALDNFELRPFADISPADLPLGIRQRLQLAAACINTPDILILDEPTSGVDPAARDMFWHHLIDLSRNKHVTIFVSTHFMNEAACCDRISLMHRGHVLAVGTPDELMKKRGEKSLEAAFIDYLQDQMSQDKDNRDNQTSSSNVSLENISDNKKKATPSPLWHWLSYVWAFARRESLELLRDKLRLTFAVAGPIILLLVSAYSISFDINKISFTVCDQDQSNESRSLVKTFQGSSYFTEKAASSSIAEMNKRLSDGTAQMTLDIPAGFGRDIEAGRHPSLGIGISGAMPFLGANIQSYATNALLQYAQLSAQGLTHNAPSSLPFSIEPRFVYNQEFLSIYTMVPDTIMLALILIPTMLTALGVVREKEIGSIINLYASPASTRQYLIGKQLPYVAIAMLAYLSLVVLSVTILGVPLKGSFLALSLGALLYNLAATGLGLLISTFVSSQVAAIFGTAILCLIPAVNFSGLLYPVSTLTGISYHVGRCFPASWFQLISLGSFTKGLGFTAFLTMYGALTGFALLYLALACVLLRKQEL

SEQ ID NO: 27424 - DNA, 1593 bp, Zymomonas mobilis subsp. mobilis ZM4
  CDS (1)..(1593): transl_table=11
atgacatttttggcgatcgaaaatctgacggtcaaagcaaaagaccgctatttgctacaggatataggattccgtatcggacggggtgaaattgttgctgtccttggtgaatccggttcggggaaatccacccttgctcgcagtatcttgcggcttttgcctgaaaatctgattttatctggcgcgctccgcgttggaaaaaccgatctaatgcagcttcctgaaaaacagatgaatgactggcgtggccaaaaaatagcttttatcggtcaggattctttacgttttctagacccgatgatgactatcgcccaacatatccgcgaaggcctcaaggaaaaatcgacagaaaataaacagccctctgccatgaccaatgccttggaacaggtgggactttctcccgatatcgcaaaacgctatccgcatcagctttccggcggacaaagacaaagggcagccattgccatagccttggcggccaaaccggctttgttaatcgcggatgagcccagttctgcacttgatatgctgactgaagcgcaaatcatggcgatttttgaaaaagccacggaaaaccgtcaaacggctattttacttatcagccataatcctgccttggcggtcagaatggcagaacgcatcgtggttttaaaagacggtcgccttgtctcgaaaatggccagccgccgttggtggtcaaatccggcagaggcgtatagtcaagcgatcatccaatcttatcatcagattttatctagcacgccctatggaaaggatgcccccaaacaatcccaaaatcacccgcccataatggataatccgcgccccttattaagactgcaaaatctttcctatcaggaaaaagacgatcatcgcctaaaggatatctcactcgaaatctataaaggcgaaaggattgccatcatcggggaatctggtgccggaaaatcaaccctactcaaattgatatccggcctgctgccagcatcatccggtgaaattttttgggaaaatcagcctctttcttttcaaaagaaacaagatcgcctcgctttttatcaaaaagcacaaatggttttccaagacccgaacagtagccttgatccggcttggacagttgaaaaaaccgtcaccgagccccttgcgctttatcagaagaaaatatcctcggaatatcggcagcaagccttgcaatcagccctgaacaaggcggccttatccctcgatcttcggcatcgttatccggcaacgctttccggcggccaaggtcaaagggtggcgatagcgcgcgccttagtgaacaatcctgatttactgttgctggatgaagccttctcggctctggatagtgtcaatcgggttgaaatcggaaaagaactgatgacgctctctgaacaagaaaaaatgacttgtttactggtaacgcatgaccttgcttttgcccgtttttttgcaaccagagtggtgattctccaccatggtcatgttatagaagagaataatacatattctattttcaccaagcctaatcacccctatacacaaaggctgatcgaaatatggcggaaaaattataatctccaagcctga

SEQ ID NO: 27425 - protein, 530 aa, Zymomonas mobilis subsp. mobilis ZM4
MTFLAIENLTVKAKDRYLLQDIGFRIGRGEIVAVLGESGSGKSTLARSILRLLPENLILSGALRVGKTDLMQLPEKQMNDWRGQKIAFIGQDSLRFLDPMMTIAQHIREGLKEKSTENKQPSAMTNALEQVGLSPDIAKRYPHQLSGGQRQRAAIAIALAAKPALLIADEPSSALDMLTEAQIMAIFEKATENRQTAILLISHNPALAVRMAERIVVLKDGRLVSKMASRRWWSNPAEAYSQAIIQSYHQILSSTPYGKDAPKQSQNHPPIMDNPRPLLRLQNLSYQEKDDHRLKDISLEIYKGERIAIIGESGAGKSTLLKLISGLLPASSGEIFWENQPLSFQKKQDRLAFYQKAQMVFQDPNSSLDPAWTVEKTVTEPLALYQKKISSEYRQQALQSALNKAALSLDLRHRYPATLSGGQGQRVAIARALVNNPDLLLLDEAFSALDSVNRVEIGKELMTLSEQEKMTCLLVTHDLAFARFFATRVVILHHGHVIEENNTYSIFTKPNHPYTQRLIEIWRKNYNLQA

SEQ ID NO: 27426 - DNA, 1599 bp, Silicibacter pomeroyi DSS-3
  CDS (1)..(1599): transl_table=11
atgagcctgttgcagatcaccgacctgtcgctgtcgatccatgcctatgacatcctcaagcgcgtctcactgaccatcgacgcgggcgagatcgtggccgtcaccggcgagagcggctcgggcaagtcgatgacggcgctggccgtgatgcagctgttgcccggcggagcgcgagccagcggctcgatccggctggacggacaagagattctgaccctgcccgaggcagaaatgtgcgccctgcgcggcgcggcggtcgggatggtgtttcaggaaccgatgaccgcactgaacccggtcaagaccatcggcgatcaggtgatggaaacgatcctgatccacaaagcgatgacgcccatcagggcggaagagcgcgcgcgcgaagtgctgacccgtgtcggcctgccgcctgaccggttcccgctttcgcgctatccgcatgaactcagcggcggccagcgccagcgcgtggtcatcgccatggccatcgcactgcgcccgaaactgctgatcgcggacgagccgacaaccgcgctcgacgtcaccacgcaggcgcagatcctcgacctgctcaaggggctggtgcaggaatacggcatgggcatgctgatgatcacccatgacctggccgttgttgccgacatggccgaccatatcaccgtcatgcgccatggcgaggtggtcgaggccgccccgacccagcgcctgctgaccggtatgagtcatccctatacgaagatgctgttcgccgcctcggatcaccgcgtgaccctgcccgcgccaccgccaccggcaccgctgctggaggtgtcggaggtggtgcgcgactatgccctgccgcgcacccggctgtttgcgcacccggggcatcaccgcgccgtggatcatgtcagctttgccctgaaccggggcgagcggctggggctggtcggcgaatccggctgtggcaaatccaccctgacacgcgccatcctggggctggagccggtacagggcggcgaaatccgtctggcggggcaaccggtctatgacggcaaacgcgccaatcccgaaatccgccgccgcatgcaggtggtgtttcaggatccttacggcagcttcaacccgcgccaccgtgtcgaccggctggtgaccgaaccgtttcatctgctcgatgcgccgccaaccgggtcggaccgcagcgaccgcattgccgagatgctgaccgccgtcggcctgtcgcccgacgatgcgggaaagtatatccacgagttttccggcggtcagcgccagcgcatcgccattgcccgtgcgctgatcatccggcctcagctgatcctgttcgacgaggcggtctcggcgcttgatgtctcggtccgggcgcagatccttgacctgctggcgcagctctgctccgaatatgacctgacctatctgttcatcagccatgatctgagcgtggtgcgcacgatcaccgaccgggtgctggtgatgcaatcgggccgcattgtcgaacagggcgagaccgcacaggtcttctcggaccccgcgcatccctatacccgggccctgatcgccgccgcgccgcgtctgcccgaaaccggggcgcggcgggcatga

SEQ ID NO: 27427 - protein, 532 aa, Silicibacter pomeroyi DSS-3
MSLLQITDLSLSIHAYDILKRVSLTIDAGEIVAVTGESGSGKSMTALAVMQLLPGGARASGSIRLDGQEILTLPEAEMCALRGAAVGMVFQEPMTALNPVKTIGDQVMETILIHKAMTPIRAEERAREVLTRVGLPPDRFPLSRYPHELSGGQRQRVVIAMAIALRPKLLIADEPTTALDVTTQAQILDLLKGLVQEYGMGMLMITHDLAVVADMADHITVMRHGEVVEAAPTQRLLTGMSHPYTKMLFAASDHRVTLPAPPPPAPLLEVSEVVRDYALPRTRLFAHPGHHRAVDHVSFALNRGERLGLVGESGCGKSTLTRAILGLEPVQGGEIRLAGQPVYDGKRANPEIRRRMQVVFQDPYGSFNPRHRVDRLVTEPFHLLDAPPTGSDRSDRIAEMLTAVGLSPDDAGKYIHEFSGGQRQRIAIARALIIRPQLILFDEAVSALDVSVRAQILDLLAQLCSEYDLTYLFISHDLSVVRTITDRVLVMQSGRIVEQGETAQVFSDPAHPYTRALIAAAPRLPETGARRA

SEQ ID NO: 27428 - DNA, 2727 bp, Silicibacter pomeroyi DSS-3
  CDS (1)..(2727): transl_table=11
atgacgcccgcacctgtcgccagcctgtctgcggttacccaccgctatggctccacgttggccctgtccgacgtcacgctggatatcccggcgggctgcatggcagggctgatcggcccagacggggtcgggaaatccaccttgctggcgttgatcgccggcgtgcgcaaactgcaagccggcggcgcgatcgtgctgggcggcgatatcaccgaccgccaccacctcagggcgtgcaaccatcgcatcgcctacatgccgcagggtcttggccggaacctttacccgacgctctcggtctatgaaaacctggactttttcggcagactctttggccagtcggaagccgaacgccgcgcccgcatcaacaatcttctgaccgccaccgggcttgatccgttcccggaccggcccgcaggcaagctgtccggcgggatgaagcagaaactctcgctctgctcggcactgatccacgatccagacctggtgatccttgacgaaccgaccactggggtcgatccgctgtcacgccagcagttctgggatctgatcgaccatatccgcgaagaacgcccggcgatgagcgtaatcgtggccaccgcatacatggaagaggcggagcgctttgactggcttgccgcgatgaatgcgggacaggtgatctcgacgggatcgccgatcgagatccggaacgctgccgggcaaccgacactggaaaaggccttcattgccatgctgcccgaggcggaccggcaaggccaccgcatagacgaagtaccaccgcgcagacctgtcatcggcccacctgccatcgaggcgaaaggcctgacctgccgtttcggcgatttcatcgcggtcgatcatgtcgaattccagatcgagccgggcgagatcttcggattcctcggctcgaacggctgcggcaagaccaccaccatgaagatgctgaccgggctacagaaggccagcgaaggcaaggcgcttctgttcggagaggcgctgaatccggacgacatggcgacccgacggcaggtcggctacatgtcgcagtccttttccctctatggtgaattgaccgtccgccagaaccttgagcttcatgcgcggctctaccagttgccgatcgagacccgcgcagagcgggtcgcacagatgctgcatgatttcgatctggccgaggaggcggacaaacggccggacggcctgccgctgggcatccgtcaacgtctgcaacttgccgtcgcggtgatccactccccggaggttctgatcctggacgagccgacctcgggcgtcgatccagtcgcacgggacgggttctggcgacacctgatcaagctgtcgcgcgacgacggcgtgacgatcttcgtctcgacccatttcatgaacgaagcggcgcgatgcgaccgcatctcattgatgcacgcgggaaaggttttggcggtgggaacgcccgaagacctggcgcgaagcaaagatacggatgacctcgaagaagcatttgtcggatatctgcgcgaggcggcaggcaataccgatggcagggcgtccgagacacctgcggcaaaattgccggacaggctggaaaaacctgatcgcctcttcgatttggcccggctttgggcctttgcgcgccgcgagtcgatcgagatattgcgggacccgatgcgccttgcctttgcgtttctgggtccggtcatcttgatgctcactttcggttatggaatttcattcgatgtgcaggaactgccctatgcggttctcgatcgtgacaagagcgcagaaagccggaacctcatgcagagcttctccggctcgcgctacttcgttgaaaggccggctgcgggcagtgtgaccgagcttgatattcgcatgagaagctccgaacttgtcatcgctgtcgaggtgccgccggggtttggaaaatccctgctgcgcggtgatcaaccagaagtccgcgttgccgttgacggagctatgccattccgggcggaaacgacacgcggctatctgcaggggctcgcggcatcctacatgtccgatcagactgaacggctttatggccatgccttcgacccgtcggcagcctcggttgaaacccggtttcgctacaatcaggcgttcaagagcgtctttgcgctgatcccttcggttatcatgctgatgctggttctgatccccgcaatgatggcggcgatgggggtcgtgcgggaaaaggaaaccggttcgatcgccaatttccgctcgacgccggtgacgcgaaccgagttcattctgggcaagcagctgccgtatgtcgcgattgccatgctcagctttgcctcgctgatcatcgtttcctatggcgtcttcggtgtattgatcaaaggctctgtcctagcgctccttgtcggcacattgctttacgtgctggcgacaacgggctttggtgtgttggtctcgacatttacccgcacgcaggttgcggcaacctttgccgccgcggtaatttcgatcattccggctgtcaacttctcgggccttctggtgccggtgtcctcgctttcgggtggcggccgtctgatcggtctgtccttcccatcgtcctggtatcagcagatcagtatgggcaccttcaccaaaggcctcggattccccgaactctggctcaaccacgtcgctctggcgggctttgcggccttgttcattgcggtgtcggtccttgccttgaacaagcaggagacatga

SEQ ID NO: 27429 - protein, 908 aa, Silicibacter pomeroyi DSS-3
MTPAPVASLSAVTHRYGSTLALSDVTLDIPAGCMAGLIGPDGVGKSTLLALIAGVRKLQAGGAIVLGGDITDRHHLRACNHRIAYMPQGLGRNLYPTLSVYENLDFFGRLFGQSEAERRARINNLLTATGLDPFPDRPAGKLSGGMKQKLSLCSALIHDPDLVILDEPTTGVDPLSRQQFWDLIDHIREERPAMSVIVATAYMEEAERFDWLAAMNAGQVISTGSPIEIRNAAGQPTLEKAFIAMLPEADRQGHRIDEVPPRRPVIGPPAIEAKGLTCRFGDFIAVDHVEFQIEPGEIFGFLGSNGCGKTTTMKMLTGLQKASEGKALLFGEALNPDDMATRRQVGYMSQSFSLYGELTVRQNLELHARLYQLPIETRAERVAQMLHDFDLAEEADKRPDGLPLGIRQRLQLAVAVIHSPEVLILDEPTSGVDPVARDGFWRHLIKLSRDDGVTIFVSTHFMNEAARCDRISLMHAGKVLAVGTPEDLARSKDTDDLEEAFVGYLREAAGNTDGRASETPAAKLPDRLEKPDRLFDLARLWAFARRESIEILRDPMRLAFAFLGPVILMLTFGYGISFDVQELPYAVLDRDKSAESRNLMQSFSGSRYFVERPAAGSVTELDIRMRSSELVIAVEVPPGFGKSLLRGDQPEVRVAVDGAMPFRAETTRGYLQGLAASYMSDQTERLYGHAFDPSAASVETRFRYNQAFKSVFALIPSVIMLMLVLIPAMMAAMGVVREKETGSIANFRSTPVTRTEFILGKQLPYVAIAMLSFASLIIVSYGVFGVLIKGSVLALLVGTLLYVLATTGFGVLVSTFTRTQVAATFAAAVISIIPAVNFSGLLVPVSSLSGGGRLIGLSFPSSWYQQISMGTFTKGLGFPELWLNHVALAGFAALFIAVSVLALNKQET

SEQ ID NO: 27430 - DNA, 1665 bp, Synechococcus elongatus PCC 6301
  CDS (1)..(1665): transl_table=11
atggctgatccgctcctagaaattcggcaattgcaaatctgctttggagaggcgatcgctctgcaaggattggatctggtggttcagcctggggaatctgtcggaattgttggcgaatcggggtctggtaaatcggttgcttgcttggccattccgggcttgttgcccaagacggcccgctgcagtggtcagattgcctttcgatcggtagcgggacaatccagtcgagatctcttgacgctaccagaacgcgagttgcgacagttgcggggcgatcgcctcggcttcatttttcaggagccgcttagctctctcaatccagtttttagcgccggttttcagctgctagaggccatccaacagcatttgcctttgagtcaggcggaagcccaacagcgagtgatcgcgctccttcaggaagttcagctgattcgcgagccgtctcaggctgcccagattctgcgacgctatccgcaccaactatctggcgggcagcgtcaacgcttgatgattgcgatcgccctagcggccaatcccgacctcttgctggcagatgaaccgacgacagctctggatgccacggtgcaagcctcagtgctgcaactgttgcgccgcctgcagcagcaacggcagatggcgatgatttttgtcagtcatgaccttggggtgattgccgaagtcgccgatcgcgtcgtggtgctctatcgcggccaggtcgttgagcaaggtcgagtggccgacgtcctgaattcccctcagcatccttacactcaggggctggtggcttgccgaccgcagatcaatccccgcagttgctatctccccaccgttgctgattttctggaaggccaaaccgaaccgcgatcgctgccaccccgatcgccagccacccagccgctgttgcaggtcgagcagcttggcattacctatcgtggtcgtagtacggcttttcaggcggtgcaaaacctttcctttaccctgcccgccggtttgaccctaggactcgtgggcgagtcgggctgtggcaaaagtagcttggctcgctgtctcgtcgggttagttcctgcgagtgaggggcaaatttggctcgatcaacagccgcttgatctgcgatcgtcgcgcgatcgccagcgacttcgccagacggtacaaatggtctttcaagatccggcggcagcccttgatccacgctggaccgtgggatccgcgattctagaacccttgcggatcaaacaaccgcgccgcgatcgcaccgctgatcaacgcctgcttaaacaatggttgcaacgggtcgatctgccgacagatatcggcgatcgctacccccacgagttttccggtggccagcggcagcgcatctgtattgcccgcgccctgattggtcagccgcgcttgctaatttgtgatgaatcggtttcagcgctagatgtctcggtgcaggcgcaaattctcaacttgctcaagcaactgcaggcggagctggggttgacctacctgttcatctcccacgatctcgcggtggtgcgctacatgagcgatcgcattttggtgatgaatcagggtcagcttgaagaagatagcccaacggagcaactcttccagcggccgcaatcagactacacgcgccgcctgattgcggctatccccggagaagtcgcagcttaa

SEQ ID NO: 27431 - protein, 554 aa, Synechococcus elongatus PCC 6301
MADPLLEIRQLQICFGEAIALQGLDLVVQPGESVGIVGESGSGKSVACLAIPGLLPKTARCSGQIAFRSVAGQSSRDLLTLPERELRQLRGDRLGFIFQEPLSSLNPVFSAGFQLLEAIQQHLPLSQAEAQQRVIALLQEVQLIREPSQAAQILRRYPHQLSGGQRQRLMIAIALAANPDLLLADEPTTALDATVQASVLQLLRRLQQQRQMAMIFVSHDLGVIAEVADRVVVLYRGQVVEQGRVADVLNSPQHPYTQGLVACRPQINPRSCYLPTVADFLEGQTEPRSLPPRSPATQPLLQVEQLGITYRGRSTAFQAVQNLSFTLPAGLTLGLVGESGCGKSSLARCLVGLVPASEGQIWLDQQPLDLRSSRDRQRLRQTVQMVFQDPAAALDPRWTVGSAILEPLRIKQPRRDRTADQRLLKQWLQRVDLPTDIGDRYPHEFSGGQRQRICIARALIGQPRLLICDESVSALDVSVQAQILNLLKQLQAELGLTYLFISHDLAVVRYMSDRILVMNQGQLEEDSPTEQLFQRPQSDYTRRLIAAIPGEVAA

SEQ ID NO: 27432 - DNA, 1593 bp, Staphylococcus aureus subsp. aureus COL
  CDS (1)..(1593): transl_table=11
atgtcaaatttattagaagtcaacagtctgaatgtacaattcaattatgatgaaactacagttcaagcggtaaaaaacgtctctttcgaattacgaaaaaaacatatcctaggtattgttggtgaatcaggatcaggaaaaagtattaccgctaaatctattttagggctactaccagattatccagatcacacattaacaggagaaattatttttaatgggcaatcgttaaataatttatcaacttcagcgttacaacaaattcgaggtaaggatatttcaatgatttttcaagatccactctcttcgttgaatccaagattaacgattggcaaacaaattacagaagtaatatttcaacataaacgtgtatctaaatctgaagcaaagtcgatgacaatagacattttagaaaaagtaggtataaaacatgcaactcgacaatttgatgcttatccacatgaactttctggtggtatgcgtcaacgtgtcatgatagcaatggcattgattttaaagccacaaattttaatcgcagatgaaccaacaacggcattagatgccagtacacaaaatcaattactgcagttaatgaagtccctttatgagtacacagaaacatctattatttttatcactcacgatttaggcgctgtgtatcaattttgcgacgatgtgattgtaatgaaagatggaagtgtcgttgaaagtggcacggttgaaagtatttttaaatcgccacaacatacctatacaaaacgcttaatagatgcgattcctgatattcatcaaacgcgtccgccaagaccgttaaacaatgatattttattaaaattcgatcgcgtgagcgtggattacacatcaccgagtggcagcctataccgagcagttaatgatattaacttggctattagaaaaggcgaaacattaggcattgtcggtgaatcagggtcagggaaatcgacattagctaagacggtcgtcggtctaaaggaagtgtcagaaggctttatttggtataacgaattaccattaagtttatttaaagatgatgaattgaaatctttacgacaagagatacaaatgatttttcaagatccattcgcatctattaatccaagatttaaagtcattgatgtgattaaacgaccactaatcattcatgggaaagtcaaagataatgatgacattattaaaactgtcgtatcgttgttagaaaaggttggcctagatcaaactttcttatatcgctatccacacgaattatctggtgggcaacgtcagcgtgtaagtatcgcgagagcacttgctgttgaacctaaagtgattgtttgcgacgaggcagtgtccgctttagacgtttcaattcaaaaagatatcatcgagttattaaaacaattacagttagacttcggcatcacttatttattcatcacacatgacatgggtgttatcaatgaaatatgtgatcgcgttgcagttatgaaaaatggcgaaatcgttgaactgaataacacagaagatattatcaaacatccgcagtcagactatgcaaagcaacttatttcagaagtagcagttattgctaaataa

SEQ ID NO: 27433 - protein, 530 aa, Staphylococcus aureus subsp. aureus COL
MSNLLEVNSLNVQFNYDETTVQAVKNVSFELRKKHILGIVGESGSGKSITAKSILGLLPDYPDHTLTGEIIFNGQSLNNLSTSALQQIRGKDISMIFQDPLSSLNPRLTIGKQITEVIFQHKRVSKSEAKSMTIDILEKVGIKHATRQFDAYPHELSGGMRQRVMIAMALILKPQILIADEPTTALDASTQNQLLQLMKSLYEYTETSIIFITHDLGAVYQFCDDVIVMKDGSVVESGTVESIFKSPQHTYTKRLIDAIPDIHQTRPPRPLNNDILLKFDRVSVDYTSPSGSLYRAVNDINLAIRKGETLGIVGESGSGKSTLAKTVVGLKEVSEGFIWYNELPLSLFKDDELKSLRQEIQMIFQDPFASINPRFKVIDVIKRPLIIHGKVKDNDDIIKTVVSLLEKVGLDQTFLYRYPHELSGGQRQRVSIARALAVEPKVIVCDEAVSALDVSIQKDIIELLKQLQLDFGITYLFITHDMGVINEICDRVAVMKNGEIVELNNTEDIIKHPQSDYAKQLISEVAVIAK

SEQ ID NO: 27434 - DNA, 1701 bp, Lactobacillus acidophilus NCFM
  CDS (1)..(1701): transl_table=11
atgactgaagcaataattacatttaaagatttctcatttaagtatgatagccaagcagaacccacgttaaaaaacatcaacttagatattaataagggtgaaaaaatattaattgcagggccatcaggcagtggtaaatcaactattggacgctgtataaacggactcattcctaatattgactctggcgatattactggtaaatgtattattaatggcaaaaatatcacagaaaccagcttatttgatttatcatttactacttcaaccattttgcaagatgcagatagccaatttattggtttaactgttggcgaagatatcgcttttgcgttagaaaacgattgccaaccacaaaacaaaattcgtcaaactgtccatcgctgggcagatgaacttgaaattggtaaactcttaaagcagtcacctcaaaacttatcaggcggtcaaaaacaaatcgtagctttagcaggagtattagttgatgaatctcctgtccttttgtttgacgaaccactagccaatttagatccagcttcaggaatgaagacaatgagtttaatcgatcaaattcaaaaaagacttaacgccacagtaattattatcgaacaccgtctagaagaagttctgagtcaaccaattgatagaatcattttaattgatgatggacaaattgtagcaaataaaacacctaatgaattattgcatgaaaacaaattagaaaatattggaataagaagtcctctatatctaaaagcattagagaaagccaatatagatattgagcaaattccagatatatcatcagttgataaattacccgataacagcataatatctgagaaattaaaagaatgggaacaaaaaaatacattaaaaattaattctattgaaccaaaacctttattagaattaaaagatgtaggtcatcgttataataaaatgcaggtaaatcctttacatgatgttaatactacaatcaatcaaggtgattttatttcaatcgttggacaaaacggtgcaggtaaaaccacactttgtagaattatttgtggttttatttcaaacgaaggtcgtattcttttaaacggtgaagatattagtaatctttccataaaagaacgttctgaaaaaataggttatgtcatgcaagatcctaatcaaatgatttctcagaagatgatctttgatgaagtggcattaggattacgattaagaggctacagtaaaaaagatattaaagataaagcctatcaagcattaaaaatttgtggtctttatccctaccggaattggcctatttctgctcttagtttcggtcaaaagaagcgagttaccattgcttctattttagttcttgaacctgaattaattattttagatgaaccgacagcagggcaagattggaagacttatacagaaattatgtcatttctaaaaaagttaaatgaacaaggaaaaacaatcatgattattactcatgatatgtatttaatgatggaatatactaatcgttcattagcctttgccaatggtgaactaattgctgatactaacccaattaaattattaaccgtgaagaatttagttaaaaaagcagcactaaaacgtactagtttatactatttagctaagaagtataatttaaacaatccagacaattttgtccgtgcctacattgattcggaaagggataagtag

SEQ ID NO: 27435 - protein, 566 aa, Lactobacillus acidophilus NCFM
MTEAIITFKDFSFKYDSQAEPTLKNINLDINKGEKILIAGPSGSGKSTIGRCINGLIPNIDSGDITGKCIINGKNITETSLFDLSFTTSTILQDADSQFIGLTVGEDIAFALENDCQPQNKIRQTVHRWADELEIGKLLKQSPQNLSGGQKQIVALAGVLVDESPVLLFDEPLANLDPASGMKTMSLIDQIQKRLNATVIIIEHRLEEVLSQPIDRIILIDDGQIVANKTPNELLHENKLENIGIRSPLYLKALEKANIDIEQIPDISSVDKLPDNSIISEKLKEWEQKNTLKINSIEPKPLLELKDVGHRYNKMQVNPLHDVNTTINQGDFISIVGQNGAGKTTLCRIICGFISNEGRILLNGEDISNLSIKERSEKIGYVMQDPNQMISQKMIFDEVALGLRLRGYSKKDIKDKAYQALKICGLYPYRNWPISALSFGQKKRVTIASILVLEPELIILDEPTAGQDWKTYTEIMSFLKKLNEQGKTIMIITHDMYLMMEYTNRSLAFANGELIADTNPIKLLTVKNLVKKAALKRTSLYYLAKKYNLNNPDNFVRAYIDSERDK

SEQ ID NO: 27436 - DNA, 1560 bp, Salmonella enterica subsp. enterica serovar Choleraesuis str
  CDS (1)..(1560): transl_table=11
ttgcaacgttgtgctaagcacattgacatccgttgccgaaagacgtatccctgtcattcatcgctgcaaaaaatgggatgcaaaatgtcatcgttgcaaatttcgcaaggcacgtttcgtctgagcgatacaaaaacacttcatctggattcgctgacgctcaatgcgggcgatagctgggcattcgttggggctaacgggagcgggaagtcggcgctcgcccgcgcgctggcgggtgaactgccgttattaacaggcgagcgccagtgtcggtttacccgcattactcgtctgtcctttgaacaattgcaaaagctggtcagcgatgaatggcaacgtaataacaccgatatgctcagtcctggcgaagacgataccgggtgcactaccgcggaaattattcaggatgatgttcaccatcctgcccgctgtgcgatgctggcgcagcagttcggcatttccgctttactcaacaggcgttttaaatacctttctaccggcgagacgcgaaaagcgctgctgtgtcaggcgctgatgtctgagccggagttattgatccttgatgaaccgttcgacgggcttgacgtgaccgcccgtcaacaactggcgcaacgcctgacggcgttgaaccaggcgggtatgaccctggcgctggtactcaaccgttttgatgaaatcccggacttcgtgcagtttgccggcgtgcttgccgactgtacgctggcagagaccggaacgacgacagagttactgcaacgggcgttggttgctcaactcgcgcacagcgagcgtctgaccgacgtacaattacccgaaccggacgaaccttccgtccgccatgcgttacccgatggcgaaccacggatcgtacttaacgatggcgtagtctcgtataacgatcgccctatcctccaccacctaagctggcgagtaaatccaggcgaacactggcagatcgtcggtcctaacggagcgggtaagtctacgctgcttagccttattactggcgatcatccgcaaggctacagcaacgatcttacgctgttcgggcggcggcgaggaagcggcgaaacaatctgggatatcaaaaaacatatcggctacgtcagcagcagtttacatctggattaccgcgtcagtaccacggtacgcaatgtcattctctccggctatttcgattctatcggcatttaccaggccgtttcagacaggcaacgaaaactggcgcaacagtggctggatattctgggaatcgataagcgtacggcggatgcccccttccacagtctctcctggggacagcagcggctggcgctgatcgtgcgcgcgctggttaaacatccgacagtgttgattctggatgagccgctgcaagggttggacccgctgaaccgccaactggtacgccgttttgtagatgtattaattcgccagggagagacccaactgctgttcgtttcccatcatgcagaggatgcgcctgcctgtattacccaccggctggaatttgtaccagatggcgaacgttataagtacgtttccggacgatgcaataattaa

SEQ ID NO: 27437 - protein, 519 aa, Salmonella enterica subsp. enterica serovar Choleraesuis str
MQRCAKHIDIRCRKTYPCHSSLQKMGCKMSSLQISQGTFRLSDTKTLHLDSLTLNAGDSWAFVGANGSGKSALARALAGELPLLTGERQCRFTRITRLSFEQLQKLVSDEWQRNNTDMLSPGEDDTGCTTAEIIQDDVHHPARCAMLAQQFGISALLNRRFKYLSTGETRKALLCQALMSEPELLILDEPFDGLDVTARQQLAQRLTALNQAGMTLALVLNRFDEIPDFVQFAGVLADCTLAETGTTTELLQRALVAQLAHSERLTDVQLPEPDEPSVRHALPDGEPRIVLNDGVVSYNDRPILHHLSWRVNPGEHWQIVGPNGAGKSTLLSLITGDHPQGYSNDLTLFGRRRGSGETIWDIKKHIGYVSSSLHLDYRVSTTVRNVILSGYFDSIGIYQAVSDRQRKLAQQWLDILGIDKRTADAPFHSLSWGQQRLALIVRALVKHPTVLILDEPLQGLDPLNRQLVRRFVDVLIRQGETQLLFVSHHAEDAPACITHRLEFVPDGERYKYVSGRCNN

SEQ ID NO: 27438 - DNA, 1596 bp, Salmonella enterica subsp. enterica serovar Choleraesuis str
  CDS (1)..(1596): transl_table=11
gtgttagtttccagcaacgttaccatgcagttcggcagtaagccgctgttcgaaaacatttccgtcaaatttggcggcggcaaccgttacggcctgatcggcgccaacggtagcggaaagtccacttttatgaaaatcctcggcggcgacctggagccgacgctgggcaatgtttccctcgatccgaatgagcgcatcggtaagctgcgtcaggaccagttcgcttttgaaacattcaccgtacttgatactgtcattatggggcatggcgaactgtgggaggtcaagcaggagcgcgaccgtatctacgccttgccggaaatgagcgaagaagacggctataaagtcgccgatctggaagtaaaatacggcgagatggacggttattccgctgaggcgcgtgcgggcgaactgctgttgggggtgggcatcccgctggagcagcattacggtctgatgagtgaagtcgcgccaggctggaaattgcgtgtgctgctggcgcaagcgttattctctaacccggacatcctgttgctcgacgaaccgaccaacaacctggatattgatactatccgttggctggagcaggtgctgaacgagcgcgatagcacgatgatcatcatttcgcacgaccgtcacttcctgaacatggtttgtacgcatatggcggatctggattacggcgacttgcgcgtctatccgggtaactatgatgagtatatgacggcggcgacccaggcgcgtgaacgtctgttggccgataatgcgaagaaaaaagcgcaaattgccgagctgcaatcttttgttagccgttttagcgccaatgcctctaaatcgcgtcaggcaacgtcgcgcgcgcggcagattgataaaatcaagctggaagaggtgaaagcctccagccgtcagaacccgttcatccgttttgagcaggataaaaaactgttccgtaacgctctggaagtggaggcgctgacgaaaggttttgataacggtccgctgtttaaaaatgtcaatttgctgctcgacgtcggcgagaagctggcggtactcggcaccaatggcgtgggtaaatctacgctgctgaagacgctggttggcgatctggacgccgatcacggcaccgttaaatggtcggaaaacgcgcgtattggttactacgcgcaggaccacgaatatgaattcgaaaatgacctgacggtgtttgaatggatgagtcagtggaagcaggaaggcgacgacgagcaggcagtgcgcagtattctgggccgcctgttatttagccaggatgatatcaaaaagcctgcgaaagtcctctccggtggcgagaagggccgtatgctgttcggcaaactgatgatgcaaaagccgaatatcctgatcatggacgaaccgactaaccacctggatatggagtcgatcgaatcgctgaatatggcgctggagctgtatcagggcacgctgatctttgtttcgcacgaccgtgagttcgtcagctcgctggcaacccgcgtcattgaaattacgccggagcgcgtggtggacttcagcggtaactacgacgattatttgcgtagtaaagggattgaaagctaa

SEQ ID NO: 27439 - protein, 531 aa, Salmonella enterica subsp. enterica serovar Choleraesuis str
MLVSSNVTMQFGSKPLFENISVKFGGGNRYGLIGANGSGKSTFMKILGGDLEPTLGNVSLDPNERIGKLRQDQFAFETFTVLDTVIMGHGELWEVKQERDRIYALPEMSEEDGYKVADLEVKYGEMDGYSAEARAGELLLGVGIPLEQHYGLMSEVAPGWKLRVLLAQALFSNPDILLLDEPTNNLDIDTIRWLEQVLNERDSTMIIISHDRHFLNMVCTHMADLDYGDLRVYPGNYDEYMTAATQARERLLADNAKKKAQIAELQSFVSRFSANASKSRQATSRARQIDKIKLEEVKASSRQNPFIRFEQDKKLFRNALEVEALTKGFDNGPLFKNVNLLLDVGEKLAVLGTNGVGKSTLLKTLVGDLDADHGTVKWSENARIGYYAQDHEYEFENDLTVFEWMSQWKQEGDDEQAVRSILGRLLFSQDDIKKPAKVLSGGEKGRMLFGKLMMQKPNILIMDEPTNHLDMESIESLNMALELYQGTLIFVSHDREFVSSLATRVIEITPERVVDFSGNYDDYLRSKGIES

SEQ ID NO: 27440 - DNA, 1590 bp, Salmonella enterica subsp. enterica serovar Choleraesuis str
  CDS (1)..(1590): transl_table=11
atgacatctccattgcttgcgattgaaaatttatcggtaggtttccgtcagcaacagcacgtgcgtcctgtcgttaacgccatttcgttacaggtgaacgccggggaaacgctggcgctggtcggcgagtccgggtcaggaaaaagcgtgacggcgctttccattctgcgtcttttgcctacccctcccgccgtctacctctccggcgatattcgctttcacggcgaatcattgcttcatgccagcgagcagacgctacgcggcgtacgcggcaataaaatcgccatgatttttcaggaaccgatggtttcacttaacccgctgcatacgctggaaaaacagctctatgaagtgctgtcgctccaccggggaatgcgtcgggaggcggcaagagcggagatgatcggttgtctggatcgggtcggtatccgccaggcgagccagcgtctgcgcgattatccgcatcagctttccggcggcgaacgccagcgcgtcatgatagccatggcgctgttaacacggccggaattactgatcgccgatgagccgaccaccgccctcgacgtctccgtacaggcgcagattttatctctactgcgggaactccagcgcgagctcaatatgggattgctgtttatcacccataacctcagcattgtaaaaaaactggcggattcggtggcggtaatgcaacacggcaagtgcgtagagaaccaacgcgccgacacgctgctctccgcgccgacccatccgtacacgcaaaaactactcaacagcgaacccacaggcgatccggttccgctccccgccgggcagacgccgttgctggaggtggacaggctgcgcgtcgccttcccgatccgcaaaggcattctgaagcgcgtcgtggatcataatgtggtggttaacaatatcagtttcaccctgcatccaggcgaaacgctgggtctggtcggcgagtcaggatcgggaaaaagtaccaccggtctggcgctgttacggcttatccgctccgaaggccgcatcgtgtttgacggtcaatcgctggatacgttaaaccgccgccagcttttacctgttcgccaccgtatccaggtcgtattccaggacccaaactcatcgctaaacccgcgtttaaacgtgttgcaaattatcgaagaaggcctgcgcgtccaccagcctacgctttcaggcgcgcagcgcgaacagcaggtgaaagcggtcatgatggaagtcggcctggacccggaaacgcggcatcgttatcccgctgagttttccggcggccagcgtcaacgtatcgccgtcgccagggtgctgattttaaaaccgtcgcttattattctggatgaaccaacctcatcgctggataaaaccgttcaggcgcagattcttgccctcctgaaatcgctacagcaaaagcaccgtctggcctatatcttcattagccacgatctgcatgtagtacgcgcgctgtgccatcaggttatcgtgctgcggcagggggaggtggttgaacaggggcaatgcgagcgcgtgtttaccgcaccgcaacaagcgtatacgcgtcagctactcgcgttaagctga

SEQ ID NO: 27441 - protein, 529 aa, Salmonella enterica subsp. enterica serovar Choleraesuis str
MTSPLLAIENLSVGFRQQQHVRPVVNAISLQVNAGETLALVGESGSGKSVTALSILRLLPTPPAVYLSGDIRFHGESLLHASEQTLRGVRGNKIAMIFQEPMVSLNPLHTLEKQLYEVLSLHRGMRREAARAEMIGCLDRVGIRQASQRLRDYPHQLSGGERQRVMIAMALLTRPELLIADEPTTALDVSVQAQILSLLRELQRELNMGLLFITHNLSIVKKLADSVAVMQHGKCVENQRADTLLSAPTHPYTQKLLNSEPTGDPVPLPAGQTPLLEVDRLRVAFPIRKGILKRVVDHNVVVNNISFTLHPGETLGLVGESGSGKSTTGLALLRLIRSEGRIVFDGQSLDTLNRRQLLPVRHRIQVVFQDPNSSLNPRLNVLQIIEEGLRVHQPTLSGAQREQQVKAVMMEVGLDPETRHRYPAEFSGGQRQRIAVARVLILKPSLIILDEPTSSLDKTVQAQILALLKSLQQKHRLAYIFISHDLHVVRALCHQVIVLRQGEVVEQGQCERVFTAPQQAYTRQLLALS

SEQ ID NO: 27442 - DNA, 2742 bp, Salmonella enterica subsp. enterica serovar Choleraesuis str
  CDS (1)..(2742): transl_table=11
atgacgtcgctgacgctggtgcctgttcctcccgtagcgcagcttgagggggtgagccagcattacggaaaaacggtcgcgctgaacaatatcacgctggacattcccgcccgtagtatggtcgggctgattggtccggacggggtgggtaagtcgagcctgctgtcgctgatttctggcgcgcgggtgattgagcaagggaacgttatcgtcctgggcggcgatatgcgcgatgcgaaacatcgccgcgacgtctgtccgcgcatcgcctggatgccgcaggggctggggaaaaacctttatcacacgttatcggtttatgagaacgtcgattttttcgctcgtctctttggtcatgacaaagctgaacgcgaagcgcgtattaccgagctgctgaacagcaccggcctggcgccgtttcgtgaccgtcctgccgggaagctgtccggtgggatgaaacaaaagctggggttgtgctgtgctctgattcatgacccggaattgctgattcttgatgagcctaccaccggcgtggacccgctctcccgcgctcagttctgggacttaatcgacagtatccgccagcgccagaccaatatgagcgtgttggtcgcaacggcctatatggaagaggcggagcgttttgactggctggtggcgatgaatgcgggcgagatactggcaaccggcagcgcgcagcaactgcgggcaaaaacccatagcgcgacgctggaacaggcgtttatcgccctgttgccagaagcgcagcgccaggcgcataagccggtggtgatcccgccgtatcacgctgagcaggaagagattgccattgaggcgaaagatctgaccatgcgcttcggtaagttcgtcgcggttgaccatgttaatttccgtattccgcgcggcgagatttttggcttcctcggttcaaacggttgcggcaaatcgaccaccatgaaaatgctgaccggtctgcttcccgccagcgaaggccaggcctggctatttggccagccggtagacccgaacgacatcgacacccgtcgccgggtcgggtatatgtcgcaggctttttcgctctataacgaactcaccgtgcggcagaatctggaacttcatgcccgcctgtttcatattccgcctgcggagatcccggcgcgcgtcgcgcagatgatcgaacgctttatgctaacggaggtggaagatacgctccccgcttcgttgccgctcggtatccgccagcgtttatcgctggcggtagcggtgatccatcgcccggaaatgctgattcttgatgagccaacgtccggcgttgatccggtcgccagagatatgttctggcagcttatggtcgatctttcgcgtcaggataaggtgacgatttttatctcgacccattttatgaacgaagcggaacgttgcgaccgaatgtcattgatgcacgccggtaaagtgcttgccagcggtacgccgcaggaattggtgcaacagcggggcgcggccaatctggaagcggcgtttatttcctggctacaggaagctgcgggagcggcgcctgaaaccccaataccgccatcccagacgcctgccgcgtcaggtaaaccgtcgcggcagggattgagcttccggcgtttgttcagctacagtcgccgcgaagcgctggagctacgccgcgatccggtacgctcgacgctggcgctgctgggaacggtaattctgatgttgattatgggctatggcatcagtatggacgtggagaacctgcgttttgccgtactcgatcgtgaccagaccgtcagtagccaggcatggtcgctcaatctggcgggatcgcgctattttatcgaacagccgccgctcgccagctatgacgagcttgaccggcggatgcgttcgggagagctggcggttgccattgagatcccgcctaattttggccgcgatattgctcgcggtacgccagcgcagattggcgtctgggtggatggcgccatgcccagccgcgccgagacggtgaaggggtacgttcaggcgatgcaccaaagctggctgcaggaggcggcaagtcgtcagccgaacccggttaaacaggtcgggctgctcaatattgaaacgcgctatcgctataacccggatgtgaaaagtctgcccgctatcgttccggcggtcattccgctgctgctcatgatgatcccgtcaatgcttagcgccctgagcgtggtgcgggagaaagagctggggtcgatgattaatctgtacgtaacgccgacgacgcgcagcgaatttttgctgggtaaacaactgccgtatatcgagctgggtatgctgaacttcttgctactgtgcgcgctgtcggtctttgtgttcggcgtgccgctgaaaggcagctttctcacgcttaccctcgcggcgctgctttatgtcatcatcgccaccggtctggggctgctgatctccacgtttatgaagagccaaatcgccgctatttttgggacgtcgattattaccctcattccggcaacacaattttccggcatgatcgatccggtggcttcgctggaaggaccgggaagatggatcggcgagatctacccgaccagtcattttctgacgatcgcgcgcgggacgttttccaaagcgttggatctgtccgatctctggccgttatttatgccgttactgattgccgtcccggtggtgatgggtctgagcattctgctgctgaaaaaacaggaggggtaa

SEQ ID NO: 27443 - protein, 913 aa, Salmonella enterica subsp. enterica serovar Choleraesuis str
MTSLTLVPVPPVAQLEGVSQHYGKTVALNNITLDIPARSMVGLIGPDGVGKSSLLSLISGARVIEQGNVIVLGGDMRDAKHRRDVCPRIAWMPQGLGKNLYHTLSVYENVDFFARLFGHDKAEREARITELLNSTGLAPFRDRPAGKLSGGMKQKLGLCCALIHDPELLILDEPTTGVDPLSRAQFWDLIDSIRQRQTNMSVLVATAYMEEAERFDWLVAMNAGEILATGSAQQLRAKTHSATLEQAFIALLPEAQRQAHKPVVIPPYHAEQEEIAIEAKDLTMRFGKFVAVDHVNFRIPRGEIFGFLGSNGCGKSTTMKMLTGLLPASEGQAWLFGQPVDPNDIDTRRRVGYMSQAFSLYNELTVRQNLELHARLFHIPPAEIPARVAQMIERFMLTEVEDTLPASLPLGIRQRLSLAVAVIHRPEMLILDEPTSGVDPVARDMFWQLMVDLSRQDKVTIFISTHFMNEAERCDRMSLMHAGKVLASGTPQELVQQRGAANLEAAFISWLQEAAGAAPETPIPPSQTPAASGKPSRQGLSFRRLFSYSRREALELRRDPVRSTLALLGTVILMLIMGYGISMDVENLRFAVLDRDQTVSSQAWSLNLAGSRYFIEQPPLASYDELDRRMRSGELAVAIEIPPNFGRDIARGTPAQIGVWVDGAMPSRAETVKGYVQAMHQSWLQEAASRQPNPVKQVGLLNIETRYRYNPDVKSLPAIVPAVIPLLLMMIPSMLSALSVVREKELGSMINLYVTPTTRSEFLLGKQLPYIELGMLNFLLLCALSVFVFGVPLKGSFLTLTLAALLYVIIATGLGLLISTFMKSQIAAIFGTSIITLIPATQFSGMIDPVASLEGPGRWIGEIYPTSHFLTIARGTFSKALDLSDLWPLFMPLLIAVPVVMGLSILLLKKQEG

SEQ ID NO: 27444 - DNA, 1584 bp, Pseudomonas syringae pv. syringae B728a
  CDS (1)..(1584)
atgcacgacaacctgattgaaattcgcgacctgcgggtcgccttcaacggccacgaagtggtgcatggcgtcagcctcgacatccgccgtggcgagtgcctggcactggtgggcgaatccggctcgggcaagtcggtcacggcgcattcgattctgcgtctgttgccggcgaaaaccgtcagtacccagggctcgattcattacgacgggctggatttggtgactgccagcgacaagcagttgcgcagcctgcgcggcaaccgggtggcgatgatttttcaggagcccatgagttcgctgaacccgctgcacacggtcgaaaaacagatcgtcgaaatcctcgtgacccacaagggcctgaagggcaaggccgcgctgagccgcaccctggagctgctggaactggtcggtattcgtgatccgctgtcacgtctcaaggcgtatccgcatcaactgtcgggcgggcaacggcagcgcatcatgattgccatggcgttggccaacgagccggatctgctgatcgccgacgagccgaccaccgcgctggatgtgaccgtgcaggtgaagattctggagttgctcaagtccctgcagcagcggctgaacatgtcgctgctgctgatcagccacgacctcaatctggtgcggcgcatcgcccagcgggtctgcgtgatgcgtgagggcgagatcgtcgagcaggccgattgccagaccctgttcgacagcccgcaacacccgtacagccgtctgctgatcaatgccgagccggatggtgaaccggtgccgtccacgcacagcaacacgctgctgtcggtgcaggacctgaaggtctggttcccgctgggcaaggcctggttcaagcgtgagccgcagtacgtgaaagcggtggacggggtgagtttcgagctgctcaagggcaagaccctgggcattgtcggcgagtcgggttcgggtaaatcgaccctgggccaggcgattttgcgcctggtcgattcagagggcagcatccgcttcggcaccaaggaactgagcctgcacagccagcacctgatgcgcccgttgcgccgccagttgcaggtggtgtttcaggacccgttcggcagcctcagcccgcgcatgaccgtggagcagatcattgccgagggcctggtgacgcacaacatcggtacgccgaaagagcgtgaacagacggtgatccgcgtgttgcaggaagtcggcctggacccggccacccggcatcgttacccgcacgagttttccggcggtcagcgccagcgtgtttccatcgcacgggcgctggtgcttgagccggacctgatcctgctcgacgagccgacctcggcgctcgaccggaccgtgcaaaagcagatcgtcgccctgctgcgcgacctgcaaatccggcatggcctgacgtacctgttcatcagccatgacctggcggtggttcacgccctggcccatgacctgatcgtcatcaaggacggcaaggtggtcgagcagggtccgtcccgcgagatcttcgccgcaccgcagcaggcctacactcaggaactgctgcgttcgtcggggctggtgttcgcctga

SEQ ID NO: 27445 - protein, 527 aa, Pseudomonas syringae pv. syringae B728a
MHDNLIEIRDLRVAFNGHEVVHGVSLDIRRGECLALVGESGSGKSVTAHSILRLLPAKTVSTQGSIHYDGLDLVTASDKQLRSLRGNRVAMIFQEPMSSLNPLHTVEKQIVEILVTHKGLKGKAALSRTLELLELVGIRDPLSRLKAYPHQLSGGQRQRIMIAMALANEPDLLIADEPTTALDVTVQVKILELLKSLQQRLNMSLLLISHDLNLVRRIAQRVCVMREGEIVEQADCQTLFDSPQHPYSRLLINAEPDGEPVPSTHSNTLLSVQDLKVWFPLGKAWFKREPQYVKAVDGVSFELLKGKTLGIVGESGSGKSTLGQAILRLVDSEGSIRFGTKELSLHSQHLMRPLRRQLQVVFQDPFGSLSPRMTVEQIIAEGLVTHNIGTPKEREQTVIRVLQEVGLDPATRHRYPHEFSGGQRQRVSIARALVLEPDLILLDEPTSALDRTVQKQIVALLRDLQIRHGLTYLFISHDLAVVHALAHDLIVIKDGKVVEQGPSREIFAAPQQAYTQELLRSSGLVFA

SEQ ID NO: 27446 - DNA, 1578 bp, Sulfolobus acidocaldarius DSM 639
  CDS (1)..(1578): transl_table=11
atgtacgcagtagagataaagggattacaatttttttacttgggatatccgacaccagctatcacagttgacgaactgtttatcgagaagggagagtcggtactcattacaggtagatcaggatcaggtaagtccacactagttagttgcattaacggaattattccccatatgacgagtggagatctaaaaggggaagtttacgtactagggaagagtataaaagatacgcctttgtctaagctgtccacagttgtaggcacggtcttacaagaccctgaaagccaagttgtgaattacactgtggaggaagaagttgcgtttggaccggagaacctgaattttcctccagaacagattgtggagagagtaaaggagtccatggagatagctgggatatcgcatttatggggaagggagaccacaacgctatctggaggagagctacagaggacagtattagcctctgtcctcaccatgagaccagaggtgctaatattagatgagccaacttcaaatatagacccagaaggaactaatcaaattttctctacactgaaagacctcagggggcaaaagacactcatcatagtggaacataaggtggagagggtactaccatttgtagacagagttattctcgtggataagggtaaggtttcacttgaccttgaaaaggacgaaatattagagggagctgagaccctacattcagcaggagtcgaagtacctgagtatttcatttatgcaaaaaagttcggagtcaagtcaccggatctagatacagtgaagaaattgatagtacaaaataatgttaaattggaacaccctaagaggaggactcctgagaacaagatactaacagctaatctgaggattaatgttaaggaaaaacagattgtagatttctctctggatttgtgggagggggaactagttgccataatggggaaaaatggtgcaggaaagacaactgcactgaaagcactagctggaattctagatacgtctgaatatagtataacggggtcaataaaatatcaaggggaggaactaatcaataaacctgtctggtataggggtaaatacatgatttatatgccacagtcctttgaccttatgttagtcacaaaccaagtgagaaaagaaatcgagtatagtttgaagaagagaaaagtaaagaactacagggagataagtgagaagtacatgagggagtttgggttattcgagtatagggatagggatcccacgttactaagtatgggtgagaggaggagggtagctatggcatcagttttagcttcaggcgtgaaaattatgttaatggatgaaccgacctcaggtcaggactactcaaataagatgagcctaggtaaagagttacgccaacttaccgacaaaggctacactgttgtggtggttacacatgattcaaaatttgtctatgatttcgctgacaggttaatagtaataagtgatgggaagaaagttcttgaaggaagaccagaggaagtttttataagttcctctagatatggaataaacccaccatcagacttcctcctcaggtggtag

SEQ ID NO: 27447 - protein, 525 aa, Sulfolobus acidocaldarius DSM 639
MYAVEIKGLQFFYLGYPTPAITVDELFIEKGESVLITGRSGSGKSTLVSCINGIIPHMTSGDLKGEVYVLGKSIKDTPLSKLSTVVGTVLQDPESQVVNYTVEEEVAFGPENLNFPPEQIVERVKESMEIAGISHLWGRETTTLSGGELQRTVLASVLTMRPEVLILDEPTSNIDPEGTNQIFSTLKDLRGQKTLIIVEHKVERVLPFVDRVILVDKGKVSLDLEKDEILEGAETLHSAGVEVPEYFIYAKKFGVKSPDLDTVKKLIVQNNVKLEHPKRRTPENKILTANLRINVKEKQIVDFSLDLWEGELVAIMGKNGAGKTTALKALAGILDTSEYSITGSIKYQGEELINKPVWYRGKYMIYMPQSFDLMLVTNQVRKEIEYSLKKRKVKNYREISEKYMREFGLFEYRDRDPTLLSMGERRRVAMASVLASGVKIMLMDEPTSGQDYSNKMSLGKELRQLTDKGYTVVVVTHDSKFVYDFADRLIVISDGKKVLEGRPEEVFISSSRYGINPPSDFLLRW

SEQ ID NO: 27448 - DNA, 1374 bp, Leuconostoc mesenteroides subsp. mesenteroides ATCC 8293
  CDS (1)..(1374)
atggttactcatttaaaacatatcagtttgtcatatggcaatacaaaaatacttgatgataccaccatgtcaatatctcacaatagttttaacctgctaattggtccctctggctctggaaaatcaacccttctccgaatatttgcaggattatatccgcaactaaaaggtgaagtacttgttaatgatcaagcagttaccacattaccggctaacgagaaagccaaagtcgtcggttttttatttcaagatccagacacccaatttgttatgaaaacgccactggatgaattgattttcactttagaaaacttgcaagttcatccttctgatatcaagcaacgtgcaacgcacgctctagaatttgttggtatttcagacttaactcatcaagacattgacaccttatcaggtggtgaaaaacaaaaagttgcattggctatcattgttgcaatgcaaagtgatttcttattattagacgaaccttttgcaaatattgatagccaatctcgccaagacctattagctaaattgaaagatttgcaaatacagggacaaaccactatattaatcactgatcatgatttacatgggtacgaaccacttgttgatcatgtgtgggaaatacaccacaaaaaagtagcaactgttagtaactttcagaatcgtattttaccggaacaaaatgtccacctgcaattacctaaagaaggtgttttgcaattaaaaaattttgaacttttagtggggcaacgtcaattaattagtatttctgatttacctttggctcccggtggaattacgctctttactggagcaaatggcacaggcaagtcatcccttttcaatgcgctaactcgactaaaatcctaccaaggtgacattttgtatatagatcaaaatatcaaaaaatttaatgctgctaaatatgcaaaacaagtagcattgatctttcaaaatgcagaacggcagtttttacgaatgacgattcgtgaggaaatcgcgttgagcatgcaacatgcgcaacaaccagaaaaatggtccgaaaacgtaattactcgttacttagagcgcttaaatttggatgggctacaagatcatgtcgtttatcagctctctggcgggcaaaagaaaaaagttcaactcttggtgatgttaattgttggcacaccaatattattgttagacgaacctattgctggtctggacacagattccgttcgggttgtaggcgaaattttacgagaaatcgcagataatggacggcaacgttttattattattagccaccaactagatcagctacgcccaatcattgattatcatttgcatctatctaatcgaactttacaatatatggagcattttttatga

SEQ ID NO: 27449 - protein, 457 aa, Leuconostoc mesenteroides subsp. mesenteroides ATCC 8293
MVTHLKHISLSYGNTKILDDTTMSISHNSFNLLIGPSGSGKSTLLRIFAGLYPQLKGEVLVNDQAVTTLPANEKAKVVGFLFQDPDTQFVMKTPLDELIFTLENLQVHPSDIKQRATHALEFVGISDLTHQDIDTLSGGEKQKVALAIIVAMQSDFLLLDEPFANIDSQSRQDLLAKLKDLQIQGQTTILITDHDLHGYEPLVDHVWEIHHKKVATVSNFQNRILPEQNVHLQLPKEGVLQLKNFELLVGQRQLISISDLPLAPGGITLFTGANGTGKSSLFNALTRLKSYQGDILYIDQNIKKFNAAKYAKQVALIFQNAERQFLRMTIREEIALSMQHAQQPEKWSENVITRYLERLNLDGLQDHVVYQLSGGQKKKVQLLVMLIVGTPILLLDEPIAGLDTDSVRVVGEILREIADNGRQRFIIISHQLDQLRPIIDYHLHLSNRTLQYMEHFL

SEQ ID NO: 27450 - DNA, 1677 bp, Leuconostoc mesenteroides subsp. mesenteroides ATCC 8293
  CDS (1)..(1677)
atggtagaaccatttattgattttcaacatgtgacatttaaatatcacgcgcaatctgaaccgacgttacatgatgtgagttttcaaatttatcctggtgaaaaagttttaatagccggtgcatctggttcgggtaaaacaacattactgcgtttactgaatggtttaattccgcaagcctatcaaggggatattactggtgaactgacaattaatggtaaaaagatcctaaatcagtcgttgtttgacctatctttgcaagctggtactgttcttcaggattctgatgcgcaatttgtgggcatgacggtcgccgaagatatagctttttctcttgaaaatgataatcagccgataaaaattgtcagagaaaaagtcgctaaatgggccaatcgatttgggttaggaaaacgtttgacgttggcaccgcaatcattgtctggtggccaaaaacaacgtactgctatggcaggtgttttggttgatgaaggggatctattgttatttgacgaaccattggctagtcttgatccagctgctggtgcggctgcaatggcactgattgatgaacttcaacaagaacgtaatatgacagtggttgtgattgaacatcggatagaagatgtgttacgtgctcatgttgatcgtgtaattgtcatggcacatggtagaattgtcgctaatgacacgcctactgccattatccaagcaggcgtgttgtctgcaaatggcttagacgaaccactatacatacaactattacgccgagcaggcgttccagtgaataaaatacctcacgtagcagatgttgaaaaagtggacgtttcaaactttagggaccaaattgaaactttggcagaaccagtgcagacagtcactcatgatgacaagcagttgttggtccaaaatttgacctttgcgtacgaccagcaagaaccattgtttgaaaatttgtcgacatcaattcatgaaggtgaaattcttggtattgtgggcaaaaatggatcaggtaaaacaactttgtcccacctattaactggctttttgacacccagtgggggagatattcaattagatggacgttcgctgctaagcgattctattaaagaacgggccgaccacataggctatgttttgcagaatcctaatcatatgattacgaaagcaacagtatttgatgaagttgccagtgggctgcgattgcgtaacattgatgaagaacaagtaacggaacgtgtgcgtgaaatgttacaacttgtcgatcttgatggtatgcgtaattggcccatttctgcattaagctttgggcaaaagaaacggcttacaattgcggctgttttggttttgaaaccagaaattctaatattagatgaaccaacagctggacaagatgcaacgcacacgtctcagttactcagtttcttacagaatattaacattacgaaccatacgactattataatcattactcatgatatgcatttattagcaaactttgttcaacgggctctggttgttgttgatgggcaaatattggcggatacaacaccagcggagttacttgcaaatgaagcattagttgacgctgctagtttgcgaactaccagtatttatcgtttagcccagcgtcttagcattgtgcatccagaagaattaaatgcagctataaggaaataa

SEQ ID NO: 27451 - protein, 558 aa, Leuconostoc mesenteroides subsp. mesenteroides ATCC 8293
MVEPFIDFQHVTFKYHAQSEPTLHDVSFQIYPGEKVLIAGASGSGKTTLLRLLNGLIPQAYQGDITGELTINGKKILNQSLFDLSLQAGTVLQDSDAQFVGMTVAEDIAFSLENDNQPIKIVREKVAKWANRFGLGKRLTLAPQSLSGGQKQRTAMAGVLVDEGDLLLFDEPLASLDPAAGAAAMALIDELQQERNMTVVVIEHRIEDVLRAHVDRVIVMAHGRIVANDTPTAIIQAGVLSANGLDEPLYIQLLRRAGVPVNKIPHVADVEKVDVSNFRDQIETLAEPVQTVTHDDKQLLVQNLTFAYDQQEPLFENLSTSIHEGEILGIVGKNGSGKTTLSHLLTGFLTPSGGDIQLDGRSLLSDSIKERADHIGYVLQNPNHMITKATVFDEVASGLRLRNIDEEQVTERVREMLQLVDLDGMRNWPISALSFGQKKRLTIAAVLVLKPEILILDEPTAGQDATHTSQLLSFLQNINITNHTTIIIITHDMHLLANFVQRALVVVDGQILADTTPAELLANEALVDAASLRTTSIYRLAQRLSIVHPEELNAAIRK

SEQ ID NO: 27452 - DNA, 1674 bp, Bifidobacterium longum DJO10A
  CDS (1)..(1674)
atgaccgttgcaccccattccttcgacgccgacgagttccacgattctgccgaacctcacgcttccgccgagcctgcctcccccgccgccgtgctcaaggacattcgtttcagctatgaccgcggcacctcatgggctttggatggcgtttcactcacggtccatgccggcgagcgcctatgcttggtcggtccgaacgggtcgggcaaatccacgttggcccgtctgattgcgggattgaccgcgccggacggtggtgaagtgacgttactggggcaacgcgtgtacgcagccggcccgaatgccgatgcctatcgtgctgcccgccacggcatcggtatggtgttccagaatcccgaggatcagctggtcactaccgtgttggaggatgacgtggcctttggcccggagaatctcgggctggagcgcgagctcatcggcgagcgtatcgttgattcattgcaggccgtggggttggcgaacttacgccagtccgacccgacccgtatgagcggcgggcagcagcaacgcgcctccatcgccggcatgctggccatgaacccggcaatgctggtattggatgagccgaccgccatgctggacgaatccgcacgcgccgaagttatgcgcattttggatgatttgcaggcgcgcggcaccactattgtgcatgtcacgcatcatccagatgaaaccgttcatgccgatcgcatcgtgcacatggaggccgggcgaatcattggtatcactgcagccgtcgataatcgatccccgctagcggaggctgtctcgcaaagcgagactgagggtagtatcggcacagaagccgcccccagtcgccctacgaacgacagcccccgccagcgggagcgcgaagacggctccgaactgccgctgctctccgatggcatcggtgatatgacgaaccccattattcgcgtctcgcatctgacctatcgctatccttcggccaaacgggcggttatcgatgacctgtcgttcaccatcgcgcgcggtgaaaccgtggcactgatgggcgtgaatggttcgggcaagtcgacgctggtgcgcatgttgtgcgcactgactgcgccgaccgccggcagcatcgaagtggccggtgttccggtggcctcgaccggcaagcgcggtcgcaacgtgcgcccgaagtcggcgaatcgcaagcaattagcgcaattgcgccggcatgtgggttacgtgatgcagcatccagagcatcagctgttcgctgacacggtagccgaggacgtggcgtacggcccacgcaaccaagggcttggcgagaccgaggtagccgaccgcgtgcgcgaatcactggaactgctgcatatcgggcatcttgccgaccgctcccccttcgacctgtccggcgggcaacaacgattggcagccattgccggcgtgctggcttgcaatcctgacgtgctcatcatggacgagccgaccgcgagtctggacgcccaagccaagaagcgtatccatgagctgttgcgcacgctcaaatcgcgtggcgtgaccgtgctcatcatcacccatgaccgggaggaggccgagcaaatcgccgaccgcgtggtccgtatgccgattgccgcccccgcatccggcggccccgtcacggccaccgtcaccgagccggccgtatcctccaactag

SEQ ID NO: 27453 - protein, 557 aa, Bifidobacterium longum DJO10A
MTVAPHSFDADEFHDSAEPHASAEPASPAAVLKDIRFSYDRGTSWALDGVSLTVHAGERLCLVGPNGSGKSTLARLIAGLTAPDGGEVTLLGQRVYAAGPNADAYRAARHGIGMVFQNPEDQLVTTVLEDDVAFGPENLGLERELIGERIVDSLQAVGLANLRQSDPTRMSGGQQQRASIAGMLAMNPAMLVLDEPTAMLDESARAEVMRILDDLQARGTTIVHVTHHPDETVHADRIVHMEAGRIIGITAAVDNRSPLAEAVSQSETEGSIGTEAAPSRPTNDSPRQREREDGSELPLLSDGIGDMTNPIIRVSHLTYRYPSAKRAVIDDLSFTIARGETVALMGVNGSGKSTLVRMLCALTAPTAGSIEVAGVPVASTGKRGRNVRPKSANRKQLAQLRRHVGYVMQHPEHQLFADTVAEDVAYGPRNQGLGETEVADRVRESLELLHIGHLADRSPFDLSGGQQRLAAIAGVLACNPDVLIMDEPTASLDAQAKKRIHELLRTLKSRGVTVLIITHDREEAEQIADRVVRMPIAAPASGGPVTATVTEPAVSSN

SEQ ID NO: 27454 - DNA, 1518 bp, Haemophilus somnus 129PT
  CDS (1)..(1518)
atgaatgatttgagtcgttctccatatattttagagatgcggaatgtatctaaaacattccccggcgttaaagcattggacggcattaacttaaaagtcaagcgtggaaccattcatgccttaatgggggaaaacggtgcaggtaaatcaacgttaatgaaaattctctacggcatctatacgccggatgccggtggagaattaattttagatgataagccttttaaaccgagtgcaccgattgatgctattcgcaccggtttgacaatggtaccacaagaaatttctccggcagggaatttaactattgcagataacttctatcttggacgagaaattactcgcagtaaattctttttaaatcaaaaagaaatggattgtaaaacagcggaaatcttaaatgaattgggtattccgatggatgtaaccgctaaaatgtcagatgtttccgtagcgaaggcacaattggttgcgattgctaccgcagtttctaatgatgcgaaagtaattattatggacgaaccgacaacggcattaacagaagtagaggttgaacagctttataaaattattgaaacggtaagacaaagagggatttcaattatctttatttcacataagttagatgaagtttttcgtgtttctgatgaaatcacagtaattcgtgatggtcaatatgtaggtacgaaactaacctcagaagtaaccaaagatgaattgatttctatgatggttggtcgtgatatgtcagaaatgttccaacgtgaacgtattgtcatttctgatgaagttgtactcgaaattaaaaatttctctcgtgcaggcaaatatcatgatattaatttccaagtgcgtagaggagaaatctttggtattgccggtctagttggtgcaggtcgttctgagattgtagagggattgtttggttataaactggctgatagtggtgaaatctatgttcatggcgaaaaagccgatattaaaaccccgttagatgctatgaaatacaaaattggctttgtaacggaagatcgtaagttaacaggactgtttttaaatttaagtattactgacaatatgattatgcctagaatgtccccttacttggaaaattttttagtgtcggtgacaaaagcacagaagtcagcaaatgctcaaaaagataaattaaaaattaaagcaccaaatgttgaggtcattaccaataatttatctgggggtaatcagcaaaaagttttattggctcgttggttattacttgagccggatattttaattttagatgaaccaacaaaaggtattgatgttggggcaaaagctgagctttataaactcatggtggaattagcaaaacaaggtaagagtattatcatgattacatcagatatgcttgaattgctttcgatgagtgacagagtgatggtaatgcacgaaggtcgtgtagccggaattattccacaagaagaattgacccaagaacgggtacttgaattagcatccggtttaggtcaagtataa

SEQ ID NO: 27455 - protein, 505 aa, Haemophilus somnus 129PT
MNDLSRSPYILEMRNVSKTFPGVKALDGINLKVKRGTIHALMGENGAGKSTLMKILYGIYTPDAGGELILDDKPFKPSAPIDAIRTGLTMVPQEISPAGNLTIADNFYLGREITRSKFFLNQKEMDCKTAEILNELGIPMDVTAKMSDVSVAKAQLVAIATAVSNDAKVIIMDEPTTALTEVEVEQLYKIIETVRQRGISIIFISHKLDEVFRVSDEITVIRDGQYVGTKLTSEVTKDELISMMVGRDMSEMFQRERIVISDEVVLEIKNFSRAGKYHDINFQVRRGEIFGIAGLVGAGRSEIVEGLFGYKLADSGEIYVHGEKADIKTPLDAMKYKIGFVTEDRKLTGLFLNLSITDNMIMPRMSPYLENFLVSVTKAQKSANAQKDKLKIKAPNVEVITNNLSGGNQQKVLLARWLLLEPDILILDEPTKGIDVGAKAELYKLMVELAKQGKSIIMITSDMLELLSMSDRVMVMHEGRVAGIIPQEELTQERVLELASGLGQV

SEQ ID NO: 27456 - DNA, 1566 bp, Pseudomonas syringae pv. syringae B728a
  CDS (1)..(1566)
atgcagttcggccccaaacctttgttcgagaatgtctcggtcaagtttggcgctggtaaccgttacggcctgattggcgcgaacggctgcggcaagtccacgttcatgaaaatcctcggtggcgacctcgagccttcgggtgggcaggtgatgctggagccgaacgtgcgtctgggtaaactgcgccaggatcagttcgcctatgaagagttcacggtgctcgacaccgtgatcatgggtcacgaagagctgtggaaggtcaaggccgagcgcgaccgcatctattcgctgccggaaatgagtgaagacgacggcatggccgttgccgagctggaaaccgagtttgccgaaatggacggctacactgccgaatcccgcgccggtgaattgctgttgggtctgggtatcggcatcgaacagcacaacggcccgatgagcgaagtctcgccgggctggaagctgcgcgttctgctggcgcaggcactgttctctgatccggaagtgctgctgctcgacgaaccgaccaaccacctggacatcaacaccattcgctggctggaaaacatcctgacccagcgtaacagcctgatgatcatcatctcccacgaccgtcacttcctgaacagcgtgtgcacgcacatggccgacctggattacggcgagttgtgcctgttcccgggcaactatgacgagtacatgaccgtggcgacccagtcccgcgagcagctgctgtccgacaacgccaagaagaaagcccagatttccgaactgcaatcgttcgtcagccgcttctcggccaacgcctcgaaagccaagcaggccacctcccgagccaaggcgatcgacaagatccagctggccgaggtcaagccatccagccgtgtcagcccgttcattcgtttcgagcagaccaaaaagctgcaccgtcaggcggtcatcgtcgatcgcatggccaaaggcttcgacggcaagaccctgttcaaggacttcagcttccaggtcgaagccggcgagcgtgtggccatcatcggcccgaacggcatcggcaagaccaccctgctgcgcaccctggtcaacgagttgcaggcggatgccggcacggtcaagtggaccgacgcagcggaaatcggctattacgctcaggaccatgctcacgatttcgaggatgactccaccctgttcgactggatgggtcagtggacccagggcggcgagcaactggtacgtggcactctgggccgcatgctgttctccaacgacgagatcctcaaatcggtgaaggtaatttccggtggtgaacagggccgcatgctgttcggcaagctgatcctgcaaaagcccaacgtgctggtgatggacgaaccgaccaaccacctggacatggaatccatcgagtcgctgaacctggcgctggaaaactatccaggcacactgattttcgtcagtcacgaccgcgagttcgtgtcctcgctggcaacccgcatcatcgaactcagcccaagtggcgtggtcgatttcagcggcacctatgacgactacctgcgtagccagggcgttacgttctaa

SEQ ID NO: 27457 - protein, 521 aa, Pseudomonas syringae pv. syringae B728a
MQFGPKPLFENVSVKFGAGNRYGLIGANGCGKSTFMKILGGDLEPSGGQVMLEPNVRLGKLRQDQFAYEEFTVLDTVIMGHEELWKVKAERDRIYSLPEMSEDDGMAVAELETEFAEMDGYTAESRAGELLLGLGIGIEQHNGPMSEVSPGWKLRVLLAQALFSDPEVLLLDEPTNHLDINTIRWLENILTQRNSLMIIISHDRHFLNSVCTHMADLDYGELCLFPGNYDEYMTVATQSREQLLSDNAKKKAQISELQSFVSRFSANASKAKQATSRAKAIDKIQLAEVKPSSRVSPFIRFEQTKKLHRQAVIVDRMAKGFDGKTLFKDFSFQVEAGERVAIIGPNGIGKTTLLRTLVNELQADAGTVKWTDAAEIGYYAQDHAHDFEDDSTLFDWMGQWTQGGEQLVRGTLGRMLFSNDEILKSVKVISGGEQGRMLFGKLILQKPNVLVMDEPTNHLDMESIESLNLALENYPGTLIFVSHDREFVSSLATRIIELSPSGVVDFSGTYDDYLRSQGVTF

SEQ ID NO: 27458 - DNA, 1545 bp, Desulfovibrio desulfuricans G20
  CDS (1)..(1545)
atgacccagaacacaccgcttttttcaatggaatccgtcagtgtccggcacaacagcgttccggcactggatgcagtcagctggacgctgcaccgcggtgcgcactgcgccgtgctgggcggcaacggcgccggcaaatcgactctgttacggcttgccgccggagcaatacgccccgaccagcacgacggcggcaccgtattatggtttccccgcggctcggcagaagattcgcccattgccgtacgcacacactgcggtcttgtttcggcagagcagcaggagcactacctgcgccgctcatggcgcataacaggcgaagaaatcgtgctttccggctatttcggcacggacatgctgtaccgtccagccggtacggcacagcgccatgcggccgcccgactggcaaaagcgctggacgcggagcatctgatgccggttatgctcgaagccatgtcgcagggacagttgcgcaaaatccttctggcgcgcgccatggtccattcgccgcagctgcttctgctggatgaagtatgcgaaggtctggatgcagctgcccgccgcgaaatgctggcagccatcgaccgtgcggctgctctgggtaccaccgtgcttatgagcgggcacagagccgggcagtttccggactgtatccggcaggccgtgctgctccgtcagggcaggctggtatttaccggcggactgcatcaggcgctgcacctgatgcgcaccacgcaccagcccttgccggccggtgcatcagacaccgcggccggacagtgcagctgctgcacgccgccccccgcatgtgcgggggcagcgccggtggtggaaatagaacacgccgatgtgtatctgggacgcacgccggtgctgcatgacataacatggagcatattaccggggcagaactgggtggtccgcggcccgaacggagcaggaaaatcaaccctgctccggctgctgtacggcgatcagagacaggcctggggcggtatagtgcgctggttcggcatggccggaccggtgccgcttgaagaagtgcgccgcaacgtggcgctggtctccgacagagtgcaggcgctttacggtcatgacggctaccactccacccggcttgagctgaacggcgaggaactggtgcacaccggtttttacgattccacgggactgtggggaaagacacccgacgcgcaacagcacgccgcagccctgcgctggatggaccggctgggcattgcggcgctggccggcactgacatccgccgcatgtcctacggcacgttacggcgttttatgctggcccgcgctctcgtacgcgatccgcagctgctcatccttgacgaaccgctttccggccttgatgaatccgcccgccgcatcatgcttaccacgctgtccgcacttatgcggtcgggcaggcagctggtgctggtgacccaccatcaggaagacatccagccggaaacaacccatgaactgcacctgaatgccggacgcataacatactgcggaccggtttgccccgcaggagacaccctgtga

SEQ ID NO: 27459 - protein, 514 aa, Desulfovibrio desulfuricans G20
MTQNTPLFSMESVSVRHNSVPALDAVSWTLHRGAHCAVLGGNGAGKSTLLRLAAGAIRPDQHDGGTVLWFPRGSAEDSPIAVRTHCGLVSAEQQEHYLRRSWRITGEEIVLSGYFGTDMLYRPAGTAQRHAAARLAKALDAEHLMPVMLEAMSQGQLRKILLARAMVHSPQLLLLDEVCEGLDAAARREMLAAIDRAAALGTTVLMSGHRAGQFPDCIRQAVLLRQGRLVFTGGLHQALHLMRTTHQPLPAGASDTAAGQCSCCTPPPACAGAAPVVEIEHADVYLGRTPVLHDITWSILPGQNWVVRGPNGAGKSTLLRLLYGDQRQAWGGIVRWFGMAGPVPLEEVRRNVALVSDRVQALYGHDGYHSTRLELNGEELVHTGFYDSTGLWGKTPDAQQHAAALRWMDRLGIAALAGTDIRRMSYGTLRRFMLARALVRDPQLLILDEPLSGLDESARRIMLTTLSALMRSGRQLVLVTHHQEDIQPETTHELHLNAGRITYCGPVCPAGDTL

SEQ ID NO: 27460 - DNA, 1473 bp, Actinobacillus pleuropneumoniae serovar 1 str. 4074
  CDS (1)..(1473)
atgccaaatatcaacatccagaacgccttattttcccttgctcaacacaataaactgtcgattgaatcgctggaaatcaatactcacgatttctgggtgattgtcggcggtaacggctcgggtaaaactgctttcgcccaagcgctacataattcactttcactatattcgggcgaatatcaaaacagcttccaacatatcgctttactttccttcgagcagcaacaaaaaatcatcgagcaaatctttaaacaccgtaacaacgatatgatttcaccggatgatttcggtttaacagcacgtcaaattatcttaaacggtagcgaaaaaacgcaattatgcgaggaatatgaggctaaattacgcattcaaccgttattagatcgcccgtttattcagctctccaccggcgaaagtcgcaaagtgttattttgccaaatgttggttagtgaaccggatttattgattctagatgagcctttcgaagggttagaccaagcctcggtcgcttattggcaagacgttatggcgcaactcggcaagcaaatggcggtggttctgatttctaaccgctttaacgatattcccaactgtgctacgcatatcgctttattggataatctacaactgattttacaaggcgaacgccaagcgattgagcaacaagcggtctattctcagctaaaatttgcagaacagaatgtgaatgcgccgttaccggacagtgccgcaccgctgattcagctcccaccgaataccaatccgttcgaactgaaaaacgtgatgattcgttacggcgaaaaaaccattattgatgatctaacttggacggttgccccaaaacaacattggtggattaaaggcccgaacggagccggcaaatcgaccttactttcgattattaccggcgatcatccgcagtcttatgccaattctgtgcatttattcggtcgtcagcgtggctccggcgaaacgatttgggatattaagaaaaatatcggctatgtaagtagtcaattacatatggattatcgggtgaattgttcggcgttagatgtgattttatccggcttttttgattcaatcggtgtttaccaacaagtgccaagtgccttacagctcaaagcaatggaatggctggaacgcttacatttagccaatctggcgaaaaaaccgttccgttcactttcgtgggggcaacaacgtttattattgattactcgagccatggtaaagcatccgccgattctaattttagacgaacctctgcaaggcttggatggtgtaaaccgcaaattggttaaacagtttatcgagcagttggtcactaacagccaaacccagttgctatttgtttctcatcaagatgcggacgccccaaattgcatcacccatttatttgaatttgtcccgcaagagaatggtggttatcgatacgtacagacggctttgaatcaaatagaaaacgcctga

SEQ ID NO: 27461 - protein, 490 aa, Actinobacillus pleuropneumoniae serovar 1 str. 4074
MPNINIQNALFSLAQHNKLSIESLEINTHDFWVIVGGNGSGKTAFAQALHNSLSLYSGEYQNSFQHIALLSFEQQQKIIEQIFKHRNNDMISPDDFGLTARQIILNGSEKTQLCEEYEAKLRIQPLLDRPFIQLSTGESRKVLFCQMLVSEPDLLILDEPFEGLDQASVAYWQDVMAQLGKQMAVVLISNRFNDIPNCATHIALLDNLQLILQGERQAIEQQAVYSQLKFAEQNVNAPLPDSAAPLIQLPPNTNPFELKNVMIRYGEKTIIDDLTWTVAPKQHWWIKGPNGAGKSTLLSIITGDHPQSYANSVHLFGRQRGSGETIWDIKKNIGYVSSQLHMDYRVNCSALDVILSGFFDSIGVYQQVPSALQLKAMEWLERLHLANLAKKPFRSLSWGQQRLLLITRAMVKHPPILILDEPLQGLDGVNRKLVKQFIEQLVTNSQTQLLFVSHQDADAPNCITHLFEFVPQENGGYRYVQTALNQIENA

SEQ ID NO: 27462 - DNA, 2613 bp, Actinobacillus pleuropneumoniae serovar 1 str. 4074
  CDS (1)..(2613)
atgggtaaatcaactctcttatcactcattgcaggtgtgaaaatcctacagcatgggtctattaccgtctttgatcaaaatattgcgaaccaagccgaacgtgaagctcttactcacaaaatcgccttcatgccgcaaggtttaggcaaaaatctctatctcacgttgtcgatttacgacaacgtcgattttcatgcgcgcctcttcggtctttctccgttacaacgacgagctaaaatccaacgtttacttagagcgaccggcttattaccctttgccgatcgtcccgcaggaaaattatctggcggtatgaaacaaaaacttagtttatgctgtgctttagtacacaatccggatttactgattttagatgaaccgactaccggcgtagatccgctttctcgccgccaattttggcaattagtaaaagaattacgtgccgagtcgccggaaatgacggtaattgttgcaaccgcttatattgatgaagccgaaaattttgcgcacgttttagcgatggataacggcaaaattattgcgcataaacccactcaacaactcattgcagaaatgcaagtacaaaatcttgaacaggcatatatcaaattattacctccggaaaaacgaggagcggaaaacggtattgaaattcagccattccaatattcaccgaatgaaccgcccgttattattgctaaaaatttaaccaaaaaattcggtaattttatttctgtagataatgtcagttttgaaattgccaaaggtgagatctttggcttcctcggttcaaacggttgcggtaaatccaccacaatgaaaatgctaaccggtctactagatcctaccgaaggcgaggcgacattgttaggtcagcctatcaatgccggcgatattgatactcgtaagcgggtaggctatatgtcgcaagccttttcgttgtatgaagagttgagtgtcaaagaaaaccttgcattacacgctaaactttatcaactgccgaaagatgaatggtcaagcagaatccaagcggcattaatgcaatttgatttattagagacggcagaatatacaccggccgatttaccgctggggattcgccaacgattacaactcgctgccgcctgcttacacaaacctgaagttttgattctagacgaacctacatcaggtgtggatcctgccgctcgagatatgttttggtcctatttgattaaactttcacgtgaagatcatatcaccattttcgtaaccacccattttatgaatgaagcggcacgttgcgatcggatttctcttatgcaccgaggcaaagttttagcggttggttcgcctgaagcgttacgccttgaaaaacaatccgccacattagaacaagccttcattaaatatttagaagaacaggcggacgacatcacaatgccaaccgaatccaacgaagtacaggaaattcaagaagaaccggtacaagcggtcaaattttggcaaaaatttacccattacttttctgttatcaccacctttgctttacgagaaagtaaagaattactccgagatagaatccgcttattattcgcattactcgggccgctgattatgttgttggctatggggtccagtatttccttcgatattaatccgttaaaaatggcagtattagatcacgataacagttcggaaagtcgtaaattaattgaaaatttacgaggctcacgttacttcatcttacaagagaatttatattcgatcgatgaaattagctccgtcctacaagtgggtaaagtacgtgttgttttagaaattccggcacacttcggacggaatctactccgccgccaacaaccggaactgggcttgtttattgacggagcttttccttccactgcagaaaatttaaagggttcggccacaggtgttatcttacaatatataaaagatatgcaaaaacaagcaggctttactatcacgcaaaataatctgattgagccaagaatggtttataaccaagatttcaaaagtatttttgcaatgacgccgggaattattatgttagccatggtgatgatcccaacgatgatgaccgcactaagtgtggtgcgtgaaaaagagattggttctattatgaatctatacggctcgccggcttcgtcctttcagtttttatttggcaagcaactgccttatatcgttttagcctttgtaagctatttagtgttggtgctaaccgcaataatagtatttgatgttccgattaaaggctcaattccggcaatgttcttgggtgtcttgttaggcatctgcgcatccaccggttttggtttgctcgtttcaagttttgtgaaatcacaagtcgctgcaatttttgtagcggcaattgtatcaatgatcccgtcggttaatttttctggtgtgatgtatcctgtttcacggctggacgatagtgttcaattggtttctaaaatcttcccgggagcatggtttcaacaaatcagcttaggcggttttactaaaggattaagttttactcaatttgagcagagttatttagctctagccctcatttattttgtttacctcacacttgccactttggcattaaaaaaacaggaaaagtaa

SEQ ID NO: 27463 - protein, 870 aa, Actinobacillus pleuropneumoniae serovar 1 str. 4074
MGKSTLLSLIAGVKILQHGSITVFDQNIANQAEREALTHKIAFMPQGLGKNLYLTLSIYDNVDFHARLFGLSPLQRRAKIQRLLRATGLLPFADRPAGKLSGGMKQKLSLCCALVHNPDLLILDEPTTGVDPLSRRQFWQLVKELRAESPEMTVIVATAYIDEAENFAHVLAMDNGKIIAHKPTQQLIAEMQVQNLEQAYIKLLPPEKRGAENGIEIQPFQYSPNEPPVIIAKNLTKKFGNFISVDNVSFEIAKGEIFGFLGSNGCGKSTTMKMLTGLLDPTEGEATLLGQPINAGDIDTRKRVGYMSQAFSLYEELSVKENLALHAKLYQLPKDEWSSRIQAALMQFDLLETAEYTPADLPLGIRQRLQLAAACLHKPEVLILDEPTSGVDPAARDMFWSYLIKLSREDHITIFVTTHFMNEAARCDRISLMHRGKVLAVGSPEALRLEKQSATLEQAFIKYLEEQADDITMPTESNEVQEIQEEPVQAVKFWQKFTHYFSVITTFALRESKELLRDRIRLLFALLGPLIMLLAMGSSISFDINPLKMAVLDHDNSSESRKLIENLRGSRYFILQENLYSIDEISSVLQVGKVRVVLEIPAHFGRNLLRRQQPELGLFIDGAFPSTAENLKGSATGVILQYIKDMQKQAGFTITQNNLIEPRMVYNQDFKSIFAMTPGIIMLAMVMIPTMMTALSVVREKEIGSIMNLYGSPASSFQFLFGKQLPYIVLAFVSYLVLVLTAIIVFDVPIKGSIPAMFLGVLLGICASTGFGLLVSSFVKSQVAAIFVAAIVSMIPSVNFSGVMYPVSRLDDSVQLVSKIFPGAWFQQISLGGFTKGLSFTQFEQSYLALALIYFVYLTLATLALKKQEK

SEQ ID NO: 27464 - DNA, 2763 bp, Dechloromonas aromatica RCB
  CDS (1)..(2763)
atggaccgcgtgccggtcgcgaagttatccgcagtcagccatcgctacggcgctgtggtggcgctggagggggttgatattgagctgccggccggttgtatggtcgggttgatcgggccggatggcgtcggcaagtcatcgctgctggcgttggtctccggggcacgacagattcagacgggcaaggttgaggtgctgggtggcgatatcggcgaccgccattttcgtgccatggcccagccgcgcattgcctacatgccgcagggactgggcaagaatctgtacccgacgctgtcggttttcgagaatgtcgatttcttcggccggctgttcgggcagggcaaacgagagcgcgagcagcgcatcaatgaactgctgaccagcactggccttgcccctttccgcgatcggcctgcggccaagctgtcaggcggcatgaagcagaagcttggcctgtgctgcgccctgatccacgatcccgacctgctgattcttgacgagccgacaaccggcgtcgatccgctgtcccgtcgccagttctgggaactgatcgacagcatccgcgcccggcggcccggcatgagcgtgctggtggcaacggcctacatggaagaggctgagcgtttcgactggctggtggcgatggacgacggcaaggtgatcggcaccggtacgccggccgaacttcggaaacagaccgggcaggagactctggatggcgccttcattcagttgctgcctgaggaacgtcggcaggctcaccatgcgctggtgattccgccgcgtgtcggcgatggcggcacctttgccatagaggcagatgggctgtcgcagcggtttggcgactttacggccgtcgaccgcgtcagtttcaagatcgaacctggcgaaattttcggctttctcggctccaatggctgcggcaagacgacgacgatgaagatgctgaccggtctgttgccgccaactgagggtgtcgccaagctgttcggcaagatgctcgacgcccgcgatctggagacgcgcaaacaggtcggctacatgtcgcaatccttctcgctgtacggcgagctgacggtgcgtgccaacctcgatctgcacgcccgacttttcaacctgtcggatgatcggcgagggccacgtatcgccgaactgatggcccgttttggcctggagccttatgccgacaaggcggcggccgaattgccgctcggtatccgccagcgcctgtcactggctgtggccgtggtccacgagccgaagctgctgatcctcgacgagccgacttcaggtgtggacccggtagcgcgcgacgaattctgggcgttgctggttgagttgtcgcgccagcaaggcgtgaccatcttcatttcgacccacttcatgaacgaggctgagcgctgcgatcggatttcgctgatgcatgccggcaaggtgctggccagcgatacgccggccagcttgtgcaagacacgcggcgagccgacgctggaggcggcgttcatcagctatctggaagaggcaacgggcattgccggccaggctgccgtgagcagcccggaaaaggtgtccaaaaccgaagcggccgaggttgaaacgcctgatcgcaccaatggagccagtaatcagcggccgagcgccttcagcccgcgccgcctgctcggctacgcctaccgcgaatcgctggaattgcgccgtgatccgatccgcctggctttcgcgctgctcggttcggtgctcttgatgttcgtgctcggctttggtatttcgctcgatgtcgaagggctccgctttggcgtgctcgaccgcgaccagtcaccagagagccgggcctacatccagaatatcgctggttcccgctatttcatcgagcagccgcccatactcgacgatgccgatctcgagcgccgcatgcgtaacggcgagttatcgctggccatcgatattccggccagtttcggccgtgacctgcggcgcagccactggccggaagtcggcgtctggatcgacggtgccatgccctatcgcggtgaaacggtgcgcggctatatccagggcctgcatctcgattacgtgcagcagatcgtccaggaggcgacgggccagactagcagctatccggtcaatatcgtctcgcgattccgctataaccaggacgtcaagagcatctacgccatggtgccggcggtcattcccatcctgctcatcttcattccggccatcctgatggcgctcggcgtcgtgcgcgagaaggaactcggctcgatcaccaatctctacgtcactccggtgacccgcctcgaattcctgcttggcaaacagttgccctacatcgtcgtcgccctgatcagtttcgcgctgctcgtcatccagtcgcagatcatgttccatgtgccgatcaagggcagcctgctcgccctgagcttcggggcctttctctacgtcatcgccaccaccggctttggcctgctgatctccaccttcaccagtacgcagatcgctgcgctgtttggcacggcgatcctgaccatattgccgaccgtcagcttttccgggttgacgacgccggttggtgcgctggaaggcgtcagctactggatcggccagttcttcccggccagctatttcctgatcatcagccgcggcaccttcaccaaggcgctcggttttgccgacctgctgccgcaattcatggcgctggccatcttcatcccggtgctgacgctgatctcggtcgccttgcttaaaaagcaggagaaatag

SEQ ID NO: 27465 - protein, 920 aa, Dechloromonas aromatica RCB
MDRVPVAKLSAVSHRYGAVVALEGVDIELPAGCMVGLIGPDGVGKSSLLALVSGARQIQTGKVEVLGGDIGDRHFRAMAQPRIAYMPQGLGKNLYPTLSVFENVDFFGRLFGQGKREREQRINELLTSTGLAPFRDRPAAKLSGGMKQKLGLCCALIHDPDLLILDEPTTGVDPLSRRQFWELIDSIRARRPGMSVLVATAYMEEAERFDWLVAMDDGKVIGTGTPAELRKQTGQETLDGAFIQLLPEERRQAHHALVIPPRVGDGGTFAIEADGLSQRFGDFTAVDRVSFKIEPGEIFGFLGSNGCGKTTTMKMLTGLLPPTEGVAKLFGKMLDARDLETRKQVGYMSQSFSLYGELTVRANLDLHARLFNLSDDRRGPRIAELMARFGLEPYADKAAAELPLGIRQRLSLAVAVVHEPKLLILDEPTSGVDPVARDEFWALLVELSRQQGVTIFISTHFMNEAERCDRISLMHAGKVLASDTPASLCKTRGEPTLEAAFISYLEEATGIAGQAAVSSPEKVSKTEAAEVETPDRTNGASNQRPSAFSPRRLLGYAYRESLELRRDPIRLAFALLGSVLLMFVLGFGISLDVEGLRFGVLDRDQSPESRAYIQNIAGSRYFIEQPPILDDADLERRMRNGELSLAIDIPASFGRDLRRSHWPEVGVWIDGAMPYRGETVRGYIQGLHLDYVQQIVQEATGQTSSYPVNIVSRFRYNQDVKSIYAMVPAVIPILLIFIPAILMALGVVREKELGSITNLYVTPVTRLEFLLGKQLPYIVVALISFALLVIQSQIMFHVPIKGSLLALSFGAFLYVIATTGFGLLISTFTSTQIAALFGTAILTILPTVSFSGLTTPVGALEGVSYWIGQFFPASYFLIISRGTFTKALGFADLLPQFMALAIFIPVLTLISVALLKKQEK

SEQ ID NO: 27466 - DNA, 1632 bp, Rhodobacter sphaeroides 2.4.1
  CDS (1)..(1632)
atgaccggccgcgacgccagcgacgcgggggcgccggtcctcgacgtgtcgaacctcaccgtccgcttccggcaggacgggcggaccgtcgaggcggtgaagggcgtctccttcaccgtcgggcgcggcgagaccgtggcgctggtgggcgagagcggatcgggcaagtcggtgacggcgctctcgacggtggcactcctgcccgacagcgccgaggtcggcggatcggtccgctacgagggccgcgagatggtgggcgcccccgcggccgagctgcgccgggtgcgcggcaatgacatcagcttcatctttcaggagccgatgacctcgctcaacccgctgcacacgatcgagcggcagatcggcgagagcctcgctttgcatcagggcctcgccggagaggcggcgcgggtgcggatcctcgagctgctgagcaaggtcggcatccgcgatcccgagacgcggctcggcgcctatccgcatcagctgtcgggcgggcagcggcagcgggtgatgatcgccatggcgctggccaacgggccggatctgctgatcgccgacgagcccacgaccgcgctcgacgtgacgatccaggcgcagatcctcgaccttctggccgagctgaagcgcaccgaggggctgagccttctgttcatcacccacgatctcggcgtggtgcgccgcatcgccgaccgggtctgcgtcatgcagggcggcgccatcgtcgagcagggcccggcgcggcgcatcttcgaggcgccggaacatccctatacccggaagctcctcgcggcggagcccacgggcaggcccgatccggtgcccgagggggcgaaggagatcgtgcggaccgacgggctgcggatctggtttccgatccagcgcgggatcctccggcggacggtcggccatgtgaaggcggtgaacggcgtcagcctctcgatccgcgagggcgagacgctgggcgtggtgggcgagagcggctcgggcaagacgacgctcgggctcggcatcctgcggctgatcgagtccgaggggccgatcctctttctcgggcaggagatccacagccgccggtcgcgggcgctgcgcgagatccggcgcgacatgcagatcgtgtttcaggacccgtatggcagcctctcgccgcggatgacggtcgagcagatcgtggccgaggggctgggcgtgcatggcgtcgagccgggacgcgaccgccgctcgatggtggccgagatcctgaccgaggtcgggctcgatccggcggcgatggggcgctatccgcacgaattctcgggcggccagcgccagcgcgtggccatcgcccgcgccatgatcctgcggccgaagttcgtcgtgctggacgagccaacgagtgcgctcgatatgacggttcaggtgcagatcgtggaccttttgcgcgacctgcagcggaaatggggtctggcctaccttttcatcagccacgacctgcgggtggtgcgcgccctctcgcacaaggtgatcgtgatgaaggagggcaatgtcgtcgaggcgggggagggggcggagctcttcgccgcgccgcagaccgactatacccgcacgcttctggcggcggccttcggagacgcggtgcccgaagccgtgtga

SEQ ID NO: 27467 - protein, 543 aa, Rhodobacter sphaeroides 2.4.1
MTGRDASDAGAPVLDVSNLTVRFRQDGRTVEAVKGVSFTVGRGETVALVGESGSGKSVTALSTVALLPDSAEVGGSVRYEGREMVGAPAAELRRVRGNDISFIFQEPMTSLNPLHTIERQIGESLALHQGLAGEAARVRILELLSKVGIRDPETRLGAYPHQLSGGQRQRVMIAMALANGPDLLIADEPTTALDVTIQAQILDLLAELKRTEGLSLLFITHDLGVVRRIADRVCVMQGGAIVEQGPARRIFEAPEHPYTRKLLAAEPTGRPDPVPEGAKEIVRTDGLRIWFPIQRGILRRTVGHVKAVNGVSLSIREGETLGVVGESGSGKTTLGLGILRLIESEGPILFLGQEIHSRRSRALREIRRDMQIVFQDPYGSLSPRMTVEQIVAEGLGVHGVEPGRDRRSMVAEILTEVGLDPAAMGRYPHEFSGGQRQRVAIARAMILRPKFVVLDEPTSALDMTVQVQIVDLLRDLQRKWGLAYLFISHDLRVVRALSHKVIVMKEGNVVEAGEGAELFAAPQTDYTRTLLAAAFGDAVPEAV

SEQ ID NO: 27468 - DNA, 1557 bp, Burkholderia cepacia R18194
  CDS (1)..(1557)
atggacgcacagcttcccgccgcaaccgatgccgccgatggcggcgaagcgaagcccgtcgtgctcgagacgcgcggcgtcggcaagaccttcggtgtcgtgcgcgcgctcaacggcgtctcgctgtcgctgcgtgcgggcgaggtgcacgggctgatgggcgagaacggcgccggcaagtcgacgctgatcaagatcctcaccggcttccaccagcctgatgcgggcgagatcctcgtcgatggcgtaccggtgtcgttcgacagtccgcgtgccgcgcagcgtgcaggcatctgcgcggtctaccaggaaatcaacctgatccccgagcgcagcgtggccgagaacatctttctcggtcacgagccgcgccgcttcggcccgtggatcgaccggcgcgagatgctggcgcgcacgcgcgaaatcgtcgagcgctacgggctcgcggtcgacccggcagacaaggtcgggtcgctcgggctcggccagcagcagatggtgtcgatcgcgcgcggcgtgtcgctcggcgcacgcgtgctgattctcgacgaaccgacgtcggcgttgagcggggcggaagtggaggtgctgttcggtgtcgtcgatcaactgcgtgcgacgggcattgcgatcgtgctggtgagccatcgattatccgagtgctaccggatgtgcgaccggctcaccgtgctgcgcgatggcgcggtcgtgcgcagcgatacgcccgaccggctgccgcgcatggcgctgatctcggcgatgctcggccgcgaggttggcgcgcacggcccacgcgaacaggcggaagcggccgctgccgatacgacgcagacaccggcgctcgccgtcgaccgcttgcgctggggcacgcgcctgcgcgacgtgacgttccgtgtcgcgccgaaggaaatcgtcgggctcgcgggcttgctcggcgcgggccgcaccgaaaccttcaaggccgtgttcggcgcgcagcagccggacggcggcacggtgcgcgtcggcggccgtgtgctcgacggcgcggacccggcgcgggcgattcgcgcggggctcgcgttcctgtccgaggatcgccgctcggaaggcattttctcgaagctgtcggtgcgcgagaacatcgtcgtgtgcgtgctgccgcgtatcgcgcggttcggcttcatttccgtgcgcaagcaggaggcgctcgtcgaacgctatatccgcgagctcggcatcaagacgtcgcatgcgggcgcgccgatctcgacgctgtccggcggcaaccagcagaaggcgctgatcgcgcgctgcctgtcgaccgagccgacggtgctgctgctcgacgatccgacgcgcggcatcgacgtcggcgcgaaggcggaagtacacgacctcgtcaaacggctcgccgatgcggggctggcggtggtcgcgacgtcgtcggagatggaagaactgctcgagctggccgaccggctcgtgatcctgcatgaaggcgcgacgagcggcgagctgtcgacgcgtggcgcgagccccgacgacgtgaccgcgctgctcgcgaaccaggcgtaa

SEQ ID NO: 27469 - protein, 518 aa, Burkholderia cepacia R18194
MDAQLPAATDAADGGEAKPVVLETRGVGKTFGVVRALNGVSLSLRAGEVHGLMGENGAGKSTLIKILTGFHQPDAGEILVDGVPVSFDSPRAAQRAGICAVYQEINLIPERSVAENIFLGHEPRRFGPWIDRREMLARTREIVERYGLAVDPADKVGSLGLGQQQMVSIARGVSLGARVLILDEPTSALSGAEVEVLFGVVDQLRATGIAIVLVSHRLSECYRMCDRLTVLRDGAVVRSDTPDRLPRMALISAMLGREVGAHGPREQAEAAAADTTQTPALAVDRLRWGTRLRDVTFRVAPKEIVGLAGLLGAGRTETFKAVFGAQQPDGGTVRVGGRVLDGADPARAIRAGLAFLSEDRRSEGIFSKLSVRENIVVCVLPRIARFGFISVRKQEALVERYIRELGIKTSHAGAPISTLSGGNQQKALIARCLSTEPTVLLLDDPTRGIDVGAKAEVHDLVKRLADAGLAVVATSSEMEELLELADRLVILHEGATSGELSTRGASPDDVTALLANQA

SEQ ID NO: 27470 - DNA, 1614 bp, Pseudomonas fluorescens PfO-1
  CDS (1)..(1614)
atgaccgacaacctgattgaaatccgcgacctgcgcgtcgccttcgccgggcacgaagtggtgcacggcgtgaacctcgacatccgccgtggcgaatgcctggcactggtcggtgaatccggctcgggcaagtcggtgacggcgcactcgatcctgcgtttgctgccaggcaagaccgtcagtagcacgggcagcatccgctacaacggcgtggacttgctgcacgccagcgaacaacaactgcgcggcttgcgcggcaatcgcatcgcgatgattttccaggagccgatgacctcgctgaacccgttgcacacggtggaaaaacagatcagcgaagtgctggagatccacaagggactcaagggccgcgccgcgcgccagcgcacgctggagctgctggaactggtcggcattcgccagccgttgcagcgtttgaaggcctatccgcaccagctctccggcggccagcggcaacgggtgatgatcgccatggcgctggccaacgaaccggaattgctgatcgccgatgagccgaccacggcgctggacgtgaccgtacagcagaagattctcgagctgctgatcgagttgcagcaacgcctgggcatgtcgctgctgctgatcactcacgacctcaatctggtgcgacgcatcgcccaacgggtgtgcgtgatgcgccacggggagatcgtcgaacaggccgactgcgaaacactgttccgcgccccgcagcatccttacagtcgcctgctgatcgaggcggaaccgtccggcgcgccggtgcagagtcgctacgatcacaacctgctggaggtggacgatctgaaagtctggttcccgctgcccaaggcgttgttcagccgcacccagcaatacatcaaggccgtggacggcgtgagtttccggctgcaacggggcaagaccctggggattgtcggcgagtccggctcgggcaagtcgacgctgggccaggcgattctgcggctggtggaatccgagggcgatattcgcttcggcaacaagcatttgagcctgctcaatcagcgcttgatgcgcccgttgcgccggcagattcaggtggtgttccaggacccgttcggcagcctcagcccacggatgtcggtgcagcagatcatcgccgaaggcctgctgacccacggcatcggcacgcccgaagaacgtgaggctgcggtgatccgcgtcttgaaggaagtcggcctcgatccgcagagccggcatcgctatccccatgagttctccggtggccagcgccagcgcatttccatcgcccgcgcattggtgctggaaccggcgttgattctgctcgacgaaccgacctcggcgctggatcgcacggtgcagaaacaggtggtggagttgttgcggcagttgcagatccgccatggcttgacgtacctgttcatcagccatgacctggcggtggtgcatgcgctggcgcacgacttgatggtgatcaaggacggcaaggtggtggaacaggggtcgtcccgggagatttttgcggcgccgcggcatgcctacacccaggaactcctgaaggcctccggcctggcattggcaaaaaccgggaaagagctggttacaacaatctga

SEQ ID NO: 27471 - protein, 537 aa, Pseudomonas fluorescens PfO-1
MTDNLIEIRDLRVAFAGHEVVHGVNLDIRRGECLALVGESGSGKSVTAHSILRLLPGKTVSSTGSIRYNGVDLLHASEQQLRGLRGNRIAMIFQEPMTSLNPLHTVEKQISEVLEIHKGLKGRAARQRTLELLELVGIRQPLQRLKAYPHQLSGGQRQRVMIAMALANEPELLIADEPTTALDVTVQQKILELLIELQQRLGMSLLLITHDLNLVRRIAQRVCVMRHGEIVEQADCETLFRAPQHPYSRLLIEAEPSGAPVQSRYDHNLLEVDDLKVWFPLPKALFSRTQQYIKAVDGVSFRLQRGKTLGIVGESGSGKSTLGQAILRLVESEGDIRFGNKHLSLLNQRLMRPLRRQIQVVFQDPFGSLSPRMSVQQIIAEGLLTHGIGTPEEREAAVIRVLKEVGLDPQSRHRYPHEFSGGQRQRISIARALVLEPALILLDEPTSALDRTVQKQVVELLRQLQIRHGLTYLFISHDLAVVHALAHDLMVIKDGKVVEQGSSREIFAAPRHAYTQELLKASGLALAKTGKELVTTI

SEQ ID NO: 27472 - DNA, 2721 bp, Pseudomonas fluorescens PfO-1
  CDS (1)..(2721)
atgaacagcgtcgcggttcacgcgaacgccatcactcaccgctatggcgagcggcaagcgctggatggcatcgcgttcggcctgccggccggtacccgctgcggcttgattggccctgacggagcgggcaaatccagtctgttggggctgattgcgggcgtgaaagccctccagcaagggcaactggaagtgcttggcggtccgatccaggatcgcagccaccgcaacacgctgtacgcgcgtatcgctttcatgccgcagggattgggcggcaacctgtacccggaactgtcgatccgcgagaacgtgcattttttcgccaccttgttcggcctctccgccgacgaaagcgcgcagcgcctgcacaacctgttgctcgccactgatctgctgaggttcgccgatcgaccggccggcaaactctccggtggcatgaaacagaaactcggactgtgttgcgcactgattcacgaaccggatctgttgatcctcgacgagccgaccaccggcgtcgatccgctctcgcgccgcaagttctgggaattgatcgacgatgttcggcgccaacgaccgcagctgaccctgctggtcgccacggcctacatggaggaagctgaacaattcgagcattgcctgatgctcgacggcggccggatgatcgccaccggtctgagccgcgaactggctgctgtcacgcccagcggcaagcttgatgacgccttcactcattttcagggtgaaagccgtcacgccactcaaccgctgcacatcccgccttacaccggcaacaccgatattgccatcgaggctcacgacctgacgttgcgtttcggcaactttacggctgtggatcgcgtcagcttcgccatcgggcgaggcgagattttcggtttccttggctccaatggctgcggcaagaccaccacaatgaaagtcctgaccggactgatgcccgccagcgaaggtaacgcaacgctgctgggcaatccggtggatgcgaaggatctggccacgcgcaaacgggtcggattcatgtctcagagcttttcgctgtatggcgaactcagcgtgcggcaaaaccttgaactgcacgcacgcctgttcgatttgccgaaaaccgagagcgcccagcgcatcgacgcgctgattcaacgcttcgatctgcacggtgtcgccaatcaatcgtccggggccttgcctctgggaatacgccagcgcctgtcactggcggtcgcggtcttgcacagcccggaagtgctgattctggatgagccgacctctggagttgatcccgcggcgcgagacgatttctggcgcctgttgatcgaactgtcccgtgatcaaggcgtgaccattttcctttccacccatttcatgaacgaagctcagcgttgcgaccgcatttccctgatgcacgcgggcaaagtgctggcctgtgacacgccgacggcactgcaacaacagtttggcggcaagtccctggaggcggcgttcgtgacctgccttgaacaggctcagggtagtgccgaaaccgccccgcctcccgcgccgtcaccggccccgaaggcgccggccagctccgtcagggagcgggttttcagtttcggtcgtctgacggcagtggctcgccgcgaaggcaaagaactgatccgcgacaaagtgcgcatggcgtttgcactgctgggtgccattttcatgatggtgatttttggcttcgggatttccctggatgtagagaacctggccttcgccgtgtatgaccaggatcaaacgccacaaagccgcgcctatctggaggccttccgcggctcccgctatttcgccgaacagccgcccatcgaagatgcacaggctctgcaccgccggctgcaacgttcggaaatcaaactggcgctggagatcccgcccggattcggccgcgacctgtacgccggacatcggccggaagtcgcggcgtggctggatggcggcatgccctttcgcgccgagaccagtcgcaactacgtcgaggccgtccatctggccaatcttgagcaacttgccgaacaaagcagcccggcattgaccctgtcagccccagccacgctgcagacccgctttcgctataaccaggatgtggtcagcgtcaatgccatcggccccggcgtgatggcgctgattctggccttcattccggcgatgctgactgcgctcggcatcgtgcgcgagaaagagctgggctcgatcaccaatttctacgccacgcccctgacccgcctcgaatttctgctgggcaaacaactaccctatctgctggtcagcctggtcaacctcgccgtgctcgtggcgatgaatcgctggctgttcggcgtgcccttcaagggcagcctgccgacccttgcgttcggcgggctgctgtatgtactggccactaccagcatgggcctgctgatttcagcgttcacccgaacgcagatcgcggcgatcctcggcaccatgatcatcaccagcctgccgaccatccagttctcgggtctgatcgtgccgcgttcttcgctggaaggagccgccgccgtgatgggcttgctgtttccggccggtcacttcctcgacatcgccgtaggaacgttcaccaaagctctggacctgcgtcaactctggccacaatgtctggcgctgggcggcttttttatcgggttcaccggcttgagcctgatcatgctgaagaagcaggaggcctga

SEQ ID NO: 27473 - protein, 906 aa, Pseudomonas fluorescens PfO-1
MNSVAVHANAITHRYGERQALDGIAFGLPAGTRCGLIGPDGAGKSSLLGLIAGVKALQQGQLEVLGGPIQDRSHRNTLYARIAFMPQGLGGNLYPELSIRENVHFFATLFGLSADESAQRLHNLLLATDLLRFADRPAGKLSGGMKQKLGLCCALIHEPDLLILDEPTTGVDPLSRRKFWELIDDVRRQRPQLTLLVATAYMEEAEQFEHCLMLDGGRMIATGLSRELAAVTPSGKLDDAFTHFQGESRHATQPLHIPPYTGNTDIAIEAHDLTLRFGNFTAVDRVSFAIGRGEIFGFLGSNGCGKTTTMKVLTGLMPASEGNATLLGNPVDAKDLATRKRVGFMSQSFSLYGELSVRQNLELHARLFDLPKTESAQRIDALIQRFDLHGVANQSSGALPLGIRQRLSLAVAVLHSPEVLILDEPTSGVDPAARDDFWRLLIELSRDQGVTIFLSTHFMNEAQRCDRISLMHAGKVLACDTPTALQQQFGGKSLEAAFVTCLEQAQGSAETAPPPAPSPAPKAPASSVRERVFSFGRLTAVARREGKELIRDKVRMAFALLGAIFMMVIFGFGISLDVENLAFAVYDQDQTPQSRAYLEAFRGSRYFAEQPPIEDAQALHRRLQRSEIKLALEIPPGFGRDLYAGHRPEVAAWLDGGMPFRAETSRNYVEAVHLANLEQLAEQSSPALTLSAPATLQTRFRYNQDVVSVNAIGPGVMALILAFIPAMLTALGIVREKELGSITNFYATPLTRLEFLLGKQLPYLLVSLVNLAVLVAMNRWLFGVPFKGSLPTLAFGGLLYVLATTSMGLLISAFTRTQIAAILGTMIITSLPTIQFSGLIVPRSSLEGAAAVMGLLFPAGHFLDIAVGTFTKALDLRQLWPQCLALGGFFIGFTGLSLIMLKKQEA

SEQ ID NO: 27474 - DNA, 1911 bp, Pseudomonas fluorescens PfO-1
  CDS (1)..(1911)
atgatccgacttcagaacctgactttacagcgtggcccgcaacgtctgctagaagacgccgagctgaccctgcacgccggccacaaagccggcctcatcggtgccaacggcgccggcaaatccagcctgttcgccttgctccgcggtgagttgcacccggactcgggcgactgcctgctgccggccgactggcgtatcgcccacatgcgccaggaggtcgacacactcgagcgtctggcggtcgactatgtgctcgacggcgacctgcgcctgcgcgaagtgcagcgtgagctcgcggcagccgaagaggcccacgacggcaccgcgctggcccgtctgcacgccgaactcgacagcgccgacggctacaccgccgatgcgcgtgcacgcaagttgctcgccggcctcggattcaccaacgagcagatggatcgtcaggtaggagatttctccggtggctggcggatgcgtctgaaccttgcgcaggctttgatgtgcccatcagacctgttgctgctcgacgaaccgaccaaccacctggatctcgacgccatcatctggctcgaagagtggctgaaaagttaccccggcaccttgctgctgatttctcacgaccgggacttcctcgatgaagtggtcgatcacgtggcccacgtcgatcagcgcaagctgacgctctaccgtggcggctacaccgcgttcgaacgcgcccgtgccgagcgtctggcccagcagcaacaggcctacgagaagcaacaggcgcagcgtgcgcacatggaaagctacatcgcccggttcaaggcccaggcgaccaaggcccgtcaggcccagagccggatcaaggcgctggagcgcatggaagagctgtcggctgcccacgtcgactcgccgttcgatttcgtgttccgcgagtcgaccaagatctccagcccgctgatcgatctgtccgatgcacgtctgggttatggcgagaaaaccgtgctggagaaggtcaagctgcaactgacccccggcgcgcggatcggcttgctcggccccaacggcgcgggtaaatcgaccctgatcaagaaccttgccggcgagctgtcaccgctggccgggcgcctgactcgcggtgagaacaccgtggtcggttacttcgctcagcatcaactcgactcgctggattccaaggccagcccgttgctgcacttgcagcgtctggcgccgaccgagcgcgagcagaccctgcgcgatttccttggtggtttcgacttccgtggcgcacggatcgacgaaccggtgctgaatttctccggtggcgaaaaggcccgtctggccctggcgctgatcgcctgggaacggccgaacctgctgctgctcgacgaaccgaccaaccacctcgacctggaaatgcgcctggcgctgaccatggcgttgcaggaattcagcggcgcggtgttggtggtttcccacgatcggcatctgctcaagagcaccaccgacaacttcttcctggtcgcggacagcaaggtcgaggagttcgatggcgaccttgaggactacgcccgttggctggtcgagtaccgtcagcgcaacgccccggtcagcaacacaccggtcaacccggacaagaccgacaagaaggcccagcgtcaagccgccgctgcgttgcgtcagcaactggcgccgcacaagcgcgaagccgacaagctcgaagccgagctcggcaagctgcacgagaagttggcgaaggtcgatgccagccttggcgacagcgacctctacgagccggcgcgcaagaacgaattgcgtgacttgctggccgaacaggccaagctgaaagtccgcgaaggcgaacttgaagaagcgtggatgcaagccctggaaaccctggaaagcatgcaggcggagctggaggcgttgtcctga

SEQ ID NO: 27475 - protein, 636 aa, Pseudomonas fluorescens PfO-1
MIRLQNLTLQRGPQRLLEDAELTLHAGHKAGLIGANGAGKSSLFALLRGELHPDSGDCLLPADWRIAHMRQEVDTLERLAVDYVLDGDLRLREVQRELAAAEEAHDGTALARLHAELDSADGYTADARARKLLAGLGFTNEQMDRQVGDFSGGWRMRLNLAQALMCPSDLLLLDEPTNHLDLDAIIWLEEWLKSYPGTLLLISHDRDFLDEVVDHVAHVDQRKLTLYRGGYTAFERARAERLAQQQQAYEKQQAQRAHMESYIARFKAQATKARQAQSRIKALERMEELSAAHVDSPFDFVFRESTKISSPLIDLSDARLGYGEKTVLEKVKLQLTPGARIGLLGPNGAGKSTLIKNLAGELSPLAGRLTRGENTVVGYFAQHQLDSLDSKASPLLHLQRLAPTEREQTLRDFLGGFDFRGARIDEPVLNFSGGEKARLALALIAWERPNLLLLDEPTNHLDLEMRLALTMALQEFSGAVLVVSHDRHLLKSTTDNFFLVADSKVEEFDGDLEDYARWLVEYRQRNAPVSNTPVNPDKTDKKAQRQAAAALRQQLAPHKREADKLEAELGKLHEKLAKVDASLGDSDLYEPARKNELRDLLAEQAKLKVREGELEEAWMQALETLESMQAELEALS

SEQ ID NO: 27476 - DNA, 1563 bp, Pseudomonas fluorescens PfO-1
  CDS (1)..(1563)
atgcagttcggcgccaagccgctgtttgaaaacgtttcggtcaaattcaacggcggcaaccgctatggcctgatcggcgccaacggttgcggcaagtcgaccttcatgaaaatcctcggcggcgacctcgagccgtccggtggccaggtcatgctggagccgaacgtacgcctgggtaaactgcgccaggatcagttcgcctacgaagaattcaccgtgatcgacaccgtgatcatgggtcacgaagagctgtggaaggtcaaggccgagcgcgaccgcatctactcgctgccggaaatgagcgaagaagacggcatggccgtggccgagctggaaaccgagttcgccgagatggacggctacaccgccgaatcccgcgccggtgaactgctgctgggtctgggcattccgctggaacagcatttcggtccgatgaccgaagtcgcgccaggctggaaactgcgtgttctgttggctcaggcactgttctccgatccggaagtgctgctgctcgacgaaccgaccaaccacctggacatcaacaccatccgctggctggaaacgattttgacggcgcgtaacagcaccatgatcatcatttcccacgaccgtcacttcctcaacagcgtctgcacccacatggccgacctggactacggcgagctgcgtctgttcccgggcaactacgacgagtacatgaccgcggcgacccagtcccgcgagcaactgctgtcggacaacgccaagaagaaagcccagattgccgaactgcaaacgttcgtcagccgcttctcggccaacgcctcgaaagccaagcaggccacttcccgcgccaagcagatcgacaagatccagctggccgaggtcaagccatcgagccgcgtgagcccgttcatccgtttcgaacagaccaagaagctgcaccgccaggccgtgaccatcgagcagatgtccaagggcttcgacggcaagactctgttcaagaacttcagctttaccgttgaagccggcgagcgcgtggcgatcatcggcccgaacggtatcggcaagaccaccctgctgcgcaccctgatgggcgaactgaccccggacacaggctcggtgaagtggaccgaaagcgcggagctgggctactacgctcaggaccatgcccacgacttcgaagaggacgtcagcctgttcgactggatgggtcagtggactcaaggcgaacaagtgatccgtggcaccctcggtcgcatgctgttctccaacgacgagatcctcaagtcggtgaaggtgatttccggtggtgagcaaggtcgcatgctgttcggcaagctgatcctgcaaaagccgaacgtgctggtgatggacgaaccgaccaaccacctggacatggaatcgatcgaggcgctgaacctggcgctggaaaactacccgggcacgctgatcttcgtcagccacgaccgtgagttcgtatcgtccctggccacgcgcatcatcgagctgagcccgaatggcgtgaccgacttcagcggcacctacgacgattacctgcgcagccaaggcgtagtgttctga

SEQ ID NO: 27477 - protein, 520 aa, Pseudomonas fluorescens PfO-1
MQFGAKPLFENVSVKFNGGNRYGLIGANGCGKSTFMKILGGDLEPSGGQVMLEPNVRLGKLRQDQFAYEEFTVIDTVIMGHEELWKVKAERDRIYSLPEMSEEDGMAVAELETEFAEMDGYTAESRAGELLLGLGIPLEQHFGPMTEVAPGWKLRVLLAQALFSDPEVLLLDEPTNHLDINTIRWLETILTARNSTMIIISHDRHFLNSVCTHMADLDYGELRLFPGNYDEYMTAATQSREQLLSDNAKKKAQIAELQTFVSRFSANASKAKQATSRAKQIDKIQLAEVKPSSRVSPFIRFEQTKKLHRQAVTIEQMSKGFDGKTLFKNFSFTVEAGERVAIIGPNGIGKTTLLRTLMGELTPDTGSVKWTESAELGYYAQDHAHDFEEDVSLFDWMGQWTQGEQVIRGTLGRMLFSNDEILKSVKVISGGEQGRMLFGKLILQKPNVLVMDEPTNHLDMESIEALNLALENYPGTLIFVSHDREFVSSLATRIIELSPNGVTDFSGTYDDYLRSQGVVF

SEQ ID NO: 27478 - DNA, 1662 bp, Rhodospirillum rubrum
  CDS (1)..(1662)
atgaccaccgtgactccgcccctcccggtcgcccctctgctgccccccctgctgtcggttgaaaaccttcaggtgcgctttggcgccggccccgaggccgttgacgccgtgcgcggcgtgtcgttcaccatcgccaagggcgaaaccctggccctggtcggcgaaagcggctcgggcaaatcggtcaccgccctgtcgatcacccgcctgttgccctatccgccggccagccaccccggcggcgccatcttcttcgatagcgaagacctgctccatgccccgggtgcccgcctgcgcgacgtgcgcggcaacaggatttcaatgatcttccaggagccgatgacctcgctcaacccgctccattccatcgagcgtcaggtgggcgaggtgctgaccctgcacaagggcctgcacggcaaggcccgccgcgcccgggtgatcgacttgctgcgcttggtcggcctgccccaggtcgaggggcgcctgggcgccctgccccatgagctgtcgggcggccagcgccagcgggtgatgatcgccatggcgctggccaacgaacccgatctgctgatcgccgacgaaccgaccaccgcccttgatgtcaccatccaggcccagatcctggccctgctcgccgatctgcaaaagcgcttcggcatggcgatcttgttcatcacccatgatctgtcgatcgtccgccgggtcgccgaccgggtggcggtgatgaaggacgggctgatcgtggaaaccggcacgacggcggcgctgtttgccgcccccagccatccctacaccaaagccctgttggccagcgagccgcgcggcacgccgcgccttgttcccaacgcccccgagatcctgtcctgtgacgacctcaaggtctggtttcccatccgcaaaggggtgatccgccgcaccgttggtcacatcaaggcggtcgacggcatctcgttttcgctgaaggccggggaaaccttgggggttgtcggcgaaagcggcagcggcaagaccacccttggcctgggcctgttgcgcctagtgtcctcgcaaggcgccatcgtcttttccggcacccggctggacggactgtcgaacacggcgatgcggcctttgcgccgccgcttgcagatcgtcttccaagacccctatggctcgctctccccccggctttcggtcggcgagatcattggcgaggggctggccgtccatggcttggccggcgatcgcgccggccgccgcgccctggtcacccaggctttgagcgaagtcggcctcgatccggcgacccaggaccgctatccccacgagttttccggcggtcagcgccagcgcatcgccatcgcccgcgccctggtgctcaagcccgaggtgatcgtgctcgacgagccgaccagcgcccttgacgtcacggtgcaggcgcagatcgtcgatctgctgcgcgacatccaaacccgccacgccatcgcctatgtcttcatcagccatgatctgcgcgtcgtccgcgccctggccgcccaggtgctggtgatgaaggacggcaaggtggtcgaggccggaagcggcgagcagatcttccaggcgccgcgccatgactatacgcgcgccctgctcgccgccgccctgtcccttgaagccgacagcagcggcatcgtgaaaaattaa

SEQ ID NO: 27479 - protein, 553 aa, Rhodospirillum rubrum
MTTVTPPLPVAPLLPPLLSVENLQVRFGAGPEAVDAVRGVSFTIAKGETLALVGESGSGKSVTALSITRLLPYPPASHPGGAIFFDSEDLLHAPGARLRDVRGNRISMIFQEPMTSLNPLHSIERQVGEVLTLHKGLHGKARRARVIDLLRLVGLPQVEGRLGALPHELSGGQRQRVMIAMALANEPDLLIADEPTTALDVTIQAQILALLADLQKRFGMAILFITHDLSIVRRVADRVAVMKDGLIVETGTTAALFAAPSHPYTKALLASEPRGTPRLVPNAPEILSCDDLKVWFPIRKGVIRRTVGHIKAVDGISFSLKAGETLGVVGESGSGKTTLGLGLLRLVSSQGAIVFSGTRLDGLSNTAMRPLRRRLQIVFQDPYGSLSPRLSVGEIIGEGLAVHGLAGDRAGRRALVTQALSEVGLDPATQDRYPHEFSGGQRQRIAIARALVLKPEVIVLDEPTSALDVTVQAQIVDLLRDIQTRHAIAYVFISHDLRVVRALAAQVLVMKDGKVVEAGSGEQIFQAPRHDYTRALLAAALSLEADSSGIVKN

SEQ ID NO: 27480 - DNA, 1569 bp, Burkholderia fungorum LB400
  CDS (1)..(1569)
atgaatcaggacgcaatttcaccggctttgccgaattcaccgcagtccgaagcgtctctgccgttcctgcaggttgtcggcgtgcacaagcgcttcaccggcgtgcatgcgctgcgcggcgtgagtctgtcattcgaacgcggccagatctatcacctgctcggcgaaaacggttgcggcaagagcacgctcatcaagatcatctccggcgcgcagccgcccgacgaaggcgaactcgtgatcgaaggcgtgcggcatgcgcggctctccgcgctcgaatcgctcgccgcgggcattgaaaccgtttatcaggatctctcgctgctgcccaacatgaacgtggccgaaaacgtcgcgctcacgtccgagctggccacgcacgcgggcaagctggtccgcaccttcgaccggcgcgagctggcgcgcacggccgcgcgcgcgctcgaagcggtcggcctgcccggcactgcggagtttcaggcgacgctgatcgagcaattgccgctcgccacgcggcaactcgtggcgattgcccgcgcgattgccagcgaggcgaagttcgtcatcatggatgagcccaccacgtcgctcacgcagaaggaagtcgacaatctgattgccgtgctcgccaatctgcgcgctcagggtgtcaccgtgctgttcgtgagccacaagctcgacgagtgctacgcgatcggcggcgaggtgatcgtgctgcgcgacggacagaaaatggcgcaaggaccgatcgcgcaattcaccaaagcgcagatcagcgaactgatgacgggcaggcatctgtcgaacgagcgctatcgcgagggcgcatgcgagcagaacgtcgtgctcgatgtgcggggttatacgcgcgccggccagttcagcgatgtgtcgttcgcgctgcacggcggggagattctgggcattacagggctgctcgattcggggcgcaacgaactcgcgcgtgcgcttgccggtgtcgcgcccgcgcaatccgggcaggtgctgctcgacggcaaggccgtttctctgcgcacaccttcggacgcgaaggagcaccgcatcggctatgtcccggaagaccgcctgaacgaagggctttttctcgacaagtcgattcgcgacaacgtgatcaccgcgatgatctccagtttgcgcgaccgcttcggccaggtggatcgcagccgtgcacaggcgctcgcggagcagacggtgaaggatctgcagatcgccacgccgggtgtggacaaacccgtgcaatcgctttcgggcggcaaccagcagcgcgtgctgattggacgctggctcgcgatcgacccgcgcgtgctgattctgcatggaccgacggtgggcgtggacgtgggctcgaaggacatcatttaccgcatcatgcagcgcctgtcgcaacgcggcatcggcatcattctgatcagcgacgacttgcccgaactgctgcagaactgcgaccgcatcctgatgatgaagaaagggcgcgtggccggagaataccaggccgccacgttgagcgaagccgatctgtatcacgcgctgctttcggaagccgcataa

SEQ ID NO: 27481 - protein, 522 aa, Burkholderia fungorum LB400
MNQDAISPALPNSPQSEASLPFLQVVGVHKRFTGVHALRGVSLSFERGQIYHLLGENGCGKSTLIKIISGAQPPDEGELVIEGVRHARLSALESLAAGIETVYQDLSLLPNMNVAENVALTSELATHAGKLVRTFDRRELARTAARALEAVGLPGTAEFQATLIEQLPLATRQLVAIARAIASEAKFVIMDEPTTSLTQKEVDNLIAVLANLRAQGVTVLFVSHKLDECYAIGGEVIVLRDGQKMAQGPIAQFTKAQISELMTGRHLSNERYREGACEQNVVLDVRGYTRAGQFSDVSFALHGGEILGITGLLDSGRNELARALAGVAPAQSGQVLLDGKAVSLRTPSDAKEHRIGYVPEDRLNEGLFLDKSIRDNVITAMISSLRDRFGQVDRSRAQALAEQTVKDLQIATPGVDKPVQSLSGGNQQRVLIGRWLAIDPRVLILHGPTVGVDVGSKDIIYRIMQRLSQRGIGIILISDDLPELLQNCDRILMMKKGRVAGEYQAATLSEADLYHALLSEAA

SEQ ID NO: 27482 - DNA, 786 bp, Thermobifida fusca
  CDS (1)..(786)
atgaacgggcacgtgctgcacatgagcggggtcggggtacgccgcggccagacggtgttgctggacgcagtggactggactgtggcggaaggggagcgctgggtggtcgtgggaccgaacggtgcaggcaagaccaccctgctgcggatcgccgccactcaactgcaccccacccggggcacggtggaggtgctcggtgagcggctcggccgcggagacgtgttcgagctccggccgatgattggcttcgcctcgtctgcggtggccgcccagcttgaggacgacatgcgcgtccgggacgtggtggtcagcgccgcctacggctatctgggcacagggaaagaggagtacagcgcccctgactatgcgcgggcccgggcactgctgggccggtggggagtgctgcggttcgaggaccgtgcgttcggcaccctttcggaaggggaacgcaaacgggtgctgatcgcccgagcgttgatgtccaacccggagctgctgctcttggacgagcctgcggccgggctcgacttgggcgcgcgggaggatctggtgcgccgcctcggcacgctcgcgaaagacgagtctgcccccgctctcgtgctcgttacccaccatgttgaggagattccccccgggtttacgcacggcctgctgctgcgcggaggcaaggtggtggccgcggggccgctggagcaggtgatgaccgccgaccacctcagcaccacgttcggtatcgggctgaaggtggagttcgacggggagcgctggtcggcccgagcgtcgtaa

SEQ ID NO: 27483 - protein, 261 aa, Thermobifida fusca
MNGHVLHMSGVGVRRGQTVLLDAVDWTVAEGERWVVVGPNGAGKTTLLRIAATQLHPTRGTVEVLGERLGRGDVFELRPMIGFASSAVAAQLEDDMRVRDVVVSAAYGYLGTGKEEYSAPDYARARALLGRWGVLRFEDRAFGTLSEGERKRVLIARALMSNPELLLLDEPAAGLDLGAREDLVRRLGTLAKDESAPALVLVTHHVEEIPPGFTHGLLLRGGKVVAAGPLEQVMTADHLSTTFGIGLKVEFDGERWSARAS

SEQ ID NO: 27484 - DNA, 1506 bp, Cytophaga hutchinsonii
  CDS (1)..(1506)
atgccctctcccatcatacacgcacaaaacctttctctttccatcgaatcagaaaatatcttaaacaacatttccttttctatcaatacgggggaatgtattgttctgacaggtgcttccggaagcggcaaaacaagtcttgcaaaaatacttgccgggcattggaaagcgtcttccggtgagatacatttttcttcacctgacttaaaaaaaaccattgtacagcagcagcatgatttcaggtatgcattcgaaacaaagtcgtattttggtcagcgttacgaccgtaattacagcggcaacttccctacggtaaacgatattctgttaaaagaaaaatctgcggcaactgatctgcaaagagttgttactcaattaaacttatctgaaaaactgcagcagcctgttattgagctgtcaaacggagaaggcaagcgtctgcagcttgcgctggcactgcttacaaaaccggatgtattaattcttgaccagccatttataggcctggatactgcaacacgcggtgagctgcatcagttgctggaaaagattaaagaacaaaaaattaccgttatcctcattactacaccggatgaaattccggcatgtgccgatcagatttttttaatgagagccggaacgctttgtgcgcaaacaaaagatgcgcctggcattatagaagaaatgcaacagcaacaaaacggatctgttaactgggaagatttaaaagaaatttctgtctctgcatttccgccgtttgaagttgcggtacacatgaatcacgtgaacgtttcttttggtaataaaaaaatactcgatgacatttcgtggacagtaaaacgcggtgagcattgggccttacttgggcataatggttcgggtaaatcaaccttgctgagtctgatcaatgcagataacccgcaggtatacctgaatgatgtatttctttttgatcaaaaacgcggaaatggtgaaagcatctgggagatcaaaaaaaagatcggttatgtttctccggaaatgcataaccacgtgttgcgtggcagcagctacattcaatcgcaggcattagctaaaaacgattattcgctgggcgggttttcacaggataaaaccacttgttttgaaattgttagttcaggtgtaaacgaccaggttggttcttccacgcgcctaacggctatgcagcaaaagacggttacgtactggatggaagcgctggatgtgattcacctgaaacaaagagctttttataaaacatcgttaggacagcagcgtttgctgttgcttgcacgtgctctggtaaaaaacccaccggtgctgattttagatgaaccttgtcagggcctggataaagaacagacccagcgttttacttcattggttgatacagtctgcaatcacattgaaaaaacattgatctatgtttcacactatgccagcgatatgccgtcgtgtattgatcatgtcttaatgcttgaaaacggacgggtgaaagaaaactaa

SEQ ID NO: 27485 - protein, 501 aa, Cytophaga hutchinsonii
MPSPIIHAQNLSLSIESENILNNISFSINTGECIVLTGASGSGKTSLAKILAGHWKASSGEIHFSSPDLKKTIVQQQHDFRYAFETKSYFGQRYDRNYSGNFPTVNDILLKEKSAATDLQRVVTQLNLSEKLQQPVIELSNGEGKRLQLALALLTKPDVLILDQPFIGLDTATRGELHQLLEKIKEQKITVILITTPDEIPACADQIFLMRAGTLCAQTKDAPGIIEEMQQQQNGSVNWEDLKEISVSAFPPFEVAVHMNHVNVSFGNKKILDDISWTVKRGEHWALLGHNGSGKSTLLSLINADNPQVYLNDVFLFDQKRGNGESIWEIKKKIGYVSPEMHNHVLRGSSYIQSQALAKNDYSLGGFSQDKTTCFEIVSSGVNDQVGSSTRLTAMQQKTVTYWMEALDVIHLKQRAFYKTSLGQQRLLLLARALVKNPPVLILDEPCQGLDKEQTQRFTSLVDTVCNHIEKTLIYVSHYASDMPSCIDHVLMLENGRVKEN

SEQ ID NO: 27486 - DNA, 1377 bp, Oenococcus oeni PSU-1
  CDS (1)..(1377)
atgactacgagtttgtttcatgtcagcctttcttacggcgacaaaaaaattatcaatgatctcaatatcgagtttcaagatgctagttttaatttattgattggtccctcgggtattggaaaatcaacttttttacgaattttagccgggttttatccgcaaatagaaggaaaagtcattgttgctgataaaacgattgatagtttgccggccaatcagcgggctcgatatgttggttttctgtttcaagatccaaatactcaatttgccatgacgacggcttttgaggaacttgtttttaccttggaaaatttgcagattccccgagacgaaattcgagaaagggttcaaaaagcaatcgatttcgttgggattaatcaattttccaattcaaaaataaattctctctcgggtggtgaaaagcaaaaggtcgctctatctgtgattgtggcaatggaaagtaagttactccttcttgatgaaccctttgcaaatattgatcaaccatcgagagaatatttactgaaaaaacttaagcagcttcaagcacgcggtataacaattatagtcgtcgaccatgatttatctgcttatgaaaagccggccgaccaagtttggctaatggaagatagaaaaattaaaccgatcagcgagaaggaatttaaaaaacgtttgccgatacgtcaaagttttgattttgcggttcccaaaaagggtagactcgtttgtaatgatttaaccgtcaaggttggagataggaaactttttttcgttaaccatctacctttggcggaatctggaatcactctgttaaccggagataatggcactggaaaatcgactttctttagtgctttgactcgtctgaaggattatgaaggcaaaatcgcttacctcggtaaggatatttctaaattaaaggttcctcgatacatgaaggaagtggcacttgtttttcaaaattcggaaaaacaatatctgcgtatgacagtcagtgaggaactgaccttgagtctggaacagactcgtcatccagcagactggccaccagaagtggttgatgaatatttgcagcgcctcaacctgttcgggctcggtgatcagattatttatcaactttccggtggacaaaagaaaaaattgcagttaattgtgatgctgattatggaaacaccgatcttattactcgatgaacctttggctggtctggattttcagtctgttgagcaggtatctaagattttacgcgaaatcgccgatcgcaaacgtcaacgttttgtaatcatcagtcatcaacttgaccgtttattgccgaaagtcgatttttatctacgtttggaaaatcagactttaaagtatcaggagcatttattatga

SEQ ID NO: 27487 - protein, 458 aa, Oenococcus oeni PSU-1
MTTSLFHVSLSYGDKKIINDLNIEFQDASFNLLIGPSGIGKSTFLRILAGFYPQIEGKVIVADKTIDSLPANQRARYVGFLFQDPNTQFAMTTAFEELVFTLENLQIPRDEIRERVQKAIDFVGINQFSNSKINSLSGGEKQKVALSVIVAMESKLLLLDEPFANIDQPSREYLLKKLKQLQARGITIIVVDHDLSAYEKPADQVWLMEDRKIKPISEKEFKKRLPIRQSFDFAVPKKGRLVCNDLTVKVGDRKLFFVNHLPLAESGITLLTGDNGTGKSTFFSALTRLKDYEGKIAYLGKDISKLKVPRYMKEVALVFQNSEKQYLRMTVSEELTLSLEQTRHPADWPPEVVDEYLQRLNLFGLGDQIIYQLSGGQKKKLQLIVMLIMETPILLLDEPLAGLDFQSVEQVSKILREIADRKRQRFVIISHQLDRLLPKVDFYLRLENQTLKYQEHLL

SEQ ID NO: 27488 - DNA, 1689 bp, Oenococcus oeni PSU-1
  CDS (1)..(1689)
atgccagctgttacatttaaaaacgttaatttcaaatatcgcgttcaaagccaagccacattgcatgatgtcagctttgcttttgattatggggagaaaattattattgccgggccatccggctccggtaagaccacgattggccatttaattaacggtttgattccacaatgttttcccgggaatctcgatggtcagatcttggttaatgatcaggatgtttctaaattggatattttcaatttatcttttgccgtcgcgactgtcctgcaagataccgattctcaatttgtcggcatgacagttgctgaagatgtttcttttctgcttgaaaatgaaaatatcgatcatcaaacactattaaaaaaaacaaatcattggttaacggaactgaatcttcaatcggttaagaatcatcatccccaagaactttccggtggacaaaagcagcgagtcagtatggccggtgttttaagttcggacagcaagattcttttgtttgacgaaccattggccaatctcgatccggctgctgggagagcggcaattcaattaatctcccaactacagaaaaagttgaatttaacggttattatcattgaacaccgtttggaagaagcacttaaaattcaggccgataaactggtgattatcagtcgaggaaaaatcattgccaacgatacgcctgatcgggtcctgcaaagcggggttgtttctcaagtcggacttcgtgaaccgctttatctgaccgctttaaagaaagccggtttcgatctgagtttggagaaacatttgacagatctttcttctttgaatcaagaattggttagcaaaaaaatctcgaattggcttaatactcaaatttctgttaaaaaaccaaatcctggtcaactgattttatcaattaaaaacttgtttttttcctatccgaaacaaagcgtttttaaagatttcaatttggatttttatgctggtcagattacggcgattgttggtaagaacggttccggaaaatcaactttttcaaatttagtaaccggttttttaaaacaggattccggccagatttttttcgatggtcaaagcttggactctctgtctgtcaaagagcgggctgataaaattggttacgttttgcaaaatccaaatcaaatgatcagccaaaatattgtctttgacgaagtcgcctacggactgaaattacgcgaatttaatcctgaagagatcaaaacaagagttcgacgagtattgaaaatctctggtcttgattcgatgcgtcattggccggtctcggctttaagcttcggccaaaagaagagagtgacgattgcttctgttttggttttggaaccgcaaattcttttattggatgaacctaccgctggacaagattatctgaattatcgttcgatcatgaattttgttgcttctcttaatcgtgagcatcatacttcgattattgtcatcactcacgatatgcatttaatgctggaatacgctgatcgagccttggctttggttgacggcaagattcttgctgatgatcgtccagccgtgcttttgagcaacttggagcttttaaaagaagcctctttggctccgaccagcctttataatctggcccgattcagtcaagtcgatccgattaaattatcggaaagacttgttgaaagcgaggccgatttatga

SEQ ID NO: 27489 - protein, 562 aa, Oenococcus oeni PSU-1
MPAVTFKNVNFKYRVQSQATLHDVSFAFDYGEKIIIAGPSGSGKTTIGHLINGLIPQCFPGNLDGQILVNDQDVSKLDIFNLSFAVATVLQDTDSQFVGMTVAEDVSFLLENENIDHQTLLKKTNHWLTELNLQSVKNHHPQELSGGQKQRVSMAGVLSSDSKILLFDEPLANLDPAAGRAAIQLISQLQKKLNLTVIIIEHRLEEALKIQADKLVIISRGKIIANDTPDRVLQSGVVSQVGLREPLYLTALKKAGFDLSLEKHLTDLSSLNQELVSKKISNWLNTQISVKKPNPGQLILSIKNLFFSYPKQSVFKDFNLDFYAGQITAIVGKNGSGKSTFSNLVTGFLKQDSGQIFFDGQSLDSLSVKERADKIGYVLQNPNQMISQNIVFDEVAYGLKLREFNPEEIKTRVRRVLKISGLDSMRHWPVSALSFGQKKRVTIASVLVLEPQILLLDEPTAGQDYLNYRSIMNFVASLNREHHTSIIVITHDMHLMLEYADRALALVDGKILADDRPAVLLSNLELLKEASLAPTSLYNLARFSQVDPIKLSERLVESEADL

SEQ ID NO: 27490 - DNA, 1587 bp, Oenococcus oeni PSU-1
  CDS (1)..(1587)
atgatggagcaaataaaagaaaaaattccggcaattaaaatggaacatatagtcaaaaaatttggcaattttgctgccaataatgatattaatctcgaggtaaaagccggtgagattcatgcattgcttggtgagaacggcgccggaaaatcaactttaatgaatatcttgtcgggcttgttgcaaccaacatccggcgagatatttttgcgaggaaaaaaagtcaagatcaaaaatccggcggcagcttccaagcttggaattggaatggtccatcaacattttatgctgatagatgcctttacagtgacggaaaatattatgcttggtgccgaaaaaaccaagggggcatcgttggatatcgagactgcaaaaaaggaaatccaagcccttgtcgataaatataaattaaaagttaatccagatgctttgataaccgatatttcagtcggtcaacaacaacgtgttgaaattttaaaaactctctatcgaaaagccgatattttaattttcgacgaaccgacagctgttttaactccccaagaaattcaagaattgatcgcggcaatgaagaatttggccgccgaaggaaaagcgatcattttaataactcataaactcgaagagattcgtcaggcagcagatcgagttaccgttatccgatcaggaaaatcgcttgaaacttttaatgcaaagaatgtttctgcaataactttggcagaaaaaatggttggcagaaaagtttcttttacaactgagaaaaaagcagccaaaacaggcaaagatattttaaaaatcaacgatcttgtcgttaaagacgcagaaaatgttactaaagtcgatcacctctctctcgatattcgtgctggcgagattatcggtatcgccggaatcgacggcaatggtcagacagaattggttcaaacagttaccggcttaacacactcacaatccggagaaattattttagacggcaagaatattaccaataagacaccaagaaaaataatcaaagccggtacttcccatattccagaagaccgcctgcgtcatgggttagaaatcaatatgccgcttgctgacaatatggtgattgaaaatttctacgaaaaaccatatgccagaatgggaattcttcagggaaaagcaattgccgatcatgccaaaaaattaattaaacaattcgatgtcaaaatgacttcgatcgatgaaccagctggatccttgtcaggcggtaatcaacaaaaagccgtcgtcgcaagagaactttcgcgtgattccaaactgattgttgctgctcaaccgacgcgtggtcttgacgtcggagccatcgaatacattcacaaacaattaattaaacagagagatcttggaaaagcagttatgctcataagcttcgagcttgatgaaattctggatctggctgatagaattgcggttatatcgtccggaaaaattatcggcgttgtcaacaccaaagacacaaccaaagaagaacttggtttgatgatgaccggggtcggcttgaagagtgctagaaaagaactggaagcaagcaaaaacaaaaataaggcaggagttaaataa

SEQ ID NO: 27491 - protein, 528 aa, Oenococcus oeni PSU-1
MMEQIKEKIPAIKMEHIVKKFGNFAANNDINLEVKAGEIHALLGENGAGKSTLMNILSGLLQPTSGEIFLRGKKVKIKNPAAASKLGIGMVHQHFMLIDAFTVTENIMLGAEKTKGASLDIETAKKEIQALVDKYKLKVNPDALITDISVGQQQRVEILKTLYRKADILIFDEPTAVLTPQEIQELIAAMKNLAAEGKAIILITHKLEEIRQAADRVTVIRSGKSLETFNAKNVSAITLAEKMVGRKVSFTTEKKAAKTGKDILKINDLVVKDAENVTKVDHLSLDIRAGEIIGIAGIDGNGQTELVQTVTGLTHSQSGEIILDGKNITNKTPRKIIKAGTSHIPEDRLRHGLEINMPLADNMVIENFYEKPYARMGILQGKAIADHAKKLIKQFDVKMTSIDEPAGSLSGGNQQKAVVARELSRDSKLIVAAQPTRGLDVGAIEYIHKQLIKQRDLGKAVMLISFELDEILDLADRIAVISSGKIIGVVNTKDTTKEELGLMMTGVGLKSARKELEASKNKNKAGVK

SEQ ID NO: 27492 - DNA, 1653 bp, Streptococcus suis 89/1591
  CDS (1)..(1653)
atgaaaaaaatcattgaatttaaagattttacatttaaataccaagcgcaacaggaacccactttaaaagatattcagttaacgatttatcagggagagaaagttctgattattggcccatctggttcaggaaagtcgacgattggacaatgtcttaatggtattattcccaatatttacaagggggaacatagcggaagtttactattggatggtcaggaagcttttaatctttcagtttatgataagtccttgctcgtatcaacggttcttcaagatacagatggtcaattcattggcttatcagttgccgaggacctagcttttgctttggaaaacgacatggaaagccaggtggtgatgaagcaaaaagtaggagattgggcagaaagactgtctttgaccgatttgctggcacatcgaccacaagatttatctggaggtcaaaagcaacgtgtcagtctgggcggagttcttattgatgagagtcctattttgttgtttgatgagccacttgctaatttagaccccaaatcaggccaagatacgattgatttgattgaccgtctgcacaagcaagaagggaccacaaccattattatcgaacaccgtttagaggacgtactgtatcgtcaggtggaccgagttgtattgattaatgatggtcggattttgttcaatggaggactggatgatttattacgtacctcattgttacaggaaaacggcatccgtgaacccttatatctatcgactcttcgcgccttaggatatccgattgcgcaggcagaacacctctcctcagtttgggaaattgatattgaggctttgaatatagcatctctaccgactctacactttgaaaatggagagaaagagtctttgttagaagtcaagcatcttcatttttcctatcctaacaaacaagttcttacagatattcaactgacgattcataagggagagcgtctagctattgttggaaaaaatggtgctgggaaatctactttagccaaggtgctttgtggttttattcagggtgagggtgagattctctggaaggggcagtcaatcaaagaagattctgtcaaagagcgagcagaacggattggttatgttcttcagaatcccaaccaaatgattagccaaacgatgatctttgatgaggttgctcttggtttgcgcgtgcgaggggtgacagaagaagaaatcgaacaccgagttcaccatatcttgaaagtatgtggcctgtatccgtttcgtaattggccgatttcggcactttcctatgggcagaaaaaacgggtaacgatagcatctatcttggttctcaatccagaaattattttgctagatgagccaacagcaggacaagatcaacggcattatcgggaaatgatggagtttttggaccaattaaatgctcaagggcacaccattgtcatgattacccatgacatgcaactcatgctagattattcagatagagctgttgttgtggtggatgggcagattattgaagatgccagtccagcagaaattttatctgatgatatggtgattgagcgagccaatttaaaagaaacatcaatttttcacttggcggagaggttgggagttaatcccttggaattaacgacgttttatatgtag

SEQ ID NO: 27493 - protein, 550 aa, Streptococcus suis 89/1591
MKKIIEFKDFTFKYQAQQEPTLKDIQLTIYQGEKVLIIGPSGSGKSTIGQCLNGIIPNIYKGEHSGSLLLDGQEAFNLSVYDKSLLVSTVLQDTDGQFIGLSVAEDLAFALENDMESQVVMKQKVGDWAERLSLTDLLAHRPQDLSGGQKQRVSLGGVLIDESPILLFDEPLANLDPKSGQDTIDLIDRLHKQEGTTTIIIEHRLEDVLYRQVDRVVLINDGRILFNGGLDDLLRTSLLQENGIREPLYLSTLRALGYPIAQAEHLSSVWEIDIEALNIASLPTLHFENGEKESLLEVKHLHFSYPNKQVLTDIQLTIHKGERLAIVGKNGAGKSTLAKVLCGFIQGEGEILWKGQSIKEDSVKERAERIGYVLQNPNQMISQTMIFDEVALGLRVRGVTEEEIEHRVHHILKVCGLYPFRNWPISALSYGQKKRVTIASILVLNPEIILLDEPTAGQDQRHYREMMEFLDQLNAQGHTIVMITHDMQLMLDYSDRAVVVVDGQIIEDASPAEILSDDMVIERANLKETSIFHLAERLGVNPLELTTFYM

SEQ ID NO: 27494 - DNA, 2751 bp, Pseudomonas aeruginosa UCBPP-PA14
  CDS (1)..(2751)
atgaccgctggcgggagcggcgtggcgagcctccggggcgtttcgctgtgctacggcgagacgcgcgcggtggacgacgtcagcctggagatcccggccaaccgcatggtcggcctgatcggtccggacggggtcggcaagtccagcctgctggcgctgctggccggcgcacggaagatgcaggatggcgagatccgcgtgctcgatggcgacatgcgcgaccgccgccaccgccgggcggtctgcccgcgcatcgcctacatgccccaggggctgggcaagaacctctacccgacgctctcggtgttcgagaacgtcgacttcttcggtcggctgttcggccacgacaaggccgagcgcgagcggcgcatcgccgatctgctgcaaagcaccggattggcgccgttcgccgagcgtcctgcgggcaagctgtccggcggcatgaagcagaagctcgggctgtgctgcgcgctgatccacgatcccgacctgctgatcctcgacgagccgaccaccggcgtcgacccgctgtcgcgcaaccagttctgggagctgatcggccgtatccgcgcgggccgcgaaggcatgagcgtgctggtcgccaccgcctacatggaggaagccgagcgcttcgactggctggtggcgatggacgatggaaaggtcctggccaccggtacgccgcaggagttgcgcgagcgtaccgggacgcagagcctcgagtcggcgttcatcgccctgctgccggaaagcaagcgcgccggccaccatcgattggtgatcccgccgcgaccgcagagcgaaggcgcgccgcggatcgccatcgaggccgagggcctgacctgtcgtttcggcgacttcgtcgcggtcgatcacgtcagcttccgtatcgagcgtggggaaatcttcggcttcctcggctccaacggctgcggcaagtccaccaccatgaagatgctcaccggcctgctgccggccagcgaaggcacgtgcgcgctgttcggccaggcggtggacgccagcgacatggcgacccgtcgccgggtcggttacatgtcccaggccttctccctgtatgccgagctgagcgtgcggcagaacctggtgctgcacgcccggctgttccacctgccggcggatggcatcccggcacgggtcggcgaaatgctccggcgcttcgacctggagaaggtggccgacgaactgcccgacgacctgccgctgggcattcgccagcgcctgtcgctggcggtggcggtgatccacaagccggagatcctgatcctcgacgagcccacctcgggggtcgatccggtggctcgcgacggcttctgggaactgatggtcgagctgtcgcgccgcgacggggtgaccatcttcatttccacccacttcatgaacgaggcccagcgctgcgatcgcatctcgctgatgcatgccggcaaggtactggccagcgatactcccgatgagctggtgcgccagcgcggcctgccgaccctggaggcgaccttcatcgcgtacctggaagaagccgccggcgccgccgcgccagcgcaaccggccgaggcgccggccgtcgcggagcagcccggcgatggccaggggcgccaggcgcaacgcgaacgcttcagccccctgcggctgttcagttatgcgcgccgcgaagccatggaactgcgccgcgacccgatccgcctgaccctggccctgctcggcaccgcgctgctgatgttcatcatcggctacggcatcaacatggacgtcgaggacctctcctgggcggtcctcgaccgtgaccagaccaccaccagccaggcctatgcgctgaacatcgccggctcgcgctatttcgtcgaacatgcgccgatcaccgacccggacgacctcgaccggcgcctgcgcagcggcgagctgagcctggcggtggagatcccgccgaacttcgggcgcgatctcaagcgtggctccgatccggccatcggcgtgtggatcgacggagcgatgccgacccgtgccaacaccgtgctcggctacgtgcagggcctgcacaccagctacctggcggacctctcgcggcaggtgggtggggccgaggccagcgcggcggccagcaccgaggtgcgctatcgctacaaccccgacgtggaaagcctgaaggcgatggtgccggcggtgatcccgctgctgctgatcatgatcccggccatgctcaccgccctcggcgtggtgcgcgaaaaggaactgggctcgatcaccaacctctatgtcaccccggtgacgcgcctggagttcctggtcggcaagcagttgccttacgtcgccatgggcatgatcaacttcctgctgatgctggtcctggccatcgtggtatttcgcgtgccgctcaagggcagcttcctggcgttgaccatcggcgctttcctctatgtggtcaccagcaccggcctcgggctgttcctctcgacgttcatgcgcagccagatcgccgctgtattcggcgtggcgatcgccaccatgatcccggcgatccagttctccgggctgatccacccggtgtcctcgctggaaggtgcggcggcctggatcggcaagctctatccgacctcgcatttcctggtggtcagccgcggcgccttttccaaatcgctgggcctgcccgatctctgggcctactacctgccgcttgccgcttccatcgtggtgctgaccctgctcagcgtggcctgcctgaagaagcaggaggactga

SEQ ID NO: 27495 - protein, 916 aa, Pseudomonas aeruginosa UCBPP-PA14
MTAGGSGVASLRGVSLCYGETRAVDDVSLEIPANRMVGLIGPDGVGKSSLLALLAGARKMQDGEIRVLDGDMRDRRHRRAVCPRIAYMPQGLGKNLYPTLSVFENVDFFGRLFGHDKAERERRIADLLQSTGLAPFAERPAGKLSGGMKQKLGLCCALIHDPDLLILDEPTTGVDPLSRNQFWELIGRIRAGREGMSVLVATAYMEEAERFDWLVAMDDGKVLATGTPQELRERTGTQSLESAFIALLPESKRAGHHRLVIPPRPQSEGAPRIAIEAEGLTCRFGDFVAVDHVSFRIERGEIFGFLGSNGCGKSTTMKMLTGLLPASEGTCALFGQAVDASDMATRRRVGYMSQAFSLYAELSVRQNLVLHARLFHLPADGIPARVGEMLRRFDLEKVADELPDDLPLGIRQRLSLAVAVIHKPEILILDEPTSGVDPVARDGFWELMVELSRRDGVTIFISTHFMNEAQRCDRISLMHAGKVLASDTPDELVRQRGLPTLEATFIAYLEEAAGAAAPAQPAEAPAVAEQPGDGQGRQAQRERFSPLRLFSYARREAMELRRDPIRLTLALLGTALLMFIIGYGINMDVEDLSWAVLDRDQTTTSQAYALNIAGSRYFVEHAPITDPDDLDRRLRSGELSLAVEIPPNFGRDLKRGSDPAIGVWIDGAMPTRANTVLGYVQGLHTSYLADLSRQVGGAEASAAASTEVRYRYNPDVESLKAMVPAVIPLLLIMIPAMLTALGVVREKELGSITNLYVTPVTRLEFLVGKQLPYVAMGMINFLLMLVLAIVVFRVPLKGSFLALTIGAFLYVVTSTGLGLFLSTFMRSQIAAVFGVAIATMIPAIQFSGLIHPVSSLEGAAAWIGKLYPTSHFLVVSRGAFSKSLGLPDLWAYYLPLAASIVVLTLLSVACLKKQED

SEQ ID NO: 27496 - DNA, 1671 bp, Ralstonia eutropha JMP134
  CDS (1)..(1671)
atgaacgtggtaccgaagctgcgggaagcggaggccatgccgctcgagccgacgccgtccccggcgccgggcagtacgctgatctgcgtggacaagctgtcggtgacgtttggtcacggcgacgacgctacccgcgccgtgcgcgaggtcagcttcgacctgcgtgccggcgagcgctatgcgctggtgggtgagtcaggctccggcaagacggtcaccgcgcttgccatgttgcggctcgtcgaggacgctgcctaccagggtgcgatccggttcgagggccgcaacctgctcgacgtatcggaccgtgacatgcgcgccatccgcggtgcggagatcgccatgatcttccaggagccgatgaccgcgctgaacccgctgtatacgatcggcaaccagattgtcgagacgctggcgctccacgaagggctcgaccggcgcgctgcgcgcgaacgcgcgattgcactgctggaacgcaccggcatcagcgatgcggcacaccgcttcgacagtttcccgcaccagctttccggcgggcagcgccagcgcgcgatgatcgccatggcgctcgcctgccgcccgaagctgctgctcgcggacgagccgaccacggcgctcgacgtcaccattcgcgcgcagatcgtggacctgttgcgtgacctccaggccgagttcggcatggcggtgatgctgatcacccatgacctgaacctcgtgcgttcgttcgcgcagcgtgtcggtgtcatggagaagggcgtgctggtcgagaccggcgagaccgcgcaggtgttcgcctcgccgcagcatccctacacgcgcaagctgatcgacagtcgcccgcggcgcgaggtgctgccgctcgtgccactggcgccgacgctgctggaggcgcgcggcctgtgcgtcaactacgcgcgcaagcgcaagggcatcgccggctggttcggcaaggaccagttcgctgcggtgaaggacgtcgattttcagctgcgcgaaggcgaaaccatcggcatcgtcggggaatctggctccggcaagaccacgctggcccataccgtgctggcgctgcagcgcaagagcgcgggcacgatccatttcctgggccgcagcttcgacgacgccacgagcaaggaccgctgcaagttgcgcgcgcgcatgcaggtggtgttccaggatccgttcgggtcgctgtcgccgcgcatgacgatcgagcagatcgtcggggaagggctggcgttgcaccagccgggcctgaagcgcgagaccacgcgcgagcgggttatcgaagcgctgcgcgaggtcggactggaccggactgcactcggccgctatccgcacgaattctcgggcggacaacgccagcgcatcgcgatcgcgcgggtgctcatcctcaagccgcagatcctggtgctcgacgagcccacatcggcgctcgatgtctcgatccagcagcaggtgctgggtctcctttcccagttgcagcacaaatacaacctcagctatctgttcatcagccacgatcttgcggtcatccgggcgatggcccaccgggtcatcgtcatgaaggccggcgaggtggtggaggcaggggagaccgaggccgttctcggtgcgccgcaacatccctatacgcgcaagctgatggctgctgcccagattggtgcagcctga

SEQ ID NO: 27497 - protein, 556 aa, Ralstonia eutropha JMP134
MNVVPKLREAEAMPLEPTPSPAPGSTLICVDKLSVTFGHGDDATRAVREVSFDLRAGERYALVGESGSGKTVTALAMLRLVEDAAYQGAIRFEGRNLLDVSDRDMRAIRGAEIAMIFQEPMTALNPLYTIGNQIVETLALHEGLDRRAARERAIALLERTGISDAAHRFDSFPHQLSGGQRQRAMIAMALACRPKLLLADEPTTALDVTIRAQIVDLLRDLQAEFGMAVMLITHDLNLVRSFAQRVGVMEKGVLVETGETAQVFASPQHPYTRKLIDSRPRREVLPLVPLAPTLLEARGLCVNYARKRKGIAGWFGKDQFAAVKDVDFQLREGETIGIVGESGSGKTTLAHTVLALQRKSAGTIHFLGRSFDDATSKDRCKLRARMQVVFQDPFGSLSPRMTIEQIVGEGLALHQPGLKRETTRERVIEALREVGLDRTALGRYPHEFSGGQRQRIAIARVLILKPQILVLDEPTSALDVSIQQQVLGLLSQLQHKYNLSYLFISHDLAVIRAMAHRVIVMKAGEVVEAGETEAVLGAPQHPYTRKLMAAAQIGAA

SEQ ID NO: 27498 - DNA, 1524 bp, Chloroflexus aurantiacus
  CDS (1)..(1524)
atgcaaaccccgatcctggagatgcgtcagattaccaaagagttccccggtgtgcgcgcacttgataacgtcactttcagcgtgaaacggggtgaaatccattgtctggtaggcgaaaatggggccggcaaatcgatattgatgaaggtcttgagcggtgtctatccgtatggctcgtacagtggcgaaattctgattgatggtcagccacagcgctttttcagcattgctgacagtgagcgggttgggatcggtatcatttaccaggaactggccctggtaccagaaatgaccgtctacgaaaatatctttctcggccacgaagttagtcgtaatgggattatcgactggaacgagacgatccgccgggccgatgagatgttgcgcaaggtgcggctcaccgtgaatccggctgccaaaatccgggatttgggtgtcggtaagcagcaactggtcgaaattgcgaaggcgctaagccgtgaagtaagaattttgatccttgatgagccgacggctgcgctgaatgaagatgatagtgagaacctgttaaacctgttacgcgaattgcgcgatcagggtgtgacctgcattctgatttcacacaagctgaaagaggtgttatcagttgccgatacggtgaccgttctccgtgatgggaagacggtctgtaccctcgatgctcacaagggcgaagtgaacgaacaggcgctgatccgcaatatggttgggcgtgaaattacgaatatctacccgccacgcaatcatcagcccggtgacgaggtggtacttgagctacgcaactggacagtctattccgcagaagcgggccgctatctgttgcgcgatgttaatttgcaggtacggcgcggcgaaattgtcggcctggccggtttgatgggtgccggtcgcaccgagctggcgctcagtctgttcggcaatgcaccgggttatcgcgtgagtggcgaattgtggctcaaaggtcgtaaacgtgagttcagacatccgcgtgaggcgattgccgccggtatggcttacgtctcggaagaccgcaaagcaaaaggcttgatcctcatccaggacgtgcgccagaacatcacgctggcgaacctgcgtgcgctggcgaacaagggcgttattgatcgaaacgctgagattcaggttgctgaagaataccgtaaatcgttgaatatcaaaactcctaccatcgagcaacaggttgtcaatctgagtggtggtaatcagcaaaaggtgtgtctcggtaaatggctcttcgttcgtcctgatgtcttgattctcgatgaaccgactcgtggtatcgatgtgggggccaagtatgaaatctatcaacttatgaatcggttggtcgaagatggcatgagcatcatcatgatttcatcggaattgcccgaagtcctcggtatgagtgaccgggtctatgtcgtttccggtggtcggattaagggcgatctaccaattgccgtggcaacccaggaaaagattatggccctggcagtcgattattaa

SEQ ID NO: 27499 - protein, 507 aa, Chloroflexus aurantiacus
MQTPILEMRQITKEFPGVRALDNVTFSVKRGEIHCLVGENGAGKSILMKVLSGVYPYGSYSGEILIDGQPQRFFSIADSERVGIGIIYQELALVPEMTVYENIFLGHEVSRNGIIDWNETIRRADEMLRKVRLTVNPAAKIRDLGVGKQQLVEIAKALSREVRILILDEPTAALNEDDSENLLNLLRELRDQGVTCILISHKLKEVLSVADTVTVLRDGKTVCTLDAHKGEVNEQALIRNMVGREITNIYPPRNHQPGDEVVLELRNWTVYSAEAGRYLLRDVNLQVRRGEIVGLAGLMGAGRTELALSLFGNAPGYRVSGELWLKGRKREFRHPREAIAAGMAYVSEDRKAKGLILIQDVRQNITLANLRALANKGVIDRNAEIQVAEEYRKSLNIKTPTIEQQVVNLSGGNQQKVCLGKWLFVRPDVLILDEPTRGIDVGAKYEIYQLMNRLVEDGMSIIMISSELPEVLGMSDRVYVVSGGRIKGDLPIAVATQEKIMALAVDY

SEQ ID NO: 27500 - DNA, 1845 bp, Chloroflexus aurantiacus
  CDS (1)..(1845)
atgagtggtctgtgggtggcaccggtgttcatgcaaacctcaatggcccttcacctgttgattgcctcgttcctcagcagcacggcacttggttcggcgattgccctggtggtgttgaaggctcttgagcgtgccggtgttgtgagattacccggcaaagaggggttacataccttgaggcagatcgtcgttcgtgatctcagctatcgctatccacaggcgacgcagtggacattgcgtcgcctgaacctgtcgattgacgccggtgaatacgtgctgctctgcggtgccagcggcagcggcaaatcaaccctgtgccggatacttaccgggttgattccgcacgtgtacgaaggaagcattgaggggacagttctggttgacggggttgacacccgtgaacagtcacccgccgatgtatgcacccggatcggtctggtctttcaacatccgcagtggcaactcttcaacagtacagttacccgtgagattgcctttggcctggaaagtctggggtatgcaccggcagaaatccggcaacgtatcgacgaagtcgccggttggctcggcatcgagcatttgcttgcgcgacatccgcaacagctctccaccggtgagcagcttttggtagcgctggcgagtattctggccatggggtcgcggatcgttgtcctcgatgaaccgtttgccaatctcgatggcaggcatgtgacgcaggtgcaggctatcctgcgcaggcttcatcagcaaggagtgacgatcatcgttgccgagcatcggcttgggctggtggccgccgatgcgacccgtatgatcgtgttgcacaatggtcaggttgtgctggatgggccgccggttcaggttctggccgccgatattcagcaatttcatctcgaaccaccattgccggtacagattggccgtgctctcaacctgaagccattgccgttgacggtagaggctgtgctggcgcaggtcgatcatcagcagcttgcgaccatgtatccacttccacccgccttgccgcgctctgcaaacggatcgccactgctcagcgtgcgcgatctctcgttctccgccggccaacggcgggtgctgaacagtgttcatctcgatctgtacgcaggtgagggggtggcaattgtcggggctaatggcgccggcaaaacctcgttgatcaaacacttcaacggtcttcaccgtccccaacagggacaggtacgggttatcgggaaagacacccgtacaacaccggtatcggtgctggcccgtcacgtggggatggtatttcagaaccctgatgaccagttgtttacgacccgtgtccgcgatgaggtggcggttggtgctcgcgtcatgggtgtctatgatccggatcaggtagcggctgtattacgcacatttcagcttgaacaccttgttgagcgctcgccctttaccttgagtgccggcgaaaaacgacggctgacactggcggcagcgctggtgaccaatccggcaatcctggtgctcgacgagccaacaaccggtctcgactggccggcacggcaggcgctggcccggcatctccgcgaacaggtgcagcatggtcgcaccgtagtcgtggtgacgcacgatctggagtttgccggcgcactcacctcacactggttcgtcctggccgatggatgcctgctggccgaaggggtacctcacgcgatatgtatgcaacccgccgtggtacaggcggctgacctcctgcttcctgatcgctaccggctggcgctggcgttacaacacgtggctgccgacgcgggcggtcccgtcagaaaacgagggagaggtgtaatggcgttccacccttga

SEQ ID NO: 27501 - protein, 614 aa, Chloroflexus aurantiacus
MSGLWVAPVFMQTSMALHLLIASFLSSTALGSAIALVVLKALERAGVVRLPGKEGLHTLRQIVVRDLSYRYPQATQWTLRRLNLSIDAGEYVLLCGASGSGKSTLCRILTGLIPHVYEGSIEGTVLVDGVDTREQSPADVCTRIGLVFQHPQWQLFNSTVTREIAFGLESLGYAPAEIRQRIDEVAGWLGIEHLLARHPQQLSTGEQLLVALASILAMGSRIVVLDEPFANLDGRHVTQVQAILRRLHQQGVTIIVAEHRLGLVAADATRMIVLHNGQVVLDGPPVQVLAADIQQFHLEPPLPVQIGRALNLKPLPLTVEAVLAQVDHQQLATMYPLPPALPRSANGSPLLSVRDLSFSAGQRRVLNSVHLDLYAGEGVAIVGANGAGKTSLIKHFNGLHRPQQGQVRVIGKDTRTTPVSVLARHVGMVFQNPDDQLFTTRVRDEVAVGARVMGVYDPDQVAAVLRTFQLEHLVERSPFTLSAGEKRRLTLAAALVTNPAILVLDEPTTGLDWPARQALARHLREQVQHGRTVVVVTHDLEFAGALTSHWFVLADGCLLAEGVPHAICMQPAVVQAADLLLPDRYRLALALQHVAADAGGPVRKRGRGVMAFHP

SEQ ID NO: 27502 - DNA, 1356 bp, Lactobacillus delbrueckii subsp. bulgaricus ATCC BAA-365
  CDS (1)..(1356)
ttgcaagcagaactgacaattgaccacttaactttttcctacggggaccgggaggtcatccgcgacctgtccttaaccctgccggcggggactttttccctcttgatcgggccgaccggctgcggcaagtcgaccctgttgaagatcatggccggcctctacccgaaatacgggggccagctgaccagcgggcaggtctctttgggcgggcggagccaggccatgatgttccaggaagccggcgagcagtttaccatggccacgcctagagaagagattatttttgccatggaaaacctgggcaaaagcaagacagaatttgcggaccggctgaagctggccagcgaattcgcggaaatcgactctcttttagaccagaagatcgtaaccatgtccggcggggaaaagcagcgggtagccttggccgtcctggtcgccatggacgtggatcttttcttattagatgagccttttgccagcgtggatccggcggcccgccgcttcttgattggccgcttggccaagctgaaagagcagggcaagaccatcatcatcactgaccacctttttgacgactaccagggcaaggtggacggggtctaccgcttcaaagacgagcaagtggacttattgactaaggatgaacaagcgcttctcctggctactgagccaatcggcctgcacttccccctgccagagaacgagccagcggcttttgtcatgaaaaatttcgccatcaagcaaggccggcctttgcttgagcaaaaggaattatccatccccaaggggaaggtgaccttgatcacggggccaaacggtagcgggaagagctccctgtttaaggccatgaccaagttgctggactaccaagggtctttgacctgggagggcaaggaagtagccaagctcaaggagcggacctacttccagcatgtagcccagatttttcaaaatgcaagtgaccagttcatggccatcaccgtcaaagaggagctggctttgagccaaaagcacgcttccccctacttcactccggaagtcttagaccaggccttggctgacctggatttggccgaccacatggaccaggtggtctactccttgtcgggcgggcaaaaaaagaagctggagatcctcttgatgcttttgtcgggccaggaagtgctcttaatcgatgagcctttgagtggcctagaccagaagtcaattgagcaggtcgtgcagcttttgcaaaagtgccaggaaaagagcgggcagacgatcctgctgatcagccaccatttctacggaatcagcacttggtgcgactaccacctgcgtctggccggcagagagctggcttttgtccaggattag

SEQ ID NO: 27503 - protein, 451 aa, Lactobacillus delbrueckii subsp. bulgaricus ATCC BAA-365
MQAELTIDHLTFSYGDREVIRDLSLTLPAGTFSLLIGPTGCGKSTLLKIMAGLYPKYGGQLTSGQVSLGGRSQAMMFQEAGEQFTMATPREEIIFAMENLGKSKTEFADRLKLASEFAEIDSLLDQKIVTMSGGEKQRVALAVLVAMDVDLFLLDEPFASVDPAARRFLIGRLAKLKEQGKTIIITDHLFDDYQGKVDGVYRFKDEQVDLLTKDEQALLLATEPIGLHFPLPENEPAAFVMKNFAIKQGRPLLEQKELSIPKGKVTLITGPNGSGKSSLFKAMTKLLDYQGSLTWEGKEVAKLKERTYFQHVAQIFQNASDQFMAITVKEELALSQKHASPYFTPEVLDQALADLDLADHMDQVVYSLSGGQKKKLEILLMLLSGQEVLLIDEPLSGLDQKSIEQVVQLLQKCQEKSGQTILLISHHFYGISTWCDYHLRLAGRELAFVQD

SEQ ID NO: 27504 - DNA, 1677 bp, Streptococcus thermophilus LMD-9
  CDS (1)..(1677)
atggataagtacattagttttaatcagtttacatttcaatatgatgcgcaagcagaagcgacgcttaaagatatcagctttgatattgccaaaggcgagaaagtgctcattttaggcccttctggtagcggaaagtcgacccttgctcagtgtctcaatggtatcatacctaatatccataaaggtcaggcaaaaggccaggtaaggatagatggtcaggatattttcaagcaatctatctatgataagtcacagtcggtatctacggtattgcaggatccagatggtcagtttattggcctaacagtagccgaggatttggcttttgctttggagaatgattgtgctgatcaaagtgagatgaaggataaggtagcactatgggctgaacgtctagacttgacttctctttttaatcaccgccctcaagacttatcaggtggccaaaaacaacgagttagtttggctggagtcttgattgatgagagccctattcttttatttgatgagcctctagcaaatttagatcctaaatcaggacaggaaaccattgacctcattgataaaatccacaaggaggtgggagctacaacaattcttattgagcaccgtctagaagatgttctttatcgtcccgttgaccgtattttgctagtcaatgatgggcaacttctctttaacggtagcccagatgagcttttatcaagtactctcttactggaaaatgggattcgcgaacctctatatgtgacggttttacgtcagttgggatttgatacaactagagcacaaaatcttagccaactagatgctttggatttgtctggattaggtatcccagatagcgttttgaaagataaaagagacagttcaagtgattctattttgaaggttgaggggcttagcgtttcctatggggataatccagcgattatagaggatatgtcttttagcttgaaaaaaggtgagcgactagcgattgtcggtaaaaatggagctggaaagtcgacgcttgctaaagctctatgcggttttgtccctagtcaagggaaattaacttacaagggtcaggatatcagtcaggatagcatcgccgagcgttcagagcgtataggctttgttttgcaaaacccaaatcagatgattagccaaactatgatttttgatgaggtggctcttggtttgcgcttgcgaggaattgaagagactgaggttgaagagcgtgttcatgaggtcctgaagacttgtggcctatatagttttcgtaaatggcccatttctgcgctttcctttggtcagaaaaagcgcgtgaccattgcatctatcttggttttgaaacctgaaatcattatcttggatgagccaacggctggtcaagattacaagacttacacagatatcatgaatttcttggacagtcttcagaagcaaggtcataccattgtgatgattacccatgatatgcagctcatgttggaatatagcgatcgttgtctcgttgtggttgaggggaaaatcattgcagacgacaatcctgttacaattcttaatcagaaggatttacttgagtcagctaatctcaagcagacatctctgtatactttgggtcagaaattgtcaagtaatccagtagaagtaacccagtattatatcgaaaaaggaggccctaatgtctaa

SEQ ID NO: 27505 - protein, 558 aa, Streptococcus thermophilus LMD-9
MDKYISFNQFTFQYDAQAEATLKDISFDIAKGEKVLILGPSGSGKSTLAQCLNGIIPNIHKGQAKGQVRIDGQDIFKQSIYDKSQSVSTVLQDPDGQFIGLTVAEDLAFALENDCADQSEMKDKVALWAERLDLTSLFNHRPQDLSGGQKQRVSLAGVLIDESPILLFDEPLANLDPKSGQETIDLIDKIHKEVGATTILIEHRLEDVLYRPVDRILLVNDGQLLFNGSPDELLSSTLLLENGIREPLYVTVLRQLGFDTTRAQNLSQLDALDLSGLGIPDSVLKDKRDSSSDSILKVEGLSVSYGDNPAIIEDMSFSLKKGERLAIVGKNGAGKSTLAKALCGFVPSQGKLTYKGQDISQDSIAERSERIGFVLQNPNQMISQTMIFDEVALGLRLRGIEETEVEERVHEVLKTCGLYSFRKWPISALSFGQKKRVTIASILVLKPEIIILDEPTAGQDYKTYTDIMNFLDSLQKQGHTIVMITHDMQLMLEYSDRCLVVVEGKIIADDNPVTILNQKDLLESANLKQTSLYTLGQKLSSNPVEVTQYYIEKGGPNV

SEQ ID NO: 27506 - DNA, 1452 bp, Deinococcus geothermalis DSM 11300 [sequence omitted]

SEQ ID NO: 27507 - protein, 483 aa, Deinococcus geothermalis DSM 11300
MTGKAGEKTRVGRGKAPLVELRDVTVRAGGQTLLEHVDLRLERGEALRLAGPNGGGKTTLLRLLAGEIAPTSGERVYGLGGTVQRSAVRARRSLSVVGPDAETFYLTRDWTQTVRDVLLAGFEGDMLRLWEPTAEALARLREVAALTEVANLLERDFRTLSHGQRRRVVLARALMPDPELLLLDEFTDGLSAGARERLGHVLRDVHASGVALVLATHRPEEAPLLPWRTLWVEGGQVRTGPATAPAPTVSLSLPPPPGSGVLVHLRDVEVYRNGHRALGPLSWTWQAGQHWLVTGENGSGKSTLARLIAGELHPALGGQLERPFLRRDLLSERRRTVGLVGAEVGIRQRRAWTGREVIGSGWSGSEGFTADLTPEQAAQVEELATQLDVTELLDRRAETLSQGQLRRLLLARAVIHAPRLLLLDEGLDFLDADARTRFLALLPELARRGTHVMVIAHREQDALPGLTHHLHLERGQVAAQGRL

SEQ ID NO: 27508 - DNA, 1437 bp, Anaeromyxobacter dehalogenans 2CP-C
  CDS (1)..(1437): transl_table=11
atgcgccggccgctcgtcacgctcgaccgggtggacgtccgcctgggcggcgtccccgtcctcgccggcgtcaccctggcgctccacgccggcgaggggctggcggtgctgggcgggaacggcgcgggaaagtccacgctcctgcggctgctccgcggcgagctctggccggatccgcgcggcgggcggcgcctcttccacgggccggacggggccttcgagagccccatcggcgcgcgcgagcggttcgcgcgggtggcgcccgaggcgcaagacgcctacctgcgcaacgaatgggacctgccggtcgaggcggtgatccgctccggcttcttcgacgcgctgtggccgtccgaggcggcgacggcggagcagtcgcggcgcgtccgcgaggtggcccgcgcgctgggcgtggcggggctgctggggcgatcggtgctggagctgtcgcgcggcgaggggcgccgcgtgctgctggcgcgcgcgctcgcgccgcggccggaggcgctgttcctggacgaggcctgcgacgggctcgacgcgccggcgcgggccggcctgctcgagaccgtctccgcgatcgcgcgcggcggcgtggccgtggtgatggccacgcaccggcccgaggagctcgtgcccgagctgggccgcgtcatccggctggagggcgggcggatcgcgtgggagggcgaccgcgccgccgcgcgggcgggcgcgcgcgaggcccccgcgccgccccgcgcgccggggcgcgaggccggcccgcgcgcggcgctgttcgagctccgcggcgctaccgtgctcgtggacgggcgcgcggtgctcgacggcgtggactggacggtccgcgccggcgagcgctgggcgatcaccggcccgaacggcgcggggaagtccacgctgctccggctgctcgcgggcgaggagcagccggcgcgcggcgcggtggaccggctcggcctcgggccgcgcgcgtccgccgaggacctgcgcggccgcgtgggcctggtctcgccggagctgcaggcgcgccaccgcttcgacgcgcgcgccgcggacgtcgtgctctccgggttcgccgggacgatcgggctcgcggtggagcccaccgcgcgcgagcgggcgctggccgccgccgcggcggagcggctcggggtgacgccgctgctcgggcggcacgtgctgtcgctctcctacggcgagctccgcaaggtgctcatcgcccgcgcgctcgcgccggcgccgcgggcgctgctgctcgacgagcccctcgccggcctcgaccccgccgcgcgcgcctgggtgctccgggtgctcgacgagctgggcgcggccggcaccgcgatcgtggccgtgtcccaccacgccgacgagctgcccggcgcggtggacgagcgggcgcggctcgacgcgggacggctcgccgtggacgcctga

SEQ ID NO: 27509 - protein, 478 aa, Anaeromyxobacter dehalogenans 2CP-C
MRRPLVTLDRVDVRLGGVPVLAGVTLALHAGEGLAVLGGNGAGKSTLLRLLRGELWPDPRGGRRLFHGPDGAFESPIGARERFARVAPEAQDAYLRNEWDLPVEAVIRSGFFDALWPSEAATAEQSRRVREVARALGVAGLLGRSVLELSRGEGRRVLLARALAPRPEALFLDEACDGLDAPARAGLLETVSAIARGGVAVVMATHRPEELVPELGRVIRLEGGRIAWEGDRAAARAGAREAPAPPRAPGREAGPRAALFELRGATVLVDGRAVLDGVDWTVRAGERWAITGPNGAGKSTLLRLLAGEEQPARGAVDRLGLGPRASAEDLRGRVGLVSPELQARHRFDARAADVVLSGFAGTIGLAVEPTARERALAAAAAERLGVTPLLGRHVLSLSYGELRKVLIARALAPAPRALLLDEPLAGLDPAARAWVLRVLDELGAAGTAIVAVSHHADELPGAVDERARLDAGRLAVDA

SEQ ID NO: 27510 - DNA, 2736 bp, Azotobacter vinelandii AvOP
  CDS (1)..(2736): transl_table=11
atgagcggcgtcgcccagcttgccggggtcaccctgcgctatggccggacttgcgccctggaccggctcgacctggaaatccccgccaaccgcatggtgggcctgatcggtccggacggcgtcggcaagtccagcctgctggcgctgatctccggcgcgcggcgtatccagcagggcagcatcagtgtgctggacggcgacatggccgacgccgcccaccgccgccgggtctgcccgcgcatcgcctacatgccccaggggctgggcaagaacctctacccgacgctgaccgtgcgcgagaacctggagttcttcggccgcctgttcggccaggaccgggcggagcgcgacgcacgcatcgccgacctgacccgcagcaccggcctggcgcctttcaccgagcggccggcgggcaagctctccggcggcatgaagcagaagctcggcctctgctgttcgctgatccacgaccccgacctgctgatcctcgacgaacccaccaccggcgtcgacccgctggcgcgcagccagttctgggaactgatcgaacgcatccgcgacaaccgcgccggcatgagtgtgctggtggccaccgcctacatggacgaggcgcaacgtttcgactggctggtggtcatggacgacggcaaggtcctggacaccggcagccccggcgagatcctcgcccgcaccggcagcgccgacctggagaccgccttcatcgccctgctgcccgaggagaagcgccgcggccaccacgccctggagatcccgccgctggccgccgacagccgcgaggccgccatcgaggcccatggcctgacctgccgcttcggcgacttcgtcgcggtggaccacgtggacttccgcatcgaacgcggggaaatcttcggcttcctcggctccaacggctgcggcaaatccaccaccatgaagatgctcaccggcctgctgccggccagcgagggccaggccctgctgttcggccagccggtggacccgaaggacatcgacacgcgccggcgggtgggctacatgtcccaggcgttctccctctacggcgaactgacggtcctgcagaacctggagctgcacgcccgcctgttccacctccccgaggcgcagcgcacgccgcgcatcggcgaaatgctcgaccgcttcgacctgcgccaggtcggcgacagcctgcccgaacaactgccgctgggcatgcgccagcgcctctcgctggccgtggcggtgctgcacaacccggaaatcctgatcctcgacgaacccacctccggcgtcgacccggtcgcgcgggacaacttctgggaactgctgatccagttgtcgcgccaggacggggtgaccatcttcatctccacccacttcatgaacgaggcgctgcgctgcgaccgcatctccatgatgcacgccggccgcgtgctggacagcgactcgccccgcgccctgatggaaaagcgcggcctgccgaccctggaggaaaccttcatcgcctacctgcgggatgccgccagcgccggcggcgacgagccgctcgccgaatcccccgccgccgacacggcggcgcctgcggcggcggacgccacggctccgtccgagggcttcagcccgcggcgcctgtacagctatttcctgcgcgaggcgacggagctgcgccgcgacccgatccgcggctccctggccctgctgggcaccctgctgctgatggcgatcatgagctacggcatcaccatggacgtggaagacctgaaatacgccgtgctcgaccgcgaccagagcggcgccagccaggactacgcgctggccctgtccggttcgccgcgctacttcaccgagcagccgccgttgaccgactatgccgacctggaccggcgcctgcgcggcggcgagatcagcgtggcggtggagatcccgccgaacttcggccgcgacctcaagcgcggcgccgtcccgcaggtggccttctggatcgacggcgccatgcccatgcgcgccgacaccgtcaagggctacgtccagggcatccaccagcgctacctcgaagaactggccgcccgcgatccagccggccagggcgccagcctcgccgaagtggccctgcgctaccgctacaaccccaacgtgctgagtctgccggccatggtcccggcggtcatcccgctgctgctgatgatgatcccggccatgctcaccgccctgggcgtggtgcgcgaaaaggagctgggatcgatcaccaacctctacaccaccccggtgacccggctggaatttctgctcggcaagcaactgatctacatactgatcggcctgatcaacttcctcatgctgctggtcttcgccgtggccgtgctcgacgtgccggtcagcggcagcctgtcggcgctgatcctgggcgcgctgctctacgtcgcctgctccaccggcctgggcctgttgatgtccacggtgaccaacagccagatcgccgccatcttcggcaccaccatcgtcaccctgctgccggcgatccagttctccgggctgctgcacccggtttccgccctggagggcatcggcgccctcaccggccagctctacccgaccagccatttcctgaccatcagccggggcgccttctccaaggccctgggcctgggggatctgctgccctatttcatcgccctgctggtgaccgccccgctgctgaccctcatcagcgtcgtcggcctgaagaaacaggaacgctga

SEQ ID NO: 27511 - protein, 911 aa, Azotobacter vinelandii AvOP
MSGVAQLAGVTLRYGRTCALDRLDLEIPANRMVGLIGPDGVGKSSLLALISGARRIQQGSISVLDGDMADAAHRRRVCPRIAYMPQGLGKNLYPTLTVRENLEFFGRLFGQDRAERDARIADLTRSTGLAPFTERPAGKLSGGMKQKLGLCCSLIHDPDLLILDEPTTGVDPLARSQFWELIERIRDNRAGMSVLVATAYMDEAQRFDWLVVMDDGKVLDTGSPGEILARTGSADLETAFIALLPEEKRRGHHALEIPPLAADSREAAIEAHGLTCRFGDFVAVDHVDFRIERGEIFGFLGSNGCGKSTTMKMLTGLLPASEGQALLFGQPVDPKDIDTRRRVGYMSQAFSLYGELTVLQNLELHARLFHLPEAQRTPRIGEMLDRFDLRQVGDSLPEQLPLGMRQRLSLAVAVLHNPEILILDEPTSGVDPVARDNFWELLIQLSRQDGVTIFISTHFMNEALRCDRISMMHAGRVLDSDSPRALMEKRGLPTLEETFIAYLRDAASAGGDEPLAESPAADTAAPAAADATAPSEGFSPRRLYSYFLREATELRRDPIRGSLALLGTLLLMAIMSYGITMDVEDLKYAVLDRDQSGASQDYALALSGSPRYFTEQPPLTDYADLDRRLRGGEISVAVEIPPNFGRDLKRGAVPQVAFWIDGAMPMRADTVKGYVQGIHQRYLEELAARDPAGQGASLAEVALRYRYNPNVLSLPAMVPAVIPLLLMMIPAMLTALGVVREKELGSITNLYTTPVTRLEFLLGKQLIYILIGLINFLMLLVFAVAVLDVPVSGSLSALILGALLYVACSTGLGLLMSTVTNSQIAAIFGTTIVTLLPAIQFSGLLHPVSALEGIGALTGQLYPTSHFLTISRGAFSKALGLGDLLPYFIALLVTAPLLTLISVVGLKKQER

SEQ ID NO: 27512 - DNA, 1590 bp, Azotobacter vinelandii AvOP
  CDS (1)..(1590): transl_table=11
ttgatctccacagcaaacatcaccatgcaattcggcgccaagccgctgttcgagaacgtctccgtcaagttcaacaacggtaaccgctacggtctgatcggcgccaacggctgcggaaagtccactttcatgaaaatcctcggcggcgatctggagccctccgccggccaggtgatgcttgagcccaacgtgcgcctcggcaagctgcgccaggatcagttcgcctacgaggatttttccgtgatcgataccgtgatcatgggccacgaggaactgtggaacgtgaaggccgaacgcgaccgtatctacgcgctgccggagatgagcgaagaggacggcatgaaggtcgccgatctcgaggtgcagttcgccgagctggacggctataccgccgaatcccgcgccggcgagctgctgctcggggtgggcattccgctggaccagcacttcggctcgatgagcgccgtggcgcccggctggaaactgcgcgtgctgctggcccaggcgctgttctccgacccggacgtgctgctgctcgacgagccgaccaaccacctggacatcaacaccatccgctggctggaaagcgtgctcaccgcgcgcaactccaccatgatcatcatctcccacgaccgtcacttcctgaacagcgtctgcacccacatggccgacctggactacggcgagttgcgcctgtttcccggcaactacgacgagtacatgaccgtggcgacccaggcccgcgagcgcctgctcgccgacaacgccaagaagaaggcgcagatcgccgagctgcagaccttcgtcagccgcttctcggccaacgcctccaaggccaagcaagccaccagccgcgcccggcagatcgacaagatccagttggaagaggtcaagccgtcgagccgggtcagccccttcatccgcttcgaacagaacaagaagctgcaccgccaggcgctgaccctggagaaggtcggccagggcttcgacggcatgacgctgttcaaagacctgtcgctgcaggtcgaagccggcgagcgggtcgccatcatcggccccaacggtatcggcaagaccaccctgctgcgcacgatggtcggcgagatgccgccgcagtccggcgaggtgaagtgggccgagagcgccgaaatcggctacttcgcccaggaccacgccgacgacttcgagcaggatctgaccctgttcgactggatggcccagtggacccagggcggcgagcagctggtgcgcggtaccctcgggcgcatgctgttctccaacgacgagatcaagaagtcggtgaaagtgatttccggcggcgaacaggggcgcatgctgttcggcaagctgatcctcgccaaacccaacgtgctggtgatggacgagccgaccaaccacctcgacatggagtccatcgaagcgctcaacctggccttggagaactaccccggcacgctgatcttcgtcagccacgaccgcgagttcgtcagctcgctggccacccgcatcatcgaactctccgccagcggcgtgaccgacttcagcggcagctacgacgactacctgcgcagccagggcgtggcgatctga

SEQ ID NO: 27513 - protein, 529 aa, Azotobacter vinelandii AvOP
MISTANITMQFGAKPLFENVSVKFNNGNRYGLIGANGCGKSTFMKILGGDLEPSAGQVMLEPNVRLGKLRQDQFAYEDFSVIDTVIMGHEELWNVKAERDRIYALPEMSEEDGMKVADLEVQFAELDGYTAESRAGELLLGVGIPLDQHFGSMSAVAPGWKLRVLLAQALFSDPDVLLLDEPTNHLDINTIRWLESVLTARNSTMIIISHDRHFLNSVCTHMADLDYGELRLFPGNYDEYMTVATQARERLLADNAKKKAQIAELQTFVSRFSANASKAKQATSRARQIDKIQLEEVKPSSRVSPFIRFEQNKKLHRQALTLEKVGQGFDGMTLFKDLSLQVEAGERVAIIGPNGIGKTTLLRTMVGEMPPQSGEVKWAESAEIGYFAQDHADDFEQDLTLFDWMAQWTQGGEQLVRGTLGRMLFSNDEIKKSVKVISGGEQGRMLFGKLILAKPNVLVMDEPTNHLDMESIEALNLALENYPGTLIFVSHDREFVSSLATRIIELSASGVTDFSGSYDDYLRSQGVAI

SEQ ID NO: 27514 - DNA, 1638 bp, Azotobacter vinelandii AvOP
  CDS (1)..(1638): transl_table=11
atgccttcgacccgaggaagtgaaatgaacgattcgcagaacctcatcgagatccgcgacctcgcggtcgagttcgtcggcggcgatcgcctggagcgcgtggtggaaggcgtcagcttcgacatccggcggggcgagaccctggccctagtcggcgaaagcggttcgggcaagtcggtcactgctcactcgatcctgcgtctgctgccctatccgctcgcccgccatccgtccggcagcatccgctatgccggccaggacctgctccagctcgacgagcgcaggctgcgcggcatccgcggcaaccgcatcgccatggtcttccaggagccgatgacctcgctgaacccgctgcacagcatcgagaagcagatcaacgaggttctcgccctacacaagggcctgcgcggcgcggcagccaccgcgcgcaccctggagctgctcgaactggtcggcattcccgagccgcacaagcgcctcaaggcttatccccacgagctttccggcggccagcggcaacgggtgatgatcgccatggcgctggccaacgaacccgaactgctgatcgccgacgagccgaccacggcgctggacgtcaccgtgcagttgaagatcctcgagctgctcaaggacctgcaggcccgcctgggcatggccttgctgctgatcacccacgacctcaacctggtgcggcgcaccgcccatcggatctgtgtcatgcgcggcgggcgcatcgtcgaacaggccggctgcgaggaaatcttccacgcgccgaagcatccctatactcaggaattgctcggtgccgaacccagcggggcgccggcggacaacccggtcggcgagccgctgctggaggtcgaggacctgcgcgtctggttcccgatcaagaagggcctgctgcgccgtaccgtcgatcacgtcaaggcggtggacggcatcggcttcagcctgcgccgcgggcagaccctgggcatcgtcggggaaagcggttccggcaagtccaccctcggcctggcgatcctgcgcctgctcgccagccagggctcgatccgcttccgcggccagacgctggacggtctgtcgcaaggcgagatccgccccctgcgacgggagatgcaggtggtcttccaggatcccttcggcagcctcagcccgcgcatgtcggtgggccagatcgtcggcgagggcctgcgcatccaccgcctcggcacgctggccgaacaggagcaggcgatcgtcgaggcgctgcgcgaggtcggcctggacccggaaacccgccaccgctacccgcacgagttttccggcggacagcggcagcggatcgccatcgcccgggcgctggtgctgaagccggcgctgatcctgctggacgagcccacttccgcgctcgaccgcacggtacagcgccaggtcgtcgagctgctgcgctcgctgcagcgcaagtacgacctgacctacctgttcatcagccacgacctggcggtggtcaaggcgctcagccaccagttgatggtggtcaggcagggacaggtggtcgaacagggggcggcgcgggatatcttcgccgctccgcgacatacttatacacggcagttgctggaagccgccttcctggctcccggcagcgccgattaa

SEQ ID NO: 27515 - protein, 545 aa, Azotobacter vinelandii AvOP
MPSTRGSEMNDSQNLIEIRDLAVEFVGGDRLERVVEGVSFDIRRGETLALVGESGSGKSVTAHSILRLLPYPLARHPSGSIRYAGQDLLQLDERRLRGIRGNRIAMVFQEPMTSLNPLHSIEKQINEVLALHKGLRGAAATARTLELLELVGIPEPHKRLKAYPHELSGGQRQRVMIAMALANEPELLIADEPTTALDVTVQLKILELLKDLQARLGMALLLITHDLNLVRRTAHRICVMRGGRIVEQAGCEEIFHAPKHPYTQELLGAEPSGAPADNPVGEPLLEVEDLRVWFPIKKGLLRRTVDHVKAVDGIGFSLRRGQTLGIVGESGSGKSTLGLAILRLLASQGSIRFRGQTLDGLSQGEIRPLRREMQVVFQDPFGSLSPRMSVGQIVGEGLRIHRLGTLAEQEQAIVEALREVGLDPETRHRYPHEFSGGQRQRIAIARALVLKPALILLDEPTSALDRTVQRQVVELLRSLQRKYDLTYLFISHDLAVVKALSHQLMVVRQGQVVEQGAARDIFAAPRHTYTRQLLEAAFLAPGSAD

SEQ ID NO: 27516 - DNA, 1623 bp, Burkholderia vietnamiensis G4
  CDS (1)..(1623): transl_table=11
atgagcgccatcgacgcctcgcagccgggcgaaccgctgctgtcgctcgagcatctgcacgtgcgcttcggcgacacggtggccgtcgaagacgtgacgctcgcgatcggtcgcggcgaacgcgtcgcgctggtcggcgagtcgggctcgggcaagagcgtgaccgcgctgtcgatcctgcggctgctgcgtgatgcggacgtgagcggcaccatccgcttcgccgggcaggatctcgccggcaagagcgagcgcgagatgcgcgggctgcgcggctcggacatcgcgatgatcttccaggagccgatgacggcgctcaatccgctgtacacggtcggcgcgcagatcgccgagacgatcgtgctgcacgacggcgtgacggccggcgaagcgcgcaagcgcacgatcgcgctgctcgcccgcaccggcatcgcggagcccgagaagcgcgtcgacagctacccgcacgagctgtcgggcggccagcggcagcgcgcgatgatcgcgatggcgctcgcctgccggccgcggctgctgctcgccgacgagccgaccaccgcgctcgacgtgacgatccgcgcgcagatcgtcgacctgctgctcgaactgcagcgcgacgaggcggaaaagcgcgggatggcgatcctgctgatcacgcacgatctgaacctcgtgcggcgcttcgccgagcgggtcgccgtaatggagcacggcaggctggtcgagagcgggccggtggagcggatcttcgcgcagcccgagcatccgtatacgcagcggctgctgaacagccggccgcagcgcacggtcgcgccggtgctgccgatcgcgccggtcgtgctcgacgcgcgccacgtcagcgtgcagttcgcgcgcaagcggccggggctggccggctggttcgggacgctgccggtgacggcggtggatgacgtgtccgtgtcggtgcggcagggcgagacgctcgggatcgtcggcgaatcaggctccggaaagtcgacgctcgcgatggcgctgctcgggctgcaacggacggtggccggcgagatcgagttccaggggcgcgcgctgtcgacctatcgcggccgcgaacagaccgcgctgcgctcgaacatgcaggtcgtctttcaggatccattcagttcgctgtcgccgcgtcagacgatcgagcggatcgtcggggaggggctcgagttgcatcgcccggaactgagcgcggacgcgcgccgcgcgaagtcgctgacggtgctgcgcgaagtcggcctcgaccgcacggtgctgcatcgctatccgcacgagttctccggcggccagcggcagcggatcgcgatcgcacgcgcgctcgtgctcgagccgcgcatcctgatcctcgacgagccgacttccgcgctcgacgtgtcgatccagcagcaggtgctgaagctgctcgcgaatttgcaacagaaatacaacctgggctatgtattcatcagccacgatctggaggtgatcggcgcgatggcgcaccgcgtcgcggtgatgcagggcggggcggtcgtcgagtccggcgacgtggcggatatcttcacgagaccgtcacatccttacacacaaaagctgttgaaagccgtctggaaagcgtga

SEQ ID NO: 27517 - protein, 540 aa, Burkholderia vietnamiensis G4
MSAIDASQPGEPLLSLEHLHVRFGDTVAVEDVTLAIGRGERVALVGESGSGKSVTALSILRLLRDADVSGTIRFAGQDLAGKSEREMRGLRGSDIAMIFQEPMTALNPLYTVGAQIAETIVLHDGVTAGEARKRTIALLARTGIAEPEKRVDSYPHELSGGQRQRAMIAMALACRPRLLLADEPTTALDVTIRAQIVDLLLELQRDEAEKRGMAILLITHDLNLVRRFAERVAVMEHGRLVESGPVERIFAQPEHPYTQRLLNSRPQRTVAPVLPIAPVVLDARHVSVQFARKRPGLAGWFGTLPVTAVDDVSVSVRQGETLGIVGESGSGKSTLAMALLGLQRTVAGEIEFQGRALSTYRGREQTALRSNMQVVFQDPFSSLSPRQTIERIVGEGLELHRPELSADARRAKSLTVLREVGLDRTVLHRYPHEFSGGQRQRIAIARALVLEPRILILDEPTSALDVSIQQQVLKLLANLQQKYNLGYVFISHDLEVIGAMAHRVAVMQGGAVVESGDVADIFTRPSHPYTQKLLKAVWKA

SEQ ID NO: 27518 - DNA, 2832 bp, Burkholderia vietnamiensis G4
  CDS (1)..(2832): transl_table=11
gtgaacacgacgacgcgcgcagataccgacagccgcgcgaccgacggcgcgccgggcgcggccggcccggcgccggtcgcccggctgtcgggcgtgtcgctgcgctacggcggcaaggcggcgctcgacgacgtgacgctcgagatcccggccggccgcatgatcgggctgatcggcccggacggcgtcggcaagtcgagcctgctcgcactcgtgtcgggcgcgcgcgcgatccagcaggggcacgtgcacgcgctcgacgccgatctgtcgtcgcgccgcgatcgcgcgcgcgtatgccggcgcatcgcgtacatgccgcagggcctcggccgcaacctgtacgcgacgctgtcggtcgaggagaacctgcagttcttcgcgcgcctgttcggccacgacgcggccgagcggcgccgccggatcgacgcgctgacgcgcagcaccggcctgcatccgttcctcgaccgcccggccggcaagctgtccggcgggatgaagcagaagctcggcctgtgctgcgcgctgatccacgatcccgacctgctgatcctcgacgagccgacgaccggcgtcgatccgctgtcgcgcgcgcagttctgggatctgatcgcgcgcattcgcgtcgcgcggcccgccatgagcgtgctggtcgcgaccgcctacatggacgaggcgcgccgcttcgactggctgatcgcgatggacgccggccgcgtgctggccaccggcagccccgccgacctgctcgcgcgcaccggctgcgacacgctggaggccgcgttcatcgcgctgctgccggacgagcgccgcaaggggcaccagccggtgcagatcgaaccgttccggcccgacgcgaccgccggctacgcgatcgaggccgacgggctgacgatgcggttcggcgagttcgtcgcggtggaccacgtgagcctgcagatccgtcgcggcgaaatcttcgggtttctcggctccaacggctgcggcaagtcgacgacgatgaagatgctcaccggcttgctgccggcgtccgaaggcacggcgacgctgttcggccagccggtcgccgccaacgacatcgacacgcgccgccgcgtcggctacatgtcgcagggcttttcgctgtacggcgagctgaccgtgcggcagaacctcgtgctgcacgcgcgcctgttcggcgtgccggaagccgacgtgcccgcgcgggtcgacgagatggtcgcgcgcttcgggctcgccggcgtgctcgacgtgctgccggagcgcctgccgctcgggatgcggcagcggctgtcgctcgcggtcgcgatggtgcacaagccggagctgctgatcctcgacgagccgacctcgggcgtcgacccggtcgcgcgcgacgacttctggcggctgatgatcgagctggcgcgccgcgatcgcgtcacgatcttcatctcgacgcacttcatgaacgaggccgcgcgctgcgaccgcatctcgctgatgcatgcgggccgcgtgctcgcgagcgccgcgccggcggagctggtgcgcatgcgcggcgcggcatcgctcgaggacgcgttcatcggctatctcaccgatgcgcagcgtgaggacagcccgagcgatgcagccgcagcggccgatgcgtcgtccgacgccggctggctcgccactgccccgtcggccacgcccgcggccgcccgcggcgcggcgcggaccgcatggttcagcgccgcgcgcgccggcagctacctgtggcgcgaggtgctggagctgcgccgcgacccgctgcgggcgacgctcgcgctgttcggctcgctcgtgctgatgtgcgtgatcagcatcggcatcagcctcgacgtcgacaacctgacgttcgcggtgctcgaccgcgaccagtcgatcctgagccaggactacgcgcagaacctcgccggctcgcgctacttcgtgccgcgcgcgccgctcgcggacgatcgcgacatcgaacgccgcatgcgcaacggcgagctgtcgctcgcgatcgagattccgcccgacttcgcgcgcgacgtcgcgcgcgggcggcacgtcgagatcggcgcgtgggtcgacggcgcgatgccgatgcgcgccgagacgatccgcggctacgtggccggcatgcacgagaactggctgcgcgaccaggcgaagcgccgcctcggcgtggcgctcgcgccggccgtcgacatcgcggtccgctatcgctacaaccccgacgtgaagagcttgcccgccatgattccggcgatcatgccgatgctgctgttgatgttgcccgcgatgctcaccgcgctcgccgtggtgcgagaacgcgagctcgggtcgatcgtgaacctgtacgtgacgcccgtcacgcgcgccgaattcctgatcggcaagcaggtgccgtacgtgatgctggcgatgcttaacttcctgctgatggtggtgctcgccgacctcgtgttcggcgtgcggatcaaaggcagtttcgcgacgctggcggccgcggtgctgatcttcaacgtggtggcgaccggcatcggcctgttcgcgtcgaccttcacgcgcagccagatcgccgcgatcttcatgacgatcgtcggtacgctgataccggtcgtgcagttctcggggctgctcacgccgctgtcgtcgctggaaggcagcggcaagtggatcggcacgatctatccggccacctacatgctcgcgatcagccgcggcgtgtacaacaaggcgctcgggctgtccgacctgtcgtcgcagttctggccgatgctcgtggccgtgcccgtcatcctcgtgatgaccggcatgctgctgcgcaaacaggagcgctga

SEQ ID NO: 27519 - protein, 943 aa, Burkholderia vietnamiensis G4
MNTTTRADTDSRATDGAPGAAGPAPVARLSGVSLRYGGKAALDDVTLEIPAGRMIGLIGPDGVGKSSLLALVSGARAIQQGHVHALDADLSSRRDRARVCRRIAYMPQGLGRNLYATLSVEENLQFFARLFGHDAAERRRRIDALTRSTGLHPFLDRPAGKLSGGMKQKLGLCCALIHDPDLLILDEPTTGVDPLSRAQFWDLIARIRVARPAMSVLVATAYMDEARRFDWLIAMDAGRVLATGSPADLLARTGCDTLEAAFIALLPDERRKGHQPVQIEPFRPDATAGYAIEADGLTMRFGEFVAVDHVSLQIRRGEIFGFLGSNGCGKSTTMKMLTGLLPASEGTATLFGQPVAANDIDTRRRVGYMSQGFSLYGELTVRQNLVLHARLFGVPEADVPARVDEMVARFGLAGVLDVLPERLPLGMRQRLSLAVAMVHKPELLILDEPTSGVDPVARDDFWRLMIELARRDRVTIFISTHFMNEAARCDRISLMHAGRVLASAAPAELVRMRGAASLEDAFIGYLTDAQREDSPSDAAAAADASSDAGWLATAPSATPAAARGAARTAWFSAARAGSYLWREVLELRRDPLRATLALFGSLVLMCVISIGISLDVDNLTFAVLDRDQSILSQDYAQNLAGSRYFVPRAPLADDRDIERRMRNGELSLAIEIPPDFARDVARGRHVEIGAWVDGAMPMRAETIRGYVAGMHENWLRDQAKRRLGVALAPAVDIAVRYRYNPDVKSLPAMIPAIMPMLLLMLPAMLTALAVVRERELGSIVNLYVTPVTRAEFLIGKQVPYVMLAMLNFLLMVVLADLVFGVRIKGSFATLAAAVLIFNVVATGIGLFASTFTRSQIAAIFMTIVGTLIPVVQFSGLLTPLSSLEGSGKWIGTIYPATYMLAISRGVYNKALGLSDLSSQFWPMLVAVPVILVMTGMLLRKQER

SEQ ID NO: 27520 - DNA, 2829 bp, Burkholderia vietnamiensis G4
  CDS (1)..(2829): transl_table=11
atggctgccacgctcggcacgtcgggggctggccatgcggcgggcgcgatccatgtcgcgaacctgtcgcatcgctatggctcggcgctcgcgctcgacgacgtatcgctgtcgctgccggcgcacacgacgatcggcctgatcggcccggacggcgtcggcaagtcgacgctgctcggcgtcatcgccggcgtgaagcgcatccagcagggcgacgtgtcggtgctcggcgcggacctgcgcgtgcgcgaccggcgcgaggcgatcctgccgcgcgtcgcgttcatgccgcaagggctcgggcgcaatctgtacccgacgctctcggtgtacgagaacatcgatttcttcgcgcgcctgttcgggctcgatgcgcatgcgcgcgcggcgcgcatccagcgcctgctcgatgccaccggccttgcgccgtttccggaccggccggcaggcaagctgtcgggcgggatgaagcagaagctcggcctgtgctgcgcgctcgtgcacaatcccgacctgctgatcctcgacgaaccgaccaccggcgtcgatccgctgtcgcgccgccagttctggacgctggtcgacgatctgcgcgccgagcatcgcggcatgagcgtgatcgtcgcaaccgcctacatggaagaggcgcagcgcttcgagcatctggtcgcgatggacggcgggcgcgtgctcgtcaacgacagcacgcaggcggtgctcgagcgcgcgggcacggacgacctggagcgggcgtacgtgtcgctcctgccgggggccggcggcgccggcgcggccgcccttgtgattccgccgcgcccgcaggacggcgcgcccgcgatcgtcgccgacgggctcacgcggcgcttcggcagcttcgtcgcggtcgatcacgtgagcttccggatcgagcgcaacgagatcttcggctttctcggctcgaacggttgcggcaagacgacgacgatgaagatgctgacgggcctgctcgacgcgacgagcgggaccgcgacgctgctcggcaagccgatcgacgcgaccgacatgaacacgcggatgaaggtcggctacatgtcgcagtcgttctcgctgtacgaggagctgacggtgcggcagaacctcgacctgcacgcgaagctctaccggatggagggcgagcgcgcgagtgaggccgtcgagcggtcgctggcgagcttcgagctgcagccgtgcgccgacgagcggcccgccgcgctgtcgctcggcatccgccagcggttgcagctcgcggccgcatgcctgcacaagccggaagtgctgatcctggacgaaccgacttcgggcgtcgatcccggcgcgcgcgacatgttctggcggcacctgatccagttgtcgcgcgaggaacgcgtgaccattttcatctcgacgcacttcatgaacgaggcggcgcgctgcgaccgcatttcgctgatgcaccgcggccgcgtgctcgccgtgggcagcccggaggaattgcgcgagcagcgtcacgcgtcgacgctcgaagaggcgttcgtggcctgtctcgaagaagccgaggcggccggcgcgacggcgccggcctcgcgccagccggatgcggcgcgacctgacgctcaggcggacgcgacggccgaagcgacagccgaagcaaccggcaaagcgacagccgaaggggcccccgaagcaacgcccaccacagcccccaccgccggctcgctcgcgcgcatctgggccttcgcgcgccgcgagtcgctggaactcgcgcgcgacaggctgcggctcgcgttcgcgctgctcggcccggtggtgctgctgctcgccgccgcatggagcgtgtcgttcgacgtggagaacgtgcggttcgcggtgctcgatcgcgaccatagcctcgaaagccgtaccctggtcgagcagttttccggctcgcgctacttcgtgccgaccggccacgtgtacaccgacggcgaagcgcaccgtctgctgcaggccgacgacgcgcagctggtcgtcgagattccgccggacttcggccgcgacctgctcgccgggcgccggcccgagctgtcgttccatgtcgatggctccagcccgttccccggcgcgacgatcggcacctacgtgaacgcggtgctgctcgactacgtcggcaaggaaatccgtcatgcgagcgtcgcgatgcccgcactgccggtgtcggtcgagtcgcgcttcatctacaacgaggaattccgcagcatctatgcgattacgcccggcgtcatcatgctcgcgctgatcctgatcccgacgatgctgaccgcgctcggcgtcgtgcgcgagaaggagatgggctcgatcacgaatctctatgcatcgccggcgggcgtcggcgagtacctgctcggcaagcaggcgccttacgtggggctcgcgatggtgagctacctcgtgctcgtcgcgctgaccgtcacggtgctcggcgtgccgctgaagggatcgttcgtcgcgctctcgatcggcgcgctgctgttcgtgttcgcggcgaccggcctcggcctgctcgtgtcgacgttcgtgcgctcccaggtcgcggcgattttcggcaccgcgattctgtgcctgattccgtcggtcaatttctccgggctgctctatccggtgtcgacgctcaccgggagcagctactgggcgggcctcggctttccgtcgtcgtggttccagctcgtgagcctgggcagcttcacgaagggcctgggcgccgcgcacttcggcacgatgtacgccgcgctgtcgggcttcgcgctgctctacctgatcggcgcgtattgcctgttgccgaagcaggaggcctag

SEQ ID NO: 27521 - protein, 942 aa, Burkholderia vietnamiensis G4
MAATLGTSGAGHAAGAIHVANLSHRYGSALALDDVSLSLPAHTTIGLIGPDGVGKSTLLGVIAGVKRIQQGDVSVLGADLRVRDRREAILPRVAFMPQGLGRNLYPTLSVYENIDFFARLFGLDAHARAARIQRLLDATGLAPFPDRPAGKLSGGMKQKLGLCCALVHNPDLLILDEPTTGVDPLSRRQFWTLVDDLRAEHRGMSVIVATAYMEEAQRFEHLVAMDGGRVLVNDSTQAVLERAGTDDLERAYVSLLPGAGGAGAAALVIPPRPQDGAPAIVADGLTRRFGSFVAVDHVSFRIERNEIFGFLGSNGCGKTTTMKMLTGLLDATSGTATLLGKPIDATDMNTRMKVGYMSQSFSLYEELTVRQNLDLHAKLYRMEGERASEAVERSLASFELQPCADERPAALSLGIRQRLQLAAACLHKPEVLILDEPTSGVDPGARDMFWRHLIQLSREERVTIFISTHFMNEAARCDRISLMHRGRVLAVGSPEELREQRHASTLEEAFVACLEEAEAAGATAPASRQPDAARPDAQADATAEATAEATGKATAEGAPEATPTTAPTAGSLARIWAFARRESLELARDRLRLAFALLGPVVLLLAAAWSVSFDVENVRFAVLDRDHSLESRTLVEQFSGSRYFVPTGHVYTDGEAHRLLQADDAQLVVEIPPDFGRDLLAGRRPELSFHVDGSSPFPGATIGTYVNAVLLDYVGKEIRHASVAMPALPVSVESRFIYNEEFRSIYAITPGVIMLALILIPTMLTALGVVREKEMGSITNLYASPAGVGEYLLGKQAPYVGLAMVSYLVLVALTVTVLGVPLKGSFVALSIGALLFVFAATGLGLLVSTFVRSQVAAIFGTAILCLIPSVNFSGLLYPVSTLTGSSYWAGLGFPSSWFQLVSLGSFTKGLGAAHFGTMYAALSGFALLYLIGAYCLLPKQEA

SEQ ID NO: 27522 - DNA, 3240 bp, Burkholderia mallei NCTC 10247
  CDS (1)..(3240)
atgagcgcgccgagcgtcgttcgtttttccgacgtcagcctgcgctacggcaagaccgtcgcgctcgagcggatcacgctcgagatcccggccggtctcacgatcgggctgatcgggccggacggcgtcggcaaatcgagcctgctcgcgctcgcggccggcgcgcgcgcgctgcagacgggcgcggtcgacgcgctcggcggcgacatgcgctcgcgccgccatcgcgagcgcgtgtgccggcgcatcgcgtacatgccgcaggggctcggcaagaacctgtatccgacgctctccgtcgaggaaaacctgcagttcttcgcgcgcctgttcggccacgacgccgacgagcgccgccgccggatcgacgcgctcacgcggagcaccggcctctttgcgttcctgtcgcggcccgcgggcaagctctcgggcgggatgaagcagaagctcggcctatgctgcgcgctgatccacgatcccgacctgctgatcctcgacgagccgacgaccggcgttgatccgctcgcgcgcgcgcagttctgggatctgatcgcgcgcattcgctcggagcggccggcgatgagcgtgatcgtcgcgaccgcgtacatggacgaggcgcaacgcttcgactggctgatcgcgatggacgcgggccgcgtgctcgcgacgggcgcgcccgccgagctgctcgcgcgcaccggctgcgattcgctcgaggcggccttcatcgcactgttgcccgaagacgaacggcgcggccacaagccggtgacgctcgagccgctgcgcgccgacgcgcaaaccggcaccgcgatcgaggcgcgcgggctgacgatgcgcttcggcgatttcaccgcggtcgatcacgtgagcttccggatccggcgcggcgagatcttcggctttctcggctcgaacggctgcggcaagtcgacgacgatgaagatgctcaccggcctgctgcccgcgaccgagggcaccgcgcagctgttcggcaagacagtcgatccgaaggacatcaatacgcgccggcgcgtcggctacatgtcgcaggccttctcgctgtatagcgaactgacggtgcggcagaacctcgtgctgcacgcgcggctgttcggcgtgccggccgccgagatcgacgcgcgcgtcgacgagatggcgcgccgcttcggcctcgccgacatctacgacatgctgccggacagcctgccgctcgggatgcggcagcggctgtcgctcgcggtggcgatggtgcacaagccggagctgctgatcctcgacgagccgacctcgggcgtcgatcccgtcgcgcgcgacagcttctggcagttgatgatcgacctcgcgcgccgcgatcgggtgacgatcttcatctcgacgcacttcatgaacgaggcgcagcgctgcgaccggatctcgctgatgcacgcgggccgcgtgctcgcgagcgatgcgccggcggcgctcgtgcgcgcgcgcggcgcggcgacgctcgaggaggccttcatcggctatctcgtcgacgcttcggcgcaggaggcgcaggaggcgcagggcggcgcgggcgagcgccccggcgcgggcgagcgcgcggcgggcgaaagcgtggccggtcgcggcgcggcgaccgatggcgatgccgacggcgcgcatgcgcggcccgccgcgtacgcgaacggcgcggcgcaacatcgcgcgcccgatgcggacgcggccggcaccgacgtcgccgccgagacgggcgcacgcgacgacgcgcgcaccgcacacgcggccggacattccgccggaaacgacgtacgcgccacggtgggctccgaagtcggctccgaagtcggctccgatgtcggctccgaagtcgcctccgaagccggcctcgcagccagcgccgaaagcggctccgaacgcggcgtcgcccacggcgccgaacgtgcacgcgaacccgcggcggatgccggcgccgcaatcgacgtcgaaccgggcgcgagcgcggaatcggccacggccgccgtcgccccggctcgccacgccgaatccgccgccacgtcaccccgcgcagggaacgcgccggccggcacgccgttcgccgccgcgccggccgagccgccccatcgcgcattcagcgcgcagcgcgcgctcagctacatgtggcgcgagatgctggagctgcgccgcgatcccgttcgcgcgacgctcgcgctgatcggctcgctcgtgctgatgtgcgtgatcggcatcggcatcagcctcgacgtcgaggatctgacctacgcggtgctcgaccgcgatcaaaccgagctgagccacgactacgcgctgaacctgtccggctcgcgctacttcgtcgagcggccgccgatcgccgattacgcggcgctcgaccgccggatgcgcgacggcgagctgtcgctcgcgatcgagattccgccgaacttcgcgcgcgacgtcgagcgcggcgcgcccgcgcagatcggcatgtggatcgacggcgcgatgccgcagcgcgccgagacgatccgcggctacgcgatcggcatgcacacgatgtggctcgccgacaaggcgcggcaccgcctcggcgtgacgctcgcgccgcgcgcggaagtggtcacgcgctaccgctacaacccggacgtgaagagcctgccggcgatgatccccgccgtgatgccgctgctgctgctgatgttgcccgcgatgctcaccgcgctcgccgtcgttcgcgaacgcgagctcggctcgatcctgaatctgtacgtgacgcccgtcacgcgcaccgagttcctgatcggcaagcaggtgccgtacgtcgtgctggcgatgctgaacttcctgctgatgacgatgctcgcgcgcatcgcgttcgacgtgcccgtcaagggcagcttcatgacgctgctgctcgcggtgctgatcttcaacgtcgtcgccacgggcatcggcctgctcgcgtcgacgttcacgcgcagccaggtggccgcgatcgtgatgacgatcatcggcacgatgatcccgaccgtgcagttcgcggggctgctcacgccgctgtcgtcgctcgagggcaccgggcgcttgatcggcctcgtctatccggccacctacatgctgtcgatcagccgcggcgtgttcaacaaggcgctgtcgctccacgagctctactcgcagttctggccgctcgccgcctgcgtaccggtgatcctcggcgcgaccatactgctcttgaaaaaacaggaacgctga

SEQ ID NO: 27523 - protein, 1079 aa, Burkholderia mallei NCTC 10247
MSAPSVVRFSDVSLRYGKTVALERITLEIPAGLTIGLIGPDGVGKSSLLALAAGARALQTGAVDALGGDMRSRRHRERVCRRIAYMPQGLGKNLYPTLSVEENLQFFARLFGHDADERRRRIDALTRSTGLFAFLSRPAGKLSGGMKQKLGLCCALIHDPDLLILDEPTTGVDPLARAQFWDLIARIRSERPAMSVIVATAYMDEAQRFDWLIAMDAGRVLATGAPAELLARTGCDSLEAAFIALLPEDERRGHKPVTLEPLRADAQTGTAIEARGLTMRFGDFTAVDHVSFRIRRGEIFGFLGSNGCGKSTTMKMLTGLLPATEGTAQLFGKTVDPKDINTRRRVGYMSQAFSLYSELTVRQNLVLHARLFGVPAAEIDARVDEMARRFGLADIYDMLPDSLPLGMRQRLSLAVAMVHKPELLILDEPTSGVDPVARDSFWQLMIDLARRDRVTIFISTHFMNEAQRCDRISLMHAGRVLASDAPAALVRARGAATLEEAFIGYLVDASAQEAQEAQGGAGERPGAGERAAGESVAGRGAATDGDADGAHARPAAYANGAAQHRAPDADAAGTDVAAETGARDDARTAHAAGHSAGNDVRATVGSEVGSEVGSDVGSEVASEAGLAASAESGSERGVAHGAERAREPAADAGAAIDVEPGASAESATAAVAPARHAESAATSPRAGNAPAGTPFAAAPAEPPHRAFSAQRALSYMWREMLELRRDPVRATLALIGSLVLMCVIGIGISLDVEDLTYAVLDRDQTELSHDYALNLSGSRYFVERPPIADYAALDRRMRDGELSLAIEIPPNFARDVERGAPAQIGMWIDGAMPQRAETIRGYAIGMHTMWLADKARHRLGVTLAPRAEVVTRYRYNPDVKSLPAMIPAVMPLLLLMLPAMLTALAVVRERELGSILNLYVTPVTRTEFLIGKQVPYVVLAMLNFLLMTMLARIAFDVPVKGSFMTLLLAVLIFNVVATGIGLLASTFTRSQVAAIVMTIIGTMIPTVQFAGLLTPLSSLEGTGRLIGLVYPATYMLSISRGVFNKALSLHELYSQFWPLAACVPVILGATILLLKKQER

SEQ ID NO: 27524 - DNA, 1635 bp, Burkholderia cenocepacia AU 1054
  CDS (1)..(1635): transl_table=11
atggcgaatgcgttgcttcagatcgacgggttttcggcgcgcttcggcaccaaggcggccgtgcaggaccttagcctgtcggtcggccgcggcgagcgcgtggcgctcgtcggcgaatcggggtcgggcaagagcgtgacggcgctgtcgatcctgcgcctcgcgcagcaggcgacgctgtcgggacggatgctgttcgacggcgaggacctgctcgcgaagaccgaacggcagatgcgcgggattcgcggcgccgacatcgcgatggtgttccaggaaccgatgacggcgctgaatccgctgtatacgatcggcaagcagatcgccgagagcctgcggctgcacgaggggctgcggccgggcgatgcgcgcgagcgggggatcgcgctgctgcggcgcaccgggattccggagccggaacggcgcatcgacagctttccgcatcagttgtcgggcgggcagcggcagcgcgcgatgatcgcgatggcgctggcatgccggccgcggctgttgctggccgacgagccgacgacggcgctcgacgtgacggtgcgccagcagatcgtcgacctgctgatcgaactgcaggagcaagaggcggccgcgcgcgggatggccgtgctgctgatcacgcacgacctgaatctcgtgcggcgttttgcgcagcgcgtggccgtgatggagcagggcgtgctcgtggagacgaacacgaccgacgcgctgttcgccgcgccgcagcacgcctatacgcgccggctgctcgacagcgccccgcagcgggacgtcgagccggtcgcggccggcgcgcagacgattctcgacgtgcaggacctcgccgtcgattaccgcgtcgcggcgaagggctggcgcgcggtgctcggcaagacgacgttccgcgccgtgcacgatgtgaagttgaacctgaggcgcggcgaaacgctgggaatcgtcggcgaatcgggctcggggaaatcgacgctggcggcgacggtgctcggcctgcagcggccggccgagggctcgatcgaaatcgacggcatgccgctggacgcgctgcggacgacgggcggcaggcgcgcgctgtacggcaggatgcaggtcgtgttccaggatccgttcggctcgctgtcgccgcgcatgacggtcgagcagatcgtcggcgaggggctcgccgtgcaccggccgcaggtagccggcgccgcgcggcgctcgcgggtcgccgcgctgctgcaggaggtcggcctgccggccgaagcgatgcttcgctatccgcacgaattttccggtggccagcgccagcgcatcgcgatcgcgcgcgcgctggcggtggagccggagctgctggtgctggacgagccgacgagcgcgctcgacgtgtcgatccagaagcaggtgctgaatctgctgacgaatctgcaaaagaagtacaagctgagctacctgttcatcacgcacgatctcgcggtgatgcgtgcaatggcccaccgggtcgtggtgatgaaggcggggcgggtggtcgaggagggcgatacgctcgacgtgctgcatgcgccgtcccatccgtatacacgcgcgctgctcgcgtcgtcgatgctggctccggtgcgcggcacacaagagagaaccgatgattga

SEQ ID NO: 27525 - protein, 544 aa, Burkholderia cenocepacia AU 1054
MANALLQIDGFSARFGTKAAVQDLSLSVGRGERVALVGESGSGKSVTALSILRLAQQATLSGRMLFDGEDLLAKTERQMRGIRGADIAMVFQEPMTALNPLYTIGKQIAESLRLHEGLRPGDARERGIALLRRTGIPEPERRIDSFPHQLSGGQRQRAMIAMALACRPRLLLADEPTTALDVTVRQQIVDLLIELQEQEAAARGMAVLLITHDLNLVRRFAQRVAVMEQGVLVETNTTDALFAAPQHAYTRRLLDSAPQRDVEPVAAGAQTILDVQDLAVDYRVAAKGWRAVLGKTTFRAVHDVKLNLRRGETLGIVGESGSGKSTLAATVLGLQRPAEGSIEIDGMPLDALRTTGGRRALYGRMQVVFQDPFGSLSPRMTVEQIVGEGLAVHRPQVAGAARRSRVAALLQEVGLPAEAMLRYPHEFSGGQRQRIAIARALAVEPELLVLDEPTSALDVSIQKQVLNLLTNLQKKYKLSYLFITHDLAVMRAMAHRVVVMKAGRVVEEGDTLDVLHAPSHPYTRALLASSMLAPVRGTQERTDD

SEQ ID NO: 27526 - DNA, 1632 bp, Burkholderia pseudomallei 1655
  CDS (1)..(1632)
atgagcgccgcgcagatcgcgcgcggcgccggcgcgccgccgcatgagccgttgctgtcgatcgagcggctgcgcgtgcgcttcggcggcacgctcgccgtcgacgacgtatcgcttgcgatcggccgcggcgagcgcgtcgcgctcgtcggcgaatcgggctccggcaagagcgtcaccgcgctggcgatcctgcgcctgctgcgcgacgccgacgtgagcggcgcgatccgcttcgcgggcgagacgctcgccgacaagagcgagcgcgagatgcgcgcgctgcgcggcgcggacatcgcgatgatcttccaggagccgatgaccgcgctcaatccgctcttcacgatcggcgagcagatcggcgagacgatcgagctgcacgatggcgtatcgaagcgcgacgcgcgcgcgcgggcgatcgcgctgctcgcgcgcaccgggatcgaccggccggacgagcgcgtcgacagctacccgcaccagttgtcgggcggccagcggcagcgcgcgatgatcgcgatggcgctcgcatgccggccgcgcctgttgctcgccgacgagccgaccaccgcgctcgacgtgacgatccgcgcgcagatcgtcgagctgctgctcgaactgcagcgtgacgcggcggccgagcgcgggatggcggtgctgctcatcacgcacgatctgaatctcgtgcggcgcttcgccgagcgggtcgcggtgatggagaagggccggctcgtcgagtgcgggccggtcgagcggatcttcgatgcgcccgagcacccgtacacgcagcgcctgttgcacagccggccgcagcgcacggtgtcgcccgtgttgccgatcgcgcccgtcgtgctcgacgcgcgcggggtcaccgtgcagttcaggcagaagctgccgggcttcgcgggctggctccgctcggggcgcttcaccgcggtgtcggacgcgagcgtgtcggtgcggcagggcgagacgctcggcatcgtcggcgaatcgggctccggcaagtcgacgctcgcgatggcgctcctcgggctgcagcgggtcgcgcacggcgacatcgaattcgagggccgttcgctcgcgagctttcgcgggcgcgagcgcgtcgcgctgcgcgcgaacatgcaggtggtatttcaggatcccttcagctcgctttcgccgcggcagacgatcgggcggatcgtgtccgaagggctcgaactgcatcgccctcggctcacggccgacgcgcgccgcgacaaggtgatcgcggtgctgcgcgaagtcggcctcgatcggacggtgctgcatcgctatccgcacgagttctcgggcggccagcgccagcggatcgcgatcgcgcgcgcgctcgtgctggagccgcgcgtgctcgtgctcgacgagccgacgagcgcgctcgacgtgtcgatccaacaacaagtgttgaagctgctgtcgaatctgcaacgaaagtacaacctgggctacgtgttcatcagccacgatctggaggtgatcggcgcgatggcgcaccgggtggcggtgatgcagggcggggcgatcgtcgagacgggcgacgtcgagcgcatcttcaccgaaccggtgcatccttacacgcaaaaattgctgaaagccgttcgttaa

SEQ ID NO: 27527 - protein, 543 aa, Burkholderia pseudomallei 1655
MSAAQIARGAGAPPHEPLLSIERLRVRFGGTLAVDDVSLAIGRGERVALVGESGSGKSVTALAILRLLRDADVSGAIRFAGETLADKSEREMRALRGADIAMIFQEPMTALNPLFTIGEQIGETIELHDGVSKRDARARAIALLARTGIDRPDERVDSYPHQLSGGQRQRAMIAMALACRPRLLLADEPTTALDVTIRAQIVELLLELQRDAAAERGMAVLLITHDLNLVRRFAERVAVMEKGRLVECGPVERIFDAPEHPYTQRLLHSRPQRTVSPVLPIAPVVLDARGVTVQFRQKLPGFAGWLRSGRFTAVSDASVSVRQGETLGIVGESGSGKSTLAMALLGLQRVAHGDIEFEGRSLASFRGRERVALRANMQVVFQDPFSSLSPRQTIGRIVSEGLELHRPRLTADARRDKVIAVLREVGLDRTVLHRYPHEFSGGQRQRIAIARALVLEPRVLVLDEPTSALDVSIQQQVLKLLSNLQRKYNLGYVFISHDLEVIGAMAHRVAVMQGGAIVETGDVERIFTEPVHPYTQKLLKAVR

SEQ ID NO: 27528 - DNA, 2727 bp, Chromohalobacter salexigens DSM 3043
  CDS (1)..(2727): transl_table=11
atgagtgaagacctcatcgcccggctgcgcggcgtcagcctgcggtatgccgcgaccacggccctggccgacgtggacctggacgttccggcccggcgcatggtcggcctgatcggtcccgacggcgttggcaagtcgagcctgctggcgctggtggccggtgctcgacgccgccagcgaggcaacgtcgaggtgctcggcggcgacatggcgaacgccaggcatcgtcgcctgacgggaccgcgtatcgcctacatgccacagggcctcggcaagaacctgtatgcgaccctgacggtgcgcgagaatctcgagttcttcgcacgtctcttcggccagaaccaggccgagcgagaaggccgcattctcgacctgacccgcagcacgggactgtccgagttcctcgagcgccccgccggcaagctctccggcggcatgaaacagaagctgggcctgtgctgcgcgctgattcacgatcccgacctgctgatcctcgatgagcccacgaccggggtcgatccactctcgcggagccagttctgggagctcatcgcccgtctccgccagcaacgtcttcacatgagcgtgctcgtcgccaccgcctacatggacgaggcccagcgcttcgactggctggtggtcatgaacgagggccgactactggataccggcacgccccgggccctgctcgaacgcacccgctgcacgacgctggaagcggccttcatccagttgctgcccgaggaccagcgccgcacgcatcagcagctggacattcccccgcgacgcaccaacgacgagaccgccatcgaggcccatggactgaccaagcgattcggcgatttcaccgccgtggatcacgtcgactttcgcatcgcccgcggcgagatcttcggctttgtgggttccaacggctgcggcaagtcgaccaccatgaagatgctcaccggactgctgcctttcgaggcaggccaggcccggctgttcggccagccggtggcccccgacgacatcgcgacccggcggcgcatcggttacatgtcgcaggccttctcgctgtacagcgaactcagcgtgggccagaacctcgacctgcatgctcggctctttcagctgtcggaagacgactaccgccagcgccgccctgcgctgctgacccgtttcgacctcgagcacgtcgtcgaccggttgcccggacgcctgccactgggcgtccgccagcgtttgtcgctggcggtggcggtgctccatcgtccggaaatcctgattctcgacgaacccacctccggcgtcgatccgatcaaccgcgacgacttctggcatcagttggtacagatgtcgcgggaggacggcgtcaccattttcatttccacccatttcatgaacgaggccatgcgctgcgatcgcgtcgcgttgatgcatgctggccgggtgctcgccaccgacaccccgcaggcgctgatcgcaaaccgaggcagcgatacactggaacaggccttcatcggctatctgcgcgacgccgcctcgcctggcgcatcgaccggcgccgctcccatggcgctttccgcctccgacacggccatgaacgatacgccgccaccgcgtttcagtggccggcgactgctcagttacgcccggcgcgagagcatcgagctacgccgcgacccggtacgggccaccatggcgatgatcggtaccctcgtgttgatgttcatcatggggtacggcatcaacatggacgtcgatcgtctcgccttcgccgtgctcgaccgtgaccagaccacgaccagccagcactatgcgctcaacctgtccggctcgcgctacttccaggaaaaggcaccgctgcagagctatgcggatctggaaacacgcctgcgcagcggtgacatcagcctcgcggtggaaataccgcccgatttcgggaggcggctcaaacgcggcgactcgccccaggtggcgtactggatcgacggcgccatgccgagtcgcgccaataccatccgggggtacgtggtaggcatccacgatgcctatctgcaggagctggcgcacggcatgggcacgcgcgccgatagcgggcaggtcgacattgcgctgcgctatcgctacaaccccgacgtgcagagcttgccggccatggtgccgacgatcatgtcgctgttgctgatgatgattccggccatgctgaccgcgctgggggtggtgcgcgagaaggagctcggctccatcaccaacttctacgtcacgccggtgacacgcctggaattcctgatcggcaagcaactgccctacgtgacgctgggcctggtcaatttcctgctgctggtgctgctgtcgatcctcgtgttcgatgtgcccctcaagggcaacctgctgaccctgaccctgggcgcattgttgtacgtgatgtgcgccacggggctgggattcttgttctcgacgctgttcaacagccagatcgccgccatcttcggcaccacgatcggcacgctggtgccggcgctgcagttctcgggcatgttcaaccctgtggcctctctggaaggcacctctgccgtgatcggacaactctaccccaccacccattttctgctgatctgccggggcgtgttctccaaggccctgggattggctgacttgtatccctactttctggccttgctggcaacgctccccgtgctcggcgggctcagcctcgttgccctcggcaaacaggagaagtga

SEQ ID NO: 27529 - protein, 908 aa, Chromohalobacter salexigens DSM 3043
MSEDLIARLRGVSLRYAATTALADVDLDVPARRMVGLIGPDGVGKSSLLALVAGARRRQRGNVEVLGGDMANARHRRLTGPRIAYMPQGLGKNLYATLTVRENLEFFARLFGQNQAEREGRILDLTRSTGLSEFLERPAGKLSGGMKQKLGLCCALIHDPDLLILDEPTTGVDPLSRSQFWELIARLRQQRLHMSVLVATAYMDEAQRFDWLVVMNEGRLLDTGTPRALLERTRCTTLEAAFIQLLPEDQRRTHQQLDIPPRRTNDETAIEAHGLTKRFGDFTAVDHVDFRIARGEIFGFVGSNGCGKSTTMKMLTGLLPFEAGQARLFGQPVAPDDIATRRRIGYMSQAFSLYSELSVGQNLDLHARLFQLSEDDYRQRRPALLTRFDLEHVVDRLPGRLPLGVRQRLSLAVAVLHRPEILILDEPTSGVDPINRDDFWHQLVQMSREDGVTIFISTHFMNEAMRCDRVALMHAGRVLATDTPQALIANRGSDTLEQAFIGYLRDAASPGASTGAAPMALSASDTAMNDTPPPRFSGRRLLSYARRESIELRRDPVRATMAMIGTLVLMFIMGYGINMDVDRLAFAVLDRDQTTTSQHYALNLSGSRYFQEKAPLQSYADLETRLRSGDISLAVEIPPDFGRRLKRGDSPQVAYWIDGAMPSRANTIRGYVVGIHDAYLQELAHGMGTRADSGQVDIALRYRYNPDVQSLPAMVPTIMSLLLMMIPAMLTALGVVREKELGSITNFYVTPVTRLEFLIGKQLPYVTLGLVNFLLLVLLSILVFDVPLKGNLLTLTLGALLYVMCATGLGFLFSTLFNSQIAAIFGTTIGTLVPALQFSGMFNPVASLEGTSAVIGQLYPTTHFLLICRGVFSKALGLADLYPYFLALLATLPVLGGLSLVALGKQEK

SEQ ID NO: 27530 - DNA, 1680 bp, Chromohalobacter salexigens DSM 3043
  CDS (1)..(1680): transl_table=11
atgctttcgaccctcgccacgtgctcagcccccagacctcgcccacagcgagtgcctcgagcggccttccagggagaagcgcgcatggacaatgatacggtcgtcttcgaactcgatggcctgcgcatcgccttcggcgacaccacggtggtggaggacctgtcgctgacgctgcgccgcggtgaaaccgccgcgctggtcggcgaatcgggctccggcaagtcggtatccgccctcggcgcgctcgacctgttgccgcccagcgccaaggtcgacggcacgcgccggctcctgggagaatcgctcgacggtctccccaaggcgcgctggaatgcgctgcgcggcgggcaggtcggtttcgtctttcaggaacccaccacctcgctcaacccgctgcacagcgtgggcaagcagctcgccgaaaccttgcggctgcatcaaggggtgcgtggccgtgccgcgcgggaacgcgcacgcgaattgctcgttgcggtgcaattgccccgccccgatgtcctgctcgacgctcaccctcaccagttgtccggcgggcagcgtcaacgcgtcatgatcgccatggccatcgccaacgacccggcgctgctcatcgccgacgaacccacgaccgcactcgatgtcacggtgcaacgggagatcctcgcgctgctggctcggctgcgggatacccacggcatggccatgctgttcatcacccatgacctcaacctggtccgtcgtcacgcggacagcgtgcatgtcatgaagcagggccggctcatcgagagcggaaccgtggcgcaggtcttcgacaccccgcgcgaggcctacacccgacacttgctcgccgccgagcccgaaggccgcgccgtggcactgcccgctgccgcccccacgctgctcgaggcgcacgcactcagcgtggcgttcgaacagggcaagtcctggctggggcggcgccccgcccccttcgtcgccgtgcatccgctcgacatccagctggcacgcggcgaaacgctgggcctggtcggggaatcgggctccggcaagaccacgctggccatggcgttgctgcgcctcaccgccgccgacggcgagatcgtcttcggcggggagcgcctcgacaccttgcgtggcaatgccctgcgccgccggcgccgacgctttcaggtcgtctttcaggacccctacgggtcgttgtcaccccgcatgccggtcatggatatcgtcagcgaaggcctgcgcttccaccaccccgaactcagcgacgccgaggtcgaacgccgtgtcgccgcgacgctggacgaagtcggcctgcccgcggattgcgcggcgcgttatccgcacgaattctcgggcggccagcgccagcgcatcgccgtggcgcgcgccatcatcctcgagcccgacctggtggtcctcgacgagcccacgtctgcgctggaccgcagcgtgcagaaacagctcattgccctgttgcgggatcttcagtcgcgacgcggactgagctacctgttcatcagccacgatctcgccgtggtccgcgccatggcacaccgggtgatggtgctcaaggatggccgtgtcgtcgagcaaggcgactgcgacacgctgctcagccgcccccaggccgactacacgcagcgcctgctcgaggcatccggcctgggtgacagaacctga

SEQ ID NO: 27531 - protein, 559 aa, Chromohalobacter salexigens DSM 3043
MLSTLATCSAPRPRPQRVPRAAFQGEARMDNDTVVFELDGLRIAFGDTTVVEDLSLTLRRGETAALVGESGSGKSVSALGALDLLPPSAKVDGTRRLLGESLDGLPKARWNALRGGQVGFVFQEPTTSLNPLHSVGKQLAETLRLHQGVRGRAARERARELLVAVQLPRPDVLLDAHPHQLSGGQRQRVMIAMAIANDPALLIADEPTTALDVTVQREILALLARLRDTHGMAMLFITHDLNLVRRHADSVHVMKQGRLIESGTVAQVFDTPREAYTRHLLAAEPEGRAVALPAAAPTLLEAHALSVAFEQGKSWLGRRPAPFVAVHPLDIQLARGETLGLVGESGSGKTTLAMALLRLTAADGEIVFGGERLDTLRGNALRRRRRRFQVVFQDPYGSLSPRMPVMDIVSEGLRFHHPELSDAEVERRVAATLDEVGLPADCAARYPHEFSGGQRQRIAVARAIILEPDLVVLDEPTSALDRSVQKQLIALLRDLQSRRGLSYLFISHDLAVVRAMAHRVMVLKDGRVVEQGDCDTLLSRPQADYTQRLLEASGLGDRT

SEQ ID NO: 27532 - DNA, 1650 bp, Burkholderia pseudomallei 1710a
  CDS (1)..(1650)
atgagcgccgcgcagatcgcgcgcggcgccggcgcgccgccgtcgccgtcgacgccgccgcatgagccgttgctgtcgatcgagcggctgcgcgtgcgcttcggcggcacgctcgccgtcgacgacgtatcgcttgcgatcggccgcggcgagcgcgtcgcgctcgtcggcgaatcgggctccggcaagagcgtcaccgcgctggcgatcctgcgcctgctgcgcgacgccgacgtgagcggcgcgatccgcttcgcgggcgagacgctcgccgacaagagcgagcgcgagatgcgcgcgctgcgcggcgcggacatcgcgatgatcttccaggagccgatgaccgcgctcaatccgctcttcacgatcggcgagcagatcggcgagacgatcgagctgcacgatggcgtatcgaagcgcgacgcgcgcgcgcgggcgatcgcgctgctcgcgcgcaccgggatcgaccggccggacgagcgcgtcgacagctatccgcaccagttgtcgggcggccagcggcagcgcgcgatgatcgcgatggcgctcgcatgccggccgcgcctgttgctcgccgacgagccgaccaccgcgctcgacgtgacgatccgcgcgcagatcgtcgagctgctgctcgaactgcagcgtgacgcggcggccgagcgcgggatggcggtgctgctcatcacgcacgatctgaatctcgtgcggcgcttcgccgagcgggtcgcggtgatggagaagggccggctcgtcgagtgcgggccggtcgagcggatcttcgatgcgcccgagcacccgtacacgcagcgcctgttgcacagccggccgcagcgcacggtgtcgcccgtgttgccgatcgcgcccgtcgtgctcggcgcgcgcggggtcaccgtgcagttcaggcagaagctgccgggcttcgcgggctggctccgctcggggcgcttcaccgcggtgtcggacgcgagcgtgtcggtgcggcagggcgagacgctcggcatcgtcggcgaatcgggctccggcaagtcgacgctcgcgatggcgctcctcgggctgcagcgggtcgcgcacggcgacatcgaattcgagggccgttcgctcgcaagctttcgcgggcgcgagcgcgtcgcgctgcgcgcgaacatgcaggtggtatttcaggatcccttcagctcgctttcgccgcggcagacgatcgggcggatcgtgtccgaagggctcgaactgcatcgccctcggctcacggccgacgcgcgccgcgacaaggtgatcgcggtgctgcgcgaagtcggcctcgatcggacggtgctgcatcgctatccgcacgagttctcgggcggccagcgccagcggatcgcgatcgcgcgcgcgctcgtgctggagccgcgcgtgctcgtgctcgacgagccgacgagcgcgctcgacgtgtcgatccaacaacaagtgttgaagctgctgtcgaatctgcaacgaaaatacaacctgggctacgtgttcatcagccacgatctggaggtgatcggcgcgatggcgcaccgggtggcggtgatgcagggcggggcgatcgtcgagacgggcgacgtcgagcgcatcttcaccgaaccggtgcatccttacacgcaaaaattgctgaaagccgttcgttaa

SEQ ID NO: 27533 - protein, 549 aa, Burkholderia pseudomallei 1710a
MSAAQIARGAGAPPSPSTPPHEPLLSIERLRVRFGGTLAVDDVSLAIGRGERVALVGESGSGKSVTALAILRLLRDADVSGAIRFAGETLADKSEREMRALRGADIAMIFQEPMTALNPLFTIGEQIGETIELHDGVSKRDARARAIALLARTGIDRPDERVDSYPHQLSGGQRQRAMIAMALACRPRLLLADEPTTALDVTIRAQIVELLLELQRDAAAERGMAVLLITHDLNLVRRFAERVAVMEKGRLVECGPVERIFDAPEHPYTQRLLHSRPQRTVSPVLPIAPVVLGARGVTVQFRQKLPGFAGWLRSGRFTAVSDASVSVRQGETLGIVGESGSGKSTLAMALLGLQRVAHGDIEFEGRSLASFRGRERVALRANMQVVFQDPFSSLSPRQTIGRIVSEGLELHRPRLTADARRDKVIAVLREVGLDRTVLHRYPHEFSGGQRQRIAIARALVLEPRVLVLDEPTSALDVSIQQQVLKLLSNLQRKYNLGYVFISHDLEVIGAMAHRVAVMQGGAIVETGDVERIFTEPVHPYTQKLLKAVR

SEQ ID NO: 27534 - DNA, 1650 bp, Burkholderia pseudomallei 668
  CDS (1)..(1650)
atgagcgccgcgcagatcgcgcgcggcgccggcgcgccgccgtcgccgtcgacgccgccgcatgagccgttgctgtcgatcgagcggctgcgcgtgcgcttcggcggcacgctcgccgtcgacgacgtatcgcttgcgatcggccgcggcgagcgcgtcgcgctcgtcggcgaatcgggctccggcaagagcgtcaccgcgctggcgatcctgcgcctgctgcgcgacgccgacgtgagcggcgcgatccgcttcgcgggcgagacgctcgccgacaagagcgagcgcgagatgcgcgcgctgcgcggcgcggacatcgcgatgatcttccaggagccgatgaccgcgctcaatccgctcttcacgatcggcgagcagatcggcgagacgatcgagctgcacgatggcgtatcgaagcgcgacgcgcgcgcgcgggcgatcgcgctgctcgcgcgcaccgggatcgaccggccggacgagcgcgtcgacagctacccgcaccagttgtcgggcggccagcggcagcgcgcgatgatcgcgatggcgctcgcatgccggccgcgcctgttgctcgccgacgagccgaccaccgcgctcgacgtgacgatccgcgcgcagatcgtcgagctgctgctcgaactgcagcgtgacgcggcggccgagcgcgggatggcggtgctgctcatcacgcacgatctgaatctcgtgcggcgcttcgccgagcgggtcgcggtgatggagaagggccggctcgtcgagtgcgggccggtcgagcggatcttcgatgcgcccgagcacccgtacacgcagcgcctgttgcacagccggccgcagcgcacggtgtcgcccgtgttgccgatcgcgcccgtcgtgctcgacgcgcgcggggtcaccgtgcagttcaggcagaagctgtcgggcttcgcgggctggctccgctcggggcgcttcaccgcggtgtcggacgcgagcgtgtcggtgcggcagggcgagacgctcggcatcgtcggcgaatcgggctccggcaagtcgacactcgcgatggcgctcctcgggctgcagcgggtcgcgcacggcgacatcgaattcgagggccgttcgctcgcgagctttcgcgggcgcgagcgcgtcgcgctgcgcgcgaacatgcaggtggtatttcaggatcccttcagctcgctttcgccgcggcagacgatcgagcggatcgtgtccgaagggctcgaactgcatcgccctcggctcacggccgacgcgcgccgcgacaaggtgatcgcggtgctgcgcgaagtcggcctcgatcggacggtgctgcatcgctatccgcacgagttctcgggcggccagcgccagcggatcgcgatcgcgcgcgcgctcgtgctggagccgcgcgtgctcgtgctcgacgagccgacgagcgcgctcgacgtgtcgatccaacaacaagtgttgaagctgctgtcgaatctgcaacgaaagtacaacctgggctacgtgttcatcagccacgatctggaggtgatcggcgcgatggcgcaccgggtggcggtgatgcagggcggggcgatcgtcgagacgggcgacgtcgagcgcatcttcaccgaaccggtgcatccttacacgcaaaaattgctgaaagccgttcgttaa

SEQ ID NO: 27535 - protein, 549 aa, Burkholderia pseudomallei 668
MSAAQIARGAGAPPSPSTPPHEPLLSIERLRVRFGGTLAVDDVSLAIGRGERVALVGESGSGKSVTALAILRLLRDADVSGAIRFAGETLADKSEREMRALRGADIAMIFQEPMTALNPLFTIGEQIGETIELHDGVSKRDARARAIALLARTGIDRPDERVDSYPHQLSGGQRQRAMIAMALACRPRLLLADEPTTALDVTIRAQIVELLLELQRDAAAERGMAVLLITHDLNLVRRFAERVAVMEKGRLVECGPVERIFDAPEHPYTQRLLHSRPQRTVSPVLPIAPVVLDARGVTVQFRQKLSGFAGWLRSGRFTAVSDASVSVRQGETLGIVGESGSGKSTLAMALLGLQRVAHGDIEFEGRSLASFRGRERVALRANMQVVFQDPFSSLSPRQTIERIVSEGLELHRPRLTADARRDKVIAVLREVGLDRTVLHRYPHEFSGGQRQRIAIARALVLEPRVLVLDEPTSALDVSIQQQVLKLLSNLQRKYNLGYVFISHDLEVIGAMAHRVAVMQGGAIVETGDVERIFTEPVHPYTQKLLKAVR

SEQ ID NO: 27536 - DNA, 3261 bp, Burkholderia pseudomallei Pasteur
  CDS (1)..(3261): Xaa of translated CDS can stand for any naturally occuring amino acid which can be translated from respective CDS-codon
atgagcgcgccgagcgtcgttcgtttttccgacgtcagcctgcgctacggcaagaccgtcgcgctcgagcggatcacgctcgagatcccggccggtctcacgatcgggctgatcgggccggacggcgtcggcaaatcgagcctgctcgcgctcgcggccggcgcgcgcgcgctgcagacgggcgcggtcgacgcgctcggcggcgacatgcgctcgcgccgccatcgcgagcgcgtgtgccgacgcatcgcgtacatgccgcaggggctcggcaagaacctgtatccgacgctctccgtcgaggaaaacctgcagttcttcgcgcgcctgttcggccacgacgccgacgagcgccgccgccggatcgacgcgctcacgcggagcaccggcctctttgcgttcctgtcgcggcccgcgggcaagctctcgggcgggatgaagcagaagctcggcctgtgctgcgcgctgatccatgatcccgacctgctgatcctcgacgagccgacgaccggcgtcgatccgctcgcgcgcgcgcagttctgggatctgatcgcgcgcattcgctcggagcggccggcgatgagcgtgatcgtcgcgaccgcgtacatggacgaggcgcaacgcttcgactggctgatcgcgatggacgcgggccgcgtgctcgcgacgggcgcgcccgccgagctgctcgcgcgcaccggctgcgattcgctcgaggcggccttcatcgcactgttgcccgaagacgaacggcgcggccacaagccggtgacgctcgagccgctgcgcgccgacgcgcaaaccggcaccgcgatcgaggcgcgcgggctgacgatgcgcttcggcgatttcaccgcggtcgatcacgtgagcttccggatccggcgcggcgagatcttcggctttctcggctcgaacggctgcggcaagtcgacgacgatgaagatgctcaccggcctgctgcccgcgaccgagggcaccgcgcagctgttcggcaagacagtcgatccgaaggacatcaatacgcgccggcgcgtcggctacatgtcgcaggccttctcgctgtatagcgaactgacggtgcggcagaacctcgtgctgcacgcgcggctgttcggcgtgccggccgccgagatcgacgcgcgcgtcgacgagatggcgcgccgcttcggcctcgccgacatctacgacatgctgccggacagcctgccgctcgggatgcggcagcggctgtcgctcgcggtggcgatggtgcacaagccggagctgctgatcctcgacgagccgacctcgggcgtcgatcccgtcgcgcgcgacagcttctggcagttgatgatcgacctcgcgcgccgcgatcgggtgacgatcttcatctygacgcacttcatgaacgaggcgcagcgctgcgaccggatctcgctgatgcacgcgggccgcgtgctcgcgagcgatgcgccggcggcgytygtgcgcgcgcgcggcgcggcgacgctcgaggaggccttcatcggctatttcgtcgacgctttggcgcaggaggcgcagggcggcgcgggcgagcgccccggcgcgggcgagcgccccggcgcgggcgagcgccccggcgcgggcgagcgcgcggcgggcgaaagcgtggccggtcgcggtgcggcgtccgatggcgatgccgacggcgcgcatgcgcggcccgccgcgtacgcgaacggcgcggcgcaacatcgcgcgcccgatgcggacgcggccggcaccgacgtcgccgccgagacgggcgcacgcgacgacgcgcgcaccgcacacgcggccggacattccgccggaaacgacgtacgcgccacggtgggctccgaagtcggctccgaagtcgcctccgaagccggcctcgcagccagcgccgaaagcggctccgaacgcggcgtcgcccacggcgccgaacgtgcacgcgaacccgcggcggatgccggcgccgcaatcgacgtcgaaccgggcgcgagcgcggaatcggccacggccgccgtcgccccggctcgccacgccgaatccgccgccacgtcaccccgcgcagggaacgcgccggccggcacgccgttcgccgccgcgccgccgtcgcacgccgcgccggccgagccgccccatcgcgcattcagcgcgcagcgcgcgctcagctacatgtggcgcgagatgctggagctgcgccgcgatcccgttcgcgcgacgctcgcgctgatcggctcgctcgtgctgatgtgcgtgatcggcatcggcatcagcctcgacgtcgaggatctgacctacgcggtgctcgaccgcgatcaaaccgagctgagccacgactacgcgctgaacctgtccggctcgcgctacttcgtcgagcggccgccgatcgccgattacgcggcgctcgaccgccggatgcgcgacggcgagctgtcgctcgcgatcgagattccgccgaacttcgcgcgcgacgtcgagcgcggcgcgcccgcgcagatcggcatgtggatcgacggcgcgatgccgcagcgcgccgagacgatccgcggctacgcgatcggcatgcacacgatgtggctcgccgacaaggcgcggcaccgcctcggcgtgacgctcgcgccgcgcgcggaagtggtcacgcgctaccgctacaacccggacgtgaagagcctgccggcgatgatccccgccgtgatgccgctgctgctgctgatgttgcccgcgatgctcaccgcgctcgccgtcgttcgcgaacgcgagctcggctcgatcctgaacctgtacgtgacgcccgtcacgcgcaccgagttcctgatcggcaagcaggtgccgtacgtcgtgctcgcgatgctgaacttcctgctgatgacgatgctcgcgcgcatcgcgttcgacgtgcccgtcaagggcagcttcatgacgctgttgctcgcggtgctgatcttcaacgtcgtcgccacgggcatcggcctgctcgcgtcgacgttcacgcgcagccaggtggccgcgatcgtgatgacgatcatcggcacgatgatcccgaccgtgcagttcgcggggctgctcacgccgctgtcgtcgcttgagggcaccgggcgcttgatcggcctcgtctatccggccacctacatgctgtcgatcagccgcggcgtgttcaacaaggcgctgtcgctccacgatctctactcgcagttctggccgctcgccgcctgcgtaccggtgatcctcggcgcgaccatactgctcttgaaaaagcaggaacgctga

SEQ ID NO: 27537 - protein, 1086 aa, Burkholderia pseudomallei Pasteur
  misc_feature (459)..(459): Xaa can be any naturally occuring amino acid
  misc_feature (489)..(489): Xaa can be any naturally occuring amino acid
MSAPSVVRFSDVSLRYGKTVALERITLEIPAGLTIGLIGPDGVGKSSLLALAAGARALQTGAVDALGGDMRSRRHRERVCRRIAYMPQGLGKNLYPTLSVEENLQFFARLFGHDADERRRRIDALTRSTGLFAFLSRPAGKLSGGMKQKLGLCCALIHDPDLLILDEPTTGVDPLARAQFWDLIARIRSERPAMSVIVATAYMDEAQRFDWLIAMDAGRVLATGAPAELLARTGCDSLEAAFIALLPEDERRGHKPVTLEPLRADAQTGTAIEARGLTMRFGDFTAVDHVSFRIRRGEIFGFLGSNGCGKSTTMKMLTGLLPATEGTAQLFGKTVDPKDINTRRRVGYMSQAFSLYSELTVRQNLVLHARLFGVPAAEIDARVDEMARRFGLADIYDMLPDSLPLGMRQRLSLAVAMVHKPELLILDEPTSGVDPVARDSFWQLMIDLARRDRVTIFIXTHFMNEAQRCDRISLMHAGRVLASDAPAAXVRARGAATLEEAFIGYFVDALAQEAQGGAGERPGAGERPGAGERPGAGERAAGESVAGRGAASDGDADGAHARPAAYANGAAQHRAPDADAAGTDVAAETGARDDARTAHAAGHSAGNDVRATVGSEVGSEVASEAGLAASAESGSERGVAHGAERAREPAADAGAAIDVEPGASAESATAAVAPARHAESAATSPRAGNAPAGTPFAAAPPSHAAPAEPPHRAFSAQRALSYMWREMLELRRDPVRATLALIGSLVLMCVIGIGISLDVEDLTYAVLDRDQTELSHDYALNLSGSRYFVERPPIADYAALDRRMRDGELSLAIEIPPNFARDVERGAPAQIGMWIDGAMPQRAETIRGYAIGMHTMWLADKARHRLGVTLAPRAEVVTRYRYNPDVKSLPAMIPAVMPLLLLMLPAMLTALAVVRERELGSILNLYVTPVTRTEFLIGKQVPYVVLAMLNFLLMTMLARIAFDVPVKGSFMTLLLAVLIFNVVATGIGLLASTFTRSQVAAIVMTIIGTMIPTVQFAGLLTPLSSLEGTGRLIGLVYPATYMLSISRGVFNKALSLHDLYSQFWPLAACVPVILGATILLLKKQER

SEQ ID NO: 27538 - DNA, 1692 bp, Polaromonas sp. JS666
  CDS (1)..(1692): transl_table=11
atgacccccacgcctgtcactgtgcatccagcgctgccgcccgatgggggcttcgcgacgggtggcggatcttccgcgcctgcccatccgctgctgaaagtcgacggcctcagcgtttcctttgccggcaaaagagtcgtgcatggaattgatttttccatcgcacccggagaaaaactggccctggtaggcgagtccggttcgggcaagacggtgacggccctgagcctgctgcggctggtgcaaaacgccagcatcagcgggcaggcccggtttgccgcaacagagggcctgcaagggccggtgaatctgctttcccttcctgaagccgagttgcgcggcattcgcggccgggatattgcgatgatcttccaggagccgatgacggccctgaatcccctgttcaacgttggggaccagattgccgaggttgtccagctaaaacgcggcctgacccctgcagagtctgtgacgatggcaattaaattgctggcagacaccggcattccggagcctgacaggcgggcgcgctcatttccccatcagctctctggtgggcaacgccagcgggccatgattgcgatggcgctggcctgccagcccaagctgctgctggctgacgagccgacaaccgcactggacgtcaccttgcgcggccagattctggacctgctcagcgagttgcagcagcgaaacggcatggcggtgctcctgatcacgcacgacctcaacctcgtccgccgctttgcggaccgggtggcggtgatggaaaacggatatctggtggagcagggcaccgtcgcggaggtgtttgccgatccgcagcacgcctacacccgtaaattgatcgacagcaagccggtgcgcaatgtgagcgagggcgtggacttcgggccgggcgggcctttgatgatgcaggccagtcgtgtctccgtgacctatccggtcgccattccgggtttcaggggctggttcaaaagcggtgggtttgtggctgtaaaggatgccaccttcgatattccacccggtcagacgctgggggtcatcggggaatcgggttccggcaagtcaactctggccctcgccagcctcggcctgctgccgttttccggtaccttgcaggcggcagggcagtcctggagccgtaatggcgccagcaacaaggcgattcgccgtgcggttcaggtggtttttcaggacccgttttcctccctttcaccgcgcatgacggtgggcgagatcgtggaggaaggcttgcgtgtccatgagccctcgctggacgagctcgaaatgcgggagcgggcgtcgcaagctctggcggacgtgggcatgagcgaggcgcagtttccgggcttgctgcaacggtatccgcatgagttctcgggcgggcagcggcagcgggtggccattgcacgggcgctgatcatccatcccggcttgctggtgctggacgagccgaccagcgcgctcgatgtgacgatccagaagcaggttttgtcgctgcttcagcggctgcagcgcgaacggggcttgagctatcttttgatcacgcatgacgtggacgtgatccgtgcgatggcccatcaggtgatggtgatgaaagacggtgaggtgctggaatccggcgcggtgctggacgttctggacaggccccatcatccctacacgcaggtattggtgtcgcaggcctga

SEQ ID NO: 27539 - protein, 563 aa, Polaromonas sp. JS666
MTPTPVTVHPALPPDGGFATGGGSSAPAHPLLKVDGLSVSFAGKRVVHGIDFSIAPGEKLALVGESGSGKTVTALSLLRLVQNASISGQARFAATEGLQGPVNLLSLPEAELRGIRGRDIAMIFQEPMTALNPLFNVGDQIAEVVQLKRGLTPAESVTMAIKLLADTGIPEPDRRARSFPHQLSGGQRQRAMIAMALACQPKLLLADEPTTALDVTLRGQILDLLSELQQRNGMAVLLITHDLNLVRRFADRVAVMENGYLVEQGTVAEVFADPQHAYTRKLIDSKPVRNVSEGVDFGPGGPLMMQASRVSVTYPVAIPGFRGWFKSGGFVAVKDATFDIPPGQTLGVIGESGSGKSTLALASLGLLPFSGTLQAAGQSWSRNGASNKAIRRAVQVVFQDPFSSLSPRMTVGEIVEEGLRVHEPSLDELEMRERASQALADVGMSEAQFPGLLQRYPHEFSGGQRQRVAIARALIIHPGLLVLDEPTSALDVTIQKQVLSLLQRLQRERGLSYLLITHDVDVIRAMAHQVMVMKDGEVLESGAVLDVLDRPHHPYTQVLVSQA

SEQ ID NO: 27540 - DNA, 1668 bp, Polaromonas sp. JS666
  CDS (1)..(1668): transl_table=11
atgacgcatctggtggatgtctccggcctgagcctatcaatcggcaagggcggccgcgaaatcgtgcgcaatgtctcgttcacggtcgcgcccggcgaaatcgtcggcatcgtcggcgaatccggcagcggcaagacccaggccgcacgggccatcatgggcctcacgccgccgccgctggtgcgcagcgcgggccacatcctgttcgagggcgaagacatggcggcggccggcgacgcgcgtttgcgcgcgctgcgcggcgcgcgcatcggcatggtgttccaggagcccatgacctcgctcaacccctccatgaccataggccggcagctcgacgaaggcctggccctgcaccgaccccagctcacaccggccgcgcgccgcgagatggcgctggcgatgctggcgcgcgtcggcatcaccgacccgcaggccgcgctggccgcctggccgcatgaattctcgggcggcatgcgtcagcgcatgatgctggcctcagtcatgctgctcgagcccgcgctgctgatcgccgacgagccgaccacggcgctggacgcgctggtgcagcgcgacgtgctcgaactcatggtcgggctcacgcgcgagcacaacacggccgtgctgctgatcagccacgacctgcccatggtcgcgcgctacacgcagcgcatgatcgtcatgcagcaaggcgaagtcgtcgaggccggcgacacggcggccttgctggccggcccgtcgcaggcctacacccgcaagctgctggaggccatcccgcgccggcaggcggcgcgcacaattgccgacgaccagcccgtcatcgaagtgcgcaatctcgtattcgactacccaggcaagcgccggctgttcgccaagtccacggccaagcgcgtgctgcacggcattgacctggtggtgcgcccgcgcgagatcgtcgcggtggtgggcggctccggttcgggcaagaccaccctgggccgcgcgattgccggcctgatcaagccgaccgagggcgatatccgttttcgcgggcgttcgattgcgcgcagcgacgcgggctggctggactaccggctcaattgccagatggtgttccaggacccgtattcgtcactaaacccgcgcatgagcataggccagctggtcggtgaagggctgcggctggtgcctggactctcctcgaccgagcggcaatcgcgtgttgccaagatgctcgacgaagtcgggctggagccgcggcatgcggcgcgctatgcgcatgaactctccggcggccagcgccagcgcgtggcgattgcccgggcgctgatacgcgagccggcctttgtgatcgccgacgagccggtgtccgcgctggacgtcaccgtgcgcgcccaggtgttggcgctgctggccgagctgcaggagcggcacggctttgcctgcctcttcatcagccacgacctcggcgtggtcgagcaggtggccgaccgcgtgatcgtgatgcaggccggccgcatcatcgagcaaggcaaccgcgacgaggttttcgaccgtccgcagcatgcctacacgcgcaagctgctctcggcgattcccgcgctgacgcccaccggccagggcggcatgcagctcaagtggcgttttgacgaagccgatgcgccagcgggcgccctgcaacctgccatgtaa

SEQ ID NO: 27541 - protein, 555 aa, Polaromonas sp. JS666
MTHLVDVSGLSLSIGKGGREIVRNVSFTVAPGEIVGIVGESGSGKTQAARAIMGLTPPPLVRSAGHILFEGEDMAAAGDARLRALRGARIGMVFQEPMTSLNPSMTIGRQLDEGLALHRPQLTPAARREMALAMLARVGITDPQAALAAWPHEFSGGMRQRMMLASVMLLEPALLIADEPTTALDALVQRDVLELMVGLTREHNTAVLLISHDLPMVARYTQRMIVMQQGEVVEAGDTAALLAGPSQAYTRKLLEAIPRRQAARTIADDQPVIEVRNLVFDYPGKRRLFAKSTAKRVLHGIDLVVRPREIVAVVGGSGSGKTTLGRAIAGLIKPTEGDIRFRGRSIARSDAGWLDYRLNCQMVFQDPYSSLNPRMSIGQLVGEGLRLVPGLSSTERQSRVAKMLDEVGLEPRHAARYAHELSGGQRQRVAIARALIREPAFVIADEPVSALDVTVRAQVLALLAELQERHGFACLFISHDLGVVEQVADRVIVMQAGRIIEQGNRDEVFDRPQHAYTRKLLSAIPALTPTGQGGMQLKWRFDEADAPAGALQPAM

SEQ ID NO: 27542 - DNA, 1560 bp, Exiguobacterium sp. 255-15
  CDS (1)..(1560): transl_table=11
atgtggtgccggaatctgaccgtccgctatccggatcaagaccgagatgttttaaacgacttgaccgtgtcgctccggcaaggagagacgaccttattgattggtccgagcggcagcggcaaaacgaccttcttgcatacgcttgccggtctgatgccggaaacgattgaggcggaagtcaccggtgaatggcgcgcagacggaaccgtcggcatgctgtttcaacagccggacgatcagttttgcatgcagacggtcggggcggaaatcgccttcagtctggaaaaccggagtattccccgcgatgaaatggaagaacgaatcagaacggtgttgaaacgggttggactcgacctcgccttgacgacgcaaattgccggactgtccggcgggatgaaacaacggcttgctttggcctgtgtgttggcactcgaaccggacatcctgttactcgatgaaccgacggcgcaactcgatccgcacggccgccgattgatgatggagctgattgaagaattgcatcacaatccgaacgtgacactggtgttgatcgaacatcaactggaagaatgtgtgacgtttgctgaccgtgtgttggtctttcgggaaggacagctgaggcttgacggttccccgcttgatgtcttcgaggagaaacgggaggacctgacccgacacggtatcatgtgcccactgctctatccctatacactcgagacgattccactgacgatcgcaacagcacggttcctggatggcccgccggtcgcaagacgtccggttgcaaacgaaacgacgcttgatttgaccgatgtgacgatcgcgcatggcaaacggatgattctagaccagatttcgctgaccgcgtccgccggagaatggatcatgctcgtcgggcgcaacggtgccggtaaaagcaccctgcttgagacgctggcaaaactgttgccggcgcaaagcgggacgatcaagctgtttcagacacctttgaaaaaatggcgggaccggacgttttaccggcaggtcggtttcgtctttcagcaaccggagtttcaatttctgaaacagacggtcgccgatgaactggccatcagctctccgtcaccggcacgaagtcaagtagctgacgctctgcaacactaccgtttggaggatgtcgccgctcagtccccgctggcactcagtctcgggcaaaaaagacgcttaagtgtcgcgacgatgctgctggaacgaaaagctgtcctgttactcgatgaaccgaccttcggacaagatgctgagacgacggctcagattctcgatgtgttacaccaagcccgggaagcgggaactacgctgatcatggtgacgcacgacatggagctggtctaccgttacgccgaccgcgttgtcgtcatcggcgagaagcacgttcagtttgacggggcaccggatgaattgttccggaacgaatcattgcttgagcataaccagttgatccgcccggtatcggtacgctatcagcaactcgaggaggtgaaacaccgtgcaggaaaacaattcgttgctcgcacgccttaa

SEQ ID NO: 27543 - protein, 519 aa, Exiguobacterium sp. 255-15
MWCRNLTVRYPDQDRDVLNDLTVSLRQGETTLLIGPSGSGKTTFLHTLAGLMPETIEAEVTGEWRADGTVGMLFQQPDDQFCMQTVGAEIAFSLENRSIPRDEMEERIRTVLKRVGLDLALTTQIAGLSGGMKQRLALACVLALEPDILLLDEPTAQLDPHGRRLMMELIEELHHNPNVTLVLIEHQLEECVTFADRVLVFREGQLRLDGSPLDVFEEKREDLTRHGIMCPLLYPYTLETIPLTIATARFLDGPPVARRPVANETTLDLTDVTIAHGKRMILDQISLTASAGEWIMLVGRNGAGKSTLLETLAKLLPAQSGTIKLFQTPLKKWRDRTFYRQVGFVFQQPEFQFLKQTVADELAISSPSPARSQVADALQHYRLEDVAAQSPLALSLGQKRRLSVATMLLERKAVLLLDEPTFGQDAETTAQILDVLHQAREAGTTLIMVTHDMELVYRYADRVVVIGEKHVQFDGAPDELFRNESLLEHNQLIRPVSVRYQQLEEVKHRAGKQFVARTP

SEQ ID NO: 27544 - DNA, 1506 bp, Methanosarcina barkeri str. fusaro
  CDS (1)..(1506): transl_table=11
atgatagaactaaaagatttttcatatacctacggaacagctgaaagccctgttctgaataaaattaaccttgaagtccgacagggagaactgcttctagttaccggacacagtgcagccggaaagacaacgcttgctcttgcaatggcaggtatcctgcaccatgaaatagggggcaagaccgaaggagaaatcattttcaaaaaccggaacgtaaaaagttttaacggcatgaaggaactgagccggcatatcgggatggtttttgatgatgcggaatcacagctgatcttcacaagtgtcgaagaggaaatccgttcgggacttgaaaatcgtggctatcccataaaagaactgagacacaggctggaagaagtaatggaattctgcgaaatcagccaccttagaaaccgggctccccatgctctttctggcggtcagaagcaaaaagttgcacttgcagcaacctttgccctcgataccgaagtccttatccttgacgaagctacagccgaactggatacaaaggctgtaagaagaatcttttcaatcctgaaaaggctgaaagaagccggaaagactatcataatcatagaccacaacatagatgatttcctcgaaatcggggatagggtcgtgctgcttgaaaaaggcagaataaaagatataaaaagtccagctgatttttcagcatcttctctttcagcatcttctctcgctttagaaccggaaattcctgaaactgacagacagactctttatatgcctcataataagtggaaggaaagaaagcccattatttctgtaaagaatctcacacagcgttacggagaagtcctggcactcgacagcatagacctggagatttatcctggggagctcgttgctgtgctgggcgagaatggttcaggcaagacaacccttgtcaagcactttaatggccttttacgcccttattctgggagtgtaactataaaaggctttgaaacttcaaaaagttctgtaaacgagcttgtcaaatataccggtctggtctttcagaacccggacaacatgctttttgaggatactgtcgaagcagaaattgctttcggattaaataacattaatataaaagggcttgaggctgagaaagcaatatccgattcccttgaacttgtaaatttgggcgaaaaactgagagtttttccccgcaacctgagcagaggagaaaggcagagactggcggttgcttgcataattgccatgaagcccgaactgatcgtgctcgatgaacctacaacaggtctggatgccgaagaatcggacagtatgatgcagctcatacgaaaactccagcaggaagggcacacaatagtcatggtgacccataacatgcagatagtaaaagaccacgccgagagggttattcgcatggcggccggaaaaatcgtcgaagataccagcaggataactgcagatagtgagcaggtgagcagagaacacattggaggcatttgtacatga

SEQ ID NO: 27545 - protein, 501 aa, Methanosarcina barkeri str. fusaro
MIELKDFSYTYGTAESPVLNKINLEVRQGELLLVTGHSAAGKTTLALAMAGILHHEIGGKTEGEIIFKNRNVKSFNGMKELSRHIGMVFDDAESQLIFTSVEEEIRSGLENRGYPIKELRHRLEEVMEFCEISHLRNRAPHALSGGQKQKVALAATFALDTEVLILDEATAELDTKAVRRIFSILKRLKEAGKTIIIIDHNIDDFLEIGDRVVLLEKGRIKDIKSPADFSASSLSASSLALEPEIPETDRQTLYMPHNKWKERKPIISVKNLTQRYGEVLALDSIDLEIYPGELVAVLGENGSGKTTLVKHFNGLLRPYSGSVTIKGFETSKSSVNELVKYTGLVFQNPDNMLFEDTVEAEIAFGLNNINIKGLEAEKAISDSLELVNLGEKLRVFPRNLSRGERQRLAVACIIAMKPELIVLDEPTTGLDAEESDSMMQLIRKLQQEGHTIVMVTHNMQIVKDHAERVIRMAAGKIVEDTSRITADSEQVSREHIGGICT

SEQ ID NO: 27546 - DNA, 1449 bp, Desulfuromonas acetoxidans DSM 684
  CDS (1)..(1449): transl_table=11
atgaaaattgaactggacaatattagcgttgtggttcgtaaacaagcgtggttacacgatgtctctctggcgatttcacccgacgagaactgggcgtttgtcggcagcaacggttcgggtaaaagtgtgctcgggcgtattttgtgtggagaactgcccgtgacttccggtcgctgccgtttgaacttgcccgctgctctggtcagctttgaacggctgggtgaggtgttgcagtttgaacgggaacatgatgattctgattttctcgaccgggtggatcacgggactccagtgcgagactttttcgctgccgatgcaccgggtgacgtagaaacattggccgaggctctgggatgccaagggttgctggaacgtgggctgcgttttctttccaccggtgaaatgcgcaaagtgatgatccttcaggccatggtgcagaagccccgcctgttggtgctggacgagccgtttgacggtttggattcgcagtcgcgtcatgcattacgcattctgattggtcgttggatcgagcaggggggacagctggttcttatggtcaatcgtttcagcaacctgttgccgcaggtgacgcatctggggtatctgcatgatggaacactgctggtgcagggaggccgggaggatgattacgttcagaacgccatccaacgtctgaaccattttgatgcgcatcaaacgctgcaactgcctgattgtgatgcgccattgccgacgttgcccgacctgcacggccagccgttgattgccatgaacaacgtcactgttcgctatgctgaggcgttggtccttaaccggctgtgctggcaggtgcagccgggcgaacactggaaaatttccggtccgaatggttccggaaaatcaaccctgctcagcttgatcagcggcgataatccccaggcttacgccaatgagattatgctgttcgggcgcgctaaaggcagtggcgaaagtgtctgggagatcaagcgtcatctcggacaggtctccgccttgtttcaccaggaataccgggtacggggcacggttttgaccacggtcttatctggtttttatgactccgtgggcctttatcagacgccgacccgtcgtcagcaacagattacccgccaatggcttgagttgttgggattggagggcaaggccaacctgccgtttcatcgcttgtcctacggggaacaacgtctggtcttactcgcgcgagccatggtcaaacagcctcgggtgttgatccttgatgagccgtgccaggggcttgacgaagtgcatcgccatctggtgctgggattgattgattatctggggcgtcaggggcgcactcagttgttgtatgtcactcaccatgatgaagatcgtattccctgtattcagcgtcatttgcggctggtgcctgcctgcggtggtggttttatggctgaggtggtgtcgtga

SEQ ID NO: 27547 - protein, 482 aa, Desulfuromonas acetoxidans DSM 684
MKIELDNISVVVRKQAWLHDVSLAISPDENWAFVGSNGSGKSVLGRILCGELPVTSGRCRLNLPAALVSFERLGEVLQFEREHDDSDFLDRVDHGTPVRDFFAADAPGDVETLAEALGCQGLLERGLRFLSTGEMRKVMILQAMVQKPRLLVLDEPFDGLDSQSRHALRILIGRWIEQGGQLVLMVNRFSNLLPQVTHLGYLHDGTLLVQGGREDDYVQNAIQRLNHFDAHQTLQLPDCDAPLPTLPDLHGQPLIAMNNVTVRYAEALVLNRLCWQVQPGEHWKISGPNGSGKSTLLSLISGDNPQAYANEIMLFGRAKGSGESVWEIKRHLGQVSALFHQEYRVRGTVLTTVLSGFYDSVGLYQTPTRRQQQITRQWLELLGLEGKANLPFHRLSYGEQRLVLLARAMVKQPRVLILDEPCQGLDEVHRHLVLGLIDYLGRQGRTQLLYVTHHDEDRIPCIQRHLRLVPACGGGFMAEVVS

SEQ ID NO: 27548 - DNA, 1584 bp, Jannaschia sp. CCS1
  CDS (1)..(1584): transl_table=11
atgatcgcggttgaggggctgtgtctgaacatcggaccggtgcagattttgcacgacgtcagctttgacatggcgggcggagagatcttcggcctggtgggggagagcggctccggcaaatcgatgacggcgctggcgatgatgggcctcgcgccgcgcagcgcatccgtcacgggggcggcgcggctgggcgatgtcgaccttctggcgctggaagagcccgccttgcaggacctgcgcggcaatgacatcgcgatgatttttcaggagccgatgacggccctgaacccggtgcagaccatcggtgaccaagtggctgaaacgctgctgatccacgggcgcgcggggcggcgcgaggcgctggacatcgcgcgaaaccgcttggaccgcgtggggctggagcatatcgcgctggaccgatttccccatgagttgtcgggtgggcagcggcagcgcgtgtgcattgccgccgccatcgcgttgcacccgaagctgttgatcgccgacgagccgacaacggcgctggacgtcacgacgcaggcgcaaattcttgatttgctgcgcgaattggtcggtgaggaaggcatgtcgctgctgctgatcacccatgatctggcggtcgtctccgacatggcggaccggatcgcggtgatgcaaaagggccggattgtggagcaaggcgcgacggcggatgtcctgcgcacccaagcccacccctacacccgcgcgctgtttgcggcgtcgtcgcaccagccggatcgcgcggcagaggccgccgacgatgcgatcctgaccgtggaagacgtccaccgccactaccccggcccccgcaaaggcttccggcgcgggccgccggtgcgggcggtcaacggcgtgagtttcgccctgcaacggggcgaaagccttgggctggtcggagaatccggctgcggcaaatccaccctgacccgcgcgatcctgggcctcgatccggtgacatcgggggcgatcacattgaacggccatcccgtatccccccagatgcccaagcccctgcgcgcagacgtgcaggtggtgtttcaggacccctacggcagcttcaacccgcgctggcgggtggaccggatcgtggcggaaccgttccatttgctggcgacgccaccgccgcgcgacaaggcggtggcggaggcgctggaggccgtgcgcctgtccccggaagatgcccagaagtacccacacgaattctccggcgggcaacggcagcgcatcgccatcgcgcgcgccctgatcacccggcccaaactgctggtgctggatgaggcggtcagcgcgctggacgtgtcggtgcgggcgcaaatccttgatttgctggcggagttgcagacggactttgggcttagctacctgttcatctcccacgatctgaccgtcgtgcgcgccatcaccgaccgcgtgctggtcatgcaacacggcgaaatcgtggagcagggagagaccgaagccgtcttcaccaacgcccgacacccctatacgcaaacccttctggccgccgccccgcaactgcccccatccttgcccggagatgcccatgtccatctggtttga

SEQ ID NO: 27549 - protein, 527 aa, Jannaschia sp. CCS1
MIAVEGLCLNIGPVQILHDVSFDMAGGEIFGLVGESGSGKSMTALAMMGLAPRSASVTGAARLGDVDLLALEEPALQDLRGNDIAMIFQEPMTALNPVQTIGDQVAETLLIHGRAGRREALDIARNRLDRVGLEHIALDRFPHELSGGQRQRVCIAAAIALHPKLLIADEPTTALDVTTQAQILDLLRELVGEEGMSLLLITHDLAVVSDMADRIAVMQKGRIVEQGATADVLRTQAHPYTRALFAASSHQPDRAAEAADDAILTVEDVHRHYPGPRKGFRRGPPVRAVNGVSFALQRGESLGLVGESGCGKSTLTRAILGLDPVTSGAITLNGHPVSPQMPKPLRADVQVVFQDPYGSFNPRWRVDRIVAEPFHLLATPPPRDKAVAEALEAVRLSPEDAQKYPHEFSGGQRQRIAIARALITRPKLLVLDEAVSALDVSVRAQILDLLAELQTDFGLSYLFISHDLTVVRAITDRVLVMQHGEIVEQGETEAVFTNARHPYTQTLLAAAPQLPPSLPGDAHVHLV

SEQ ID NO: 27550 - DNA, 1503 bp, Desulfitobacterium hafniense DCB-2
  CDS (1)..(1503): transl_table=11
atgattgagcttaaacaagtatcttttgcttatggaaacggtgagagagacagcgggcttgaggatattgagctgaaagttgaagagggcgaatttctcctgctgtgcggcggctccggctgcgggaaaaccactttaacacgtctgctcaacggtttaattcccaacttttatggaggggtccttaagggacaggtatgggtcgggggcctggatgttgctaaggcccctctctatgagacggcggggaaagtaggttcggtgtttcagaatccccgcagccagttttttaatatggacaccaccggtgaattggcctttggttgtgaaaatatgggtctgcccctaaaggagatttgcgcccgggtggagaggattgcccttgaattaggattagagcctttgctggatcgcaatatctttgccttatcaggaggagaaaagcagaaaattgcctgtggcgctgtggcggcgctggggcctcaggtttatgtcttagatgagccctcttccaatctggatgctttggctatcgaagaattacgagctcttttgaccaagctgaaggctcagggcaaaaccgtgatcattgctgaacatcggttgtactatctccgtgaattggtggatcgggtgatctatatgaagaaaggacggattcagcaggaatattcaggtcaggaattccgcgctttgccaaggggggaactggatgccatggggctgcgttctttatccttggagggtttactggagggcgccccggtacatttaccaaggactgagggggccattgccttgtccggcttttccttcgcctatccccggggaggccggagcctggacatcagggaaacatcgttcccccaaggggcggtggttgcagttaccggccacaacggagcgggaaaatccactctggcacggtgtctatgcggtctggaaaagaagtgccgcggcaggatggggatgcagggggagagtctgggaaggaaggaacgattaaagcgttcttatatggtcatgcaggatgtaaaccatcaattatttacagagagcgtgctggatgaggtgctgatttccatggggcatccggatgtgaagcagggggaggaaatccttaaaggcctcgatctgttgcagttcaaagagcgccatcccatgtccctatccggaggccaaaaacagagagttgccattgcttcggcgatagcctcccggcgggaattgatactttttgatgaacccaccagtggactggatctgctgcatatgcagggagtagcccggagtctgtctcaattagccgggatagggaaaagcgtcttggttgttactcatgatccggaatttatcctgtcctgctgcacccatatcctgcatatgcaagaagggaaaatcattgataacagacctttggatgcttgtggcaggggaaggatgctctcctattttcttgaggcggtaaaggagcctggagaaagaagggaaagggtggtgtga

SEQ ID NO: 27551 - protein, 500 aa, Desulfitobacterium hafniense DCB-2
MIELKQVSFAYGNGERDSGLEDIELKVEEGEFLLLCGGSGCGKTTLTRLLNGLIPNFYGGVLKGQVWVGGLDVAKAPLYETAGKVGSVFQNPRSQFFNMDTTGELAFGCENMGLPLKEICARVERIALELGLEPLLDRNIFALSGGEKQKIACGAVAALGPQVYVLDEPSSNLDALAIEELRALLTKLKAQGKTVIIAEHRLYYLRELVDRVIYMKKGRIQQEYSGQEFRALPRGELDAMGLRSLSLEGLLEGAPVHLPRTEGAIALSGFSFAYPRGGRSLDIRETSFPQGAVVAVTGHNGAGKSTLARCLCGLEKKCRGRMGMQGESLGRKERLKRSYMVMQDVNHQLFTESVLDEVLISMGHPDVKQGEEILKGLDLLQFKERHPMSLSGGQKQRVAIASAIASRRELILFDEPTSGLDLLHMQGVARSLSQLAGIGKSVLVVTHDPEFILSCCTHILHMQEGKIIDNRPLDACGRGRMLSYFLEAVKEPGERRERVV

SEQ ID NO: 27552 - DNA, 2766 bp, Methylobacillus flagellatus KT
  CDS (1)..(2766): transl_table=11
gtgagcgacacccggcagcaggtggcgtccgcagtccgcttgcaggacgtcagcctgcattacggcaagaccattgcactggacggtatcagcctcgatatccctgccagctgcatggtgggcatgataggcccggacggtgtcggcaagtccagccttctgtcgctggtggcaggtgcaagggcggtgcagacgggcaaggtggaggcgctgggcggcgatatgtccagcaagcagcaccgcgacgatgtctgcccgcgcatcgcctatatgccgcaaggcctgggcaagaacctctacccgacattgtcggtagaggaaaacctgcagttcttcggccgcctgttcggccatgatgcgcaggaacgcagacgacgcatcgacgatctcacgcgcagcaccggcctgcaaaaattcctagaccggccggcaggcaagctgtccggcggcatgaaacagaaactgggcctgtgctgcgcgctgatccacgaccccgacctgctgatcctcgacgagcccaccaccggcgtcgacccgctcgcgcgtgcccagttctgggatctgatcaagcgcatccgccaggaaagaaacagcatgagcgtcattgtcgccacggcctatatggatgaggcgcagcgcttcgactggctcgtggcaatggatgaaggccaggtactggcgacgggaacgccacaggaactgcttgaacgcacgggctccagctccctcgaaaccgcgttcatcgcgctgcttccggaagaaaaaaaacagggccacgaggaagtcacgattccgcccttgccagaaggcgacggcagcaacgcggatatcgccatcgaggccaaagaccttaccatgcgtttcggcgatttcgttgccgtcgaccacgtcagcttccgcattcgccgcggcgagattttcggctttctcggctccaatggctgcggcaaatccaccaccatgaaaatgctcaccggcctgctgcccgccagcgaagggcaagcctggctgttcgggcacgaaatcgaccccagggacatcgacacccgccgccgcgtcggctacatgtcgcaggcgttttcgctctacaccgagctgaccgtccggcagaatctggtgctgcatgcccgcctgttccacgtgccggaagcagacattcccgcccgtgtaaatgaaatggtgcagcgcttcgacctggaggaagcgctcgacagcctgccagatggcctgccgctcggcatccgccagcgcctgtcgctggccgtcgccatggtgcacaaacccgagctgctgattctcgacgaaccaacctccggcgtcgacccggtcgcccgcgacaatttctggcgcctgttgatcgagctgtcgcgccgtgaccgggtcaccatcttcatctccacccatttcatgaacgaggccgagcgctgcgaccgtatgtcgctgatgcatgcgggcaaggtgctggttagtgacacgcctgcgaacatcgtcgcgcagcgcaatgccgatacgctggagcaggctttcatcgactacctggtggaagccggcggcggcactgacaccggcaccaatgacacccaacaaaccactccctcaacgccggatattgcacaaggcagccatcaggccaagcttaggtttttcagcttcaatcgcatgttcagctacctttggcgcgaaatgctggagctacagcgcgacccggtacgcggcggcctcgccctggcaggctcgatgctgctcatgttcgtcatgggcttcggcatcagcatggatgtcgaggacctgacctatgccgtgctggaccgcgaccagaccacgctgagccagaattacgcgctcaatctctccggctcgcgctacttcatcgagcagccaccgatccgggattatcaggagctggaccagcgcatgcgcagcggcgaactgtcactcgccattgaaataccgccggggttcgcccgcgacgtgcaacgcggcagccgggccgaaatcggcgcctgggtgaacggcgccatgccgcagcgcgccgagacagtgcagggctatgtgcaaggtatccaccagcaatggctgcaacaacaggcgcaggagcggctgggcgtcacggtcgcaagcgcggccaccatagagacgcgctaccgctacaatccagatgtgcgcagcctgccggcaatggtgccggccgtgatccctctgctgctgctcatgctgcctgccatgctgtccgccctgtccgtggtgcgcgagaaggagctgggttccatcatcaacctgtacgtgacgccagtgacccgcaccgaattcctgctcggcaagcaattgccctatgtcgcacttgccatgctgaatttcctgctgatggtattgctcgccgtgacggtattcgacgtgccggtcaagggcagcttcgccacactggcgctggcagccttcctctatagcatcgtcgccactgggattggcctgctcgcctccaccttcacccgcagccagattgctgcgctgtttttcaccatgatcgcttccatcgtcccggcggtgcagttcgccggcatgctcaacccggtctcgtcgctggaaggcgcaggccgcatcgtcggcgagatctacccgacgacttatatgctgatcatcacccgcggtgtgttcagcaaggcgctggatttctccgacctgcaagcctcattctggccgttgttggccgccattcccgtggtcctggtgacaacagtgctcctactgaagaaacaggacaaatga

SEQ ID NO: 27553 - protein, 921 aa, Methylobacillus flagellatus KT
MSDTRQQVASAVRLQDVSLHYGKTIALDGISLDIPASCMVGMIGPDGVGKSSLLSLVAGARAVQTGKVEALGGDMSSKQHRDDVCPRIAYMPQGLGKNLYPTLSVEENLQFFGRLFGHDAQERRRRIDDLTRSTGLQKFLDRPAGKLSGGMKQKLGLCCALIHDPDLLILDEPTTGVDPLARAQFWDLIKRIRQERNSMSVIVATAYMDEAQRFDWLVAMDEGQVLATGTPQELLERTGSSSLETAFIALLPEEKKQGHEEVTIPPLPEGDGSNADIAIEAKDLTMRFGDFVAVDHVSFRIRRGEIFGFLGSNGCGKSTTMKMLTGLLPASEGQAWLFGHEIDPRDIDTRRRVGYMSQAFSLYTELTVRQNLVLHARLFHVPEADIPARVNEMVQRFDLEEALDSLPDGLPLGIRQRLSLAVAMVHKPELLILDEPTSGVDPVARDNFWRLLIELSRRDRVTIFISTHFMNEAERCDRMSLMHAGKVLVSDTPANIVAQRNADTLEQAFIDYLVEAGGGTDTGTNDTQQTTPSTPDIAQGSHQAKLRFFSFNRMFSYLWREMLELQRDPVRGGLALAGSMLLMFVMGFGISMDVEDLTYAVLDRDQTTLSQNYALNLSGSRYFIEQPPIRDYQELDQRMRSGELSLAIEIPPGFARDVQRGSRAEIGAWVNGAMPQRAETVQGYVQGIHQQWLQQQAQERLGVTVASAATIETRYRYNPDVRSLPAMVPAVIPLLLLMLPAMLSALSVVREKELGSIINLYVTPVTRTEFLLGKQLPYVALAMLNFLLMVLLAVTVFDVPVKGSFATLALAAFLYSIVATGIGLLASTFTRSQIAALFFTMIASIVPAVQFAGMLNPVSSLEGAGRIVGEIYPTTYMLIITRGVFSKALDFSDLQASFWPLLAAIPVVLVTTVLLLKKQDK

SEQ ID NO: 27554 - DNA, 1602 bp, Methylobacillus flagellatus KT
  CDS (1)..(1602): transl_table=11
atggccgcgcctttgcttgcgttggagaacgtctccatcgccttcggcaacaagctggccgtggacagcctcaacctggaggtacgtcccggcgagcgtcttgctctggtcggcgaatccgggtcgggcaagacggtcacggcgctgtccatcctgcgcttgctgagccagcccagaatatcgggcagcatccatttccaggggcaagacttgttgcagaagagcgaacacgagctgcgccagatcaggggccgtgacatcgccatgatcttccaggagccgatgactgcactcaacccgctgttcaccatcggcaaccagattgtcgagacgctgcagctgcatgagggcctgagcaagaagcaggcgcgagacaaggcgctgcaactgatcatcaggaccggcatacgccagccggagcgcagcatagacagctttccgcaccagctttccggcggtcagcgtcagcgtgcgatgattgcgatggcgctggcgtgccgtcccaagctgttgattgccgacgaaccgacgaccgccctcgatatgacgatacgcgcgcgcatcgtcaagacattgctggatttgcagcaggaggaaatccagcgcaatggcgacgccggcatggccatcctgctgattacccacgatctcaacctggtgcgcaaattcgcccagcgcgtggccgtgatggaacgtggcaaactggtcgaaaccggggatacggaatccattttcgccaacccgcagcatccttacacgatcaagctcatcaacagcatcccggtacgcaatatcgtgcctgtgcaggaagcggctcccatgttgctggaaacgcgggggctgcgtgtggaataccgcaaggccgccaacagttggcgtggcattttcagcaccagccgccatgttgcgctcaagggggctgatatccagttgcgtgaaggcgagaccattggagtggtgggggagtcgggctcgggcaagtctaccctggcccaggccatcctgaacctgattccggctgaatccggcgatatcgagtttgagggcgcgccggtggcgagattgagcaaataccggcagcgggccctgcgcgctcggctccaggtcgtgttccaggacccgttcggctcgctttcgccgcgccagaccataaggcagatcgtcggcgagggactggcgttgcatttccccgcgctcgatcctgaggagcagcacgaaaaaatcgtcaatgtgctgcgtgaggttggcctgcctgagaccgtactcaatgcctatccacatgagttctcaggggggcagcgccagcgcatcgcgatcgcgcgggcactgatcctcgcgcccagggtactggtgctcgacgagccgacctcggccctggatgtctctatccagaaccaggtgctcgagctgttggtaagcctgcaggagaaataccgcctgagttacctgctcatcacgcacgacctgactgtggtgaatgcgttggcgcatcgggtatatgtgctcaaggatggcgagatcgtggaatcgggcgatacggagcaggtgatcgagcgtccccgccatccttatacgcaaagcctggtccaggcttcgctgtaa

SEQ ID NO: 27555 - protein, 533 aa, Methylobacillus flagellatus KT
MAAPLLALENVSIAFGNKLAVDSLNLEVRPGERLALVGESGSGKTVTALSILRLLSQPRISGSIHFQGQDLLQKSEHELRQIRGRDIAMIFQEPMTALNPLFTIGNQIVETLQLHEGLSKKQARDKALQLIIRTGIRQPERSIDSFPHQLSGGQRQRAMIAMALACRPKLLIADEPTTALDMTIRARIVKTLLDLQQEEIQRNGDAGMAILLITHDLNLVRKFAQRVAVMERGKLVETGDTESIFANPQHPYTIKLINSIPVRNIVPVQEAAPMLLETRGLRVEYRKAANSWRGIFSTSRHVALKGADIQLREGETIGVVGESGSGKSTLAQAILNLIPAESGDIEFEGAPVARLSKYRQRALRARLQVVFQDPFGSLSPRQTIRQIVGEGLALHFPALDPEEQHEKIVNVLREVGLPETVLNAYPHEFSGGQRQRIAIARALILAPRVLVLDEPTSALDVSIQNQVLELLVSLQEKYRLSYLLITHDLTVVNALAHRVYVLKDGEIVESGDTEQVIERPRHPYTQSLVQASL

SEQ ID NO: 27556 - DNA, 1518 bp, Frankia sp. EAN1pec
  CDS (1)..(1518): transl_table=11
atgaggacgagcacgccgggggcgacccgcacgtctggcacgacccgcgcaacgcgaagatcatggtcacgaacgtcgagaaggggctcgcggcggccgatccggagagctccgccacgtaccgcgccaacctcgccggctacacgaccaagttggacgagctcgaccgggagaaccagcagaagatcgacaccatcccggcggaccggcgcaagctggtcaccaaccacgactcgttcggctactacgtggaccggtacggcctggagttcgtcgggtcgatcatcccgagcttcgacacgtccgccgagctctccggccgggcgatcgacgacatcgtcagccggatcagggcgtcccgcgtcgtggcggtgttctccgagtcatccctgccgccgcggacggcgcagaccatcggccgcgaggcgggcgtccgcgtcgtcgccggcgagggtgccctctacgccgacacgctgggcccggcggggtctgatggtgccacctacctcgaagccgaacggcacaacacggataccatcgtcaacgccctccggtgagacaggacccacagccaggatctacaggatggaccggtggtcgatcatgaccggtaacgctcaggcaccgtgcctgaccgcgccggacgggccggacggagccccgtcaccgtcgccggtggcgataccgacgaccgcggcgccggtggcggcagtggcgacagcactggcggccgacgcgatcgcgctccccgaccaggtcggcgccgctcccgccgcactgtcgctggagcacgcgagcatcgcctacggcagggtgccggtgctacacggcgtgcacggcgtcctccacccgggccggacgctggccctcatcgggcccaacggcgcgggcaagtcaacgctgatcaaggccgtgctcggcctggtgcccgtggtcgacgggctgatcacggtgctgggacgtcccccgggcgccgcccgccgggaggtcgcctacgtgccacaggcggacacgctcgacccggacttcccgatctcggtcggccaggtcgtgctgatgggccgctaccgcgggatcggctggatccgccgtccgggccgcgccgaccgggcggcggcgcaggccgcgctggaggccgtcgggctggcccaccgggcccgggatcgcttcggcacgctctccggagggcagcgccagcgggtgctgctggcccgcgccatcgccgcccagccccgcctgctgctgctcgacgagccgttcaacggcgtggacgtcgtctcgcaggacgccctgctcgccacgctcagtacgctgaccgccgccggcacggccgtcgtcgtctccacccacgacctggccctggcgcagctcatcagcgacgaggtgtgcctgctgagtggccgtcagatcacgttcgggccgcccgccgaggcgctcaccgcggagcccctgcgggccgcctacggcggcgccgcgctggagatcgacggccggggcgtcgtcgtgacccgcgtgtga

SEQ ID NO: 27557 - protein, 505 aa, Frankia sp. EAN1pec
MRTSTPGATRTSGTTRATRRSWSRTSRRGSRRPIRRAPPRTAPTSPATRPSWTSSTGRTSRRSTPSRRTGASWSPTTTRSATTWTGTAWSSSGRSSRASTRPPSSPAGRSTTSSAGSGRPASWRCSPSHPCRRGRRRPSAARRASASSPARVPSTPTRWARRGLMVPPTSKPNGTTRIPSSTPSGETGPTARIYRMDRWSIMTGNAQAPCLTAPDGPDGAPSPSPVAIPTTAAPVAAVATALAADAIALPDQVGAAPAALSLEHASIAYGRVPVLHGVHGVLHPGRTLALIGPNGAGKSTLIKAVLGLVPVVDGLITVLGRPPGAARREVAYVPQADTLDPDFPISVGQVVLMGRYRGIGWIRRPGRADRAAAQAALEAVGLAHRARDRFGTLSGGQRQRVLLARAIAAQPRLLLLDEPFNGVDVVSQDALLATLSTLTAAGTAVVVSTHDLALAQLISDEVCLLSGRQITFGPPAEALTAEPLRAAYGGAALEIDGRGVVVTRV

SEQ ID NO: 27558 - DNA, 1497 bp, Shewanella baltica OS155
  CDS (1)..(1497): transl_table=11
atgcttgatgttgtcgcgaaccaagacaaaagtattgtggttaaacagttgcgatatgggcgtgataatgaggtgctagtcgtcgatgagtggcaactgcatcccgctgaacattgggcgattttcgcgaccgacagctattgtggttccttgctcgggcgaatattaaccggtgatattcagcccgatgaagggacgattgctggcctgccgcaacgtatcggctgggtgtcacttgggttgcaacaagtattgctggagcgagagttagaaaaagacgaattggattacggttcgagtgtcgaattcttagtgttggaatgctgccaagatgccgcacaactcgcgccactattacaaaaggttgggcttgagccgctgcgcctgcgtggtttccggcagttatctacgggcgaaacacgccgagtcatgctggcgcgtgcgctggcaatgttaccgcaattgctgatcttagatgacccttatgctggcctcgatgttgaacatcaggcgagtttatctgagctgctgagtgaagtggctgagcatactcagttgctgatcattacctctcgccaagaggaattgccgccgtgcatcagccatgtggcgctgtttaatggcgagatgctcaaatcggggcagagtgtgcacaaactcagccagcctatgtcgattgagcaatggcacaatcatcctgtgatggcgcagctgaatgcgttatcggcgcagcgtagcaatgaactcttggccttgatggagcggcaaaggcacaacgccgaggcctttgatcctttggtcgagattaaaaatggcaaagtggaatatgtcagtgggctgatttttagcggcgtgaattggcgcatcgaagcggggcaacattggcaagttcgcggcccaaatggctgcggtaaaagcactttgctggggctgattttaggcgaccatccccaatgctatagcaacgacattacgctctttggccgacctcgcggaagcggcgagagtatttggcagattaaacaacggattggcatagtatcgtcggcgctgcacttgcagtatcgcgtcagttgctcggtattagatgtgctgctttcaggcttttttgactctattggtctgtaccagaaacccactaaacctcagctagatttggcgaaggaatggttggcgattctgcacatgacagggttggcgagcacgagttttaagaagctcgattatggtcagcagcggttattgctgataggccgcgccttgattaaacagcccttattactgattttagatgagccgtatcagggcttagattttatcaatcgcaccttagtgatgcgggcgttgaagatgatagccgagcatcatctgagccaattgctgtacgtgtcgcaccatagggaggatgcgctgcccgctatccatcatttcgtggattttattaagcagggcgacggttattcggtgcaggtgagtgatagcgagtccaaggattga

SEQ ID NO: 27559 - protein, 498 aa, Shewanella baltica OS155
MLDVVANQDKSIVVKQLRYGRDNEVLVVDEWQLHPAEHWAIFATDSYCGSLLGRILTGDIQPDEGTIAGLPQRIGWVSLGLQQVLLERELEKDELDYGSSVEFLVLECCQDAAQLAPLLQKVGLEPLRLRGFRQLSTGETRRVMLARALAMLPQLLILDDPYAGLDVEHQASLSELLSEVAEHTQLLIITSRQEELPPCISHVALFNGEMLKSGQSVHKLSQPMSIEQWHNHPVMAQLNALSAQRSNELLALMERQRHNAEAFDPLVEIKNGKVEYVSGLIFSGVNWRIEAGQHWQVRGPNGCGKSTLLGLILGDHPQCYSNDITLFGRPRGSGESIWQIKQRIGIVSSALHLQYRVSCSVLDVLLSGFFDSIGLYQKPTKPQLDLAKEWLAILHMTGLASTSFKKLDYGQQRLLLIGRALIKQPLLLILDEPYQGLDFINRTLVMRALKMIAEHHLSQLLYVSHHREDALPAIHHFVDFIKQGDGYSVQVSDSESKD

SEQ ID NO: 27560 - DNA, 1596 bp, Shewanella amazonensis SB2B
  CDS (1)..(1596): transl_table=11
gtgatcacaaccgccaatatcaccatgcagttcggcgccaagccactgtttgaaaacatctccgtcaagttcggtgacggcaaccgctacggccttatcggtgccaatggttgcggtaaatccacctttatgaagatcctcgccggtgaacttgagccgtccggcggtaacgttcatctggatcccaacgagcgtctgggtaagctgaatcaggatcagttcgcctacgaagagttcagcgtaatcgataccgttatcatgggccacaaagaactgtgggctgttaagcaggaacgtgaccgtatctattctttgcctgaaatgagtgaagaagacggcatcaaggtagccgagcttgaaatggaatttgccgaaatggacggttacaccgccgagagccgtgccggtgaactgctgctgggtgtgggtattcctctggagcaacattttggtcctatgagcgaagtggccccaggctggaaactgcgtgtgctgctggcacaggcactgttctcagacccggacgtgcttctgcttgacgaaccaaccaacaacctggacatcgataccatccgttggttgcaggacatgctgaatcagcgtaacagcaccatgattatcatttcacacgaccgttacttcctgaactctgtgtgtacccacatggcggatctggactacggcgagctgcgtgtgtatccgggcaactacgatgaatacatgatggcagccagccaggcccgtgagcgtttgctggccgacaacgccaagaagaaggcacagattgcagagctgcaaaccttcgtggcgcgtttctctgccaacgcctccaaggccaagcaggccacctcccgtgcccgccagattgacaagatcaagctggacgaagtgaaggcttccagccgtgtgaacccctacatccgtttcgagcaggaaaagaaactgttccgtaacgcgctggtggtagagaacctgagcaagggcttcgatagcaagccgctgttccaaaacttcaacatgattgccgaagtgggtgagcgtatcgccatcctcggtgagaacggtgccggtaaaaccaccctggtgcgtaccctcatccatgaattgccacaggacgaaggcactattcactggtctgagaatgccgctatcggttactacgcccaggatcacgccagtgattttgaaaacgatttgaccgtattcgactggatgagccagtggaagaaagaaggcgacgatgaacaggccgtacgcggtattctgggtcgtatgctgtttggcgccgacgacatcagaaagtcggtcaaggtactgtcgggtggtgagcagggccgcatgctgtttggcaagatgatcatgcaaaagcccaatatcctggtgatggacgaacccactaaccacctggatatggaatctatcgagtcgctcaacaacgcgctggaaatgtacgaaggtacgctgtttttcgtgtcccacgaccgcgcctttgtcagctcgctggccaaccgcattatcgaaatcaccgccaatggcgtgaatgacttcaaaggaacttacgacgagttcctgcgcagtaaaggcatcgaaggctaa

SEQ ID NO: 27561 - protein, 531 aa, Shewanella amazonensis SB2B
MITTANITMQFGAKPLFENISVKFGDGNRYGLIGANGCGKSTFMKILAGELEPSGGNVHLDPNERLGKLNQDQFAYEEFSVIDTVIMGHKELWAVKQERDRIYSLPEMSEEDGIKVAELEMEFAEMDGYTAESRAGELLLGVGIPLEQHFGPMSEVAPGWKLRVLLAQALFSDPDVLLLDEPTNNLDIDTIRWLQDMLNQRNSTMIIISHDRYFLNSVCTHMADLDYGELRVYPGNYDEYMMAASQARERLLADNAKKKAQIAELQTFVARFSANASKAKQATSRARQIDKIKLDEVKASSRVNPYIRFEQEKKLFRNALVVENLSKGFDSKPLFQNFNMIAEVGERIAILGENGAGKTTLVRTLIHELPQDEGTIHWSENAAIGYYAQDHASDFENDLTVFDWMSQWKKEGDDEQAVRGILGRMLFGADDIRKSVKVLSGGEQGRMLFGKMIMQKPNILVMDEPTNHLDMESIESLNNALEMYEGTLFFVSHDRAFVSSLANRIIEITANGVNDFKGTYDEFLRSKGIEG

SEQ ID NO: 27562 - DNA, 2760 bp, Ralstonia metallidurans CH34
  CDS (1)..(2760): transl_table=11
atgaacgtctcgacgggtacgcacgaacacgttgccggcgtcgcgcatgtcacgctgcgctatggcaagacggttgctctcgacgacatctcgctggagtttcccgcgggctgcatgatcggcgtgatcggtcccgatggtgttggcaagtcgagcctgctgtcgctggtggccggcgcacgggccgtgcaggaaggcacggtcaccgcgctcggcggcgacatgtcgcgcaaggaccatcgcgacgccgtctgcccgcgcatcgcctatatgccgcaggggctgggcaagaacctctacccgactttgtcggtcgaggaaaacctgcagttctttgccagactgttcggccacggtgcggccgaacggcgtcatcgcatcgacgacctcacgcgcagcaccggtctgcaaccgttcctggatcgcccggccggcaaactctccggcggcatgaagcagaagcttggcctttgctgcgcgctgatccacgaccccgacctgctgattctggacgagccaaccaccggcgtggatcccctggcacgcgcccagttctgggacctgatcgcccgcatccgccaggatcgtccgggcatgagcgtgatcgtcgccaccgcctatatggatgaagcccagcgcttcgactggctggtggcgatggacagcggcaagatcctcgataccgggacgccggcagaactgctggcccgcaccagcgccgccgatctcgaaggcgcgttcatcgggctgctgcccgaggagaagaagcgtggctacgagcccgtggtgatcgcgccgttggccgtggacgaaaacaccccgatcgccatcgaggcgaaagacctgaccatgcgcttcggcgatttcgtcgcggtggaccacgtgcagttcaagattcggcggggcgagatcttcggatttctcggatccaatggctgcggcaagtccacgacgatgaagatgctgaccggtctgctgcccgccagcgacggacgcgcgtggctgttcggtcaggaagtggatccgcgcgatatcgacacccgccgccgcgtgggctacatgtcacaggcgttctcgctttacaccgaactgacggtgcgccagaacctggtgcttcacgcccagctctttcacgtgcctagggaggacatcgaagtccgtgtggaggaaatggcccagcgcttcgggctgcaggacgtgatggagagcctgcctgacggattgccgcttggtatgcgccagaggctttcgctggccgtggcaatggtgcacaagcccgaactgctgatcctcgacgagccgacctccggcgtcgatcccgtggcgcgtgacaatttctggcggctgttggttgcgctgtcccgcgaggaccatgtcacgatcttcatctccacgcacttcatgaacgaggcggcccgctgcgaccgcatctcgctgatgcacgcgggcaaggtgctggtcagcgatccgcccgagaagatcgtcagcgattgcggcgcggatacgctggaagccgcgtttatcgactacctcgtggcagccggcggcggcacgcaggcagcctcggaaggcgcggaggccccggcgtccccggtagaggccggagccgaagccgaggcaaaaagcaagcatcagtctttctcgctcggccggatgtacagctacctgtggcgcgagtcgctggagcttcaacgcgatccggtgcgcctgaccctggccttgctgggctccgtgatcctgatgcttgtgatgggcttcggcatcagcatggacgttgaggatttgacctatgcggtcctcgaccgcgaccagaccacattgagcgagaactacgcgctcaatattgccggctcgcgctacttcgtccagaagccgccacttgagagctatgccgacatggacgcgcgcctgcgcagcggcaagctggccctggctatcgaaattccgccaggcttcgcacgcgatgtggcgcgtggcaagcaagtccagatcggcgcgtggatcgacggcgcaatgccgatgcgggccgaaaccgttcagggctatgtccagggtatgcaccagatctggctggcggatcaggcgctacggcgttacggtgtgcgagccacatcgaatgtatcgatcgagacccgcttccgctacaacccagacgtcaagagcttgccggcgatggtgccggccgtgattccgctgctactgatgatgatgccggcgatgctgaccgccctgtcggtcgtgcgcgaaaaggaactcggctccatcctgaatctgtacgtcactcccgtcacgcgtaccgagttcttgctgggcaagcagatgccgtatgtcgcccttgggatgctgaacttcttcctgatgtcgttcctggcggtcaccctgtttggggtaccggtgaaaggcaactttctggcgctggtgctggcggcgctgatcttcaacgtcgtgtccacgggcgttggcctgttcgcatcgacgttcacccgcagccagatcgccgccctcttcttcacgatgatcggcacgatgatcccgaccatacagttctcggggcttctgacgccggtatcctcgatggagggcgcgggcaaggtgatcggcggcatttatcccgccacgcacatgctcatcatcagccgtggcgtcttcaacaaggcgcttggtttctccgaccttcacgcttcgtactggccgatgctgatcgccatccccgtcattctcgggttgacggtggcgctgctggccaagcaggacaaatga

SEQ ID NO: 27563 - protein, 919 aa, Ralstonia metallidurans CH34
MNVSTGTHEHVAGVAHVTLRYGKTVALDDISLEFPAGCMIGVIGPDGVGKSSLLSLVAGARAVQEGTVTALGGDMSRKDHRDAVCPRIAYMPQGLGKNLYPTLSVEENLQFFARLFGHGAAERRHRIDDLTRSTGLQPFLDRPAGKLSGGMKQKLGLCCALIHDPDLLILDEPTTGVDPLARAQFWDLIARIRQDRPGMSVIVATAYMDEAQRFDWLVAMDSGKILDTGTPAELLARTSAADLEGAFIGLLPEEKKRGYEPVVIAPLAVDENTPIAIEAKDLTMRFGDFVAVDHVQFKIRRGEIFGFLGSNGCGKSTTMKMLTGLLPASDGRAWLFGQEVDPRDIDTRRRVGYMSQAFSLYTELTVRQNLVLHAQLFHVPREDIEVRVEEMAQRFGLQDVMESLPDGLPLGMRQRLSLAVAMVHKPELLILDEPTSGVDPVARDNFWRLLVALSREDHVTIFISTHFMNEAARCDRISLMHAGKVLVSDPPEKIVSDCGADTLEAAFIDYLVAAGGGTQAASEGAEAPASPVEAGAEAEAKSKHQSFSLGRMYSYLWRESLELQRDPVRLTLALLGSVILMLVMGFGISMDVEDLTYAVLDRDQTTLSENYALNIAGSRYFVQKPPLESYADMDARLRSGKLALAIEIPPGFARDVARGKQVQIGAWIDGAMPMRAETVQGYVQGMHQIWLADQALRRYGVRATSNVSIETRFRYNPDVKSLPAMVPAVIPLLLMMMPAMLTALSVVREKELGSILNLYVTPVTRTEFLLGKQMPYVALGMLNFFLMSFLAVTLFGVPVKGNFLALVLAALIFNVVSTGVGLFASTFTRSQIAALFFTMIGTMIPTIQFSGLLTPVSSMEGAGKVIGGIYPATHMLIISRGVFNKALGFSDLHASYWPMLIAIPVILGLTVALLAKQDK

SEQ ID NO: 27564 - DNA, 1635 bp, Mesorhizobium sp. BNC1
  CDS (1)..(1635): transl_table=11
atgagcctgctccagatcgaaaagctgacgctctcgatcggcggatcgcagatcctcaggagcatcgacatttcgatagagccgggcgaaatcatgggcctggtgggcgaatcaggctccggcaagtccatgacggcgctcagcatcatgaagcttctgccgcctggcgcacgggcgggcggccgcgtgcagttcgacggcatcgacatcctctccgcgcctgaagccgccatgtgccggctgcgcggggacgacatcggcatgatttttcaggaaccgatgacggcgctcaacccggtgaagaccatcggccagcaggtggccgaaggaatccgctggcacacgggcgcgaacagggcagacgcagagagccgcgcccgcgccatgctcgaacgcgtgggactgcccgaaaaggaattccccctcacccgctatccgcacgagctttcgggcggacagcgccagcgcgtcgtgatcgccatcgcctgcgcgctcaagccgaagcttctgatcgcggatgagccgaccacggcgctcgacgtggtgctgcagaggcagattctgacgctcttacgcgagctggtgaacgaaagcggcatgagcctgcttctcatctcgcatgatctggcggtcgtggcggaaatgacggaccgcctgacgatcatccgcgatggcgccgtgatggaggcgggtgaaacggtccagatcctctcgcggaaaacacatccttatacgaggcaacttgcggaagcctccactcacgtcccggcgcgggtggcgatttccaaaccgggcgccgggccgtctgccgcacccctcctcgaagtggagggcctgacgcgcgactatcccgtacgccctgccggtctttttgcacgggcaagcaggttccgcgccgtggaccatgtctccttctcgattttccctggccagagcgtcgctctcgtcggccgctccggttgcgggaaatcgacactggcccgaatgattctggcgcttgatcggccaagttcaggctccatccgctttatgggccaggagatcggcggaagaagcgaggaagcgctgcggcccgcgcgccgcaacatgcaggtggtctttcaggacccctacggctctttcgacccgcgtcatcgcgtggaaaggctagtggccgagcctctgcatcttgccgacgagaaaccgggtgcggcgcgccggcgcgatctggtcgccgaggcgctggagcaagtcggcctttcgcccttggacatcgacaaatatccgcatgagttctcaggcggtcagcggcagcgcctcgccatcgcccgcgcgattatcaccaggccgaagctcatcgtcgccgacgagcccgtttccgcgcttgacgtttcgatcagggcgcagatcctcgatcttttcgcggacctcaacgaccggctgggggtcgcctatctcttcataacgcatgatctaagggttgcccgcgcgatcaccgacacggtgctggtgatgcacgagggaaaaatcgtcgagacggggccgacggaaatcgtcctggacaatcccaggagcgatgcggcccgcgcgcttttggccgccgctcccgacctcgggctgaccctgcgaaaacgtctcgcgcaggatacgggttga

SEQ ID NO: 27565 - protein, 544 aa, Mesorhizobium sp. BNC1
MSLLQIEKLTLSIGGSQILRSIDISIEPGEIMGLVGESGSGKSMTALSIMKLLPPGARAGGRVQFDGIDILSAPEAAMCRLRGDDIGMIFQEPMTALNPVKTIGQQVAEGIRWHTGANRADAESRARAMLERVGLPEKEFPLTRYPHELSGGQRQRVVIAIACALKPKLLIADEPTTALDVVLQRQILTLLRELVNESGMSLLLISHDLAVVAEMTDRLTIIRDGAVMEAGETVQILSRKTHPYTRQLAEASTHVPARVAISKPGAGPSAAPLLEVEGLTRDYPVRPAGLFARASRFRAVDHVSFSIFPGQSVALVGRSGCGKSTLARMILALDRPSSGSIRFMGQEIGGRSEEALRPARRNMQVVFQDPYGSFDPRHRVERLVAEPLHLADEKPGAARRRDLVAEALEQVGLSPLDIDKYPHEFSGGQRQRLAIARAIITRPKLIVADEPVSALDVSIRAQILDLFADLNDRLGVAYLFITHDLRVARAITDTVLVMHEGKIVETGPTEIVLDNPRSDAARALLAAAPDLGLTLRKRLAQDTG

SEQ ID NO: 27566 - DNA, 1629 bp, Mesorhizobium sp. BNC1
  CDS (1)..(1629): transl_table=11
gtgctcgagatagaaaagcttagcatcgttcttccttccggcgccgacagggctctcgcgattaaggacgtttcgttcagcgtgaagtccggttcaacgctttgtcttgtgggcgaatccgggtcggggaaatcggttatcggacaagccgttgcagggctcctaccgcaaacccttcactgtttgaaacagagttccatacgccttggcggccgaaacttgctgtcgctagacgaatgtgcgtggcgccgtattcgagggcgggaaatcggaatggtgtttcaggagccgatgactgccttgaatccgctgatgccagtcgggcagcagattgctgaagtttaccggtcacacggcttgcgcctcaggaaggcggaagtccgggaccgggttgaaggtttgctcgagcgtgtcgggataaaggacccggcccgcatctcgaaatcctacacgttccgcatgtcaggcggtcagaggcagcgtgctatgatagccatggccgtggcaatgaagcccaaggtgcttattgccgatgagccgaccacagcgctcgatgtgacgacgcaaagacaggttcttgacttgttggccgactttcaggctgaaacccgaatggcactcatattcatcacgcatgattttgggatcgtggcggatattgccgacgaagtcgctgtcatggaaagcggaaaccttgtcgagttcggctcgaaggaagatgttttggctcgcgcgcagcaccgctacactcgaaaattgctcgcagctgttccgcgccttcatgagcataaggcttcggttgccgagcgatcgacaccggtgctcgaagtgcgcggcttgagcaaaacgtatggagtggcaacgagcatcttcagaaggcaggacatgagggtcctgaacgatgtcaatttcaaggtttgcaaaggcgaggttgtcgcgcttgtaggggagtccggatccggcaaatcaacaattgcaaaatgcctgacgcgtctcacgtcgatagacaccggttcgatccgtcttgacggggcagatatgctgagcctcaaaggagaggccctaatgaaactgcgccgcaaggtgcagatcgtattccaagatccgtacggatctctgaatcctcgccagaagatcgtggatgcggtatcggccggaccaattgcgcagggggttgcgtcacgcgaagcccgtgaactcgcggagcacctgctcacgattgtcggtctgggacgaaatgcactcgaccgttatcctcatgagttctccggcgggcaacgtcagcgcattggtatcgccagggctctcgccgcgaagccggaggttcttattgcggacgaagctgtctctgctctcgatgttacggttcaagcgcagattttgcgacttcttgcggacctaagggatcgacttggactcaccatgctttttatcacgcacgacctgcgcgtcgccggtcaagtgagcgatcgcataatcgtcttgaaggctgggaatgtagttgaagagggtcccactcaagcaatattcaccaagccatcaaatcagtacacttactctcttctgcaggcaattcccggaatctcatcaaacgagtccgcgttggttcggaataagtgcgtgtgctaa

SEQ ID NO: 27567 - protein, 542 aa, Mesorhizobium sp. BNC1
MLEIEKLSIVLPSGADRALAIKDVSFSVKSGSTLCLVGESGSGKSVIGQAVAGLLPQTLHCLKQSSIRLGGRNLLSLDECAWRRIRGREIGMVFQEPMTALNPLMPVGQQIAEVYRSHGLRLRKAEVRDRVEGLLERVGIKDPARISKSYTFRMSGGQRQRAMIAMAVAMKPKVLIADEPTTALDVTTQRQVLDLLADFQAETRMALIFITHDFGIVADIADEVAVMESGNLVEFGSKEDVLARAQHRYTRKLLAAVPRLHEHKASVAERSTPVLEVRGLSKTYGVATSIFRRQDMRVLNDVNFKVCKGEVVALVGESGSGKSTIAKCLTRLTSIDTGSIRLDGADMLSLKGEALMKLRRKVQIVFQDPYGSLNPRQKIVDAVSAGPIAQGVASREARELAEHLLTIVGLGRNALDRYPHEFSGGQRQRIGIARALAAKPEVLIADEAVSALDVTVQAQILRLLADLRDRLGLTMLFITHDLRVAGQVSDRIIVLKAGNVVEEGPTQAIFTKPSNQYTYSLLQAIPGISSNESALVRNKCVC

SEQ ID NO: 27568 - DNA, 1656 bp, Kineococcus radiotolerans SRS30216
  CDS (1)..(1656): transl_table=11
gtgagcacccccctgctgcaggtcgaggacctgcggatctcctacgccgggcgggacgggcggcgcgaggtcgtccacggcgcgtccttcgacgtgcacccgggcgaggtcgtcgcggtcgtcggcgagtccggctccggcaagagcaccacggcgcacgccgtcgtgggtctgctgcccggcaacggttccgtcgactccggctccgtcctgctggagggcgacgaactggtcgggctgggggagggtgcgtggcgccgggtccgcggggcccgcatcgggctcgtcccgcaggaccccacgctgtcgctgaacccggtcgagcgcatcggcgaccaggtcgccgaggcgctgcacgtccacggcctggcccggggagcggccgcccgggcgcgggccgtcgacctgctcaccgccgccggcctgcccgacgccgccctgcgcgcgcggcagtacccgacggaactctccggcggcatgcgccagcgcgtcctcatcgccatcggcctcgccgccggcccccggctgctcgtcgccgacgaaccgaccagcgccctcgacgtcaccgtccagcggcaggtcctcgaccacctggaggcgctgacccgcgacgccgggacggccgtgctgctcatcacccacgacctcgccgtcgccgcggaccgggcgtcgcgggtcgtggtgatgtccgggggcgaggtcgtcgaggtcggcaccgcgcaccaggtcctcacccggccccgacacccgtacacggcgtccctgctggccagcgcgcccagcctctccagcgcccggatcaccgcccgcccgcgcccccgcaccgcacccccggaacccccggaacccccggcgccccgcgcgtccggaccgctggtccaggtgcgcgacctggtgaaggagttcccgctgcccgggcgcggccgcacccagaccgccgtcgccggggtgagcttcgacgtcgcccgcggcgagaccctcgccctcgtgggggagtccgggtcgggcaagaccaccaccgcccgcctcgtcctggggctggagcggccgacctcgggggaggtgcggttcgacggggaaccgacggccggtctgaggggggcggcctggcgcgaactgcgccggcgggtgcagctggtctaccagaacccctacgcctcgctggacccgcgcgtcgcggtgggggagacggtcgcggaacccctgcgcgccttcgggatcggggaccgggcgtcgcgtcggcggcgcgcggcgtccctgctggaccaggtccggctgccggccggccttctcgaacgccggcccgcggaactgtccggcgggcagcggcagcgggtcgcgatcgcccgcgcgctggccctggaaccggagctcgtggtgtgcgacgaacccgtctccgccctcgacgtctcggtccaggcgcagatcctggaactgctggtgcagctgcaggccgaccacggcctgagctacctgttcatctcccacgacctggccgtggtccgccaggtcagcgaccgggtgggtgtcgtgcgccggggggaactcgtcgagctcggacccaccgacgaggtgttctcccgcccccggcacgagtacaccgtcgaactgctggaggccatccccggccggcgggcgctggaggacgtgtcgtga

SEQ ID NO: 27569 - protein, 551 aa, Kineococcus radiotolerans SRS30216
MSTPLLQVEDLRISYAGRDGRREVVHGASFDVHPGEVVAVVGESGSGKSTTAHAVVGLLPGNGSVDSGSVLLEGDELVGLGEGAWRRVRGARIGLVPQDPTLSLNPVERIGDQVAEALHVHGLARGAAARARAVDLLTAAGLPDAALRARQYPTELSGGMRQRVLIAIGLAAGPRLLVADEPTSALDVTVQRQVLDHLEALTRDAGTAVLLITHDLAVAADRASRVVVMSGGEVVEVGTAHQVLTRPRHPYTASLLASAPSLSSARITARPRPRTAPPEPPEPPAPRASGPLVQVRDLVKEFPLPGRGRTQTAVAGVSFDVARGETLALVGESGSGKTTTARLVLGLERPTSGEVRFDGEPTAGLRGAAWRELRRRVQLVYQNPYASLDPRVAVGETVAEPLRAFGIGDRASRRRRAASLLDQVRLPAGLLERRPAELSGGQRQRVAIARALALEPELVVCDEPVSALDVSVQAQILELLVQLQADHGLSYLFISHDLAVVRQVSDRVGVVRRGELVELGPTDEVFSRPRHEYTVELLEAIPGRRALEDVS

SEQ ID NO: 27570 - DNA, 1593 bp, Silicibacter sp. TM1040
  CDS (1)..(1593): transl_table=11
atgacacaagcgccaattctgcaggtcaaggaccttcgggtcgcctttcgtcaggacggtcagcgggttgaggccgtcaaaggggtgtcctttgccctgtctcgtggcgagacggtggctttggtgggcgagtcgggctccggcaaatcggtctcggcgctttcgacggtgcagctccttggtgatagcgccgaggtctccggctcggtgaactatgacggacaggaaatgatcggcgccgatgaacgtaccctgcgacgggtgcgcggcaatgacatctccttcattttccaggagccgatgacctctctgaacccgctgcatacgatcgaaaaacagttgggcgaggcgcttgcgctacatcagggagtgatgggagaggacgcccgcgcgcgtgtgctggacctgttgaataaggttggtatccgggacgcggaaacccgactgggggcttatccgcaccagctttctggcggtcaacgtcagcgtgtaatgatcgcaatggcgctcgccaacaaacccgacgttctgatcgcggacgagcccacaacggcgctcgatgtgaccattcaggcgcagatcctcgatctccttgcggatctgaaacagagcgaggggatggggcttttgttcatcacccatgacctctcgattgtgcgccgtattgcggatcgggtctgcgtgatgaaatccggtgaaattgtcgaggaaggtccaacggctgagctgtttgcaaacccacagcacccctacacccagaaactcctggcggcagaaccctccggtcgacccgcgccgatcccggaaggggcaaccgaattcgtcagtgccaaggatctcaaggtctggtttcccatccagcgggggctactgaagcgcatggttggccatgtcaaggcggtcaatcccatgtcgctctcggtgcgcgccggggaaactttgggaattgtaggcgaatccggctcgggcaaaaccacgatggcacttgcgatcatgcgccttatcgcctccgaaggcgaggtgcgctttcaggatcaggacctgcgccaatggtccacgcgggacctgcgccggttgcgcaaggacatgcagatcgtgtttcaggatccgtttggctcgctgtctccgcgtatgacatgccagcagatcattgccgaaggtctggcaattcatgaggttgaccaacatcgtaagccgcgtgatcttgtggctgatgtaatgcaggaagtgggtctcgaccctgccaccatggaccgctatccacatgaattctcaggtgggcagcgtcagcgcattgccatcgcccgtgcaatggttctgcgccccaagctggtggttctggacgagccgacctcggcccttgatatgacggtccaggtgcagatcgtgaacctgctgcgcgatcttcaggcccgctacgggcttgcctatctcttcatcagccatgacctcaatgtggtgcgcgccatgtcgcatgacatcctggtgatgaaagccggagacgtgatcgagcaaggccccgccgaggaggtatttgccaatcccaaagaagaatacacacggcatctgctctctgccgtgacgggtgcctag

SEQ ID NO: 27571 - protein, 530 aa, Silicibacter sp. TM1040
MTQAPILQVKDLRVAFRQDGQRVEAVKGVSFALSRGETVALVGESGSGKSVSALSTVQLLGDSAEVSGSVNYDGQEMIGADERTLRRVRGNDISFIFQEPMTSLNPLHTIEKQLGEALALHQGVMGEDARARVLDLLNKVGIRDAETRLGAYPHQLSGGQRQRVMIAMALANKPDVLIADEPTTALDVTIQAQILDLLADLKQSEGMGLLFITHDLSIVRRIADRVCVMKSGEIVEEGPTAELFANPQHPYTQKLLAAEPSGRPAPIPEGATEFVSAKDLKVWFPIQRGLLKRMVGHVKAVNPMSLSVRAGETLGIVGESGSGKTTMALAIMRLIASEGEVRFQDQDLRQWSTRDLRRLRKDMQIVFQDPFGSLSPRMTCQQIIAEGLAIHEVDQHRKPRDLVADVMQEVGLDPATMDRYPHEFSGGQRQRIAIARAMVLRPKLVVLDEPTSALDMTVQVQIVNLLRDLQARYGLAYLFISHDLNVVRAMSHDILVMKAGDVIEQGPAEEVFANPKEEYTRHLLSAVTGA

SEQ ID NO: 27572 - DNA, 1614 bp, Paracoccus denitrificans PD1222
  CDS (1)..(1614): transl_table=11
atgacgccggttctggaagtcagcgacctgcgggtggggttccggcaggacgggcagcttgcgcccgccgtcaagggcgtcagctttaccgtcggcaagggcgagacggtggcgctggtcggcgaatccggctcgggcaaatcggtcacggcgctttcgacggtgcggctgctgggcgaggcggcagaggtctcgggctcggtccgctatgacgggcgcgaattgctgggcgcggccgagccggaactgcgtcgggtgcgcggcaacgacatcagcttcatctttcaagagccgatgacctcgctgaaccccctgcacacgctggagcggcagcttgccgaaagcctggcgctgcatcaggggctgcgcggcgcggcggcgcgggcgcgcatcatcgagctgctgacccgcgtcggcatccgcgacccggaaacgcggcttgccgattacccgcaccagctgtccggcggccagcgccagcgggtgatgatcgccatggcgctggcgaacgggccggaactgctggtcgcggatgagccgacgacggcgctggacgtgaccatccaggcgcagatcatggaactcttggcagagctcaaggctgccgaggggctgtcgatgctgttcatcagccacgacctgggcctggtgcggcgcatcgccgaccgggtctgcgtgatgaagggcggcgagatcgtcgagcagggcccggtcgagcagatctttgcccatccgcagcacgaatatacccgcatgttgctggccgccgagccacagggccgcgccgaccccattcccgccgacgcgccgcaggtcgtggcgacgcaggatctgcgggtctggttcccgatccagcgcggcttcctgcgccgcaccgtcggccatgtgaaggcggtgaacggcgccacgatctcggtccgcgccggcgagaccctgggcatcgtcggtgaatccggctcgggcaagaccacgctggcgctggcgatcatgcggctgatcgagagcgaggggccgatcctctacatgggccgcgacatctcgaaactgccgggtcgggcgctgcgcggcttgcgccgcgacatgcagatcgtattccaggatccctttggcagcctgtcgccgcgcatgacggtcgagcagatcatctccgagggcctgggcgtgcatggcatcgagccgggccgcgaccgccgcgggatggtggacgaaatcatgcgcgaggtcgggctggaccccgccaccatgcaccgctatccgcatgaattcagcggcggccagcgccagcgcatcgccatcgcccgcgccatgatcctgaaccccaggctggtggtgctggacgagccgaccagcgcattggacatgaccgtgcaggtgcagatcgtcgagcttttgcggcggctgcaacgcaagcacgggcttaccttcctgttcatcagccacgacctgcgcgtcgtgcgtgccatgtcgcaccagatcatggtcatgcgcgcgggcgaggtggtcgagcagggatcgacccaggcggtcttcgacaatccgcaaagcgactacactcgccgtctgatcgaggcggcgtttcttacggtaataagtgaagatttttcggtaatttaa

SEQ ID NO: 27573 - protein, 537 aa, Paracoccus denitrificans PD1222
MTPVLEVSDLRVGFRQDGQLAPAVKGVSFTVGKGETVALVGESGSGKSVTALSTVRLLGEAAEVSGSVRYDGRELLGAAEPELRRVRGNDISFIFQEPMTSLNPLHTLERQLAESLALHQGLRGAAARARIIELLTRVGIRDPETRLADYPHQLSGGQRQRVMIAMALANGPELLVADEPTTALDVTIQAQIMELLAELKAAEGLSMLFISHDLGLVRRIADRVCVMKGGEIVEQGPVEQIFAHPQHEYTRMLLAAEPQGRADPIPADAPQVVATQDLRVWFPIQRGFLRRTVGHVKAVNGATISVRAGETLGIVGESGSGKTTLALAIMRLIESEGPILYMGRDISKLPGRALRGLRRDMQIVFQDPFGSLSPRMTVEQIISEGLGVHGIEPGRDRRGMVDEIMREVGLDPATMHRYPHEFSGGQRQRIAIARAMILNPRLVVLDEPTSALDMTVQVQIVELLRRLQRKHGLTFLFISHDLRVVRAMSHQIMVMRAGEVVEQGSTQAVFDNPQSDYTRRLIEAAFLTVISEDFSVI

SEQ ID NO: 27574 - DNA, 2517 bp, Paracoccus denitrificans PD1222
  CDS (1)..(2517): transl_table=11
atgaatacccaaaaacgtgcggcgatgaggaatctgctgatcgtggcggcagggctggtgctgctgccggtcttgctgggccggatcgggctgggcgcgaattccgccgtcgaggtggtgatctatgccctggccgcgatggggctgaacgtgctggtgggttataccggcctcgtctcgttcgggcatggcgtctggttcgggacggcggcctatattgttgggctgaccgcgcggtcgatgggcaatgccagcatggccgtgtcgctgaccgtcggagtggtcgccaccgcgctgatcgcggcgcttgtcggctttctggtgctgcggcggcgcggggtctatttctcgctgatgacgctggcgctgtcggcgatgggcttccagcttgccttccgctggaccgacgtgaccggcggcgagaacggccttggcgggatcgagcgtcccgcgatgctggacgccaatctcagcttctacatcttcgtggcgctgctgggctttgccgtgatcgcgctgcttcagcgggtgctgcaatcgcccttcggctcggtcctcgaagccatccgcgagaacgacggccgcgcgcaggcgcttggctatgacgtgcgccgctacaagctgaaagcctttgtcctatcggccgcgatcaccgggcttgcggggggactgctgctttacaagaaccgcatgacctcggccgagccgatgtcgatcatcttctcgggcgagttgctggcgatggtcgtcatcggcgggatgcgcggctatctgggaccggcgctgggggcgctgttctacatcctcttccgcgaatacctgtcgatgtatagcgagaactggctgctctggttcgggctgatcttcgtcggcttcgtgatctttgcgcgccaaggcatgatcggcatcgggacgcagcttcgccgccgcttctttcccgagcccgagaccggcgccgccatggcggaacgcaggaccggcgactatcccttgccccgcgcgatcgcggaacgcgacggcggtggcggcgacgtgctggtggcggaagggatctcgaagcatttcaatgcgatcaaggcggtggacgatgtctcgctgcgggtcagggatcgcacgcttcacgcgcttctggggcccaacggggcgggcaagaccacggccttcaacctgatgtcggggatcatcccgaccagcgcgggcggcgtctcgttcatggggcaggatatttccggcaagtcggccgaccatatctcgaatctggggctggggcggtcgttccagatcaccaatcttttccccgagctgaccgtgcgcgagaatatccgccttgccgtccaggcccgcgatcccagccgcagtgacatgttgtgttcgaccgccagcatcgcccaggtccatgaaaaggtcgaggagatgatcaactgggtcggccttgccgggatggagaacgcccgcgcgggctcgctgtcctatggcgggcagcggcttctggacctcggcctggcgctggcgaccgagccgcgcatcctgctggcggacgaaccccttgccggcctgtcggtcgcggaacgcgagcgggtcgggttgctgatcaaggacgtctcgaaaagcctgccggtgttgctggtcgagcatgacatcgaccgcgtgttcgagcttgccgaccatgtcaccgtcatggcggacggcaaggtgctggtcgacggcacggtggacgacgcccgcaactcgcgcgaggtgtgcgacatctatatcggttcgggcaccagcgaggtcgcggcctcggcgcggcaggggcagttctcggcggaaaagatcctgcaactggacaaggtgaacctgcattacggcaagagccacatcctgcaggacgtcagcttcgacctgcacaagggcgagatcctggcgctgctgggtcgcaacggcgcgggcaaatcctcggtgctgaaggcggtgacggggatcgtgccgccgtcctcgggttcggtccggctgatggagcatgagcttgccggcctgtccagcgcccggatcgcgcggttgggcatcggctatgtgccgcaaggccgggggcttttcgccggaatgaccgtgcgcgagaacctggagctgggccgcatccgccgccagacgggcgagggcacgcattggtcgctggaagagatcctcgaatacttcccccggctgcgcgagcgactggatacgcctgccgacagcatgtcggggggtgagcagcagatggccgcggtcgcccgcgcgctgtcgggcgatatccgtgtcctgctgctggacgagcccttcgaggggctggccccggcggtggtcgagcagctgttccgcaccttcgacaagctgcgcgaccggctgtcgatcgtgatcgtggaccacaacctcgacctggcgctggcgctttcggaccgcaccatcgtgctggagcgcggtcgcgtgctgcatgaaatcgaatcccgccgcatcgccgaagatatcgagctgcggcgcgaaatgctgtggatgtag

SEQ ID NO: 27575 - protein, 838 aa, Paracoccus denitrificans PD1222
MNTQKRAAMRNLLIVAAGLVLLPVLLGRIGLGANSAVEVVIYALAAMGLNVLVGYTGLVSFGHGVWFGTAAYIVGLTARSMGNASMAVSLTVGVVATALIAALVGFLVLRRRGVYFSLMTLALSAMGFQLAFRWTDVTGGENGLGGIERPAMLDANLSFYIFVALLGFAVIALLQRVLQSPFGSVLEAIRENDGRAQALGYDVRRYKLKAFVLSAAITGLAGGLLLYKNRMTSAEPMSIIFSGELLAMVVIGGMRGYLGPALGALFYILFREYLSMYSENWLLWFGLIFVGFVIFARQGMIGIGTQLRRRFFPEPETGAAMAERRTGDYPLPRAIAERDGGGGDVLVAEGISKHFNAIKAVDDVSLRVRDRTLHALLGPNGAGKTTAFNLMSGIIPTSAGGVSFMGQDISGKSADHISNLGLGRSFQITNLFPELTVRENIRLAVQARDPSRSDMLCSTASIAQVHEKVEEMINWVGLAGMENARAGSLSYGGQRLLDLGLALATEPRILLADEPLAGLSVAERERVGLLIKDVSKSLPVLLVEHDIDRVFELADHVTVMADGKVLVDGTVDDARNSREVCDIYIGSGTSEVAASARQGQFSAEKILQLDKVNLHYGKSHILQDVSFDLHKGEILALLGRNGAGKSSVLKAVTGIVPPSSGSVRLMEHELAGLSSARIARLGIGYVPQGRGLFAGMTVRENLELGRIRRQTGEGTHWSLEEILEYFPRLRERLDTPADSMSGGEQQMAAVARALSGDIRVLLLDEPFEGLAPAVVEQLFRTFDKLRDRLSIVIVDHNLDLALALSDRTIVLERGRVLHEIESRRIAEDIELRREMLWM

SEQ ID NO: 27576 - DNA, 1383 bp, Paracoccus denitrificans PD1222
  CDS (1)..(1383): transl_table=11
atgatccgcgtccgcgacctgtcgctggaccatggcacgcagccgatcctgcgccatgtctcgctggaggtcgcgcgaggcgagacgctggcgctgatcggcccgtcgggcagcggcaagaccagcttggcacggatgatcctgggattgccgccgcagggccgggcgatacgatggcggggcgaggtcacgctggacgggcttgacatgctgcgcgcacctgcccgccacctgcgccgctttcgcgcagcggaaaccggaatgatcgtgcaggcgctttcggacgcgttgaacccgcatctgagcgttgcgcagcacctgcgcgaggcgggcgatccgcaagcgctctgcaccggtttcaacatcccgcccatgctgctgccgcgcctgccgcgcgacctgagcggcggcgagatccagcgcgtgctgaccgcgctcgccatggcgaaatcgccgcgctgtctgatcctcgacgagcccacggcggcgctggatccggccaatcgcgcctgggccaggacgcgcttcgcggccggcgcgcaggatcgggcgcaattgctgatcacccacgacctggagctggcgcgcgcactggccgaccgcatcgccgtcatgcgcgacggcgaattgatcgagatcggcgcggccgcgcaggtgttggcaacccccggccatgcctgcacgcgccggctactgggtttcgatcgcaagccggagctgcgcctgccgtccccggaaccacgcgagagcggcctgctggtcgaggggctgcggcaccggatcggcgacagggtgctgctgcgcgaggtctcggcccgtatcccggccgggcactgccttgccgtgatcggagccagcggttgcggcaagtccacgctggcgcggctgctggcgggttatctgccgctgcagggcggccggatcctgtggcagccgggcgcgcgggcgccgcgcatcgcactggtctcgcagcatccgcaccgggcgctggcccggcatttcaccgtcgagcaggtgctggccgaggctctgcggctggcgggcgagcccctggcacccgcccgcatcgcggccctgctgcgcgagatcggcctgtccgacgcgccgggtttccgtgcccggcgcacggagacgctttcgggcggcgaggcgcagcggctggtgatcgcacgcgccatcgcggtgcgcccggattgcctggtcgcggacgagccgaccagcgcgttggacccggtcagccgcgagcaggtgctgggcctgctgaaccggctcaagcgcgagcggggcgtcgcgctgctgctggtcacccatgacgccgaagtcgcgcgcaccctggccgagcggaccgcccgcctgcatgacgggcggctggccttcgattga

SEQ ID NO: 27577 - protein, 460 aa, Paracoccus denitrificans PD1222
MIRVRDLSLDHGTQPILRHVSLEVARGETLALIGPSGSGKTSLARMILGLPPQGRAIRWRGEVTLDGLDMLRAPARHLRRFRAAETGMIVQALSDALNPHLSVAQHLREAGDPQALCTGFNIPPMLLPRLPRDLSGGEIQRVLTALAMAKSPRCLILDEPTAALDPANRAWARTRFAAGAQDRAQLLITHDLELARALADRIAVMRDGELIEIGAAAQVLATPGHACTRRLLGFDRKPELRLPSPEPRESGLLVEGLRHRIGDRVLLREVSARIPAGHCLAVIGASGCGKSTLARLLAGYLPLQGGRILWQPGARAPRIALVSQHPHRALARHFTVEQVLAEALRLAGEPLAPARIAALLREIGLSDAPGFRARRTETLSGGEAQRLVIARAIAVRPDCLVADEPTSALDPVSREQVLGLLNRLKRERGVALLLVTHDAEVARTLAERTARLHDGRLAFD

SEQ ID NO: 27578 - DNA, 1470 bp, Shewanella frigidimarina NCIMB 400
  CDS (1)..(1470): transl_table=11
atgaaaatcagacttacgcagttgcagtgcagttcatcgagtgtcactgtcgacattaatgattgggttattgagcctcaacaatcttggggggtatttagcaccgaaggtgatgtaggtgcattgcttggccagttattaactcagcaaattgatgcgcaaaccttaacttacagtggcgatattatcggtgtcacgccagcaagtgtggcattagtgtcattgcttgaacagcaatcactgcttgaagctattttagagcaagatgacagcgaatcactgggatataccgatcctaaaacgaccgtgtttggggttgtttttaatcaatgccatgacaatgacttaacccatcaattgctgcaacaattagatttaacgcatttaagcttaagtccttttgctcaattgtctaccggtgaaggccgcagagtaatgcttgctcgtgcagtagcaactcaagtgccttttttagtgctcgacgaaccttatgcaggtcttgatgttgcgcacagacagactctcacagaatatttacaacaattatctcaaaccaaacagatactggtcgtggtgtcgcgtgaagaagatatgccagattggattgaacatgttgctatgtttagtcatggtaaattagacactatgatgaccaaatcacagtgggataaccatcctgttattgcccagttaacggcgcaagcgggtcaacaaagtgatgatatattggcgcttattcgtcgtcacagacacaagccattatttgctaacccggtatttcagttaaacaatggacgagtggcttacagcgataaagtgattttttcgggtgttaactggcgtatcgataatggtgtgcattggcaagtaaaagggcctaatggctgcggtaagagtactttactggggcttatttttggtgaccatccacaatgttacagtaatgatattgatatttttggtaacaaaagaggttctggcgaaagtatttgggaaattaaaaaacacatcggtatggtgtcttcggcattacatctgcaatatcgggttaactgtagcgcactggatgtgattgtttctggcttttatgattctattggtttgtaccaaaaaccgacggcacagcaaatatctgtcgctacagaatggttggccattttacacatgggccatttaagtaaaaccgcttttcgacaattagaatatggccagcaacgtttattactcatcgctcgcgccattgtgaaacaacccactttattgatcctcgatgagccttatcaaggtttggattatttgggacgccgactgattaaaaatgcccttgaactcattgccaaagaacacttaagtcaattgttgtatgtctcgcattatcaagaagatagcctagacagtattcagcactatattgaatttgtgaaagatgaaaatcaagatggttatcgggcggtggtttctcaggggtaa

SEQ ID NO: 27579 - protein, 489 aa, Shewanella frigidimarina NCIMB 400
MKIRLTQLQCSSSSVTVDINDWVIEPQQSWGVFSTEGDVGALLGQLLTQQIDAQTLTYSGDIIGVTPASVALVSLLEQQSLLEAILEQDDSESLGYTDPKTTVFGVVFNQCHDNDLTHQLLQQLDLTHLSLSPFAQLSTGEGRRVMLARAVATQVPFLVLDEPYAGLDVAHRQTLTEYLQQLSQTKQILVVVSREEDMPDWIEHVAMFSHGKLDTMMTKSQWDNHPVIAQLTAQAGQQSDDILALIRRHRHKPLFANPVFQLNNGRVAYSDKVIFSGVNWRIDNGVHWQVKGPNGCGKSTLLGLIFGDHPQCYSNDIDIFGNKRGSGESIWEIKKHIGMVSSALHLQYRVNCSALDVIVSGFYDSIGLYQKPTAQQISVATEWLAILHMGHLSKTAFRQLEYGQQRLLLIARAIVKQPTLLILDEPYQGLDYLGRRLIKNALELIAKEHLSQLLYVSHYQEDSLDSIQHYIEFVKDENQDGYRAVVSQG

SEQ ID NO: 27580 - DNA, 2757 bp, Shewanella frigidimarina NCIMB 400
  CDS (1)..(2757): transl_table=11
atggaccaacaaaattatcctatcgtctgcattaagggtgttacgcatacctataagaaagtgaatgctatcgaagatgtgtcattaaccattccatctgggatgatggttggcttactcggtcctgatggtgttggtaagtcgacgctattggcccttatttcgggtgttcgcaagttacagcatggcagtcttgaggtgcttggtggtgacatggcttcggcccgccaccgctccgaagttggccctcggattgcctacatgccccaaggtctgggtaaaaacctttatagcgagcttagtgttgccgaaaacctggacttctttggaaagttatttggtcagggggtctctgagcgtaaagctcgaatcgatcgtttgactaaagcaacagggcttcactcttttctatcaaggccagcgggcaagttatctggtggcatgaaacaaaaacttgggctctgctgttcgcttatacatgatccagatctgttgatattggatgagccgacgactggtgtcgacccattgtcaaggcgacaattttggcaattaatcaacgctattcgcagcgaaagacccagcatgagtgtgatagtgtccactgcgtacatggacgaagcagaagactttgactggctggttgcaatagatgctggacatatcttggacacaggtactccagcagagctaaaagccaaaactaacaccagtaatttagaaaagacgtttgtgcgcttactaccggaagggaagcggggaagtggtaaagagcttgttatccctccatttgaaaagactgctggcacacctgctatcatagcgaaagggttgactcgatgcttcggtgattttaccgctgtgaacgacgttagttttgaaattcaagctggcgagatttttggttttctcggttctaatggttgtggcaagaccaccacaatgaaaatgctgacgggtttgctgccagcttctgaaggtgaggcttttttattcggaaagttagttgatgcgaacaatctagaaatgcgcaagcgtgtcggatttatgtcacaagctttttcgctgtatggcgaactaacggtgatgcagaatttaaccttgcatgctcgcttatttcatctgtcaccgtcaaaaacaacagagcggataaatacgctggttgaccgttttggtctgcgcaaacaaatagatgatctagcttcatcgctgccacttggcatccgtcagcggctttcgctcgcggttgcggtgatccatgagcccgaaatgctcattcttgacgagcctacttcaggtgttgatcctgtcgcccgtgacgaattttgggagctgcttgttgaattgtcacgtcgagataaagtgaccatatttatttctacccattttatgaatgaggctttacgttgcgatcgcatttcgctcatgcacgctggtgaagtacttgtttatgatgaaccgcaacatctagtagaagccaaaggtgcagcctcgctcgaggaagcatttatcaattacctgaaagaggccattggaacgactgccgaagaatcaaccgatttggcttccgtgcagccagacgattcatcaacgttaataagttcaccttcaaccacattaaaacgccactattttagcttgaataggttattggcatacagctatcttgaaatgatggcggtaatgcgtgacaggatacgtttggcatttgccttttttggcagtgtgatcttattaattgttattgcttacggtatatcgctagatatagaggatctcacttttgccgtgctggatctggatcgtactccagagagccgccaatatttaagtaactttcaagggtcacactattttattgagagaccagaactgcaaagtaaagatgaacttgaatggcgtcttaagtctaacgatataaccttagcgatagagatccctccgggctttggccgtgatttaaaaacgggccaaacgcctagtatttctgcttggattgatggtgctaataccaccagagcaagcactatagaaggatatgtcactggtggccatatacgctatcttaccgagttagcaacaaatgcaggtatcgacgcaagagctctatataaagtagatctacagtctcgatatcgttataacccatcatttgagagcatattttcgattgggccgaaaacgcctgccttgctgttgctctttttccccgcaatcttgatggcggtgagtatctcgcgtgagaaggaggttggcactatcaccaacttttacgtcacgccaacaaacaaacttgaatttctgataggcaaacagctgccttatattggcattggcatggctaacttttttattctgacattcttagtggtatttttgctacaagtaccgctaaaaggtagcctgctgggcttaactgtgggagctttcttttacgtttgcgcttcaacgggtattgggttaattgtttccgcgttaactaagacacaggttaccgctgtttttgcgactacaattgtgtctttattacccacagcacttttctccgggttagttcagccaacatcaacgttagaaggcgggggatatcttatcggtatggcgtggcccgcaacctattacatgcatttgagtgtcgctgcatttaccaaaggattggatttctttgccctagcaggggatttaatgatgctatccatttatggtccgctctttgtcgttttcgctgcagtatgtttgacaaaacaagaggcataa

SEQ ID NO: 27581 - protein, 918 aa, Shewanella frigidimarina NCIMB 400
MDQQNYPIVCIKGVTHTYKKVNAIEDVSLTIPSGMMVGLLGPDGVGKSTLLALISGVRKLQHGSLEVLGGDMASARHRSEVGPRIAYMPQGLGKNLYSELSVAENLDFFGKLFGQGVSERKARIDRLTKATGLHSFLSRPAGKLSGGMKQKLGLCCSLIHDPDLLILDEPTTGVDPLSRRQFWQLINAIRSERPSMSVIVSTAYMDEAEDFDWLVAIDAGHILDTGTPAELKAKTNTSNLEKTFVRLLPEGKRGSGKELVIPPFEKTAGTPAIIAKGLTRCFGDFTAVNDVSFEIQAGEIFGFLGSNGCGKTTTMKMLTGLLPASEGEAFLFGKLVDANNLEMRKRVGFMSQAFSLYGELTVMQNLTLHARLFHLSPSKTTERINTLVDRFGLRKQIDDLASSLPLGIRQRLSLAVAVIHEPEMLILDEPTSGVDPVARDEFWELLVELSRRDKVTIFISTHFMNEALRCDRISLMHAGEVLVYDEPQHLVEAKGAASLEEAFINYLKEAIGTTAEESTDLASVQPDDSSTLISSPSTTLKRHYFSLNRLLAYSYLEMMAVMRDRIRLAFAFFGSVILLIVIAYGISLDIEDLTFAVLDLDRTPESRQYLSNFQGSHYFIERPELQSKDELEWRLKSNDITLAIEIPPGFGRDLKTGQTPSISAWIDGANTTRASTIEGYVTGGHIRYLTELATNAGIDARALYKVDLQSRYRYNPSFESIFSIGPKTPALLLLFFPAILMAVSISREKEVGTITNFYVTPTNKLEFLIGKQLPYIGIGMANFFILTFLVVFLLQVPLKGSLLGLTVGAFFYVCASTGIGLIVSALTKTQVTAVFATTIVSLLPTALFSGLVQPTSTLEGGGYLIGMAWPATYYMHLSVAAFTKGLDFFALAGDLMMLSIYGPLFVVFAAVCLTKQEA

SEQ ID NO: 27582 - DNA, 1611 bp, Burkholderia mallei JHU
  CDS (1)..(1611)
atgagcgcgccgagcgtcgttcgtttttccgacgtcagcctgcgctacggcaagaccgtcgcgctcgagcggatcacgctcgagatcccggccggtctcacgatcgggctgatcgggccggacggcgtcggcaaatcgagcctgctcgcgctcgcggccggcgcgcgcgcgctgcagacgggcgcggtcgacgcgctcggcggcgacatgcgctcgcgccgccatcgcgagcgcgtgtgccggcgcatcgcgtacatgccgcaggggctcggcaagaacctgtatccgacgctctccgtcgaggaaaacctgcagttcttcgcgcgcctgttcggccacgacgccgacgagcgccgccgccggatcgacgcgctcacgcggagcaccggcctctttgcgttcctgtcgcggcccgcgggcaagctctcgggcgggatgaagcagaagctcggcctatgctgcgcgctgatccacgatcccgacctgctgatcctcgacgagccgacgaccggcgttgatccgctcgcgcgcgcgcagttctgggatctgatcgcgcgcattcgctcggagcggccggcgatgagcgtgatcgtcgcgaccgcgtacatggacgaggcgcaacgcttcgactggctgatcgcgatggacgcgggccgcgtgctcgcgacgggcgcgcccgccgagctgctcgcgcgcaccggctgcgattcgctcgaggcggccttcatcgcactgttgcccgaagacgaacggcgcggccacaagccggtgacgctcgagccgctgcgcgccgacgcgcaaaccggcaccgcgatcgaggcgcgcgggctgacgatgcgcttcggcgatttcaccgcggtcgatcacgtgagcttccggatccggcgcggcgagatcttcggctttctcggctcgaacggctgcggcaagtcgacgacgatgaagatgctcaccggcctgctgcccgcgaccgagggcaccgcgcagctgttcggcaagacagtcgatccgaaggacatcaatacgcgccggcgcgtcggctacatgtcgcaggccttctcgctgtatagcgaactgacggtgcggcagaacctcgtgctgcacgcgcggctgttcggcgtgccggccgccgagatcgacgcgcgcgtcgacgagatggcgcgccgcttcggcctcgccgacatctacgacatgctgccggacagcctgccgctcgggatgcggcagcggctgtcgctcgcggtggcgatggtgcacaagccggagctgctgatcctcgacgagccgacctcgggcgtcgatcccgtcgcgcgcgacagcttctggcagttgatgatcgacctcgcgcgccgcgatcgggtgacgatcttcatctcgacgcacttcatgaacgaggcgcagcgctgcgaccggatctcgctgatgcacgcgggccgcgtgctcgcgagcgatgcgccggcggcgctcgtgcgcgcgcgcggcgcggcgacgctcgaggaggccttcatcggctatctcgtcgacgcttcggcgcaggaggcgcaggaggcgcagggcggcgcgggcgagcgccccggcgcgggcgagcgcgcggcgggcgaaagcgtgtag

SEQ ID NO: 27583 - protein, 536 aa, Burkholderia mallei JHU
MSAPSVVRFSDVSLRYGKTVALERITLEIPAGLTIGLIGPDGVGKSSLLALAAGARALQTGAVDALGGDMRSRRHRERVCRRIAYMPQGLGKNLYPTLSVEENLQFFARLFGHDADERRRRIDALTRSTGLFAFLSRPAGKLSGGMKQKLGLCCALIHDPDLLILDEPTTGVDPLARAQFWDLIARIRSERPAMSVIVATAYMDEAQRFDWLIAMDAGRVLATGAPAELLARTGCDSLEAAFIALLPEDERRGHKPVTLEPLRADAQTGTAIEARGLTMRFGDFTAVDHVSFRIRRGEIFGFLGSNGCGKSTTMKMLTGLLPATEGTAQLFGKTVDPKDINTRRRVGYMSQAFSLYSELTVRQNLVLHARLFGVPAAEIDARVDEMARRFGLADIYDMLPDSLPLGMRQRLSLAVAMVHKPELLILDEPTSGVDPVARDSFWQLMIDLARRDRVTIFISTHFMNEAQRCDRISLMHAGRVLASDAPAALVRARGAATLEEAFIGYLVDASAQEAQEAQGGAGERPGAGERAAGESV

SEQ ID NO: 27584 - DNA, 1587 bp, Pseudomonas fluorescens
  CDS (1)..(1587): transl_table=11
ttgatctccacagctaacatcaccatgcagttcggcgccaagccgctgttcgagaacgtttcggtcaagttcaacggcggcaaccgctacggcctgatcggcgccaacggttgcggcaagtcgaccttcatgaaaatcctcggtggcgacctcgagccgtccggcggccaggtcatgctggaaccgaacgtgcgcctgggcaagctgcgccaggaccagttcgcctacgaagaattcaccgtgatcgacaccgtgatcatgggccacgaggagctgtggaaggtcaaggccgagcgcgatcgcatctactcgctgccggaaatgaccgaagaagacggcatggccgtggccgagctggaaaccgaattcgccgagatggacggctacaccgccgagtcccgcgccggtgagctgctgctgggcctgggcattcccctggaacagcatttcggcccgatgaccgaagtcgcgccaggctggaaactgcgagttctgctggctcaggcgctgttctccgatccggaagtgctgctgctggacgaaccgaccaaccacctggacatcaacaccatccgctggctggaaaacattctcacggcgcgtaacagcaccatgatcatcatttcccacgaccggcacttcctcaacagcgtctgcacccacatggccgacctggactacggcgagctgcgcctgttcccgggcaactacgacgagtacatgatcgccgcgacccagtcccgcgagcagttgctgtcggacaacgccaagaagaaagcccagatcgccgagctgcagaccttcgtcagccgcttctcggccaacgcctcgaaagccaagcaggccacgtcccgggccaagcagatcgacaagatccagctggccgaagtcaagccgtctagccgcgtcagcccgttcatccgcttcgaacagaccaagaaactgcaccgccaggcggtgaccctggagcgcatgtccaagggtttcgacggcaagaccctgttccagaacttcagcttcaccgtcgaggccggcgagcgcgtagcgatcatcggccccaacggcatcggcaagaccactctgctgcgcaccctggtgggcgagctgaccccggacgccggcacagtgaaatggaccgaaagcgcggagctgggctactacgcccaggaccacgcccatgacttcgaagacgacgtcagcctgttcgactggatgggccagtggacccagggcgaacagatgatccgcggcaccctgggccggatgctgttctccaacgacgagatcctcaagtcggtgaaggtgatttccggtggtgagcaaggccgcatgctgttcggcaagctgatcctgcaaaagcccaacgtgctggtgatggacgaaccgaccaaccacctggacatggaatccatcgaggcgctgaacctggccctggaaaactacccgggcaccctgatcttcgtcagccacgaccgtgagttcgtatcgtccctggccacccgcatcatcgagttgagcccaagcggcgtgaccgacttcagcggcacctacgacgactacctgcgcagccagggcgtgatgttctaa

SEQ ID NO: 27585 - protein, 528 aa, Pseudomonas fluorescens
MISTANITMQFGAKPLFENVSVKFNGGNRYGLIGANGCGKSTFMKILGGDLEPSGGQVMLEPNVRLGKLRQDQFAYEEFTVIDTVIMGHEELWKVKAERDRIYSLPEMTEEDGMAVAELETEFAEMDGYTAESRAGELLLGLGIPLEQHFGPMTEVAPGWKLRVLLAQALFSDPEVLLLDEPTNHLDINTIRWLENILTARNSTMIIISHDRHFLNSVCTHMADLDYGELRLFPGNYDEYMIAATQSREQLLSDNAKKKAQIAELQTFVSRFSANASKAKQATSRAKQIDKIQLAEVKPSSRVSPFIRFEQTKKLHRQAVTLERMSKGFDGKTLFQNFSFTVEAGERVAIIGPNGIGKTTLLRTLVGELTPDAGTVKWTESAELGYYAQDHAHDFEDDVSLFDWMGQWTQGEQMIRGTLGRMLFSNDEILKSVKVISGGEQGRMLFGKLILQKPNVLVMDEPTNHLDMESIEALNLALENYPGTLIFVSHDREFVSSLATRIIELSPSGVTDFSGTYDDYLRSQGVMF

SEQ ID NO: 27586 - DNA, 1632 bp, Cryptococcus neoformans var
  CDS (1)..(1632)
atgcccccctcatctctacccctcgtaaggctacccccaaaagctgtcgtacatcgtttcggtgcacctacttcagctcctccttcatcggctttacttagatttccggttcaaggatggactatcaacagagaatcagcaaaacctgaaggatgggcaatcgtaggagatgctgacggtcgcaaggttgctgtggagacgctgttgagcagacatcgaatccaacctttttccccgcctccaggcccgttcccttatataacctcgctcatctcctcttccacagactcctggtcttctactactgaagcaccctcgaaacctatccgtcacctggcatttgcacgcccaccaacgacaggtgaatttacagattttactgctcgctatggagctctccttgaagaagacaggctgtcttacagggaaaacttgcagaaccttcacccgagaccgagtgatgaggatattgagagggttgcaaagctcatgaggatagggcacttgctcgatctccctactgtttcattctcatctggtcagactagacggggtagaatcgcaagtgccctgttgacaagacctgttttgttgctgttggaggatcctatggcaggtttggatgttcccagtcgaaaggaagtctccaaccttttgggagagctcaatgcaagtgaaactatcaagattgtcctcatccttagaggtaagggtggtgaagagatgccaacgtggatcacggatgtggccgaggtcagaaatggagaagtatggattggcaaacgggatgaatatgagcagaagcatgcagaagagcaggtccgggatcaggcgaaggtcgagcaggtggctgagaagagtgatgaagttcctggagaacccgtcatcaaacttgatggagtgtctgtatcatatggagagggcaccagacaagttctcaaggatatcaaatggaccgtcaagcccggagagaaatggcatctcattggggccaacggctccggtaagacgacactcctctcgctcatcttaggacaccatccacgctcatactccttgcccgcttcatccctccttctcttctccaagcctcgtcgctccatccctagccctactcttcggactttgattggacacacctctccggaaatcttcgcctctttcccaagagggatggggctgagtgctttggaggctgtcggcagtggttttgaaggcattttctctaggagaaatcttacctcggagcaaaaggaacgagttaaatatcttttgggacaatttaaagaccttttgaaaccgtcttctctttctgggaagcccgcaccggatgtgactgtccaagaaattgccaaccgaaactttgctcacttcactccccctcagcaaggtctccttcttttcctccgtgccattgtacggaaaccaaagcttcttatccttgacgaacctagtcagggcatggacgaagtaatctgggaacgatgtaagggcttattggagaaagagtgggaagatgagggtaagggtatggctgttatcgtggtgagccattatgaagacgaggttccatggaaaaagggtagaggaaaggtcctcaaactcgatcaaggagtcgctactgtacaataa

SEQ ID NO: 27587 - protein, 543 aa, Cryptococcus neoformans var
MPPSSLPLVRLPPKAVVHRFGAPTSAPPSSALLRFPVQGWTINRESAKPEGWAIVGDADGRKVAVETLLSRHRIQPFSPPPGPFPYITSLISSSTDSWSSTTEAPSKPIRHLAFARPPTTGEFTDFTARYGALLEEDRLSYRENLQNLHPRPSDEDIERVAKLMRIGHLLDLPTVSFSSGQTRRGRIASALLTRPVLLLLEDPMAGLDVPSRKEVSNLLGELNASETIKIVLILRGKGGEEMPTWITDVAEVRNGEVWIGKRDEYEQKHAEEQVRDQAKVEQVAEKSDEVPGEPVIKLDGVSVSYGEGTRQVLKDIKWTVKPGEKWHLIGANGSGKTTLLSLILGHHPRSYSLPASSLLLFSKPRRSIPSPTLRTLIGHTSPEIFASFPRGMGLSALEAVGSGFEGIFSRRNLTSEQKERVKYLLGQFKDLLKPSSLSGKPAPDVTVQEIANRNFAHFTPPQQGLLLFLRAIVRKPKLLILDEPSQGMDEVIWERCKGLLEKEWEDEGKGMAVIVVSHYEDEVPWKKGRGKVLKLDQGVATVQ

SEQ ID NO: 27588 - DNA, 1518 bp, Thermoanaerobacter ethanolicus
  CDS (1)..(1518): transl_table=11
atgagcgagtatattcttgaaatgagaaacataacaaaggaatttcctggagttaaagcattggataatgtaaatttcaaagttaaaagaggggaaattcacgcgttagtaggagaaaatggagcgggaaagtctaccttgatgaagatattaagtggtgtttatccttatggaacttataaaggagacataatcatagatggtgaagtgaagcaatttcgaaatattaaagatagtgaaaaaagtggtatagcgattatttatcaggagctcactctggtaaagtatatgacagtaggcgaaaacatatttttaggtgaagagcctgtaaaaggcggaataattgattggatgaaagtttactctgagacttatagacttttgaaagagttgcagattaatgtaaacccctatacaaaagttatgaatttaggaattgggcatcaacaaatggtagaaatagcgaaggctctttcaaaaaaagcgaggattttaatattagatgagcctacttctgcattgacagaaagcgaaacagaacatcttctcaatattttgaaagatttgaagaaaaatggtgtaacttgtatatacatttctcacaagcttaatgaagtatttgaaattgcagattcaatcactgtattaagagatggcaaaacgataatgacggacaaaaaagaaaatttcacagaaaacaaggtaatttctttaatggtagggcgtgagcttacacagagattcccaagagctaagcatacgccaggggaagtggttttcgaggttaaaaattacacagtttatgaccatgaaataccgggcaagaaaattattgacaatgtaagctttaaagccaggagaggcgagatattaggtattgcaggacttatgggagcagggaggacagaacttgctgctagtatatttggtgcatttaaaggtagaaaagaaggggaaatatatttaaatggcaaaaaaattgaaataaacactcccagcgatgcgataaaacatggaattgcctatctttcagaggataggaaaaggtttggccttgtgactttgatggatgtacaagaaaatatagcacttcctaactatgacagactatcaaaatttagtattataaataacaatgcaaaaattaaacatgcagaaaagtatgtaaaagagttaaaaataaaaacaccaaccataagacaaagggttgctaatttaagtggaggaaaccagcaaaaagtggttattgcaaagtggcttatgtcagacccaaaagttttgatactggacgaaccaactagaggaatagatgtgggagctaagtttgaaatatataatctaatgaataaattggttgatatgggcgtgtgtgtaataatgatatcttcagaactgcctgaaatattgggaatgagtgatagaatactggtaattcatgaaggaaaaatcaatggagaatttccaatagaagaagcagaccaagaaaaaatcatgtactgtgcaactggaggtaagtaa

SEQ ID NO: 27589 - protein, 505 aa, Thermoanaerobacter ethanolicus
MSEYILEMRNITKEFPGVKALDNVNFKVKRGEIHALVGENGAGKSTLMKILSGVYPYGTYKGDIIIDGEVKQFRNIKDSEKSGIAIIYQELTLVKYMTVGENIFLGEEPVKGGIIDWMKVYSETYRLLKELQINVNPYTKVMNLGIGHQQMVEIAKALSKKARILILDEPTSALTESETEHLLNILKDLKKNGVTCIYISHKLNEVFEIADSITVLRDGKTIMTDKKENFTENKVISLMVGRELTQRFPRAKHTPGEVVFEVKNYTVYDHEIPGKKIIDNVSFKARRGEILGIAGLMGAGRTELAASIFGAFKGRKEGEIYLNGKKIEINTPSDAIKHGIAYLSEDRKRFGLVTLMDVQENIALPNYDRLSKFSIINNNAKIKHAEKYVKELKIKTPTIRQRVANLSGGNQQKVVIAKWLMSDPKVLILDEPTRGIDVGAKFEIYNLMNKLVDMGVCVIMISSELPEILGMSDRILVIHEGKINGEFPIEEADQEKIMYCATGGK

SEQ ID NO: 27590 - DNA, 1515 bp, Bifidobacterium longum bv
  CDS (1)..(1515): transl_table=11
atgaaaggcattacgattgaattcccgggcgtcaaggccttggatggtgttgatttgactctctacccgggtgaagttcacgccctgatgggtgagaacggtgcaggcaagtccaccatgattaaggctctgaccggtgtgtacaagatcaacgccggctccattatggtggacggcaagcctcagcagttcaacggcaccctcgacgcacaaaacgccggtatcgccaccgtgtatcaggaagtgaacctgtgcaccaacctttccgtcggtgagaacgtgatgctgggccacgaaaagcgcggccccttcggcatcgactggaagaagacccacgaggccgctaagaagtatttggcacagatgggcctcgaatccattgacccgcacactccgctgagctccatctccatcgctatgcagcagctggtcgccatcgcccgcgctatggttatcaacgccaaggtgctgattctcgatgagccgacctcttcgctggatgccaacgaggtcagggacctgttcgcgatcatgcgcaaggtgcgtgactcgggcgtggccatcctcttcgtctcccacttcctcgatcagatttatgagattaccgatcgtctgaccattctgcgtaacggccagttcatcaaggaggtcatgaccaaggacaccccgcgcgacgaactcatcggcatgatgattggtaagtccgccgccgagctgtcccagattggtgccaagaaggctcgccgtgaaatcacccctggcgagaagccgatcgtcgatgtcaagggcctcggcaagaagggcaccatcaacccggttgatgttgacatctacaagggtgaggtcgttggcttcgctggcctgctgggctccggtcgtaccgagcttggtcgactcctgtatggtgccgacaagccggattcgggtacctacacgctcaacggcaagaaggtcaacatctccgatccgtacacggctttgaagaacaaaatcgcgtactccaccgaaaaccgtcgtgatgagggcatcatcggcgacctgaccgtccgccagaacatccttatcgccctgcaggcaacgcgcggtatgttcaagccgattcccaagaaggaagcggacgccatcgttgacaagtacatgaaggaactcaacgttcgtcccgccgacccggatcgcccggtcaagaatctctccggcggcaaccagcagaaggtgctcattggccgttggctggccacgcaccccgagctgctgattctggacgagccgacccgtggtatcgatatcggtgccaaggctgaaattcagcaggtcgtgcttgacctggcttctcagggcatgggcgttgtcttcatctcctccgagcttgaagaggtcgtgcgtctgtccgacgacatcgaggttctcaaggaccgccacaagatcgcagaaatcgaaaacgacgacaccgtctctcaggcgaccatcgtcgaaaccatcgctaacaccaacgtaaacaccggaaaggaggcatga

SEQ ID NO: 27591 - protein, 504 aa, Bifidobacterium longum bv
MKGITIEFPGVKALDGVDLTLYPGEVHALMGENGAGKSTMIKALTGVYKINAGSIMVDGKPQQFNGTLDAQNAGIATVYQEVNLCTNLSVGENVMLGHEKRGPFGIDWKKTHEAAKKYLAQMGLESIDPHTPLSSISIAMQQLVAIARAMVINAKVLILDEPTSSLDANEVRDLFAIMRKVRDSGVAILFVSHFLDQIYEITDRLTILRNGQFIKEVMTKDTPRDELIGMMIGKSAAELSQIGAKKARREITPGEKPIVDVKGLGKKGTINPVDVDIYKGEVVGFAGLLGSGRTELGRLLYGADKPDSGTYTLNGKKVNISDPYTALKNKIAYSTENRRDEGIIGDLTVRQNILIALQATRGMFKPIPKKEADAIVDKYMKELNVRPADPDRPVKNLSGGNQQKVLIGRWLATHPELLILDEPTRGIDIGAKAEIQQVVLDLASQGMGVVFISSELEEVVRLSDDIEVLKDRHKIAEIENDDTVSQATIVETIANTNVNTGKEA

SEQ ID NO: 27592 - DNA, 2691 bp, Salmonella typhimurium
  CDS (1)..(2691): transl_table=11
gtgagccagcattacggaaaaacggtcgcgctgaacaatatcacgctggacattcccgcccgtagtatggtcgggctgattggtccggacggggtgggtaagtcgagcctgctgtcgctgatttctggcgcgcgggtgattgagcaagggaacgttatcgtcctgggcggcgatatgcgcgatgcgaaacatcgccgcgacgtctgtccgcgcatcgcctggatgccgcaggggctggggaaaaacctttatcacacgttatcggtttatgagaacgtcgattttttcgctcgtctctttggtcatgacaaagctgaacgcgaagcgcgtattaccgagctgctgaacagcaccggcctggcgccgtttcgtgaccgtcctgccgggaagctgtccggtgggatgaaacaaaagctggggttgtgctgtgctctgatttatgacccggaattgctgattcttgatgagcctaccaccggcgtggacccgctctcccgcgctcagttctgggacttaatcgacagtatccgccagcgccagaccaatatgagcgtgttggtcgcaacggcctatatggaagaggcggagcgttttgactggctggtggcgatgaatgcgggcgagatactggcaaccggcagcgcgcagcaactgcgggcaaaaacccatagcgcgacgctggaacaggcgtttatcgccctgttgccagaagcgcagcgccaggcgcataagccggtggtgatcccgccgtatcacgctgagcaggaagagattgccattgaggcgaaagatctgaccatgcgcttcggtaagttcgtcgcggttgaccatgttaatttccgtattccgcgcggcgagatttttggcttcctcggttcaaacggttgcggcaaatcgaccaccatgaaaatgctgaccggtctgcttcccgccagcgaaggccaggcctggctatttggccagccggtagacccgaacgacatcgacacccgtcgccgggtcgggtatatgtcgcaggctttttcgctctataacgaactcaccgtgcggcagaatctggaacttcatgcccgcctgtttcatattccgccagcggagatcccggcgcgcgtcgcgcagatgatcgaacgctttatgctaacggaggtggaagatacgctccccgcttcgttgccgctcggtatccgccagcgtttatcgctggcggtagcggtgatccatcgcccggaaatgctgattcttgatgagccaacgtccggcgttgatccggtcgccagggatatgttctggcagcttatggtcgatctttcgcgtcaggataaggtgacgatttttatctcgacccattttatgaacgaagcggaacgttgcgaccgaatgtcattgatgcacgccggtaaagtgctcgccagcggtacgccgcaggaattggtgcaacagcggggcgcggccaatctggaggcggcgtttatttcctggctacaggaagctgcgggagcggcgcctgaaaccccaataccgccatcccagacgcccgccgcgtcaggtaaaccgtcgcggcagggattgagcttccggcgtttgttcagctacagtcgccgcgaagcgctggagctacgccgcgatccggtacgctcgacgctggcgctgctgggaacggtaattctgatgctgattatgggctatggcatcagtatggacgtggagaacctgcgttttgccgtcctcgatcgtgaccagaccgtcagtagtcaggcatggtcgctcaatctggcgggatcccgctattttatcgaacagccgccgctcgccagctatgacgagcttgaccggcggatgcgttcgggagagctggcggttgccattgagatcccgcctaattttggccgcgatattgctcgcggtacgccagcgcagattggcgtctgggtggatggcgccatgcccagccgcgccgagacggtgaaggggtacgttcaggcgatgcaccaaagctggctgcaggaggcggcaagtcgtcagccgaacccggttaaacaggtcgggctgctcaatattgaaacgcgctatcgctataacccggatgtgaaaagtctgcccgctatcgttccggcggtcattccgctgctgctcatgatgatcccgtcaatgcttagcgccctgagcgtggtgcgggagaaagagctggggtcgatgattaatctgtacgtaacgccgacgacgcgcagcgaatttttgctgggtaaacaactgccgtatatcgcgctgggtatgctgaacttcttgctactgtgcgcgctgtcggtctttgtgttcggcgtgccgctgaaaggcagctttctcacgcttaccctcgcggcgctgctttatgtcatcatcgccaccggtctggggctgctgatctccacgtttatgaagagccaaatcgccgctatttttgggacgtcgattattaccctcattccggcaacacaattttccggcatgatcgatccggtggcttcgctggaaggaccgggaagatggatcggcgagatctacccgaccagtcattttctgacgatcgcgcgcgggacgttttccaaagcgttggatctgtccgatctctggccgttatttatgccgttactgattgccgtcccggtggtgatgggtctgagcattctgctgctgaaaaaacaggaggggtaa

SEQ ID NO: 27593 - protein, 896 aa, Salmonella typhimurium
MSQHYGKTVALNNITLDIPARSMVGLIGPDGVGKSSLLSLISGARVIEQGNVIVLGGDMRDAKHRRDVCPRIAWMPQGLGKNLYHTLSVYENVDFFARLFGHDKAEREARITELLNSTGLAPFRDRPAGKLSGGMKQKLGLCCALIYDPELLILDEPTTGVDPLSRAQFWDLIDSIRQRQTNMSVLVATAYMEEAERFDWLVAMNAGEILATGSAQQLRAKTHSATLEQAFIALLPEAQRQAHKPVVIPPYHAEQEEIAIEAKDLTMRFGKFVAVDHVNFRIPRGEIFGFLGSNGCGKSTTMKMLTGLLPASEGQAWLFGQPVDPNDIDTRRRVGYMSQAFSLYNELTVRQNLELHARLFHIPPAEIPARVAQMIERFMLTEVEDTLPASLPLGIRQRLSLAVAVIHRPEMLILDEPTSGVDPVARDMFWQLMVDLSRQDKVTIFISTHFMNEAERCDRMSLMHAGKVLASGTPQELVQQRGAANLEAAFISWLQEAAGAAPETPIPPSQTPAASGKPSRQGLSFRRLFSYSRREALELRRDPVRSTLALLGTVILMLIMGYGISMDVENLRFAVLDRDQTVSSQAWSLNLAGSRYFIEQPPLASYDELDRRMRSGELAVAIEIPPNFGRDIARGTPAQIGVWVDGAMPSRAETVKGYVQAMHQSWLQEAASRQPNPVKQVGLLNIETRYRYNPDVKSLPAIVPAVIPLLLMMIPSMLSALSVVREKELGSMINLYVTPTTRSEFLLGKQLPYIALGMLNFLLLCALSVFVFGVPLKGSFLTLTLAALLYVIIATGLGLLISTFMKSQIAAIFGTSIITLIPATQFSGMIDPVASLEGPGRWIGEIYPTSHFLTIARGTFSKALDLSDLWPLFMPLLIAVPVVMGLSILLLKKQEG

SEQ ID NO: 27594 - DNA, 1476 bp, Treponema denticola
  CDS (1)..(1476): transl_table=11
atgatcaatctgaatgatgtaagctacaaatataacgatactgcggcacaggcaattcaacatatatctctgtccgtaaaaaaaggagaattggttgttattaccggaaaaagcggctgcggaaaaacaacgctgtttcgttgtgtgaatgggctgtgtccccgtttttatgaaggagaaataaccggaagtcttacattaaacggcaaagttctttcgtcgatgcgtatatgcgatatatcaaacattgcagcgtccgtttttcaaaatcctgaaagccagttttttaccaccgatgtactttccgaccttgtatatccgtgcgaaaattgcggtatagaaaaagaagaaatacaagagcggctgcaccgtgttacaaaactgctatcgctggaaccgcttttgaacagaaagctttcggaactctcaggaggtgaaaaacaaaagattgcaatcgcttcggttttaatgttggacacgcgcgttgtactgatggacgagccgtcttccaatctcgattatcaatccgtcgaattgcttacacaaatacttgcacagctaaaatcaaaaggctacacgctgctcatcattgagcaccggctgcattatttggcggaactctgcgaccggctcattgtaatggaaaacgggtccatagtacgggaatatgaaaaagatttgttatgcactatcggtaatgatgagttccataaacaaggacttcgcggcttgcatttatttcaaaataacagcaatacactgattactccgcagcggcaacatacagacaaacggttattgacgctgcatgatattcattttggctatcggaaaaacactgaggttttaaaaggaatacatctttcgatatatcccggagacaagattgctttaatcggtaaaaacggctgcggaaaaacaacgctggggaaaatcctgtgcggattaaaaaaggaacagagcggtaccgttttgttggacggaagatcattccctgcaagggtgcgcagtaagaccgccggttacgtgatgcaaaatgtagactttcagctttttgggtgcagcgtctatgatgatttattgctcggtaacgaagcactgcccgacaaagaaaaccgaatacaaacagtgcttgaaaagctcagtctttcggccttgcaagaacaacacccgacaacgctatcgatgggacaaaaacagcgcttggtagtcgccgcatcatttttacaaaataagcggctcactatttttgacgaaccgacaagcggtttggattacggcagtatgcaaaatgtctgtgcgttaatcgattcgataacgggcaagacaaacgcctccgttattatcacgcatgattatgagttcattttaaacacctgcaatagagcggttcttttggaagacggacaaataaaggaagattttcaattgaacggttcgatgcagttggaatatatttttaaagagaggttataa

SEQ ID NO: 27595 - protein, 491 aa, Treponema denticola
MINLNDVSYKYNDTAAQAIQHISLSVKKGELVVITGKSGCGKTTLFRCVNGLCPRFYEGEITGSLTLNGKVLSSMRICDISNIAASVFQNPESQFFTTDVLSDLVYPCENCGIEKEEIQERLHRVTKLLSLEPLLNRKLSELSGGEKQKIAIASVLMLDTRVVLMDEPSSNLDYQSVELLTQILAQLKSKGYTLLIIEHRLHYLAELCDRLIVMENGSIVREYEKDLLCTIGNDEFHKQGLRGLHLFQNNSNTLITPQRQHTDKRLLTLHDIHFGYRKNTEVLKGIHLSIYPGDKIALIGKNGCGKTTLGKILCGLKKEQSGTVLLDGRSFPARVRSKTAGYVMQNVDFQLFGCSVYDDLLLGNEALPDKENRIQTVLEKLSLSALQEQHPTTLSMGQKQRLVVAASFLQNKRLTIFDEPTSGLDYGSMQNVCALIDSITGKTNASVIITHDYEFILNTCNRAVLLEDGQIKEDFQLNGSMQLEYIFKERL

SEQ ID NO: 27596 - DNA, 1473 bp, Bacillus subtilis
  CDS (1)..(1473): transl_table=11
atgcaagcctttgatgagcttctgacggttgagcagctcagcttctcttatgaagaagacgagaaaccggtttttcaagacatttcgtttgagcttcaaaaaggagaatgtgttttattattaggaccgagcggatgcggtaaaagctcgctcgccctttgtttaaacggtctatatccggaggcttgcgacggcattcagtccggacatgtatttctatttcaaaagccggtcacagatgctgaaacctccgaaacgattactcagcatgccggggtcgtttttcaggatcctgatcagcagttctgcatgctgacggtggaggacgaaatagcgttcgggctggaaaatctgcaaattccaaaagaagaaatgacagagaaaatcaacgccgtattaggaaaattacgcattacccatttaaaagaaaaaatgatctcaaccctttcaggaggacaaaagcagaaagtggctctcgcctgtattttggcgatggagcctgagcttattattttagatgagccgacctctcttttagaccctttctcagctcgggagttcgttcatctgatgaaggatcttcagcgggaaaaaggtttcagcctcctcgtcattgagcaccagcttgatgaatgggcgccttggattgagagaacgatcgtactcgacaaatcaggcaaaaaggcactggatggcctgacgaaaaatctatttcagcatgaagcggagacactaaagaaattgggcatcgcaattccaaaggtctgtcatctgcaggaaaagctgagtatgccgtttactttatcaaaagagatgctgttcaaagagcctattcctgccgggcatgtcaaaaagaagaaagccccttctggggagagtgtgcttgaagtcagcagcctttcgttcgcgagaggacagcaggcgattttcaaagacatcagcttttcgttgcgcgaaggctctttaacggcgcttgtcggtccgaacggaactggaaaatcgacgctcctatcagttctggccagtctcatgaaaccgcaaagcggcaaaatccttctctatgatcagccgctgcagaaatataaagaaaaagaattgcgtaaacggatgggatttgtttttcaaaaccctgagcatcaattcgtcaccgatacggtgtatgacgagcttctgttcggccagaaagcaaatgctgaaactgagaaaaaagcgcaacacctgctgcagcgttttggtcttgcgcatttggctgatcatcatccgtttgcgatcagccaagggcaaaaacggcgactgagcgtagctactatgctcatgcatgacgtaaaggttttattattagacgaaccaacctttggccaggatgcccgcacggcggctgaatgcatggaaatgattcaacgtatcaaggcagagggaactgctgtccttatgattacacaaggatatggagcaagtctcttcgtatgctga

SEQ ID NO: 27597 - protein, 490 aa, Bacillus subtilis
MQAFDELLTVEQLSFSYEEDEKPVFQDISFELQKGECVLLLGPSGCGKSSLALCLNGLYPEACDGIQSGHVFLFQKPVTDAETSETITQHAGVVFQDPDQQFCMLTVEDEIAFGLENLQIPKEEMTEKINAVLGKLRITHLKEKMISTLSGGQKQKVALACILAMEPELIILDEPTSLLDPFSAREFVHLMKDLQREKGFSLLVIEHQLDEWAPWIERTIVLDKSGKKALDGLTKNLFQHEAETLKKLGIAIPKVCHLQEKLSMPFTLSKEMLFKEPIPAGHVKKKKAPSGESVLEVSSLSFARGQQAIFKDISFSLREGSLTALVGPNGTGKSTLLSVLASLMKPQSGKILLYDQPLQKYKEKELRKRMGFVFQNPEHQFVTDTVYDELLFGQKANAETEKKAQHLLQRFGLAHLADHHPFAISQGQKRRLSVATMLMHDVKVLLLDEPTFGQDARTAAECMEMIQRIKAEGTAVLMITQGYGASLFVC

SEQ ID NO: 27598 - DNA, 1707 bp, Enterococcus faecalis
  CDS (1)..(1707): transl_table=11
atgaaaaaaccaatcattacttttaataatttttcctttcaatatcatagccaatctgaaccaacattaaaggggattcaattaaccatctatgaaggagaaaaggttttaatcgttgggcctagtggtagtggtaaatcaacattggcgcaatgtatcaacgggttaattcccaatatttatgaaggtgagattcaaggaacagctacggttgctggtaaaaatatccaagaaacaagtctatttgatttgtcttttgatgtaggaactgttttacaagataccgatgggcagtttatcggtttaacggttgctgaggatattgcttttgctttagaaaacgatgcagttgaacaagcagaaatgaaaaaagcggttcagaaatggtccgagattgttgagctgaatcagttattgcaacaccgtccacaagatttgtcaggtggtcaaaaacaacgtgtatctatggcgggcgttctaattaaccaatcaaaaattttactttttgatgaacctttggctaatcttgacccacgagcgggacaagaaacaatgactttgattgacaccattcaacaagaaacaaaagcgactgttttaataatagaacatcgcttagaggacgttctttgcgaatcagttgatcgaattattgtcatgaatgagggcacaattatttctgatacaacgccagatgaattgttacgtcaagatacgttgacccaacaagggattcgtgaacctttgtacgttacagccatgaaatatgctgggattgatttaacacaagttagtcatttagacaaattagccgaagtatcaggcgaaacggttttgcctaaaatgacacagtggtctgtccaacctagttcagttagtgcagtcaaaggagctgaactattacgtttggaacaagtgtcctatcaatatgatcgtcacggtgaaaaagtgttagatgacttctcagtaactattcatcatggagaaatgatcagcattgtaggaaaaaatggtgccgggaagtctacactttctaaaataatttgcgggttcatcacgcctcaatctggcaagattttatgggaaggacaggatttttccaattattcaatcaaagaacgtgcagataaaattggttatgtgatgcaaaatcccaatcaaatgatttctaaaaaaatgatttttgaagaagtagctttaggattagttttacgagatgtgccacaagcagaaattgaggaacgtgtgacgaatattttacatatttgtgggctgtatcccttccggaactggccgatttctgcgttgagttttgggcagaaaaaacgggtaactattgcatcaatcttagttttagaacctgaattattaattttagatgaaccaacagctgggcaagattttaaacattatacagaaatgatgacatttttagaagaattgaaccgcttaggtgtgactattttaatgatcactcacgatatgcacttaatgttggaatatacaacacgtgcgttagtagtttgtgatggacgtttactagcagatgcgactccagttgctgttttaacagatgaaaaattaattcaagcagcttctttaaaagaaacaagcttgtttacctttgctaaagcgttaggcttggaaaatcccttgctatttacggaaaaatttgttgcttacgatcgtgaggtgcgttttggatga

SEQ ID NO: 27599 - protein, 568 aa, Enterococcus faecalis
MKKPIITFNNFSFQYHSQSEPTLKGIQLTIYEGEKVLIVGPSGSGKSTLAQCINGLIPNIYEGEIQGTATVAGKNIQETSLFDLSFDVGTVLQDTDGQFIGLTVAEDIAFALENDAVEQAEMKKAVQKWSEIVELNQLLQHRPQDLSGGQKQRVSMAGVLINQSKILLFDEPLANLDPRAGQETMTLIDTIQQETKATVLIIEHRLEDVLCESVDRIIVMNEGTIISDTTPDELLRQDTLTQQGIREPLYVTAMKYAGIDLTQVSHLDKLAEVSGETVLPKMTQWSVQPSSVSAVKGAELLRLEQVSYQYDRHGEKVLDDFSVTIHHGEMISIVGKNGAGKSTLSKIICGFITPQSGKILWEGQDFSNYSIKERADKIGYVMQNPNQMISKKMIFEEVALGLVLRDVPQAEIEERVTNILHICGLYPFRNWPISALSFGQKKRVTIASILVLEPELLILDEPTAGQDFKHYTEMMTFLEELNRLGVTILMITHDMHLMLEYTTRALVVCDGRLLADATPVAVLTDEKLIQAASLKETSLFTFAKALGLENPLLFTEKFVAYDREVRFG

SEQ ID NO: 27600 - DNA, 1722 bp, Lactobacillus johnsonii
  CDS (1)..(1722): transl_table=11
atgacagaacctattattgaatttaaagatttttcatttaaatataatagccaagcagaacctactcttaaaaatattaatttgaagattaataaaggagaaaaaattcttttggctggaccttcaggcagcggcaaatccacaattggtcgctgccttaatggtcttattccaaatatcgatcaaggtgaagttaaaggaaaatgtttagtgaatggaaaagatattactagcacaagtctttttgatttttcattcactacttcaactatcttacaagatgctgatagtcaattcattggcctaacagttggtgaagatatcgcttttgctttagaaaatgactgtcaacctaaagataaaatgcaccaaactgtaaaccagtgggctaatgagttaaaaatcaaagaactacttactcaatctccacaaagtctttctggaggtcaaaaacaaattgttgccttagctggagttttagtcgacgagtcacctattttattattcgatgagccacttgctaatctagatcctgcttctgggcttaaaacgatggcaattatcgataaaattcaaaaggaacttaatgcgacagttataattattgaacatcgcgtagaagaagtcctcagtcaactaattgacagaattattttagtaaatgaaggtacgattgttgctgatcagcctactaatcaattgctccactcaaacaccttagaaaaaattggcgttagagagcccctatatctaaaggctcttacagccgctgatgtaaatctaagttctattaaagaagtagaccagatatcaactctccctgtttctgaaaaaatcagcgataaattagcagcttggactaaacaagctaaaatcaccaaaaaagaagtagataatttaccattattaaaattagatcacgttggtcatcaatacagcaagaatcagccctatcccttaaaagatgtttctactactattaatcagggcgactttatttcaatagttggacaaaatggtgcaggtaaaactaccctttgccgaactatttgtggttttatttctaacgaaggaaaaatcactcttaaggaccagaatttaagtgacttatcaattaaagagagagccgaaaaaattggctacgtaatgcaagatcctaatcaaatgatttctcaaaaaatgatctttgatgaaattgctctaggtttacgtttacgcaatgttgatgaagaaacaattaagcaaaaagttgaccaaacgttgaaaatttgtggactttatccctttagacattggccaatttccgcattaagttttggacagaaaaagcgtgtcacaattgctgcaattttggtcttagaaccagagattattattttagatgagccaactgctggtcaagactggaagacctatacggaaattatgagctttttaaagcatctaaacactatggggaaaacaatcattattatcacgcatgatatgcacttgatgcttgagtacactagtcgatctctagcatttgctaagggaaaattaattgcagatactaccccaattgaattattaaccaatcaagctttaattaaagaagcctcattaaagcgcactagtctttacgacctggcaaaacattataacttacctgatccaaataaatttgtgcaggcttatattaattttgaacaacaaaactggaaggatgaagattatgaatga

SEQ ID NO: 27601 - protein, 573 aa, Lactobacillus johnsonii
MTEPIIEFKDFSFKYNSQAEPTLKNINLKINKGEKILLAGPSGSGKSTIGRCLNGLIPNIDQGEVKGKCLVNGKDITSTSLFDFSFTTSTILQDADSQFIGLTVGEDIAFALENDCQPKDKMHQTVNQWANELKIKELLTQSPQSLSGGQKQIVALAGVLVDESPILLFDEPLANLDPASGLKTMAIIDKIQKELNATVIIIEHRVEEVLSQLIDRIILVNEGTIVADQPTNQLLHSNTLEKIGVREPLYLKALTAADVNLSSIKEVDQISTLPVSEKISDKLAAWTKQAKITKKEVDNLPLLKLDHVGHQYSKNQPYPLKDVSTTINQGDFISIVGQNGAGKTTLCRTICGFISNEGKITLKDQNLSDLSIKERAEKIGYVMQDPNQMISQKMIFDEIALGLRLRNVDEETIKQKVDQTLKICGLYPFRHWPISALSFGQKKRVTIAAILVLEPEIIILDEPTAGQDWKTYTEIMSFLKHLNTMGKTIIIITHDMHLMLEYTSRSLAFAKGKLIADTTPIELLTNQALIKEASLKRTSLYDLAKHYNLPDPNKFVQAYINFEQQNWKDEDYE

SEQ ID NO: 27602 - DNA, 1584 bp, Oceanobacillus iheyensis
  CDS (1)..(1584): transl_table=11
gtgaacaaagcgcatcttgatcaacccctatttaaacttgataatttttcatttatgtacaatacaagcgaaactgctagtattcatcagttatctttatcgatctatgaaaatgacattaccattctaatgggggcaagtggttctgggaaaagtactttggcactttgtttaaatggactttatccagaagctgtagaaggaaccacaaaaggaaatattttatataagggtaagaatattgccgagtacccaagaggtataattaaccaagaggttggcatcgtatttcaagacccggaaagtcaattttgtatggttcgagtggaagatgaattagcttttgtactagaaaacctagctattccacgttctgaaatgaaaaaaaagataaagaaggtattacaacaaataggaatgctcgagtacatagatgccgacattcaccgtttatccggaggccagaaacaaaaaatagctttagcttctgtcttactaatggagccaaagtatatcattttagatgaaccaacagcgaatctcgaccctatgtccagattagaatttattgagcttataattgcaatacaaaagaaaacaaataccggcgtactaattattgaacatcaagtcgatgattgggaaatgtatgcagatcggctagtcgtattaagtaaagataatcacattctaatagatgaaaagcccgaaacagctttccaattacatcaaaatatgctgcgaaaccaacaaattgcaattccaatgaagtatctggataaccaagaaactattaagaaagtatcgcacgaaaaatctatgcctgtgtgtttagaagttcatcatcttcactattaccagaagaagtctgctatattaaaggatatttctttttcagttaagcaaggtgaatttattacgatattaggagaaaatggtgctggaaaatctaccctactacaatgcttaatcggattaaaaaagtatcacaatggtaatatcttatttcaaggaaaagatttacaagcatgggatcggaaaatattatcgaaacatactgggtttgtttttcaacaacccgagcatcaatttatttgtgatacggtatttgatgaggtcgcttttggtatgcgcttaaacaattatactactagtgaaattaatcatcgtacgatttctttactgcaggcatttcgactattggatcatcaatggaagaatccttttacactaagcggaggtcaaaaacgtcgtttaagtgtagctacaatgttagatgaaacaccagatttacttttatttgatgaacctacatttggacaggatgctcatactacaaaagaattgatgaacatgatattggaactgcaagctcaaggaacagctattatttttgtaacacatgatatggatttagtagatacatattgtgaacgggcattagtgatagataaaggaagcgtacgttttgatgggaatccacaatcgctttggaatcagaaagagttattacaagatactagattaagagaaccttatcgtgttcgagaatctgttaaacgagaagtggtgcatatgcaatga

SEQ ID NO: 27603 - protein, 527 aa, Oceanobacillus iheyensis
MNKAHLDQPLFKLDNFSFMYNTSETASIHQLSLSIYENDITILMGASGSGKSTLALCLNGLYPEAVEGTTKGNILYKGKNIAEYPRGIINQEVGIVFQDPESQFCMVRVEDELAFVLENLAIPRSEMKKKIKKVLQQIGMLEYIDADIHRLSGGQKQKIALASVLLMEPKYIILDEPTANLDPMSRLEFIELIIAIQKKTNTGVLIIEHQVDDWEMYADRLVVLSKDNHILIDEKPETAFQLHQNMLRNQQIAIPMKYLDNQETIKKVSHEKSMPVCLEVHHLHYYQKKSAILKDISFSVKQGEFITILGENGAGKSTLLQCLIGLKKYHNGNILFQGKDLQAWDRKILSKHTGFVFQQPEHQFICDTVFDEVAFGMRLNNYTTSEINHRTISLLQAFRLLDHQWKNPFTLSGGQKRRLSVATMLDETPDLLLFDEPTFGQDAHTTKELMNMILELQAQGTAIIFVTHDMDLVDTYCERALVIDKGSVRFDGNPQSLWNQKELLQDTRLREPYRVRESVKREVVHMQ

SEQ ID NO: 27604 - DNA, 1677 bp, Streptococcus agalactiae serotype III
  CDS (1)..(1677): transl_table=11
atgaaagattttattgaatggaaggattttacctttcaatatgacgttcaatctgaaccaactttaaaagggattaacttaagcattcctaaaggtgaaaaggtcttgatattaggaccttcagggtcggggaagtcaacgcttggtcattgtttaaatggtattatcccaaatactcataaaggccaatatagtggtatttttacgattaaccataaaaatgcttttgacttgtcaatatatgacaagtctcatttagtttctacggttttacaagacccagatggccaatttataggattgacagtagcagaagatattgcttttgcattagaaaatgacgttgtagcacaggaagaaatgacctctatcgttgaaatgtgggcaaaacgtttagaaatagctcctcttttgtctaaacgtccacaagacttgtcgggaggacaaaaacaacgggttagtttagctggagttttagtagacgatagcccaattctattatttgatgagcctttggctaatctagatccacaatcgggacaagatatcatggcattggttgaccgtattcatcaagagcaagatgcgaccactattattattgaacatcgattggaagatgttctttatgagcgagtagatcgtgtagttctttttagtgatggacaaattatttataatggggagccggatcaacttttaaaaactaattttttatctgaatatggtattcgagaaccactgtatatttctgccctcaaaaatttaggatatgactttgaaaaacaaaatacaatgacgtctattgatgactttgatttcagtgaactattgatacctaaaatgcgagcattagatttagataaacatacagataaattattatcagtacagcatttgtcggtgtcatatgatttagagaataatactttagatgatgtttcgtttgatttatataaaggtcagcggttagctatcgttgggaaaaatggtgcaggtaaatctactttagctaaagcgttatgtcaatttatccctaataatgctactctaatttataataatgaagatgtcagtcaagactctataaaagaaagagcagaacgaattggctatgttttgcaaaatcccaatcagatgataagtcaagcgatggtttttgatgaagttgctctgggtctccgtttaagaggttttagtgataatgatatagaaagtcgtgtctacgatatattaaaggtttgtgggctctaccaatttaggaattggcctatatcggctctatcattcggtcagaaaaaacgtgttacgattgcttcgatactgattttaaatccagaagttattattttggatgaaccaacagctggtcaagatatgaagcattatactgaaatgatgtctttccttgacaaactaagttgtgatggacatagcattgttatgattacacatgatatgcagcttatgttagagtatacagatcgtgcaattgtaatcgacaatggtcttattgctgcagatgatcatcctattaacatcctttcaaatacagagcttttgaaaaagactcatttaaagaaaacgagtttatttgctttagcagacagattagggatatctccacagaaactaacacaatggtacattgataatcaaggaggtaagaatggctaa

SEQ ID NO: 27605 - protein, 558 aa, Streptococcus agalactiae serotype III
MKDFIEWKDFTFQYDVQSEPTLKGINLSIPKGEKVLILGPSGSGKSTLGHCLNGIIPNTHKGQYSGIFTINHKNAFDLSIYDKSHLVSTVLQDPDGQFIGLTVAEDIAFALENDVVAQEEMTSIVEMWAKRLEIAPLLSKRPQDLSGGQKQRVSLAGVLVDDSPILLFDEPLANLDPQSGQDIMALVDRIHQEQDATTIIIEHRLEDVLYERVDRVVLFSDGQIIYNGEPDQLLKTNFLSEYGIREPLYISALKNLGYDFEKQNTMTSIDDFDFSELLIPKMRALDLDKHTDKLLSVQHLSVSYDLENNTLDDVSFDLYKGQRLAIVGKNGAGKSTLAKALCQFIPNNATLIYNNEDVSQDSIKERAERIGYVLQNPNQMISQAMVFDEVALGLRLRGFSDNDIESRVYDILKVCGLYQFRNWPISALSFGQKKRVTIASILILNPEVIILDEPTAGQDMKHYTEMMSFLDKLSCDGHSIVMITHDMQLMLEYTDRAIVIDNGLIAADDHPINILSNTELLKKTHLKKTSLFALADRLGISPQKLTQWYIDNQGGKNG

SEQ ID NO: 27606 - DNA, 1677 bp, Streptococcus agalactiae serotype V
  CDS (1)..(1677): transl_table=11
atgaaagattttattgaatggaaggattttacctttcaatatgacgttcaatctgaaccaactttaaaagggattaacttaagcattcctaaaggtgaaaaggtcttgatattaggaccttcagggtcggggaagtcaacgcttggtcattgtttaaatggtattatcccaaatactcataaaggccaatatagtggtatttttacgattaaccataaaaatgcttttgacttgtcaatatatgacaagtctcatttagtttctacggttttacaagatccagatggccaatttataggattgacagtagcagaagatattgcttttgcattagaaaatgatgttgtagcacaggaagaaatggcctctatcgttgaaatgtgggcaaaacgtttagaaatagctcctcttttgtctaaacgtccacaagacttgtcgggaggacaaaaacaacgggttagtttagctggagttttagtagacgatagcccaattctattatttgatgagcctttggctaatctagatccacaatcgggacaagatatcatggcattggttgaccgtattcatcaagagcaagatgcgaccactattattattgaacatcgattggaagatgttttttatgagcgagtagatcgtgtagttctttttagtgatggacaaattatttataatggggagccggatcaacttttaaaaactaattttttatctgaatatggtattcgagaaccactgtatatttctgctctcaaaaatttaggatatgactttgaaaaacaaaatacaatgacgtctattgatgactttgatttcagtgaactattgatacctaaaatgcgagcattagatttagataaacatacagataaattattatcagtacagcatttgtcggtgtcatatgatttagagaataatactttagatgatgtttcgtttgatttatataaaggtcagcggttagctatcgttgggaaaaatggtgcaggtaaatctactttagctaaagcgttatgtcaatttatccctaataatgctactctaatttataataatgaagatgtcagtcaagactctataaaagaaagagcagaacgaattggctatgttttgcaaaatcccaatcagatgataagtcaagcgatggtttttgatgaagttgctctgggtctccgtttaagaggttttagtgataatgatatagaaagtcgtgtctacgatatattaaaggtttgtgggctctaccaatttaggaattggcctatatcggctctatcattcggtcagaaaaaacgtgttacgattgcttcgatactgattttaaatccagaagttattattttggatgaaccaacagctggtcaagatatgaagcattatactgaaatgatgtctttccttgataaactaagttgtgatggacataccattgttatgattacacatgatatgcagcttatgttagagtatacagatcgtgcaattgtaatcgacaatggtctgattgttgcagatgatcatcctattaacatcctttcaaatacagagcttttgaaaaagactcatttaaagaaaacgagtttatttgctttagcagacagattagggatatctccacagaaactaacacaatggtacattgataatcaaggaggtaagaatggctaa

SEQ ID NO: 27607 - protein, 558 aa, Streptococcus agalactiae serotype V
MKDFIEWKDFTFQYDVQSEPTLKGINLSIPKGEKVLILGPSGSGKSTLGHCLNGIIPNTHKGQYSGIFTINHKNAFDLSIYDKSHLVSTVLQDPDGQFIGLTVAEDIAFALENDVVAQEEMASIVEMWAKRLEIAPLLSKRPQDLSGGQKQRVSLAGVLVDDSPILLFDEPLANLDPQSGQDIMALVDRIHQEQDATTIIIEHRLEDVFYERVDRVVLFSDGQIIYNGEPDQLLKTNFLSEYGIREPLYISALKNLGYDFEKQNTMTSIDDFDFSELLIPKMRALDLDKHTDKLLSVQHLSVSYDLENNTLDDVSFDLYKGQRLAIVGKNGAGKSTLAKALCQFIPNNATLIYNNEDVSQDSIKERAERIGYVLQNPNQMISQAMVFDEVALGLRLRGFSDNDIESRVYDILKVCGLYQFRNWPISALSFGQKKRVTIASILILNPEVIILDEPTAGQDMKHYTEMMSFLDKLSCDGHTIVMITHDMQLMLEYTDRAIVIDNGLIVADDHPINILSNTELLKKTHLKKTSLFALADRLGISPQKLTQWYIDNQGGKNG

SEQ ID NO: 27608 - DNA, 1677 bp, Streptococcus mutans
  CDS (1)..(1677): transl_table=11
atgaaaccatttattgaattcaaggatttttcttttaaatatgatgctcaggcagagccaaccttgaaagaaatcacactttctattgagaaaggggaaaaggtactgattattgggccgtctggaagtggaaagtcaaccatagggcactgtttaaatggcattattcctaatatttataaagggcaggctgaaggttctttgacaatagatggcaaggatgtctttgatctatctatttatgaaaaatctcatcttgtttcaactgttttacaagatccagatgggcaatttattggcttaacagtagcagaagatcttgcttttgccttggaaaatgattgtgtagcccatgagacaatgtttgagagggtggacacttgggcagacaaattagatttaaaagaattgctccaacatcgtccgcaggatttatcaggcggacaaaagcaaagagtcagtttggcaggtgttatgattgatgaaagtcctgttttattatttgacgaacctttagctaatctagatccaaaatctggtcaggacaccatagatttgattgatcatcttcatcagacggcagaaacaactactattattattgaacatcgcttagaagatgttctttatcgacctgttgatcgggttatactgattaatgaaggtcaagttctttttaacggaagtcctaatgatcttttaaagactagtcttttacaagaaaatggtattcgtgagcccctttatgtgactgttttacgtcatcttggtttggatatcaaaaatacttctcatttagccaatcttgaacaacttgatctctctggtgtcagttttgcaggcgatatttccctaaaagaacctcaagagccacaagtcttgtttgatattcaacaccttaattttgcctatagttcagagcgtcccattttgaagaatctctcttttacccttaataagggggaacgtcttgctattgttggcaaaaatggtgcaggtaaatcaacgctggccaaagctctttgtcagtttatttcctacgctggccaaatcttttatcaaggccaggatattgcatctgattctatcaaggaacgctccgagcgtattggctatgttctccaaaatcctaatcaaatgattagtcaaacgatgatttttgatgaagttgctctgggactccgtttacgcggtgttgatgacagtcagatcgaaaagcgcgttttgaaggttttaaagacctgcggtctttatgagtttcgcaagtggcccatttcagccctttccttcgggcagaaaaaacgcgtgaccattgcttctattttggtattgaatccagaggtgattcttttagatgaaccgacagcaggacaagataagaagcattatacagaaatgatgtctttcttaaatgatttgcatgctttggggcatactattattatgattacacatgatatgcaactcatgttagaatattctgatcgagccttggttattagtgatggtcaaattctagctgatcaaagtcccattactctctttaatcaaccggacatactaagaatagccaatcttaaacaaactagcatttttgatttggcgcaaagactgaattgtgacccaattgctctgacacattactatattgatcagcaaggaggagaagatgaataa

SEQ ID NO: 27609 - protein, 558 aa, Streptococcus mutans
MKPFIEFKDFSFKYDAQAEPTLKEITLSIEKGEKVLIIGPSGSGKSTIGHCLNGIIPNIYKGQAEGSLTIDGKDVFDLSIYEKSHLVSTVLQDPDGQFIGLTVAEDLAFALENDCVAHETMFERVDTWADKLDLKELLQHRPQDLSGGQKQRVSLAGVMIDESPVLLFDEPLANLDPKSGQDTIDLIDHLHQTAETTTIIIEHRLEDVLYRPVDRVILINEGQVLFNGSPNDLLKTSLLQENGIREPLYVTVLRHLGLDIKNTSHLANLEQLDLSGVSFAGDISLKEPQEPQVLFDIQHLNFAYSSERPILKNLSFTLNKGERLAIVGKNGAGKSTLAKALCQFISYAGQIFYQGQDIASDSIKERSERIGYVLQNPNQMISQTMIFDEVALGLRLRGVDDSQIEKRVLKVLKTCGLYEFRKWPISALSFGQKKRVTIASILVLNPEVILLDEPTAGQDKKHYTEMMSFLNDLHALGHTIIMITHDMQLMLEYSDRALVISDGQILADQSPITLFNQPDILRIANLKQTSIFDLAQRLNCDPIALTHYYIDQQGGEDE

SEQ ID NO: 27610 - DNA, 1683 bp, Streptococcus pneumoniae
  CDS (1)..(1683)
atgaaagaagctataattgagtggaaggatttctctttccggtatgaaacacaacaagaaccgaccttgcaagggatagacttgaccatttacaagggagagaaagtcttaattgttggaccatctgggtcaggtaaatctaccttgggtcagtgtttgaatgggattattcccaatatttacaagggtcagacatatggagaatttttgataaagggtcaagtagcctttgatatgagcatctatgataagtctcatctggttagcacagttttgcaggatacagatgggcagtttattggcttgtctgtggcagaagatttggcgtttgctctggaaaatgatgtgacagccctagatgagatgaaaggtcgtgtttataaatgggctgaaaagctggaccttcttcctttactggatcagcgtcctcaggatttgtcaggtggacaaaagcagcgagtcagtctggctggtgtcttgattgatgaaagtccgattctcttgtttgatgagccactcgccaatctagatcccaagtcaggtcaggatattatcgaattgattgaccagattcataaggaagaggggacgacgactcttattatcgagcaccgtttggaggacgttctgcatcgccctgtggatcggattgtcttgataaacgatggtcgtatcctttttaatgggagccctgaccagttgcttgcgactgatttattgactcaaaatggaattcgagaacccctttatctaacgactctccgtcaattaggtgtggacttagtcaaggaagaacaattagcgaatctggataacttgtctatctcaaaaggtcaggttcagttgcagaatgaactggcaaaagaaaccccagcattgcagtcactctttagactagaggaagtatctttttcttatgatgatagaccgattttaaaatccctacatttagatattaaaaagggtgaaaagattgctattgtcggaaaaaatggagcagggaaatcaactctagccaaggctataagtagctttattcagacggaaggacgctatctttgggaaaaacaggatataaaaggcgattctgttgcagagcgggcggaacgagtaggatatgtgctacaaaatcctaatcaaatgatttcaaccaatatgatttttgatgaggtggctctagggctccgtttgcgaggtgtggatgagaaggaaattgaaacgagagtatatgaaaccttgaaaatctgtggactttatgaattccgtaattggcctatttctgccctgtcatttggtcagaaaaaacgtgtcaccattgcttcaattttggtcttaggagctgaaattattctcctagatgaaccgactgcaggtcaagatcagaagaactatactgagattatggaatttctcgaagagttacatcaaaaagggcataccattgtcatgattacccatgatatgcaattgatgctggattattcagaccgggtccttgtcatggtggatggagaattgattgccgatactgttccagccagtctgttgagcgatcctgagctgttagtaaaagccaatctaaaagaaacctccatctttaacttggctaagaaactagatgtggatccactggatttaacggcattttacaaagaaaggagagagggatgcaagctaaattaa

SEQ ID NO: 27611 - protein, 560 aa, Streptococcus pneumoniae
MKEAIIEWKDFSFRYETQQEPTLQGIDLTIYKGEKVLIVGPSGSGKSTLGQCLNGIIPNIYKGQTYGEFLIKGQVAFDMSIYDKSHLVSTVLQDTDGQFIGLSVAEDLAFALENDVTALDEMKGRVYKWAEKLDLLPLLDQRPQDLSGGQKQRVSLAGVLIDESPILLFDEPLANLDPKSGQDIIELIDQIHKEEGTTTLIIEHRLEDVLHRPVDRIVLINDGRILFNGSPDQLLATDLLTQNGIREPLYLTTLRQLGVDLVKEEQLANLDNLSISKGQVQLQNELAKETPALQSLFRLEEVSFSYDDRPILKSLHLDIKKGEKIAIVGKNGAGKSTLAKAISSFIQTEGRYLWEKQDIKGDSVAERAERVGYVLQNPNQMISTNMIFDEVALGLRLRGVDEKEIETRVYETLKICGLYEFRNWPISALSFGQKKRVTIASILVLGAEIILLDEPTAGQDQKNYTEIMEFLEELHQKGHTIVMITHDMQLMLDYSDRVLVMVDGELIADTVPASLLSDPELLVKANLKETSIFNLAKKLDVDPLDLTAFYKERREGCKLN

SEQ ID NO: 27612 - DNA, 1683 bp, Streptococcus pneumoniae
  CDS (1)..(1683): transl_table=11
atgaaagaagctataattgaatggaaggatttctctttccggtatgaaacacaacaagaaccgaccttgcaagggatagacttgaccatttacaagggagagaaagtcttaattgttggaccatctgggtcaggtaaatctaccttgggtcagtgtttgaatgggattattcccaatatttacaagggtcatacatatggagaatttttgataaagggtcaagcagcctttgatatgagcatctatgataagtctcatctggttagcacagttttgcaggatacagatgggcagtttattggcttgtctgtggcagaagatttggcgtttgctctggaaaatgatgtgacagccctagatgagatgaaaggtcgtgtttataaatgggctgaaaagctggaccttcttcctttactggatcagcgccctcaggatttgtctggtgggcaaaagcagcgagtcagtctagctggtgtcttgattgatgagagtccgattctcttgtttgatgagccactcgccaatcttgatcccaagtcaggtcaggatattatcgaattgattgaccagattcataaggaggaggggacgacgacccttattatcgagcaccgtttggaggatgttctgcattgccctgtggatcggattgtcttgataaacgatggtcgtatcctttttaatgggagccctgaccagttactggcgactgatttgttgacccaaaatggaattcgcgaacccctttatctcaccactctccgtcaattgggtgtggatttagtcaaggaagaacaattagcagatctggataacttgtctatctcaaaaggtcaggttcagttgcggacggaactggtaaaagaaaccccagaattgcagtcactctttagactagaggacgtgtcgttttcttatgatgatagaccgattttaaaatctcttcatttagatattaaaaagggtgaaaagattgccattgtcggaaaaaatggagcagggaagtcaactctagccaaggccttgagtagctttatccagactgaaggccgctatctttgggaaggacaggatataaaaggagattctgttgcagagcgggcggaacgagtaggctatgtgctgcaaaatcccaatcaaatgatttcaaccaatatgatttttgatgaggtggctctgggactccgtttgcgaggtgtggacgagcaggaaattgaaacgagagtctatgaaaccttgaaaatctgtggtctctatgaattccgtaattggcccatttctgccctgtcatttggtcagaaaaaacgtgtgactattgcctcaattttggtcttaggcgctgaaattatcctcctagatgaaccgactgcgggtcaagaccagaagaactatactgagattatggaatttctcgaagaactgcatcaacaagggcataccattgtcatgattacccatgatatgcaattgatgctggattattcagatcgagcccttgtcatggtggatggggaattgattgctgatactgatccagctagtctgttgagcaatcctgagctgttagtaaaagccaacctaaaagagacttctatcttcaacttggctaagaaactcgacgtggatccacttgctttaacggcattttacaaagaaaggagagaaggatgcaagctaaattaa

SEQ ID NO: 27613 - protein, 560 aa, Streptococcus pneumoniae
MKEAIIEWKDFSFRYETQQEPTLQGIDLTIYKGEKVLIVGPSGSGKSTLGQCLNGIIPNIYKGHTYGEFLIKGQAAFDMSIYDKSHLVSTVLQDTDGQFIGLSVAEDLAFALENDVTALDEMKGRVYKWAEKLDLLPLLDQRPQDLSGGQKQRVSLAGVLIDESPILLFDEPLANLDPKSGQDIIELIDQIHKEEGTTTLIIEHRLEDVLHCPVDRIVLINDGRILFNGSPDQLLATDLLTQNGIREPLYLTTLRQLGVDLVKEEQLADLDNLSISKGQVQLRTELVKETPELQSLFRLEDVSFSYDDRPILKSLHLDIKKGEKIAIVGKNGAGKSTLAKALSSFIQTEGRYLWEGQDIKGDSVAERAERVGYVLQNPNQMISTNMIFDEVALGLRLRGVDEQEIETRVYETLKICGLYEFRNWPISALSFGQKKRVTIASILVLGAEIILLDEPTAGQDQKNYTEIMEFLEELHQQGHTIVMITHDMQLMLDYSDRALVMVDGELIADTDPASLLSNPELLVKANLKETSIFNLAKKLDVDPLALTAFYKERREGCKLN

SEQ ID NO: 27614 - DNA, 1707 bp, Clostridium perfringens
  CDS (1)..(1707): transl_table=11
atggaaagaaaagcaataatagagtttaaagattttactgctcattatacagttcaatcaaagccaactttaaataacataaatttaactatatatgaaggagaaaaagttcttatagctgggccttcagggtcaggaaaaagtacattagctaactgtataaatggattaataccattttcaactgatattgaaatttcaggaagtcttaaaataaagggaaaagagacaaaggatttaagtgtttttgaaatatctaaaatggtaggaactgtacttcaagatccagatagtcaatttataggattaactgtagctgaggatatagcttttaaactagaaaataactgtgtatctcaagaagagatgaagaaaaaagttaattatgtatcaaaaatagttgatatagaaaatagattagacttagctccatatagtctttcaggtggacaaaaacagagggtaaccttagctggaactattgttgatgatgttgatatacttctttttgatgaacctttagcaagcttagatccagcagcaggaaaagcttctatagaacttatagataaaatacaaaaggaagaaaaaaagacagtaataataatagaacatagattagaagaagttttaaattgtgatgtagacagaataatacttatgaatgaaggagaaattattgctgatacaaatccaaatgaaatattagcttctaataaattaaaagagtgtggaataagagaacctttatacataacagctcttaaatatagtggatatgaattaaataaggaaatgaaccttgagaatatagacaagttaaagcttagtgatgatggcgagaaattaaaaacttggtataagagtttaaattttaataagaaagaaagagaagaagacaccctattagaatttaaaaatgtatctttttcttacgataagaaaaaagatatattaagtgatattaattttaaaattaatagaggagacatagtaagtgtagttgggaaaaatggtgcaggtaaatcaactatatctaagatcatatgtggatttttcaaagaatcaaagggagatatattatttgaaggaaaaagtttagatggaaagactattaaggaaagaggagaagaaataggagttgttcttcaaaatccaaatcaaatgatatctaaaacaatgatttttgatgaggttgcattaggcttaagagttagagggattgatgaaaaagaagttaaggaaagagtaattgaaaccctaaagacctgtggtttatatccatatagaaattggccagtttctgcacttagttttggacagaaaaagagggttactatagcttcaatactagttttaaatcctaaggttataatacttgatgaaccaacagcaggacaagactataaacattataatgaaataatggagtttcttctaaaacttaataaaaagggagttacaataattttaataactcatgatatgcatttaatgcttgaatatacagacaaggctattgtaatttcaaatggacgtaaaatagctgatacaacatcagcagaaatacttacagataaagaagttatagaaaaggcaagtttaaaagaaacatcattatatgatttagccttgaaatttaagttggaagaccctaaggattttgtttgtaaatttattgatttcgacaggggggcaagaaattag

SEQ ID NO: 27615 - protein, 568 aa, Clostridium perfringens
MERKAIIEFKDFTAHYTVQSKPTLNNINLTIYEGEKVLIAGPSGSGKSTLANCINGLIPFSTDIEISGSLKIKGKETKDLSVFEISKMVGTVLQDPDSQFIGLTVAEDIAFKLENNCVSQEEMKKKVNYVSKIVDIENRLDLAPYSLSGGQKQRVTLAGTIVDDVDILLFDEPLASLDPAAGKASIELIDKIQKEEKKTVIIIEHRLEEVLNCDVDRIILMNEGEIIADTNPNEILASNKLKECGIREPLYITALKYSGYELNKEMNLENIDKLKLSDDGEKLKTWYKSLNFNKKEREEDTLLEFKNVSFSYDKKKDILSDINFKINRGDIVSVVGKNGAGKSTISKIICGFFKESKGDILFEGKSLDGKTIKERGEEIGVVLQNPNQMISKTMIFDEVALGLRVRGIDEKEVKERVIETLKTCGLYPYRNWPVSALSFGQKKRVTIASILVLNPKVIILDEPTAGQDYKHYNEIMEFLLKLNKKGVTIILITHDMHLMLEYTDKAIVISNGRKIADTTSAEILTDKEVIEKASLKETSLYDLALKFKLEDPKDFVCKFIDFDRGARN

SEQ ID NO: 27616 - DNA, 1701 bp, Lactobacillus plantarum
  CDS (1)..(1701): transl_table=11
atgagcgcacccatcattagctttaaaaatttctcttttcaatataatagccaaacggaaccaactttacgtgatattaatctggatatttaccccggtgaaaaagtgttgattgctggaccttctggctccggtaaatctacattaggccggtgtttgaacggcttgattccgcagtcctatccaggaacagtgacgggccaagcaaggattgctggtcaaaccattactgagagctccatttttgcattatcccaagacgtcggtacggtactgcaagatcctgatagtcagttcgtcggtttgactgtcgtcgaagatatggctttctcattggaaaatgatcagcagacccaaccggccatgcgacaagcaactgaacagtgggcccaaactttagacctccaggacttattgactcaccgcccgcaggaattatctggtgggcaaaagcaacgggtcgccatggctggtgttctgatcgacaatagtaaaatcctattatttgatgaaccgctagcgagtcttgatccggcatcgggtaaagcctcgatggcactcattgatcagctgactcatacgcaggacctgaccgtcatcattattgagcaccgcattgaggacgtgttacagcaaccaatcgaccggctgattgtcatgcaagacggcgcgatcgtcgctaacgaccggccggaaacgattctgcggcaatcactcatgactcaactcgggctacgcgaaccattatacctttcagcgctcaaactagccggtgttgatctagcaacttgccaacacttggataacctccaagccttacaagtacccgacctcaccgcgacgttgcaaaactggaccaccggcgtacaactacagtcacccaccgttcatgaccaaccgttactcgcaattgagcatctgacattcgggtacgatcccgccaaaccaatcatcaacgatatcaccgtcacacttcatcagggtgaaatgattagtctagtgggtcaaaacgggactggtaagtcaacattaagcaatctgattactgggtttttgatgccacagtccggcaaaatgcgatttaacggtcattccctagctgaccaatcagtcaaagaacgtgccgaccaaattggttatatccttcaggaccccaatcaaatgatctctacaacgatgatttttgatgaagttgctgccggtttggtcctccgaggtgtcgctgacgatgaagtaaagcgccgtgtccaggccgttctgaaggtctgtggtctctatgagtttcgccactggcctatttctgcgctcagtttcggtcaaaagaaacgggtcacgattgcggccatcctcgtattagaaccggccatgctaattcttgatgagcctactgcgggccaagacttgcaacactatactgaaatgatgaccttcttaactaagatcaatcaggaacaacacatgacgattatgttgatcacgcatgatatgcacctaatgctagaatacacggatcgcacgattgtgttgggccacggcaacattttgatggatgctcgcccagccgatgtgttgaccaacgcatccattattcagcaagcttccttagccaagacaagtttatacaccctggcagaagcgcaccatttaaacccgacagaattcgtcgcaaaatttgttcaggctgaacgggaggcgcgctaa

SEQ ID NO: 27617 - protein, 566 aa, Lactobacillus plantarum
MSAPIISFKNFSFQYNSQTEPTLRDINLDIYPGEKVLIAGPSGSGKSTLGRCLNGLIPQSYPGTVTGQARIAGQTITESSIFALSQDVGTVLQDPDSQFVGLTVVEDMAFSLENDQQTQPAMRQATEQWAQTLDLQDLLTHRPQELSGGQKQRVAMAGVLIDNSKILLFDEPLASLDPASGKASMALIDQLTHTQDLTVIIIEHRIEDVLQQPIDRLIVMQDGAIVANDRPETILRQSLMTQLGLREPLYLSALKLAGVDLATCQHLDNLQALQVPDLTATLQNWTTGVQLQSPTVHDQPLLAIEHLTFGYDPAKPIINDITVTLHQGEMISLVGQNGTGKSTLSNLITGFLMPQSGKMRFNGHSLADQSVKERADQIGYILQDPNQMISTTMIFDEVAAGLVLRGVADDEVKRRVQAVLKVCGLYEFRHWPISALSFGQKKRVTIAAILVLEPAMLILDEPTAGQDLQHYTEMMTFLTKINQEQHMTIMLITHDMHLMLEYTDRTIVLGHGNILMDARPADVLTNASIIQQASLAKTSLYTLAEAHHLNPTEFVAKFVQAEREAR

SEQ ID NO: 27618 - DNA, 1587 bp, Methanosarcina acetivorans
  CDS (1)..(1587): transl_table=11
atgatagaactcaggaacttttcgtatacctacggaacagcagcaatccctgcgttaaaaaacataaatctggaaatccggaaaggagagctgctccttgttacggggcacagtgcagccggaaaaactaccttagcccttgcaatggcaggcattctccaccacgagatcggaggcaaaattgaggggaacatcagcttccagagcagggatgtaaaagaatttgacggcataaaggaactgagtcgacatataggggtggtttttgacgacgcggaatctcagctgatctttacgactgttgaagaagaaatcttttcaggacttgaaaaccgcggccatccggaaaaagagatggtacgcaggtcaaaagaggcaatggatttctgcgcaatcagccatctgaataaccgggctcctcacatgctttccggagggcagaagcaaaaagttgccctcgcagcaacccttgccctggatacggaagtcctgatccttgacgaagccactgccgaactagactcccaggcagtccgaaaggtattttctgtcctgaagaggctgaaagatgccggaaaaactattataatcatagaccacaatatcgaggatttccttgaaattggggacagggtcgtgcttcttgagaaaggagagataaaggcaataaaaagtccctcggaatttacctcaaagtcttcagatcttacttctacaaatcttacttctacttcagctcttcaaacagaccttcccctttcaagaacagctgagcagccgattatttccgtaaagaacctcacccagcgatatggagaaatcctggcgcttgacaacattgaccttgagatttaccctggggagcttgttgccattctgggggaaaatggttctggtaagactaccctcgtaaaacatttcaatggcctccttcgcccttactccggaaaagtgacagtaaaagggcttgagacctctacaacccccataaacgagcttgtgaaacataccgggctggtcttccagaacccggacaatatgctttttgaagatactgttgaagccgaaatcaatttcgggctgaataacatcggcgtaaaagggcctgaagcagtaggggcaatcctccgttccctggagcttgtaaacctgaatgataagcaaaaagtcttcccccgccatctcagccgaggagaaaggcagaggctggctgttgcctgcataattgcgatgaagcctgagctgatagtgcttgacgagcccaccacaggccttgatgccgaagagtccgaccggatgatgcagctcatgcgcaagctccagcaggaaggccatacaatagtcatggtgactcataacctgcagatcgtaagggaccatgtagaaagagtcattcggatggagtccggaaaagttgtggaggattcggcaaacaggaaattttccggcaaaggatctgtcaaggaagaaagtgactacaaaggacatgtcagtaaagaaattgttagtgaagaaattgttagtgaagaaattgttagtgaagaaagtgttagtgaagaatgtgtaagaggaggcacatgcgcatga

SEQ ID NO: 27619 - protein, 528 aa, Methanosarcina acetivorans
MIELRNFSYTYGTAAIPALKNINLEIRKGELLLVTGHSAAGKTTLALAMAGILHHEIGGKIEGNISFQSRDVKEFDGIKELSRHIGVVFDDAESQLIFTTVEEEIFSGLENRGHPEKEMVRRSKEAMDFCAISHLNNRAPHMLSGGQKQKVALAATLALDTEVLILDEATAELDSQAVRKVFSVLKRLKDAGKTIIIIDHNIEDFLEIGDRVVLLEKGEIKAIKSPSEFTSKSSDLTSTNLTSTSALQTDLPLSRTAEQPIISVKNLTQRYGEILALDNIDLEIYPGELVAILGENGSGKTTLVKHFNGLLRPYSGKVTVKGLETSTTPINELVKHTGLVFQNPDNMLFEDTVEAEINFGLNNIGVKGPEAVGAILRSLELVNLNDKQKVFPRHLSRGERQRLAVACIIAMKPELIVLDEPTTGLDAEESDRMMQLMRKLQQEGHTIVMVTHNLQIVRDHVERVIRMESGKVVEDSANRKFSGKGSVKEESDYKGHVSKEIVSEEIVSEEIVSEESVSEECVRGGTCA

SEQ ID NO: 27620 - DNA, 2343 bp, Bifidobacterium longum
  CDS (1)..(2343)
atgctcaaggacattcgtttcagctatgaccgcggcacctcatgggctttggatggcgtttcactcacggtccatgccggcgagcgcctatgcttggtcggtccgaacgggtcgggcaaatccacgttagcccgtctgattgcgggattgaccgcgccggacggtggtgaagtgacgttactggggcaacgcgtgtacgcagccggcccgaatgccgatgcctatcgtgctgcccgccacggcatcggtatggtgttccagaatcccgaggatcagctggtcaccaccgtgttggaggatgacgtggcctttggcccggagaatctcgggctggagcgcgagctcatcggcgagcgtatcgttgattcattgcaggccgtggggttggcgaacttacgccagtccgacccgacccgtatgagcggcgggcagcagcaacgcgcctccatcgccggcatgctggccatgaacccggcaatgctggtattggatgagccgaccgccatgctggacgaatccgcacgcgccgaagttatgcgcattttggatgatttgcaggcgcgcggcaccactattgtgcatgtcacgcatcatccagatgaaaccgttcatgccgatcgcatcgtgcacatggaggccgggcgaatcattggtatcactgcagccgtcgataatcgatccccgctagcggaggctgtctcgcaaagcgagactgagggtagtatcggcacagaagccgcccccagtcgccctacgaacgacagcccccgccagcgggagcgcgaagacggctccgaactgccgctgctctccgatggcatcggtgatatgacgaaccccattattcgcgtctcgcatctgacctatcgctatccttcggccaaacgggcggttatcgatgacctgtcgttcaccatcgcgcgcggtgaaaccgtggcactgatgggcgtgaatggttcgggcaagtcgacgctggtgcgcatgttgtgcgcactgactgcgccgaccgccggcagcatcgaagtggccggtgttccggtggcctcgaccggcaagcgcggtcgcaacgtgcgcccgaagtcggcgaatcgcaagcaattagcgcaattgcgccggcatgtgggttacgtgatgcagcatccagagcatcagctgttcgctgacacggtagccgaggacgtggcgtacggcccacgcaaccaagggcttggcgagaccgaggtagccgaccgcgtgcgcgaatcactggaactgctgcatatcgggcatcttgccgaccgctcccccttcgacctgtccggcgggcaacaacgattggcagccattgccggcgtgctggcttgcaatcctgacgtgctcatcatggacgagccgaccgcgagtctggacgcccaagccaagaagcgtatccatgagctgttgcgcacgctcaaatcgcgtggcgtgaccgtgctcatcatcacccatgaccgggaggaggccgagcaaatcgccgaccgcgtggtccgtatgccgattgccgcccccgcatccggcggccccgtcacggccaccgtcaccgagccggccgtatcctccaacggccctgcgcactcagtgatacaccgacttgacccgcgcgtgaagatggtgggcttcctggccgccatgttcacgatgttcgcggtgaacacgccaacccagctcgcgctgggcatcgccatcaccctggccgttatcgcggcggcacgcctgaacccgttacgggtgcttgaatccattcatccgattctgatcctgctggtgctgatgggcgtggtcaatctgtttgtggtacgcaccggcacgccggtggtggcgcttggcccgctaagcatcaccgatcagggcgtgaccatagccgtgctgtacgcctgccgtttcgcattggtaatcattctgggcgcggtgttcctcactaccaccacgcctaccgccatgaccgacgccttcgccaccttgatcagtccgctcaaccggctcggtatccatgcccaagaaatcgcgctggtcatgagtctggcattgcgattcattccaacgctgaccgacgaaacccgcgccatcgtcgacgcccaatccgcgcgtggcggttccatcgaaaccggttcactggcccagcgcatcaaggcgatgagcgcgattatcgtgccgattttcgccggcacgttgcgtcacgcggacaacctgagcctcgcacttgacgcccgctgctacgaggagggcatccgccgcacccactggcgtgccctgaccatcgccgcgcgagatctcatattcgccgctgccgtcatcatctacatcgcggccatcatcgcgctgtag

SEQ ID NO: 27621 - protein, 780 aa, Bifidobacterium longum
MLKDIRFSYDRGTSWALDGVSLTVHAGERLCLVGPNGSGKSTLARLIAGLTAPDGGEVTLLGQRVYAAGPNADAYRAARHGIGMVFQNPEDQLVTTVLEDDVAFGPENLGLERELIGERIVDSLQAVGLANLRQSDPTRMSGGQQQRASIAGMLAMNPAMLVLDEPTAMLDESARAEVMRILDDLQARGTTIVHVTHHPDETVHADRIVHMEAGRIIGITAAVDNRSPLAEAVSQSETEGSIGTEAAPSRPTNDSPRQREREDGSELPLLSDGIGDMTNPIIRVSHLTYRYPSAKRAVIDDLSFTIARGETVALMGVNGSGKSTLVRMLCALTAPTAGSIEVAGVPVASTGKRGRNVRPKSANRKQLAQLRRHVGYVMQHPEHQLFADTVAEDVAYGPRNQGLGETEVADRVRESLELLHIGHLADRSPFDLSGGQQRLAAIAGVLACNPDVLIMDEPTASLDAQAKKRIHELLRTLKSRGVTVLIITHDREEAEQIADRVVRMPIAAPASGGPVTATVTEPAVSSNGPAHSVIHRLDPRVKMVGFLAAMFTMFAVNTPTQLALGIAITLAVIAAARLNPLRVLESIHPILILLVLMGVVNLFVVRTGTPVVALGPLSITDQGVTIAVLYACRFALVIILGAVFLTTTTPTAMTDAFATLISPLNRLGIHAQEIALVMSLALRFIPTLTDETRAIVDAQSARGGSIETGSLAQRIKAMSAIIVPIFAGTLRHADNLSLALDARCYEEGIRRTHWRALTIAARDLIFAAAVIIYIAAIIAL

SEQ ID NO: 27622 - DNA, 1695 bp, Photobacterium profundum
  CDS (1)..(1695): transl_table=11
atgactattgaattctctaatttcacgttcaagtattgggcgttagaaaagccaaccctaaaaaatattaacctaacgatagggaaaggcgaaaaagttgttattgttggtccaagcggcagtgggaaatcaacactaggccaatgcttgaatggcttaatcccctttgccgttaaaggcgattgctctggtagcctcaaaattaacggtaaagacacaaaatcattagatcttcatcaatgtaccaatattgttggtacagtattgcaagatactgatggacaatttgtcggtctaagcgtgggcgaagatattgcctttgcacttgaaaaccaaatggttattcaagaagacatgcatactattgttaaagacaccgcaaaaatggttgagcttgatgacatcttagatgtgtctccttttgaccttagtggtggtcaaaaacagcgcgtatctcttgcgggcgttatggtcgatgatgtcgatatcttattgtttgatgaaccgctggcaagcttggatcccaaaacaggcaaagccgccatcgatattattgatcaccttcatcgtgatacaggtaaaacggttatcattattgagcatcgccttgaagatgttcttcatcgccccgttgatcgcatcattatgatggaacaaggtgaaattgttgccaacatgacgcccgaccaactcattgccagtgacctattagaacagcatggaatacgtgagcctctttacatctctgctttaaaagcggctggatgccaaataaccgaagacgataaaccagcttatttttcaacgttaaatcttgataaatttaagcctcaaatcgaaaactggtaccaccaatcattcgttgcatgtactccagaaaacagtgagcgcttgcttactgtcaataacctttcgtactcatacgatggtattaaaaatacgcttgatgatgtgagctttcatatcaataaaggggaatttgtttccattttaggtaagaatggttcagggaaatcaacaataacgcgtttaatcatgggtgtgttagaaccagatactgggtctattttcatgaacggtcaagatttagcacaaagctctatttttgaacgtagccaaaagatcgggattgtattacaaaaccccaatcatatgatttcacaccacatgatttttgatgagattgcatcaggtttacgcaaccgaggaatcaatgaagccacagtagaacgcaaagttttcgatattcttgagctatgcggtttgaaaaaataccgccattggccaattgatgctttaagttatggtcagaagaagcgcgtaacgattgccactatcttagtgcttgagcctgaactcttaattctggatgaaccgacagcaggtcaagactaccatcactacacattaatgatggagtttgtgcgagagcttaaccgcaaactcggcattaccattctgatcatctcgcatgatatgcaccttgttctcgaatatactcagcgtgccattgtcattgctaatagccaattgttagccgatgcacctgtaaacaccatttttagccagccagctctgctagaaaaagccaacttaaccgtaaccagcctgtattcattagcacatgcaatggggattgaacgtatcgataacttcattcattgctttattgaacatgaggcaaagaataaataa

SEQ ID NO: 27623 - protein, 564 aa, Photobacterium profundum
MTIEFSNFTFKYWALEKPTLKNINLTIGKGEKVVIVGPSGSGKSTLGQCLNGLIPFAVKGDCSGSLKINGKDTKSLDLHQCTNIVGTVLQDTDGQFVGLSVGEDIAFALENQMVIQEDMHTIVKDTAKMVELDDILDVSPFDLSGGQKQRVSLAGVMVDDVDILLFDEPLASLDPKTGKAAIDIIDHLHRDTGKTVIIIEHRLEDVLHRPVDRIIMMEQGEIVANMTPDQLIASDLLEQHGIREPLYISALKAAGCQITEDDKPAYFSTLNLDKFKPQIENWYHQSFVACTPENSERLLTVNNLSYSYDGIKNTLDDVSFHINKGEFVSILGKNGSGKSTITRLIMGVLEPDTGSIFMNGQDLAQSSIFERSQKIGIVLQNPNHMISHHMIFDEIASGLRNRGINEATVERKVFDILELCGLKKYRHWPIDALSYGQKKRVTIATILVLEPELLILDEPTAGQDYHHYTLMMEFVRELNRKLGITILIISHDMHLVLEYTQRAIVIANSQLLADAPVNTIFSQPALLEKANLTVTSLYSLAHAMGIERIDNFIHCFIEHEAKNK

SEQ ID NO: 27624 - DNA, 1740 bp, Vibrio parahaemolyticus
  CDS (1)..(1740): transl_table=11
atgacaatcgaattttctaacttctcttttagatatgagtcgctggacaaaccgacgctaaaaaatatcaatctaaggatagagaaaggagagaaaatcgtcattattggtccaagtggtagtggtaaatctacccttgggcaatgtcttaacggactgatcccacacgcaatcaaaggggaaaccagtggaacattgaccatctatggtcaagacaccgcccctttcgacatgcaccaatacactgagcaagttggcaccgtactgcaagatacggacagccaatttgtcggcttgagcattggcgaagacatcgcatttgcgctggaaaaccagctaacttctaacatcgacatgtacccattggtcaaagccacggccaaaatggtcgacttggaacagatgttagatcgctctccccacgatttatctggcgggcagaaacagcgtgtttctttggcaggcattctcgtcgatgacgtcgatatccttttgtttgatgaaccactagctgcgcttgaccctaaaacgggtaaaaaaaccatcgagatcatcgatgatctacaccgcgaaacgggcaaaaccatcgtaatcattgagcatcgtcttgaggacgttctgcatcgctcagttgaccgtattatcttgatggaaagcggcgaaatcattgccgatacaacgccagatgaaattttagcgtcgcctctgctagaagattacggcatccgcgaaccgctttatatttcggctctgaaagaagcaggctgcgcgattgagggcgatgcaaaaccttcgagcttaactaccttaccgttggagcaatataaaccaacagtacaagcgtggtttgatggttcaacagcacaaccacctaaaacgccagccgagactttgcttgaagtccgtggcctcacctattcttacgacggtgagaaaaacgcgctagaagacgtgagttttgacatcaagcgtggcgagtttgtctctgtacttggcaaaaatggctcgggtaaatcgaccatcaccaaactgattatgggcgttattgaagcggatagcggctcaatgagcatgaatggtcaagatctaaacgaactgaccatcttcgagcgcagccagaaagtgggcgtggtgatgcaaaacccgaatcacatgatttcccatcacatgattttcgacgaggtggccttcggcctccgtaatcgtggcattaaagagaaacaaatcgaagctaaagtacttgaagtccttgagctgtgcggtttgagcaaataccgtcactggccaatcgaagcattgagctacggccagaaaaagcgcgtaaccattgcgtcaattttggtcttggaaccagagcttctgatccttgatgaaccgacggcaggtcaggactaccggaactacacgtctatgctgagtttcatcgaaaagctcaatcgcgagttgggcgtaaccgtgatgatcatctctcatgacatgcatttagtgctggaatacactacgcgctctatcgtgattgcagacagtaaattagtcgcggatgcaccaatgacgcaggtattcagcagtccagagctactagaccaagcaaacctcaccacaacaagtctgtttgatttggctacgaaagttggtatcgaagacaccaatggctttatgcagcattttatcaatgtagaaaaagcgcaccgccaacaaaaaagcggcgaagtaaaccaaccagagaaagcggtggcatga

SEQ ID NO: 27625 - protein, 579 aa, Vibrio parahaemolyticus
MTIEFSNFSFRYESLDKPTLKNINLRIEKGEKIVIIGPSGSGKSTLGQCLNGLIPHAIKGETSGTLTIYGQDTAPFDMHQYTEQVGTVLQDTDSQFVGLSIGEDIAFALENQLTSNIDMYPLVKATAKMVDLEQMLDRSPHDLSGGQKQRVSLAGILVDDVDILLFDEPLAALDPKTGKKTIEIIDDLHRETGKTIVIIEHRLEDVLHRSVDRIILMESGEIIADTTPDEILASPLLEDYGIREPLYISALKEAGCAIEGDAKPSSLTTLPLEQYKPTVQAWFDGSTAQPPKTPAETLLEVRGLTYSYDGEKNALEDVSFDIKRGEFVSVLGKNGSGKSTITKLIMGVIEADSGSMSMNGQDLNELTIFERSQKVGVVMQNPNHMISHHMIFDEVAFGLRNRGIKEKQIEAKVLEVLELCGLSKYRHWPIEALSYGQKKRVTIASILVLEPELLILDEPTAGQDYRNYTSMLSFIEKLNRELGVTVMIISHDMHLVLEYTTRSIVIADSKLVADAPMTQVFSSPELLDQANLTTTSLFDLATKVGIEDTNGFMQHFINVEKAHRQQKSGEVNQPEKAVA

SEQ ID NO: 27626 - DNA, 1725 bp, Vibrio vulnificus
  CDS (1)..(1725): transl_table=11
atgacaatcgaattttctaacttctcttttagatatgagtcgctggacaaaccgacgctaagaaatatcaatctaaggatagagaaaggagagaaaatcgtcattattggtccaagtggtagtggtaaatctacccttggccagtgtttaaatgggcttatcccccacgcaatcaaaggtgaagtgtccggctctttgaccatcaacggccaagaaacggcgacgttcgccatgcaccaattcaccgaacaggtggggacagtgctgcaagacaccgacagccaatttgtcggtttaagcatcggtgaagacatcgcgtttgcacttgaaaaccagctcaccgccaatattgagatgtactcgctggtcaaagccaccgcgaagatggtggaccttgagcaaatgttgcaacgctcgccacacgatctctcgggcggacagaaacaacgtgtttcgttggcaggcattctcgtggatgatgtcgatattctgctgtttgatgaacctttggcagcgctcgatccaaaaaccggcaaacgtaccattgaaatcattgatgatctccatcgcaagacaggcaaaaccgtggtcatcatcgagcaccgtctcgaggatgtgctgcatcgtcacgtcgaccgcatcattctgatggatggcggtgagattattgctgataccacgccagacgagctgcttgcttcgccattattggctcaatatggcattcgcgaaccgctttacttaacggcgctaaaatccgctggttgccatcttgcgctagacgatcacccctcaagcttaagcgagttacccttggccaattatcagcacgcaatggcagattggtttcaccaagcgaacacgacaagcaaccacattcgttcagagactttgcttgacgtgcgcaacttaacctactcctacgatggtgagaaaaacgcattagaaggggtaagtttcaatgtgcaacgcggcgaatttgtctcgatattgggcaaaaatggttccggtaaatcgaccatcaccaagctgatcatgggcgtcattgaacccgatgacggcacgatgcacttaaacggccaagatcttagcgagctgaccattttcgagcgcagtcaaaaagtaggtgtggtgatgcaaaaccctaaccacatgatttcgcaccatatgatttttgacgaagtcgcatttggcctgcgcaatcgaggttgggacgagcagcaagtcaacgacaaggtgcttgaagcgctcgaattgtgtggtctcagcaaatatcgtcattggccaattgaagcactcagctacggccagaagaaacgcgtcaccatcgcttcgattctcgccctagagcctgagctattgatgcttgacgagcccaccgcaggtcaggattaccgcaactacacctcaatgctgagtttcattgaaaaactcaatcgagagctaggcatcaccgtcgtgatcatttctcatgacatgcacttggtactggaatacaccacacgctcaatcgtgattgcagatagccagcttgtggcggatgcgccgatgacggatgttttcagtaaccctgcattgctagaccgagcgaacctaaccaccaccagcctgtatgagcttgcgacgcgcttgaacatggctgaaaccaacgcctttatgcagcattttattgatgtagaaaaagcttctcgcttagagaaaaccgttgagagaaatgtggcatga

SEQ ID NO: 27627 - protein, 574 aa, Vibrio vulnificus
MTIEFSNFSFRYESLDKPTLRNINLRIEKGEKIVIIGPSGSGKSTLGQCLNGLIPHAIKGEVSGSLTINGQETATFAMHQFTEQVGTVLQDTDSQFVGLSIGEDIAFALENQLTANIEMYSLVKATAKMVDLEQMLQRSPHDLSGGQKQRVSLAGILVDDVDILLFDEPLAALDPKTGKRTIEIIDDLHRKTGKTVVIIEHRLEDVLHRHVDRIILMDGGEIIADTTPDELLASPLLAQYGIREPLYLTALKSAGCHLALDDHPSSLSELPLANYQHAMADWFHQANTTSNHIRSETLLDVRNLTYSYDGEKNALEGVSFNVQRGEFVSILGKNGSGKSTITKLIMGVIEPDDGTMHLNGQDLSELTIFERSQKVGVVMQNPNHMISHHMIFDEVAFGLRNRGWDEQQVNDKVLEALELCGLSKYRHWPIEALSYGQKKRVTIASILALEPELLMLDEPTAGQDYRNYTSMLSFIEKLNRELGITVVIISHDMHLVLEYTTRSIVIADSQLVADAPMTDVFSNPALLDRANLTTTSLYELATRLNMAETNAFMQHFIDVEKASRLEKTVERNVA

SEQ ID NO: 27628 - DNA, 1593 bp, Escherichia coli O157
  CDS (1)..(1593): transl_table=11
gtgttagtttccagtaacgtcaccatgcagttcggcagtaagccgttgtttgaaaacatttccgtcaaatttggcggcggcaaccgttacggcctgattggcgcgaacggtagtggtaaatccacctttatgaagatcctcggcggcgaccttgagccgacgctgggtaacgtttccctcgatcccaacgagcgcattggtaaactgcgtcaggatcagtttgcctttgaagagttcactgtgctggatacggtgatcatggggcataaagagttgtgggaagtgaagcaggagcgcgaccgcatctatgctttgccggaaatgagtgaagaagacggctataaagtggccgatctggaagttaaatacggcgaaatggacggttactctgcggaagctcgtgccggtgaattgttgcttggcgtgggaattccagtggaacagcactacggcccgatgagtgaagttgctcctggctggaagctgcgtgtgttgctggcgcaggcgctgtttgctgatccggatattctcctgctcgacgaaccgaccaacaacctcgacatcgacaccattcgctggctggaacaggtgctgaacgagcgtgacagcaccatgatcatcatctcgcacgaccgtcacttccttaacatggtctgtacccacatggcggatctggattacggcgagctgcgcgtttatccgggtaactacgatgagtacatgacggcggcgacccaggcgcgtgaacgtctgctggccgataacgccaagaagaaagcgcagattgctgagctgcaatctttcgttagccgctttagcgccaacgcctcgaaatctcgccaggcaacttcgcgcgcgcgccagattgataaaatcaaactggaagaggtgaaagcctccagccgtcagaacccgttcatccgttttgaacaggataagaagctgttccgtaacgcgctggaagtggaaggtctgaccaaagggtttgataacggtccgctgtttaaaaatctcaacctgctgctggaagtcggtgaaaaactggcggtactgggtaccaacggcgtcggtaaatcaacgctgttgaaaacgctggtgggcgatctgcaaccggacagcggcaccgtaaaatggtctgaaaacgcgcgcattggttactatgctcaggaccacgaatatgagtttgaaaatgatctgaccgtgttcgaatggatgagccagtggaagcaggaaggcgatgacgagcaggcggtgcgcagtattctcggtcgtttgctgttcagccaggacgacatcaaaaagcctgctaaagtgctttccggtggagaaaaagggcggatgctttttggtaagttaatgatgcagaagccgaacattctgatcatggacgaaccgaccaaccacctggatatggaatccatcgagtcactgaacatggcgctggaactgtatcagggcacgctgatctttgtttcacacgaccgtgagttcgtaagctccctggcgacccgcattctggaaatcaccccggaacgcgtgatcgactttagcggtaattacgaagattacctgcgtagtaaagggatcgagtaa

SEQ ID NO: 27629 - protein, 530 aa, Escherichia coli O157
MLVSSNVTMQFGSKPLFENISVKFGGGNRYGLIGANGSGKSTFMKILGGDLEPTLGNVSLDPNERIGKLRQDQFAFEEFTVLDTVIMGHKELWEVKQERDRIYALPEMSEEDGYKVADLEVKYGEMDGYSAEARAGELLLGVGIPVEQHYGPMSEVAPGWKLRVLLAQALFADPDILLLDEPTNNLDIDTIRWLEQVLNERDSTMIIISHDRHFLNMVCTHMADLDYGELRVYPGNYDEYMTAATQARERLLADNAKKKAQIAELQSFVSRFSANASKSRQATSRARQIDKIKLEEVKASSRQNPFIRFEQDKKLFRNALEVEGLTKGFDNGPLFKNLNLLLEVGEKLAVLGTNGVGKSTLLKTLVGDLQPDSGTVKWSENARIGYYAQDHEYEFENDLTVFEWMSQWKQEGDDEQAVRSILGRLLFSQDDIKKPAKVLSGGEKGRMLFGKLMMQKPNILIMDEPTNHLDMESIESLNMALELYQGTLIFVSHDREFVSSLATRILEITPERVIDFSGNYEDYLRSKGIE

SEQ ID NO: 27630 - DNA, 1590 bp, Escherichia coli
  CDS (1)..(1590): transl_table=11
atgacgcaaactctgttagcgattgaaaatttgtcggtgggttttcgccatcagcaaaccgtacgtacagtagtcaatgatgtttcactacagattgaggctggcgaaacgctggcgctggtgggtgagtcaggttcaggcaaaagcgttaccgcgctgtcaattttacgcctgctcccttccccgccggttgaatatctctccggcgatattcgttttcatggcgaatcgctgcttcacgccagcgatcaaacgttgcgcggtgtacgcggtaataagatcgccatgatttttcaggaaccgatggtgtcgttaaatccattgcataccctggaaaaacagctttatgaagtgctttcactccaccgcgggatgcgtcgggaagcggctcgtggcgaaattcttaactgccttgatcgcgttggtatccgccaggcggcaaaacggctgacagattatccgcatcagctctccggcggcgaacggcagcgggtgatgattgcgatggcgctgttaacgcgaccggaattattaattgccgatgaaccgaccaccgcactggacgtctctgtccaggcgcagattttacagctgttgcgcgaactgcaaggcgagctgaatatgggcatgctgtttattactcataacctcagcattgtcagaaaactggcccaccgcgtggcggtaatgcaaaacggtcgctgtgtcgagcaaaattacgccgctacgctatttgcatcacccactcatccttacacacaaaagctactcaacagtgaaccgtcaggcgatccagtgccgttgccagaacctgcctcaacgttgctggatgttgaacagcttcaggttgccttccccattcgcaaagggattttgaagcgcattgtggatcataatgtggtggtgaaaaacatcagttttacgctacgagcgggtgaaacactgggtttagtgggcgagtccggttccgggaaaagtacgacgggactggcgctgctgcgactgattaattctcagggcagcatcatctttgacggtcagccactgcaaaatttaaatcgccgccagctgttacctattcgtcatcgcattcaggtggtatttcaggatccaaactcctcgctcaacccacgactcaacgttttgcagattattgaggaaggcttacgggttcaccagccgacgctttctgccgcacaacgcgaacaacaagtgatagccgtgatgcatgaagtgggattagatcctgaaacacgccaccgttatccggcggagttctctggtggtcagcgacaacgtattgcgattgccagggcattaattcttaagccctcgctgatcatacttgatgaaccgacatcatcactcgacaaaacggtacaggcgcaaatattgacgctattgaaatcattgcaacaaaagcatcaactggcctatttgtttatcagccacgatttgcacgttgtccgcgcgttatgtcatcaggttatcatactgcgacaaggggaagtagtggaacaaggaccgtgcgcgcgcgtgtttgccacaccgcagcaggagtatacgcgtcagctactggcgttgagctga

SEQ ID NO: 27631 - protein, 529 aa, Escherichia coli
MTQTLLAIENLSVGFRHQQTVRTVVNDVSLQIEAGETLALVGESGSGKSVTALSILRLLPSPPVEYLSGDIRFHGESLLHASDQTLRGVRGNKIAMIFQEPMVSLNPLHTLEKQLYEVLSLHRGMRREAARGEILNCLDRVGIRQAAKRLTDYPHQLSGGERQRVMIAMALLTRPELLIADEPTTALDVSVQAQILQLLRELQGELNMGMLFITHNLSIVRKLAHRVAVMQNGRCVEQNYAATLFASPTHPYTQKLLNSEPSGDPVPLPEPASTLLDVEQLQVAFPIRKGILKRIVDHNVVVKNISFTLRAGETLGLVGESGSGKSTTGLALLRLINSQGSIIFDGQPLQNLNRRQLLPIRHRIQVVFQDPNSSLNPRLNVLQIIEEGLRVHQPTLSAAQREQQVIAVMHEVGLDPETRHRYPAEFSGGQRQRIAIARALILKPSLIILDEPTSSLDKTVQAQILTLLKSLQQKHQLAYLFISHDLHVVRALCHQVIILRQGEVVEQGPCARVFATPQQEYTRQLLALS

SEQ ID NO: 27632 - DNA, 1512 bp, Escherichia coli
  CDS (1)..(1512): transl_table=11
atgttcacggcaacagaggcagtcccggtagcaaaagtggtggcaggaaataagcgttatcccggcgtcgttgcgctggataacgttaacttcacgctcaataaaggcgaagttcgtgcgctgttaggtaaaaacggcgcgggcaaatcgactctcattcgaatgcttaccggcagcgaacgcccggatagcggtgatatctggattggcgagacgcgactggaaggtgacgaagctacgctgactcgccgtgccgctgaactgggggtgcgcgcggtttatcaggagttaagtctggtggaagggctgacagtggcggaaaacctctgcctcggtcagtggccccgccgcaacggcatgattgattacctgcaaatggcgcaggatgcccaacgttgcttacaggcgctgggcgttgacgttagtcctgaacaacttgtttcaacgctaagcccggcgcaaaagcagctggtggaaattgcgcgggtgatgaagggcgagccgcgcgtggtcattcttgatgaacctaccagttcgcttgcgagtgcggaagttgaactggtgatcagcgcggtgaaaaagatgtcggcactgggcgtggcggtgatttatgtcagccaccggatggaagaaattcgccgcattgcctcctgtgccaccgttatgcgcgatggtcaggtggcgggcgatgtgatgctcgaaaacacctccacgcatcatattgtgtcgctgatgctcgggcgcgatcacgttgatattgcgccggtagcccctcaggaaattgtggatcaggccgtgctggaagtccgtgcgttacgccataagcccaagctggaggatatcagttttacgctacgtcgtggcgaagtgctcggcattgctggtctgctgggggcagggcgcagtgaattgctgaaggcgattgttgggctggaggagtatgaacagggcgaaattgttatcaacggcgagaaaatcacgcgccccgattacggcgacatgctgaaacgcggcattggctatacgccagaaaaccgcaaagaagcggggatcattccctggttgggcgttgacgaaaatacagtgctgaccaatcggcaaaaaatcagcgccaacggtgtgctgcaatggtccaccatccgccgcctgaccgaagaggtgatgcagcggatgacggtcaaggccgccagtagcgaaacacccatcggcacgctttctggtggcaatcagcaaaaagtggtgatcggtcgttgggtctatgctgccagccagattttgttgctcgacgagccaacgcgcggcgtcgatatcgaagccaaacagcagatttaccgtattgtccgtgagctggctgccgaaggaaaaagcgtggtgtttatctccagtgaagtggaggagttgccgctggtgtgtgaccgcatcctgttattacagcacggcacgttctcgcaggagtttcacgctccggtcaatgtggatgagctgatgtccgccattctgtctgtgcactga

SEQ ID NO: 27633 - protein, 503 aa, Escherichia coli
MFTATEAVPVAKVVAGNKRYPGVVALDNVNFTLNKGEVRALLGKNGAGKSTLIRMLTGSERPDSGDIWIGETRLEGDEATLTRRAAELGVRAVYQELSLVEGLTVAENLCLGQWPRRNGMIDYLQMAQDAQRCLQALGVDVSPEQLVSTLSPAQKQLVEIARVMKGEPRVVILDEPTSSLASAEVELVISAVKKMSALGVAVIYVSHRMEEIRRIASCATVMRDGQVAGDVMLENTSTHHIVSLMLGRDHVDIAPVAPQEIVDQAVLEVRALRHKPKLEDISFTLRRGEVLGIAGLLGAGRSELLKAIVGLEEYEQGEIVINGEKITRPDYGDMLKRGIGYTPENRKEAGIIPWLGVDENTVLTNRQKISANGVLQWSTIRRLTEEVMQRMTVKAASSETPIGTLSGGNQQKVVIGRWVYAASQILLLDEPTRGVDIEAKQQIYRIVRELAAEGKSVVFISSEVEELPLVCDRILLLQHGTFSQEFHAPVNVDELMSAILSVH

SEQ ID NO: 27634 - DNA, 25 bp, Artificial sequence
  Primer sequence
atgtcatcgttgcaaattttgcaag

SEQ ID NO: 27635 - DNA, 28 bp, Artificial sequence
  Primer sequence
ttaatatatttttgtcagcacatagcga

SEQ ID NO: 27636 - protein, 762 aa, Artificial sequence
  Consensus
  Variant (2)..(4): Xaa in position 2 to 4 is any amino acid
  Variant (6)..(7): Xaa in position 6 to 7 is any amino acid
  Variant (9)..(12): Xaa in position 9 to 12 is any amino acid
  Variant (16)..(17): Xaa in position 16 to 17 is any amino acid
  Variant (18)..(21): Xaa in position 18 to 21 is any or no amino acid
  Variant (23)..(23): Xaa in position 23 is any amino acid
  Variant (27)..(31): Xaa in position 27 to 31 is any amino acid
  Variant (33)..(73): Xaa in position 33 to 73 is any amino acid
  Variant (74)..(118): Xaa in position 74 to 118 is any or no amino acid
  Variant (120)..(133): Xaa in position 120 to 133 is any amino acid
  Variant (134)..(185): Xaa in position 134 to 185 is any or no amino acid
  Variant (187)..(192): Xaa in position 187 to 192 is any amino acid
  Variant (193)..(203): Xaa in position 193 to 203 is any or no amino acid
  Variant (206)..(206): Xaa in position 206 is any amino acid
  Variant (208)..(210): Xaa in position 208 to 210 is any amino acid
  Variant (212)..(213): Xaa in position 212 to 213 is any amino acid
  Variant (215)..(217): Xaa in position 215 to 217 is any amino acid
  Variant (219)..(223): Xaa in position 219 to 223 is any amino acid
  Variant (227)..(227): Xaa in position 227 is any amino acid
  Variant (231)..(233): Xaa in position 231 to 233 is any amino acid
  Variant (236)..(245): Xaa in position 236 to 245 is any amino acid
  Variant (247)..(248): Xaa in position 247 to 248 is any amino acid
  Variant (250)..(253): Xaa in position 250 to 253 is any amino acid
  Variant (254)..(264): Xaa in position 254 to 264 is any or no amino acid
  Variant (266)..(280): Xaa in position 266 to 280 is any amino acid
  Variant (282)..(283): Xaa in position 282 to 283 is any amino acid
  Variant (285)..(314): Xaa in position 285 to 314 is any amino acid
  Variant (315)..(412): Xaa in position 315 to 412 is any or no amino acid
  Variant (414)..(417): Xaa in position 414 to 417 is any amino acid
  Variant (419)..(428): Xaa in position 419 to 428 is any amino acid
  Variant (429)..(444): Xaa in position 429 to 444 is any or no amino acid
  Variant (446)..(447): Xaa in position 446 to 447 is any amino acid
  Variant (448)..(448): Xaa in position 448 is any or no amino acid
  Variant (450)..(451): Xaa in position 450 to 451 is any amino acid
  Variant (453)..(456): Xaa in position 453 to 456 is any amino acid
  Variant (458)..(458): Xaa in position 458 is any amino acid
  Variant (460)..(461): Xaa in position 460 to 461 is any amino acid
  Variant (463)..(463): Xaa in position 463 is any amino acid
  Variant (468)..(471): Xaa in position 468 to 471 is any amino acid
  Variant (473)..(478): Xaa in position 473 to 478 is any amino acid
  Variant (479)..(482): Xaa in position 479 to 482 is any or no amino acid
  Variant (484)..(485): Xaa in position 484 to 485 is any amino acid
  Variant (486)..(518): Xaa in position 486 to 518 is any or no amino acid
  Variant (520)..(521): Xaa in position 520 to 521 is any amino acid
  Variant (523)..(531): Xaa in position 523 to 531 is any amino acid
  Variant (532)..(561): Xaa in position 532 to 561 is any or no amino acid
  Variant (563)..(577): Xaa in position 563 to 577 is any amino acid
  Variant (578)..(596): Xaa in position 578 to 596 is any or no amino acid
  Variant (598)..(601): Xaa in position 598 to 601 is any amino acid
  Variant (603)..(609): Xaa in position 603 to 609 is any amino acid
  Variant (610)..(640): Xaa in position 610 to 640 is any or no amino acid
  Variant (643)..(643): Xaa in position 643 is any amino acid
  Variant (645)..(647): Xaa in position 645 to 647 is any amino acid
  Variant (650)..(650): Xaa in position 650 is any amino acid
  Variant (653)..(654): Xaa in position 653 to 654 is any amino acid
  Variant (656)..(658): Xaa in position 656 to 658 is any amino acid
  Variant (660)..(660): Xaa in position 660 is any amino acid
  Variant (668)..(669): Xaa in position 668 to 669 is any amino acid
  Variant (673)..(682): Xaa in position 673 to 682 is any amino acid
  Variant (684)..(690): Xaa in position 684 to 690 is any amino acid
  Variant (691)..(742): Xaa in position 691 to 742 is any or no amino acid
  Variant (744)..(744): Xaa in position 744 is any amino acid
  Variant (747)..(761): Xaa in position 747 to 761 is any amino acid
IXXXIXXGXXXXLVGXXXXXXGXGKSXXXXXLXXXXXXXXXXXXXXXXXXXXXXXXXXXXXXXXXXXXXXXXXXXXXXXXXXXXXXXXXXXXXXXXXXXXXXXXXXXXXXXXXXXXXXIXXXXXXXXXXXXXXXXXXXXXXXXXXXXXXXXXXXXXXXXXXXXXXXXXXXXXXXXXXXXXXXXXXLXXXXXXXXXXXXXXXXXLSXGXXXRXXLXXXLXXXXXLLIXDEPXXXLDXXXXXXXXXXLXXLXXXXXXXXXXXXXXXVXXXXXXXXXXXXXXXVXXMXXXXXXXXXXXXXXXXXXXXXXXXXXXXXXXXXXXXXXXXXXXXXXXXXXXXXXXXXXXXXXXXXXXXXXXXXXXXXXXXXXXXXXXXXXXXXXXXXXXXXXXXXXXXXXXXXXXXXXXXXXXXXXXXLXXXXLXXXXXXXXXXXXXXXXXXXXXXXXXXVXXXVXXGXXXXIXGXXGXGKSTXXXXLXXXXXXXXXXGXXXXXXXXXXXXXXXXXXXXXXXXXXXXXXXXXXXIXXVXXXXXXXXXXXXXXXXXXXXXXXXXXXXXXXXXXXXXXXLXXXXXXXXXXXXXXXXXXXXXXXXXXXXXXXXXXLXXXXLXXXXXXXXXXXXXXXXXXXXXXXXXXXXXXXXXXXXXXLSXGXXXRLXIAXXLXXXPXLLILDEPXXGLDXXXXXXXXXXLXXXXXXXXXXXXXXXXXXXXXXXXXXXXXXXXXXXXXXXXXXXXXXXXXXXXXXXXXXXIXISXXXXXXXXXXXXXXXM

SEQ ID NO: 27637 - protein, 9 aa, Artificial sequence
  Consensus
  Variant (2)..(2): Xaa in position 2 is any amino acid
  Variant (3)..(3): Xaa in position 3 is Asp, Asn or Ser
  Variant (5)..(5): Xaa in position 5 is any amino acid
  Variant (8)..(8): Xaa in position 8 is Ser or Thr
  Variant (9)..(9): Xaa in position 9 is Ala, Ser, Thr or Val
GXXGXGKXX

SEQ ID NO: 27638 - protein, 29 aa, Artificial sequence
  Consensus
  Variant (2)..(4): Xaa in position 2 to 4 is any amino acid
  Variant (5)..(5): Xaa in position 5 is Lys or Arg
  Variant (6)..(19): Xaa in position 6 to 19 is any amino acid
  Variant (20)..(20): Xaa in position 20 is Phe, Ile, Leu or Val
  Variant (21)..(21): Xaa in position 21 is any amino acid
  Variant (23)..(23): Xaa in position 23 is Asp, Glu, Asn or Gln
  Variant (25)..(27): Xaa in position 25 to 27 is any amino acid
  Variant (28)..(28): Xaa in position 28 is Ile, Leu or Val
  Variant (29)..(29): Xaa in position 29 is Asp or Thr
GXXXXXXXXXXXXXXXXXXXXDXPXXXXX

SEQ ID NO: 27639 - protein, 16 aa, Artificial sequence
  Consensus
  Variant (2)..(5): Xaa in position 2 to 5 is any amino acid
  Variant (6)..(6): Xaa in position 6 is Phe, Ile, Leu or Val
  Variant (7)..(7): Xaa in position 7 is any amino acid
  Variant (9)..(9): Xaa in position 9 is any amino acid
  Variant (10)..(10): Xaa in position 10 is Asn or Ser
  Variant (12)..(12): Xaa in position 12 is any amino acid
  Variant (15)..(15): Xaa in position 15 is any or no amino acid
GXXXXXXGXXGXGKXT

SEQ ID NO: 27640 - protein, 29 aa, Artificial sequence
  Consensus
  Variant (2)..(5): Xaa in position 2 to 5 is any amino acid
  Variant (6)..(6): Xaa in position 6 is Ile, Leu, Met or Val
  Variant (7)..(7): Xaa in position 7 is any amino acid
  Variant (8)..(8): Xaa in position 8 is Phe, Ile, Leu or Val
  Variant (9)..(17): Xaa in position 9 to 17 is any amino acid
  Variant (18)..(18): Xaa in position 18 is Phe, Ile, Leu, Met or Val
  Variant (19)..(19): Xaa in position 19 is any amino acid
  Variant (20)..(20): Xaa in position 20 is Phe, Ile, Leu or Val
  Variant (21)..(21): Xaa in position 21 is any amino acid
  Variant (24)..(28): Xaa in position 24 to 28 is any amino acid
GXXXXXXXXXXXXXXXXXXXXDEXXXXXD

SEQ ID NO: 27641 - protein, 7 aa, Artificial sequence
  Consensus
  Variant (2)..(2): Xaa in position 2 is any amino acid
  Variant (3)..(6): Xaa in position 3 to 6 is any or no amino acid
IXXXXXH

SEQ ID NO: 27642 - DNA, 1629 bp, Escherichia coli
  CDS (467)..(1513)
cgaagagccgaataaggttaccctaaccggagacgccaatctggacatgaactccctgttcggtagtcagaaagcgaccatgaaactgaagctgaaagcgctgcccgtgtttgataaagaaaaaggtgcgatcttcctgaaagagatggaagtggtcgatgcgacggtacaaccggaaaaaatgcaaacggtgatgcaaacgttgcttccctatttgaaccaggcattacgcaattactttaaccagcaacctgcttacgtcctgcgcgaagatggcagccagggcgaagcaatggcgaaaaaactggcgaaaggcattgaagtgaagccaggcgaaattgtcattccatttactgattaatcacgagggcgcattcgcgccctttatttttcgtgcaaaggaaaacgtttccgcttatcctttgtgtccggcaaaaacatcccttcagccggagcatagagattaatgactgcaccatcccaggtattaaagatccgccgcccagacgactggcaccttcacctccgcgatggcgacatgttaaaaactgtcgtgccatataccagcgaaatttatggacgggctatcgtaatgcccaatctggctccgcccgtgaccaccgttgaggctgccgtggcgtatcgccagcgtattcttgacgccgtacctgccgggcacgatttcaccccattgatgacctgttatttaacagattcgctggatcctaatgagctggagcgcggatttaacgaaggcgtgttcaccgctgcaaaactttacccggcaaacgcaaccactaactccagccacggcgtgacgtcaattgacgcaatcatgccggtacttgagcgcatggaaaaaatcggtatgccgctactggtgcatggtgaagtgacacatgcagatatcgacatttttgatcgtgaagcgcgctttatagaaagcgtgatggaacctctgcgccagcgcctgactgcgctgaaagtcgtttttgagcacatcaccaccaaagatgctgccgactatgtccgtgacggaaatgaacggctggctgccaccatcactccgcagcatctgatgtttaaccgcaaccatatgctggttggaggcgtgcgtccgcacctgtattgtctacccatcctcaaacgtaatattcaccaacaggcattgcgtgaactggtcgccagcggttttaatcgagtattcctcggtacggattctgcgccacatgcacgtcatcgcaaagagagcagttgcggctgcgcgggctgcttcaacgccccaaccgcgctgggcagttacgctaccgtctttgaagaaatgaatgctttgcagcactttgaagcattctgttctgtaaacggcccgcagttctatgggttgccggtcaacgacacattcatcgaactggtacgtgaagagcaacaggttgctgaaagcatcgcactgactgatgacacgctggtgccattcctcgccggggaaacggtacgctggtccgttaaacaataaaaatcgtagcttcctgttgtcattaggttattttacctgtataaataaccagtatattcaacagggggctattatgcgaattgaagtcaccatagcgaaaacttctccattgccag

SEQ ID NO: 27643 - protein, 348 aa, Escherichia coli [sequence omitted]

SEQ ID NO: 27644 - DNA, 1053 bp, Vibrio cholerae O1 biovar eltor str. N16961
  CDS (1)..(1053): transl_table=11
atgcattcatggtgggagcactcaatgacaacactgacgattacacgcccagacgactggcacgttcaccttcgcgatggcgatgtactggccgatactgtacgcgacatcagccgttataacggccgcgcgctgatcatgcctaacacggttccccctgtaaccaccactgagatggccttagcctatcgtgagcgcattatggccgctcagccacaagcgcactttgaacctttgatggcgctttacctcaccgataacacatcacctgaggaaattcgcaaagccaaagcgtcaggcaaagtcgttgcagctaagctttacccagccggtgcgaccaccaactcggattcaggcgtcacttcagccaaaaacatttacccagttttgcaagcgatgcaggaagtcggtatgttgctgttggtgcacggtgaagtcaccacgcacgaagtcgacatttttgaccgtgaaaagaccttcctagacaccgtgcttgcgccgatcgtgaatgatttcccgcaactgaaaattgtgcttgaacacatcaccaccgccgatgcagtgacctttgtgcaacaagcaggcgataacgttgcggcaacgattaccgcgcaccatttgctgtttaaccgtaaccacatgctggttggcggtattcgcccacatttctactgtttgccaatcctaaagcgtgcgactcaccaacacgcgttagtggcagcggcaacctctggcagcaagaaattcttcctaggtacggactctgccccgcacgccaaaggccgcaaagaagccgcttgtggctgcgcaggttcttacacagcccatgcagctcttgagttgtatgccgaagtgtttgaaaaagaaggtaagctagaaaatctggaagcgttcgctagctttaatggccctgatttctacggcctacctcgcaatcaagagaccgtcacgctcaccaagcaagcctggccagtcgcagaaagcatgccgtttggcagcgatatcgtggtgccaatccgcgccggtgaaaatatcgagtggacagtgaagtaa

SEQ ID NO: 27645 - protein, 350 aa, Vibrio cholerae O1 biovar eltor str. N16961
MHSWWEHSMTTLTITRPDDWHVHLRDGDVLADTVRDISRYNGRALIMPNTVPPVTTTEMALAYRERIMAAQPQAHFEPLMALYLTDNTSPEEIRKAKASGKVVAAKLYPAGATTNSDSGVTSAKNIYPVLQAMQEVGMLLLVHGEVTTHEVDIFDREKTFLDTVLAPIVNDFPQLKIVLEHITTADAVTFVQQAGDNVAATITAHHLLFNRNHMLVGGIRPHFYCLPILKRATHQHALVAAATSGSKKFFLGTDSAPHAKGRKEAACGCAGSYTAHAALELYAEVFEKEGKLENLEAFASFNGPDFYGLPRNQETVTLTKQAWPVAESMPFGSDIVVPIRAGENIEWTVK

SEQ ID NO: 27646 - DNA, 1008 bp, Campylobacter jejuni subsp. jejuni NCTC 11168
  CDS (1)..(1008): transl_table=11
atgaaacttaaaaatcctttagatatgcatttgcatttaagagataaccaaatgttagaacttattgcacctttgagtgcaagagatttttgtgcagctgtgattatgccaaatttaatccctccgctttgcaatttagaagatctaaaagcttataaaatgcgtatccttaaggcttgtaaagatgaaaatttcactcctttaatgacacttttttttaaaaattatgatgagaaatttctttacagtgctaaagatgaaatttttggcattaagctttatccagcaggaattacaacaaattcaaatggtggagtttcaagttttgatatagagtatttaaaacctactttagaggctatgagtgatttaaatattcctttgctagtgcatggtgaaaccaatgattttgtaatggacagggaaagtaattttgctaaaatttatgaaaaattagccaaacattttccacgacttaagattgttatggagcatattaccactaaaactttatgtgaacttttaaaagattatgaaaatttatacgcgacaatcactttacatcatttaatcatcactttagatgatgttatcggaggtaaaatgaatcctcatcttttttgtaagcctatagccaagcgttacgaagataaagaagccctttgcgaacttgcttttagtggttatgaaaaagttatgtttggaagtgatagtgcgcctcatccaaaagatactaaagagtgttgcggttgtgccgcaggtgtatttagtgccccagtgattttacctgttttagctgaattatttaagcaaaatagctcagaagaaaatttgcaaaaatttttaagcgataatacttgtaaaatttatgatttaaaatttaaagaagataaaattttaactttagaagaaaaagaatggcaagtaccaaatgtttatgaagataaatacaatcaagtcgtgccttatatggctggagaaattttgaaatttcaattaaaacattga

SEQ ID NO: 27647 - protein, 335 aa, Campylobacter jejuni subsp. jejuni NCTC 11168
MKLKNPLDMHLHLRDNQMLELIAPLSARDFCAAVIMPNLIPPLCNLEDLKAYKMRILKACKDENFTPLMTLFFKNYDEKFLYSAKDEIFGIKLYPAGITTNSNGGVSSFDIEYLKPTLEAMSDLNIPLLVHGETNDFVMDRESNFAKIYEKLAKHFPRLKIVMEHITTKTLCELLKDYENLYATITLHHLIITLDDVIGGKMNPHLFCKPIAKRYEDKEALCELAFSGYEKVMFGSDSAPHPKDTKECCGCAAGVFSAPVILPVLAELFKQNSSEENLQKFLSDNTCKIYDLKFKEDKILTLEEKEWQVPNVYEDKYNQVVPYMAGEILKFQLKH

SEQ ID NO: 27648 - DNA, 1047 bp, Salmonella typhimurium LT2
  CDS (1)..(1047): transl_table=11
atgactgcaccatcccaggttttaaagatccgccgcccggacgactggcacgttcaccttcgcgatggcgacatgttaaaaacggtcgtaccctataccagcgaaatttatggtcgcgctatcgtgatgccgaacctggcgtcccccatcacgaccgttgatgcagcgatcgcctaccgccagcgtattctcgatgcggtgcccgccgggcatgatttcacgccgttaatgacctgctatttaacggattcgctcgatgccgatgaactggagcgtggtttccatgaaggcgtatttactgcggctaagctttacccggccaatgccaccactaactccagtcatggcgtaacgtcagtcgacgctatcatgccggtactggagcggatggaaaaactcggaataccattgctggtccacggggaggtgacccatgcggatgttgatatattcgatcgtgaagcgcgttttatcgacaccgtaatggaaccgctacgccagcgtctgaccgcgcttaaagtggtctttgagcacatcacgaccaaagatgccgcgcagtatgtacgtgacggcaacgactacctggcggctaccattacgcctcaacatttaatgtttaaccgtaatgatatgctggtcggcggcattcgtcctcacctgtactgtctgccgattctgaaacgcaatattcaccagcaggcgttacgcgaactggttgccagtggttttacgcgcgccttcctggggacggattcagcgccgcattcacgtcatcgtaaagagaccagttgcggctgcgccggttgtttcaacgccccctccgcccttggcagttatgccgccgtgtttgaggaaatgaacgcgctggcgcactttgaagcgttctgttcactgaatggcccgcaattctatggcctgccgatgaatacggggtgggtggaactggttcgcgatgaacaacagataccgggaaatatcgcgctggctgatgattctctggtgccttttttagcgggtgaaacagtacgctggtcagtaaaaaaataa

SEQ ID NO: 27649 - protein, 348 aa, Salmonella typhimurium LT2
MTAPSQVLKIRRPDDWHVHLRDGDMLKTVVPYTSEIYGRAIVMPNLASPITTVDAAIAYRQRILDAVPAGHDFTPLMTCYLTDSLDADELERGFHEGVFTAAKLYPANATTNSSHGVTSVDAIMPVLERMEKLGIPLLVHGEVTHADVDIFDREARFIDTVMEPLRQRLTALKVVFEHITTKDAAQYVRDGNDYLAATITPQHLMFNRNDMLVGGIRPHLYCLPILKRNIHQQALRELVASGFTRAFLGTDSAPHSRHRKETSCGCAGCFNAPSALGSYAAVFEEMNALAHFEAFCSLNGPQFYGLPMNTGWVELVRDEQQIPGNIALADDSLVPFLAGETVRWSVKK

SEQ ID NO: 27650 - DNA, 1182 bp, Agrobacterium tumefaciens str. C58
  CDS (1)..(1182): transl_table=11
atgtctggggtccggaagcgggcaacatctgacgcacgcttcaaaaaaatgacatttacagctgccggatggtctctggcggctgttttcccgcgacaaaagatgctaagcgggcgcaattccatcatgttccgaggtatcccgatgaagtcgctcaccctgcgccgccctgatgactggcacctgcatcttcgtgatggcgccatgctggaaggggtgatcggggatacgagccgccatttcgcccgcgccatcatcatgccgaatctggtgccgcccgtcgtcaccacggccgatgccagcgcctatcgagaacgcatcctcaaggcgatcccggagggtgaccgcttcgagccgctgatgaccctctacctcactgaggatactgttgctgatgacgtggaagagggcaaaaaaagcggcctcatcaccgccgtaaagctctatcctgcgggtgcgaccaccaattctcatggcggcgtgcgcgatttcaacaaggcgatgccggtgctggaacgcatggcaaagatcggcctgccgctctgcgtgcatggcgaggtgacgacgccagacgtcgatattttcgaccgcgagaaggccttcatcgatacggttctggagcccctgcgccagcgcctgccagagttgaaggtgacgatggaacacatcaccacccgcgatggcgtggactacatcaagtcttccaatgccaatctggccggctccatcaccacgcaccacctcatcatcaaccgcaacgccattctggtcggcggtatcaagccgcattattattgcctgcccgtcgccaagcgcgaggagcatcgtctggcgctgcgggctgctgcgacgtcgggtgatgcccgcttcttcctcggcacggattccgccccacatgtggacccgctgaaagaatgcgcctgcggctgtgctggcatctatacttccatcaacaccatgagctgccttgcccatgtcttcgaggatgagaatgccctcgataagctggaggccttcgcctcgctcaacggcccggcctggtatggtcttgcgccgaacgacgagacgatcacgctggtcaagcgcgaggaagcggtggcgtttcccgaaaagatcgaaacgggcgccgggccggtgaccgtattcgatccgatgttcccgcttcattgggatgtaaactga

SEQ ID NO: 27651 - protein, 393 aa, Agrobacterium tumefaciens str. C58
MSGVRKRATSDARFKKMTFTAAGWSLAAVFPRQKMLSGRNSIMFRGIPMKSLTLRRPDDWHLHLRDGAMLEGVIGDTSRHFARAIIMPNLVPPVVTTADASAYRERILKAIPEGDRFEPLMTLYLTEDTVADDVEEGKKSGLITAVKLYPAGATTNSHGGVRDFNKAMPVLERMAKIGLPLCVHGEVTTPDVDIFDREKAFIDTVLEPLRQRLPELKVTMEHITTRDGVDYIKSSNANLAGSITTHHLIINRNAILVGGIKPHYYCLPVAKREEHRLALRAAATSGDARFFLGTDSAPHVDPLKECACGCAGIYTSINTMSCLAHVFEDENALDKLEAFASLNGPAWYGLAPNDETITLVKREEAVAFPEKIETGAGPVTVFDPMFPLHWDVN

SEQ ID NO: 27652 - DNA, 1077 bp, Plasmodium falciparum 3D7
  CDS (1)..(1077)
atgaaaaattacttttatattccaatagctgatgacatgcactgtcacttaaggcaaggcgacatgctggattttacggtaaattccattagaagaggcggctgtaatcgtgttttagtgatgccgaacacgcatcctattataagtacttgtagtgatgcacaaaaatatttatatcaactgaaaagtcgtgatgatgatatagaatatttaatgaccttgtatttgaataagaatacggatgaaaacgatatattaagtaattactataagtgtaatttacaaggcgtaaaaatatatcctagtaatgtaaccactaattcgagtgatggtattactagcctagaaccttattataaggtatttcatgcactagaaaaattaaataagagtatacatatccattgtgaggaaccaaatataaatccattatatgctgaggaaaagtatttaccgcatatacatgatttagccataaagtttccaggtttgaatattgttttagaacatatatcgtcaagcgaatcgataaatgttattaaagaatttcgaaatgtagcaggttccataacacctcatcatttatatttaacaatagatgatgttgttaatatggatatatatgatcatgcaatagataacacatatattgaaaaatatataaaaaatacatatcattattgtaagccattaccaaaattgttagaagataaaattgctttacaagatgttataaaagatgattttccaagagtctttttgggttcggattcagcacctcattacaaagttatgaagcgcaaaccctactataaaccaggaatatacacacaaccatttttaataaattatgttgctcatatattgaacaaattcgatgctttagataagatggaaaattttacctcaaaaaatgcttccctctttctaaatttagcagaaaaaaaaaaattggcaaaatattacatatgtgtggaaaaacatccatttaaattaccaagagaatataatggtgtagtcccctttttggcagggaagactttggattatgacatacattatgtaagtaagttttaa

SEQ ID NO: 27653 - protein, 358 aa, Plasmodium falciparum 3D7
MKNYFYIPIADDMHCHLRQGDMLDFTVNSIRRGGCNRVLVMPNTHPIISTCSDAQKYLYQLKSRDDDIEYLMTLYLNKNTDENDILSNYYKCNLQGVKIYPSNVTTNSSDGITSLEPYYKVFHALEKLNKSIHIHCEEPNINPLYAEEKYLPHIHDLAIKFPGLNIVLEHISSSESINVIKEFRNVAGSITPHHLYLTIDDVVNMDIYDHAIDNTYIEKYIKNTYHYCKPLPKLLEDKIALQDVIKDDFPRVFLGSDSAPHYKVMKRKPYYKPGIYTQPFLINYVAHILNKFDALDKMENFTSKNASLFLNLAEKKKLAKYYICVEKHPFKLPREYNGVVPFLAGKTLDYDIHYVSKF

SEQ ID NO: 27654 - DNA, 1032 bp, Shewanella oneidensis MR-1
  CDS (1)..(1032): transl_table=11
atgaaaacactcacaattacgcgtcctgacgactggcatattcacctaagagacggcgcccaattaaccgataccgttcgcgacatcagccgctatatgggccgcgcgatcgtcatgcctaacttagtgccccccgcgatcgataccgaaaccgccttggcgtactacgatcgcatcaaggcgcgagtgcccgcaggctcgcaatttgagcccttaatggtgctgtatctcaccgacaaaaccagcccagacgaaatccgtaaagctaaagcctcgggcaaagtctttgccgctaagctctatcctgctggcgcgacgacgaactcagactctggcgtcaccgatttaaaaaatatctaccctgccctcgaagcgatgcaggaagtcggcatgttgtttttagtgcacggcgaagtgactgactcatcgattgatattttcgaccgtgagcgcgtgtttattgagaatatcttgagcaagatcgtgactgattttccaaacctcaaaatcgtcctcgagcatatcaccactaaagatgccgtcgattttgtgactcaagcctctgataatgtggccgccacgatcaccgcgcaccatttactttataaccgcaaccatatgttggctggcggtattcgcccgcatttttattgcctaccgattttaaagcgcaatactcaccagcaagcactgttagcggctgcagccagtggcaataaaaagttcttcctcggtactgactcggcgccacacgcgaaagaccgcaaagaggccgcctgcggctgtgcgggttcttatactgcccatgcggcaattgagctgtatgccgaagcctttgaatcggtgaatgcgctggataaattagaagcctttgccagttttaacggcccagatttttacaatctaccccgcaatagcgataccatcaccttggtgaaaaaagcgtgggacattcccgcaagttatccgcttggcgacacaaatgtcgtccccatccgcgctggcgaacaaattgattggcaggttgaataa

SEQ ID NO: 27655 - protein, 343 aa, Shewanella oneidensis MR-1
MKTLTITRPDDWHIHLRDGAQLTDTVRDISRYMGRAIVMPNLVPPAIDTETALAYYDRIKARVPAGSQFEPLMVLYLTDKTSPDEIRKAKASGKVFAAKLYPAGATTNSDSGVTDLKNIYPALEAMQEVGMLFLVHGEVTDSSIDIFDRERVFIENILSKIVTDFPNLKIVLEHITTKDAVDFVTQASDNVAATITAHHLLYNRNHMLAGGIRPHFYCLPILKRNTHQQALLAAAASGNKKFFLGTDSAPHAKDRKEAACGCAGSYTAHAAIELYAEAFESVNALDKLEAFASFNGPDFYNLPRNSDTITLVKKAWDIPASYPLGDTNVVPIRAGEQIDWQVE

SEQ ID NO: 27656 - DNA, 1044 bp, Vibrio vulnificus CMCP6
  CDS (1)..(1044): transl_table=11
atggtgggagcaacaatgacaacacttactattactcgtcctgatgattggcacgtacacttgcgcgatggcgaagttttggcagataccgttcgtgatatcagccgttacaatggccgcgcactcatcatgccaaacactgtcccacccgtcaccacgtctgaaatggcgcttgcctatcgcgatcgcattcaagcacataaccaaacagaacaattttctccgcttatgtcgctgtatttgaccgacaacacaactgcggatgaagtacgcaaagccaaggccagcggtgctgtggtcgcagcaaaactgtatccagcaggcgcgacaactaactccgattctggcgtgacggatgtaaagaaaatttatccagtccttcaagccatgcaagaagtgggcatgttgctactggtacacggcgaagtgaccacacacgatgtggacatctttgatcgcgaaaaaacctttttagacaatgtgttggcgccgattgttcaagacttccctgatttgaaaattgtcctcgaacacatcaccacctcagatgcggttgtgtttgtgaaaaatgccaatgaaaacgttgccgcaaccattaccgctcatcacctgctgtacaaccgcaatcacatgttagtaggcggcatcaagccccacttctactgcttgccaattcttaaacgcaacacccaccagcttgcgttgatctctgctgcgacgagtggcaacaagaagttctttttgggtacggactctgcgccacacgccaaaggcgcaaaagaatccgcttgtggttgcgcgggctcttacacggctcacgccgctgtggaactgtatgcagaagtgtttgagcaagcgggcaagttggaaaatctcgaagcgtttgccagccataacggcccggatttttacggtcttcctcgtaaccaagatacgatcactttggtcaaagacgcatggcctgttcctgcttcaatgccatttggtggtgatattgtggtgccaattcgcgctggtgaaaacatggagtggaaggttaagtaa

SEQ ID NO: 27657 - protein, 347 aa, Vibrio vulnificus CMCP6
MVGATMTTLTITRPDDWHVHLRDGEVLADTVRDISRYNGRALIMPNTVPPVTTSEMALAYRDRIQAHNQTEQFSPLMSLYLTDNTTADEVRKAKASGAVVAAKLYPAGATTNSDSGVTDVKKIYPVLQAMQEVGMLLLVHGEVTTHDVDIFDREKTFLDNVLAPIVQDFPDLKIVLEHITTSDAVVFVKNANENVAATITAHHLLYNRNHMLVGGIKPHFYCLPILKRNTHQLALISAATSGNKKFFLGTDSAPHAKGAKESACGCAGSYTAHAAVELYAEVFEQAGKLENLEAFASHNGPDFYGLPRNQDTITLVKDAWPVPASMPFGGDIVVPIRAGENMEWKVK

SEQ ID NO: 27658 - DNA, 1056 bp, Coxiella burnetii RSA 493
  CDS (1)..(1056): transl_table=11
atggcgtatatgaaaaaaataactttaattcgcccggacgattggcattgtcatctccgcgatggatcttatctcccacgcaccgtcgcagacattgctgctcaatttaatcgagccattgtaatgccaaaccttgtaccgccgatcacgactgtccaacaagcaaaagcgtactatgatcgcattaaagcgcacgttcctaaatccagtaactttgaaccgctgatgacactttatctcaccgaatccaccccccaacaagaaatcaaagccgcgcaacaatcgggaattattgtcgcctgcaaactttatcccgcgggcgctaccactcattctcaagccggggtaaaagatctcaaagcaatttatacgttgttggaaaccatgcaatcggtcgatttaccacttttaattcatggggaggttgttgattacgcagtcgatatttttgaccgtgaagcggtttttattgaacgcgagctcctgcctttagtagaaacatttcctcaacttcgcattgtctttgaacatatttctactaaaattgctgttgattttgttttagaagctccttctaaacttggcgcaaccattacgccgcatcatttgctattcaatcgaaatgatctactaagcggcagcatccgacctcactattactgccttcctattttaaaaaccagcgaagaccaaatggccttaattcaagcagccaccagcggaaatccaaaattttttttgggcaccgatagcgccccccattcgcaaacaaaaaaacaatccatttgcggctctgcgggtatttacaatgcacccgcggctatagcgctttacgcagaaattttcgcgagccaaaatgctctagataaattggagggtttcgccagtcgtttcggcgcagagttttatggattaccactaaataacagccaaattacactcatccatcaaccatggcaggtcgcagagtcgctcccctttggcaatgaactcgttgtgccactttttgcgggccaaaccttgcagtggcagataaaatcccatgaacacaaataa

SEQ ID NO: 27659 - protein, 351 aa, Coxiella burnetii RSA 493
MAYMKKITLIRPDDWHCHLRDGSYLPRTVADIAAQFNRAIVMPNLVPPITTVQQAKAYYDRIKAHVPKSSNFEPLMTLYLTESTPQQEIKAAQQSGIIVACKLYPAGATTHSQAGVKDLKAIYTLLETMQSVDLPLLIHGEVVDYAVDIFDREAVFIERELLPLVETFPQLRIVFEHISTKIAVDFVLEAPSKLGATITPHHLLFNRNDLLSGSIRPHYYCLPILKTSEDQMALIQAATSGNPKFFLGTDSAPHSQTKKQSICGSAGIYNAPAAIALYAEIFASQNALDKLEGFASRFGAEFYGLPLNNSQITLIHQPWQVAESLPFGNELVVPLFAGQTLQWQIKSHEHK

SEQ ID NO: 27660 - DNA, 1050 bp, Nitrosomonas europaea ATCC 19718
  CDS (1)..(1050): transl_table=11
ttgaacgacacagcagacaagctgacttttacccgtccggatgactggcacctgcatttgcgtgacggtaacgccatgcggtcggtgttgcccgataccgcccggcgttttgcgcgcgccatcatcatgccgaacctcaagccgcccatcgtgacgactgaacaggcagctgcctatcgtgtccgtattctgtctgctttaccggctgagctggccgggcggttcgagccgctgatgacgctatacctgacggatacgacatcacccgaagaaattactcgggctcaggcaagtggtatcgtgcaaggtatcaagctctaccctgctggagcgaccacacattccgatgcgggtgtcacggatattgcacgctgcgaggctacgctggagaagatggaagagctcgacatgcctttactcgtgcatggagaagtggtcgatcctgcagtggatgttttcgaccgggaaaaaattttcattgaccgggtactgacgccgctactgcaacgctttcccgggctgcgagtggtattcgaacatatcactaccagagaggcagtcgagtttgtgcagacggctccaaaccggattgctgccacgattaccgcacaccacctgatgctgaaccggaatgccctgtttaccggcggattgcgtccgcatcattactgtttgccggtactgaaacgggaaatacatcgtcaggcactgctggaagcagcgaccagcggtcattccagattcttccttggtaccgacagcgcaccacatccggtcagagacaaagaatcagcctgtgggtgtgcgggtatttacagtgctcatgcagccatcgaattttatgccgaggtattcgaacaggctggccggctcgatcgactggaggcttttaccagctttcacggccccgatttctatggtttaccacgtaataccgatcggatttccctgatcagggaaagctggcagattccggagcaggtcgaattgggtgaagaaaaattgatccccctcagagcaggggaacacgctcgctggaaactggcatga

SEQ ID NO: 27661 - protein, 349 aa, Nitrosomonas europaea ATCC 19718
MNDTADKLTFTRPDDWHLHLRDGNAMRSVLPDTARRFARAIIMPNLKPPIVTTEQAAAYRVRILSALPAELAGRFEPLMTLYLTDTTSPEEITRAQASGIVQGIKLYPAGATTHSDAGVTDIARCEATLEKMEELDMPLLVHGEVVDPAVDVFDREKIFIDRVLTPLLQRFPGLRVVFEHITTREAVEFVQTAPNRIAATITAHHLMLNRNALFTGGLRPHHYCLPVLKREIHRQALLEAATSGHSRFFLGTDSAPHPVRDKESACGCAGIYSAHAAIEFYAEVFEQAGRLDRLEAFTSFHGPDFYGLPRNTDRISLIRESWQIPEQVELGEEKLIPLRAGEHARWKLA

SEQ ID NO: 27662 - DNA, 1032 bp, Helicobacter hepaticus ATCC 51449
  CDS (1)..(1032): transl_table=11
atgccacaaacattacaactcacaaaccctatggatatgcatcttcatttgcgcgagggagaaatgcttagtgctatcttgccttttagtgcaaatccttttagtgctgctgttgttatgccaaatcttaaaacccctattaccactactgcacaagctcttgcatacaaaaggcagattctatcactttgttctacatcatttgaaccacttatgagtatttttcttactccagaccttgacaaacaagaacttatacgtgctaaagaagcaggcattcatattcttaaactttatcctaagggctcaactacgggaagtgagaagggcgttaaagagatgttatgcgaaaagacacttcatatctttgagattgctcaagaattaggctttattctctccatacacggcgagagtaatggcttttgtatggaaagagaatatgaatttttgcctatttttgcccatattgcacaacatttccctcgtcttcgcataatcattgagcatatgagcgataggcgtagtcttgagttgattgaacaatacccaaatctctatgctacacttacattacatcacattactatgaatcttgatgacgtgcttggtggggggattaatcctcatcacttctgcaaacctatgcttaaaaccaaaaaagaccaacaagccttgctgcaagctgctctaaatgctcacccaaaagtaagttttgggtcggattctgcgcctcatttagaatctgcaaaacttaactccaaaggtgcagcggggattttttctgcccctattttactcccagcccttgctgaagtttttgcatttcataacgcccttgattgcttgcaaacatttataagcaatagggctatcgcgaactacaagctaaagcattttccgattaaaaccatcacgcttgagcgtgtggaaaatccagtgcctccttacattaatacacctcttgggcatattataccactccgagcgcaaacaaatctctcttggcgcattaaagaggaaaatagatga

SEQ ID NO: 27663 - protein, 343 aa, Helicobacter hepaticus ATCC 51449
MPQTLQLTNPMDMHLHLREGEMLSAILPFSANPFSAAVVMPNLKTPITTTAQALAYKRQILSLCSTSFEPLMSIFLTPDLDKQELIRAKEAGIHILKLYPKGSTTGSEKGVKEMLCEKTLHIFEIAQELGFILSIHGESNGFCMEREYEFLPIFAHIAQHFPRLRIIIEHMSDRRSLELIEQYPNLYATLTLHHITMNLDDVLGGGINPHHFCKPMLKTKKDQQALLQAALNAHPKVSFGSDSAPHLESAKLNSKGAAGIFSAPILLPALAEVFAFHNALDCLQTFISNRAIANYKLKHFPIKTITLERVENPVPPYINTPLGHIIPLRAQTNLSWRIKEENR

SEQ ID NO: 27664 - DNA, 1050 bp, Wigglesworthia glossinidia endosymbiont of Glossina brevipalpis
  CDS (1)..(1050): transl_table=11
atgttattaaaaataataaagccagatgattttcacatacatctcagagaaaaagaaatactaaaaaaaattcttccttatactagtcaattttttggaagagcattagtaatgcctaatttaaatcaaccaattataaattctcattttgcaagtgtttataaaaaagaaatatgttcttttattcctaaattacataaatttaatccattaatgactttatatttaactgaaaattgcgataaaaagatgttagttgatggatttttaaataaaattttcattgcagctaaaatgtatatatcaaatactactactaattctgaaaaaggaataaaaaattttgaaaatatatttcatatattagaaattatgcaaaaaataggaatgattttatcagttcatggagaaataagcgatgaaaaaacagatatattcgacagagaagctaaatttatagaaaaagtaatgattccaatacgtaaaaattttcctaaattaaaaattgtttttgaacatatttctacaaaaatagctgtggaatatgtaatatcagaagattcattattaggagcaactataactccacatcatttaatgtttaattataatgatatgttatcaaataaaataaaaccacatttatattgttttccaattttaaaaaaaaaaatagatcaatttgccttacataaggctatatctggaaattgtaatagattttttcttggaactgatagtgctcctcatgttttgaaaaacaaagaatctagcatgggattcgcaggaatatttaattctccaattgctcttgaaatgtatgctacagtttttgacaatcttaatattttaaataaattagaaaatttttgttctataaatggagctaatttctataatttaccgatcaataaagaacacattactttttttaaagaaactttttatcctaataaaaaacaaattattaaaataaataaaaataattatctatctccaattttcttcgagaaaaaattaaattggaaaataaaattaaaagaatattaa

SEQ ID NO: 27665 - protein, 349 aa, Wigglesworthia glossinidia endosymbiont of Glossina brevipalpis
MLLKIIKPDDFHIHLREKEILKKILPYTSQFFGRALVMPNLNQPIINSHFASVYKKEICSFIPKLHKFNPLMTLYLTENCDKKMLVDGFLNKIFIAAKMYISNTTTNSEKGIKNFENIFHILEIMQKIGMILSVHGEISDEKTDIFDREAKFIEKVMIPIRKNFPKLKIVFEHISTKIAVEYVISEDSLLGATITPHHLMFNYNDMLSNKIKPHLYCFPILKKKIDQFALHKAISGNCNRFFLGTDSAPHVLKNKESSMGFAGIFNSPIALEMYATVFDNLNILNKLENFCSINGANFYNLPINKEHITFFKETFYPNKKQIIKINKNNYLSPIFFEKKLNWKIKLKEY

SEQ ID NO: 27666 - DNA, 1080 bp, Prochlorococcus marinus subsp. marinus str. CCMP1375
  CDS (1)..(1080): transl_table=11
ttgtctaaagaacgaattactttgcgccaacctgatgattggcatttacatcttagagatggagatattttaaatgctgtggttccccctacagcaaaagtgtttcgtcgtgcagtagtaatgcccaacttgcaaccaccaataacaagtcttcaagctgcaattgattacaagcagagaatcatgaatgcaattcccactgaggttgcattcactcctcttatgactgtatatctcactgatgatatttcttctgaggttttaagagaaggtcacaaagaaggtgttttgatggcagcaaaattatatccagcaaattcaacgactaattcatctggcggtgttactgatataaagaatatttactctattttcgagacaatggaggagattgggttgccattgcttatacatggagaggttacagatcaagatgtagatatttttgatagagaatcagtgtttattgagagatatcttgatcctttgcttactaaatttcctgatatacgaactgttttagaacatattacaacggatgatgctgttcaatatgttcaagcaagtaatgcaaaactagcggccacaataactccccatcatttgcatataaataggaatgcaatttttcaggatggattaagaagtgactttttttgtttgccagtagctaaaagagaacgtcatcgtattgcattgagacgtgcagccataagtggagaaccttgctttttccttgggactgactccgcacctcaccttagagaatccaaggaaagtgcttgtggttgtgccggtatttttaatgcgattaatgcaattgaaagttatgctcaagtttttgatgaagaaggtgccattgaacgcttagaagcttttgcaagcgaattcggcccagcattttataaattaccgttaaatgaaaactctataaccttagttaaaaaagcaattaaaattccttccaggtttgaactgaataatgcagatgatttgtctaattatatagtcccttttcatgctggagagactttgaattggtctttcgaatcaatacaacctttctctcaaaaagtatga

SEQ ID NO: 27667 - protein, 359 aa, Prochlorococcus marinus subsp. marinus str. CCMP1375
MSKERITLRQPDDWHLHLRDGDILNAVVPPTAKVFRRAVVMPNLQPPITSLQAAIDYKQRIMNAIPTEVAFTPLMTVYLTDDISSEVLREGHKEGVLMAAKLYPANSTTNSSGGVTDIKNIYSIFETMEEIGLPLLIHGEVTDQDVDIFDRESVFIERYLDPLLTKFPDIRTVLEHITTDDAVQYVQASNAKLAATITPHHLHINRNAIFQDGLRSDFFCLPVAKRERHRIALRRAAISGEPCFFLGTDSAPHLRESKESACGCAGIFNAINAIESYAQVFDEEGAIERLEAFASEFGPAFYKLPLNENSITLVKKAIKIPSRFELNNADDLSNYIVPFHAGETLNWSFESIQPFSQKV

SEQ ID NO: 27668 - DNA, 1080 bp, Bordetella pertussis Tohama I
  CDS (1)..(1080): transl_table=11
ttgaggcccgcttccatgtccaaccaacacgctacagaacttaccatcacccgcccggacgattggcacctgcacctgcgcgatggcagcgccctcgaggcggtggtgctggatacggcgcggcagttcgcgcgcgccatcgtgatgcccaacctccgcccgccggtgaccaccaccgagcaggcgctggtctatcgcgcgcggatcgaagcggcgctgcgcaaggcgggtggcgatacggctgccttcacgcccttgatgacgctgtacctgaccgacaacacgccggccgaggaaatcgtgcgcgcgcatgagtccgggcaggtcgccgcggtcaagctgtatccggccggggccaccacaaactccgatgccggcgtgaccgacctgctgggcaagtgcggcgccgcgctggctgcgctggagcgctgcggcatgccgctgctggtgcacggcgaggtgaccgatccggcgatcgacgtgttcgaccgcgaagcggtgttcatcgaacgtgtcatgcagccgctgcggcgcgcgtatcccggcctgaaggtggtgttcgagcacatcacgacccgggaaggcgcccactacgtgcgcgacgcggaaggacccaccgccgcgaccatcacgccgcagcacatgctctacaaccgcaatgcgattttcacgggcggcgtgcggccgcattggtattgcctgccgatcctcaagcgcgaggtgcatcgccaggccctggtcgaggcggccaccagcggcagtccgcgtttcttcctgggtaccgacagcgcgccccatgcgcgcggcctgaaggaacatgcctgtggttgcgcgggctgctatacggccctgcatgcaatggagctttacgccaccgcgttcgacgcggtcggccgcctggatcggctggaaggctttgccagcttccacggcccggatttttacggcctgccgcgcaatacgggtacgctcacgctgcggcgcgaagcctacgaaattccggcggaggtcgcgttcggcgatacgaccctggtgccgctgtccggcggcgagtcgctcggctggcgggccctggcctga

SEQ ID NO: 27669 - protein, 359 aa, Bordetella pertussis Tohama I
MRPASMSNQHATELTITRPDDWHLHLRDGSALEAVVLDTARQFARAIVMPNLRPPVTTTEQALVYRARIEAALRKAGGDTAAFTPLMTLYLTDNTPAEEIVRAHESGQVAAVKLYPAGATTNSDAGVTDLLGKCGAALAALERCGMPLLVHGEVTDPAIDVFDREAVFIERVMQPLRRAYPGLKVVFEHITTREGAHYVRDAEGPTAATITPQHMLYNRNAIFTGGVRPHWYCLPILKREVHRQALVEAATSGSPRFFLGTDSAPHARGLKEHACGCAGCYTALHAMELYATAFDAVGRLDRLEGFASFHGPDFYGLPRNTGTLTLRREAYEIPAEVAFGDTTLVPLSGGESLGWRALA

SEQ ID NO: 27670 - DNA, 1080 bp, Bordetella bronchiseptica RB50
  CDS (1)..(1080)
atgaggcccgcttccatgtccaaccaacacgctacagaacttaccatcacccgcccggacgattggcacctgcacctgcgcgatggcagcgccctcgaggcggtggtgctggatacggcgcggcagttcgcgcgcgccatcgtgatgcccaacctccgcccgccggtgaccaccaccgagcaggcgctggcctatcgcgcgcggatcgaagcggcgctgcgcaaggcgggtggcgatacggctgccttcacgcccttgatgacgctgtacctgaccgacaacacgccggccgaggaaatcgtgcgcgcgcatgagtccgggcaggtcgccgcggtcaagctgtatccggccggggccaccacaaactccgatgccggcgtgaccgacctgctgggcaagtgcggcgccgcgctggctgcgctggagcgctgcggcatgccgctgctggtgcacggcgaggtgaccgatccggcgatcgacgtgttcgaccgcgaagcggtgttcatcgaacgtgtcatgcagccgctgcggcgcgcgtatcccggcctgaaggtggtgttcgagcacatcacgacccgggaaggcgcccactacgtgcgcgacgcggaaggacccaccgccgcgaccatcacgccgcagcacatgctctacaaccgcaatgcgattttcacgggcggcgtgcggccgcattggtattgcctgccgatcctcaagcgcgaggtgcatcgccaggccctggtcgaggcggccaccagcggcagtccgcgtttcttcctgggtaccgacagcgcgccccatgcgcgcggcctgaaggaacatgcctgtggttgcgcgggctgctatacggccctgcatgcaatggagctttacgccaccgcgttcgacgcggtcggccgcctggatcggctggaaggctttgccagcttccacggcccggatttttacggcctgccgcgcaatacgggtacgctcacgctgcggcgcgaagcctacgaaattccggcggaggtcgcgttcggcgatacgaccctggtgccgctggccggcggcgagtcgctcggctggcgggccctggcctga

SEQ ID NO: 27671 - protein, 359 aa, Bordetella bronchiseptica RB50
MRPASMSNQHATELTITRPDDWHLHLRDGSALEAVVLDTARQFARAIVMPNLRPPVTTTEQALAYRARIEAALRKAGGDTAAFTPLMTLYLTDNTPAEEIVRAHESGQVAAVKLYPAGATTNSDAGVTDLLGKCGAALAALERCGMPLLVHGEVTDPAIDVFDREAVFIERVMQPLRRAYPGLKVVFEHITTREGAHYVRDAEGPTAATITPQHMLYNRNAIFTGGVRPHWYCLPILKREVHRQALVEAATSGSPRFFLGTDSAPHARGLKEHACGCAGCYTALHAMELYATAFDAVGRLDRLEGFASFHGPDFYGLPRNTGTLTLRREAYEIPAEVAFGDTTLVPLAGGESLGWRALA

SEQ ID NO: 27672 - DNA, 1050 bp, Prochlorococcus marinus subsp. pastoris str. CCMP1986
  CDS (1)..(1050): transl_table=11
ttgaaagaattaactatatcaaaaccggatgattggcatttacatttaagggaaggcattgttttaaaaaatattattaggtttacatctcaatattttggtagggctattgtgatgccaaacaccaaaaacccaataacatctatagaaaaatgtatttcttataaaaattctatatttgaagcattgtctaataattctacatttgagccattaatgacgatatatcttacggacgagacaataaaacatgaattagtagaaggttttaaaaataaagttttctttgctgccaaattgtatcctgctaatgcaacaacaaattccagacatggagttaaaaaaatagaaaatctttatgaaatttttgaagttatgcaagaacttggaatgccacttttaattcatggagaagtcactgaccctgaagtagatatttttgatagggaagaagtttttattgataaagaactttcacctttaatacaacaattcccaagattaaagattgttttagagcatataactacctcttatgcagttgattttgttcagaggaataacttaggagctactattactccacatcatttacacataaatagaaatgcaatgttctttggaggtttaaatagtgacttttactgcttaccagtcgcaaagagagaaaacaatagaattgctttaaggaaagctgctactagtggaaaagaatgttttttcataggcacggattctgctcctcacttaagacagtggaaagctttttgtggttgtgcaggcatttttaattctccagtagcaatagaaagctatttaaaagtttttgaggaggaaaatgcacttaatcaattcgaaaaatttgccagcttgaatgggcctaatttttataatctacctattaataacgaaaaaattagattggtatcaaggtcaaataaaattccagaatttattgaagtaattgaacaaaataaggttgttggacaaataaaaccatttcatggaggtgaaactttaacttggcgagtagagggagttgttaaataa

SEQ ID NO: 27673 - protein, 349 aa, Prochlorococcus marinus subsp. pastoris str. CCMP1986
MKELTISKPDDWHLHLREGIVLKNIIRFTSQYFGRAIVMPNTKNPITSIEKCISYKNSIFEALSNNSTFEPLMTIYLTDETIKHELVEGFKNKVFFAAKLYPANATTNSRHGVKKIENLYEIFEVMQELGMPLLIHGEVTDPEVDIFDREEVFIDKELSPLIQQFPRLKIVLEHITTSYAVDFVQRNNLGATITPHHLHINRNAMFFGGLNSDFYCLPVAKRENNRIALRKAATSGKECFFIGTDSAPHLRQWKAFCGCAGIFNSPVAIESYLKVFEEENALNQFEKFASLNGPNFYNLPINNEKIRLVSRSNKIPEFIEVIEQNKVVGQIKPFHGGETLTWRVEGVVK

SEQ ID NO: 27674 - DNA, 1065 bp, Prochlorococcus marinus str. MIT 9313
  CDS (1)..(1065): transl_table=11
ttggattctttgcccgaccaactcattttgcgtcaaccggatgactggcatgtccatctgagggatggtgccatgctgcatgcggtgctaggcagcacagctcgtgtgtttcgacgagcaatcgtgatgcccaatctcaggccaccaatcacgagtgtagaagcagcaaaaacctatcgcgaccagattttggcagcccttcctgatggtgttccgtttacgccattgatgacggcctacctcaacgaaagcttggctccagatgttttagaacaagggcatcaacagcatgttttcatcgccgccaagctttatccagcccatgccacaactaattccgagcagggggtcagtgatctaagagcgattaactcacttctagagacgatggagaaaattgggatgccattgctcgttcatggtgaggtgagcgatgtcgatatcgacatttttgatagagaagccttttttattgagcaccacctggcaccactaatagggcgttatccaaatcttcgtgtcgtgatggagcacatcacgacgcaagaggcagttcagttcgtggaaacaggtgggccgaatctggcagccactatcactcctcatcatttacatatcaaccgtaatgcaatgtttctcggtggttttcgtagtgatttctactgcttaccagtagccaagcgtgaacgccatcgactctccctgcgtcgagcagcgacaagtggcaaaccatgctttttccttggcactgattcggcaccacaccctcgctctgcaaaggagagtgcttgtagttgtggtggcattttcaatgctcattatgcgatggaaagttatgccgaagtctttgagcaggaaggagcacttgatcgccttgaggccttctccagtgaatacggtccagctttctatggcttgcccctcaataacacctcaatcaaactgatacgaagagctcatgttgtaccagctacttttagcggacaaacgaacgcagattcttctgaacacttagttccatttcatgctggcgaactgttgggctggtctgtttcggttgattga

SEQ ID NO: 27675 - protein, 354 aa, Prochlorococcus marinus str. MIT 9313
MDSLPDQLILRQPDDWHVHLRDGAMLHAVLGSTARVFRRAIVMPNLRPPITSVEAAKTYRDQILAALPDGVPFTPLMTAYLNESLAPDVLEQGHQQHVFIAAKLYPAHATTNSEQGVSDLRAINSLLETMEKIGMPLLVHGEVSDVDIDIFDREAFFIEHHLAPLIGRYPNLRVVMEHITTQEAVQFVETGGPNLAATITPHHLHINRNAMFLGGFRSDFYCLPVAKRERHRLSLRRAATSGKPCFFLGTDSAPHPRSAKESACSCGGIFNAHYAMESYAEVFEQEGALDRLEAFSSEYGPAFYGLPLNNTSIKLIRRAHVVPATFSGQTNADSSEHLVPFHAGELLGWSVSVD

SEQ ID NO: 27676 - DNA, 1032 bp, Synechococcus sp. WH 8102
  CDS (1)..(1032): transl_table=11
atggctgaacagctcacgatcaccgctccggacgattggcacgttcacctcagggatgaggagatgctggaacgggttgtggcctacacagcccgttgcttccggcgggccatcgtgatgcccaacctgcgaccgccggtcacgacggtggatgcagctcgttcgtaccgcgaccgcatcctgtcggcttgtcctgaaggcgtggcattcaccccgttgatgaccgcttatctcacggacaactccgatccagatgatcttgagcggggtttccaggagggggtctacaccgctgccaagctgtatcccgcgaacgccacgaccaattcagccgctggtgtgacggatctcgatcagatcggccgtgtcttgagccggatggaggccatcggcatgcctctgctcattcatggggaagtgacggatgcggatgtcgatgtgttcgaccgggaagcggtgttcattgagcggcatctgaagtccctgcggacccgtcaccctgagctcaaggtggtgttcgagcacatcaccaccgagcaggccgttgattacgtgggttcgtccgatcgcaatctggcggccacgatcaccccccatcacctgcagatcaatcgcaactccatgttccttggcggcttgcgcagtgacttttactgcctgccggtggtcaaacgggagcgccatcgccttgctctgcggcgggccgccaccagcggagatccacggtttttcctgggcactgattccgcccctcatccgagagccggcaaggaaacctcctgcggctgtgccggcatcttcaatgctccctttgcactggagagctacgcccaggtttttgcagaggaagaggccatgcatcacctcgaaggtttcgcctccctgcacggtccagccttctacggcctgcctgcgaacaacgacacggtgacccttgaaaaggttgctgttgacgtgcccgagctggtgaacgggctcgttcccttccatgctggggaaacgctgccctggaggcttcagccatgcatgtga

SEQ ID NO: 27677 - protein, 343 aa, Synechococcus sp. WH 8102
MAEQLTITAPDDWHVHLRDEEMLERVVAYTARCFRRAIVMPNLRPPVTTVDAARSYRDRILSACPEGVAFTPLMTAYLTDNSDPDDLERGFQEGVYTAAKLYPANATTNSAAGVTDLDQIGRVLSRMEAIGMPLLIHGEVTDADVDVFDREAVFIERHLKSLRTRHPELKVVFEHITTEQAVDYVGSSDRNLAATITPHHLQINRNSMFLGGLRSDFYCLPVVKRERHRLALRRAATSGDPRFFLGTDSAPHPRAGKETSCGCAGIFNAPFALESYAQVFAEEEAMHHLEGFASLHGPAFYGLPANNDTVTLEKVAVDVPELVNGLVPFHAGETLPWRLQPCM

SEQ ID NO: 27678 - DNA, 1086 bp, Chromobacterium violaceum ATCC 12472
  CDS (1)..(1086): transl_table=11
atggctttccatcgccattgttttatccatcgttacggcaagccatccaccatgcagactctcaccctgatccgccccgacgactggcatttgcacctgcgcgacgacgccgcgctggccgcggtgctgcccgacacctgtcgccagatgggccgcgccatcgtcatgcccaacctgaagccgccggtcaccaccgtggccgccgccgccgcctaccgcgagcgcattctggccgcgcgcccggccggcagcgccttcgagccgctgatgacgctttatctgaccgataaaaccagcgccgacgaaatccgcaaggccaaggcctgcggcttcgtccacggcgtcaagctgtacccggccggcgccaccaccaattccgaccacggcgtcaccgatatcgcccacgcgatgccggcgctggaggcgatggccgaagccggcatgccgctcttggtgcacggcgaagtcaccgacgccgacatcgacgtgttcgaccgcgaggcggtgttcatcgagcgggtgatgaagcccttgctggccaagctgccgcaactgaaggtggtgttcgagcacatcaccacccgagaggcggccgagttcgtcgccgccgcgccggccaacgtcgccgccaccatcaccgcccatcacctgctgatgaaccgcaacgcgctgtttgtcggcggcatccgcccgcaccactactgtctgccggtgctcaagcgcgagctgcaccgccaggcgctggtgaaggcggcgacgtcgggctcggccaagttctttctcggcaccgacagcgcgccgcacgcgaagggcgccaaggaggcggcttgcggctgcgccggcatgtacaccgccaacgcggcgatcgagctctacgccgaggctttcgaggccgccggcgcgctggacaagctggaggctttcgccagcctgaacggcccggctttctacggcttgccggccaacggcgaccgcatcgagctggtcaaggagagttggacggtgccggccgagctgccttatcccggcgacagcctggtgccgctgcgcgccggcgacagcgtcgcctggcgtctgcggcgctga

SEQ ID NO: 27679 - protein, 361 aa, Chromobacterium violaceum ATCC 12472
MAFHRHCFIHRYGKPSTMQTLTLIRPDDWHLHLRDDAALAAVLPDTCRQMGRAIVMPNLKPPVTTVAAAAAYRERILAARPAGSAFEPLMTLYLTDKTSADEIRKAKACGFVHGVKLYPAGATTNSDHGVTDIAHAMPALEAMAEAGMPLLVHGEVTDADIDVFDREAVFIERVMKPLLAKLPQLKVVFEHITTREAAEFVAAAPANVAATITAHHLLMNRNALFVGGIRPHHYCLPVLKRELHRQALVKAATSGSAKFFLGTDSAPHAKGAKEAACGCAGMYTANAAIELYAEAFEAAGALDKLEAFASLNGPAFYGLPANGDRIELVKESWTVPAELPYPGDSLVPLRAGDSVAWRLRR

SEQ ID NO: 27680 - DNA, 1014 bp, Wolinella succinogenes DSM 1740
  CDS (1)..(1014): transl_table=11
atggagagactcaccctcatcgatcccttggatatgcatcttcacctccgagagggcgaaaccctaaagcgcgtcctcccctacacagcgaatctctttagcggggcagtggtgatgcctaacctcaaaacacccctctgcaccacccaagaggtgctctcctacaaaaagagcattgaggaggcttgccccaaagagcgcttcatcccctttatgacgctcttttttcatgagaatctcactttagaagagctcactttagcccaaatagagggaattagaatcatcaaactctaccctaagggctccaccacgggaagcgaggcgggtgtggcgcagattctcacccctaaaaccctccaaatcctagaaacgatgcaatctcttggtctcatcctctcaatgcatggcgagagcggagggtttgtcctagagagggagtttgagtttttgagtgtctatgaggagattgcacgcacctttccaaagcttcaaatcatcattgagcacatgagcgatgcccgctccttagagcgaatcgagcgttttagcaatctctatggcacgctcaccctccaccacctcctctacacacttgatgacctcctaggccaagccctcaatcctcacctcttctgcaaacctgtcttaaaactccctagagatagagaggcgttgcaaaaggcggcattaggcgcccaccccaaaatctcctttggaagcgatagcgctccccaccccaaagaggccaaagagagcgccaaaggggcagcgggaatctttagcgctcccttgcttttaccccttttagccgagctctttgagcgccacgggaagctagaaaatcttcaggcttttgtctctgataatgcccataggatttatggaatcgcccccttaggcaaaagggtgacccttcttcaagaagaatcgctcatagaggaggattattcgggattcatcccccctgaggcaggcaagagagtccgctggagagtggagagttcgtgctag

SEQ ID NO: 27681 - protein, 337 aa, Wolinella succinogenes DSM 1740
MERLTLIDPLDMHLHLREGETLKRVLPYTANLFSGAVVMPNLKTPLCTTQEVLSYKKSIEEACPKERFIPFMTLFFHENLTLEELTLAQIEGIRIIKLYPKGSTTGSEAGVAQILTPKTLQILETMQSLGLILSMHGESGGFVLEREFEFLSVYEEIARTFPKLQIIIEHMSDARSLERIERFSNLYGTLTLHHLLYTLDDLLGQALNPHLFCKPVLKLPRDREALQKAALGAHPKISFGSDSAPHPKEAKESAKGAAGIFSAPLLLPLLAELFERHGKLENLQAFVSDNAHRIYGIAPLGKRVTLLQEESLIEEDYSGFIPPEAGKRVRWRVESSC

SEQ ID NO: 27682 - DNA, 1080 bp, Oryza sativa (japonica cultivar-group)
  CDS (1)..(1080)
atggccgcgtcgccgtcgccgccgccgctgcaggagctcaccatcacgcggcccgacgactggcacctccacctccgggaaggcgatgtcctcgcggccgtgctcccccacagcgcgatgcattttgggagggccatcgtgatgcccaacctgaagccaccggtgaccacgacagcacgagctttggagtacagggaggagatcctcagggcgctgccgcctgggagcaactttgtgccgctcatgacgctctacctcacggacaatactagcccagaggagatcaagctcgcaaaaaagagtggcgtggtttttgctgtgaagttgtacccttctggagcaactaccaactcccaagatggtgtcactgatatatttgggaagtgcttgcctgtgcttgaggaaatggctaggcaggagatgcctttgcttgttcatggagaagtcacagatcagcatgttgatacctttgatcgtgagaaggttttcattgagaaaatattggcaccacttgtacaaagactgccacagctgaaaattgttatggaacatatcaccactatggatgcggttaacttcgtagaatcatgcaaagaaggtcatgttgctgcaacggtgactccccaacatcttcttctcaacaggaatgcgttatttcagggtggcttgcagccacacaactattgcttaccagtactgaaaagagaaactcatagacaagcaattgtgtctgcggtaacaagtgggagtaaacaatactttcttggtactgacagtgctcctcatgataaacggagaaaagaatgctcctgtggttgtgcaggaatatatagcgctcctgtggctctttctctttatgcgaaagtattcgaacaggccggtgctcttgataagctagaagcatttacaagcttcaatggcccagatttttatggccttccaaggaacacttcaaagattgtccttagaaagagcgcctggaaagtacctgatacatactcatatagttcaggagagatcgtgcctatgtttactggcaacaccctcgaatggcttccatccgatcaacttgaagagtaa

SEQ ID NO: 27683 - protein, 359 aa, Oryza sativa (japonica cultivar-group)
MAASPSPPPLQELTITRPDDWHLHLREGDVLAAVLPHSAMHFGRAIVMPNLKPPVTTTARALEYREEILRALPPGSNFVPLMTLYLTDNTSPEEIKLAKKSGVVFAVKLYPSGATTNSQDGVTDIFGKCLPVLEEMARQEMPLLVHGEVTDQHVDTFDREKVFIEKILAPLVQRLPQLKIVMEHITTMDAVNFVESCKEGHVAATVTPQHLLLNRNALFQGGLQPHNYCLPVLKRETHRQAIVSAVTSGSKQYFLGTDSAPHDKRRKECSCGCAGIYSAPVALSLYAKVFEQAGALDKLEAFTSFNGPDFYGLPRNTSKIVLRKSAWKVPDTYSYSSGEIVPMFTGNTLEWLPSDQLEE

SEQ ID NO: 27684 - DNA, 1044 bp, Vibrio vulnificus YJ016
  CDS (1)..(1044): transl_table=11
atggtgggagcaacaatgacaacacttactattactcgtcctgatgattggcacgtacacttacgcgatggcgaagttttggcagataccgttcgcgatatcagccgttacaatggccgcgcactcatcatgccaaacactgtcccacccgtcaccacgactgaaatggcgcttgcctatcgcgatcgcattcaagcacataaccaaacagaacaattttctccgcttatgtcgctatatttgaccgacaacacaactgcggatgaagtacgcaaagccaaggccagcggtgctgtagtcgcagcaaaactgtacccagcaggcgcgacaactaactccgattctggcgtgacggatgtaaagaaaatttatccagtccttcaagcgatgcaagaagtaggcatgttgctactggtacacggcgaagtgaccacacacgatgtggacatctttgatcgcgaaaaaacctttttagacaatgtgttggcgccgattgttcaagacttccctgatttgaaaattgtcctcgaacacatcaccacctcagatgcggttgtgtttgtgaaaaatgccaatgaaaacgttgccgcaaccattaccgctcatcacctgctgtacaaccgcaatcacatgttagtaggcggcatcaagccccacttctactgcttgccaattcttaaacgcaacacccaccagcttgcgttgatctctgctgcgacgagtggcaacaagaagttctttttgggtacggactctgcgccacacgccaaaggcgcaaaagaatccgcttgtggttgcgcgggctcttacacggctcacgccgctttggaactgtatgcagaagtgtttgagcaagcgggcaagttggaaaatctcgaagcgtttgccagccataacggtccagatttttacggtttgcctcgcaatcaagacacaattacgttggtaaaagacgcatggcctgttcctgcttcaatgccatttggtggtgatattgtggtgccaattcgcgctggtgaaaacatggagtggaaggttaagtaa

SEQ ID NO: 27685 - protein, 347 aa, Vibrio vulnificus YJ016
MVGATMTTLTITRPDDWHVHLRDGEVLADTVRDISRYNGRALIMPNTVPPVTTTEMALAYRDRIQAHNQTEQFSPLMSLYLTDNTTADEVRKAKASGAVVAAKLYPAGATTNSDSGVTDVKKIYPVLQAMQEVGMLLLVHGEVTTHDVDIFDREKTFLDNVLAPIVQDFPDLKIVLEHITTSDAVVFVKNANENVAATITAHHLLYNRNHMLVGGIKPHFYCLPILKRNTHQLALISAATSGNKKFFLGTDSAPHAKGAKESACGCAGSYTAHAALELYAEVFEQAGKLENLEAFASHNGPDFYGLPRNQDTITLVKDAWPVPASMPFGGDIVVPIRAGENMEWKVK

SEQ ID NO: 27686 - DNA, 1086 bp, Eremothecium gossypii
  CDS (1)..(1086)
atggaagagattgaactaggagtcacatgcgacatgcatgtgcatgtcagggagggcccaatggcggagttggtaaccccgacgatcagagaaggcggggtttccgtcgcgtacatcatgcccaacttgcagccgcccgtcacgacgctggagcgtgtaattcagtacaagcagtcgctggagcagatgagcccacagacaacgttcctcatgtcgttctacttgtgccgtgagttgacgcccgaactgatccacgaggcggcgcaagcgggcgcgatccagggtgtgaagtgctatccggcaggagtcaccaccaactctacgagcggtgttgatccgaatgacttctcggccttttaccctgttttccgtgccatggaggaggaaggactggtcctgaatctgcatggtgaaaagccaagtgtctcggatgactccgaggacatccacgtgatgaatgccgaagagtcatttctgcctgcgctgaagcagatccatgcggcctttcccaacctgaagattgtgcttgaacactgcacgacagctgcggccgttgccgcaattgaggagctcaaccgcggcgtgtccgcagccgcggaggtgcgcgttgccgcgaccctgacggcccaccacctttcgctgaccatcgacgactgggcaggcaaccccgtcaacttctgcaaacccgtcgccaagcttcccagcgaccggcgcgccctcgtccgctcggcaaccagcggcaagccctacttcttctttgggtcggactccgcaccgcaccctgtggaaaacaaatcgagacacgccggcgtctgcgccggcgtctactcgcagtcgctggccatcccgtacctcgcgcaggtgtctgatgcgcacggggcgctgccgcagctgacggcgttcgtttccgactttccgctccagttctacggcgtcgggcgcgacacccttcgatccggcgaccgtgctgtgctctacaggtcgcgccagcaggtccccggccacattacggatggccgcggaatcgtggttgatcccttcaaagccggcgagacgctggactgggccgtccgttgggacgcctag

SEQ ID NO: 27687 - protein, 361 aa, Eremothecium gossypii
MEEIELGVTCDMHVHVREGPMAELVTPTIREGGVSVAYIMPNLQPPVTTLERVIQYKQSLEQMSPQTTFLMSFYLCRELTPELIHEAAQAGAIQGVKCYPAGVTTNSTSGVDPNDFSAFYPVFRAMEEEGLVLNLHGEKPSVSDDSEDIHVMNAEESFLPALKQIHAAFPNLKIVLEHCTTAAAVAAIEELNRGVSAAAEVRVAATLTAHHLSLTIDDWAGNPVNFCKPVAKLPSDRRALVRSATSGKPYFFFGSDSAPHPVENKSRHAGVCAGVYSQSLAIPYLAQVSDAHGALPQLTAFVSDFPLQFYGVGRDTLRSGDRAVLYRSRQQVPGHITDGRGIVVDPFKAGETLDWAVRWDA

SEQ ID NO: 27688 - DNA, 1074 bp, Neurospora crassa
  CDS (1)..(1074)
atggctctcaaggactcctacctcctccccgccgcggcggacatgcacgtccacctgcgcaacgcccccggccccattgccgagctggtcaccccgaccatccgcaaggccggcatcgacaccgtcttcgtcatgcccaacttggctcctcgccccgtcgtcaccgtcgatgaggctctcgagtacaagaaggccctccaggcttacgaccccgaggtcaactacctcatgtctctctaccttcacgagagcatcacccccgatgagatccgcaaggccaagaaggccggtattgccggtgtcaaggcctacccccgcggcgccaccaccaactcccaatggggcgttgtttccttcgaccccttccacgaactcctctccaccatggaatccgaaggtctcgtcctcaacctgcacggcgagatgccctcctcgcccaccgacaacgtgaccgtcatgaacgccgagtccaagttcctgcccaccctcgcctctctgcacagcaagtaccccaacctcaagatcgtgctcgagcactgcaccaccgccgacgccgtcgccgccgtgcgcgcctgtggcgccaacgtggtcgccaccatcacggcccaccacctctcgctgctcgtggacgactggtccgccaacgtgcaccactactgcaagccgagcgccaagtcgcccgaggaccgccgcgcgctgctgcaggccttggtcacgagcgagggcaaatttttcctgggcaccgactcggcgccccatgatatctcgagcaagaagggtaaaggcaacacggcggcgggcgtgttcacgcagccgtatgcgttgggctatgtgttgactgcgctggaagagggcattgcgagaggagatatcaaggaggagcaggtgacggaggaggtgttggcgggcttcttgagtgagtttggtcgcaagttttatgagcttgggccggcggagaagcagatcctggtcaagagggatggggcggtggtggaggagagtctcaagacggacaaggtggagattgtgccgtacaggagcggcgagaagacgtggagtgttgagtggcagtga

SEQ ID NO: 27689 - protein, 357 aa, Neurospora crassa
MALKDSYLLPAAADMHVHLRNAPGPIAELVTPTIRKAGIDTVFVMPNLAPRPVVTVDEALEYKKALQAYDPEVNYLMSLYLHESITPDEIRKAKKAGIAGVKAYPRGATTNSQWGVVSFDPFHELLSTMESEGLVLNLHGEMPSSPTDNVTVMNAESKFLPTLASLHSKYPNLKIVLEHCTTADAVAAVRACGANVVATITAHHLSLLVDDWSANVHHYCKPSAKSPEDRRALLQALVTSEGKFFLGTDSAPHDISSKKGKGNTAAGVFTQPYALGYVLTALEEGIARGDIKEEQVTEEVLAGFLSEFGRKFYELGPAEKQILVKRDGAVVEESLKTDKVEIVPYRSGEKTWSVEWQ

SEQ ID NO: 27690 - DNA, 957 bp, Gibberella zeae PH-1
  CDS (1)..(957)
atgcctaatcttctccctcccctcacttcggtcgagcagcgattccaggttcttgactacaagtccaagttgactgccatcactcaagatgtcaactttctcatgtccctttatcttcatccttcagttacccctgaagtgattgctcaagctgccgaggccggtgtcactggtgtcaagctgtatcctcagggtgtcaccaccaactctgaaaatggtgtttctgatatcacagcgttctatgacacatttgctgctatggagaagcacggaatcgtcttgaacatccacggagaagctctcgagtctcttgccccagctgataccaccctggaggaggcttttctccccactttgaagcaacttcacgatcggttccctaagcttcgcattgtactcgagcattgcactaccgctgccgctgtagaggctgtcaaggcctgcggacctaccgttggtgctactattactgcccaccacctttacctcacttcgcacgaggcttgctgcgacccctttgctttttgcaagcccatccctaagaagcccactgacagagacgctctggtcaaggctgtcgtgagcggtaacaacaagttcttctttggaagtgacagtgctcctcactccctgcagtccaagacctctgctgagcaaggcaaggcccctgcaggtgtcttcactcagccttatgttgtgcagcttgttctccttggtctcgaggaagccattgagcgtggggccatatccgaggaagaagttacagaggagaagctcgaaaacttcttcagccgcaatggtcgacgcttctacaagttgcccgatacctctggcaacaagatcatcttggagaggaagggcgagaagatccccactagtgtcaagagtgccgacggaaagtctgaggttggtatttccagacatggcactgaggtgttcagcctgacctgggcctga

SEQ ID NO: 27691 - protein, 318 aa, Gibberella zeae PH-1
MPNLLPPLTSVEQRFQVLDYKSKLTAITQDVNFLMSLYLHPSVTPEVIAQAAEAGVTGVKLYPQGVTTNSENGVSDITAFYDTFAAMEKHGIVLNIHGEALESLAPADTTLEEAFLPTLKQLHDRFPKLRIVLEHCTTAAAVEAVKACGPTVGATITAHHLYLTSHEACCDPFAFCKPIPKKPTDRDALVKAVVSGNNKFFFGSDSAPHSLQSKTSAEQGKAPAGVFTQPYVVQLVLLGLEEAIERGAISEEEVTEEKLENFFSRNGRRFYKLPDTSGNKIILERKGEKIPTSVKSADGKSEVGISRHGTEVFSLTWA

SEQ ID NO: 27692 - DNA, 1185 bp, Ustilago maydis 521
  CDS (1)..(1185)
atgtcagtacaagagatcacgattccggcgccggccgattttcacgtgcatctgcgacaaggaaagatgtcggagctcgtcaccccgcacgtcgccgagggaggcgtctcgcttgcatatgttatgcccaaccttgtacctccgatcacatcgacacagcaagcgatggaatacctcgagcgcttgcgagcgcttgctcctcagaccatgttcgtcggcacgctgtatctatcgcctgacttgacgccggcggaaatcgccaaggcggctcagaatggtgtccgaggtgtcaagagctatcctcgtggagtcactacgaactcggacagcggcatcgaggattacgagacctactatcccatctttgaagagatgcagaaacacgatatggtcctcaacttgcacggcgagcttccttcgaatgcagacgcgggcatctgcgtgttgaatgccgaggaaaagtttttgacgcacctgttcaagatccacggtgaatttcccaagctcaagatcgtgctggagcatgcgaccaccaggaaggcggtcgaagccgtcaagcagtgtggcgacacagtgggctgtaccatcacaccgcatcacctcgagctcatcgtggatgactgggcgggcaagccactcaacttttgcaagccagtcgccaaatatcccgatgaccgacaggcgttgcgcgacgtcattcgccaaggtcatcctcgcttcttcctcggctcagattcggcgccgcacccgttggctaacaagtatccttccgcagtcacacatggcgctcctggaaccaaagcttctgcatctggcagcgatcacctcgaagctactggtgtcgtctcgtgtggttgcgcagcgggcgtctacacctcgtcgatccttgtgcctctttgcgcgacgctgctcgaagcgtttggcgcgttggatcaacttgccaactacgtcagcatcaacgggcgcaacttctatggctacaacgatgatcagcatgccaaacacggcagcataaagcttcgcaaggtgcgcagccgatcatcgatttcgccagcagctgcaaccgttcctgcagtctatgtccatcccgagttccgagaggtgccagattcagatgcatccaaggtgcaagtagtgcctttctgggcgggcaagtgtctcggctgggagatcgtccgttcgtga

SEQ ID NO: 27693 - protein, 394 aa, Ustilago maydis 521
MSVQEITIPAPADFHVHLRQGKMSELVTPHVAEGGVSLAYVMPNLVPPITSTQQAMEYLERLRALAPQTMFVGTLYLSPDLTPAEIAKAAQNGVRGVKSYPRGVTTNSDSGIEDYETYYPIFEEMQKHDMVLNLHGELPSNADAGICVLNAEEKFLTHLFKIHGEFPKLKIVLEHATTRKAVEAVKQCGDTVGCTITPHHLELIVDDWAGKPLNFCKPVAKYPDDRQALRDVIRQGHPRFFLGSDSAPHPLANKYPSAVTHGAPGTKASASGSDHLEATGVVSCGCAAGVYTSSILVPLCATLLEAFGALDQLANYVSINGRNFYGYNDDQHAKHGSIKLRKVRSRSSISPAAATVPAVYVHPEFREVPDSDASKVQVVPFWAGKCLGWEIVRS

SEQ ID NO: 27694 - DNA, 1077 bp, Candida glabrata CBS138
  CDS (1)..(1077)
atgagtgaaattgatttgggtattacttgcgacatgcatgtgcatgtccgtgaaggggatatgtgtgagttggtgactccttctatccgtgatggcggtgtctctgtctgctatgtgatgcctaacttacaaccacctattaccactttggatagagtggttgcgtataagaagaaattgcaagaacttgctcccgagaccaccttcttaatgagtttctacttgtcccgtgatttgactccggaattgatccatgaagctgccagagccaaggctattcaaggtgtgaaatgctatcctgctggtgtaactacaaactcaagtgctggtgttgatccaaacgattttactgccttctatcctatattcaaggctatggaagaagaacatctggtcttgaatcttcatggtgagaaaccctcagtggccaaggaagatatccatgttctaaatgcagaagaatcatttctaccggctctgaagaaattacacacagatttcccaaacttgaaaattatattggaacattgcacaactgaggctgcagtaaatgccatcgaggagattaacaagaatgtgacaaacatatctgatgttaaagtggccgccaccttaacagctcatcacttgtacttaacaatagatgactgggccggtaatccaattaatttctgtaaaccagtggcaaagttgcctagagacagaagagcgctagttgctgcagcaacctctggcaagccatactttttctttggctctgattcagcacctcatcctctggagatgaaaggacgtcacattggtgtctgtgctggtgtatacactcagtcactagctatcccgtacgttgctcaagtgttccatgaagccaatgccatggataaattgaagggttttgtatccgattttggcttggcattctacgatgtaccacaaagtgaaattagatcgacccagcacgcaatcttgtacaaacaagaacaaacagttcaagacaccattcaaggaaagaacaatttgaaggttgctttatttaaaccaggtgagaaattggatttttctgttaagtggcaataa

SEQ ID NO: 27695 - protein, 358 aa, Candida glabrata CBS138
MSEIDLGITCDMHVHVREGDMCELVTPSIRDGGVSVCYVMPNLQPPITTLDRVVAYKKKLQELAPETTFLMSFYLSRDLTPELIHEAARAKAIQGVKCYPAGVTTNSSAGVDPNDFTAFYPIFKAMEEEHLVLNLHGEKPSVAKEDIHVLNAEESFLPALKKLHTDFPNLKIILEHCTTEAAVNAIEEINKNVTNISDVKVAATLTAHHLYLTIDDWAGNPINFCKPVAKLPRDRRALVAAATSGKPYFFFGSDSAPHPLEMKGRHIGVCAGVYTQSLAIPYVAQVFHEANAMDKLKGFVSDFGLAFYDVPQSEIRSTQHAILYKQEQTVQDTIQGKNNLKVALFKPGEKLDFSVKWQ

SEQ ID NO: 27696 - DNA, 1095 bp, Kluyveromyces lactis NRRL Y-1140
  CDS (1)..(1095)
atgtccgaatctcaaactgaatatgatcttggtatcacttgtgatatgcacgtccatttgagagatggcgaaatgtgcaaattgatcactcctactgtgaaggaaggtggtatttctgttgcttatgtgatgccaaacctaagcccaccggttattaccttggaaagagtccaagagtataaatgtaccttggaatctcttgcaccagaaacaacttttttaatgtctttctatctctgcaaagatttgacgcctgaattgatccatgcagcagcaaaagttggtgctattcaaggcgtgaaatgttatcctgctggtgtgactaccaactcggcgcaaggtgtggaccctaacgatttcacagtgttttatccattgtttaaggccatggaagaagagggcatcgtgttgaatttacatggtgaaaaaccaagtgtcgctggtgaaaaagaggatattcatgttttgaatgccgaagaatcattcttgcctgccttaaagaagctccaccttgatttcccaaagttgaagatcattttggaacattgcaccactgctgccgccatcaagaccattgaagagatcaatgctgatgtcaaggatccattggatgtcatggtcgccgctactatcaccgcgcatcatcttttcttgactattgacgattgggctggaaatccaatcaatttctgtaagcctgttgcaaagcttcctagcgataaaagggctctagttcaagctgcaacatccgggaaaccatactttttctttggatctgattctgcgccacatccgatagaaaataaagctaaacatgtaggcgtatgtgccggtgtgttttcgcaatcgctggcaattccatacctggctgaaatattcgaaactcaaggaaaactggacactttaaagaacttcgtaagcgatgcaccattatcattttatgcattgaaaccagaagacatcaagtccaaccaaaacgttacagtcttcaaaaagacaactaatatcccagaaataatcactgatggaaaaggcctcagagttgctccattcaaagctggagatgagttacactgggctgtcagatgggactag

SEQ ID NO: 27697 - protein, 364 aa, Kluyveromyces lactis NRRL Y-1140
MSESQTEYDLGITCDMHVHLRDGEMCKLITPTVKEGGISVAYVMPNLSPPVITLERVQEYKCTLESLAPETTFLMSFYLCKDLTPELIHAAAKVGAIQGVKCYPAGVTTNSAQGVDPNDFTVFYPLFKAMEEEGIVLNLHGEKPSVAGEKEDIHVLNAEESFLPALKKLHLDFPKLKIILEHCTTAAAIKTIEEINADVKDPLDVMVAATITAHHLFLTIDDWAGNPINFCKPVAKLPSDKRALVQAATSGKPYFFFGSDSAPHPIENKAKHVGVCAGVFSQSLAIPYLAEIFETQGKLDTLKNFVSDAPLSFYALKPEDIKSNQNVTVFKKTTNIPEIITDGKGLRVAPFKAGDELHWAVRWD

SEQ ID NO: 27698 - DNA, 1083 bp, Debaryomyces hansenii CBS767
  CDS (1)..(1083)
atggccaaggaaatcgaattaggtatcaccgctgacatgcacgtccacttacgtgatggtaaaatgatggagttaattacacctactgttagagaggggggtatatcgatagcatacgttatgccgaacttggttcccccaattacaactatcgatagggtagttgaatataagcaaaacttagaaaagttgtcaccaaagaccacatttttgatgtcattttatttatcgaaagagttaagtcctgaattgattctggatgccgccaaaataggggccattcatggtgtcaagtgctacccagctggtgttactaccaattctgctgctggtgtcgatcccaacgacttcacacctttctaccctattttcaaagcattggaagagaataatcttgttttgaatttgcatggcgaaaagccaccatcgaaggatggcgaagaggatatccatgtcttgaacgccgaaccaaagttcttaccagccttagaaaaattgcataatgacttcccaaacttgaagatcatcttggaacattgtacaacaaaggatgcaatcgacatgattgaaaaaatcaatgctggtcacaaagacggtgatgatgtcaaggtcgctgctaccatcactgctcatcatttatcgcttacaattgataactgggctggaaatcctatcaacttttgtaagccagttgctaagttgccagctgacaagcgtgccttagtacaggctgcgacgtctgctaaaccatacttcttctttggatctgactctgctcctcatcctttatccgccaaggcaaaacatacgggcgtatgtgccggtgtctacacccaatcgcatgctattgcttacttggcagaggtcttcgaaagtcagaatagattagccaacttgaagaagtttgtgaatgacaacggtaaaggcttctacggaatttgtgaccaagatgttaaatgcaaagataaatgctacttggtacagaatgccaacaatgtccccgaaatgtttggtaacaaggatattactgttgttcctttcaaagctggtgaagaattaaaatggacagttgaatggagatga

SEQ ID NO: 27699 - protein, 360 aa, Debaryomyces hansenii CBS767
MAKEIELGITADMHVHLRDGKMMELITPTVREGGISIAYVMPNLVPPITTIDRVVEYKQNLEKLSPKTTFLMSFYLSKELSPELILDAAKIGAIHGVKCYPAGVTTNSAAGVDPNDFTPFYPIFKALEENNLVLNLHGEKPPSKDGEEDIHVLNAEPKFLPALEKLHNDFPNLKIILEHCTTKDAIDMIEKINAGHKDGDDVKVAATITAHHLSLTIDNWAGNPINFCKPVAKLPADKRALVQAATSAKPYFFFGSDSAPHPLSAKAKHTGVCAGVYTQSHAIAYLAEVFESQNRLANLKKFVNDNGKGFYGICDQDVKCKDKCYLVQNANNVPEMFGNKDITVVPFKAGEELKWTVEWR

SEQ ID NO: 27700 - DNA, 1038 bp, Yarrowia lipolytica CLIB99
  CDS (1)..(1038)
atgacttctatcaaccttggccaccccgtcgacatgcacgtccacctgcgacagggcgagatgatgaagctcgtcacccccaccgtcaagcagggcggtttctccgtcgcctacgtcatgcccaacctggtccctcccgtcacttctcccgagcgagctttggagtacaagcaggagctccaggccctggcccctgacaccgagttcatggtcaccatgtatctgtctccagagatcacccccgaggttgttgctgacgctgctaagaagggagtctccggtatcaaggtctatcctgcgggtgtcaccacaaactccgatcagggagtctcttcatacgagcagtactaccccgtcttccgagccatggaggagcacaaccttgttcttaacctgcacggtgagtgccccagcactccccagagcgacatcaccgttctgaacgccgaggagcggttcctgcccacccttggagagctcaacaagatgttccccaagctgcgaatcgttctcgagcactgcaccaccaaggctgctgttgatgctgtcaacgcctgtgatgacaacgtctccggctctatcactgctcaccacctgtctctgattatcgacaactggtccggtaacgccatcaacttctgcaagcctgttgccaagctgccctctgatcgagacgctctcgtggctgccgccacctccggctcacccaagttcttcttcggatccgactctgctcctcaccctatcaagaacaagcgaacctgcaacaacgcccctgctggtgtcttcactcagagccacgctctgacctacgtcgcccaggtcttcgacaaggccggcaagctcgataatctcaagaagttcgtcaccgataacggccgaaagttttaccagatcgagaacatggccaccagcggccccgaggtcactgttgtcaggaaggaggttgtcattcctggtctcatcggtcctgaggacgacggtgttgttcctttccgagccggcgagaagctcgactggaccattgaatggaactag

SEQ ID NO: 27701 - protein, 345 aa, Yarrowia lipolytica CLIB99
MTSINLGHPVDMHVHLRQGEMMKLVTPTVKQGGFSVAYVMPNLVPPVTSPERALEYKQELQALAPDTEFMVTMYLSPEITPEVVADAAKKGVSGIKVYPAGVTTNSDQGVSSYEQYYPVFRAMEEHNLVLNLHGECPSTPQSDITVLNAEERFLPTLGELNKMFPKLRIVLEHCTTKAAVDAVNACDDNVSGSITAHHLSLIIDNWSGNAINFCKPVAKLPSDRDALVAAATSGSPKFFFGSDSAPHPIKNKRTCNNAPAGVFTQSHALTYVAQVFDKAGKLDNLKKFVTDNGRKFYQIENMATSGPEVTVVRKEVVIPGLIGPEDDGVVPFRAGEKLDWTIEWN

SEQ ID NO: 27702 - DNA, 1062 bp, Cryptococcus neoformans var. neoformans JEC21
  CDS (1)..(1062)
atgctacaagaaatcgctcttccttctcctgctgacttccatgtccatgtgagacaaggaaagatgtgtgagctcgtcactcctcaagttggtaagggaggtgttcgcaccgcgtatgtaatgcccaacctcgtcccacctctcacttccaccgatgctgttttatcctacaaggccgagcttgagaagattgatccctctgttcagtggctcatgaccctttatttgcatcctgacgtaactcccgctgagatccgcaaagctgctaaagcgggcatcaaaggtgtcaagtcttaccctcgaggagtcactaccaactccagttctggcatcgaagattacgaagtctactaccccgtctttaaggctatggaggaagaagacatggtcttgaacttgcacggagaagtgcccagtgatgctgacaagaacatctcaatcctcaatgctgagattcatttcctcgaacatctccgtaaactcgcgaccgctttccccaagcttcgtatcgttcttgagcatgctaccacctctgctgcggtcgagactgttgcttccctcccttccaacgtcgcctgtacaatcactgctcaccatctgtatcttacaatcgatgaggtcgctccccaaccccaccacttctgcaaacctcttgctaaggagcccaaggatagaaaggccctccaagacgccatcaagagcgggaacgagaagttcttcttgggcagtgatagtgctccccaccccttgtccagtaaggcccctgctttaactgataagggcgctgtgagcgcttgtgctgccggtgtatacaccagtcccattttgatcccgctagttgcgacccttttggaaagtttcggtgctttggataagcttgagggattcgtcagtggacacggaaggaaattctatggggagcctgccaaggagggacaggagttaaggttgaggaggacgaaggaggatgaaggtttcgttaagggaacattcaggggtgatggtgtggaagtcatgcctttttgggctggcaagaggctgggttgggaaattgctcaatga

SEQ ID NO: 27703 - protein, 353 aa, Cryptococcus neoformans var. neoformans JEC21
MLQEIALPSPADFHVHVRQGKMCELVTPQVGKGGVRTAYVMPNLVPPLTSTDAVLSYKAELEKIDPSVQWLMTLYLHPDVTPAEIRKAAKAGIKGVKSYPRGVTTNSSSGIEDYEVYYPVFKAMEEEDMVLNLHGEVPSDADKNISILNAEIHFLEHLRKLATAFPKLRIVLEHATTSAAVETVASLPSNVACTITAHHLYLTIDEVAPQPHHFCKPLAKEPKDRKALQDAIKSGNEKFFLGSDSAPHPLSSKAPALTDKGAVSACAAGVYTSPILIPLVATLLESFGALDKLEGFVSGHGRKFYGEPAKEGQELRLRRTKEDEGFVKGTFRGDGVEVMPFWAGKRLGWEIAQ

SEQ ID NO: 27704 - DNA, 1083 bp, Plasmodium berghei
  CDS (1)..(1083)
atggaaagcgggtttagcattccgttagcagatgatatgcattgccatttaaggcaagatgatatgctaaaatttacagtccctgcaataaaaaaaggaggatgtaatcgagttttagtaatgcctaacactataccaattataagtagttgtgaagaagccaagaaatatagagatgaattaataaaatatgatagcagtatagaatatttgatgactctatatttaaataaaaaaactgatgaaaatgatatattaattaattacaaagaatgcaatttacaaggaataaaagtatacccaagtaatgtaacaacgaattctaacgatggtgtatcaagtttagaaccatattataaaatattttctacattagaaaaaataaataaaagtttacatatacattgtgaagaacctaatataaatccagtatatgcagaaaaggaatatttacagcatatacatgatatatctattaaattcccacatttaaaaatagttttagaacacatatcaactgaaaatatgatagagcttgttaaaaaatatccaaatatagcaggatctattactcctcatcatttgcatctaactattgatgatgttgtagatgtaaaaaattatgattactcatttaacaatacagatattgaaaaatatgtaaaaaatgtatataattattgtcctttacctaaaacattagatgataaaatagcattatgcaatattataaaagagggaaaccctaaagtatttttaggttctgactcggctccacattatcaaaaatttaaacaagaacctcattataagcctggtatttttacacagccttttcttttatcatatcttgctcatatatttaataaatttaattcattagacaaaattgaaaattttgcttgtaaaaatgctgcacaatttttaaatttgaaacctaaacccatcgaaaataataaaaatagtattatatacatacaaaaaaaaaattttacaataccaaatgaatattttggagttgttccatttttagctaatcagacaattgattttacagcatcctataaacatgatgtcgtttaa

SEQ ID NO: 27705 - protein, 360 aa, Plasmodium berghei
MESGFSIPLADDMHCHLRQDDMLKFTVPAIKKGGCNRVLVMPNTIPIISSCEEAKKYRDELIKYDSSIEYLMTLYLNKKTDENDILINYKECNLQGIKVYPSNVTTNSNDGVSSLEPYYKIFSTLEKINKSLHIHCEEPNINPVYAEKEYLQHIHDISIKFPHLKIVLEHISTENMIELVKKYPNIAGSITPHHLHLTIDDVVDVKNYDYSFNNTDIEKYVKNVYNYCPLPKTLDDKIALCNIIKEGNPKVFLGSDSAPHYQKFKQEPHYKPGIFTQPFLLSYLAHIFNKFNSLDKIENFACKNAAQFLNLKPKPIENNKNSIIYIQKKNFTIPNEYFGVVPFLANQTIDFTASYKHDVV

SEQ ID NO: 27706 - DNA, 1077 bp, Candida albicans SC5314
  CDS (1)..(1077): transl_table=12
atgtctgatattgaattaggtataactgccgatatgcacgtacatcttcgtgatggtagcatgtgtgaactaattactcctactgttagaacaggaggtattgccatctcttatgttatgccaaatttggttcctccaattacaactaaacaacaagttgttaattatcatactaaactttccaaattagccccacaaaccacatttttaatgtcattttatcttagtaaagatttaactcctgaattaattgaagaatgtgctgatttaatacatggtgttaaatgctacccagcaggagttaccacaaattccaaatacggtgttgacccaaatgatttttcctcattttatccattatttgaagctatgcaaaagcacggaatagttttaaacattcatggtgaaaaaccaggtactagtgaagaagatgaaatcaatgttattaacgctgaaccaaaatttttaccagctttaaagaaattacatgctgatttcccacgtttaaaaatcattttagaacattgtactactagtgatgccgttgaaactgttcgtgaattaaattccaattataaaccaggagatgaattatttgttggtgctacaatcactgctcatcatttatatttgatcattgataattgggccggaaatccaattaatttttgtaaaccagttgccaagtttcaaaaagacagaaaagcacttgttgatgctgcaactagtggagaaccatggtttttctttggttctgatagtgcgccacatccgattcatgcaaagcaaactcacgttggtgtgtgtgctggtgtttacactcaaagccatgctattgcttatgttgccgagattttcgataaagccaacaaattggacaatttgaagaaatttgtcagtgacaatggtattaagttttatggattatcagatgagattttaaagaaacataagaatgaatcagtttggttggttaaaagagataatcaagtcccagaaattattggtaacggtgatgttgaagttgttcctttcaaagctggggaaactttaaagtatgccatcgaatggagatga

SEQ ID NO: 27707 - protein, 358 aa, Candida albicans SC5314
MSDIELGITADMHVHLRDGSMCELITPTVRTGGIAISYVMPNLVPPITTKQQVVNYHTKLSKLAPQTTFLMSFYLSKDLTPELIEECADLIHGVKCYPAGVTTNSKYGVDPNDFSSFYPLFEAMQKHGIVLNIHGEKPGTSEEDEINVINAEPKFLPALKKLHADFPRLKIILEHCTTSDAVETVRELNSNYKPGDELFVGATITAHHLYLIIDNWAGNPINFCKPVAKFQKDRKALVDAATSGEPWFFFGSDSAPHPIHAKQTHVGVCAGVYTQSHAIAYVAEIFDKANKLDNLKKFVSDNGIKFYGLSDEILKKHKNESVWLVKRDNQVPEIIGNGDVEVVPFKAGETLKYAIEWR

SEQ ID NO: 27708 - DNA, 1035 bp, Acinetobacter sp. ADP1
  CDS (1)..(1035): transl_table=11
ttggacacgattactcttttacagccagatgattggcacgcacatttacgtgatggtcttgcccttaaacgtaccgttccagatttagctcaacaatttgcccgcgcaatttgtatgccaaatcttgttccacccgtaaaaactgtagatgaagctgaagcctatcgtgaacgaatcatggcgcatgttccagagggtgtacattttgatccgcgcatggtgctttattttactgaccatacttcaccaagtgaggtcaagaaaattaaagactctgcccatgtcaatgcgatcaagctttatcctgcgggtgcaaccaccaactcagataacggcgtaagtgatattcgtaaagtatatgcagtgattgaacagcttgaagaacatcaggttcctcttttattgcatggtgaagtcacccatcatcacgttgatatttttgatcgtgaaaagcgctttctagatgaagttctttccccgcttctcaaacagtttccaaaacttaaactggtacttgaacacatcaccaccagtgaagctgcacattttgtactcgaacaagaccgtaatgtcgctgcaaccattacaccacagcacttactcttcaaccgcaacgatatgttggtgggtggaattaaaccacatttctattgtttgccaattttaaaacgccaaacacatcagcaaacactgattgaagtggcgaccagcggaaatcctaaatttttcttgggtacagacagcgcaccccactcaaaaaatgccaaagaaaatgcatgtggttgtgcaggctgctatagcgcaccaacagcgattgagctctatgctcaagcattcgatcaagtcaataaaattgaacgtctagaaggctttgcaagtcattttggcgcagatttttacggtttgccacgtaacaccaataccattaccctggtcaaggaagatcagattattcctgaacagcttgactatctggatgatgaaaagattattccactttatgcaggaaaaaccattcaatggagaaaagtgtga

SEQ ID NO: 27709 - protein, 344 aa, Acinetobacter sp. ADP1
MDTITLLQPDDWHAHLRDGLALKRTVPDLAQQFARAICMPNLVPPVKTVDEAEAYRERIMAHVPEGVHFDPRMVLYFTDHTSPSEVKKIKDSAHVNAIKLYPAGATTNSDNGVSDIRKVYAVIEQLEEHQVPLLLHGEVTHHHVDIFDREKRFLDEVLSPLLKQFPKLKLVLEHITTSEAAHFVLEQDRNVAATITPQHLLFNRNDMLVGGIKPHFYCLPILKRQTHQQTLIEVATSGNPKFFLGTDSAPHSKNAKENACGCAGCYSAPTAIELYAQAFDQVNKIERLEGFASHFGADFYGLPRNTNTITLVKEDQIIPEQLDYLDDEKIIPLYAGKTIQWRKV

SEQ ID NO: 27710 - DNA, 1044 bp, Erwinia carotovora subsp. atroseptica SCRI1043
  CDS (1)..(1044)
atgaccgcacagcacactattcttaaaatccgtcgccctgacgattggcacattcacctgcgtgacgatcggatgctggaaaccgttctcccctataccagccgtttcttcggccgtgcgattgttatgccaaatctgacgccaccgattaccagcgtagccagcgctatcgcgtatcgtcagcgtattttagccgcagtcccgcaaggcgataattttcatccactgatgacgtgctatctgactgatacgctagatgccaatgaaatcgtgagtggttttgagcaaggcgtctttaccgctgccaaactctatccagccaacgccacaacgaactccagccatggcgtaactagcgtcgccactatctccgggattctggagaaaatgcagaaaattggcatgccgttactcattcacggtgaagtcaccgatcccgctattgatatattcgatcgggaagctcgctttatcgaaaccattctggaaccgttacgccaggatttccctgaactgaaggtcgtcctcgaacacattacgacgaaagaagcagcggaatacgttattgcaggcaatgattatcttgcagcaaccatcaccccccagcacttgatgttcaaccgcaatcatatgctggttggcggcatccgcactcacttatattgtctaccgatcttaaaacgcaacacgcatcaacaagcgttgcgtgaagccgtcgccagcggctgcgaccgacttttcctcggtacagattcagcgccacatgccaaacacagaaaagaatccagctgcggctgtgctggtgtgttcaatgctcaggctgcattaagtacctacgccaccgtttttgaagaaatgaatgcgcttgataaactcgaagcattctgttccctgaatggcccgcggttttatggcctgccagtgaacgacagctggattgaacttcaccgtgaagcagtcacgttcccagaagaaatcgctctcggcgacgagtcgctaatccccttccttgccggacaaagcctcaactggtcagttcgttaa

SEQ ID NO: 27711 - protein, 347 aa, Erwinia carotovora subsp. atroseptica SCRI1043
MTAQHTILKIRRPDDWHIHLRDDRMLETVLPYTSRFFGRAIVMPNLTPPITSVASAIAYRQRILAAVPQGDNFHPLMTCYLTDTLDANEIVSGFEQGVFTAAKLYPANATTNSSHGVTSVATISGILEKMQKIGMPLLIHGEVTDPAIDIFDREARFIETILEPLRQDFPELKVVLEHITTKEAAEYVIAGNDYLAATITPQHLMFNRNHMLVGGIRTHLYCLPILKRNTHQQALREAVASGCDRLFLGTDSAPHAKHRKESSCGCAGVFNAQAALSTYATVFEEMNALDKLEAFCSLNGPRFYGLPVNDSWIELHREAVTFPEEIALGDESLIPFLAGQSLNWSVR

SEQ ID NO: 27712 - DNA, 1080 bp, Legionella pneumophila subsp. pneumophila str. Philadelphia 1
  CDS (1)..(1080): transl_table=11
atgttattctcttttatcggcaataatgcaggaacctttattatgcaaactctgataattaatcgccctgacgattggcatctccatctcagggatggagagtttctaactcataccgtccaggcgtctgcccaacattttgccagagcgttagtgatgcccaatctcaaaccagcactaaccaatttatctgcaattgagagttatagaaacagaatcatttcggccattcccaaacaaaactcctttattccttatatgactttttatttaaatgagtccgtcaaaccagaagaattacagcaagccgcctctctttcttatatagttggagcaaaactttatccagctggagcgacgacaaattctgaagagggtgctaaatctttgaaagcactctaccccctttttgaaacattgcaagcgaataatttagtcttgcaaattcatggcgaagtcactcatagcgatattttcgagcgtgaagcattatttattgatgaatacctgaaacctatcgccaaacatttccccaaattaagaatcgtgctggagcacatatcgactaaaactgccgtggattatgtttctgaagggcctgctaaccttacagcaacaataactcctcaccatttgctttataatcgcaataagctactcgcagggggcattagacctcattattattgtttgcctattttaaaacacgaaaaagaccaaaaggccttacaaattgcagcgacaagcggaaatccaaaattttttgccggcactgacagtgcccctcatgccatcaatgccaaggaaaatgcatgtggatgcgccggtatttattcagctccatatgcggtagcgctctacacgcagatctttgatgaacttaaccaattaaaaaaacttaatgattttcttagtcgatttggtgcagagttttaccaactccctattaatcaacagcaattggaactcattaaatcacctcaaactatccccaactcaatgccatttggatcaactcatgttgtgcctattgctgctggagacactataaactggagtattaatggtttctcgcaataa

SEQ ID NO: 27713 - protein, 359 aa, Legionella pneumophila subsp. pneumophila str. Philadelphia 1
MLFSFIGNNAGTFIMQTLIINRPDDWHLHLRDGEFLTHTVQASAQHFARALVMPNLKPALTNLSAIESYRNRIISAIPKQNSFIPYMTFYLNESVKPEELQQAASLSYIVGAKLYPAGATTNSEEGAKSLKALYPLFETLQANNLVLQIHGEVTHSDIFEREALFIDEYLKPIAKHFPKLRIVLEHISTKTAVDYVSEGPANLTATITPHHLLYNRNKLLAGGIRPHYYCLPILKHEKDQKALQIAATSGNPKFFAGTDSAPHAINAKENACGCAGIYSAPYAVALYTQIFDELNQLKKLNDFLSRFGAEFYQLPINQQQLELIKSPQTIPNSMPFGSTHVVPIAAGDTINWSINGFSQ

SEQ ID NO: 27714 - DNA, 1059 bp, Burkholderia mallei ATCC 23344
  CDS (1)..(1059): transl_table=11
atgaatgcttccgttcccgcctcgctgaccctcgcccgccccgacgactggcacctgcacgtgcgcgacggcgcgatgctcgcggccgtcctgccgcacaccgctcgccagttcggccgcgcgatcatcatgccgaacctgaagccgcccgtcacgacgaccgcgcaggcgcaggcctaccgcgagcgcatcctggccgcggtgccggccggcatgacgttcgagccgttgatgacgctgtacctgaccgacaacacgcccgccgacgaaatccgccgcgcacgcgaaagcggctgcgtgcacggcgtgaagctctatccggcgggcgcgacgacgaactcggacgccggcgtgaccgacctgctcggcaagtgcgcgaagacgctcgaggcgatgcaggaagtcgggatgccgctgctcgtgcacggcgaggtgacggatccgtcgatcgacctgttcgaccgcgagaaggtgttcatcgatcgcgtgatggagccgctgcgccgcgcgctgccggggctcaaggtggtgttcgagcatattacgacgaaggatgcggccgactacgtgcgcgatgccgacgcggcgtcaggccggatcggcgcgacgatcaccgcgcaccatctgctgtacaaccgcaatgcgatgtttttcggcggcatccgtccacattactactgcctgccggtgctcaagcgcgagacgcatcggatcgcgctcgtcgaggcggcgacgtcgggcaatccgcgcttcttcctcggcaccgacagcgcgccgcacgcgaaaggcgcgaaggaagccgcgtgcggctgcgcgggctgctacaccgcgctgcacgcgctcgagctgtacgcggaggcattcgaccaggcgggcgcgctcgacaagctcgaaggcttcgcgagcttcttcggcgcggacttctacggtttgccgcgcagcgccgagacggtgacgctgcgccgcgagacgtgggagctgccgcgcgagatcgacgcgggcgccggcccggtcgtgccgctgcgcggcggcgaggcgatcggctggcggctcgtctga

SEQ ID NO: 27715 - protein, 352 aa, Burkholderia mallei ATCC 23344
MNASVPASLTLARPDDWHLHVRDGAMLAAVLPHTARQFGRAIIMPNLKPPVTTTAQAQAYRERILAAVPAGMTFEPLMTLYLTDNTPADEIRRARESGCVHGVKLYPAGATTNSDAGVTDLLGKCAKTLEAMQEVGMPLLVHGEVTDPSIDLFDREKVFIDRVMEPLRRALPGLKVVFEHITTKDAADYVRDADAASGRIGATITAHHLLYNRNAMFFGGIRPHYYCLPVLKRETHRIALVEAATSGNPRFFLGTDSAPHAKGAKEAACGCAGCYTALHALELYAEAFDQAGALDKLEGFASFFGADFYGLPRSAETVTLRRETWELPREIDAGAGPVVPLRGGEAIGWRLV

SEQ ID NO: 27716 - DNA, 1044 bp, Methylococcus capsulatus str. Bath
  CDS (1)..(1044): transl_table=11
atggactcgatcacgctggcgacacccgacgactggcatctgcacctgcgcgacggcgcagccatggcggacatcgtggaccacagtgcccgccagttcggccgggcggtcgtcatgcccaacctgaagccaccggtgacgacggtgacggccgcactggaataccgtggccgtatcctggcggccctgccggacgacgcgcgttttgagccgctgatggcgctttatctgacggatgccacgccggccgatgaagtccggcgcgcggccgaaacgcccgaaatcatcggcttcaagctctacccggccggcgccacgacccactccgaggccggcgtcacggccatcggaaagatccagcggacgctcgaagccctggaacggcatgatgtacccctgctcgttcacggcgaggtcaccgacgcggaaatcgacattttcgaccgggaagcgcgtttcatcgaatcggtcctcaagccgctggtcaggcgcttcccggcattgcgcatcgtcctggaacacgtgacgacgaaggagggtgtggagttcgtgcaaggctgcggtccccggatcggggccaccatcacggcccaccatctgctctataaccgcaatgccttgctggccggcggcatccgccctcaccactactgcctgccggtgctcaagcgcgaatcccaccggcaggcactggtatcggccgcgaccagcggcgacgcccacttctttctgggcaccgacagcgctccccacccccggccacacaaggagagtgcctgcggttgcgccggctgctacacggcattcacggccgtggaactttacgcccttgcattcgagcgggccggcgcgctggacaagctcgagcgcttcgccagccacaacggcgccgatttctacggcctccccaggaaccgcggaaccctcaccctgcaccgggcgccgtggcggattcccgacgctctgccattcgggcgggacagcctggttcccgccatggccggagaagacatcccttggcgggcatcccgccacccgggttag

SEQ ID NO: 27717 - protein, 347 aa, Methylococcus capsulatus str. Bath
MDSITLATPDDWHLHLRDGAAMADIVDHSARQFGRAVVMPNLKPPVTTVTAALEYRGRILAALPDDARFEPLMALYLTDATPADEVRRAAETPEIIGFKLYPAGATTHSEAGVTAIGKIQRTLEALERHDVPLLVHGEVTDAEIDIFDREARFIESVLKPLVRRFPALRIVLEHVTTKEGVEFVQGCGPRIGATITAHHLLYNRNALLAGGIRPHHYCLPVLKRESHRQALVSAATSGDAHFFLGTDSAPHPRPHKESACGCAGCYTAFTAVELYALAFERAGALDKLERFASHNGADFYGLPRNRGTLTLHRAPWRIPDALPFGRDSLVPAMAGEDIPWRASRHPG

SEQ ID NO: 27718 - DNA, 1038 bp, Legionella pneumophila str. Paris
  CDS (1)..(1038): transl_table=11
atgcaaactctgataattaatcgccctgacgattggcatctccatcttcgggatggagagtttctaactcataccgtccaggcgtctgcccaacattttgccagagcgttagtgatgcccaatctcaaaccagcactaactaatttagccgcaattgagagttatagaaacagaatcatttcggctattcccaaacaaaactcctttattccttatatgactttttatttaaatgagtccgttaaaccagaagaattacagcaagccgcctctctttcttatatagtgggagcaaaactttatccggctggagcgacgacaaattctgaagagggtgctaaatctttgaaagcactctaccctctttttgaaacattgcaaacgagtaatttagtcttgcaaattcatggcgaagtcactcatagtgatattttcgaacgcgaagcactatttattgatgaatacctgaaacccattgctaaacatttccccaaattaagaatcgttctggagcacatatcaaccaaagctgccgtggattatgtttcagaaggacctgctaaccttacagcaacaataactcctcaccatttgctttataatcgcaataagctactcgcagggggcattagacctcattactattgtttgcctattttaaaacacgaaaaagaccaaaaggccttacaaattgcagcgacgagtggaaatccaaaattttttgccggcactgacagtgcccctcatgccatcaatgccaaggaaaatgcatgtggatgcgccggtatttactcagctccatttgcggtagcgctctacacgcagatctttgatgaacttaaccaattaaaaaaacttaatgattttcttagtcgatttggcgcagagttttaccaactccctattaatcaacagcaattggaactcattaaagcacctcaaactatccccaactcaatgccatttggatcaactcatgttgtgcctattgctgctggagacactataaactggagtattaatggcttctcacaataa

SEQ ID NO: 27719 - protein, 345 aa, Legionella pneumophila str. Paris
MQTLIINRPDDWHLHLRDGEFLTHTVQASAQHFARALVMPNLKPALTNLAAIESYRNRIISAIPKQNSFIPYMTFYLNESVKPEELQQAASLSYIVGAKLYPAGATTNSEEGAKSLKALYPLFETLQTSNLVLQIHGEVTHSDIFEREALFIDEYLKPIAKHFPKLRIVLEHISTKAAVDYVSEGPANLTATITPHHLLYNRNKLLAGGIRPHYYCLPILKHEKDQKALQIAATSGNPKFFAGTDSAPHAINAKENACGCAGIYSAPFAVALYTQIFDELNQLKKLNDFLSRFGAEFYQLPINQQQLELIKAPQTIPNSMPFGSTHVVPIAAGDTINWSINGFSQ

SEQ ID NO: 27720 - DNA, 1038 bp, Legionella pneumophila str. Lens
  CDS (1)..(1038): transl_table=11
atgcaaactctgataattaatcgccctgacgattggcatctccatctccgggatggagagtttctaactcataccgtccaggcgtctgcccaacattttgccagagcgttagtgatgcccaatctcaaaccagcactaactaatttacccgcaattgagagttatagaaacagaatcatttcggccattcccaaacaaagctcctttattccttatatgaccttttatttaaatgagtccgttaaaccagaagaactacaccaagccgcctctctttcttatatagttggagcaaaactttatccagctggagcgacgacaaattctgaagagggtgctaaatctttgaaagcactctaccctctttttgaaacattgcaaacgagtaatttagtcttgcaaattcatggcgaagtcactcatagtgatattttcgaacgcgaagcactatttattgatgaatacctgaaacccattgccaaacatttccccaaattaagaatcgttctggagcatatatcaaccaaagctgccgtggattatgtttcagaaggacctgctaaccttacagcaacaataactcctcaccatttactttataatcgcaataagctactcgcagggggcattagacctcattattattgtttgcctattttaaaacacgaaaaagaccaaaaggccttacaagttgcagcaacgagcggaaatccaaagttttttgccggcactgacagtgcccctcatgccatcaatgccaaggaaaatgcatgtggatgcgccggtatttattcagctccatatgcggtagcgctctacacgcagatctttgatgaacttaaccaattaaaaaaacttaatgattttcttagtcgatttggcgcagagttttaccaactccctattaatcaacagcaattggaactcattaaatcacctcaaactatccccaactcaatgccatttggttcaactcatgttgtgcctattgctgctggagacactataaactggagtattaatggtttctcgcaataa

SEQ ID NO: 27721 - protein, 345 aa, Legionella pneumophila str. Lens
MQTLIINRPDDWHLHLRDGEFLTHTVQASAQHFARALVMPNLKPALTNLPAIESYRNRIISAIPKQSSFIPYMTFYLNESVKPEELHQAASLSYIVGAKLYPAGATTNSEEGAKSLKALYPLFETLQTSNLVLQIHGEVTHSDIFEREALFIDEYLKPIAKHFPKLRIVLEHISTKAAVDYVSEGPANLTATITPHHLLYNRNKLLAGGIRPHYYCLPILKHEKDQKALQVAATSGNPKFFAGTDSAPHAINAKENACGCAGIYSAPYAVALYTQIFDELNQLKKLNDFLSRFGAEFYQLPINQQQLELIKSPQTIPNSMPFGSTHVVPIAAGDTINWSINGFSQ

SEQ ID NO: 27722 - DNA, 1029 bp, Photobacterium profundum SS9
  CDS (1)..(1029): transl_table=11
atgacaacgattacaattacacgtcctgacgactggcatgtgcatttacgcgatggcgacgtattaaaagatactgttcgtgacatcagccggtatatgggacgagcgataatcatgcctaacttgatcccacccgttattgatacagaatctgcactatcttaccgcgaacgtattattgcccaaggccctcaaggcaacttctccccgctaatggttatctatttaaccgacaatacttccgcagaagaaatccacaaagccaaagcatctggccatgtatacgctgccaaactttaccctgcaggtgcaaccaccaattcagactcgggcgtaacatccattgatcatattcgccctgcacttcaagcaatgcaagaagcaggtatgcagctgcttattcatggtgaagtaaccgctcacgatatcgatattttcgaccgtgaaaaagtattcctagagacggttttagcaccgattgttgagcaattccccaaccttagaatggtattggaacatatcacaacagcagatgccgttgagtttgtaacaaatgcaggccctaatgttggagccacaattaccgctcaccacctcatgtttaaccgtaaccatatgttagtcggtggcattcgtccgcatttctattgcttaccaattctaaagcgtaatattcaccaagacgcattggttaaagctgcaacaagtggtaaccctaaattcttcttgggtacagactctgcaccacacgcacaaggtcgtaaagaatcagcttgtggttgtgctggctcttacactgcgcacgcggcaatcgagctgtatgctgaagtattcgaagcagcagacgcattagataaattagaagcattctcaagctttaatggtcctgacttttacaaccttccacgtaatacagacaccattacactcaaaaaagaaagctggaacgtgcctgaaacaatggcatttggtggcgatgaagtagtaccaatccgtgcaggcgaagcaatgctatggaaagttatctaa

SEQ ID NO: 27723 - protein, 342 aa, Photobacterium profundum SS9
MTTITITRPDDWHVHLRDGDVLKDTVRDISRYMGRAIIMPNLIPPVIDTESALSYRERIIAQGPQGNFSPLMVIYLTDNTSAEEIHKAKASGHVYAAKLYPAGATTNSDSGVTSIDHIRPALQAMQEAGMQLLIHGEVTAHDIDIFDREKVFLETVLAPIVEQFPNLRMVLEHITTADAVEFVTNAGPNVGATITAHHLMFNRNHMLVGGIRPHFYCLPILKRNIHQDALVKAATSGNPKFFLGTDSAPHAQGRKESACGCAGSYTAHAAIELYAEVFEAADALDKLEAFSSFNGPDFYNLPRNTDTITLKKESWNVPETMAFGGDEVVPIRAGEAMLWKVI

SEQ ID NO: 27724 - DNA, 1047 bp, Salmonella enterica subsp. enterica serovar Paratyphi A str. ATCC
  CDS (1)..(1047): transl_table=11
atgactgcaccatcccaggttttaaagatccgccgcccggacgactggcacgttcaccttcgcgatggcgacatgttaaaaacggtcgtaccctataccagcgaaatttatggtcgcgctatcgtgatgccgaacctggcgtcccccatcacgaccgttgatgcagcgatcgcctaccgccagcgtattctcgatgcggtgcccgccgggcatgatttcacgccgttaatgacctgctatttaacggattcgctcgatgccgatgaactggagcgtggtttccatgaaggcgtgtttactgcggccaagctttacccggccaatgccaccactaactccagtcatggcgtaacgtcagtcgacgctatcatgccggtactggagcggatggaaaaactcggaatgccattgctggtccacggtgaggtgacccatgcggatgttgatatcttcgatcgcgaagcgcgttttatcgacaccgtaatggaaccgctacgccagcgtctgaccgcgcttaaagtggtctttgaacacatcacaaccaaagatgccgcgcagtatgtacgtgacggcagcgacaacctggcggcgaccattacgcctcaacatttaatgtttaaccgtaatgatatgctggtcggcggcattcgtcctcacctgtactgtctgccgattctgaaacgcaatattcaccagcaggcgttacgcgacctggtcgccagtggttttacgcgcgccttcctggggacggattcagcgccgcattcacgtcatcgtaaagagacccgttgcggctgcgccggttgtttcaacgccccctccgctcttggcagttatgccgccgtgtttgaggaaatgaacgcgctggcgcactttgaagcgttctgttcactgaatggcccgcaattctatggcctgccggtgaatacggggtgggtggaactggttcgcgatgaacaacagataccggaaaatatcgcgctggctgatgattcgctggtgccttttttagcgggtgaaacagtacgctggtcagtaaaaaaataa

SEQ ID NO: 27725 - protein, 348 aa, Salmonella enterica subsp. enterica serovar Paratyphi A str. ATCC
MTAPSQVLKIRRPDDWHVHLRDGDMLKTVVPYTSEIYGRAIVMPNLASPITTVDAAIAYRQRILDAVPAGHDFTPLMTCYLTDSLDADELERGFHEGVFTAAKLYPANATTNSSHGVTSVDAIMPVLERMEKLGMPLLVHGEVTHADVDIFDREARFIDTVMEPLRQRLTALKVVFEHITTKDAAQYVRDGSDNLAATITPQHLMFNRNDMLVGGIRPHLYCLPILKRNIHQQALRDLVASGFTRAFLGTDSAPHSRHRKETRCGCAGCFNAPSALGSYAAVFEEMNALAHFEAFCSLNGPQFYGLPVNTGWVELVRDEQQIPENIALADDSLVPFLAGETVRWSVKK

SEQ ID NO: 27726 - DNA, 1035 bp, Idiomarina loihiensis L2TR
  CDS (1)..(1035): transl_table=11
atgcaaagcttaacaattccaagacctgatgactggcacctgcatttacgcgatggtgctatgttacaaacaaccgtacctgcaactgcggcagtgtttcatcgtgctgtggttatgccaaacctggtccccccggtaacaaccgtagcggccgctatggaatatcgtgagagaattttggccgagatccctgctggcatgagttttaatccgcttatggctctgtatcttacggcagacacaactcctgcagaaattgctgaagctgctgcgaacgagcatgttattggcttcaagctatatccgtcaggagccaccacaaattctgccgctggagtgaagtcggtagaagctctggctccggtactggcagctatgcaggagcatcaggtacctttgctggtgcatggtgaagtaaccgacagcgacatcgatatctttgaccgcgaaagagtttttattgaacggcatttaattccgataaccgagcgcttcccgcagttaaagctggtgctggagcatataaccaccgccgacgcggttaagtttgttgaaaacgccaacagtaatgtcgcagccacaatgaccccgcaacacttactgatgaaccgcaacgacttgctggtcggtggtattcgtccacataattactgtctgccaattttaaaacgtcggtcacatcaacaagccttgcagcaggcggccttgtccggtaaccctaagtttttcctcggaactgactcagccccgcatgtgcaggcaaataaagagactgcttgtggttgcgcgggttgttattcagctccagcagcaattgagctttatgccgagttttttagccagcataacgcgctggataaattggcaaattttgccagtgtttttggggctgacttttatcagttaccccgcaacactgagaccattgaactggttcaacaaccatggactgttgctgaaacggtagacacggcaacagggcctatggtgccttattgggcaggatctgatttgcaatggaaactgcgcggttag

SEQ ID NO: 27727 - protein, 344 aa, Idiomarina loihiensis L2TR
MQSLTIPRPDDWHLHLRDGAMLQTTVPATAAVFHRAVVMPNLVPPVTTVAAAMEYRERILAEIPAGMSFNPLMALYLTADTTPAEIAEAAANEHVIGFKLYPSGATTNSAAGVKSVEALAPVLAAMQEHQVPLLVHGEVTDSDIDIFDRERVFIERHLIPITERFPQLKLVLEHITTADAVKFVENANSNVAATMTPQHLLMNRNDLLVGGIRPHNYCLPILKRRSHQQALQQAALSGNPKFFLGTDSAPHVQANKETACGCAGCYSAPAAIELYAEFFSQHNALDKLANFASVFGADFYQLPRNTETIELVQQPWTVAETVDTATGPMVPYWAGSDLQWKLRG

SEQ ID NO: 27728 - DNA, 1035 bp, Azoarcus sp. EbN1
  CDS (1)..(1035): transl_table=11
atgcagacgatttccctgatccgccccgacgactggcatctgcacgtgcgcgacggcgcagcgctggcgaccgtcgtgccgcacaccgctcgccgtttcggtcgcgcgctgatcatgccgaacctgcgcccgccggtgacgactgccgcgcaggcactcgaataccgcgcccgcatcctcgccgcggtgccgcccggccagcacttcgagccgctgatgagcctgtacctcaccgacaacacctcgcccgatgaaatcgaccgcgcgaaggcgagcggcgcggtcgtcgccgtcaagctgtatccggccggtgcgacgacgaactccgacgcgggcgtgaccgccatcgaaaaagtccacgccgtgctcgagcgcatggaaaagctcggcatggtgctgtgcgtgcatggcgaagtcacacacggcgacgtggatgtgttcgaccgcgagcaggtgttcatcgagcaggtcctggcgccgctggtggcgcgctttcccgctctgcgcgtcgtcttcgagcacatcacgaccgccgaggcagcgcgcttcgtgcaggacgccggaccgaacgtcgcggcgaccgtgacggcacatcacctgctgctcaaccgcaacgcgattttcgctggcggcatccgcccgcatcattactgcctgccggtgctcaagcgcgaaacccaccgccgcgcgctggttgaagcggcgacgtcgggcaacgcgaaattcttcctcggcaccgactccgcgccgcattcgcgcgccgcgaaagagaccgcctgcggctgcgcaggctgctacaccgcgcacgccgcgatcgagctgtacgccgaggccttcgagcaggccggagcgctcgaccggctcgaggctttcgcgagcctgaacgggccggcgttctacggccttgcgccgaacgccgagcggatcacgctggcgaaagacgcgtgggaagtgccgggcgaatacgaatacctgcacgacgacccgctggtgccgctgcgtgccggcgaaacagtcgcttggcgcgtgctctga

SEQ ID NO: 27729 - protein, 344 aa, Azoarcus sp. EbN1
MQTISLIRPDDWHLHVRDGAALATVVPHTARRFGRALIMPNLRPPVTTAAQALEYRARILAAVPPGQHFEPLMSLYLTDNTSPDEIDRAKASGAVVAVKLYPAGATTNSDAGVTAIEKVHAVLERMEKLGMVLCVHGEVTHGDVDVFDREQVFIEQVLAPLVARFPALRVVFEHITTAEAARFVQDAGPNVAATVTAHHLLLNRNAIFAGGIRPHHYCLPVLKRETHRRALVEAATSGNAKFFLGTDSAPHSRAAKETACGCAGCYTAHAAIELYAEAFEQAGALDRLEAFASLNGPAFYGLAPNAERITLAKDAWEVPGEYEYLHDDPLVPLRAGETVAWRVL

SEQ ID NO: 27730 - DNA, 1041 bp, Silicibacter pomeroyi DSS-3
  CDS (1)..(1041): transl_table=11
atgacccagagcctcacgatccgccgccccgacgactggcacctgcatctgcgcgacggcgccatgctggccgccgtcctgcccgaaaccgcgcgccatttcgctcgcgccatcgtcatgccgaacctggtaccgccggtggtgaccggggcgcaggcggccgcctatcgcgaccggatcctggcgacgctgcccaagggcatgaatttcgaaccgctgatgacgctctacctgaccgagcagaccgatcccgacgatctggccgcggcgcacaccagcgggctgatcacctcggtcaagctctacccggcgggcgccaccaccaattccgcgagcggcgtgaaggattttgacaaggtacgtccggtgctcgaacgcatggccgaaatcggctgtccactctgcgtacatggcgaggtcacggatcgcgagatcgacattttcgaccgcgaggcggtgttcatcgaccgggtgcttgacccgatccgccgcgcgacaccggggctgcgcgtgatcatggagcatatcaccacaaaggatggggccgattacgtagccgccaaccccgagggtctgggggcgacgatcaccgtccagcacctgatgttcgaccgcaatgacatgctggtgggcggcatgcgcccgcattactactgcctgccgatcctcaagcgccgccatcaccgcgaggcgctggtcgccgccgccacgtcgggcgatgcgcggtacttccttggcaccgacagcgcgccccatccgacccacgccaaagaggccgaatgctgcgccgcgggctgttttaccgcgccaatcgcgctgtcctgccttgcccatgtgttcgaggaagcgggtgcattggacaagctggaaggcttcacctcgctgaacggtcccgccttttatggcctgcctgtcaatgccgacacgatcacgctcagcaaggccgacccgcttgacatccccaagaccctgcccgccggagagcataccgtcaccgtgttcgatcccggtgtcccactgcattggagggtgacgaggtaa

SEQ ID NO: 27731 - protein, 346 aa, Silicibacter pomeroyi DSS-3
MTQSLTIRRPDDWHLHLRDGAMLAAVLPETARHFARAIVMPNLVPPVVTGAQAAAYRDRILATLPKGMNFEPLMTLYLTEQTDPDDLAAAHTSGLITSVKLYPAGATTNSASGVKDFDKVRPVLERMAEIGCPLCVHGEVTDREIDIFDREAVFIDRVLDPIRRATPGLRVIMEHITTKDGADYVAANPEGLGATITVQHLMFDRNDMLVGGMRPHYYCLPILKRRHHREALVAAATSGDARYFLGTDSAPHPTHAKEAECCAAGCFTAPIALSCLAHVFEEAGALDKLEGFTSLNGPAFYGLPVNADTITLSKADPLDIPKTLPAGEHTVTVFDPGVPLHWRVTR

SEQ ID NO: 27732 - DNA, 996 bp, Campylobacter jejuni RM1221
  CDS (1)..(996): transl_table=11
atgaaacttaaaaaccctttggatatgcatttacatttacgcgatgaaagtatgcttgagcttgtagctccttttagtgcaaaagactttaaggcaggggttatcatgccaaatttaatcaccccacttactgaaatagatgtattaaaagcttataaagaacgcattttaaaagcatgtaaaaatgaagattttacgcctttgatgactttgtttttcaaagactatgatgagcaatttttagaaaaagctaaagacgagctttttgctatcaaactttatcctgcaggtatcactaccaactcagataatggaatttcaagttttgatatagaaaagttaaaacctacattaattactatgagcgaattaaacatacccttacttgtgcatggagaaaccaatgattttgtcatggatagagaagcaaattttgccaaaatatatgaaaaattagctaaaaactttccaaaattaaaaattgtaatggagcatattaccactaaggttttgtgtgatttattaaaagattatgaaaatttatacgcaactattactttgcatcatttaatgataacgcttgatgatgtagtgggtggtaaaatggatccacatttattttgcaagcctattgcaaaacgctatgaagataaagacgctttatgtgggcttgcttttagtggctatgaaaaggctatgtttggaagcgatagcgcgcctcatccattgcacactaaagaatgttgtggttgtgcggctggagtttttagcgcaccggtgattttacctgtattagttgaactttttgaaaaatattcaaatgaaacaaatttgcaaaaatttatttcagataatgcttgcaaaatccataatcttaaatttgaaaatgacaaaattatcactttagaaaaacaagaatggcaagtagcgcaaaaatacggcgatgtagtgccatttatggcagggaaaactttaaatttcaaagtcgcaaattaa

SEQ ID NO: 27733 - protein, 331 aa, Campylobacter jejuni RM1221
MKLKNPLDMHLHLRDESMLELVAPFSAKDFKAGVIMPNLITPLTEIDVLKAYKERILKACKNEDFTPLMTLFFKDYDEQFLEKAKDELFAIKLYPAGITTNSDNGISSFDIEKLKPTLITMSELNIPLLVHGETNDFVMDREANFAKIYEKLAKNFPKLKIVMEHITTKVLCDLLKDYENLYATITLHHLMITLDDVVGGKMDPHLFCKPIAKRYEDKDALCGLAFSGYEKAMFGSDSAPHPLHTKECCGCAAGVFSAPVILPVLVELFEKYSNETNLQKFISDNACKIHNLKFENDKIITLEKQEWQVAQKYGDVVPFMAGKTLNFKVAN

SEQ ID NO: 27734 - DNA, 1029 bp, Vibrio fischeri ES114
  CDS (1)..(1029): transl_table=11
atgacaactttaacaattactcgtcctgatgattggcatttacacttacgtgatggtgatgtgttaactgacacagttcgtgactctggtcgttacaacggcagagctttaatcatgccaaaccttgtaccacctgtaacaactaccgaacaagcattaagttaccgtgaacgcattcaggctgaaaacaaatctgattcttttgctcctcttatgtctctttatctaacagaaaagacaacatcagaagagatccgaaaagcgaaagcgactggacatatcgtagcagcaaaactgtatccagctggtgctacaacaaactcagactctggtgtaagcgacgttaaaaacgtttaccctattctaaaaacgatgcaagaagaaggcatgcttttacttattcatggggaagtaacaactcatgatattgatatcttcgatcgtgaaaagactttccttgatacagttttagcgcctatcgttaatgattttcctgagctaaaaattgtacttgagcacatcacaactaaagatgcggcagattttgttaaaaacgcaggtccaaacgttgctgcaaccattacagcgcatcacttattgtttaaccgtaaccacatgttagttggtggtattaaacctcacttctactgtttaccaattttaaaacgcaatacacaccaacaagctctagtggaagctgcaacaagcggtaatcctaaatttttcttaggtactgattcagcacctcatgcaaaagacaaaaaagaagcggcttgtggttgtgctggttcatatactgcccacgcttcaatcgagctttatgcagaagtatttgaaaacgaaggtaagttagaaaacctagaagcattcgcaagctttaatggtccagatttttataacctacctcgcaacactgacacaataacgcttgtaaaagaagcgtggattgcaccagagacaatggcatttggaaatgactttgttgtaccaattcgtgctggtgaagctgttgagtggctagtaaagtaa

SEQ ID NO: 27735 - protein, 342 aa, Vibrio fischeri ES114
MTTLTITRPDDWHLHLRDGDVLTDTVRDSGRYNGRALIMPNLVPPVTTTEQALSYRERIQAENKSDSFAPLMSLYLTEKTTSEEIRKAKATGHIVAAKLYPAGATTNSDSGVSDVKNVYPILKTMQEEGMLLLIHGEVTTHDIDIFDREKTFLDTVLAPIVNDFPELKIVLEHITTKDAADFVKNAGPNVAATITAHHLLFNRNHMLVGGIKPHFYCLPILKRNTHQQALVEAATSGNPKFFLGTDSAPHAKDKKEAACGCAGSYTAHASIELYAEVFENEGKLENLEAFASFNGPDFYNLPRNTDTITLVKEAWIAPETMAFGNDFVVPIRAGEAVEWLVK

SEQ ID NO: 27736 - DNA, 1047 bp, Salmonella enterica subsp. enterica serovar Choleraesuis str
  CDS (1)..(1047): transl_table=11
atgactgcaccatcccaggttttaaagatccgccgcccggacgactggcacgttcaccttcgcgatggcgacatgttaaaaacggtcgtaccctataccagcgaaatttatggtcgcgctatcgtgatgccgaacctggcgtcccccatcacgaccgttgatgcagcgatcgcctaccgccagcgtattctcgatgcggtgcccgccgggcatgatttcacaccgttaatgacctgctatttaacggattcgctcgatgccgatgaactagagcgtggtttccatgaaggcgtatttactgcggctaagctttacccggccaatgccaccactaactccagtcatggcgtaacgtcagtcgacgctatcatgccggtactggagcggatggaaaaactcggaatgccattactggtccacggggaggtgacccatgcggatgttgatatcttcgatcgcgaagcgcgttttatcgacactgtaatggaaccgctacgccagcgtctgaccacgcttaaagtggtctttgagcacatcacgaccaaagatgccgcgcagtatgtccgtgacggcaacgactacctggcggctaccattacgcctcaacatttaatgtttaaccgtaatgatatgctggtcggcggcattcgtcctcacctgtactgtctgccgattctgaaacgcaatattcaccagcaggcgttacgcgaactggttgccagtggttttacgcgcgccttcctggggacggattcagcgccgcattcacgtcatcgtaaagagaccagttgcggctgcgccggttgtttcaacgccccctccgcccttggcagttatgccgccgtgtttgaggaaatgaacgcgctggcgcactttgaagcgttctgttcactgaatggcccgcaattctatggcctgccggtgaatacggggtgggtggaactggttcgcgatgaacaacaggtaccggaaaatatcgcgctggctgatgattcgctggtgccttttttagcgggtgaaacagtacgctggtcagtaaaaaaataa

SEQ ID NO: 27737 - protein, 348 aa, Salmonella enterica subsp. enterica serovar Choleraesuis str
MTAPSQVLKIRRPDDWHVHLRDGDMLKTVVPYTSEIYGRAIVMPNLASPITTVDAAIAYRQRILDAVPAGHDFTPLMTCYLTDSLDADELERGFHEGVFTAAKLYPANATTNSSHGVTSVDAIMPVLERMEKLGMPLLVHGEVTHADVDIFDREARFIDTVMEPLRQRLTTLKVVFEHITTKDAAQYVRDGNDYLAATITPQHLMFNRNDMLVGGIRPHLYCLPILKRNIHQQALRELVASGFTRAFLGTDSAPHSRHRKETSCGCAGCFNAPSALGSYAAVFEEMNALAHFEAFCSLNGPQFYGLPVNTGWVELVRDEQQVPENIALADDSLVPFLAGETVRWSVKK

SEQ ID NO: 27738 - DNA, 1044 bp, Pseudomonas syringae pv. syringae B728a
  CDS (1)..(1044)
atgtctgaccgcctgaccctcctgcgtcccgacgactggcatattcacctccgtgacggagctgtcttgcctcataccgttgctgacgtagcgcgaacttttggccgcgcaatcatcatgcccaacctcgtgcctccggtacgcaacgcgcagcaagccgatgcctatcgccagcgcattctggcggcacgtccggccaccagccgcttcgagccattgatggtgctgtacctcaccgaccagaccacgcccgacgacatccgcaccgccaaggccagtggcttcgtgtatgcggccaagctgtatccggccggcgcgaccaccaactccgattccggtgtcaccagcatcgacaagatcttccctgccctcgaagccatggccgacgtcggcatgctgctgctggtgcacggggaagtaacacgtggcgaaatcgacgtgttcgatcgcgagaaggtcttcatcgatgagcacctgcgccgtgtagtcgagcgcttcccgagcctgaaagtggtgttcgaacacatcaccaccggtgaagcggtgcagttcgtcaatgaagcttcagccaatgtcgcggcgaccatcaccgcgcaccacctgctgtacaaccgtaaccacatgctggtcggcgggattcgtccgcacttctattgcctgccgatcctcaagcgcaatactcatcagacagccctgctcgacgcggccaccagcggcagcggcaagttcttcctgggcaccgactcggcgccgcatgcccagcatgccaaggaaaacgcttgcggttgcgccgggtgctacaccgcctacgcagccatcgaactgtatgcagaagctttcgagcaacgtaacgccctggacaagctggaaggcttcgccagccttcacggtccggcgttctacggcttgcccgccaatcaggacaccatcacgctggtgcgtgacgagtggaccgcccctgccagcctgccgtttggcgagttgaccgttatcccgctgcgcgcaggtgaaacactgcgctggcgtctggaggaacacgcgtga

SEQ ID NO: 27739 - protein, 347 aa, Pseudomonas syringae pv. syringae B728a
MSDRLTLLRPDDWHIHLRDGAVLPHTVADVARTFGRAIIMPNLVPPVRNAQQADAYRQRILAARPATSRFEPLMVLYLTDQTTPDDIRTAKASGFVYAAKLYPAGATTNSDSGVTSIDKIFPALEAMADVGMLLLVHGEVTRGEIDVFDREKVFIDEHLRRVVERFPSLKVVFEHITTGEAVQFVNEASANVAATITAHHLLYNRNHMLVGGIRPHFYCLPILKRNTHQTALLDAATSGSGKFFLGTDSAPHAQHAKENACGCAGCYTAYAAIELYAEAFEQRNALDKLEGFASLHGPAFYGLPANQDTITLVRDEWTAPASLPFGELTVIPLRAGETLRWRLEEHA

SEQ ID NO: 27740 - DNA, 1041 bp, Rhodobacter sphaeroides 2.4.1
  CDS (1)..(1041)
atgacccagagcctgaccctgcgccgccccgacgactggcacctccacctgcgcgacggcgcgatgctggagggggtgctgcccgaaaccacacggcacttcgcccgcgccatcgtgatgccgaacctcgtgccgccggtggtgaccgcggcggaggcccaggcctaccgggcccggatcctgcgcgccctgcccgagggcgcgcggttcgagccgctgatggtgctctatctgaccgagacgaccgatccggccgatgtgcgcgcggcggcggcctcgggcctcgtgacggcggtgaagctctatcccgcgggggccacgaccaattcggcctcgggcgtgcgcgacttcgaccgggtgcgcggcgtgctcgagactatggccgagatcggcctgccgctctgcgtgcatggcgaggtgacggatccggccgtggacatcttcgatcgcgaggccgtgttcctcgaccgggtgctggatccgatccggcgcgcgacgccggggctccgggtcgtgctcgaacatgtgaccacgcgggaggggctcgattatgtgcgcggcggggggccggacatggccggcacgctcaccacgcatcacctgatcatcaaccgcaaccacatcctcgcgggcggcatccggccgcattactactgcctgccggtggccaagcgcgagacgcatcggctggcgctccgcgctgccgcgacggggggcgaggcctgcttcttcctcggcaccgacagcgcgccgcatgtcgatgcggccaaggagagcggctgcggctgcgcgggctgcttcaccgcccccaacacgctctcgatcctcgcccatgtgttcgaggaggagggcgcgctcgaccggctggaagggttcgtgtcgctccacgggcccgccttctaccgcctgccggcgaacgaggagcgcatcaccctgcgcaagggggcggctctcgcgctgcccggcaagatcgagacgggcgccgggccggtcacggtcttcgatcccggcttcccgcttctgtggcacgtcgaaccctga

SEQ ID NO: 27741 - protein, 346 aa, Rhodobacter sphaeroides 2.4.1
MTQSLTLRRPDDWHLHLRDGAMLEGVLPETTRHFARAIVMPNLVPPVVTAAEAQAYRARILRALPEGARFEPLMVLYLTETTDPADVRAAAASGLVTAVKLYPAGATTNSASGVRDFDRVRGVLETMAEIGLPLCVHGEVTDPAVDIFDREAVFLDRVLDPIRRATPGLRVVLEHVTTREGLDYVRGGGPDMAGTLTTHHLIINRNHILAGGIRPHYYCLPVAKRETHRLALRAAATGGEACFFLGTDSAPHVDAAKESGCGCAGCFTAPNTLSILAHVFEEEGALDRLEGFVSLHGPAFYRLPANEERITLRKGAALALPGKIETGAGPVTVFDPGFPLLWHVEP

SEQ ID NO: 27742 - DNA, 1047 bp, Pseudomonas aeruginosa UCBPP-PA14
  CDS (1)..(1047)
atgtccgaccgtctcaccctcctgcgccccgacgactggcacattcacctgcgtgacggtgccgcgctggccaataccgtcggcgacgccgcccgcaccttcggccgcgccatcgtcatgccgaacctggtgccgccggtgcgcaacgccgccgaagccgacgcctaccggcagcgcatcctcgccgcccgtcccgccgccagccgcttcgagccgctgatggtgctgtacctcaccgaccgcaccagcgccgaggaaatccgtaccgccaaggccagcggcttcgtgcatgccgccaagctctatccggcaggcgccaccaccaactcggactctggcgtgacccgcatcgacaatatcttcgaagcgctcgaggcgatggccgaggtcggcatgccactgctggtgcatggcgaggtgacccgcgccgaggtcgacgtattcgatcgcgagaagcagttcatcgacgagcacctgcgccgggtggtcgagcgcttcccgaccctgaaagtggtcttcgagcacatcaccaccggcgacgccgcccagttcgtccgggaagccccggccaacgtcggcgcgaccattaccgcccatcacctgctgtacaaccgcaaccacatgctggtcggcggtatccgcccgcatttctattgcctgccgatcctcaagcgcaacacccaccaggaagccctgctggacgccgcggtgagcggcaacccgaaattcttcctcggcaccgactcggcgccgcacgcccgccacgccaaggaaaccgcctgcggttgcgccggctgctacagcgcctacgccgccatcgagctgtatgccgaggccttcgaacagcgcaatgcgctggacaagctggaaggcttcgccagcctgcatggcccggatttctatggcctgccgcgcaacaccgaccggatcaccctggtccgcgaggagtggcaggcgcccgccagcctccccttcggcgacttcgacgtggtaccgctgcgcgccggcgagacactccgctggaaactgctggaggccggggcatga

SEQ ID NO: 27743 - protein, 348 aa, Pseudomonas aeruginosa UCBPP-PA14
MSDRLTLLRPDDWHIHLRDGAALANTVGDAARTFGRAIVMPNLVPPVRNAAEADAYRQRILAARPAASRFEPLMVLYLTDRTSAEEIRTAKASGFVHAAKLYPAGATTNSDSGVTRIDNIFEALEAMAEVGMPLLVHGEVTRAEVDVFDREKQFIDEHLRRVVERFPTLKVVFEHITTGDAAQFVREAPANVGATITAHHLLYNRNHMLVGGIRPHFYCLPILKRNTHQEALLDAAVSGNPKFFLGTDSAPHARHAKETACGCAGCYSAYAAIELYAEAFEQRNALDKLEGFASLHGPDFYGLPRNTDRITLVREEWQAPASLPFGDFDVVPLRAGETLRWKLLEAGA

SEQ ID NO: 27744 - DNA, 1077 bp, Psychrobacter sp. 273-4
  CDS (1)..(1077)
atgactgattcaattagagaattgactatcctgcagcccgatgattggcacatgcatttgcgtgatgacaaggcgctagcaaccacagtccctcatgcggcagagagctttaatcgggttatctgtatgccaaaccttgtgccgccggtcaaaaacgttgaagatgctcgcgcttaccgtgcgcgtatcatgcagcatctagaagccagtaatgtgagcgctgagcgtaaagcagcatttgatccgcgtatgaccttgtatcttaccgatcataccactgcacaagatatcgagttggcagcacaatctggcatcgtgcaagcggtcaagctgtatcctgctggcgccaccaccaactctgctgatggcgtcactgatatcaatgcctgcgttgatgtatttgaagcgcttgaaaaatataaccttcctctattactgcatggcgaagtcactcacgaccacgtcgatattttcgatcgtgaaaagcgctttttggatgaggtgatggtacaaatcatcgcaaagttcccaactatgaaaattgtgatggagcatatcaccaccagtgatgccgctgattttgtcttgtcacagggcaatcaaatcgctgccactattacgccgcaacatttgatgtttaaccgcaatcacctgctgctcggtggtatcaagccccacttttactgcttgcctatcttaaagcgtgaaagccatcaaaaagtattattagatgtcgccaccagcggcaacccaaaattctttttgggcacagactccgccccccatgcaaccgataaaaaagaagccgcttgtggctgtgcgggctgctatagcgctgctacagcgctaccgttatatgccacagcgtttgatagcgttggtaaaattgatagattagaagggtttactagccgttttggtgcccaattctacggtttgcccgttaacgagagcactattacgattatcaatacgccgatgcaaatcccggcatcttacccttactttgatggcagctctctaacaccactcatggcaggtgagaccttaccttggtcgattaaaaaatcactttaa

SEQ ID NO: 27745 - protein, 358 aa, Psychrobacter sp. 273-4
MTDSIRELTILQPDDWHMHLRDDKALATTVPHAAESFNRVICMPNLVPPVKNVEDARAYRARIMQHLEASNVSAERKAAFDPRMTLYLTDHTTAQDIELAAQSGIVQAVKLYPAGATTNSADGVTDINACVDVFEALEKYNLPLLLHGEVTHDHVDIFDREKRFLDEVMVQIIAKFPTMKIVMEHITTSDAADFVLSQGNQIAATITPQHLMFNRNHLLLGGIKPHFYCLPILKRESHQKVLLDVATSGNPKFFLGTDSAPHATDKKEAACGCAGCYSAATALPLYATAFDSVGKIDRLEGFTSRFGAQFYGLPVNESTITIINTPMQIPASYPYFDGSSLTPLMAGETLPWSIKKSL

SEQ ID NO: 27746 - DNA, 1032 bp, Dechloromonas aromatica RCB
  CDS (1)..(1032)
atgcaactgaccatcacccgtcccgacgactggcatctccacctgcgcgacggcgaagcgctggcgtccgtccttgcccataccgctcgccagttcggtcgcgccattgtgatgccgaacctgaaaccgccggtgacgaccgtcgagcaggccgctgcctatcgcgaccgtatcgtggccgcgctgccggtcggcgcctgcttcgagccgttgatgacgctgtatctgaccggcaacacgccggccagtgaaattgccaaagccgctgcctcgggcttcgtcaaggcggtaaagctttacccggccggggcgacgaccaattccgatgctggtctgaccgacatcgccaaggcctacgacacgctggccgaaatggagcgcgtcggcctgccgctgctggtgcacggcgaggtgaccgatccgaagatcgacctcttcgaccgcgaaaaggtcttcatcgacaccgtgctgctaccgctgaccctgcgcttcccgacgctgaaggtggtcatggagcacatcacgaccaaggatgcggccgagttcgtggccggctcgccggccaacgtggcggcgaccatcaccgcccaccacttgctgtacaaccgcaacgccattttccagggcggtgtccggccgcactggtactgcctgcctgtcttgaagcgcgagacgcatcgcgaggcgctggtcgcggcggcgatttccggcaatccgaaattcttcctcggcaccgattcggcgccgcatgccaagggcgccaaggaggcggcctgcggctgtgccggctgttacaccgcctatgcggcgatcgagctgtatgccgaagccttcgagcaggctggcgggctcgacaagctggaagctttcgccagcttcaatggcccggactggtacggcctgccgcgcaacagtggcaccgtcacgctggtcaaggaaaactggaccgtgccggccgactacccgtacatcagcaccgacaccatcgttccgctgcgcgccggcgaaacgctgtcctggaaaatgctctga

SEQ ID NO: 27747 - protein, 343 aa, Dechloromonas aromatica RCB
MQLTITRPDDWHLHLRDGEALASVLAHTARQFGRAIVMPNLKPPVTTVEQAAAYRDRIVAALPVGACFEPLMTLYLTGNTPASEIAKAAASGFVKAVKLYPAGATTNSDAGLTDIAKAYDTLAEMERVGLPLLVHGEVTDPKIDLFDREKVFIDTVLLPLTLRFPTLKVVMEHITTKDAAEFVAGSPANVAATITAHHLLYNRNAIFQGGVRPHWYCLPVLKRETHREALVAAAISGNPKFFLGTDSAPHAKGAKEAACGCAGCYTAYAAIELYAEAFEQAGGLDKLEAFASFNGPDWYGLPRNSGTVTLVKENWTVPADYPYISTDTIVPLRAGETLSWKML

SEQ ID NO: 27748 - DNA, 1035 bp, Ralstonia eutropha JMP134
  CDS (1)..(1035)
atgactcagaagctcaccatcacccgcccggacgactggcacctgcacctgcgcgacggcgcggcgctcgcggccgtgttgcccgacaccgcgcgccagttcggccgcgcgatcatcatgcctaacttgaagccgcccgtgaccacggtcgagcaggcgcaggcctaccgcgcccgaatcctggctgcgctgccggccggcatgagcttcgagccgctgatgacgctgtacctgaccgacaacaccccggccgaggaaatcgtcgcggccaaggcgagcggcttcgtgcatggcgtcaagctgtatcctgcgggcgctacgaccaacagcgatgccggcgtgaccgacatccgccgctgcgcgggcgcgctggaggcgatgcagcgtgtgggcctgccgctgctcgtgcacggcgaagtcactgatggcgacatcgatatcttcgatcgcgaagccgtcttcatcgaccgtgtcatgacgccgctgcgccgcgacttcccggaactgaaggtggtgttcgagcacatcacgaccagggatgcggcccagtacgtgcgcgatgcgagcggcccggtgggtgccaccatcacggcgcatcacctgctgtacaaccgcaatgcgatcttcaccggcggcatccgcccgcattactactgcctgccggtgctcaagcgcgagacgcatcgcgaggcgctggtcgcggccgcgacctcgggtagcgaccgtttcttcctcggcaccgacagcgcgccgcacgcgcgtggcctgaaggagcatgcctgcggctgcgccggctgctacaccgcgctgcacgccatggaactctatgcagaggccttcgacgccgctggtgcgctcgataagctggaagcgttcgcaagcttcaacggcccggcgttctacgggctgccgcgcaataccggcacgctgacgctggagcgcgaagactggcaactgccggcggaactgccgtatggcgatgccaccctggtgccgctgcgcgccggcgagacgctgcgctggaaggcgcgctga

SEQ ID NO: 27749 - protein, 344 aa, Ralstonia eutropha JMP134
MTQKLTITRPDDWHLHLRDGAALAAVLPDTARQFGRAIIMPNLKPPVTTVEQAQAYRARILAALPAGMSFEPLMTLYLTDNTPAEEIVAAKASGFVHGVKLYPAGATTNSDAGVTDIRRCAGALEAMQRVGLPLLVHGEVTDGDIDIFDREAVFIDRVMTPLRRDFPELKVVFEHITTRDAAQYVRDASGPVGATITAHHLLYNRNAIFTGGIRPHYYCLPVLKRETHREALVAAATSGSDRFFLGTDSAPHARGLKEHACGCAGCYTALHAMELYAEAFDAAGALDKLEAFASFNGPAFYGLPRNTGTLTLEREDWQLPAELPYGDATLVPLRAGETLRWKAR

SEQ ID NO: 27750 - DNA, 1065 bp, Burkholderia cepacia R18194
  CDS (1)..(1065)
atgactgcctcgaacgcttcttccccggcgacgctctcgctcgcccgtcccgacgactggcacctgcacctgcgagacggcgacatgctggccgccgtgctgccgcacaccgcacgccagttcggccgtgcaatcgtcatgccgaacctgaagccgccggtgacgaccaccgcgcaggcgcaggcctatcgcgagcgcatcctcgccgcgctgccggccgggatgacgttcgaaccgctgatgacgctgtacctgaccgacaacacgccgcccgacgagatccgccgcgcgcgcgaaagcggcttcgtgcacggcgtgaagctgtatccggccggcgcgacgacgaattccgaccacggcgtcaccgatctcgcgaaatgcgcgaagacgctcgaggcgatgcaggaaactggcatgccgctgctggtgcacggcgaagtgaccgatgcgtcgatcgacctgttcgaccgcgagaaggtcttcatcgaccgcgtgatgacgccgctgcgccgcgatttcccgggcctgaaggtcgtgttcgaacacatcacgacgaaggatgcggccgactacgtgcgcgacgccgacgcggcgcccggcctgctcggcgcgacgatcaccgcgcatcacctgctgtacaaccgcaatgcgctgttcgtcggcgggattcgcccgcattactactgcctgccggtgctgaagcgcgagacgcatcgcgtcgcgctcgtcgaggccgcgacgtcgggcaacccgcgcttcttcctcggtaccgacagcgcgccgcatgcgcgcgacgcgaaggaaaccgcgtgcggctgcgcgggctgctacacggcgctgcatgcgctcgaactgtatgcggaagcgttcgacacggccggcgcgctcgacaagctggaaggcttcgcgagcttcttcggcgccgatttctacgggctgccgcgcagcgccgagacggtcacgctgcgtcgcgaggcatgggagctgccgcgcgagatcttcgcaggcgatacgcccgtcgtgccgctgcgcggcggcgagacgatcggctggaaactggcgtga

SEQ ID NO: 27751 - protein, 354 aa, Burkholderia cepacia R18194
MTASNASSPATLSLARPDDWHLHLRDGDMLAAVLPHTARQFGRAIVMPNLKPPVTTTAQAQAYRERILAALPAGMTFEPLMTLYLTDNTPPDEIRRARESGFVHGVKLYPAGATTNSDHGVTDLAKCAKTLEAMQETGMPLLVHGEVTDASIDLFDREKVFIDRVMTPLRRDFPGLKVVFEHITTKDAADYVRDADAAPGLLGATITAHHLLYNRNALFVGGIRPHYYCLPVLKRETHRVALVEAATSGNPRFFLGTDSAPHARDAKETACGCAGCYTALHALELYAEAFDTAGALDKLEGFASFFGADFYGLPRSAETVTLRREAWELPREIFAGDTPVVPLRGGETIGWKLA

SEQ ID NO: 27752 - DNA, 1047 bp, Rubrivivax gelatinosus PM1
  CDS (1)..(1047)
atgagttctgctgccccggacaccctgaccctgagtcggcccgacgactggcacctgcacgtgcgcgatggcgccgcgctggcggccgtcgtgccgcacaccgcgcgacagttcggccgcgcgatcatcatgcccaatctcaagccgccggtcaccactgcggcccaggcgctggcctaccgcgagcgcatcctcgcggctgtgccggccggcctcgcgttcgagccgctgatgacgctctacctgaccgacaacatgccgcccgaggagatcggccgcgcgaaggcggccggcgtcgtggccgtcaagctctacccggcgggcgccaccaccaacagcgatgccggcgtgaccgacctgcgcaagacccaggccacgctcgaggcgatgcagcgcgagggcctgcctctgctggtgcacggcgaggtcaccgatgccgagatcgacctgttcgaccgcgaggcggtgttcatcgaccgccagctgatcccgctgcggcgcgacttcccggccctgaagatcgtgttcgagcacatcaccacccgcgaggccgcgcagtacgtggccggggccgggccgcacaccgcggccacgatcaccgcccaccacctgctctacaaccgcaacgccatcttcaccggcggcatccggccgcactactactgcctgccggtgctcaagcgcgagctgcatcgcgaggcgctggtggccgccgccacctcgggcagcgaccgctatttcctcggtaccgacagcgcaccgcatccggcccacctgaaagagcacgccagcggctgtgccggctgctacaccgcgttcagtgcgctggagctgtatgccgaggccttcgacgccgccggcgcgctggatcggctggaaggcttcgccagcgtccacggtccggccttctacggcctgccgcgcaacgccggcacggtgacgctgcgccggcaggcctggacgccacccgagacgctgccgttcggcgaagcgacgctcaagccgctgcgcggcggcgagtcgctggcctggcggcaggtcgagtga

SEQ ID NO: 27753 - protein, 348 aa, Rubrivivax gelatinosus PM1
MSSAAPDTLTLSRPDDWHLHVRDGAALAAVVPHTARQFGRAIIMPNLKPPVTTAAQALAYRERILAAVPAGLAFEPLMTLYLTDNMPPEEIGRAKAAGVVAVKLYPAGATTNSDAGVTDLRKTQATLEAMQREGLPLLVHGEVTDAEIDLFDREAVFIDRQLIPLRRDFPALKIVFEHITTREAAQYVAGAGPHTAATITAHHLLYNRNAIFTGGIRPHYYCLPVLKRELHREALVAAATSGSDRYFLGTDSAPHPAHLKEHASGCAGCYTAFSALELYAEAFDAAGALDRLEGFASVHGPAFYGLPRNAGTVTLRRQAWTPPETLPFGEATLKPLRGGESLAWRQVE

SEQ ID NO: 27754 - DNA, 1062 bp, Burkholderia fungorum LB400
  CDS (1)..(1062)
atgaccgcttccaacgcttccctcgactccatcacgctcgcccggccggacgactggcacctgcacgtccgcgacggcgcgatgctggccgccgtgctgccggacaccgcgcgccagttcggccgcgcgatcatcatgccgaacctgaagccgccggtcacgaccaccgcaatggcgcaggcttatcgcgagcggatcgtcaccgcgattcccgaaggcgcgaagttcgaaccgctgatgacgctgtacctgaccgacaacacgccgcccgacgaaatccgccgcgcgcgcgaaagcggcttcgtgcacggtgtgaagctgtacccggcgggcgcgacgaccaattcggacgcgggcgtcaccgacatcatgaagtgcgcgaaaacgctcgaagtgatgcaggaactgggcatgccgctgctggtgcacggcgaagtgacggatgcgtcgatcgatctgttcgaccgcgagaaggtgttcatcgaccgggtcatgacgccgctgcgccgcgcgtttccggcgctgaaggtggtgttcgagcacatcaccacgaaagacgcggtcgactatatccgcgaagccggcgtggcgccggaagtgctgggcgcgacgatcaccgcgcatcatctgctgtacaaccgcaacgcgatcttccagggcggtattcgcccgcattactactgcttgcccgtgttgaagcgggagacgcatcgggtggcgctggtcgaggcggcgacgtcgggcaatccgcgctttttcctcggaacggacagcgcgccgcacccgaaggggctgaaagagcatgcgtgcggctgcgcgggctgctacacggcgctgcacgctttggagctctatacggaagcattcgacaaggccggcgcgctggacaagctcgaaggtttcgcgagctttttcggcgcggatttctatggtctgccgcgtaacgaagagaaggtcacgttgcgtcgcgaggaatggacgctgccggccgaactgccggtcggcgatacgccggtcgtgccgctgcgcggcggcgagtcgatcggctggcgcctggtttaa

SEQ ID NO: 27755 - protein, 353 aa, Burkholderia fungorum LB400
MTASNASLDSITLARPDDWHLHVRDGAMLAAVLPDTARQFGRAIIMPNLKPPVTTTAMAQAYRERIVTAIPEGAKFEPLMTLYLTDNTPPDEIRRARESGFVHGVKLYPAGATTNSDAGVTDIMKCAKTLEVMQELGMPLLVHGEVTDASIDLFDREKVFIDRVMTPLRRAFPALKVVFEHITTKDAVDYIREAGVAPEVLGATITAHHLLYNRNAIFQGGIRPHYYCLPVLKRETHRVALVEAATSGNPRFFLGTDSAPHPKGLKEHACGCAGCYTALHALELYTEAFDKAGALDKLEGFASFFGADFYGLPRNEEKVTLRREEWTLPAELPVGDTPVVPLRGGESIGWRLV

SEQ ID NO: 27756 - DNA, 1041 bp, Novosphingobium aromaticivorans DSM 12444
  CDS (1)..(1041)
atgaccgagacgctgacgatccgccgccccgacgactggcatgtccacctgcgcgaccgcgacgtactgcggggcgtcgttccctataccgcccggcagtttgcccgcgccatcgtcatgcccaacctttcgccgccgatgaccgacgttgcgggcgttgccgcctatcgcgatcgcatccttgccgccctgccgcagggtagcgccttcacgccgctgatgacgctgtaccttaccgattcgaccgacatcgaagaggttgcgcgcggctttgccgaaggcgtgttcgtcgccgccaagctctatccagcccatgcgacgaccggttccgcgcacggcgtcaccgacatccgcaacatctatccggtgctggagaagatgcaggagatcgggatgccactgctgatccacggcgaggtgaccgattcccatgtcgacatcttcgaccgcgaagccgtgttcatcgagcggacgctgacccgcctcgtggccgacatgccggcccttcgcatcgtcttcgagcatatcacgaccgaggaggcggcccagttcgtggaaggcgcgggcgacagcatcgccgcgacgatcacgccgcagcatctccacatcaaccgcaacgccatgctcgtcggcggcatccgtccgcacgccttctgcctgccggtcgccaagcgcgagaagcaccggcttgccctgcgcaagcttgccacctcgggcttttcgcgggtgttcctgggaaccgataccgcgcctcatgccaagcacctgaaggaagcggcatgcggctgtgcggggatattcaacgcgcccttcgcgctcgaaagctatgtcacggtcttcgacgaggaaggcgcgctcgaccggttcgaggcctttgcctcgctcaacgggcccgcgttctaccggatgccggtgaacgaggaccgcatcgtgctggaaagggcgcccatcgaggtgcctgaggtgatcgactgcaacggcaccgcaatcgtgcccttccacgccggtgagacgctcggctggcgaatcgccgcggcctga

SEQ ID NO: 27757 - protein, 346 aa, Novosphingobium aromaticivorans DSM 12444
MTETLTIRRPDDWHVHLRDRDVLRGVVPYTARQFARAIVMPNLSPPMTDVAGVAAYRDRILAALPQGSAFTPLMTLYLTDSTDIEEVARGFAEGVFVAAKLYPAHATTGSAHGVTDIRNIYPVLEKMQEIGMPLLIHGEVTDSHVDIFDREAVFIERTLTRLVADMPALRIVFEHITTEEAAQFVEGAGDSIAATITPQHLHINRNAMLVGGIRPHAFCLPVAKREKHRLALRKLATSGFSRVFLGTDTAPHAKHLKEAACGCAGIFNAPFALESYVTVFDEEGALDRFEAFASLNGPAFYRMPVNEDRIVLERAPIEVPEVIDCNGTAIVPFHAGETLGWRIAAA

SEQ ID NO: 27758 - DNA, 1080 bp, Microbulbifer degradans 2-40
  CDS (1)..(1080)
atggccacaggcttgaatgccaataagcagcaagaactcatgtctgaaaaaattactcttaccgcccccgatgactggcacattcacctgcgcgacggcgatgccctcgcatacaccgtatccgatgccgcccgcaactttcgccgcgccattattatgcctaaccttgtgccccccgtactaaacgccaagcaggcactagattacaaagcacgcattcttgcccacgcaccggaagacgccgactttaccccgctaatggtgttataccttaccgaaaaaaccagccccgcagacatagcagaggcagcggccaaaggcatagtggcctgtaagctctaccccgccggcgccacaaccaattcagactcaggcgttaccgacataaaaaactgttacgacgcccttgctgccatgcaagagcacaatattaagcttttggtacacggcgaagttaccgatgcagatatcgatatttttgaccgcgaagcaacctttctaagccgcacaatggagcagcttgttaaggacttcccaacgctaaaaatcgttttagagcacattactaccgaagatgcggtcaagtttgtacttaaatcaggccccaacgtagcggcaaccattactgcgcaccaccttttgtacaaccgcaaccacatgctcgcaggcggtatacgcccacactattactgtttgcctattttaaagcgcagctcgcaccagcaagctctaattagtgctgcaatcagtggtaacccaaagttctttttaggcaccgactctgccccccacgcaaaaagtaaaaaagaagctgcttgtggctgtgcaggtagctacaccgcttttgccgcgctaccactttatgctgaggcattcgaagaagccggcgcactcgacaaactagaagattttgccagccattttggccccgacttttacggcctaccgcgcaacacaacaaaagtgaccctcaccaagcaagcatggacagtaccgtccaacctgcccttcggaagtgatacgctagtgccagttaaagctggcgaaacgttgaattggactctgacaccagcggaataa

SEQ ID NO: 27759 - protein, 359 aa, Microbulbifer degradans 2-40
MATGLNANKQQELMSEKITLTAPDDWHIHLRDGDALAYTVSDAARNFRRAIIMPNLVPPVLNAKQALDYKARILAHAPEDADFTPLMVLYLTEKTSPADIAEAAAKGIVACKLYPAGATTNSDSGVTDIKNCYDALAAMQEHNIKLLVHGEVTDADIDIFDREATFLSRTMEQLVKDFPTLKIVLEHITTEDAVKFVLKSGPNVAATITAHHLLYNRNHMLAGGIRPHYYCLPILKRSSHQQALISAAISGNPKFFLGTDSAPHAKSKKEAACGCAGSYTAFAALPLYAEAFEEAGALDKLEDFASHFGPDFYGLPRNTTKVTLTKQAWTVPSNLPFGSDTLVPVKAGETLNWTLTPAE

SEQ ID NO: 27760 - DNA, 1035 bp, Thiobacillus denitrificans ATCC 25259
  CDS (1)..(1035)
atgaccgacacgctcacgatcacccgccccgacgactggcacatccacttccgcgacggcgccgcgatgcagagcgtgatcggcgacaccgcacgcgtcttcggccgcgcgatcgcgatgccgaatctgaaaccgccggtcgtgacgctcgccgatgccctcgcctaccgcgagcgcctgctcgccgcgtcggcaggaaccggcttcgaaccgctgatggtgctctatctcaccgacaatacgcgggccgacgacatccgccgcgcgcaggcgagcggcctggttcacgccgtgaagtactacccggccggggcgacgacgaactcggactcgggcgtcaccgaactcaccaaggcctacggcgcgatcgcggcgatggaggaggtcggcctgccgctgcttttgcacggcgaagtcgtcgaccccgaggtcgacgtgttcgaccgcgaggccgtgttcatcgagcgacacctggtgaagttgctggaggattttccgcgtctgaagatcgtgctcgaacacgtcacgacgcggcaggcggtcgagttcgtcggcacggcgccgtccaacgtcgcggcgacgatcacggtccatcatctgctctacaaccgcaatgcgatgttccgcggcggcctgcgtccccatctctactgcctgccggtgctgaagcgcgagcggcaccgcgaggcgctcgtcgccgctgcggtctcgggcaatcccaaattctttctcggcagcgattccgcgccgcacccgatcggcgccaaggagagcgcttgcgggtgcgcgggcgtctattcggcgcatgcggcgatcgaactgtacgccgaggcgttcgaagatgccggtgccctcgacaggctcgaagccttcgcgagtttccacggcgccgatttctacgggctgccgcgcaacgccgcatcgatcaccttacggcgcgaatcctgggaggtgccggcccgcctcgcgctcggtgacgaagcgctggtgcctctgcgggcgggcgagaaggtgcgctggcgcgtggtcggctga

SEQ ID NO: 27761 - protein, 344 aa, Thiobacillus denitrificans ATCC 25259
MTDTLTITRPDDWHIHFRDGAAMQSVIGDTARVFGRAIAMPNLKPPVVTLADALAYRERLLAASAGTGFEPLMVLYLTDNTRADDIRRAQASGLVHAVKYYPAGATTNSDSGVTELTKAYGAIAAMEEVGLPLLLHGEVVDPEVDVFDREAVFIERHLVKLLEDFPRLKIVLEHVTTRQAVEFVGTAPSNVAATITVHHLLYNRNAMFRGGLRPHLYCLPVLKRERHREALVAAAVSGNPKFFLGSDSAPHPIGAKESACGCAGVYSAHAAIELYAEAFEDAGALDRLEAFASFHGADFYGLPRNAASITLRRESWEVPARLALGDEALVPLRAGEKVRWRVVG

SEQ ID NO: 27762 - DNA, 996 bp, Chloroflexus aurantiacus
  CDS (1)..(996)
atgacagttacattatttgccccacttgacatgcatctgcacctgcgcgaaggcgccatgttgcgcctcgtcgcgccattctctgctgcgcagttcgctggtgccgtgatcatgccgaatctcgtaccaccggtggataacgccgaccgccttgcccgctatcacgaggagattcgggctgcggttgacccgtacccgtttctcccgctgatgaccctgttttttcgcccctacgatgcccaaaccttgcaggcattgcgtgagcatatcttcgcgattaagctctacccggaaggcgtaacgaccaatagcgccggtggggtcagcgacctgacggcgattgagccaacgctggcaatgatggaagagttgggtattccgctcctggtacacggcgagagtcacgggtttgtgctggatcgtgaagccgagtttttgccggtgtatgagcgttgggcccgcacgttcccacgcctgcggattgtaatggagcatatcacaacggctgccgccctcgacctgctggatcgttatccgaatttgtttgccaccgtcaccctgcaccacctcttgatcactctcgacgatgtggccggtggtctgttgcagccgcatctcttctgtaagccgattgccaaacgtccgactgaccgtgatgcactgctggctgcggcattagccggccatcccaaactgatgtttggcagcgactcggcaccgcatccgatagatcgcaaagaagccgcgttctgcgctgccggtgtcttctcagcgccggtgttgctgccgatgctggtcgaattgttcgagcgtcacaacgccctcgaccgcctgcccgacttcgtgagtgggaatgcccggcggattcacggcctgaacccgccgccccgcaccgtgcgattggtcgaagacccctggcaggtaccgatgcgttatggcgatgtcgttccgttcgccgccggccagacgctacgctggcaggtggttgctgagtag

SEQ ID NO: 27763 - protein, 331 aa, Chloroflexus aurantiacus
MTVTLFAPLDMHLHLREGAMLRLVAPFSAAQFAGAVIMPNLVPPVDNADRLARYHEEIRAAVDPYPFLPLMTLFFRPYDAQTLQALREHIFAIKLYPEGVTTNSAGGVSDLTAIEPTLAMMEELGIPLLVHGESHGFVLDREAEFLPVYERWARTFPRLRIVMEHITTAAALDLLDRYPNLFATVTLHHLLITLDDVAGGLLQPHLFCKPIAKRPTDRDALLAAALAGHPKLMFGSDSAPHPIDRKEAAFCAAGVFSAPVLLPMLVELFERHNALDRLPDFVSGNARRIHGLNPPPRTVRLVEDPWQVPMRYGDVVPFAAGQTLRWQVVAE

SEQ ID NO: 27764 - DNA, 1005 bp, Campylobacter coli RM2228
  CDS (1)..(1005): transl_table=11
atgacacttaaaaacccactagatatgcatttgcatttaagagataaaaacatgctaagcttggttgcaccttttagtgctaaagattttcgtgcgggtgtgattatgccaaatttagttccaccgctttgtgatttagagagtttaaaatcttataaaacgcgtataataaatgcttgtgaaaatgagaatttcactcctttaatgactcttttttttaaaaattatgatgaaaaatttcttaaaagtgctaaggatgaaatttttggtatcaagctttatcctgcgggcatcaccacaaattcaaaaggtggggtttcaagttttgatatagagaatttaaaacccactttagaagcgatgagtgatttgcaaattccacttttggtacatggagaaaccaatgattttgtgatggatagggaaagcaattttgctaaaatctatgaaaatttagctaaaaattttccgcgtcttaagattgttatggagcatattacgactcaaaccttatgtgaacttttgaaagattatgaaaatttatatgcaaccattactttacatcatttaatcatcactttagatgatgttatcggtggaaaaatgcagccccatcttttttgcaagcctatagcaaagcattataaagataaagaagcgctttgtgagcttgcttttggtggatatgaaaaagtgatgtttggaagcgatagtgcaccacatcctaagcatgaaaaagaatgttgcggttgtgcagcgggtgtatttagtgcgagtgtagcactttgtgttttggctgatctttttagtaaaaattcaaatgaagttaatttgcaaaagtttatttcggataatgcttgtaaagtgcataatttaacctttgaaaaagaaaaaatcattgttttagaaaatcaagaatggcaagttccaaacgaatataaaaacgagaatgaaaaagtagttccttttatggcgggggaaagtttaaaatttagagtaaaataa

SEQ ID NO: 27765 - protein, 334 aa, Campylobacter coli RM2228
MTLKNPLDMHLHLRDKNMLSLVAPFSAKDFRAGVIMPNLVPPLCDLESLKSYKTRIINACENENFTPLMTLFFKNYDEKFLKSAKDEIFGIKLYPAGITTNSKGGVSSFDIENLKPTLEAMSDLQIPLLVHGETNDFVMDRESNFAKIYENLAKNFPRLKIVMEHITTQTLCELLKDYENLYATITLHHLIITLDDVIGGKMQPHLFCKPIAKHYKDKEALCELAFGGYEKVMFGSDSAPHPKHEKECCGCAAGVFSASVALCVLADLFSKNSNEVNLQKFISDNACKVHNLTFEKEKIIVLENQEWQVPNEYKNENEKVVPFMAGESLKFRVK

SEQ ID NO: 27766 - DNA, 993 bp, Campylobacter lari RM2100
  CDS (1)..(993): transl_table=11
atgacacttaaaaaccctttggacatgcatttacatttacgcgatgaaagtatgcttgaacttgtagccccatatagtgcaaaagactttaaagcgggggttatcatgccaaatttaatcaccccacttactgaaacaactgcacttaaagcttataaagaacgcattttaaaagcttgtaaaaatgaagattttacacctttaatgactttgttttttcaaaactatgatgagaaatttttagaacaagcaaaagatgaaatttttactataaagctttatccagctggaatcactacaaattcagataatggaatttcaagctttgatatagaaaaactaaaacctacactaaatgctatgagtgagcttaatttgcctttgcttgtgcatggagaaaccaatgattttgtcatggatagagaagcaaattttgctaaaatctatgaaaaattagctcaaaattttccaaaattaaaaattgtaatggagcatattaccactaaagttttatgtgatttattgaaaaattatgaaaatttatatgcaactataactttacatcatttaatgataacacttgatgatgtaataggtggcaagatggatcctcatttattttgcaagcctatagcaaaacgctatgaagacaaagatgctttatgtgagcttgcttttagcggttatgaaaaggctatgtttggaagcgatagcgcaccacatcctttacatactaaagaatgctgtggttgtgcagctggagtatttagtgctcctgttatactacctgttttggctgagctttttgaaaaaaattcaaatgaagaaaatttacaaaaattcataagtgacaatgcttgcaaaattcataatctcaaatttgaaaaagaaaaaatcatcaccttagaaaaaaacacatggcaagttccacaaaaatacggcgatgtagtgccttttatggccggaaaaactctaaatttcaaggttatttaa

SEQ ID NO: 27767 - protein, 330 aa, Campylobacter lari RM2100
MTLKNPLDMHLHLRDESMLELVAPYSAKDFKAGVIMPNLITPLTETTALKAYKERILKACKNEDFTPLMTLFFQNYDEKFLEQAKDEIFTIKLYPAGITTNSDNGISSFDIEKLKPTLNAMSELNLPLLVHGETNDFVMDREANFAKIYEKLAQNFPKLKIVMEHITTKVLCDLLKNYENLYATITLHHLMITLDDVIGGKMDPHLFCKPIAKRYEDKDALCELAFSGYEKAMFGSDSAPHPLHTKECCGCAAGVFSAPVILPVLAELFEKNSNEENLQKFISDNACKIHNLKFEKEKIITLEKNTWQVPQKYGDVVPFMAGKTLNFKVI

SEQ ID NO: 27768 - DNA, 1002 bp, Campylobacter upsaliensis RM3195
  CDS (1)..(1002): transl_table=11
atgaaacttatcaatcctcttgacatgcacctacacttaagagacacgcctatgctcgagtgcgttaccccctactcggcaaaggattttagagcagctgtaattatgccgaatttaatccctccactttgcgacttaaatgctttaaaagcctataaaagtcgcattataaaagcaagtgaaaatgagcttttcacgcctttaatgacccttttttttcagcattatgatgagaaatttttagaagaagcaaggagcgaaatttttggcattaagctttatcctgctgggattacgacaaattcaagtggaggtgtttcaagttttgacttagaagctttaaagcctacacttttggcaatgagtgctttagaaatccctcttttaattcacggcgaaacgaatgattttgtaatggatagagaggcgaattttgccaaaatttatgagaaacttgcccttaattttccaaaacttaaaatcgtaatggaacacatcaccacaaaaaccctttgcaaacttttaaaagactatgaaaatttatacgcgactataaccttacatcatcttattttaagccttgatgatgttatcggcggtaaaatgcaacctcatcttttttgcaaacccatagcaaaaacctacgaagatagagaagccttatgtgagctagcttttagtgggtatgaaaaagcgatgtttggaagcgattctgcccctcacccacaaagtgaaaaagagtgctgtggctgtgctgctggagtgttttcttctcctgtggctttaagcgttttagcggagctttttgaaaaaaattcaaatgaaagcaatttgcaaaaattcctttcaaataatgcttgtggaattcataagctaagctttgaaaaagacaaaatgattgagcttaaaaaagaaaaatggcaagtcaaagaaaattaccataaaatcgtgccttttatggctgaaaaatgcttggaatttaagccttttatcctagaataa

SEQ ID NO: 27769 - protein, 333 aa, Campylobacter upsaliensis RM3195
MKLINPLDMHLHLRDTPMLECVTPYSAKDFRAAVIMPNLIPPLCDLNALKAYKSRIIKASENELFTPLMTLFFQHYDEKFLEEARSEIFGIKLYPAGITTNSSGGVSSFDLEALKPTLLAMSALEIPLLIHGETNDFVMDREANFAKIYEKLALNFPKLKIVMEHITTKTLCKLLKDYENLYATITLHHLILSLDDVIGGKMQPHLFCKPIAKTYEDREALCELAFSGYEKAMFGSDSAPHPQSEKECCGCAAGVFSSPVALSVLAELFEKNSNESNLQKFLSNNACGIHKLSFEKDKMIELKKEKWQVKENYHKIVPFMAEKCLEFKPFILE

SEQ ID NO: 27770 - DNA, 1065 bp, Erythrobacter litoralis HTCC2594
  CDS (1)..(1065): transl_table=11
atgcggcgtgccgcactagagcagcgcgcgatgaccgagacgctgacgatccgccgccccgacgactggcacctccatttccgcgacggcgcgatgatgcgcggcgtcgtgccctataccgcgcgccagttcgcccgcgcgatcgtaatgcccaacctgacccctccggtaacgacgacagcgctgggggctgcctatcgcgagcggatcctcgctgccgtgccggagggcgttgattttaggccgctgatgaccgcctatctcaccgacgaaaccgacgccgacgatctcatcgacggttacacgcacggcgtgtttacggctgccaagctttaccccgccaatgccacgaccaattctgcgtcgggcgtgaccgatgtcgaagcgctctatccggtgttcgagcggatggcagcagctggcatggtcctgtgcattcacggcgaggttaccgacgccgacgtcgacgtgttcgaccgcgagaaagagttcatcgagcggaccatggcaccgcttcacgccgcgatcccggcgctcaagatcgcgttcgagcatatcacgaccagcgatgcggtcgatttcgtagtcggcgcaaacgacaatatcggcgcgaccatcacgccgcagcacctgcacatcaaccgtaatgccatgctggtcggcggcatccagccgcataattactgcctgccggtcgccaagcgcgagacgcatcggctggcgctacgccaggcggcgacctccggtccgcccaaattcttcctcggcaccgacagcgcgccgcatgaaaagcacaccaaggaaagcgcctgcggctgcgcgggcatcttcggcgcgccctatgcgctggagagctatctcgcggtgttcgaagaggaagatgcgcttgataagttcgaagccttcgcctcgctcaacggtcctgcgttttatggcctgccggtcaatgacgagacaatcacgctggagcgggtgccgcataatgtgcccgattctctggagacggaaggcggcaaggtcgtgccattccacgccgggcaggagcttaactggcggcttaaatga

SEQ ID NO: 27771 - protein, 354 aa, Erythrobacter litoralis HTCC2594
MRRAALEQRAMTETLTIRRPDDWHLHFRDGAMMRGVVPYTARQFARAIVMPNLTPPVTTTALGAAYRERILAAVPEGVDFRPLMTAYLTDETDADDLIDGYTHGVFTAAKLYPANATTNSASGVTDVEALYPVFERMAAAGMVLCIHGEVTDADVDVFDREKEFIERTMAPLHAAIPALKIAFEHITTSDAVDFVVGANDNIGATITPQHLHINRNAMLVGGIQPHNYCLPVAKRETHRLALRQAATSGPPKFFLGTDSAPHEKHTKESACGCAGIFGAPYALESYLAVFEEEDALDKFEAFASLNGPAFYGLPVNDETITLERVPHNVPDSLETEGGKVVPFHAGQELNWRLK

SEQ ID NO: 27772 - DNA, 1080 bp, Azotobacter vinelandii AvOP
  CDS (1)..(1080): transl_table=11
atgcacggcagcctcacttttctggaagtctcgatgcccgatagactgatactgctacgccctgatgactggcatattcatcttcgcgatggtgccgccctgagccgaacggtgacggatgcagcacgcacgttcggtcgcgccatcgtcatgcccaatctggttccacccgtacgcaacgcgtccgaggcgggcgcctatcggcaacgcatccaggccgcacgccctgcggacagtcgcttcgaacccctgatgaccctctacctcacggacaagacctccccagaggatatccgaaccgccaaggcccaaggctttgtgcatgcagcaaaattatatcctgcgggcgccacaaccaattcggatgccggggtcacacgcatcgacaacatctttccaatactggaagcgatggccgaggcaggcctgccacttctagtacacggagaggtgactcacagcgaagtcgatgtattcgatcgcgaaaagcgcttcatagatgaaaatctggtccgcataatcgagcacttccctacacttaaggtggtattcgaacacatcactacccgagatgccgttcaatttgtggaaaccagtagcagcaatgttggcgccaccattaccgcccatcaccttctgtacaaccgcaaccacatgctggtcggcggcatacgcccccacttctactgcttgccaatcctcaaacgcaggactcaccaggaggccttgctggatgcggccaccagcggtaacacaaaattctttcttggtaccgactcggcgccacacgcccgtcacgccaaggaagcggcttgcggctgcgccggctgctatacggcgtacgcagccatcgagttgtatgctgaagccttcgagcaacgcagcgccctggaccggctggaggcctttgccagccaccatggcgccgacttctacggcattccgcggaacaccgaccacataacgctaattcgcgaggagtggacagcaccagcctgcatgacatttggcgagcatagtctggttccattgcgcgcaggagaaaagctgcgctggcgtctgctggaggaaaaaatgtga

SEQ ID NO: 27773 - protein, 359 aa, Azotobacter vinelandii AvOP
MHGSLTFLEVSMPDRLILLRPDDWHIHLRDGAALSRTVTDAARTFGRAIVMPNLVPPVRNASEAGAYRQRIQAARPADSRFEPLMTLYLTDKTSPEDIRTAKAQGFVHAAKLYPAGATTNSDAGVTRIDNIFPILEAMAEAGLPLLVHGEVTHSEVDVFDREKRFIDENLVRIIEHFPTLKVVFEHITTRDAVQFVETSSSNVGATITAHHLLYNRNHMLVGGIRPHFYCLPILKRRTHQEALLDAATSGNTKFFLGTDSAPHARHAKEAACGCAGCYTAYAAIELYAEAFEQRSALDRLEAFASHHGADFYGIPRNTDHITLIREEWTAPACMTFGEHSLVPLRAGEKLRWRLLEEKM

SEQ ID NO: 27774 - DNA, 1095 bp, Burkholderia vietnamiensis G4
  CDS (1)..(1095): transl_table=11
atggccagcccgttcctcacgacgcctcctatgactgcctcgaacgcttcctccccggcgacgctcacgctcgcccgtcccgacgacctgcatctgcacctgcgcgacggcgacatgctggccgcggtgctgccgcacaccgcacgccagttcgcgcgcgcgatcgtgatgccgaacctgaagccgcccgtcacgacgaccgcgcacgcgcaggcctatcgcgaccggatcctggccgcgctgccggccggcagcgcgttcgagccgctgatgacgctgtacctgaccgacaacacggcgcccgacgaagttcgtcgcgcgcgcgacagcggcttcgtgcacggcgtgaagctgtatccggccggcgcgacgacgaactcggatcacggcgtgagcgacctcgcgaagtgcgcgaagacgctcgaggcgatgcaggaaaccggcatgccgctgctcgtgcacggcgaggtgacggacccgtcgatcgacatgttcgatcgcgagaaggtgttcatcgaccgcgtgatgacgccgctgcgccgcgatttccccgcgctgaaggtcgtgttcgagcacatcacgacgaaggatgcggccgactacgtgcgcgacgccgatgcggcgccgggcttgctcggcgcgacgatcacgccgcagcatctgctgtacagccgcaacgcgctgttcgtcggcggcattcgcccgcattactactgcctgccggtgctcaagcgcgagacgcaccgcgtcgcgctcgtcgaagcggcgacctccggcaacccgcgcttcttcctcggcaccgacagcgcgccgcatgcgcgcggcgcgaaggaaaccgcctgcggctgcgccggctgctacacggcgctgcacgcgctcgagctgtatgcggaagcgttcgaccaggccggcgcgctcgacaagctggagaatttcgcgagccgcttcggcgccgatttctacggcctggcgcacagcaccgacacggtcacactgcgccgcgagacctgggagctgccgaccgaggtgttcgcgggcgatacgccggtcgtgccgctgcgcgctggcgagacgatcggctggaagttcgcgtga

SEQ ID NO: 27775 - protein, 364 aa, Burkholderia vietnamiensis G4
MASPFLTTPPMTASNASSPATLTLARPDDLHLHLRDGDMLAAVLPHTARQFARAIVMPNLKPPVTTTAHAQAYRDRILAALPAGSAFEPLMTLYLTDNTAPDEVRRARDSGFVHGVKLYPAGATTNSDHGVSDLAKCAKTLEAMQETGMPLLVHGEVTDPSIDMFDREKVFIDRVMTPLRRDFPALKVVFEHITTKDAADYVRDADAAPGLLGATITPQHLLYSRNALFVGGIRPHYYCLPVLKRETHRVALVEAATSGNPRFFLGTDSAPHARGAKETACGCAGCYTALHALELYAEAFDQAGALDKLENFASRFGADFYGLAHSTDTVTLRRETWELPTEVFAGDTPVVPLRAGETIGWKFA

SEQ ID NO: 27776 - DNA, 1095 bp, Burkholderia cenocepacia AU 1054
  CDS (1)..(1095): transl_table=11
atggcaagcccgttcctcacgacgcctcctatgactgcctcgaacgcttcttccccggcgacgctttcgctcgcccgtcccgacgactggcacctgcacctgcgcgacggcgacatgctcgccgccgtgctgccgcacaccgcccgccagttcggccgcgccatcgtcatgccgaacctgaagccgccggtcacgaccaccgcgcaggcgcaggcctatcgcgagcgcatcctcgccgcgctgccggccgggatgacgttcgagccgctgatgacgctgtacctgaccgacaacacgccgcccgacgaaatccgccgcgcgcgcgaaagcggcttcgtgcacggcgtgaagctgtatccggcaggcgccacgacgaattccgaccatggcgtcaccgatctcgcgaaatgcgcgaagacgctcgaggcgatgcaggacaccggcatgccgctgctcgtgcacggcgaggtgaccgatgcgtcgatcgacctgttcgaccgcgagaaggtgttcatcgaccgcgtgatgacgccgctgcgccgcgatttcccgggcctgaaggtcgtgttcgagcacatcacgacgaaggacgcggccgactacgtgcgcgatgccgacgcggcgcccggcctgctcggcgcgacgatcaccgcgcatcacctgctgtacaaccgcaacgcgctgttcgtcggcgggattcgcccgcattactactgcctgccggtgctcaagcgcgagacgcatcgcgtggcgctggtcgaggccgcgacgtcgggcaacccgcgcttcttcctcggcaccgacagcgcgccgcatgcgcgcgacgcgaaggaaaccgcgtgcggctgcgcgggctgctacacggcgctgcacgcgctcgaactgtacgcggaagcgttcgacacggccggcgcgctcgacaagctggaagggttcgcgagcttcttcggcgccgatttctacgggctgccgcgcagcgccgagacggtcacgctgcgccgcgagccgtgggaactgccgcgcgagatcctcgcgggcgatacgccggtcgtgccgctgcgcggcggcgagacgatcggctggaagctggcgtga

SEQ ID NO: 27777 - protein, 364 aa, Burkholderia cenocepacia AU 1054
MASPFLTTPPMTASNASSPATLSLARPDDWHLHLRDGDMLAAVLPHTARQFGRAIVMPNLKPPVTTTAQAQAYRERILAALPAGMTFEPLMTLYLTDNTPPDEIRRARESGFVHGVKLYPAGATTNSDHGVTDLAKCAKTLEAMQDTGMPLLVHGEVTDASIDLFDREKVFIDRVMTPLRRDFPGLKVVFEHITTKDAADYVRDADAAPGLLGATITAHHLLYNRNALFVGGIRPHYYCLPVLKRETHRVALVEAATSGNPRFFLGTDSAPHARDAKETACGCAGCYTALHALELYAEAFDTAGALDKLEGFASFFGADFYGLPRSAETVTLRREPWELPREILAGDTPVVPLRGGETIGWKLA

SEQ ID NO: 27778 - DNA, 1056 bp, Chromohalobacter salexigens DSM 3043
  CDS (1)..(1056): transl_table=11
atgtccgagtcccctacccgcctgcgaatccgtcgccccgacgactggcaccttcacctgcgcgacggcgacgtgatgcgcctggtgctgccggcgaccagccgtgtcttcgcacgcgccatcgtgatgcccaacctgatgccgccggtcaccaccctggatgccgccgaggcgtatcgcgcgcggatcctcgaggcgttgccggcagggcatgacttcacgccgctgatgacctgctatctcaacgagagcgtcagcgccgagacgctggaggcggggcatgccagcggattgctgacggcggccaagctgtacccggccaatgccaccaccaactcgcaacatggcgtcaagcgtatccaggacatctacccgttgctcgaggtgatgcagcgcatcggcatgccgctgctggtgcatggcgaagtcacgcgtggcgagatcgacatcttcgatcgcgaaaaggccttcatcgacgaggtgatgacaccgctgtgcgagcatttcccggcgctcaaggtggtgttcgagcacatcaccacggcggaggcggcgcagtacgtcctggagggcaacgacaatctggccgcgacgctgacgccgcagcacctggcgcacaatcgcaacgacatgctggtcggcggcattcgcccgcacctttattgcctgccgatcctcaagcgcgccgagcaccagcgggcgctgcgcgcggcggtcgccagcggtcatccgcggttctttctgggcaccgactcggcaccgcacgtggtcgccgccaaggagaccagttgcggctgtgccggggtgttcaacgcccaggccgcgctctcggtctatgcggaggtattcgaggaagaaggcgcgctcgagcacttcgcggcgttctgctcggaaaacgggccgcgcttctatggcctgccgctcaacgaggatcacatcgagctcgtgcgccagccgacgaccatgcccgaacgcatcgaaggccatggcgaaacgttgaagcccttcaaggccggggaaaccctggcctggacggtcgccgccgggcgcgattga

SEQ ID NO: 27779 - protein, 351 aa, Chromohalobacter salexigens DSM 3043
MSESPTRLRIRRPDDWHLHLRDGDVMRLVLPATSRVFARAIVMPNLMPPVTTLDAAEAYRARILEALPAGHDFTPLMTCYLNESVSAETLEAGHASGLLTAAKLYPANATTNSQHGVKRIQDIYPLLEVMQRIGMPLLVHGEVTRGEIDIFDREKAFIDEVMTPLCEHFPALKVVFEHITTAEAAQYVLEGNDNLAATLTPQHLAHNRNDMLVGGIRPHLYCLPILKRAEHQRALRAAVASGHPRFFLGTDSAPHVVAAKETSCGCAGVFNAQAALSVYAEVFEEEGALEHFAAFCSENGPRFYGLPLNEDHIELVRQPTTMPERIEGHGETLKPFKAGETLAWTVAAGRD

SEQ ID NO: 27780 - DNA, 1059 bp, Burkholderia pseudomallei 668
  CDS (1)..(1059)
atgaatgcttccgttcccgcctcgctgaccctcgcccgccccgacgactggcacctgcacgtgcgcgacggcgcgatgctcgcggccgtcctgccgcacaccgcccgccagttcggccgcgcgatcatcatgccgaacctgaagccgcccgtcacgacgaccgcgcaggcgcaggcctaccgcgagcgcatcctggccgcggtgccggccggcatgacgttcgagccgttgatgacgctgtacctgaccgacaacacgcccgccgacgaaatccgccgcgcacgcgaaagcggctgcgtgcacggcgtgaagctctatccggcgggcgcgacgacgaactcggacgccggcgtgaccgacctgctcggcaagtgcgcgaagacgctcgaggcgatgcaggaagtcgggatgccgctgctcgtgcacggcgaggtgacggatccgtcgatcgacctgttcgaccgcgagaaggtgttcatcgatcgcgtgatggagccgctgcgccgcgcgctgccggggctcaaggtggtgttcgagcatattacgacgaaggatgcggccgactacgtgcgcgatgccgacgcggcgtcaggccggatcggcgcgacgatcaccgcgcaccatctgctgtacaaccgcaatgcgatgtttctcggcggcatccgtccacattactactgcctgccggtgctcaagcgcgagacgcatcggatcgcgctcgtcgaggcggcgacgtcgggcaatccgcgcttcttcctcggcaccgacagcgcgccgcacgcgaaaggcgcgaaggaagccgcgtgcggctgcgcgggctgctacaccgcgctgcacgcgctcgagctgtacgcggaggcattcgagcaggcgggcgcgctcgacaagctcgaaggcttcgcgagcttcttcggcgcggacttctacggtttgccgcgcagcgccgagacggtgacgctgcgccgcgagacgtgggagctgccgcgcgagatcgacgcgggcgccggcccggtcgtgccgctgcgcggcggcgaggcgatcggctggcggctcgtctga

SEQ ID NO: 27781 - protein, 352 aa, Burkholderia pseudomallei 668
MNASVPASLTLARPDDWHLHVRDGAMLAAVLPHTARQFGRAIIMPNLKPPVTTTAQAQAYRERILAAVPAGMTFEPLMTLYLTDNTPADEIRRARESGCVHGVKLYPAGATTNSDAGVTDLLGKCAKTLEAMQEVGMPLLVHGEVTDPSIDLFDREKVFIDRVMEPLRRALPGLKVVFEHITTKDAADYVRDADAASGRIGATITAHHLLYNRNAMFLGGIRPHYYCLPVLKRETHRIALVEAATSGNPRFFLGTDSAPHAKGAKEAACGCAGCYTALHALELYAEAFEQAGALDKLEGFASFFGADFYGLPRSAETVTLRRETWELPREIDAGAGPVVPLRGGEAIGWRLV

SEQ ID NO: 27782 - DNA, 1068 bp, Polaromonas sp. JS666
  CDS (1)..(1068): transl_table=11
atgacttcagccatcagcaccccggtttccaccctgaccatcacccgccccgacgactggcacctgcatgtgcgggacggcgacgcattgagcacggtggtgccgcataccgccgcccagtttggccgggccatcatcatgcccaacctgcgcccgccggtgaccaccgcggcccaggctgttgcctaccgcgagcgcatccaggccgccgtgcccgcgggcgtggctttcgagccgctgatgacgctgtatttgaccgacaacctgccgcccgacgagatcaagcgggccaaagaggccggcgtggtcgccaccaagctctacccggccggcgccaccaccaacagcgatgcgggcgtgaccgacctgcgcaagacctacaagacactcgaagcgatgcagcgcgaaggcctgctgctgctggtgcatggcgaggtgacctcgcccgacattgacctgtttgaccgcgaggcggtgttcatcgacacgcagctgattccactgcgccgcgatttccctgagctgaagatcgtgtttgagcacatcaccacgaaagaagccgcgcagtatgtgcatgacgccgaccgcttcacgggcgccaccatcaccgcgcaccatctgctgtacaaccgcaacgcgattttcaccggcggcatccggccgcactactactgcctgcccgtgctcaagcgcgaaacgcatcgcgtcgcgctggtcgaggcggccaccagtggcaaccaccggtttttcctcggcacggacagcgcaccgcacccggcccacctcaaggagcatgccaccggctgcgccggctgctacaccgcccatgcggcgatggagctgtatgccgaagcctttgatgcggcgggcgcactcgacaagctcgaggcctttgccagtttcaacggcgcggacttctatggcttgccgcgcaaccagggcaccatcaccctgaaaaaggaaagctggcggccccccgagagttatgcgtttggcgaggctgaactcaagccgctgcgctcgggtgaaagcctgccatggaagctttactccacccggagcgaatga

SEQ ID NO: 27783 - protein, 355 aa, Polaromonas sp. JS666
MTSAISTPVSTLTITRPDDWHLHVRDGDALSTVVPHTAAQFGRAIIMPNLRPPVTTAAQAVAYRERIQAAVPAGVAFEPLMTLYLTDNLPPDEIKRAKEAGVVATKLYPAGATTNSDAGVTDLRKTYKTLEAMQREGLLLLVHGEVTSPDIDLFDREAVFIDTQLIPLRRDFPELKIVFEHITTKEAAQYVHDADRFTGATITAHHLLYNRNAIFTGGIRPHYYCLPVLKRETHRVALVEAATSGNHRFFLGTDSAPHPAHLKEHATGCAGCYTAHAAMELYAEAFDAAGALDKLEAFASFNGADFYGLPRNQGTITLKKESWRPPESYAFGEAELKPLRSGESLPWKLYSTRSE

SEQ ID NO: 27784 - DNA, 1341 bp, Jannaschia sp. CCS1
  CDS (1)..(1341): transl_table=11
ttgcccgccatccagcagcgacacgcgccattcatagagcatcatgggccgtctcctcgtcctcgcctgcgtaaggaacgtggcgcgcgggcatcatcgcgacaagtaagacaatccgccggtcaggaccgcgcgaatgcaggcaacgccttgcggatctcctacggctccagcaccagccccccggacgaatcacggatcagcgcagggccgacgcggatcacctttgcccgtgatcccgcctcaaatcgcgcgcccctctttccgcacgtcgcgacctgctataacacacggcccatgacccaatccctcacgatccgccgccccgacgactggcacctgcacctgcgcgacggcgcgatgatgcgggccgttctgcctgaaaccgcccgtcattttgcccgcgcgatcatcatgcccaacctcgtgccgcccgtggtcacagcccaggatgcgctggcctaccgcgaccggattgaggcggcgctgccggacggcgcggatttcacgccactgatgacgctttatctaaccgaacagacggacccggacgacgtggaggcggcgtttgccgatgggctgatccatgcggtcaaactctatccggcgggggccacgacaaattcccaatccggcgttgcgacgctgaaaaacgtctatccggtgctggagcgtatggcccagatcggcctgccgctgtgtatccatggcgaggtcaccgatccgcaggtcgacatcttcgaccgggaacaggccttcatcgataccgtcctgatcccgctgcgcgccgacctgccggacctgaaggtcacgctggagcatatcaccacctcccacggcatcgattatgtggtgggcgcggacggggacattgccggcacgatcacaacgcatcacctgatgatcaaccgcaaccatatgctcgtgggcggcatccgaccgcactattattgcctgcccatcgtcaaacgcgcctcccaccaacacgccctgcgccgggccgcgacatcgggccacccgcgcttctttctgggcaccgactcggccccccacctggacggcgcgaaggaaaccgcctgcgggtgcgcgggcgtcttctcagccaccaacacgatgtcctgcctcgcccatgtgttcgacgaagacggcgcgctggtgaaccttgaggccttcacctccctcaacggccccgcccgctatggcctggcgccgaacgcggccacgatgacgctggaaaagcgcgaccatcccaccaattaccctgccaaatttgacacagatgacggccccctgaccctcttcgatccctccacgccgctctattggcatgtgaaggactga

SEQ ID NO: 27785 - protein, 446 aa, Jannaschia sp. CCS1
MPAIQQRHAPFIEHHGPSPRPRLRKERGARASSRQVRQSAGQDRANAGNALRISYGSSTSPPDESRISAGPTRITFARDPASNRAPLFPHVATCYNTRPMTQSLTIRRPDDWHLHLRDGAMMRAVLPETARHFARAIIMPNLVPPVVTAQDALAYRDRIEAALPDGADFTPLMTLYLTEQTDPDDVEAAFADGLIHAVKLYPAGATTNSQSGVATLKNVYPVLERMAQIGLPLCIHGEVTDPQVDIFDREQAFIDTVLIPLRADLPDLKVTLEHITTSHGIDYVVGADGDIAGTITTHHLMINRNHMLVGGIRPHYYCLPIVKRASHQHALRRAATSGHPRFFLGTDSAPHLDGAKETACGCAGVFSATNTMSCLAHVFDEDGALVNLEAFTSLNGPARYGLAPNAATMTLEKRDHPTNYPAKFDTDDGPLTLFDPSTPLYWHVKD

SEQ ID NO: 27786 - DNA, 1038 bp, Methylobacillus flagellatus KT
  CDS (1)..(1038): transl_table=11
atgacgactaccattactatcacgcgccccgatgattggcaccttcatttgcgcgatggcgcagccttgtctgcagtgctgccagattcggcaaggcgctttgggcgggcgattgtcatgcccaacctgcgtccgccggtgacgaccacggcattggcgtatgcatatcgtgagcgcattatgcaggcaatgcctgctgggtcaggatttgagccattgatgaccttgtacctcactgacaataccagtgcagaagagattgaccgcgccaaggctagcggtattgtgcatggcgtgaagctttatcctgccggggcgaccaccaattccgactcgggggtgactaacatcgggcattgcgtcaaggcgctcgaggcgatggaaaagcacgggattcccctgctggtgcatgcggaagtgactgatgtcgatgtggatgtgtttgaccgcgagcgggtgttcatcgagcgcaatatggtcccgctgctggaacgattccaggggttgcgggtggtgtttgagcacattaccaccaaggatgcggccaacttcgtcgctggggcaccggagaacgtcgctgccaccatcacggcgcaccacctgctcatgaaccgcaatgccatgttcaacgggggtatccgaccgcatcattattgcctgcccgtgctcaagcgtgaggagcatcgacttgccttggtcgcggcggcgacctccggcaatccaaagttctttctgggcaccgatagcgcgccgcatgcgaagtccgccaaagaggcggcttgtggctgtgccggcatgtataccgcacatgccggaattgaactgtataccgaggtgtttgatgcagctggctcgcttgacaggctggaggcatttgcaagcttccatgggccggatttttaccgtctgccgcgcaatacggacaagatcactcttgaaaaaactgcgtgggaagtgcctgcaagcttgccgtttgccggggatgagctggttccgctgagagctggcagccatatttcctggagattaaaagactaa

SEQ ID NO: 27787 - protein, 345 aa, Methylobacillus flagellatus KT
MTTTITITRPDDWHLHLRDGAALSAVLPDSARRFGRAIVMPNLRPPVTTTALAYAYRERIMQAMPAGSGFEPLMTLYLTDNTSAEEIDRAKASGIVHGVKLYPAGATTNSDSGVTNIGHCVKALEAMEKHGIPLLVHAEVTDVDVDVFDRERVFIERNMVPLLERFQGLRVVFEHITTKDAANFVAGAPENVAATITAHHLLMNRNAMFNGGIRPHHYCLPVLKREEHRLALVAAATSGNPKFFLGTDSAPHAKSAKEAACGCAGMYTAHAGIELYTEVFDAAGSLDRLEAFASFHGPDFYRLPRNTDKITLEKTAWEVPASLPFAGDELVPLRAGSHISWRLKD

SEQ ID NO: 27788 - DNA, 1023 bp, Sphingopyxis alaskensis RB2256
  CDS (1)..(1023): transl_table=11
atgaccgaccgcctgacgatccgccgccccgacgactggcacgtccatctgcgcgacggcgcgatgcttgcccatgtcgcgccctataccgcgcgccagtttgcgcgcgcgatcgtcatgcccaatctgtcgccgccggtgacgaccgccgaagaaggccgcgcctatcgcgaccgcatcaccgccgcggtgcccgcggacctcgacttcaccccgctgatcgtcgcctatctgaccgacgccaccgacgcggacgagatcgcgcgcggccatgccgagggcgtgttcaccgccgccaagctctatcccgcgcacgccaccaccggcagcgcgcacggcgtcaccgacgtcgcgaacatcatgggtgtgctcgagcggatgcaggacatcggcatgccgctgctcatccacggcgaagtcaccgaccatgacgtcgacattttcgaccgcgaggcggtgttcatcgagcgcacgcttgaaccgctggtgcgcgcgctgcccggcctcaagatcgttttcgagcatatcacgacggcggaggccgcgcagtttgtcgccgacgcgcccgccaatgtcgccgcgacgatcacgccgcagcatctccacatcaaccgcaacgcgatgcttgtcggcggcatccgcccgcacgcctattgcctgcccgtcgcgaagcgcgagcatcaccggctcgcggtgcgcgccgccgcgacatcgggctcgcccaaattcttcctcggcaccgacagcgcgccgcacgcggtgcatatgaaggaagcgtcgtgcggctgcgcaggcattttcaacgcgccctttgcgctcgaaagctatgcgatggcgttcgatcaggatggcgcgctggccaatttcgagggtttcgccagcgagcatggtccgcgcttctatggcctgccgctcaacgagggcacggtgacgttggaacgcgccgaaatcaccgtccccgaccggatcggcgacgtcgtgcccttccacgcgggcgaaaccatcggctggcggctggtctga

SEQ ID NO: 27789 - protein, 340 aa, Sphingopyxis alaskensis RB2256
MTDRLTIRRPDDWHVHLRDGAMLAHVAPYTARQFARAIVMPNLSPPVTTAEEGRAYRDRITAAVPADLDFTPLIVAYLTDATDADEIARGHAEGVFTAAKLYPAHATTGSAHGVTDVANIMGVLERMQDIGMPLLIHGEVTDHDVDIFDREAVFIERTLEPLVRALPGLKIVFEHITTAEAAQFVADAPANVAATITPQHLHINRNAMLVGGIRPHAYCLPVAKREHHRLAVRAAATSGSPKFFLGTDSAPHAVHMKEASCGCAGIFNAPFALESYAMAFDQDGALANFEGFASEHGPRFYGLPLNEGTVTLERAEITVPDRIGDVVPFHAGETIGWRLV

SEQ ID NO: 27790 - DNA, 1032 bp, Shewanella baltica OS155
  CDS (1)..(1032): transl_table=11
atgaccacaataacaatcactcgcccagacgactggcatattcatttaagagacggcgcccagcttaaagataccgtgcgcgacatcagccgctatatgggccgcgccatcgtgatgccaaacttagtgccccccgctatcgataccgaaaccgcactgacttattacgaccgcattaaagcgcaggtgccagcgggctcacagttcgaacctttgatggtgctgtatttaaccgacaaaaccagcccagatgaaatccgcaaagccaaagcttcgggtaaaattgtcgccgcgaaactctaccctgcgggcgcgacgaccaactcggattcaggcgtaaccgaattgaagaacatctacccagccctcgaagccatgcaagaagtcggtatgttgtttttagtgcacggtgaagtcacggattcatcgattgatattttcgaccgcgagcgcgtctttatcgaaaatatcctcagcaaaatcgttgccgatttcccagaacttaaaatcgtgcttgaacatatcaccactaaagatgcggtcgattttgtcacccaagcctctgataatgtggccgcgactattacagcccaccatttgctgtataaccgcaaccacatgctggctggcggtattcgcccacatttttactgcctaccgattttaaaacgcaatacccaccagcaggcgttattggccgctgcagcaagcggtagcaagaagttcttcttaggcacagattcggcgccccacgctaaagataagaaagaagccgcctgtggctgcgcgggttcgtacacggcccatgccgcaattgagctgtatgccgaagccttcgaatcggtgaatgcgctagataaactcgaagcatttgcaagcttcaatggcccagatttttacaatctgccacgtaacgccgacacgatcacgctagtgaaaaaaccatggaatgtccctgcaacttacccgctgggcgacactaacgtagtgccgattcgtgcaggcgaagccattgattggcaagttgagtaa

SEQ ID NO: 27791 - protein, 343 aa, Shewanella baltica OS155
MTTITITRPDDWHIHLRDGAQLKDTVRDISRYMGRAIVMPNLVPPAIDTETALTYYDRIKAQVPAGSQFEPLMVLYLTDKTSPDEIRKAKASGKIVAAKLYPAGATTNSDSGVTELKNIYPALEAMQEVGMLFLVHGEVTDSSIDIFDRERVFIENILSKIVADFPELKIVLEHITTKDAVDFVTQASDNVAATITAHHLLYNRNHMLAGGIRPHFYCLPILKRNTHQQALLAAAASGSKKFFLGTDSAPHAKDKKEAACGCAGSYTAHAAIELYAEAFESVNALDKLEAFASFNGPDFYNLPRNADTITLVKKPWNVPATYPLGDTNVVPIRAGEAIDWQVE

SEQ ID NO: 27792 - DNA, 1029 bp, Shewanella amazonensis SB2B
  CDS (1)..(1029): transl_table=11
atgactcatttgaccctcacccgtcccgatgactggcatatccacctgcgcgacggcgactcccttgccgacactgtgcgcgacgccggtcgttacatgggccgtgccatagtaatgcccaatctggtgccgccggtgaccactacagaagccgcgattgcctactacgagcgcatcaaggcccacagcagcactgccttcgagcccttaatggtgctgtatctcaccgacaagaccagcccggatgaaatccgcgccgccaaggcctccggcaaggtggttgccgccaagctttatcctgccggtgccaccaccaactctgattcgggcgtgaccgacgtcaacaacatctatggcgtgctcaaggccatggaagaagaaggtttactgctgctggtacacggtgaggtcactgattctgctatcgatattttcgacagggagcgcatctttatcgaaaacatcctctccaaagtggtcgccgactttcccggcctcaagatagtgctcgagcacatcactaccaaggatgcggtggatttcgtgatgtctgccggtgacaatgtcgccgccaccatcacagcccatcacctgctgtataaccgcaaccatatgctggccggcggtattcgcccgcacttctactgcctgcccatccttaagcgcaatacccaccagcaggcgctgttggcagcggccaccagcggcagcaagaagtttttccttggcaccgactcggctccccacgccaaagacaaaaaagaagccgcctgtggctgcgccggttcttacacagcccacgcggcactggaactgtacgctgaagcctttgaggcggaaggtgccctggacaagctggaagcctttgccagctttaatggcccggacttctacggcctgccccgcaatgccgataccgttgctctggtgaaaagtccctggcaggtgcccgagtcttatcccctgggcagcaccactgtggtgcctatccgtgcaggtgaaatcattggctggaaagtcgaagactga

SEQ ID NO: 27793 - protein, 342 aa, Shewanella amazonensis SB2B
MTHLTLTRPDDWHIHLRDGDSLADTVRDAGRYMGRAIVMPNLVPPVTTTEAAIAYYERIKAHSSTAFEPLMVLYLTDKTSPDEIRAAKASGKVVAAKLYPAGATTNSDSGVTDVNNIYGVLKAMEEEGLLLLVHGEVTDSAIDIFDRERIFIENILSKVVADFPGLKIVLEHITTKDAVDFVMSAGDNVAATITAHHLLYNRNHMLAGGIRPHFYCLPILKRNTHQQALLAAATSGSKKFFLGTDSAPHAKDKKEAACGCAGSYTAHAALELYAEAFEAEGALDKLEAFASFNGPDFYGLPRNADTVALVKSPWQVPESYPLGSTTVVPIRAGEIIGWKVED

SEQ ID NO: 27794 - DNA, 1035 bp, Ralstonia metallidurans CH34
  CDS (1)..(1035): transl_table=11
atgacccagaaactcaccatcacccgcccggacgactggcacctgcacctgcgcgatggcgcggcgctggcggccgtactgcccgacacggcacgccagttcgcacgtgccatcatcatgccgaacctgaagccgcccgtgaccacggtggatcaggccagtgcctaccgcgcgcgcattctggccgcgctgccggccggcatggcgttcgagccgctgatgacgctgtacctgaccgacaacacgccgccggaggaaatcgtcgcggcccgtgccagcggtttcgtccacggcgtcaagctgtatccggccggcgccaccaccaacagcgatgccggcgtgaccgatatccgccgctgcgccgccacgcttgaggcgatgcagcgtgaaggtgtgccgctgctggtccacggcgaggtcactgatggcgacatcgacatcttcgatcgcgaggccgtgttcatcgaccgcgtgatgaagccgctgcgccgcgacttcccggagctcaaggtggtgttcgaacacatcaccacccgcgatgcggcccagtacgtggccgaggccgaaggcccggtcggcgcgacgattaccgcgcaccacctgctgtacaaccgtaatgcgatcttcacgggcgggattcgtccgcactactactgcctgccggtgctcaagcgcgagatccaccgcgaggcgctggtcaaggccgcgacgtcgggcagcccgcgtttcttccttggcactgacagcgcaccccacgcacgcggcctcaaggagcacgcatgcggctgcgccggctgctacacggcgctccatgcgatggagctctatgccgaagcgttcgacgctgccggcgcgctggacaagctcgaggcattctccagcttcaacggcccggccttctacggcctgccgcgcaatagcggcacgctgacgctgacgcgcgaagactgggaactgccggccgagctgccgtacggtgataccacgctggtgccgctgcgcgccggcgaaacgctgcgctggaaggcgagctga

SEQ ID NO: 27795 - protein, 344 aa, Ralstonia metallidurans CH34
MTQKLTITRPDDWHLHLRDGAALAAVLPDTARQFARAIIMPNLKPPVTTVDQASAYRARILAALPAGMAFEPLMTLYLTDNTPPEEIVAARASGFVHGVKLYPAGATTNSDAGVTDIRRCAATLEAMQREGVPLLVHGEVTDGDIDIFDREAVFIDRVMKPLRRDFPELKVVFEHITTRDAAQYVAEAEGPVGATITAHHLLYNRNAIFTGGIRPHYYCLPVLKREIHREALVKAATSGSPRFFLGTDSAPHARGLKEHACGCAGCYTALHAMELYAEAFDAAGALDKLEAFSSFNGPAFYGLPRNSGTLTLTREDWELPAELPYGDTTLVPLRAGETLRWKAS

SEQ ID NO: 27796 - DNA, 1041 bp, Mesorhizobium sp. BNC1
  CDS (1)..(1041): transl_table=11
atgaaaacacttaccatcagacagccggacgactggcacctacacctgcgcgatggctccgtgcttcaggcggtggcggagcactcggcggctcactttgcccgcgccatcatcatgccgaatctggtgccgcccgtcgtgaccacaagggatgcggcggcctatcgcgagcgcatcctggcggcgctgtctgaaggcagcgcctttacgcctctgatgacgctctatctcacggaatcgagctgcgctgacgatatcgaggcagggttccgcagcggcctgatcaaggcggtcaagctctatccggcgggagccaccaccaactcccaaagcggcgtgcgcaacatcgaggccgtctacccggtgctggagcgcatggcgaaaatcggcctgccgctctgcgtgcatggcgaagtcaccgatcccgcggtcgatatcttcgaccgagaggcggtgttcatcgagcgggtgctgcagcccttgcgccgccgcctgccggaactgcgcatcgtcatggagcatgtgacgacgaaggacggcgtcgattttgcgctgtcgcaggatgagaatgtcggcgcgacgatcacgacgcatcacctgatcatcaaccgcaatgcaatcctcgccggcggcattcgcccgcattattactgcctgcccgtcgccaagcgggagtcccatcgcctcgcgctgcgcgcggccgccatctccggcgaaggccgcttcttcctcggcacggattctgcgccgcatctggatccgctcaaggaatgcgcctgcgggtgcgcaggcgtcttcaatgcaccgaacaccatggcctgtctggcgcatgtgttcgaggaggagggcgcgctcgaccggctggaggctttcacctccttaaacggtcccgccttctaccgcctgccgccgaacgagaagcgcatcacgctcaggcgttacgacgagccgctggaaatggaacggaaagtcagcgtgggggacgaggctatcaccgtcttcgacccgatgttcccgatccactggaaagttgaggattag

SEQ ID NO: 27797 - protein, 346 aa, Mesorhizobium sp. BNC1
MKTLTIRQPDDWHLHLRDGSVLQAVAEHSAAHFARAIIMPNLVPPVVTTRDAAAYRERILAALSEGSAFTPLMTLYLTESSCADDIEAGFRSGLIKAVKLYPAGATTNSQSGVRNIEAVYPVLERMAKIGLPLCVHGEVTDPAVDIFDREAVFIERVLQPLRRRLPELRIVMEHVTTKDGVDFALSQDENVGATITTHHLIINRNAILAGGIRPHYYCLPVAKRESHRLALRAAAISGEGRFFLGTDSAPHLDPLKECACGCAGVFNAPNTMACLAHVFEEEGALDRLEAFTSLNGPAFYRLPPNEKRITLRRYDEPLEMERKVSVGDEAITVFDPMFPIHWKVED

SEQ ID NO: 27798 - DNA, 1041 bp, Silicibacter sp. TM1040
  CDS (1)..(1041): transl_table=11
atgacccagagcctgacgatcacccgccccgacgactggcatctgcatctgcgcgacggcgacatgctgcgcgcggtgctgccggaaacagcccgccattttggccgcgccatcatcatgcccaatctcgtgcccccggttgtcaccggcgccgaggccagcgcctatcgcgaccgcattcttgccgcactccctgagggcatgacgttcgagcccctgatgacgctctatctcaccgaggacacggaccctgcagatgtcgcagccgcccatgcctcgggtctggtcaaagccgtcaagctctaccccgctggcgccaccaccaactcctcgtccggtgtgcgcgatttcgacaaggtccgccccgtgcttgagaaaatggccgaaatcggcctgccgctctgcacccatggcgaggtcaccgaccacgacatcgacatctttgaccgcgaggccgtctttatcgatcgcgtgctggacccgatccgccaatccacaccgggcctgcgtgtggtgatggagcatatcaccaccaaggacgcggcggattatgtgcgatcgcaggacaaggatcttggcgcgacaatcaccacgcaccacctgatcatcaatcgcaaccacatcctcgtgggcgggatcaagccacactattactgcctgcctgtcgccaagcgcgaagagcaccgcctcgccctgcgccaagctgcgacctccggtgatgcgcggttcttccttggtaccgactcagcgccccacaccgatgccaacaagctccagacctgtggctgcgcgggttgtttcacggcgaccaacaccatggctctgctggcccatgtatttgaggaagaaggcgcgctcgacaagctcgaagggtttgcctccaagaacggccccgccttttatcgcttacccgaaaacgatggtcagatcacactggtgaaacaggacgcgcccgtcgctttcccggaacagatcgacacgccggacggccccgtgaccgtctttgatccaagctttgcggtgcattggaccgtcacctga

SEQ ID NO: 27799 - protein, 346 aa, Silicibacter sp. TM1040
MTQSLTITRPDDWHLHLRDGDMLRAVLPETARHFGRAIIMPNLVPPVVTGAEASAYRDRILAALPEGMTFEPLMTLYLTEDTDPADVAAAHASGLVKAVKLYPAGATTNSSSGVRDFDKVRPVLEKMAEIGLPLCTHGEVTDHDIDIFDREAVFIDRVLDPIRQSTPGLRVVMEHITTKDAADYVRSQDKDLGATITTHHLIINRNHILVGGIKPHYYCLPVAKREEHRLALRQAATSGDARFFLGTDSAPHTDANKLQTCGCAGCFTATNTMALLAHVFEEEGALDKLEGFASKNGPAFYRLPENDGQITLVKQDAPVAFPEQIDTPDGPVTVFDPSFAVHWTVT

SEQ ID NO: 27800 - DNA, 1044 bp, Paracoccus denitrificans PD1222
  CDS (1)..(1044): transl_table=11
atgaccaaatccgtgacgctccgacgccccgacgactggcacctgcacctgcgcgatggcgccatgctgcaggcagtggcttcattttccggccattttggccgggcgatcatcatgccgaacctggtgccgcccgtggtgacgggggcgcaggcggccgcctatcgcgaccggatccgggccgcgctgggtccgaaagtgacgttgcgtccattgatgacgctctacctgaccgaaaccaccgatccggccgatgtggtggccgcccatgccgggggaatcatctcggccgtcaagctttatccggccggggcgaccaccaattcggcctcgggcgtgcgcgacttcgacaaggtgcgaggcgtgctggaagccatggccgaagccggcatcccgctgctcttccatggcgaggtcaccgatccggcggtggacatcttcgaccgcgaggcggcgttcatcgaccgcgtgctggacccgatccgccgcgccacgcccggcctgcgcgtggtgatggaacatatcaccacgtcggacggcgtggattatgtcgccgccaacgacgatatcggcgcgaccatcaccacccaccacctggtcatcaaccgcaaccacatcctggcgggcggcatccggccgcattactactgcctgccggtcgccaagcgcgaaacccaccggctggcgctgcgcaaagcggcggtctcgggcgatgggcgcttcttcctcggcaccgactcggcgccgcatcccgaccgcgccaaggaagcggcctgcggctgcgccggctgcttcaccgcgccgaacaccatgtccatcctggcgcaggtcttcgaggaggaaggcgcgctcgaccggctcgaaggcttcgcctcgctcaacggcgccgccttctacggcatggagccgaaccaggaccgcatccggctggtccggcgcgacacgcccgccgaatatccgacccatatcgccgccggcgacgaaaccgtcaccgtcttcgaccccggcttcccgctctactggcacgttgaggaccccgcatga

SEQ ID NO: 27801 - protein, 347 aa, Paracoccus denitrificans PD1222
MTKSVTLRRPDDWHLHLRDGAMLQAVASFSGHFGRAIIMPNLVPPVVTGAQAAAYRDRIRAALGPKVTLRPLMTLYLTETTDPADVVAAHAGGIISAVKLYPAGATTNSASGVRDFDKVRGVLEAMAEAGIPLLFHGEVTDPAVDIFDREAAFIDRVLDPIRRATPGLRVVMEHITTSDGVDYVAANDDIGATITTHHLVINRNHILAGGIRPHYYCLPVAKRETHRLALRKAAVSGDGRFFLGTDSAPHPDRAKEAACGCAGCFTAPNTMSILAQVFEEEGALDRLEGFASLNGAAFYGMEPNQDRIRLVRRDTPAEYPTHIAAGDETVTVFDPGFPLYWHVEDPA

SEQ ID NO: 27802 - DNA, 1035 bp, Shewanella denitrificans OS-217
  CDS (1)..(1035): transl_table=11
atgatgagtttaaccataactaggccagatgattggcatgtccacctcagggatggcattcagcttaacgatacggtgcgagacattagccgttatatgggccgcgctatcattatgcctaaccttatgccccccgcgacgtgtaccgataccgcgctggcttatcgcgagcgtattgttgccgctaaaacgccggataatcagtttgaacctttaatggtgctttatttaacggataacactagcccagatgaaattcgtaaagctaaggctactgggcttattcatgcggctaagttgtatcctgcgggggcgaccaccaattcagattctggggtgaccagcatcagcaacttatacccagtgcttgaagccatggctgaagtgggtatgttgttgctagttcatggcgaagtaacggattcaagtatcgatattttcgatcgtgagaaagtgtttttagagaccattctggcccaagtggtgacagatttccctaagcttaaaatagtgcttgagcacattactacctcagatgctgtggagttcgtcaataaagcaccggacaatgtggcagcgaccatcaccgctcatcatttactctataaccgtaaccatatgctagcgggtggtattaggcctcatttctattgtttgcccattcttaagcgcaatacccatcagcaggcgttaattgccgcagccaccagtggcagcaaaaaattcttccttggcacggattctgctccccaccttaaagacaaaaaagaagcctcctgtggttgtgcaggctcttacacggcccacgcagccattgagctatatgccgaagcgtttgaagccgcgggcgccttagataaactcgaagcctttgccagtttttatggtgccgatttttatggtttaccccgtaatacagacaccattaccctagaaaaaaccccatggcaagtgccagactcttaccccttagccaacgacagggtggtgcctattcgcgccggtgaaatgctggattggcaagtcataagctga

SEQ ID NO: 27803 - protein, 344 aa, Shewanella denitrificans OS-217
MMSLTITRPDDWHVHLRDGIQLNDTVRDISRYMGRAIIMPNLMPPATCTDTALAYRERIVAAKTPDNQFEPLMVLYLTDNTSPDEIRKAKATGLIHAAKLYPAGATTNSDSGVTSISNLYPVLEAMAEVGMLLLVHGEVTDSSIDIFDREKVFLETILAQVVTDFPKLKIVLEHITTSDAVEFVNKAPDNVAATITAHHLLYNRNHMLAGGIRPHFYCLPILKRNTHQQALIAAATSGSKKFFLGTDSAPHLKDKKEASCGCAGSYTAHAAIELYAEAFEAAGALDKLEAFASFYGADFYGLPRNTDTITLEKTPWQVPDSYPLANDRVVPIRAGEMLDWQVIS

SEQ ID NO: 27804 - DNA, 1038 bp, Shewanella frigidimarina NCIMB 400
  CDS (1)..(1038): transl_table=11
atgacgcaaattaccttaaccactcccgatgattggcatcttcattttcgagatggggatatgctaggtgaaacggttcctgcaacggctcgattgtttcaacgcgcgattgtcatgcctaatttagttccaccagtaacgacagcggcaatggctttagcttatcgagatcgtattttggctgctcgcccacaaggtagcaattttgaaccattaatgaccttgtttttaacaaacaacaccagcgcccaagatattatcgatgctaaagcggcaggggttgtggcaggaaagttatacccagcaggtgcgaccacaaattcagatgcagcagttaaagctttggatgagttgtttcctatatttgaggttatggcacaacaaggcatgttgctattagtgcatggcgaagtgacagaatcgcatattgatatttttgatcgcgaaaaaatgtttatcgatcgctatttatcgcgcattgtcgaagccattcctagccttaaagtggtgtttgaacatatcaccactaaagaagcggctgagtttgtggcagaggcttcagctaatgttgctgcaactattaccccacagcatttattgttaaatcgtaatgatttactcgtcggtggtgttcgtccacataacttttgcttacccgtattaaaacgcaatattcaccagcatgcattacaagctgctgtggcgacaggctcaagtaaattctttttaggtactgattctgccccgcatgaaaaacaccgcaaagagtcagcctgtggctgcgcaggttgttacagtgcctggagtgcattagaactctatgcgcaagtttttgataacttaggggcattagataagttagaaggctttgccagcttacatggcgcagacttttatggcttaccacgcaacagcggcactgtgacgctagtgaaacaagaatggacggtaccagaagagattattctgccaaacggcaatcctatcgtgccattttttgcaggacaaaaagtgaattggaaagtgaaaacggcttaa

SEQ ID NO: 27805 - protein, 345 aa, Shewanella frigidimarina NCIMB 400
MTQITLTTPDDWHLHFRDGDMLGETVPATARLFQRAIVMPNLVPPVTTAAMALAYRDRILAARPQGSNFEPLMTLFLTNNTSAQDIIDAKAAGVVAGKLYPAGATTNSDAAVKALDELFPIFEVMAQQGMLLLVHGEVTESHIDIFDREKMFIDRYLSRIVEAIPSLKVVFEHITTKEAAEFVAEASANVAATITPQHLLLNRNDLLVGGVRPHNFCLPVLKRNIHQHALQAAVATGSSKFFLGTDSAPHEKHRKESACGCAGCYSAWSALELYAQVFDNLGALDKLEGFASLHGADFYGLPRNSGTVTLVKQEWTVPEEIILPNGNPIVPFFAGQKVNWKVKTA

SEQ ID NO: 27806 - DNA, 1047 bp, Pseudomonas fluorescens
  CDS (1)..(1047): transl_table=11
atgtccgaccgcctgaccctgctgcgtcccgacgactggcatattcatcttcgcgatggggccgtgttgcccaatacagtcgcagatgtcgcgcgcacctttggccgcgccatcatcatgcccaacctggtacctccggtgcgcaacgccgcggaagccgacgcctatcgccagcgcattctagctgcgcgcccggccggcagccgcttcgagccactgatggtgctctacctgaccgaccgtacccagccggaggaaatccgcgcggccaaggcctgcggtttcgtccacgccgccaagctgtacccggccggcgcgaccaccaactcggattcgggcgtgaccagcatcgacaagattttcccggtgcttgaagccatggccgaagtcggcctgccgctgttgatccacggcgaggtaacccgcggcgacgtcgatgtcttcgaccgcgagaaaatcttcatcgacgagcacatgcggcgtgtggttgaacgcttccccagcctgaaagtggtgttcgaacacatcaccaccgctgaagccgtgcagttcgtcaaggaggcttcggctaacgtcggcgccaccatcactgcgcatcacctgctgtacaaccgcaaccacatgctggtgggcggtattcgtccgcacttctattgcctgccgatcctcaagcgcaacacccaccaggaagccctgctggatgcggccaccagcggcaacgcgaagttcttcctcggcaccgactcggcacctcacgcccagcacgccaaggaagccgcttgcggttgcgccggctgctacagcgcctacgccgccatcgagctgtacgccgaagcgttcgaacaacgcaatgccctggatcagctggaagctttcgccagcctcaacggcccgcgcttctacggcctgccggccaacaccgacagcatcaccctggtccgtgaagaatggaccgctcctgccagcctgccgtttggcgagctgactgtcattccgctgcgcgccggtgaaaaactgcgctggcgcctgctggaggatcactcgtga

SEQ ID NO: 27807 - protein, 348 aa, Pseudomonas fluorescens
MSDRLTLLRPDDWHIHLRDGAVLPNTVADVARTFGRAIIMPNLVPPVRNAAEADAYRQRILAARPAGSRFEPLMVLYLTDRTQPEEIRAAKACGFVHAAKLYPAGATTNSDSGVTSIDKIFPVLEAMAEVGLPLLIHGEVTRGDVDVFDREKIFIDEHMRRVVERFPSLKVVFEHITTAEAVQFVKEASANVGATITAHHLLYNRNHMLVGGIRPHFYCLPILKRNTHQEALLDAATSGNAKFFLGTDSAPHAQHAKEAACGCAGCYSAYAAIELYAEAFEQRNALDQLEAFASLNGPRFYGLPANTDSITLVREEWTAPASLPFGELTVIPLRAGEKLRWRLLEDHS

SEQ ID NO: 27808 - DNA, 888 bp, Theileria parva
  CDS (1)..(888)
atgcagtttttgtacgcggatgacttacactgtcatctcagacagggtgaacttatggagaaggtcgtcaaatacgttcgaaaaggtggatggttcgtacttaacacatataatagagtgcttgttatgccgaatactgtgcctgagattacaagctgttctcaggctcttgagtataggaaaaagttactggaacttgacccgaatgtagagtacctcatgactctttatctcacagacgatttatcttccgaagatttaaggaataacgctaaaaaatgtcatgtgcagggggtcaaatgttacccttctggagtcacaactaattctgatagaggttttaatagttttgagaagtattacccgctattttctgagatggagaaaattggtgtttcacttcacttacacggagaattacctggagctcctccgctgactgctgaaaaggagtttttaccaatcgttgaaaacgtttgtaggaaattctcctctttaaaggttgttttggaacatgtaacttcgaaagattctctacaagttgttaaaaggattcaaaatctagcagccacaattacgcctcaccacatgagactaacagttttggacgttctaaacactgctgaaaatgtaacattacaaaacgtgaccaaacatttgagggacccttatgcatactgtaaacccttagctaagtttgaggaggatcgtcacgctattttggaaaccctaaaatcaggacatccaagattctttctaggatcagattcagcacctcatacacagtataacactattcatactattatcttgacagtaagagatcagttaaccctccagctggaatttacactcaaccatttctgctgcaggaccagagtactttga

SEQ ID NO: 27809 - protein, 295 aa, Theileria parva
MQFLYADDLHCHLRQGELMEKVVKYVRKGGWFVLNTYNRVLVMPNTVPEITSCSQALEYRKKLLELDPNVEYLMTLYLTDDLSSEDLRNNAKKCHVQGVKCYPSGVTTNSDRGFNSFEKYYPLFSEMEKIGVSLHLHGELPGAPPLTAEKEFLPIVENVCRKFSSLKVVLEHVTSKDSLQVVKRIQNLAATITPHHMRLTVLDVLNTAENVTLQNVTKHLRDPYAYCKPLAKFEEDRHAILETLKSGHPRFFLGSDSAPHTQYNTIHTIILTVRDQLTLQLEFTLNHFCCRTRVL

SEQ ID NO: 27810 - DNA, 1053 bp, Theileria annulata
  CDS (1)..(1053)
atgcagtttttgtacgcagatgacttacactgtcatctcagacagggagaactcatgaagaaggtcgtaaaatacattcgaaaaggaggatgtaatagagtgctcgtaatgcctaatactgtccctgagataacaagctgttctcaggctctcgaatacagaaaaaggctcctggaactcgatcccaacgtcgattacctcatgactctttatctgacagatgagctgtctgtcgaagatttaaagaataacgccaaaaaatgccacgtccagggggtcaaatgttatcccttaggtgtgacaactaattctgatagaagttttgaggttacgaatagaaataagagttttgagaagtactatccggtattttctgagatggagaaaattggagtttcactccacttacacggagagttatcaggcgctcctcctctgaccgctgaaaaggactttttaaccccaatagaaaacatttgtaggaggttcccctcgttgaaggtcgttttggagcacgtaacgtctcgagagtctctggaagtagttaaaaggctccaaaatctctcagccacagttactcctcaccacatgagactcacagtctcagacgttctcaacaccactgaaaatgtaactctggaaaatataactagacaccttaaggacccattcgcatactgcaaacccgtggctaaatttgaggaggaccgacaggcaattttggaaaccctaaagtcaggacacccgagactcttcttgggatcagattcagcacctcacacatgtgatagcaaaaggtcagataaccctccagctggcatttatactcagccgtttctgttacagtacctttctgacacgtttgaggattttggattttttgataaactggagaacttttgctgcaaaaacggccaggagtttttgcaattaccgcccaaagaacctgaatactttgaacttgtaaaacagccctttaaagttcccgaagaagtcgaaggaatcgtgccattcagagcaggccaatttctcaattattcaattttattctaa

SEQ ID NO: 27811 - protein, 350 aa, Theileria annulata
MQFLYADDLHCHLRQGELMKKVVKYIRKGGCNRVLVMPNTVPEITSCSQALEYRKRLLELDPNVDYLMTLYLTDELSVEDLKNNAKKCHVQGVKCYPLGVTTNSDRSFEVTNRNKSFEKYYPVFSEMEKIGVSLHLHGELSGAPPLTAEKDFLTPIENICRRFPSLKVVLEHVTSRESLEVVKRLQNLSATVTPHHMRLTVSDVLNTTENVTLENITRHLKDPFAYCKPVAKFEEDRQAILETLKSGHPRLFLGSDSAPHTCDSKRSDNPPAGIYTQPFLLQYLSDTFEDFGFFDKLENFCCKNGQEFLQLPPKEPEYFELVKQPFKVPEEVEGIVPFRAGQFLNYSILF

SEQ ID NO: 27812 - DNA, 1005 bp, Aspergillus fumigatus Af293
  CDS (1)..(1005)
atgatcctgaaagagacaacccggctggagctgccggcggcggccgacatgcacgtccaccttcgtcaaggcaagatgatggaattggttgtgccgcagattcgcaacggaggcgtcgataccgtttttgtcatgcctgctgacttggtcccttaccaatccgtgacccccgagactatcagggaagcagctgcagctggtatcaccggtgtcaaggtgtatccccagggcgtgacgaccaactccgcggccggcgtccgcgactatgacgaattcttccccgtcttcgcggagatggaaaagcacgacatggtgctcaacctccacggcgaggtccccggctcgcccggctcgggcatcaccgacatgaacgccgaggaaaagttccttcccacgctcacgatgctcaatgagaagttccccaagctgcggattatcctcgagcattgcagcaccgaggcggcgctggaggctgtccgctcctgctcctcgacggttgccgcgaccatcaccgcgcaccacctctaccttacccaccacagctgcgagaacccgctcgccttctgcaagcctctccccaagacatccaaggaccgcgatgcgcttctccgcgcggtctgcagcggcgatcccaaattcttctttggaagcgacagcgccccccacccgcgtctcgcaaagcaaggcggcgcagagggcacagccaaaccgccggcgggtgtgtttacgcagccctgtgtcgtgcagtatgtgcttctggcgctcgaggagggcgtggaacgcggcgtcatcgccaacgaggatattaccccggagaagctggcgaattttctcagtgggtatggacgtcggttctacaagttgccggaggcgacggagaggattgtgctggagcggaagggggaggttatcccggagagtgtgaagagtgaggatgggagtgtggaggtggccttgtctcggggcggagagaaggtgtttagcttgacgtggaagacctcgtag

SEQ ID NO: 27813 - protein, 334 aa, Aspergillus fumigatus Af293
MILKETTRLELPAAADMHVHLRQGKMMELVVPQIRNGGVDTVFVMPADLVPYQSVTPETIREAAAAGITGVKVYPQGVTTNSAAGVRDYDEFFPVFAEMEKHDMVLNLHGEVPGSPGSGITDMNAEEKFLPTLTMLNEKFPKLRIILEHCSTEAALEAVRSCSSTVAATITAHHLYLTHHSCENPLAFCKPLPKTSKDRDALLRAVCSGDPKFFFGSDSAPHPRLAKQGGAEGTAKPPAGVFTQPCVVQYVLLALEEGVERGVIANEDITPEKLANFLSGYGRRFYKLPEATERIVLERKGEVIPESVKSEDGSVEVALSRGGEKVFSLTWKTS

SEQ ID NO: 27814 - DNA, 1086 bp, Plasmodium chabaudi
  CDS (1)..(1086)
atggaaaacggatttcgtattccgttagcagatgatatgcattgccatttaaggcaagatgaaatgttaaagtttactgtccccgcaataaaaaaaggaggatgcaatcgagttttagtcatgcctaatactacaccaattgtaagcagttgtgaggaagccaagagatatagagaggaattaataaaatatgatgatagtgtagaatatttgatgactctatatttaaataaaaaaactgatgaaaacgatatattaaataattataaagaatgcaatttacaaggaataaaaatatatcctagtaatgtaacaacaaattctaatgatggtgtatcaagtttagaaccatattataaaatattttctacattagaaaaaataaataaaagcttacacatacattgtgaagaaccaaatataaatccagtatatgcagaaaaggaatatttacaacatatacatgatatagctattaaattcccacacctaaaaatagttttagaacatatatcaactgaaaacatgatagaaattattaaaaaatatccaaatgtagcaggatctattactcctcatcatttgcatctaactattgatgatgttgttgatataaaaaattatgattattcattcaataatactgacattgaaaaatatgtcaaaaatgtatataattattgtaagcctttacctaaaacattagatgataaaatagcattatgtaatattataaaagaggggaaccctaaagtatttttaggttcagactcggctccacattatcaaaaatttaaacaagaacctcattataaacctggtatttttacccagccttttcttttatcatatcttgctcatgtatttaataaatttgattcattagacaagattgaaaattttgcttgtaaaaatgctgcaaattttttaaacttaaaacctaaatgtgttgaaaataatcaaaatggtacgatatatatacaaaaaaaaaattttacaataccaagtgactattttggcgttattccatttttagctagccagacaattgattttactgcatcctataaatgtgatgtcgtttag

SEQ ID NO: 27815 - protein, 361 aa, Plasmodium chabaudi
MENGFRIPLADDMHCHLRQDEMLKFTVPAIKKGGCNRVLVMPNTTPIVSSCEEAKRYREELIKYDDSVEYLMTLYLNKKTDENDILNNYKECNLQGIKIYPSNVTTNSNDGVSSLEPYYKIFSTLEKINKSLHIHCEEPNINPVYAEKEYLQHIHDIAIKFPHLKIVLEHISTENMIEIIKKYPNVAGSITPHHLHLTIDDVVDIKNYDYSFNNTDIEKYVKNVYNYCKPLPKTLDDKIALCNIIKEGNPKVFLGSDSAPHYQKFKQEPHYKPGIFTQPFLLSYLAHVFNKFDSLDKIENFACKNAANFLNLKPKCVENNQNGTIYIQKKNFTIPSDYFGVIPFLASQTIDFTASYKCDVV

SEQ ID NO: 27816 - DNA, 1086 bp, Plasmodium yoelii yoelii
  CDS (1)..(1086)
atggaaaacgggtttagcattccgttagcagatgatatgcattgtcatttaaggcaagatgagatgttaaaatttacagtccctgcaataaaaaaaggaggatgtaatcgagttttagtaatgcctaacactacaccaattataagtagttgcgaagaagccaagaaatatagagatgaattaataaaatatgataacagtatagaatatttgatgactctatatttaaataaaaaaactgatgaaaatgatatattaaataattataaagaatgtaatttacaaggaataaaaatatacccaagtaatgtaacaacgaattctaacgatggtgtgtcaaatttagaaccatattataaaatattttctacattagaaaaaataaataaaagtttacatatacattgtgaagaacctaatataaatccagtatatgcagaaaaagaatatttacaacatatacatgatatatctattaaatttccacatttaaaaatagttttagaacatatatcaactgaaaatatgatagaaatggttaaaaaatatccaaatgtagcaggatctattacacctcatcatttacatctaactattgatgatgttgtagatataaaaaattatgattattcatttaacaatacagatattgaaaaatatgtaaaaaatgtatataattattgtaagcctttacctaaaacattagatgataaaatagcattatgcaatattataaaagagggaaaccctaaagtatttttaggttctgactcggctccacattatcaaaaatttaaacaagaacctcattataagcctggtatttttacacaaccttttcttttatcatatcttgctcatatatttaataaatttaattccttagacaaaattgaaaattttgcttgtaaaaatgctgcacaatttttaaatttggaacctaaatctatcgaaaataatcaaaatagtattatatacatacaaaaaaaaaatcttacaataccaaatgactattttggagttgttccatttttagctaatcaaacaattgattttactgcatcctataaatatgatgtcgtttaa

SEQ ID NO: 27817 - protein, 361 aa, Plasmodium yoelii yoelii
MENGFSIPLADDMHCHLRQDEMLKFTVPAIKKGGCNRVLVMPNTTPIISSCEEAKKYRDELIKYDNSIEYLMTLYLNKKTDENDILNNYKECNLQGIKIYPSNVTTNSNDGVSNLEPYYKIFSTLEKINKSLHIHCEEPNINPVYAEKEYLQHIHDISIKFPHLKIVLEHISTENMIEMVKKYPNVAGSITPHHLHLTIDDVVDIKNYDYSFNNTDIEKYVKNVYNYCKPLPKTLDDKIALCNIIKEGNPKVFLGSDSAPHYQKFKQEPHYKPGIFTQPFLLSYLAHIFNKFNSLDKIENFACKNAAQFLNLEPKSIENNQNSIIYIQKKNLTIPNDYFGVVPFLANQTIDFTASYKYDVV

SEQ ID NO: 27818 - DNA, 1212 bp, Toxoplasma gondii
  CDS (1)..(1212)
atggcaatgactggtgaagaaaagggggggaatggggcaagcaactcttgctgcggccaggcaagagcaaaacctctggtcatgccgcttataagcgacatgcatacgcacctcagacaagatgaaatggcagagttcgtcaccccaatgatcaaaaagggagggtgccggtgtgtcctggtcatgcccaacaccattcctcccgtcaccacatgtgctcaagccgctgcatacagagagcgcctcgtcaggatagaccccaacgtggactatatgatgacgctgtttctctctccggaagtgtcggccgatgacttgcggcagaatgccaagatgtgccatgtcaccggaatcaagagctacccgaaaggagtgacgacaaactctgaccagggcgtcgagagctacgaacagtattacggaatcttcgaggcaatgcaggagcttggactaacgcttcatttgcacggggaagtgcctggagttgctcctctggatgcagaggaggctttcattccctttttcgagcagatccattcaagatttcctagtctaaaaatcgtccttgagcatgtctccaccgctgcggcgatccaagcggtcaagcgcatgcctgcgaacgtggcggcaaccatcacgccccaccacctaatgctgacggttgatgacgtcgtgaagccggacgcgatcaaaagggcaatggagactgcagcacacagaggactctgctgtgcagaggcagtcgagaagccccacaacttctgcaagccgttggcgaagaccaagagagaccgtgacgcactccgacaggtcatccaggatggtgacacgcactttttcctcggctccgattcagcgccgcatcccagacttgccaaggaatcgtccccgccagctgcaggggtatttacgcagccgcttcttctagcttacctggttagcatattcgcggaacttggttgcatctccaaacttcgggaattcgcagatggccatgctgcagcgtttttcggctttgaggctgcaaccctggaagagaaccttgagtgtgccgttatccagcctacgcctcagcgggttccttccattttcaagttccctggccaagaaaacgaaggcgtcgtgccgtttatggcatcgcttgagctgccttacacagtggaagtacggcgcttcagcccttctctactgaaggaatgcgacgaaatttaa

SEQ ID NO: 27819 - protein, 403 aa, Toxoplasma gondii
MAMTGEEKGGNGASNSCCGQARAKPLVMPLISDMHTHLRQDEMAEFVTPMIKKGGCRCVLVMPNTIPPVTTCAQAAAYRERLVRIDPNVDYMMTLFLSPEVSADDLRQNAKMCHVTGIKSYPKGVTTNSDQGVESYEQYYGIFEAMQELGLTLHLHGEVPGVAPLDAEEAFIPFFEQIHSRFPSLKIVLEHVSTAAAIQAVKRMPANVAATITPHHLMLTVDDVVKPDAIKRAMETAAHRGLCCAEAVEKPHNFCKPLAKTKRDRDALRQVIQDGDTHFFLGSDSAPHPRLAKESSPPAAGVFTQPLLLAYLVSIFAELGCISKLREFADGHAAAFFGFEAATLEENLECAVIQPTPQRVPSIFKFPGQENEGVVPFMASLELPYTVEVRRFSPSLLKECDEI

SEQ ID NO: 27820 - DNA, 1038 bp, Beta vulgaris
  CDS (1)..(1038)
atggaactgactcttacacgccctgatgactggcatctacatctccgcgatggagatcttcttgctgctgttgctcctcacagtgcaagacattttggaagggcaatcgttatgccgaatctaaggcctcctgttactactacaggtgctgctattgcttaccgaaagtctattatggaagtattgcctgatgatagcgacttcaatcctctcatgacactttatttgactgatacgaccagccctaatgagatcaagcttgccagaaaaagtgaggtggtatatgctgtcaaattataccctgctggcgcaacaactaattctcaggacggtgtcactgatcttttaggaaagtgtctgcctgtgcttgaagagatggctgagcaagatatgcctcttctggtccatggagaagttacagatcctgatgtagatatatttgatcgtgaaaaggtttttattgagtcagttttaagacctttaattcagaaattaccacagctaaaggttgtgatggaacacatcactactgctgatgctgtcaagtttattgagtcctgtaatggaggaaatgtagcagccactgtgacgccgcagcaccttgttctgaatagaaactctctcttccaaggagggttgcaaccgcataactattgtcttccagtgctcaaaagagaaatccatagacaggcacttgtttcagcggtaaccagcgggagcaagcaatattttcttgggactgatagtgctcctcatgaaaggcggaggaaagaatgttcgtgtggatgtgctggaatctataattcccctgttgctctatcactatatgccaaagtatttgaagaggctggtgcccttgacaagttagaggcatttacaagctttaatggacccgatttctatggtcttccaaggaatacgtcgaagatcaagttgaaaaaagaaccatggaaagtcctagagcgtatacctttcccatccggagaaataatccctatgtttgctggacaaatgcttgactggaagccatctttctga

SEQ ID NO: 27821 - protein, 345 aa, Beta vulgaris
MELTLTRPDDWHLHLRDGDLLAAVAPHSARHFGRAIVMPNLRPPVTTTGAAIAYRKSIMEVLPDDSDFNPLMTLYLTDTTSPNEIKLARKSEVVYAVKLYPAGATTNSQDGVTDLLGKCLPVLEEMAEQDMPLLVHGEVTDPDVDIFDREKVFIESVLRPLIQKLPQLKVVMEHITTADAVKFIESCNGGNVAATVTPQHLVLNRNSLFQGGLQPHNYCLPVLKREIHRQALVSAVTSGSKQYFLGTDSAPHERRRKECSCGCAGIYNSPVALSLYAKVFEEAGALDKLEAFTSFNGPDFYGLPRNTSKIKLKKEPWKVLERIPFPSGEIIPMFAGQMLDWKPSF

SEQ ID NO: 27822 - DNA, 1038 bp, Agrobacterium tumefaciens
  CDS (1)..(1038)
atgaagtcgctcaccctgcgccgccctgatgactggcacctgcatcttcgtgatggcgccatgctggaaggggtgatcggggatacgagccgccatttcgcccgcgccatcatcatgccgaatctggtgccgcccgtcgtcaccacggccgatgccagcgcctatcgagaacgcatcctcaaggcgatcccggagggtgaccgcttcgagccgctgatgaccctctacctcactgaggatactgttgctgatgacgtggaagagggcaaaaaaagcggcctcatcaccgccgtaaagctctatcctgcgggtgcgaccaccaattctcatggcggcgtgcgcgatttcaacaaggcgatgccggtgctggaacgcatggcaaagatcggcctgccgctctgcgtgcatggcgaggtgacgacgccagacgtcgatattttcgaccgcgagaaggccttcatcgatacggttctggagcccctgcgccagcgcctgccagagttgaaggtgacgatggaacacatcaccacccgcgatggcgtggactacatcaagtcttccaatgccaatctggccggctccatcaccacgcaccacctcatcatcaaccgcaacgccattctggtcggcggtatcaagccgcattattattgcctgcccgtcgccaagcgcgaggagcatcgtctggcgctgcgggctgctgcgacgtcgggtgatgcccgcttcttcctcggcacggattccgccccacatgtggacccgctgaaagaatgcgcctgcggctgtgctggcatctatacttccatcaacaccatgagctgccttgcccatgtcttcgaggatgagaatgccctcgataagctggaggccttcgcctcgctcaacggcccggcctggtatggtcttgcgccgaacgacgagacgatcacgctggtcaagcgcgaggaagcggtggcgtttcccgaaaagatcgaaacgggcgccgggccggtgaccgtattcgatccgatgttcccgcttcattgggatgtaaactga

SEQ ID NO: 27823 - protein, 345 aa, Agrobacterium tumefaciens
MKSLTLRRPDDWHLHLRDGAMLEGVIGDTSRHFARAIIMPNLVPPVVTTADASAYRERILKAIPEGDRFEPLMTLYLTEDTVADDVEEGKKSGLITAVKLYPAGATTNSHGGVRDFNKAMPVLERMAKIGLPLCVHGEVTTPDVDIFDREKAFIDTVLEPLRQRLPELKVTMEHITTRDGVDYIKSSNANLAGSITTHHLIINRNAILVGGIKPHYYCLPVAKREEHRLALRAAATSGDARFFLGTDSAPHVDPLKECACGCAGIYTSINTMSCLAHVFEDENALDKLEAFASLNGPAWYGLAPNDETITLVKREEAVAFPEKIETGAGPVTVFDPMFPLHWDVN

SEQ ID NO: 27824 - DNA, 1269 bp, Aquifex aeolicus
  CDS (1)..(1269): transl_table=11
atgctaaagttaatcgtgaaaaacggttacgtaatagacccctcgcaaaatctcgagggggagtttgatatcctcgtagaaaatggaaagataaagaagatagataaaaacatcctagtccccgaggcggaaatcatagatgcaaagggtttaatagtgtgcccgggatttatagacatacacgttcacctgagagatccggggcagacttacaaggaggatatagagagcggaagcaggtgtgccgttgcgggaggttttacgactatcgtatgcatgccgaacacaaaccctcccattgataacacaacggtggttaattacattctccagaagtctaaaagtgtcggactttgcagggttcttcctactgggactataaccaagggaagaaagggaaaggaaattgcggatttttactctttaaaagaggcgggatgtgtggcttttacggacgacggcagtcccgtaatggacagttccgtgatgagaaaagccttagaactcgcctcacagctcggtgttcctataatggatcactgcgaggacgacaaactcgcctacggtgtgataaacgagggcgaggtttccgcccttctgggactttcctcaagggctccggaggctgaggagatccagatagcgagagatgggatactggcacagagaacagggggacacgtccacatacagcacgtatccacaaagctttccttagaaataatagagtttttcaaagaaaagggagtgaagataacctgcgaggtaaacccgaaccacctcctctttacggaaagggaagttttgaactcgggggcaaacgcaagggtaaaccctccactcagaaagaaagaggacaggttggccctgatagaaggtgtgaaaagaggaattatagactgctttgccacagatcacgccccgcaccagacttttgaaaaggagctcgttgagtttgcgatgcccggtattattgggctccagacagctttaccctcggctcttgaactctacagaaagggaataatttcactcaagaagttgatagagatgtttacaatcaaccctgcaaggataatcggtgtagacctcggaaccttgaaactgggaagtcccgcggacataactatttttgatcccaataaggaatggattttgaacgaagagacgaacctttcgaagagcaggaacacacccctctggggcaaagttctcaagggtaaagtgatttacaccataaaagacgggaagatggtgtataaagattaa

SEQ ID NO: 27825 - protein, 422 aa, Aquifex aeolicus
MLKLIVKNGYVIDPSQNLEGEFDILVENGKIKKIDKNILVPEAEIIDAKGLIVCPGFIDIHVHLRDPGQTYKEDIESGSRCAVAGGFTTIVCMPNTNPPIDNTTVVNYILQKSKSVGLCRVLPTGTITKGRKGKEIADFYSLKEAGCVAFTDDGSPVMDSSVMRKALELASQLGVPIMDHCEDDKLAYGVINEGEVSALLGLSSRAPEAEEIQIARDGILAQRTGGHVHIQHVSTKLSLEIIEFFKEKGVKITCEVNPNHLLFTEREVLNSGANARVNPPLRKKEDRLALIEGVKRGIIDCFATDHAPHQTFEKELVEFAMPGIIGLQTALPSALELYRKGIISLKKLIEMFTINPARIIGVDLGTLKLGSPADITIFDPNKEWILNEETNLSKSRNTPLWGKVLKGKVIYTIKDGKMVYKD

SEQ ID NO: 27826 - DNA, 1134 bp, Arabidopsis thaliana
  CDS (1)..(1134)
atgataaagactttggtctctccttatagtggatttggatctcagaagttgaagtttgacagatcttctgagaaagtgaagacgagagcagtaagaatggagctcacaatcactcaacctgatgattggcatcttcatctccgtgacggtgatcttcttcatgctgttgttccccacagtgcgagtaattttaagagagcgattgtgatgccgaatctgaagcctcctgtcacctccactgcagctgccattatttaccggaaatttatcatgaaagctttgccatctgagagtagctttgatccacttatgacactttatttgactgacaaaactctacctgaagagatcaggcttgcaagggaaagtggtgtggtttatgcggtgaagctgtaccctgccggagcaacaaccaactctcaagatggtgtcacggatctctttggaaaatgcttaccggtactagaagagatggtcaaacaaaacatgcctttgctggttcatggggaggtcacagatccgagtatcgatgtctttgaccgcgagaaaatcttcattgagacagttctgcagcctctaatccaacgccttccgcagctgaaagtagtgatggaacacatcacaaccatggatgctgtgaattttgttgaatcttgcaaagaagggtctgtgggtgcaacagtcacaccacaacatctccttctcaacaggaacgcccttttccaaggtggattacaacctcacaactactgtcttcccgttctcaaaagagaaatacatagagaagccattgtcaaagctgtaactagtggaagcaagaagttcttcctcggcacagatagtgctccacatgaacggagtagaaaagaatcatcctgcggatgtgctggtatttacagcgctcccattgccttgtccctatacgccaaggtctttgatgaggcgggtgcgctggacaagttggaagctttcaccagtttcaatggacctgatttctatggccttccgagaaactcgtcaaagatcacactgaagaaatctccttggaaggttccagacgttttcaacttcccattcggagagatcgtccctatgtttgctggagaaacccttcaatggcaaccgttgaaataa

SEQ ID NO: 27827 - protein, 377 aa, Arabidopsis thaliana
MIKTLVSPYSGFGSQKLKFDRSSEKVKTRAVRMELTITQPDDWHLHLRDGDLLHAVVPHSASNFKRAIVMPNLKPPVTSTAAAIIYRKFIMKALPSESSFDPLMTLYLTDKTLPEEIRLARESGVVYAVKLYPAGATTNSQDGVTDLFGKCLPVLEEMVKQNMPLLVHGEVTDPSIDVFDREKIFIETVLQPLIQRLPQLKVVMEHITTMDAVNFVESCKEGSVGATVTPQHLLLNRNALFQGGLQPHNYCLPVLKREIHREAIVKAVTSGSKKFFLGTDSAPHERSRKESSCGCAGIYSAPIALSLYAKVFDEAGALDKLEAFTSFNGPDFYGLPRNSSKITLKKSPWKVPDVFNFPFGEIVPMFAGETLQWQPLK

SEQ ID NO: 27828 - DNA, 1053 bp, Buchnera aphidicola
  CDS (1)..(1053): transl_table=11
atgtctaaatttgtcaaaaaaataaaaatcattaaacctgatgattggcatgttcatttaagagacaatgagattttaaatcaagttataaagtatactggtaaattttataaaagagctgttattatgccaaatcttaatagtccgattacgagttgtttgaaaagcattgcgtatcgtaatagaattttaaaatcaatgcacttgaattataaattcaaaccgttaatgacttgttatttaactaattccacaagccctaaagaactagaatttggtttttctaaaaaaatatttgtagcagctaaattctatccaaatggttgcacgaccaattcaaaaactggtataaaaaaaattagtgatattactcctgttttagaatgtatggaaaaaataggaatgccattactaattcatggtgaagagattaaccaaaatattgatatctatgatagagaagcaaaatttattgaaaaaacgttagatcctttaagaaaaaaatttccaaagttaaagatagtattagaacatattacaaccaaagaatctgtagaatatatcaaaaataacgatgttaattacttatctgcaactattacaccacatcatttaatgctaaatcgaaatgatatgttttatggtgggattcaaccatatctttactgtttaccgattttaaaaaaaaacaaacatcgaatggcactaagaaaagccatctctaatggagataaacatttttttttaggaagcgatacagctccacatcttcataaaaataaaattaatatgcttggatgtgcgggtatatttaatgctccatcatctctattatcttatgttaaagtatttgaggaaatgagagcgttaaaatatttacaatctttttgttctgaaaatggtcctaaattttataacatgccaattaacaaagaaaccataacaataatcaaaaaaccgtgtaaaattattaaaaaaataaatgttggaagaaatgtgattattccatttttatcaggtgaaattttaaactggtcaattgaaagtgattaa

SEQ ID NO: 27829 - protein, 350 aa, Buchnera aphidicola
MSKFVKKIKIIKPDDWHVHLRDNEILNQVIKYTGKFYKRAVIMPNLNSPITSCLKSIAYRNRILKSMHLNYKFKPLMTCYLTNSTSPKELEFGFSKKIFVAAKFYPNGCTTNSKTGIKKISDITPVLECMEKIGMPLLIHGEEINQNIDIYDREAKFIEKTLDPLRKKFPKLKIVLEHITTKESVEYIKNNDVNYLSATITPHHLMLNRNDMFYGGIQPYLYCLPILKKNKHRMALRKAISNGDKHFFLGSDTAPHLHKNKINMLGCAGIFNAPSSLLSYVKVFEEMRALKYLQSFCSENGPKFYNMPINKETITIIKKPCKIIKKINVGRNVIIPFLSGEILNWSIESD

SEQ ID NO: 27830 - DNA, 1050 bp, Buchnera aphidicola
  CDS (1)..(1050): transl_table=11
atgtctaaatttttaaaaaaaattaaaattataaaacctgatgactggcatgttcatttaagagataatgaaattttaaaaaaagtttctcaatacactggaacattttataaacgtgcaatcattatgcctaatctcgaagaacctattacaaattgttttagatcaatctcttatcgtcgtagaattttaaattctatgacaccaaatactgcatttcaaccattaatgatttgttacttaacagaaaaaacttctcctgaagaattacaacaaggtttttttaaaaaaatttttgtaggagcaaaattatatcctcattgttctacaactaattcaaaatacggtataaaaaatattaacaatatctatcatttatttaatattatggaaaaaataaaaatgccattacttattcatggagaagaaaataatttaaatatcgacatatatgatagagaagcaaaatttattgaaaatacactaaaaccattacgtaaaaaatttccagaattaaaaataatactagaacatattacaacagaagaagcaatatcgtacattgaggaatgtaattcttcatatttagctggtactattacacctcatcacttaatgttaaaccgaaataatatgtttattgatggaattcaaccacatctttattgtttacctcttttaaaaagaaaaaaacatcaaatagctttgagaaatgtcatatcaagtggtagtaaaaatttttttttaggcagtgatacagctccacactttcataaaaataaaatcaacacttttggttgcgcaggtatatttaatgctccatcttctttattatgttatgttagcgtttttgaagaaatgaatgcattacagcattttcaatctttttgctccgaaaacggacctaacttttataatatgccaattaataaagaaaccattacacttgtcaaaaaacctcataaaattttagaaaaaattaatattggtaaaaatattattgttccctttttagctgggaaaagactagattggtctattgaaaagtaa

SEQ ID NO: 27831 - protein, 349 aa, Buchnera aphidicola
MSKFLKKIKIIKPDDWHVHLRDNEILKKVSQYTGTFYKRAIIMPNLEEPITNCFRSISYRRRILNSMTPNTAFQPLMICYLTEKTSPEELQQGFFKKIFVGAKLYPHCSTTNSKYGIKNINNIYHLFNIMEKIKMPLLIHGEENNLNIDIYDREAKFIENTLKPLRKKFPELKIILEHITTEEAISYIEECNSSYLAGTITPHHLMLNRNNMFIDGIQPHLYCLPLLKRKKHQIALRNVISSGSKNFFLGSDTAPHFHKNKINTFGCAGIFNAPSSLLCYVSVFEEMNALQHFQSFCSENGPNFYNMPINKETITLVKKPHKILEKINIGKNIIVPFLAGKRLDWSIEK

SEQ ID NO: 27832 - DNA, 1020 bp, Helicobacter pylori J99
  CDS (1)..(1020): transl_table=11
atggaaatcacgctttttgaccccatagacgcccacttgcatgtgcgagaaaacgcgcttttaaaagcggtgttggaatattctagcgaaccttttagcgccgcagtgatcatgcccaatctcagtaagcctttgattgacactccaatcaccctagaatatgaagaagaaattttaaaaaattcttcaaacttcaagcctttaatgagtttgtattttaacgatggtttgactttagaagaattgcaacgagctaaaaacaaaggcattaaatttttaaaactctaccccaaaggcatgaccacaaacgcgcaaaatggcacttcggatttgttgggtgaaaagactttggaggttttagaaaacgcccaaaaattaggctttattttatgcgtccatgcagaacaagctgggttttgtttggataaagaatttttatgccatagcgttttagaaactttcgccctttcattccctaaactcaaaatcattatagagcatttgagcgattggcgcagtatcgctttgattgaaaagcatgacaacctctatgcgactttgaccttacaccatatcagcatgactttagatgacttattaggggggagtttggacccgcattgtttttgcaaacccttaatcaaaaccaaaaaagaccaagaaaggctcttatcccttgctttaaaagcccaccctaaaatctcttttggatcggacagtgccccgcatttcatttctaaaaagcatagcgctaacatcccggcgggcatcttttctgcccctattttgttgcctgcgttgtgcgaactttttgaaaaacacaacgctttagaaaatttgcaagcctttatcagtgataacgctaaaaaaatctacgcgctagacaatttacccagtaaaaaagcgcatttgtctaaaaaaccctttatagtccctacgcacacgctttgcttgaatgaaaaaatcgctatcttaagagggggcgaaacgctatcttggaaccttcaagaaatcgcctaa

SEQ ID NO: 27833 - protein, 339 aa, Helicobacter pylori J99
MEITLFDPIDAHLHVRENALLKAVLEYSSEPFSAAVIMPNLSKPLIDTPITLEYEEEILKNSSNFKPLMSLYFNDGLTLEELQRAKNKGIKFLKLYPKGMTTNAQNGTSDLLGEKTLEVLENAQKLGFILCVHAEQAGFCLDKEFLCHSVLETFALSFPKLKIIIEHLSDWRSIALIEKHDNLYATLTLHHISMTLDDLLGGSLDPHCFCKPLIKTKKDQERLLSLALKAHPKISFGSDSAPHFISKKHSANIPAGIFSAPILLPALCELFEKHNALENLQAFISDNAKKIYALDNLPSKKAHLSKKPFIVPTHTLCLNEKIAILRGGETLSWNLQEIA

SEQ ID NO: 27834 - DNA, 1020 bp, Helicobacter pylori
  CDS (1)..(1020): transl_table=11
atggaaatcacgctttttgaccccatagacgcccacttgcatgtgcgagaaaacgcacttttaaaagcggtgttaggatattctagcgagccttttagtgctgcagtgatcatgcctaatctcagtaagcccttgattgacactccaaccacccttgaatacgaagaagaaattttaaaccattcttcaaacttcaagcctctaatgagtttgtatttcaatgatggcttgactttagaagaattgcaatgcgcaaaagaaaaaggcgtcaggtttttaaagctctaccccaaaggcatgaccacaaacgcgcaaaacggcacttcggatttgttgggtgaaaaaactttagaggttttagaaaacgcccaaaaattaggctttattttatgcatccatgcagaacaaaccgggttttgtttggataaagaatttttatgccatagcgttttagaaacttttgccctttcattccctaaactcaaaatcattatagagcatttgagcgactggcgcagtatcgctttgattgaaaaacatgacaatctctatgcgactttgactttacaccatatcagcatgactttagatgatttattaggggggagtttgaacccgcattgtttttgcaaacccttaatcaaaaccaaaaaagaccaagaaaggcttttatcccttgctttaaaagcccaccctaaaatctcttttggctctgatagcgccccgcatttcatttctaaaaagcatagcgctaacatcccggcgggcatcttttctgcccctattttattgcctgcgttgtgcgaactttttgaaaaacacaacgctttagaaaacttgcaagcctttatcagcgataacgctaaaacaatctatgggctagaaaatttgcccagtaaaaaagcgcgtttgtctaaaaaaccctttatgatccctacacacacgctttgcttgaatgaaaaaatcgctatcttaagagggggcgaaacgctatcttggaaccttcaagaaatcgcctaa

SEQ ID NO: 27835 - protein, 339 aa, Helicobacter pylori
MEITLFDPIDAHLHVRENALLKAVLGYSSEPFSAAVIMPNLSKPLIDTPTTLEYEEEILNHSSNFKPLMSLYFNDGLTLEELQCAKEKGVRFLKLYPKGMTTNAQNGTSDLLGEKTLEVLENAQKLGFILCIHAEQTGFCLDKEFLCHSVLETFALSFPKLKIIIEHLSDWRSIALIEKHDNLYATLTLHHISMTLDDLLGGSLNPHCFCKPLIKTKKDQERLLSLALKAHPKISFGSDSAPHFISKKHSANIPAGIFSAPILLPALCELFEKHNALENLQAFISDNAKTIYGLENLPSKKARLSKKPFMIPTHTLCLNEKIAILRGGETLSWNLQEIA

SEQ ID NO: 27836 - DNA, 1281 bp, Listeria innocua
  CDS (1)..(1281): transl_table=11
atgtacgtattaaaaaatggtcaagtgttaaatgaatcaggcgaactagagaacaaagatgtacttattcaaaacggcaaagtcaacttgattgcagattcgattgaagtaacaagtggcgaagaatttgatgcaacgggaaaactaatcgcaccaggctttatcgatgttcacgtacatcttcgcgaaccaggcggagaacataaagaaaccattttgacaggaacaaaagcagcagcacgcggaggttatacaacgatttgttcgatgcctaatacaaaacctgttccagattccaaagaagtaatgaacagtttacaagcaaaaattaaagaaacagcagaagttcgagtgttaccatacgcatccattacaacgagtcttggaacggacgagctagtagattttgaagctttaaaagaagctggagcatttgcttttacagatgatggcgtgggcgtacagctagccggaacaatgtatgaggcaatgaaacgagcagcagcactagatatggcaatcgttgctcactgtgaagacaactcgctcatttacggcggagtggtccacgacgggatttttgctgaaaaagaaggacttaaaggcattccaaacattgcagaatcggttcaaatcgcgcgtgatgttttactagcagaagcagccggctgtcactatcatgtttgccatatttcgactaaagaatctgttcgcgtggtacgtgatgcaaaacgagcgggtattcgtgtcacagcagaagtttcgccacatcacttgatactcgacgaagaggacattccgggaaatgacggcaactggaaaatgaatccaccacttcgcagcaaagaagatcgcgcagcacttttagaaggattactagatggaacgattgattttatcgcaactgaccacgcaccacacgcagcggaagaaaaaaatgtcccaatggagcaagccgcatttggtattgttggtttagaaacggctttcccgctgctatacacccattttgtcaaaacgaacgaatggacgttaaaacaacttatcgactggatgacagtgaagccagcagagtgctttaaactcccatacggaaaactagaagaaggcgcagtagcagatattgtcgtacttgatttagaaaaagaagcaactattgatccagctactttttactcaaaaggaaaaaatacaccatttgttggagaaacgtgtatcggctggccggtagcaacgtttgcagaaggagaacttgtatacaatgagggggaaaacaaatga

SEQ ID NO: 27837 - protein, 426 aa, Listeria innocua
MYVLKNGQVLNESGELENKDVLIQNGKVNLIADSIEVTSGEEFDATGKLIAPGFIDVHVHLREPGGEHKETILTGTKAAARGGYTTICSMPNTKPVPDSKEVMNSLQAKIKETAEVRVLPYASITTSLGTDELVDFEALKEAGAFAFTDDGVGVQLAGTMYEAMKRAAALDMAIVAHCEDNSLIYGGVVHDGIFAEKEGLKGIPNIAESVQIARDVLLAEAAGCHYHVCHISTKESVRVVRDAKRAGIRVTAEVSPHHLILDEEDIPGNDGNWKMNPPLRSKEDRAALLEGLLDGTIDFIATDHAPHAAEEKNVPMEQAAFGIVGLETAFPLLYTHFVKTNEWTLKQLIDWMTVKPAECFKLPYGKLEEGAVADIVVLDLEKEATIDPATFYSKGKNTPFVGETCIGWPVATFAEGELVYNEGENK

SEQ ID NO: 27838 - DNA, 1281 bp, Listeria monocytogenes
  CDS (1)..(1281): transl_table=11
atgtacgtattaaaaaatgggcaagtattaaacgcgtcaggtgaactggaaaacaaagatgtacttattcaaaacggtaaagtcaatttgattgcggattccattgaagtaacaagcggcgaggaatttgatgcgacagggaaattaattgccccaggttttatcgacgtccatgtacatcttcgtgagccgggcggggaacataaagaaaccattttaacaggaacacaagcggcggcacgcggtggctatacgacaatttgttcgatgccgaatacaaaacctgttccagattccaaagaagtaatggaaagtttacaagcaaaaattaaagaaacagcgaaagttcgcgtgttaccatatgcttcgattacaacaagccttggaacggacgaattagttgattttgaagctttaaaagaagctggtgcatttgcttttacagatgacggggtaggcgtgcagttagctggaacaatgtatgaagcgatgaaacgagcagcagcactagatatggcgattgtggctcactgtgaagataactcacttatctatggtggcgttgtccatgacgggatttttgctgaaaaagaaggtctgaaaggtattccgaatattgctgaatctgtccaaatcgcacgtgacgttttactagcagaagctgcaggttgtcattatcatgtctgtcatatttcaacaaaagaatctgttcgtgttgtgcgagatgcaaaacgggcgggaattcgtgtcactgctgaagtttcaccacatcacttaattttagatgaagaagctattccaggaaatgacggtaattggaaaatgaaccccccacttcgcagcaaagaagatcgggcggcacttttagaaggcttactggatggtacgatagattttatcgcaactgatcatgctccacacgcagcggaagaaaaaaatgtaccgatggagcaagctgctttcggaattgtaggtctagaaacggcattcccattactatatacccattttgttaaaacgaacgaatggacattaaaacagctaatcgactggatgactgtaaaaccagcggaatgctttaaactcccatacgggaaattagaagaaggcagcgtagctgatatcgtcgtacttgatttagaaaaagaagcgaatattgacccagctactttttattcaaaaggaaaaaacacaccatttgtaggagaaacgtgtattggatggccagtagcaacgttttcggaaggcacacttgtatacaatgagggggaaattaaatga

SEQ ID NO: 27839 - protein, 426 aa, Listeria monocytogenes
MYVLKNGQVLNASGELENKDVLIQNGKVNLIADSIEVTSGEEFDATGKLIAPGFIDVHVHLREPGGEHKETILTGTQAAARGGYTTICSMPNTKPVPDSKEVMESLQAKIKETAKVRVLPYASITTSLGTDELVDFEALKEAGAFAFTDDGVGVQLAGTMYEAMKRAAALDMAIVAHCEDNSLIYGGVVHDGIFAEKEGLKGIPNIAESVQIARDVLLAEAAGCHYHVCHISTKESVRVVRDAKRAGIRVTAEVSPHHLILDEEAIPGNDGNWKMNPPLRSKEDRAALLEGLLDGTIDFIATDHAPHAAEEKNVPMEQAAFGIVGLETAFPLLYTHFVKTNEWTLKQLIDWMTVKPAECFKLPYGKLEEGSVADIVVLDLEKEANIDPATFYSKGKNTPFVGETCIGWPVATFSEGTLVYNEGEIK

SEQ ID NO: 27840 - DNA, 1281 bp, Listeria monocytogenes
  CDS (1)..(1281): transl_table=11
atgtacgtattaaaaaatggacaagtgctaaacgcgtcagggaaactagaaagtaaagatgtactcattcaaaacggcaaagtcaacttgattgccgattcaattgaagtaacaagtggtgaggaatttgacgccacaggtaagctaattacaccaggctttatcgacgtccatgtacatcttcgtgagccaggcggggaacataaggaaaccattttgacaggaacgaaagctgctgcacgcggtggctatacgacaatttgttcgatgccgaatacaaaacctgttccagattctaaagaagtaatggaaagtatacaagcaaaaattaaagaaacagcgaaagttcgcgtgttaccatatgcttcgattacgaccagccttggaacggacgaattagtagattttgaagctttaaaagaagctggcgcatttgctttcacagatgatggtgtaggagtgcagttagctggaacaatgtatgaagcgatgaaacgagcggcagcactagatatggcaattgtggctcactgtgaagataactcacttatatacggtggagttgtccatgacgggatttttgctgaaaaagaaggacttaaaggcattccaaatattgctgaatctgtccaaatcgcacgtgacgttttactagcagaagctgcaggttgtcattatcatgtctgtcatatttcaacaaaagaatctgttcgtgttgtgcgagatgcaaaacgggcgggaattcgtgtcactgctgaagtttcaccacatcacttaattttagatgaagaagctattccaggaaatgatggtaattggaaaatgaaccccccacttcgcagcaaagaagatcgggcggcacttttagaaggcttactggatggtacgatagattttatcgcaactgatcatgctccacacgcagcggaagaaaaaaatgtaccgatggagcaagctgctttcggaattgtaggtctagaaacagcattcccattactatatacacattttgttaaaacgaacgaatggacattaaaacagctaatcgactggatgactgtgaaaccagcggaatgctttaaactgccatacgggaaattagaagaaggcagcgtagcagatatagtcgtacttgatttagaaaaagaagcgaatattgacccagacactttttattcaaaaggaaaaaacacaccatttgttggagaaacatgtattggttggccagtagccacgtttgcagaaggaacgcttgtatacaatgagggggaaattaaatga

SEQ ID NO: 27841 - protein, 426 aa, Listeria monocytogenes
MYVLKNGQVLNASGKLESKDVLIQNGKVNLIADSIEVTSGEEFDATGKLITPGFIDVHVHLREPGGEHKETILTGTKAAARGGYTTICSMPNTKPVPDSKEVMESIQAKIKETAKVRVLPYASITTSLGTDELVDFEALKEAGAFAFTDDGVGVQLAGTMYEAMKRAAALDMAIVAHCEDNSLIYGGVVHDGIFAEKEGLKGIPNIAESVQIARDVLLAEAAGCHYHVCHISTKESVRVVRDAKRAGIRVTAEVSPHHLILDEEAIPGNDGNWKMNPPLRSKEDRAALLEGLLDGTIDFIATDHAPHAAEEKNVPMEQAAFGIVGLETAFPLLYTHFVKTNEWTLKQLIDWMTVKPAECFKLPYGKLEEGSVADIVVLDLEKEANIDPDTFYSKGKNTPFVGETCIGWPVATFAEGTLVYNEGEIK

SEQ ID NO: 27842 - DNA, 1035 bp, Neisseria meningitidis
  CDS (1)..(1035): transl_table=11
atgcaaaccctgaccattatccgccccgacgatatgcacctgcacctgcgcgacggcgacgcgctcaaagccgttgccccttataccgcccgccaaatggggcgcgccgtcattatgcccaacctcaaaccgcctgtcgtcagtgtagccgacgcgcttgcctacaaagcgcgcattatggcggcgttgcccgaaggtagcgcgtttgagccgttgatgacgctttatttgactgataacgccacgcccgaacttgtacgcgaagccaaagccgccggcatcgtcgccttcaaactctaccctgccggcgcgaccaccaattccgattccggcgtaaccgacctgttcaagctcatccccgtgttggaagaaatggcgaaacagggcattttgttcctcgttcacggcgaagtaaccgaccccgaaatcgacatcttcgaccgcgaagccgcctttatcgggcgcgtgatgaaacccgttttggcgcaagtgccgaatcttaaagtcgtgttcgaacacatcaccaccgccgaagccgcccgcctggttttggaagcaggcgacaacgtagccgccaccgttaccccgcaacacctcctgctcaaccgcaacgacctcttggtcggcggcgtgcgcccccatcatttctgcctgcccgtactcaaacgcgaaacccaccgtcaggcattggtcgccgccgttaccggcgagaaggcgcataaattcttcctcggcaccgactccgcgccgcacgccaaatccgccaaagaaaacgcctgcggctgcgccggtatgttcagtgcgatgaccgctatcgagctttacgccgaagtatttgaaaaagcaggcgcgttggacaaactcgaagccttcgcctcaaaaaacggcgcaaggttctacggcattcctgaaaataccgacacgatcaccctcgtcaaacaaagccaaaccgttcccgcaagtgttccctacggcgacggcgaacttgtcccgatgcgcgcgggcggcgaaatcggctggacggtgcagtattga

SEQ ID NO: 27843 - protein, 344 aa, Neisseria meningitidis
MQTLTIIRPDDMHLHLRDGDALKAVAPYTARQMGRAVIMPNLKPPVVSVADALAYKARIMAALPEGSAFEPLMTLYLTDNATPELVREAKAAGIVAFKLYPAGATTNSDSGVTDLFKLIPVLEEMAKQGILFLVHGEVTDPEIDIFDREAAFIGRVMKPVLAQVPNLKVVFEHITTAEAARLVLEAGDNVAATVTPQHLLLNRNDLLVGGVRPHHFCLPVLKRETHRQALVAAVTGEKAHKFFLGTDSAPHAKSAKENACGCAGMFSAMTAIELYAEVFEKAGALDKLEAFASKNGARFYGIPENTDTITLVKQSQTVPASVPYGDGELVPMRAGGEIGWTVQY

SEQ ID NO: 27844 - DNA, 1047 bp, Pseudomonas aeruginosa
  CDS (1)..(1047): transl_table=11
atgtccgaccgtctcaccctcctgcgccccgacgactggcacattcacctgcgtgacggtgccgcgctggccaataccgtcggcgacgccgcccgcaccttcggccgcgccatcgtcatgccgaacctggtgccgccggtgcgcaacgccgccgaagccgacgcctaccggcagcgcatcctcgccgcccgtcccgccgccagccgcttcgagccgctgatggtgctgtacctcaccgaccgcaccagcaccgaggaaatccgtaccgccaaggccagcggcttcgtgcatgccgccaagctctatccggcaggcgccaccaccaactcggactctggcgtgacccgcatcgacaatatcttcgaagcgctcgaggcgatggccgaggtcggcatgccgctgctggtgcatggcgaggtgacccgcgccgaggtcgacgtattcgatcgcgagaagcagttcatcgacgagcacctgcgccgggtggtcgagcgcttcccgaccctgaaagtggtcttcgagcacatcaccaccggcgacgccgcccagttcgtccgggaagccccggccaacgtcggcgcgaccattaccgcccatcacctgctgtacaaccgcaaccacatgctggtcggcggtatccgtccgcacttctattgcctgccgatcctcaagcgcaacacccaccaggaagccctgctggacgccgcggtgagcggcaatccgaaattcttcctcggcaccgactcggcgccgcacgcccgccacgccaaggaagccgcctgcggttgcgccggctgctacagcgcctacgccgccatcgagctgtatgccgaggccttcgaacagcgcaatgcgctggacaagctggaaggcttcgccagcctgcacggcccggacttctatggcctgccgcgcaacaccgaccggatcaccctggtccgcgaggaatggcaggcgcccgccagcctccccttcggcgacttcgacgtggtgccgctgcgcgccggagagacactccgctggaaactgctggaggccggggcatga

SEQ ID NO: 27845 - protein, 348 aa, Pseudomonas aeruginosa
MSDRLTLLRPDDWHIHLRDGAALANTVGDAARTFGRAIVMPNLVPPVRNAAEADAYRQRILAARPAASRFEPLMVLYLTDRTSTEEIRTAKASGFVHAAKLYPAGATTNSDSGVTRIDNIFEALEAMAEVGMPLLVHGEVTRAEVDVFDREKQFIDEHLRRVVERFPTLKVVFEHITTGDAAQFVREAPANVGATITAHHLLYNRNHMLVGGIRPHFYCLPILKRNTHQEALLDAAVSGNPKFFLGTDSAPHARHAKEAACGCAGCYSAYAAIELYAEAFEQRNALDKLEGFASLHGPDFYGLPRNTDRITLVREEWQAPASLPFGDFDVVPLRAGETLRWKLLEAGA

SEQ ID NO: 27846 - DNA, 1047 bp, Pseudomonas putida
  CDS (1)..(1047): transl_table=11
atgtccgatcgcctgaccctcctgcgccccgacgactggcacatccatctgcgcgatggtgccgtcctgccccacaccgttggcgacgtggcgcgtaccttcgcccgtgccatcatcatgcccaacctcgtgccgcccgtgcgcaatgtcaccgaggccggcgcctaccgtgagcgcattctggctgcccgcccggccggcagccgcttcgagccgctgatggtgctgtacctcaccgaccgcaccagccccgaggacgtccgcgcggccaaggccagcggtttcgtgtacgccgccaagttgtacccggccggcgccaccaccaactccgattccggcgtgaccagcatcgacaacatcttcccggccatagaggcactggcggaagtgggcatgccgctgctggtgcatggcgaagtgacccgcagcgagatcgacgtgttcgaccgcgagaagcgcttcatcgacgagcacatgcgccgtgtggtcgagcgcttcccgacgctgaaagtggtgttcgaacacatcaccaccagtgatgccgcgcagttcgtcaccgaggccccggccaacgtcggtgcgaccatcaccgcccagcacctgctgtacaaccgcaaccacatgctggtcggcggcattcgcccgcacttctactgcctgccgatcctcaagcgcaacacccaccaggtggccttgctggacgcagccaccagcggcaatccgaagttcttcctcggcaccgactcggcacctcatgcccgtcacgccaaggaagcagcctgcggttgcgcgggttgctacaccgcctatgcggccatcgagatgtacgccgaagcgttcgagcagcgtaacgcgctggacaagctggaaggcttcgccagcctgcacggcccggccttctatggcctgccggcgaacaccgacaccattaccctggtccgcgaagaatggaccgctccggaaagcctgccatttggcgagcaaaccgtagtcccgctgcgcgctggcgaaaaactgcgctggcgcctgctggagaaaaacgcgtga

SEQ ID NO: 27847 - protein, 348 aa, Pseudomonas putida
MSDRLTLLRPDDWHIHLRDGAVLPHTVGDVARTFARAIIMPNLVPPVRNVTEAGAYRERILAARPAGSRFEPLMVLYLTDRTSPEDVRAAKASGFVYAAKLYPAGATTNSDSGVTSIDNIFPAIEALAEVGMPLLVHGEVTRSEIDVFDREKRFIDEHMRRVVERFPTLKVVFEHITTSDAAQFVTEAPANVGATITAQHLLYNRNHMLVGGIRPHFYCLPILKRNTHQVALLDAATSGNPKFFLGTDSAPHARHAKEAACGCAGCYTAYAAIEMYAEAFEQRNALDKLEGFASLHGPAFYGLPANTDTITLVREEWTAPESLPFGEQTVVPLRAGEKLRWRLLEKNA

SEQ ID NO: 27848 - DNA, 1035 bp, Ralstonia solanacearum
  CDS (1)..(1035): transl_table=11
atgatcgataccctgaccatcgtccgccctgatgactggcacctgcacctgcgcgatggcgacgcgctcgccgacgtggtgggcgacaccgcgcgccagttcggccgggcgatcatcatgcccaacctcaagccgccggtgacgaccaccgcgcaggctcgcgcctaccgcgagcgcatcctcgccgcgctgccggcgggcacgcgcttcgagccgctgatgacgctgtacctgaccgacaacaccacgcccgaggaagtccgcgccgcccgtgccagcggcttcgtgcatggcgtcaagctctacccggccggtgccaccaccaacagcgatgccggcgtgaccgacctgcgccgctgcgccaagacgctcgaagcgatgcaggacgtcggcatgcccctgctggtgcacggcgaagtgaccgaccccacggtcgacatcttcgatcgcgaagccgtcttcatcgacaccgtgatgcagccgctgcgccgcgattttccggcgctcaaggtcgtgttcgagcacatcaccaccaagcacgccgccgaatacgtgcgcgacgcgcaggggccggtcggcgcgaccatcacggcacaccacctgctgtacaaccgcaacgcgctgttcgttggcggcattcgtccgcactactactgcctgccggtgctcaagcgcgaaacgcaccgcctggcgctggtggcggcggccacctcgggccatccgcgcttcttcctcggcaccgacagcgcaccgcatgccaagggcctgaaggagcacgcctgcggctgcgccggctgctataccgcgctgcacgcgatggagctgtacgccgaagcctttgaagacgccaacgcgctcgacaagctcgaaggcttcgccagcctgcacggcccggacttctacggcctgccgcgcaacgccggcacgctcacgctcacgcgctcgcagtggcagctgcccgccgaggtgcccttcggcgagcagatgctggtgccgctgcgcggcggcgagatgctgcgctggaagacggtctga

SEQ ID NO: 27849 - protein, 344 aa, Ralstonia solanacearum
MIDTLTIVRPDDWHLHLRDGDALADVVGDTARQFGRAIIMPNLKPPVTTTAQARAYRERILAALPAGTRFEPLMTLYLTDNTTPEEVRAARASGFVHGVKLYPAGATTNSDAGVTDLRRCAKTLEAMQDVGMPLLVHGEVTDPTVDIFDREAVFIDTVMQPLRRDFPALKVVFEHITTKHAAEYVRDAQGPVGATITAHHLLYNRNALFVGGIRPHYYCLPVLKRETHRLALVAAATSGHPRFFLGTDSAPHAKGLKEHACGCAGCYTALHAMELYAEAFEDANALDKLEGFASLHGPDFYGLPRNAGTLTLTRSQWQLPAEVPFGEQMLVPLRGGEMLRWKTV

SEQ ID NO: 27850 - DNA, 1044 bp, Rhizobium meliloti
  CDS (1)..(1044): transl_table=11
atgcaagacctcgttatacgccgccctgatgattggcatcttcaccttcgcgacggcggcatgctgcgcggcgtgattgccgatacgagccgccatttcgcgcgcgccatcatcatgcccaatctggtgccgcccgtggtgacctccgccgatgcggccgcctatcgcgagcgcatcctcgccgccattcccgcaggggaccggttcgagccgctgatgacgctgtatcttaccgagggcaccgatccgggagatgtggaagccgggttcaggagcggcctcgtcaaggccgtcaagctctatccggccggcgccacaaccaattcgtcgagcggcgtccgcgatatcgacaaggccatgccggtgctcgagcgcatggccgagatcggcctgccgctctgcgtccatggcgaggtgacgacggccgaggtcgacattttcgaccgcgaggcggtcttcatcgaaaccgttctcgacccgctccgccggcgcctgcccgatctcaggatcaccatggagcatgtgacgacgaaggacggcgtcgactacatccgcgagcatgcggccaatcttgccggctccatcaccacccatcacctgatcatcaaccgcaacgccatcctcgtcggcggcatcaagccgcattactactgtctgccggtggcgaagcgcgaggcgcatcggctggcgcttcgccaggcggcgatctcgggcgacgtccgcttcttcctgggcacggactctgccccgcatgtcgacccgcttaaggagtgcgcctgcggctgtgccggcatctacacatcgatcaacaccttgagctgcctcgctcacgtcttcgaggaagagggtgcgctcgaccggctggaagccttcacctcgctgaacggccccgcctggtacggcctgccggcaaacgaggagacgatcacgctgcgcaagcaggaggagccggtcagctaccctgccaggatcgagaccgaagccggtccggtcacggttttcgacccgatgttcccgctccactgggccgtgacacaggcctga

SEQ ID NO: 27851 - protein, 347 aa, Rhizobium meliloti
MQDLVIRRPDDWHLHLRDGGMLRGVIADTSRHFARAIIMPNLVPPVVTSADAAAYRERILAAIPAGDRFEPLMTLYLTEGTDPGDVEAGFRSGLVKAVKLYPAGATTNSSSGVRDIDKAMPVLERMAEIGLPLCVHGEVTTAEVDIFDREAVFIETVLDPLRRRLPDLRITMEHVTTKDGVDYIREHAANLAGSITTHHLIINRNAILVGGIKPHYYCLPVAKREAHRLALRQAAISGDVRFFLGTDSAPHVDPLKECACGCAGIYTSINTLSCLAHVFEEEGALDRLEAFTSLNGPAWYGLPANEETITLRKQEEPVSYPARIETEAGPVTVFDPMFPLHWAVTQA

SEQ ID NO: 27852 - DNA, 1047 bp, Salmonella typhimurium; identical to SEQ ID NO: 27648
  CDS (1)..(1047)

SEQ ID NO: 27853 - protein, 348 aa, Salmonella typhimurium; identical to SEQ ID NO: 27649

SEQ ID NO: 27854 - DNA, 1014 bp, Schizosaccharomyces pombe
  CDS (1)..(1014)
atgagtttgaaaatacctggtttggctgatatgcatgttcatctaaggcaagataatatgttaaaagctgtagttccaacggtcgcagagggtggagtctctgttgcgtatgtaatgcctaatttaatccccccaattactaccgttgatgcctgtttgcaatataaaaaagaaattgagcagcttgactccaagaccacctatttaatgagtctttatctctcaccggaaactacacctgaggttatttacgaagctgcaaaaaagggaattcgaggagttaaatcatatccgaaaggagctactaccaattctgaaagtggtgttgaaagctacgaacccttttatcctacctttgctgcaatgcaagaaacaggtatgattctgaacattcacggagaagttcccccctctaaggataacaccgtttttacggctgagcccaagtttcttcctactttactagaccttcaccaaagatttccaaaactcaagattgtgcttgaacattgcaccactgccgacgctgttgaggcagtaaaagcatgcggtgaaagtgttgcgggtactataactgcccatcatctttatctcacacaaaaagattggcaggatgatccttattgtttctgcaagccggtagccaaaaccgaacgagaccgacgtgctcttattgaagctgctaccagtaaaaatcccaagtttttctttgggagtgattctgcacctcatcctaggtcttctaaactgaagacgccaccggcagctggtgtttttacccaacctttcgctgcttcgtacttagctgaagtgtttgataaagagggtcgtttagatgctttgaaggattttgcatgtatttttggtaggaaattttattgtattcctttagacttcaaagagtctaatatcgtcttaaaaaaggagtcgtttcgcgtacctgaaagtgttgccaatgatttggttccttttcatccaaacgaagttcttcaatggcactgttcatgggagtaa

SEQ ID NO: 27855 - protein, 337 aa, Schizosaccharomyces pombe
MSLKIPGLADMHVHLRQDNMLKAVVPTVAEGGVSVAYVMPNLIPPITTVDACLQYKKEIEQLDSKTTYLMSLYLSPETTPEVIYEAAKKGIRGVKSYPKGATTNSESGVESYEPFYPTFAAMQETGMILNIHGEVPPSKDNTVFTAEPKFLPTLLDLHQRFPKLKIVLEHCTTADAVEAVKACGESVAGTITAHHLYLTQKDWQDDPYCFCKPVAKTERDRRALIEAATSKNPKFFFGSDSAPHPRSSKLKTPPAAGVFTQPFAASYLAEVFDKEGRLDALKDFACIFGRKFYCIPLDFKESNIVLKKESFRVPESVANDLVPFHPNEVLQWHCSWE

SEQ ID NO: 27856 - DNA, 1278 bp, Staphylococcus epidermidis
  CDS (1)..(1278): transl_table=11
atgaaattaattaaaaacggaaaaatcttaaaaaacggtatcctaaaagacacagaaattttaatcgacggtaaacgtattaaacaaattagtagtaaaattaatgcttcatcttcaaatattgaagttattgatgcaaaaggaaatttaattgctcccggttttgtagatgttcatgtgcacctacgtgaaccaggtggtgaacataaagaaacaattgaaagtggtacaaaagccgctgcaagaggtggttttactacagtatgtcctatgcctaatacaagacctgtaccagatacagttgaacatgttagagaattaagacaacgaatttctgaaacagcacaagttagggtgttgccttatgctgctattactaagagacaagcaggtactgaacttgttgattttgaaaaattagcactagaaggtgtgtttgcatttactgacgatggtgtgggagttcaaacagcaagtatgatgtatgctgctatgaagcaagctgtaaaagttaaaaaaccgattgtcgcacactgtgaagataatagcttaatctatggtggtgcaatgcataaaggtaaacgtagtgaagaattaggcatacctggtattccaaatattgctgaatctgtacaaattgctagagatgtattattggctgaagcaactggttgtcactatcatgtgtgtcatgtttcaactaaggaaagtgttcgagtaatcagagacgctaaaaaagctggtatccatgtaacagcagaagttacaccacatcatttattattaactgaaaatgatgttcctggcgatgattcaaactacaaaatgaatccaccattaagaagtaatgaagatagagaagcacttttagaaggcttattagatggaacaattgattgtattgcaacggatcatgcacctcacgctaaagaagaaaaagcacaacctatgacaaaagcacctttcggcatcgtaggtagtgaaacagcattcccattactttatacacactttgtaagacgaggtaattggtcactgcaacaattagttgattatttcactattaaaccagctactattttcaacttaaattatggaaaattacacaaagatagttacgctgatttaacaataattgatcttaatactgaaaaagaaatcaaaagtgaagatttcttatctaaagctgataacactccatttattggtgaaaaagtttatggaaatccaacactaacaatgcttaaaggtgaagtagtattcgaggaggaaaagtag

SEQ ID NO: 27857 - protein, 425 aa, Staphylococcus epidermidis
MKLIKNGKILKNGILKDTEILIDGKRIKQISSKINASSSNIEVIDAKGNLIAPGFVDVHVHLREPGGEHKETIESGTKAAARGGFTTVCPMPNTRPVPDTVEHVRELRQRISETAQVRVLPYAAITKRQAGTELVDFEKLALEGVFAFTDDGVGVQTASMMYAAMKQAVKVKKPIVAHCEDNSLIYGGAMHKGKRSEELGIPGIPNIAESVQIARDVLLAEATGCHYHVCHVSTKESVRVIRDAKKAGIHVTAEVTPHHLLLTENDVPGDDSNYKMNPPLRSNEDREALLEGLLDGTIDCIATDHAPHAKEEKAQPMTKAPFGIVGSETAFPLLYTHFVRRGNWSLQQLVDYFTIKPATIFNLNYGKLHKDSYADLTIIDLNTEKEIKSEDFLSKADNTPFIGEKVYGNPTLTMLKGEVVFEEEK

SEQ ID NO: 27858 - DNA, 1278 bp, Staphylococcus epidermidis
  CDS (1)..(1278): transl_table=11
atgaaattaattaaaaacggaaaaatcttaaaaaacggtatcctaaaagacacagaaatattaatcgatggtaaacgtattaaacaaattagtagtaagataaatgcttcatcttcaaatattgaagttattgatgcaaaaggaaatttaattgctccaggttttgtagatgttcatgtgcacctacgtgaaccaggtggtgaacataaagaaacaattgaaagtggtacaaaagccgctgcaagaggtggttttactacagtatgtcctatgcctaatacaagacctgtaccagatacagttgaacatgttagagaattaagacaacgaatttctgaaacagcacaagttagggtgttgccttatgctgctattactaagagacaagcaggtactgaacttgttgattttgaaaaattagcactagaaggtgtgtttgcatttacagatgatggtgtgggtgttcaaacagcaagtatgatgtatgctgctatgaagcaagctgcaaaagttaaaaaaccgattgtcgcacactgcgaagataatagcttaatctatggtggtgcaatgcataaaggtaaacgtagtgaagaattaggcatacctggtattccaaatattgctgaatctgtacaaattgctagagatgtactattagctgaagcaactggttgtcactatcatgtgtgccatgtttcaactaaggaaagtgttcgagtaatcagagacgctaaaaaagctggtatccatgtaacagcagaagttacaccacatcatttattattaactgaaaatgatgttcctggtgatgattcaaactacaaaatgaatccaccattaagaagtaatgaagatagagaagcacttttagaaggcttattagatggaacaattgattgtattgcaacggatcatgcacctcacgctaaagaagaaaaagaacaacctatgacaaaagcacctttcggtatcgtaggtagtgaaacagcattcccattactttatacacactttgtaagacgaggtaattggtcactgcaacaattagttgattatttcactattaaaccagctactattttcaacttaaattatggaaaattacacaaagatagttacgctgatttaacaattattgatctaaatactgaaaaagaaatcaaaagtgaagatttcttatctaaagctgataacactccatttattggtgaaaaagtttatggaaatccaacactaacaatgcttaaaggtgaagtagtattcgaggaggaaaagtag

SEQ ID NO: 27859 - protein, 425 aa, Staphylococcus epidermidis
MKLIKNGKILKNGILKDTEILIDGKRIKQISSKINASSSNIEVIDAKGNLIAPGFVDVHVHLREPGGEHKETIESGTKAAARGGFTTVCPMPNTRPVPDTVEHVRELRQRISETAQVRVLPYAAITKRQAGTELVDFEKLALEGVFAFTDDGVGVQTASMMYAAMKQAAKVKKPIVAHCEDNSLIYGGAMHKGKRSEELGIPGIPNIAESVQIARDVLLAEATGCHYHVCHVSTKESVRVIRDAKKAGIHVTAEVTPHHLLLTENDVPGDDSNYKMNPPLRSNEDREALLEGLLDGTIDCIATDHAPHAKEEKEQPMTKAPFGIVGSETAFPLLYTHFVRRGNWSLQQLVDYFTIKPATIFNLNYGKLHKDSYADLTIIDLNTEKEIKSEDFLSKADNTPFIGEKVYGNPTLTMLKGEVVFEEEK

SEQ ID NO: 27860 - DNA, 1029 bp, Synechocystis sp
  CDS (1)..(1029): transl_table=11
atggaaaagcttaccatcactcgacccgacgactggcacctgcatctacgggatggagcggccctgaaagcagttctaccccacactgtccgtcaatttgctagggcgatcgtcatgcccaatttgaagcctccggtgcgttccgtggctgatgccgccgcctatcgggaaaggattctcgccgccatacctgcgggaggccagtttgaaccgctgatgaccctttatctaacggataatactaatcccgaagaaattattgcggccaaagcatcccagtttgttaaagcagtaaaatactatcccgctggagccaccaccaattctgactttggcgtcacggatatccatcgatgtgatgcagtgttggcagccatggaacaggtggacttgcccctattactccacggcgaagtaacggacagtaatattgatattttcgaccgagaaaaagtattcattgaaaaatatttaattcctctcagggaaaaatttccccggctgcgggtagtgctggaacatattactacttcagatgcagtgcaatttgttttatctgctaataatattgcagccactattacgccccaacatttactatttagtcgcaacgctttattcaaaggtggcatttgtccccacttttattgcctgccaattctgaagcgggaagaacatcgtttatcattgctacacgcggccacatctggtaatcctaaattttttctcggcactgatagtgctccccacgctcgcaatagtaaagagagtttatgtggctgtgctggttgctattctgccctccatgctatggagctatatgccgaagcttttgaaagtgttaattccctggataagctagaagcctttgctagcttttatggcccagatttttaccaattgccccgtaatacagcacaaattacgttgatgaaaaacccttggcgtattcctgctgaattacctttccctgaatctggattggtgcctctgcgggccggcgaggaaataacttggcaaatggtgtga

SEQ ID NO: 27861 - protein, 342 aa, Synechocystis sp
MEKLTITRPDDWHLHLRDGAALKAVLPHTVRQFARAIVMPNLKPPVRSVADAAAYRERILAAIPAGGQFEPLMTLYLTDNTNPEEIIAAKASQFVKAVKYYPAGATTNSDFGVTDIHRCDAVLAAMEQVDLPLLLHGEVTDSNIDIFDREKVFIEKYLIPLREKFPRLRVVLEHITTSDAVQFVLSANNIAATITPQHLLFSRNALFKGGICPHFYCLPILKREEHRLSLLHAATSGNPKFFLGTDSAPHARNSKESLCGCAGCYSALHAMELYAEAFESVNSLDKLEAFASFYGPDFYQLPRNTAQITLMKNPWRIPAELPFPESGLVPLRAGEEITWQMV

SEQ ID NO: 27862 - DNA, 1176 bp, Ustilago maydis
  CDS (1)..(1176)
atgtcagtacaagagatcacgattccggcgccgggcgattttcacgtgcatctgcgacaaggaaagatgtcggagctcgtcaccccgcacgtcgccgagggaggcgtctcgcttgcatatgttatgcccaaccttgtacctccgatcacatcgacacagcaagcgatggaatacctcgagcgcttggcagccgttgctcctcagaccatgttcgtcggcacgctgtatctatcgcctgacttgacgccggcggaaattgccgaaggcgctcagaatggtgtccgaggtgtcaagagctatcctcgtggagtcactacgaactcggacagcggcatcgaggattacgagacctactatcccatctttgaagagatgcagaaacacgatatggtcctcaacttgcacggcgagcttccttcgaatgcagacgcgggcatctgcgtgttgaatgccgaggaaaagtttttgacgcacctgttcaagatgcacggtgaatttcccaagctcaagatcgtgctggagcatgcgaccaccaggaaggcggtcgaagccgtcaagcagtgtggcgacacagtgggctgtaccatcacaccgcatcacctcgagctcatcgtggatgactgggcgggcaagccactcaacttttgcaagccagtcgccaaatatcccgatgaccgacaggcgttgcgcgacgtcattcgccaaggtcatcctcgcttcttcctcggctcagattcggcgccgcacccgttggctaacaagtatccttccgcagtcacacatggcgctcctggaaccaaagcttctgactctggcagcgatcacctcgaagctactggtgtcgtctcgtgtggttgcgcagcggccgtctacacctcgtcgatccttgtgcctctttggccgacgctgctcgaagcgtttggcgcgttggatcaacttgccaactacgtcagcatcaacgggcgcaacttctatggctacaacgatgatcagcatgccaaacacggcagcataaagcttcgcaaggtgcgcagccgatcatgcatttcgccagcagctgcaaccgttcctgcagtctatgtccatcccgagttccgagaggtgccagattcagatcgatccaaggtgcaagtagtgcctttctgggctgtctcggctgggatcgtccgttcgtga

SEQ ID NO: 27863 - protein, 391 aa, Ustilago maydis
MSVQEITIPAPGDFHVHLRQGKMSELVTPHVAEGGVSLAYVMPNLVPPITSTQQAMEYLERLAAVAPQTMFVGTLYLSPDLTPAEIAEGAQNGVRGVKSYPRGVTTNSDSGIEDYETYYPIFEEMQKHDMVLNLHGELPSNADAGICVLNAEEKFLTHLFKMHGEFPKLKIVLEHATTRKAVEAVKQCGDTVGCTITPHHLELIVDDWAGKPLNFCKPVAKYPDDRQALRDVIRQGHPRFFLGSDSAPHPLANKYPSAVTHGAPGTKASDSGSDHLEATGVVSCGCAAAVYTSSILVPLWPTLLEAFGALDQLANYVSINGRNFYGYNDDQHAKHGSIKLRKVRSRSCISPAAATVPAVYVHPEFREVPDSDRSKVQVVPFWAVSAGIVRS

SEQ ID NO: 27864 - DNA, 1029 bp, Vibrio cholerae
  CDS (1)..(1029)
atgacaacactgacgattacacgcccagacgactggcacgttcaccttcgcgatggcgatgtactggccgatactgtacgcgacatcagccgttataacggccgcgcgctgatcatgcctaacacggttccccctgtaaccaccactgagatggccttagcctatcgtgagcgcattatggccgctcagccacaagcgcactttgaacctttgatggcgctttacctcaccgataacacatcacctgaggaaattcgcaaagccaaagcgtcaggcaaagtcgttgcagctaagctttacccagccggtgcgaccaccaactcggattcaggcgtcacttcagccaaaaacatttacccagttttgcaagcgatgcaggaagtcggtatgttgctgttggtgcacggtgaagtcaccacgcacgaagtcgacatttttgaccgtgaaaagaccttcctagacaccgtgcttgcgccgatcgtgaatgatttcccgcaactgaaaattgtgcttgaacacatcaccaccgccgatgcagtgacctttgtgcaacaagcaggcgataacgttgcggcaacgattaccgcgcaccatttgctgtttaaccgtaaccacatgctggttggcggtattcgcccacatttctactgtttgccaatcctaaagcgtgcgactcaccaacacgcgttagtggcagcggcaacctctggcagcaagaaattcttcctaggtacggactctgccccgcacgccaaaggccgcaaagaagccgcttgtggctgcgcaggttcttacacagcccatgcagctcttgagttgtatgccgaagtgtttgaaaaagaaggtaagctagaaaatctggaagcgttcgctagctttaatggccctgatttctacggcctacctcgcaatcaagagaccgtcacgctcaccaagcaagcctggccagtcgcagaaagcatgccgtttggcagcgatatcgtggtgccaatccgcgccggtgaaaatatcgagtggacagtgaagtaa

SEQ ID NO: 27865 - protein, 342 aa, Vibrio cholerae
MTTLTITRPDDWHVHLRDGDVLADTVRDISRYNGRALIMPNTVPPVTTTEMALAYRERIMAAQPQAHFEPLMALYLTDNTSPEEIRKAKASGKVVAAKLYPAGATTNSDSGVTSAKNIYPVLQAMQEVGMLLLVHGEVTTHEVDIFDREKTFLDTVLAPIVNDFPQLKIVLEHITTADAVTFVQQAGDNVAATITAHHLLFNRNHMLVGGIRPHFYCLPILKRATHQHALVAAATSGSKKFFLGTDSAPHAKGRKEAACGCAGSYTAHAALELYAEVFEKEGKLENLEAFASFNGPDFYGLPRNQETVTLTKQAWPVAESMPFGSDIVVPIRAGENIEWTVK

SEQ ID NO: 27866 - DNA, 1029 bp, Vibrio parahaemolyticus
  CDS (1)..(1029): transl_table=11
atgacaacactgactattactcgtcctgacgactggcacgttcacttacgcgatggtgaagttctaaaagacaccgttcgcgatatcagccgctacaatggccgcgcgctgatcatgccaaacaccgtcccacctgttaccaataccgaaatggcacttgcctaccgcgatcgaattctgaaagagcagcacggcgaacaattcgaacctctgatggcgctttacctaaccgataacaccacgccagaagagattcgcgcagcaaaagcaaccggtaaaattgtcgcagcgaagctttacccagcaggtgcaacgactaactcagattctggtgtgaccgatgcgaagaacatttaccacgttctcgaagccatggaagaagtcgggatgttgcttttggttcatggagaagtcacccatcaccacgttgatatcttcgaccgagaaaaagaattccttgataccgtcctcgctcctatcgttaatgacttcccaaatcttaaaatcgttctagaacatatcaccaccgccgacgcagcacagttcgttaacaacgcgtctgataatgttgccgctaccattactgctcaccaccttcttttcaaccgcaatcacatgcttgtcggtggcattaagcctcatttctactgcttaccgattctaaagcgcaacacccaccagcaagcgctaatcgaagccgcaaccagtggtagcaagaagtttttcctaggtaccgactctgctccgcatgcaaaaggcgcgaaagaatcggcttgcggttgtgccggttcttacactgcgcacgcggcgttagaactttatgcagaagtctttgaaaaagaaggcaagctggaaaacttggaagcgttcgcaagcttcaacggtcctgatttttacggtattgcgcgcaacgcagatacggtgacgctagaaaaatcggcttgggatgttcctgaatctatgccatttggcaacgacatcgttgtgcctattcgtgcaaacgaacaaattgagtggaaagtgaagtaa

SEQ ID NO: 27867 - protein, 342 aa, Vibrio parahaemolyticus
MTTLTITRPDDWHVHLRDGEVLKDTVRDISRYNGRALIMPNTVPPVTNTEMALAYRDRILKEQHGEQFEPLMALYLTDNTTPEEIRAAKATGKIVAAKLYPAGATTNSDSGVTDAKNIYHVLEAMEEVGMLLLVHGEVTHHHVDIFDREKEFLDTVLAPIVNDFPNLKIVLEHITTADAAQFVNNASDNVAATITAHHLLFNRNHMLVGGIKPHFYCLPILKRNTHQQALIEAATSGSKKFFLGTDSAPHAKGAKESACGCAGSYTAHAALELYAEVFEKEGKLENLEAFASFNGPDFYGIARNADTVTLEKSAWDVPESMPFGNDIVVPIRANEQIEWKVK

SEQ ID NO: 27868 - DNA, 1029 bp, Vibrio vulnificus
  CDS (1)..(1029)
atgacaacacttactattactcgtcctgatgattggcacgtacacttgcgcgatggcgaagttttggcagataccgttcgtgatatcagccgttacaatggccgcgcactcatcatgccaaacactgtcccacccgtcaccacgtctgaaatggcgcttgcctatcgcgatcgcattcaagcacataaccaaacagaacaattttctccgcttatgtcgctgtatttgaccgacaacacaactgcggatgaagtacgcaaagccaaggccagcggtgctgtggtcgcagcaaaactgtatccagcaggcgcgacaactaactccgattctggcgtgacggatgtaaagaaaatttatccagtccttcaagccatgcaagaagtgggcatgttgctactggtacacggcgaagtgaccacacacgatgtggacatctttgatcgcgaaaaaacctttttagacaatgtgttggcgccgattgttcaagacttccctgatttgaaaattgtcctcgaacacatcaccacctcagatgcggttgtgtttgtgaaaaatgccaatgaaaacgttgccgcaaccattaccgctcatcacctgctgtacaaccgcaatcacatgttagtaggcggcatcaagccccacttctactgcttgccaattcttaaacgcaacacccaccagcttgcgttgatctctgctgcgacgagtggcaacaagaagttctttttgggtacggactctgcgccacacgccaaaggcgcaaaagaatccgcttgtggttgcgcgggctcttacacggctcacgccgctgtggaactgtatgcagaagtgtttgagcaagcgggcaagttggaaaatctcgaagcgtttgccagccataacggcccggatttttacggtcttcctcgtaaccaagatacgatcactttggtcaaagacgcatggcctgttcctgcttcaatgccatttggtggtgatattgtggtgccaattcgcgctggtgaaaacatggagtggaaggttaagtaa

SEQ ID NO: 27869 - protein, 342 aa, Vibrio vulnificus
MTTLTITRPDDWHVHLRDGEVLADTVRDISRYNGRALIMPNTVPPVTTSEMALAYRDRIQAHNQTEQFSPLMSLYLTDNTTADEVRKAKASGAVVAAKLYPAGATTNSDSGVTDVKKIYPVLQAMQEVGMLLLVHGEVTTHDVDIFDREKTFLDNVLAPIVQDFPDLKIVLEHITTSDAVVFVKNANENVAATITAHHLLYNRNHMLVGGIKPHFYCLPILKRNTHQLALISAATSGNKKFFLGTDSAPHAKGAKESACGCAGSYTAHAAVELYAEVFEQAGKLENLEAFASHNGPDFYGLPRNQDTITLVKDAWPVPASMPFGGDIVVPIRAGENMEWKVK

SEQ ID NO: 27870 - DNA, 1029 bp, Vibrio vulnificus
  CDS (1)..(1029)
atgacaacacttactattactcgtcctgatgattggcacgtacacttacgcgatggcgaagttttggcagataccgttcgcgatatcagccgttacaatggccgcgcactcatcatgccaaacactgtcccacccgtcaccacgactgaaatggcgcttgcctatcgcgatcgcattcaagcacataaccaaacagaacaattttctccgcttatgtcgctatatttgaccgacaacacaactgcggatgaagtacgcaaagccaaggccagcggtgctgtagtcgcagcaaaactgtacccagcaggcgcgacaactaactccgattctggcgtgacggatgtaaagaaaatttatccagtccttcaagcgatgcaagaagtaggcatgttgctactggtacacggcgaagtgaccacacacgatgtggacatctttgatcgcgaaaaaacctttttagacaatgtgttggcgccgattgttcaagacttccctgatttgaaaattgtcctcgaacacatcaccacctcagatgcggttgtgtttgtgaaaaatgccaatgaaaacgttgccgcaaccattaccgctcatcacctgctgtacaaccgcaatcacatgttagtaggcggcatcaagccccacttctactgcttgccaattcttaaacgcaacacccaccagcttgcgttgatctctgctgcgacgagtggcaacaagaagttctttttgggtacggactctgcgccacacgccaaaggcgcaaaagaatccgcttgtggttgcgcgggctcttacacggctcacgccgctttggaactgtatgcagaagtgtttgagcaagcgggcaagttggaaaatctcgaagcgtttgccagccataacggtccagatttttacggtttgcctcgcaatcaagacacaattacgttggtaaaagacgcatggcctgttcctgcttcaatgccatttggtggtgatattgtggtgccaattcgcgctggtgaaaacatggagtggaaggttaagtaa

SEQ ID NO: 27871 - protein, 342 aa, Vibrio vulnificus
MTTLTITRPDDWHVHLRDGEVLADTVRDISRYNGRALIMPNTVPPVTTTEMALAYRDRIQAHNQTEQFSPLMSLYLTDNTTADEVRKAKASGAVVAAKLYPAGATTNSDSGVTDVKKIYPVLQAMQEVGMLLLVHGEVTTHDVDIFDREKTFLDNVLAPIVQDFPDLKIVLEHITTSDAVVFVKNANENVAATITAHHLLYNRNHMLVGGIKPHFYCLPILKRNTHQLALISAATSGNKKFFLGTDSAPHAKGAKESACGCAGSYTAHAALELYAEVFEQAGKLENLEAFASHNGPDFYGLPRNQDTITLVKDAWPVPASMPFGGDIVVPIRAGENMEWKVK

SEQ ID NO: 27872 - DNA, 1095 bp, Saccharomyces cerevisiae
  CDS (1)..(1095)
atggtacaagaaatcgatttaggtttgacatgtgatatgcatgttcatgtaagagagggtgcgatgtgtgaactagtcacccccaagattagagatggtggggtttcaattgcttacatcatgccaaatttacaacctccaattaccacactagatagagtgattgaatacaaaaagacactgcagaaactagctcctaaaactaccttcttaatgagtttttatctttcaaaagacttaactccagatttaattcatgaagctgcccaacaacatgccattcgtggagtaaagtgttatccagcgggagtaacaacaaattcggctgctggggtggatccaaatgacttcagcgcattttacccaattttcaaggctatgcaagaagagaacctggtattaaatttgcatggggaaaaaccttctgtccatgatggagacaaagaacctattcatgtattgaatgcagaggaagcctttttgccagccttgaaaaaattgcataatgatttcccaaacctgaaaataattctggaacactgcactagcgagtcggcaataaagacaatcgaggatataaataagaacgtgaagaaagccactgacgtaaaggttgctgccacattaacggctcatcacttatttttaacaattgatgattgggccggaaatccggtaaatttttgcaaacctgttgcgaaacttccaaatgacaaaaaggctctagtcaaagctgctgtatcagggaaaccatattttttctttggatctgattcagcacctcatcctgtacaaaataaggccaattacgagggtgtttgcgcaggagtttactcacaatcttttgcgatcccttatatcgcccaagtttttgaagagcaaaatgccttggagaacttaaagggctttgtttccgacttcggaatttccttttatgaggttaaagatagcgaagtggcttcttcagataaggcaatattattcaaaaaagaacaagttatccctcaggttatcagcgatggcaaagacataagcatcatcccatttaaagcaggtgataaactaagttggtcggtgagatgggaacctcgttaa

SEQ ID NO: 27873 - protein, 364 aa, Saccharomyces cerevisiae
MVQEIDLGLTCDMHVHVREGAMCELVTPKIRDGGVSIAYIMPNLQPPITTLDRVIEYKKTLQKLAPKTTFLMSFYLSKDLTPDLIHEAAQQHAIRGVKCYPAGVTTNSAAGVDPNDFSAFYPIFKAMQEENLVLNLHGEKPSVHDGDKEPIHVLNAEEAFLPALKKLHNDFPNLKIILEHCTSESAIKTIEDINKNVKKATDVKVAATLTAHHLFLTIDDWAGNPVNFCKPVAKLPNDKKALVKAAVSGKPYFFFGSDSAPHPVQNKANYEGVCAGVYSQSFAIPYIAQVFEEQNALENLKGFVSDFGISFYEVKDSEVASSDKAILFKKEQVIPQVISDGKDISIIPFKAGDKLSWSVRWEPR

SEQ ID NO: 27874 - DNA, 1047 bp, Yersinia pestis
  CDS (1)..(1047): transl_table=11
atgactgcacaaccccaaaccctaaaaattcgccgcccggatgactggcacattcatctacgtgatgatgaaatgctcagtaccgtgttgccctatacctccgaagtattcgcccgcgctattgttatgccaaatctagcccagccaattacaacggttgccagtgctattgcttatcgggagcgtattttagcagcggttcctgcgggccataaattcaccccgttgatgacgtgttacctgactaatagccttgatgctaaagagttgaccacgggttttgagcaaggcgtttttaccgcggccaaactgtatccggccaatgccaccaccaactccactcacggtgtatctgacatcccggcaatttacccgttgtttgaacaaatgcaaaagataggcatgcccctgcttattcacggtgaggtaacagatgcggccgttgacatctttgatcgtgaagcccgttttattgaccaaattttagagcccattcgccaaaagtttcccgaactaaaaattgtctttgagcatatcacgaccaaagatgcggcagattatgtgctggcaggcaatcgtttccttggggcaaccgtcacgccacaacacttgatgtttaaccgcaatcacatgctggtaggcggtattcgcccccacttgttctgcctgccaatattgaagcgcagcacccatcagcaagcattgcgcgcagccgtcgccagtggttctgatcgcttcttccttgggaccgattcagctccccatgccaaacatcgtaaagagtcatcttgcggctgtgcgggtgtattcaacgccccagcggcattgcctgcttatgcttccgtgtttgaggaactgaatgcattgcaacatctggaagcgttttgcgccttaaatggcccacgattttatggcttgcctgttaatgatgacgttgttgaattggttcgcactccattcctgcagccagaagagatcccattaggcaatgaatcggttattcctttccttgcgggtcaaacgcttaattggtcagtgaaacgctaa

SEQ ID NO: 27875 - protein, 348 aa, Yersinia pestis
MTAQPQTLKIRRPDDWHIHLRDDEMLSTVLPYTSEVFARAIVMPNLAQPITTVASAIAYRERILAAVPAGHKFTPLMTCYLTNSLDAKELTTGFEQGVFTAAKLYPANATTNSTHGVSDIPAIYPLFEQMQKIGMPLLIHGEVTDAAVDIFDREARFIDQILEPIRQKFPELKIVFEHITTKDAADYVLAGNRFLGATVTPQHLMFNRNHMLVGGIRPHLFCLPILKRSTHQQALRAAVASGSDRFFLGTDSAPHAKHRKESSCGCAGVFNAPAALPAYASVFEELNALQHLEAFCALNGPRFYGLPVNDDVVELVRTPFLQPEEIPLGNESVIPFLAGQTLNWSVKR

SEQ ID NO: 27876 - DNA, 23 bp, Artificial sequence
  Primer sequence
atgactgcaccatcccaggtatt

SEQ ID NO: 27877 - DNA, 24 bp, Artificial sequence
  Primer sequence
ttattgtttaacggaccagcgtac

SEQ ID NO: 27878 - protein, 478 aa, Artificial sequence
  Consensus
  Variant (2)..(2): Xaa in position 2 is any amino acid
  Variant (4)..(5): Xaa in position 4 to 5 is any amino acid
  Variant (7)..(7): Xaa in position 7 is any amino acid
  Variant (9)..(9): Xaa in position 9 is any amino acid
  Variant (15)..(16): Xaa in position 15 to 16 is any or no amino acid
  Variant (19)..(20): Xaa in position 19 to 20 is any amino acid
  Variant (22)..(33): Xaa in position 22 to 33 is any amino acid
  Variant (34)..(41): Xaa in position 34 to 41 is any or no amino acid
  Variant (49)..(49): Xaa in position 49 is any or no amino acid
  Variant (51)..(51): Xaa in position 51 is any or no amino acid
  Variant (54)..(58): Xaa in position 54 to 58 is any amino acid
  Variant (59)..(61): Xaa in position 59 to 61 is any or no amino acid
  Variant (64)..(64): Xaa in position 64 is any amino acid
  Variant (65)..(65): Xaa in position 65 is any or no amino acid
  Variant (67)..(84): Xaa in position 67 to 84 is any or no amino acid
  Variant (88)..(89): Xaa in position 88 to 89 is any or no amino acid
  Variant (92)..(92): Xaa in position 92 is any amino acid
  Variant (93)..(98): Xaa in position 93 to 98 is any or no amino acid
  Variant (101)..(102): Xaa in position 101 to 102 is any amino acid
  Variant (104)..(106): Xaa in position 104 to 106 is any amino acid
  Variant (107)..(108): Xaa in position 107 to 108 is any or no amino acid
  Variant (110)..(110): Xaa in position 110 is any amino acid
  Variant (112)..(112): Xaa in position 112 is any amino acid
  Variant (118)..(119): Xaa in position 118 to 119 is any amino acid
  Variant (124)..(125): Xaa in position 124 to 125 is any amino acid
  Variant (128)..(139): Xaa in position 128 to 139 is any amino acid
  Variant (140)..(145): Xaa in position 140 to 145 is any or no amino acid
  Variant (147)..(150): Xaa in position 147 to 150 is any amino acid
  Variant (152)..(152): Xaa in position 152 is any amino acid
  Variant (154)..(154): Xaa in position 154 is any amino acid
  Variant (159)..(161): Xaa in position 159 to 161 is any amino acid
  Variant (162)..(181): Xaa in position 162 to 181 is any or no amino acid
  Variant (183)..(185): Xaa in position 183 to 185 is any amino acid
  Variant (187)..(188): Xaa in position 187 to 188 is any amino acid
  Variant (191)..(192): Xaa in position 191 to 192 is any amino acid
  Variant (193)..(203): Xaa in position 193 to 203 is any or no amino acid
  Variant (205)..(206): Xaa in position 205 to 206 is any amino acid
  Variant (208)..(211): Xaa in position 208 to 211 is any amino acid
  Variant (213)..(213): Xaa in position 213 is any amino acid
  Variant (218)..(218): Xaa in position 218 is any amino acid
  Variant (224)..(225): Xaa in position 224 to 225 is any amino acid
  Variant (227)..(229): Xaa in position 227 to 229 is any amino acid
  Variant (231)..(235): Xaa in position 231 to 235 is any amino acid
  Variant (236)..(244): Xaa in position 236 to 244 is any or no amino acid
  Variant (246)..(246): Xaa in position 246 is any or no amino acid
  Variant (251)..(252): Xaa in position 251 to 252 is any amino acid
  Variant (255)..(260): Xaa in position 255 to 260 is any amino acid
  Variant (262)..(264): Xaa in position 262 to 264 is any amino acid
  Variant (265)..(265): Xaa in position 265 is any or no amino acid
  Variant (267)..(288): Xaa in position 267 to 288 is any or no amino acid
  Variant (290)..(290): Xaa in position 290 is any or no amino acid
  Variant (293)..(293): Xaa in position 293 is any amino acid
  Variant (296)..(296): Xaa in position 296 is any amino acid
  Variant (298)..(303): Xaa in position 298 to 303 is any amino acid
  Variant (306)..(310): Xaa in position 306 to 310 is any amino acid
  Variant (311)..(311): Xaa in position 311 is any or no amino acid
  Variant (314)..(315): Xaa in position 314 to 315 is any amino acid
  Variant (317)..(317): Xaa in position 317 is any amino acid
  Variant (319)..(319): Xaa in position 319 is any amino acid
  Variant (327)..(330): Xaa in position 327 to 330 is any amino acid
  Variant (332)..(364): Xaa in position 332 to 364 is any or no amino acid
  Variant (367)..(367): Xaa in position 367 is any amino acid
  Variant (369)..(369): Xaa in position 369 is any amino acid
  Variant (371)..(373): Xaa in position 371 to 373 is any amino acid
  Variant (375)..(375): Xaa in position 375 is any amino acid
  Variant (376)..(390): Xaa in position 376 to 390 is any or no amino acid
  Variant (393)..(395): Xaa in position 393 to 395 is any amino acid
  Variant (396)..(396): Xaa in position 396 is any or no amino acid
  Variant (398)..(399): Xaa in position 398 to 399 is any amino acid
  Variant (401)..(402): Xaa in position 401 to 402 is any amino acid
  Variant (404)..(404): Xaa in position 404 is any amino acid
  Variant (406)..(407): Xaa in position 406 to 407 is any amino acid
  Variant (409)..(410): Xaa in position 409 to 410 is any amino acid
  Variant (413)..(413): Xaa in position 413 is any amino acid
  Variant (415)..(420): Xaa in position 415 to 420 is any amino acid
  Variant (421)..(426): Xaa in position 421 to 426 is any or no amino acid
  Variant (428)..(428): Xaa in position 428 is any amino acid
  Variant (430)..(430): Xaa in position 430 is any amino acid
  Variant (432)..(441): Xaa in position 432 to 441 is any amino acid
  Variant (442)..(466): Xaa in position 442 to 466 is any or no amino acid
  Variant (468)..(468): Xaa in position 468 is any amino acid
  Variant (470)..(472): Xaa in position 470 to 472 is any amino acid
  Variant (474)..(475): Xaa in position 474 to 475 is any amino acid
  Variant (477)..(477): Xaa in position 477 is any amino acid
LXIXXPXDXHLHLRXXDGXXLXXXXXXXXXXXXXXXXXXXXAIVMPNLXPXPVXXXXXXXXYRXXIXXXXXXXXXXXXXXXXXXPLMXXYLXXXXXXXEIXXAXXXXXVXAXKLYPAXXTTNSXXGVXXXXXXXXXXXXXXXXXXMXXXXMXLXVHGEXXXXXXXXXXXXXXXXXXXXXXXIXXXEXXFIXXXXXXXXXXXXXLXXLXXXXPXLKIVXEHITTXXAXXXVXXXXXXXXXXXXXXVXATITXXHLXXXXXXMXXXXIXXXXXXXXXXXXXXXXXXXXXXHXYCXPIXKXXXXXXALXXXXXXSGXXKXFXGTDSAPHXXXXKXXXXXXXXXXXXXXXXXXXXXXXXXXXXXXXXXAGXYXAXXXLXXXXXXXXXXXXXXXXFEXXXXLXXLXXFXSXXGXXFYXLXXXXXXXXXXXXIXLXKXXXXXXXXXXXXXXXXXXXXXXXXXXXXXXXXXXXVXPXXXGXXLXW

SEQ ID NO: 27879 - protein, 17 aa, Artificial sequence
  Consensus
  Variant (2)..(3): Xaa in position 2 to 3 is any amino acid
  Variant (4)..(5): Xaa in position 4 to 5 is any or no amino acid
  Variant (7)..(7): Xaa in position 7 is any amino acid
  Variant (8)..(9): Xaa in position 8 to 9 is any or no amino acid
  Variant (11)..(11): Xaa in position 11 is any amino acid
  Variant (13)..(13): Xaa in position 13 is any amino acid
  Variant (15)..(15): Xaa in position 15 is Phe, Leu or Val
  Variant (17)..(17): Xaa in position 17 is Asp, Glu or Gln
LXXXXPXXXDXHXHXRX

SEQ ID NO: 27880 - protein, 25 aa, Artificial sequence
  Consensus
  Variant (2)..(3): Xaa in position 2 to 3 is any amino acid
  Variant (4)..(4): Xaa in position 4 is any or no amino acid
  Variant (8)..(10): Xaa in position 8 to 10 is any amino acid
  Variant (12)..(12): Xaa in position 12 is Ala, Ile, Leu or Val
  Variant (13)..(20): Xaa in position 13 to 20 is any amino acid
  Variant (22)..(24): Xaa in position 22 to 24 is any amino acid
  Variant (25)..(25): Xaa in position 25 is Ile or Leu
AXXXMPNXXXPXXXXXXXXXYXXXX

SEQ ID NO: 27881 - protein, 8 aa, Artificial sequence
  Consensus
  Variant (2)..(2): Xaa in position 2 is any or no amino acid
  Variant (4)..(5): Xaa in position 4 to 5 is any or no amino acid
LXLXXHGE

SEQ ID NO: 27882 - protein, 41 aa, Artificial sequence
  Consensus
  Variant (2)..(2): Xaa in position 2 is any amino acid
  Variant (4)..(4): Xaa in position 4 is Ile, Leu or Val
  Variant (5)..(5): Xaa in position 5 is Ala, Leu, Pro or Val
  Variant (7)..(9): Xaa in position 7 to 9 is any amino acid
  Variant (10)..(10): Xaa in position 10 is Asp or His
  Variant (11)..(12): Xaa in position 11 to 12 is any amino acid
  Variant (13)..(13): Xaa in position 13 is Ala, Ser, Thr or Val
  Variant (15)..(17): Xaa in position 15 to 17 is any amino acid
  Variant (18)..(18): Xaa in position 18 is Ala, Ile or Val
  Variant (19)..(19): Xaa in position 19 is any amino acid
  Variant (20)..(20): Xaa in position 20 is Ala, Asp, Glu, Gly, Asn, Gln, Ser or Thr
  Variant (22)..(24): Xaa in position 22 to 24 is any amino acid
  Variant (25)..(26): Xaa in position 25 to 26 is any or no amino acid
  Variant (28)..(29): Xaa in position 28 to 29 is any or no amino acid
  Variant (31)..(31): Xaa in position 31 is Ser or Thr
  Variant (33)..(33): Xaa in position 33 is Ser or Thr
  Variant (37)..(40): Xaa in position 37 to 40 is any amino acid
CXPXXKXXXXXXXLXXXXXXGXXXXXFXXGXDXAPHXXXXK

SEQ ID NO: 27883 - DNA, 1251 bp, Escherichia coli
  CDS (1)..(1251)
atggaaagtaaagtagttgttccggcacaaggcaagaagatcaccctgcaaaacggcaaactcaacgttcctgaaaatccgattatcccttacattgaaggtgatggaatcggtgtagatgtaaccccagccatgctgaaagtggtcgacgctgcagtcgagaaagcctataaaggcgagcgtaaaatctcctggatggaaatttacaccggtgaaaaatccacacaggtttatggtcaggacgtctggctgcctgctgaaactcttgatctgattcgtgaatatcgcgttgccattaaaggtccgctgaccactccggttggtggcggtattcgctctctgaacgttgccctgcgccaggaactggatctctacatctgcctgcgtccggtacgttactatcagggcactccaagcccggttaaacaccctgaactgaccgatatggttatcttccgtgaaaactcggaagacatttatgcgggtatcgaatggaaagcagactctgccgacgccgagaaagtgattaaattcctgcgtgaagagatgggggtgaagaaaattcgcttcccggaacattgtggtatcggtattaagccgtgttcggaagaaggcaccaaacgtctggttcgtgcagcgatcgaatacgcaattgctaacgatcgtgactctgtgactctggtgcacaaaggcaacatcatgaagttcaccgaaggagcgtttaaagactggggctaccagctggcgcgtgaagagtttggcggtgaactgatcgacggtggcccgtggctgaaagttaaaaacccgaacactggcaaagagatcgtcattaaagacgtgattgctgatgcattcctgcaacagatcctgctgcgtccggctgaatatgatgttatcgcctgtatgaacctgaacggtgactacatttctgacgccctggcagcgcaggttggcggtatcggtatcgcccctggtgcaaacatcggtgacgaatgcgccctgtttgaagccacccacggtactgcgccgaaatatgccggtcaggacaaagtaaatcctggctctattattctctccgctgagatgatgctgcgccacatgggttggaccgaagcggctgacttaattgttaaaggtatggaaggcgcaatcaacgcgaaaaccgtaacctatgacttcgagcgtctgatggatggcgctaaactgctgaaatgttcagagtttggtgacgcgatcatcgaaaacatgtaa

SEQ ID NO: 27884 - protein, 416 aa, Escherichia coli
MESKVVVPAQGKKITLQNGKLNVPENPIIPYIEGDGIGVDVTPAMLKVVDAAVEKAYKGERKISWMEIYTGEKSTQVYGQDVWLPAETLDLIREYRVAIKGPLTTPVGGGIRSLNVALRQELDLYICLRPVRYYQGTPSPVKHPELTDMVIFRENSEDIYAGIEWKADSADAEKVIKFLREEMGVKKIRFPEHCGIGIKPCSEEGTKRLVRAAIEYAIANDRDSVTLVHKGNIMKFTEGAFKDWGYQLAREEFGGELIDGGPWLKVKNPNTGKEIVIKDVIADAFLQQILLRPAEYDVIACMNLNGDYISDALAAQVGGIGIAPGANIGDECALFEATHGTAPKYAGQDKVNPGSIILSAEMMLRHMGWTEAADLIVKGMEGAINAKTVTYDFERLMDGAKLLKCSEFGDAIIENM

SEQ ID NO: 27885 - DNA, 1218 bp, Thermoplasma volcanium GSS1
  CDS (1)..(1218): transl_table=11
atggcatacatacaggtgagagaggatggaacacttctcgttcctgacaaagttacgataggctacattgagggggatggtataggccccgatatcacgaagaccacgataaatgtaataaatgctgcccttgaggtcgcctatggtggaaagagatcaatagaatggcacaaagtccttgcgggcgatgaagcatatgataagactggaaataggcttccagattcttcgctcgaagagcttaagaagtgcgttgtttcaataaagggcccgctcactactcctattggcgaagggtttaggagcctcaacgtcacgctcaggcagtaccttgatctgtatgctaacataaggcccgtccgttacttccctggagtcccatctcctgttctccatccggaatacatgaacatggttgtcttcagagaaaatactgaggatctttacgctggcattgagtggaggtatgattctgaggacgcggaaaaggttagggcttttctatcatctacattcaacataaatcttacgccagatacgggcataggcataaagcctataagcaagttcaagtcgacaaggttggtgcggaaggcgatacagtatgcaatagctaacggcaggaagagtgttacgctagtccacaaaggaaatataatgaagtacacagagggtgcattcagggactggggctatgaggtagccagaactgagtttggggattataccgtaacggaagccgaatacctgaaagaccctgagaaatacgcaaacaagatagtgataaaggacagaatcacggacaatatgttccagcaggtccttacaagaacccaggaatacgacgttattgctactccgaacttgaacggagactacctttccgatgccctcgctgcccaagttggtggaataggccttgccccaggagcaaacataggcgaccactatgctgtattcgaagcggttcacggtacagctccaaagtatgccggcctagacgttgcaaatccaacttccttgatactgtcagcggagatgatgctcgatcacataggctggaaggaagcatccaagatactcgatgatgctataatgcagacgtaccgcgaccaaaaattgacacaggatatagccaggctccttaatctaaaggccctaaaatgctctgagtttggcgaagaaataatcaacaggatgaagcctataaaaagctaa

SEQ ID NO: 27886 - protein, 405 aa, Thermoplasma volcanium GSS1
MAYIQVREDGTLLVPDKVTIGYIEGDGIGPDITKTTINVINAALEVAYGGKRSIEWHKVLAGDEAYDKTGNRLPDSSLEELKKCVVSIKGPLTTPIGEGFRSLNVTLRQYLDLYANIRPVRYFPGVPSPVLHPEYMNMVVFRENTEDLYAGIEWRYDSEDAEKVRAFLSSTFNINLTPDTGIGIKPISKFKSTRLVRKAIQYAIANGRKSVTLVHKGNIMKYTEGAFRDWGYEVARTEFGDYTVTEAEYLKDPEKYANKIVIKDRITDNMFQQVLTRTQEYDVIATPNLNGDYLSDALAAQVGGIGLAPGANIGDHYAVFEAVHGTAPKYAGLDVANPTSLILSAEMMLDHIGWKEASKILDDAIMQTYRDQKLTQDIARLLNLKALKCSEFGEEIINRMKPIKS

SEQ ID NO: 27887 - DNA, 1308 bp, Aeropyrum pernix K1
  CDS (1)..(1308): transl_table=11
gtgcaggttatggcttcccctccttgcactaccgaggagctctcgcctcccccagggggttctctagtcgagtatagcggcggcagccttagggtccccgataaccctgttgttgcgttcataaggggcgacggcgtgggccccgaggttgttgagagcgctctaaaggttgtggacgccgccgtgaagaaggtttacggggggtctaggaggatagtctggtgggagctcctggctggccatctcgcccgggagaagtgcggcgagctgcttcccaaggcgacgctggagggtataaggcttgccagggtcgcgctcaaggggcccttggagactcccgtgggcacgggctatagaagccttaacgtggctatacgccaggcgctagacctctacgctaacataaggcctgtgaggtactacggccagccagccccccacaagtatgcggatagggttgacatggtgatattcagggagaacacggaggacgtgtacgccggtatagagtggcctcatgacagccctgaggctgcgaggattaggaggttcctcgcagaggagttcgggatatcgataagggaggacgccggcataggggttaagccgataagcaggtttgcaactaggcgtcttatggagagggctctcgagtgggccctcaggaacggcaacacagtagtcactataatgcacaagggcaacataatgaagtacactgaaggggctttcatgaggtgggcctatgaggtggcgctggagaagtttagggagcatgtggttacggagcaggaggtccaggagaagtatgggggggttaggcccgagggcaagatacttgttaacgacaggatagccgacaacatgctgcagcagattataaccaggccctgggactaccaggtcatagtggcgccaaacctcaacggcgactacataagcgacgctgcgagcgccctcgtcggaggcataggcatggccgcggggatgaacatgggcgacggcatagctgtcgccgagccggttcacggcaccgcgccgaagtacgcgggcaaggacctgataaacccctccgcggagatactgagcgcctcactactgataggagagttcatgggctggagggaggtgaagagcatagtagagtatgccattaggaaggcggtgcagagcaagaaggtcacccaggacctggccaggcacatgcccggggtccagccgctgaggacaagcgagtacacggagacgctgatagcatacatagacgaggcggacctgaacgaggtcctcgccgggaagaggggctag

SEQ ID NO: 27888 - protein, 435 aa, Aeropyrum pernix K1
MQVMASPPCTTEELSPPPGGSLVEYSGGSLRVPDNPVVAFIRGDGVGPEVVESALKVVDAAVKKVYGGSRRIVWWELLAGHLAREKCGELLPKATLEGIRLARVALKGPLETPVGTGYRSLNVAIRQALDLYANIRPVRYYGQPAPHKYADRVDMVIFRENTEDVYAGIEWPHDSPEAARIRRFLAEEFGISIREDAGIGVKPISRFATRRLMERALEWALRNGNTVVTIMHKGNIMKYTEGAFMRWAYEVALEKFREHVVTEQEVQEKYGGVRPEGKILVNDRIADNMLQQIITRPWDYQVIVAPNLNGDYISDAASALVGGIGMAAGMNMGDGIAVAEPVHGTAPKYAGKDLINPSAEILSASLLIGEFMGWREVKSIVEYAIRKAVQSKKVTQDLARHMPGVQPLRTSEYTETLIAYIDEADLNEVLAGKRG

SEQ ID NO: 27889 - DNA, 1104 bp, Arabidopsis thaliana
  CDS (1)..(1104)
atgtctcgccaatcgttttctctactgaagaatcttcgtagcatcgcttccggttccaaaatccagacccgatccgtgacttacatgcccagacccggtgacggaaaaccaagaccagtgacgttaatccccggagacggagttggtccgttggtaacaaacgcggttcaacaagtgatggaagcgatgcacgctccggtttacttcgaaccgttcgaagttcatggagatatgaagagtttacctgaaggattgttggaatcgattaagaagaacaaagtttgtttgaaaggtggtcttaagactcccgtcggtggtggtgtgagctctctcaatgttaatctgagaaaggagcttgatctctttgcttctttggtcaactgtttcaatttgcctggtttagcttctcgtcatgagaatgttgatattgttgtgattagagagaacactgaaggtgaatatgcaggtcttgaacatgaagttgttcctggtgttgttgagagccttaaggtgattacaaagttctgttcagagcgtattgcaaagtatgcgtttgagtatgcctacttgaacaacaggaagaaagttacagcagtgcacaaggctaatatcatgaaattggctgatggtttgttcttggagtcttgtcaagaggttgctaagaagtatccaagcattgcttacaatgaaatcattgttgataattgttgtatgcaacttgtggctagaccagagcaattcgatgtcatggtgacgcctaatctctatggtaatctagtggcaaacactgctgctggtattgctggaggtactggagtcatgcctggaggaaatgttggggcggagtatgcggtctttgagcaaggtgcatcagcgggaaacgtggggaaggatacaacggaagagcaaaagaatgcaaaccctgtggctttgttgctgtcatcagccatgatgcttagacaccttcagttcccttcttttgctgacaggcttgaaaccgctgtgaagcgtgttatcgctgaagggaattgtcggactgaagatcttggtggaaacagtaccactcaagaggtcgttgacgctgtcattgcaaatttggattga

SEQ ID NO: 27890 - protein, 367 aa, Arabidopsis thaliana
MSRQSFSLLKNLRSIASGSKIQTRSVTYMPRPGDGKPRPVTLIPGDGVGPLVTNAVQQVMEAMHAPVYFEPFEVHGDMKSLPEGLLESIKKNKVCLKGGLKTPVGGGVSSLNVNLRKELDLFASLVNCFNLPGLASRHENVDIVVIRENTEGEYAGLEHEVVPGVVESLKVITKFCSERIAKYAFEYAYLNNRKKVTAVHKANIMKLADGLFLESCQEVAKKYPSIAYNEIIVDNCCMQLVARPEQFDVMVTPNLYGNLVANTAAGIAGGTGVMPGGNVGAEYAVFEQGASAGNVGKDTTEEQKNANPVALLLSSAMMLRHLQFPSFADRLETAVKRVIAEGNCRTEDLGGNSTTQEVVDAVIANLD

SEQ ID NO: 27891 - DNA, 1104 bp, Arabidopsis thaliana
  CDS (1)..(1104)
atgtctcgcagatcgctaactctcctcaagaatctagctagaaacgcgaatggatcaggtattcaaacccgatccgtgacttacatgcccagacccggtgacggagcaccacgcgcagtgacgctgatccccggagatggaatcggtcctctggtgacgaacgccgtggaacaggtgatggaagcgatgcacgctccgatcttcttcgagaagtacgatgttcacggagaaatgagccgtgtgccgccggaagtgatggagtcgataaggaagaataaggtttgtttgaaaggtgggcttaagactcctgttggtggtggtgttagttctcttaacgtccagcttaggaaagagcttgacctctttgcttctctggtcaactgttttaatttgcctggtttacctactcgccatgagaatgttgacatcgttgtcatcagagagaacactgaaggtgagtacgcggggcttgagcacgaggttgttcctggtgtcgttgagagtctgaaggtgatcacgaagttctgttcggagcgtattgcaaagtatgcttttgagtatgcctacctgaacaacaggaagaaagttacagcggtgcataaggctaacatcatgaaacttgcggatggtttgttcttggaatcttgtcgcgaggttgcgaaaaagtatcccagcatcacctacaatgaaatcattgttgataactgctgtatgcaacttgtagccaaaccagagcaattcgatgtcatggtaacgccgaatctctatgggaatttagttgcaaacactgctgctggtattgctggaggcacaggagtcatgcctggaggaaatgttggggctgaccatgcggtattcgagcaaggtgcatcagcaggaaatgttgggaaagacaagatagtattggaaaacaaagcaaacccagtggcattgcttctctcatcagcgatgatgcttagacaccttcagtttccttcatttgctgaccggctcgaaacagcagtgaagaaagtcatcgctgaaggaaagtgccggacgaaagatcttggtggaacaagcacgactcaagaggtcgttgatgcggtcattgcaaaactagactga

SEQ ID NO: 27892 - protein, 367 aa, Arabidopsis thaliana
MSRRSLTLLKNLARNANGSGIQTRSVTYMPRPGDGAPRAVTLIPGDGIGPLVTNAVEQVMEAMHAPIFFEKYDVHGEMSRVPPEVMESIRKNKVCLKGGLKTPVGGGVSSLNVQLRKELDLFASLVNCFNLPGLPTRHENVDIVVIRENTEGEYAGLEHEVVPGVVESLKVITKFCSERIAKYAFEYAYLNNRKKVTAVHKANIMKLADGLFLESCREVAKKYPSITYNEIIVDNCCMQLVAKPEQFDVMVTPNLYGNLVANTAAGIAGGTGVMPGGNVGADHAVFEQGASAGNVGKDKIVLENKANPVALLLSSAMMLRHLQFPSFADRLETAVKKVIAEGKCRTKDLGGTSTTQEVVDAVIAKLD

SEQ ID NO: 27893 - DNA, 1107 bp, Arabidopsis thaliana
  CDS (1)..(1107)
atggcgagaagatccgtttcgatatttaatcgccttctggcgaatcctccttctccattcacatcactgtcccgatccatcacctacatgcctagacccggagatggagctccacgaaccgtaaccctaattcccggcgacggaatcggacctttggtgaccggtgcggtggaacaggtcatggaagcgatgcacgcgccagtgcatttcgagagatacgaggttctaggaaacatgagaaaagtccctgaagaagtgatcgagtctgtgaagagaaacaaggtttgtctcaaaggtggattagcgactcctgttggtgggggtgtcagttctttgaatatgcaattgaggaaagaactcgatatcttcgcttctcttgtcaattgcatcaatgtccctggattagtgacgcgacacgaaaatgttgatatcgttgtgataagagagaacactgaaggagagtactcaggtctcgagcatgaggttgttcctggtgttgtcgagagccttaaggtgataacaaagttttgttctgagagaatagcgagatatgcatttgagtatgcgtatctaaacaataggaagaaagtgactgctgttcataaagctaacattatgaagcttgcggatgggctcttccttgaatcttgtagagaggttgctaaacattattcggggattacttacaatgaaataatcgtagacaattgctgtatgcagcttgtcgccaagcctgagcaatttgatgtcatggtgacacctaatttgtatggtaaccttatagcaaacacggcggctggaatagccggtggcactggagtgatgccaggagggaatgttggtgcagaacatgcgatattcgagcaaggtgcatcagcagggaatgtggggaatgataagatggtggaacagaagaaagcgaatccggtggctctacttctctcgtcggctatgatgctaagacatctccggtttcctacttttgctgatcggcttgaaacagcagtgaaacaagtgattaaagaaggaaaatatagaacaaaagatcttggaggagattgtaccacgcaggaagttgttgatgctgtcatagcagctcttgagtga

SEQ ID NO: 27894 - protein, 368 aa, Arabidopsis thaliana
MARRSVSIFNRLLANPPSPFTSLSRSITYMPRPGDGAPRTVTLIPGDGIGPLVTGAVEQVMEAMHAPVHFERYEVLGNMRKVPEEVIESVKRNKVCLKGGLATPVGGGVSSLNMQLRKELDIFASLVNCINVPGLVTRHENVDIVVIRENTEGEYSGLEHEVVPGVVESLKVITKFCSERIARYAFEYAYLNNRKKVTAVHKANIMKLADGLFLESCREVAKHYSGITYNEIIVDNCCMQLVAKPEQFDVMVTPNLYGNLIANTAAGIAGGTGVMPGGNVGAEHAIFEQGASAGNVGNDKMVEQKKANPVALLLSSAMMLRHLRFPTFADRLETAVKQVIKEGKYRTKDLGGDCTTQEVVDAVIAALE

SEQ ID NO: 27895 - DNA, 1269 bp, Bacillus halodurans C-125
  CDS (1)..(1269): transl_table=11
atggcaaacggagagaaaattaaagtaagtgcaggggtacttgaagtaccaaacaatccaattatcccatttatcgaaggggatggaacaggtcctgatatttgggcggctgcacatcgggtgatcgatgcggctgtggagaaagcgtacaacggagaaaagaaaattgtctggaaagaaattttggcaggtgagaaagcgttcaatcaaacaggccaatggcttccagatgagacgcttgaaacgattcgcgagtatacaatcgctattaaaggaccgcttacgactccagttggaggaggcattcgttctttaaacgtggcattacgtcaagaacttgacctttatgtttgcttgcgtccagttcgttattttaatggggttccatctccagtcaaacgtccggaagatacgaacatggttattttccgtgaaaactctgaagacatctacgcaggaattgagtatcaggctggaacggatgaagtgaagaaagtaatcaacttcttacgggaagaaatgggcgttaagaaaattcgcttccctgaaacttctggtattggcatcaaacctgtttctcaagagggaacagaccgactagttcgtgcagcgattcaatatgcgattacagaaggacgtaagagcgtcaccctcgttcataaaggtaacattatgaagtttacagaaggtgcgttcaaaaactgggggtacgaagtagctgagcgcgagttcggtgataaagtattcacgtgggcacagtacgacaaaattgttgaagaacaaggaaaggaagctgcggataaagcgcaagcagaggcggaagcagcaggcaaaattatcgtcaaagattcaattgccgatattttcctccaacaaatcttaacgcgtccgaaagagttcgatgttgtagcaacaatgaacttgaacggtgactatatttccgatgcactcgcggctcaagtaggcggtatcggaattgcgccgggagcgaacattaactatgatacaggtcacgccatttttgaggccactcacggaacggcgccgaaatatgcaggcctcgacaaagtgaatccatcttctgtacttttatctggtgagctcatgcttcgtcaccttggttggaatgaagctgctgacttaattatggcttccatggacaaaacgatcgaaagtaaagttgtcacatacgactttgctcgattaatggatggggctacagaagtcaaatgctcagagtttgcgaatgaattgatcaagaacctttaa

SEQ ID NO: 27896 - protein, 422 aa, Bacillus halodurans C-125
MANGEKIKVSAGVLEVPNNPIIPFIEGDGTGPDIWAAAHRVIDAAVEKAYNGEKKIVWKEILAGEKAFNQTGQWLPDETLETIREYTIAIKGPLTTPVGGGIRSLNVALRQELDLYVCLRPVRYFNGVPSPVKRPEDTNMVIFRENSEDIYAGIEYQAGTDEVKKVINFLREEMGVKKIRFPETSGIGIKPVSQEGTDRLVRAAIQYAITEGRKSVTLVHKGNIMKFTEGAFKNWGYEVAEREFGDKVFTWAQYDKIVEEQGKEAADKAQAEAEAAGKIIVKDSIADIFLQQILTRPKEFDVVATMNLNGDYISDALAAQVGGIGIAPGANINYDTGHAIFEATHGTAPKYAGLDKVNPSSVLLSGELMLRHLGWNEAADLIMASMDKTIESKVVTYDFARLMDGATEVKCSEFANELIKNL

SEQ ID NO: 27897 - DNA, 1248 bp, Pasteurella multocida subsp. multocida str. Pm70
  CDS (1)..(1248): transl_table=11
atgcaatcaaaagtcgttatcccacaaggtgaaaaaattcaactggatgccaaaggagcattaattgtacctgatcatccgattatcccctttattgaaggcgatggtattggtgtggacgttaccccagcgatgcgcacagtcattgatgcggcggtggaaaaagcctatggcggcaaacgtaaaatttcgtggatggaaatctatgctggtggtaaagcaaatgaggtctatggcgaaaatacttggttacccgatgaaaccatgacatttatccgtgattatcatgtggcgattaaaggaccgcttatgacgccagtcggtggtggcattcgttccttgaatgtggcgatgcgtcaaggcttagatttatataattgcttacgtccaattcgttattatgacggtaccccaagccctgttaaacaccctgaattagtggacatggtgattttccgtgaaaactccgaagatatttatgcgggtgtagaatgggtggcaggatctgccgaagcgaataaagtgattgcgtttttacaacaagaaatgggggtgaaaaaaatccgtttcactgaagattgtggcattggtatcaaaccagtttctaaacaaggtacccaacgtttagttcgtgcggcactacaatatgtgattgataatgatcgcaaatcgcttactctagtgcacaaagggaacatcatgaaatttaccgaaggcgcattcaaagagtggggttatcaagtggcgcaagagtttggtgccgaattgctagatggtggtccatggatgacattaaaaaatccaaaaacaggcagagaaatcatcattaaagacagcattgccgatgcgtttttacaagaaattctgcttcacccaacggagtacgatgtgattgcgactttaaacctaaacggggattacatttctgacgcgttagccgcgcaggtggggggtatcgggatttcaccgggggcgaatattggtgcagaagctgcgatttttgaagccacccacggtaccgcaccaaaaattgcaggacaagataaaggtaatccgggttctttgattttgagtggtgaaatgatgttacgtcacttaggttggttagaagcggcggatttagtggtcaaagcagtatcgaaaaccattgctgataaaaccgttacctttgattttgctgaaatgttagaaggcgctaaattacgttccacttcggaatttgctcaagatattgtagcgaatatgtaa

SEQ ID NO: 27898 - protein, 415 aa, Pasteurella multocida subsp. multocida str. Pm70
MQSKVVIPQGEKIQLDAKGALIVPDHPIIPFIEGDGIGVDVTPAMRTVIDAAVEKAYGGKRKISWMEIYAGGKANEVYGENTWLPDETMTFIRDYHVAIKGPLMTPVGGGIRSLNVAMRQGLDLYNCLRPIRYYDGTPSPVKHPELVDMVIFRENSEDIYAGVEWVAGSAEANKVIAFLQQEMGVKKIRFTEDCGIGIKPVSKQGTQRLVRAALQYVIDNDRKSLTLVHKGNIMKFTEGAFKEWGYQVAQEFGAELLDGGPWMTLKNPKTGREIIIKDSIADAFLQEILLHPTEYDVIATLNLNGDYISDALAAQVGGIGISPGANIGAEAAIFEATHGTAPKIAGQDKGNPGSLILSGEMMLRHLGWLEAADLVVKAVSKTIADKTVTFDFAEMLEGAKLRSTSEFAQDIVANM

SEQ ID NO: 27899 - DNA, 1257 bp, Pseudomonas aeruginosa PAO1
  CDS (1)..(1257): transl_table=11
atgggataccaaaagatccaggtgccggcgaccggtgacaaaatcactgtgaatgccgacatgtccttgagcgtaccgaagaacccgatcatcccgttcatcgagggtgatggcatcggcgtcgatatcagcccggtcatgatcaaggttgtcgacgctgcagtggaaaaagcatacaagggcgagcgcaagatcgcctggatggaagtctacgccggcgagaaggccacccaggtctatgaccaggacacctggctgccccaggaaaccctggacgccgtacgcgactacgtggtttccatcaagggcccgctgaccaccccggtcggtggcggcatccgctccctgaacgtggccctgcgccagcaactcgatctctacgtctgccagcgcccggtacgctggttcgaaggcgtgcccagcccggtgaagaagcccggcgacgtggacatggtgatcttccgcgagaactccgaggacatctatgccggcgtcgagtggaaggccggttcgccggaagcggagaaggtcatcaagttcctcaccgaggaaatgggcgtcaagaagatccgcttcaccgagaactgcggcatcggcatcaagccggtttcccaggaaggcaccaagcgcctggtgcgcaaggccctgcaatacgccgtcgacaacgaccgcagttcggtgaccctggtgcacaagggcaacatcatgaagttcaccgagggtgccttcaaggattggggctacgaagtcgcgcgcgatgaattcggcgccgagctgctggacggcggtccgtggatgcagttcaagaatccgaagaccggcaagaacgtcgtggtcaaggacgtgatcgccgacgccatgttgcagcagatcctgctgcgccccgccgagtacgacgtgatcgccaccctgaacctgaacggcgactatctctccgacgccctggcggccgaggtcggcggcatcggcatcgcgcccggcgccaacctgtccgattcggtggccatgttcgaggcgacccacggcaccgcgccgaagtacgccggccaggacaaggtcaacccgggttcgctgatcctctccgcggagatgatgctgcgccacatgggttggaccgaggcggccgacctgatcatcaagggcaccaacggggcgatcgccgccaagaccgtgacctatgacttcgaacgcctgatggacggcgcgaccctgctgtcctgctcggagttcggcgacgcgatgattgccaagatgtag

SEQ ID NO: 27900 - protein, 418 aa, Pseudomonas aeruginosa PAO1
MGYQKIQVPATGDKITVNADMSLSVPKNPIIPFIEGDGIGVDISPVMIKVVDAAVEKAYKGERKIAWMEVYAGEKATQVYDQDTWLPQETLDAVRDYVVSIKGPLTTPVGGGIRSLNVALRQQLDLYVCQRPVRWFEGVPSPVKKPGDVDMVIFRENSEDIYAGVEWKAGSPEAEKVIKFLTEEMGVKKIRFTENCGIGIKPVSQEGTKRLVRKALQYAVDNDRSSVTLVHKGNIMKFTEGAFKDWGYEVARDEFGAELLDGGPWMQFKNPKTGKNVVVKDVIADAMLQQILLRPAEYDVIATLNLNGDYLSDALAAEVGGIGIAPGANLSDSVAMFEATHGTAPKYAGQDKVNPGSLILSAEMMLRHMGWTEAADLIIKGTNGAIAAKTVTYDFERLMDGATLLSCSEFGDAMIAKM

SEQ ID NO: 27901 - DNA, 1239 bp, Lactococcus lactis subsp. lactis Il1403
  CDS (1)..(1239): transl_table=11
atgaaaattgagatgaaaaatggaaaattagttgtgccagattatccagcaattggttatattagaggagatggtgttggcgaagatatttttcctcaggcgcaaaaagtttttgatgctgcggttctaaaaatttatggtcaaaaaaagaaaatagaatggcaaaaattattggcaggaggagaagcatttgagacttgtggagaatatctgcccaaagaaactctcgctcatattaatgaaaatttaattgcgataaagggaccactaatgaccccggtcggtgaaagctttcgttcaattaatgttactttaagacaaaaaatggatttatatgcttgcgtaagaccagttgaatattttaaagggataaaatccccagttaaggcgccagaaaaagttgacatgacaatttttcgagaaaatacagaagatatttatgcaggtattgaatttgctagtgaaacaaatgagtctcacaacttattaaaatttttagaaaaagaattgaatgtccattctattcgctttccaaaaacttcagcactaggaataaaacctgttagtcctgaaggaagtaaacgactggttaatgcggcttttgagtacgctctgaaaatgaacaaaaaaagagtgacctttgttcataagggaaatattatgaaatttactgaaggaggatttagaaattgggcctatgaggttgctagggaatatccaacttttacaaaactagaatacgatgaaatcaaaaatgaaagaggaagtttacaagctgaaaatgagaaaaaagcagcattaaaatcaggaaaaatttatgtagatgatgtaattgctgacaacttcctccaacagattattttaaatcctgaaaattttgaagtaattgccactcttaatttaaatggtgattatatttcagatgcacttgccgcacaggttggaggaattggaattgcaccaggagcgaatattaattataaaagcggtcatgctatttttgaagcaactcatggaacagctccagatatcgctggaaaaaatatagcaaatccttctagtctaattttatctggagtgatgatgtttgagtatttaggctggcaagaggtagctgaattaatcaaaattgctctttcattttcattcaggaatggaaatttgacagctgatttaggtggaaaactttcaacttcaaaattttccgacgttttaattgattttataaaaacatattaa

SEQ ID NO: 27902 - protein, 412 aa, Lactococcus lactis subsp. lactis Il1403
MKIEMKNGKLVVPDYPAIGYIRGDGVGEDIFPQAQKVFDAAVLKIYGQKKKIEWQKLLAGGEAFETCGEYLPKETLAHINENLIAIKGPLMTPVGESFRSINVTLRQKMDLYACVRPVEYFKGIKSPVKAPEKVDMTIFRENTEDIYAGIEFASETNESHNLLKFLEKELNVHSIRFPKTSALGIKPVSPEGSKRLVNAAFEYALKMNKKRVTFVHKGNIMKFTEGGFRNWAYEVAREYPTFTKLEYDEIKNERGSLQAENEKKAALKSGKIYVDDVIADNFLQQIILNPENFEVIATLNLNGDYISDALAAQVGGIGIAPGANINYKSGHAIFEATHGTAPDIAGKNIANPSSLILSGVMMFEYLGWQEVAELIKIALSFSFRNGNLTADLGGKLSTSKFSDVLIDFIKTY

SEQ ID NO: 27903 - DNA, 996 bp, Methanothermobacter thermautotrophicus str. Delta H
  CDS (1)..(996): transl_table=11
atgtacaggataacggtcatacccggtgatgggatcggagtggaggtgatggaggcagcccttcacgtcctccaggcccttgaaattgaatttgaattcacacatgcagaggcaggtaatgagtgcttcaggcgctgcggcgacacactgccggaggaaaccctgaagcttgtcaggaaggctgatgcaacactcttcggtgctgtgacgactgtgccaggacagaagagtgccataatcacattgaggcgtgagctggatctttttgcgaatttgaggccagttaagtccctgccaggtgtcccctgcctctacccggaccttgactttgttattgtgcgggagaacaccgaggacctctatgtcggtgacgaggagtacacccctgagggcgccgttgcaaaaagaatcataacaagaaccgcctccaggagaatcagccaattcgccttccagtacgcccagaaagagggcatgcaaaaggtaacagcagtccacaaggccaacgtgctcaaaaaaaccgacggaatcttcagagacgaattctataaagtggcatcagaatacccccagatggaggccaatgactactacgttgacgccacagcaatgtacctcataacccagccccaggaattccagaccatcgtcacaaccaacctattcggagacatactatcagacgaagccgcaggactcatcggaggactcggactcgcaccatcagcaaacataggagaaaaaaacgcactattcgaaccagtacacggatcagcaccccaaatcgcaggaaaaaacatagccaaccccacagccatgatactaacaaccacactaatgctaaaacacctcaacaaaaaacaagaagcccaaaaaatagaaaaagcactccaaaaaaccctcatgaggggtatcatgacaccggaccttgggggtactgccagtaccatggagatggcagaggccataaaagaggaaatagtaaaaggggagtag

SEQ ID NO: 27904 - protein, 331 aa, Methanothermobacter thermautotrophicus str. Delta H
MYRITVIPGDGIGVEVMEAALHVLQALEIEFEFTHAEAGNECFRRCGDTLPEETLKLVRKADATLFGAVTTVPGQKSAIITLRRELDLFANLRPVKSLPGVPCLYPDLDFVIVRENTEDLYVGDEEYTPEGAVAKRIITRTASRRISQFAFQYAQKEGMQKVTAVHKANVLKKTDGIFRDEFYKVASEYPQMEANDYYVDATAMYLITQPQEFQTIVTTNLFGDILSDEAAGLIGGLGLAPSANIGEKNALFEPVHGSAPQIAGKNIANPTAMILTTTLMLKHLNKKQEAQKIEKALQKTLMRGIMTPDLGGTASTMEMAEAIKEEIVKGE

SEQ ID NO: 27905 - DNA, 1269 bp, Halobacterium sp. NRC-1
  CDS (1)..(1269): transl_table=11
atgagctacgacaagatcgaagtccccgagggcggggcgaaagtcagctacgacgaggccgccgacgaactcgacgtccccgacaccccgatcatccccatcattcacggggacggcatcggcaaggacgtcggtcccatcgcccaggacgtgctgagcgcggccgccgaggccaccggccacgacatcgagtggatggaagtgtacgccggcgagtccgcccgggagatgtacgacgagaacctccccgaggagaccgtcgaggccatccgcgagcaccgcgtcgcgatcaaggggccgctcacgacgccggtcggtgccgggttccgcagcctcaacgtggcgctgcgccagacgcttgacctctacgcgaacgtgcggccgacctactacctggacggcgtcccgtcacccatgaaggcccccgaggagatggacatggtgaccttccgggagaacaccgaggacgtctacgcgggcatcgagtgggaggccggcaccgacgaggcggagcaggtgcgttcgttcgtcgaggacgagatggacttcgacgacgtgatgcacgacggcgacatcgggatcggcctcaagcccatctcggagaagggctccaagcgcttggtacgggaggccatcgactacgccatcgagaacgaccgtgacacggtcacgctcgtccacaagggcaacatcatgaagttcaccgaggggcagttcggtgactgggggatggaggtcgccgaggaggagtaccccgacgacgaggtgttcgccgcgcccgattcgctgtgggaggaacaggacgaggtcgacatcccggaggacgccgtcatggtcgaggagcgcctcgcggacgccatgctgcagtggatgcagctgcgcaccgacgagttcgacgtgctcgcgatgccgaacctcaacggcgactacctcagcgacgccgcgggcgcgcagatcggcggcctcggcatcgcgccgggcgcgaacttcggggcggggcggtgtctcgcggagccggtccacgggtccgcgccgaagcgcgccggccaggacaaggcgaacccgaccgcgctcatcctctcgggccgcctgctgttcgagtacatcggctgggacgacgccagcacgctcgtgcgcgacgccgtcgaggacaccatcgagtcgggcacggtcacctacgacctcgcgcgccagcgcgacgacgccgaggaagtgtccagcacgacgtacgccgaggccgtcatcgaccgcatcgaggacctcgcgtaa

SEQ ID NO: 27906 - protein, 422 aa, Halobacterium sp. NRC-1
MSYDKIEVPEGGAKVSYDEAADELDVPDTPIIPIIHGDGIGKDVGPIAQDVLSAAAEATGHDIEWMEVYAGESAREMYDENLPEETVEAIREHRVAIKGPLTTPVGAGFRSLNVALRQTLDLYANVRPTYYLDGVPSPMKAPEEMDMVTFRENTEDVYAGIEWEAGTDEAEQVRSFVEDEMDFDDVMHDGDIGIGLKPISEKGSKRLVREAIDYAIENDRDTVTLVHKGNIMKFTEGQFGDWGMEVAEEEYPDDEVFAAPDSLWEEQDEVDIPEDAVMVEERLADAMLQWMQLRTDEFDVLAMPNLNGDYLSDAAGAQIGGLGIAPGANFGAGRCLAEPVHGSAPKRAGQDKANPTALILSGRLLFEYIGWDDASTLVRDAVEDTIESGTVTYDLARQRDDAEEVSSTTYAEAVIDRIEDLA

SEQ ID NO: 27907 - DNA, 1008 bp, Xylella fastidiosa 9a5c
  CDS (1)..(1008): transl_table=11
atgacgcaaacaattacggtgatccgcggtgatggtatcggcccggaaatcatggatgccaccctgttggtattaaacacgttacaagcgaatctgaattacgaattcgcagatgcaggcttgaacgcacttgaaaagcacggagacttgctaccagaggccaccctgaattcaatcagcaagaacaaagttgcgctgaaaagcccgctcacgaccccggtaggtgaaggcttcagctcgatcaatgtcgccctgcgacgtaaattcgacttatatgccaacgttcggcctgcaaaatccttcccaaataccaagtcacgctttagcgataacgtagacctgatcaccgtacgggaaaataccgagggcgcctacctgagcgaaggtcaaaccatctctcctgacggagaagttgccacttccagcgcacgagtgacccgtaaagggtcggaacgcatcgtccgttacgcgttcgacttggcccgaacaacgggccgcaaaaaggtcaccgcagtacacaaagccaacatcattaaatcaacctctgggctgtttctgaaaaccgcccgagacgtcgcaagccagtacccagaaatcgatttccaagaaatgatcgtcgacaacgcttgcatgcaacttgtgatgcgcccagaacaattcgacatcattgtcaccaccaacttgttcggtgacatcctctcagatttgtgcgcaggcttggtcggcggtttaggcttggctccgggcgccaacattggtaatgaacaagccatcttcgaagccgtacatggctcggctccagacatcgctggacaaggtaaagccaatccatgcgcgctgctgctaggtgctgtacaaatgctggatcatatcggtcaaccacaaaacgccgaacgcctacgcaacgcaatcgtggccacactgaatgccaaagactcgctgactcccgacctggggggtaacggcaacaccatggaattcgccaaggcaattgccagcagactctaa

SEQ ID NO: 27908 - protein, 335 aa, Xylella fastidiosa 9a5c
MTQTITVIRGDGIGPEIMDATLLVLNTLQANLNYEFADAGLNALEKHGDLLPEATLNSISKNKVALKSPLTTPVGEGFSSINVALRRKFDLYANVRPAKSFPNTKSRFSDNVDLITVRENTEGAYLSEGQTISPDGEVATSSARVTRKGSERIVRYAFDLARTTGRKKVTAVHKANIIKSTSGLFLKTARDVASQYPEIDFQEMIVDNACMQLVMRPEQFDIIVTTNLFGDILSDLCAGLVGGLGLAPGANIGNEQAIFEAVHGSAPDIAGQGKANPCALLLGAVQMLDHIGQPQNAERLRNAIVATLNAKDSLTPDLGGNGNTMEFAKAIASRL

SEQ ID NO: 27909 - DNA, 1242 bp, Sulfolobus solfataricus P2
  CDS (1)..(1242): transl_table=11
ttgatgcaaaagataccagaagatggagaagtaattaaatttgaaaatgggaaatggattgtaccaaaaaagccaataattctgtatgttgaaggggatggaatagggcatgaaataacacatgctgctatgaaggttataaacaaagcagtggaaaaagcttatggatctgatagagaaattaagtgggtagaagttctagcaggagataaggcagaaaagctaaccggaaatagatttcctaaagagtcagaggaattgatagagaagtatagagtcttattaaaaggtcccctagaaacaccaataggcaaaggctggaaatccatcaatgtagcaattagattaatgttggatctttatgcaaatataagaccagtaaaatacattccaggtatagaaagtccaattaagaacgcagataagattgaccttataatatttagggaaaatactgatgatttgtacagaggaatagagtatccttatgacagtgaacaagcaaagaaaattagagattttctaagaaaggagctaggagtggaagtggaagatgatactggaattggtataaaacttatcagtagatttaagacgcaaaggattgcgagaatggctataaaatacgctatagaccataaacgaaagaaagttacaataatgcataaaggtaatgtgatgaaatataccgaaggagcatttagagaatggtcatatgaagttgcaacaaaagaatttagagattatatagttactgaggaagaggtaacaaagaattataatggagtacctccttctgggaaggtcataataaatgataggatagctgataacatgttccaacagataattatcagaccagacgagtacgatataatattagcacctaacgtaaatggggattacatatcggatgctgcgggcgcactggtaggaaatattggtatgttaggcggtgcaaatataggagatactggaggtatgttcgaggcaatacatggtaccgcacctaagtatgctggtaagaatgttgcaaaccccactggaataataaaaggtggtgagttaatgttaagatttatgggatgggataaggctgctgagttaatagattctgcaatcatggaatctataagacagaagaaggttactcaggatttagctagatttatgggtgtaagagccttatcaactactgaatatactgacgagctaattgcgataatcgatacactatcataa

SEQ ID NO: 27910 - protein, 413 aa, Sulfolobus solfataricus P2; identical to SEQ ID NO: 5668

SEQ ID NO: 27911 - DNA, 1005 bp, Clostridium acetobutylicum ATCC 824
  CDS (1)..(1005): transl_table=11
atgaaaaaaaatcacacaataactcttattcctggagatggaataggaccagaagtaacgggggcagctaaaaaggtaatagaggcagcaggagttagtataacttgggatatagttgaagcgggagcaaaggttatggatgagtatggaacacctcttccagagtatgtgttagaaagcataaaaaagaataaaatagcactcaaaggacctataacaactcctgttggaagtggatttagaagtgtaaatgttgcattaagacaaacttttaatttatatgcaaatgtaagacctataaagacatatgaaggaatacctacaagatacaaagatgtagatctaattatagttcgtgaaaatacagaagatttatatgcaggaattgaacacaaaattggtgattatgcagctgaaagtattaagataataactagagaagcaagtgaaagaattgctgattttgctttcgatatggcagttaaacaaaatagaaaaaaggtaacagcagtacataaggctaatataatgaaattttctgatggactgtttttagattgtgcaagaaaagtagcagaaggttataaggaaaaagaatttgaagatatgattgttgatgctatgagtatgaaattagttcaaaatcctgaaaagtatgatgttcttgtaatgcctaatctttatggagatatactgtcagatatggctgcaggacttgttggaggacttggagtagcgccaggagcaaatataggaaaagaaatttcgatatttgaatcaattcatggttcagcacctgatatagcaggtaagaacatagcaaatccaacagctgctatactttctggagtaatgatgcttagatatataggggaacttgaagcagcagataagatagataatgcaattaaagtggttttaaaagagggaactaaggttacatctgatttaggtggaaatgctacaactgatgaatttgctaatgaagttataaagaatatataa

SEQ ID NO: 27912 - protein, 334 aa, Clostridium acetobutylicum ATCC 824
MKKNHTITLIPGDGIGPEVTGAAKKVIEAAGVSITWDIVEAGAKVMDEYGTPLPEYVLESIKKNKIALKGPITTPVGSGFRSVNVALRQTFNLYANVRPIKTYEGIPTRYKDVDLIIVRENTEDLYAGIEHKIGDYAAESIKIITREASERIADFAFDMAVKQNRKKVTAVHKANIMKFSDGLFLDCARKVAEGYKEKEFEDMIVDAMSMKLVQNPEKYDVLVMPNLYGDILSDMAAGLVGGLGVAPGANIGKEISIFESIHGSAPDIAGKNIANPTAAILSGVMMLRYIGELEAADKIDNAIKVVLKEGTKVTSDLGGNATTDEFANEVIKNI

SEQ ID NO: 27913 - DNA, 1230 bp, Sulfolobus tokodaii str. 7
  CDS (1)..(1230): transl_table=11
atgttatacaaagaacccgaggatggagaaaaaatcaaattcgataagggaaaatggatagtaccaaataaacccgtgattttatatatagaaggagatggaataggtccagagataactaacgctgcaataaaggtgattaataaagctgtagaaagagcttatggtagctctagagagataaaatggttagaagtttatgctggtgaaaaagctgaaaaattagttaatgatagatttccaaaagaaactcaagagatgttacttaaatatagagtagttcttaaaggtccattagaaactccaataggaaaaggatggaaatctgttaatgtagctattagattaatgcttgacttatacgcaaatataagaccagtaaaatatattgagggactagaaagccccctaaaacatcccgaaaaagtagatatgataatttttagagaaaatactgatgatctatatagaggaatagaatatccatttaatagtgaggaggctaaaaaaattagagactttctaagaaaagaactaaaagtagaaatagaagacgataccggaatagggataaaggtaatgagtaaatataaaactcaaagaattactaggttagcaatacagtatgcaatagaacataaaaggaaaaaggttactattatgcataaaggtaatgttatgaaatatacagaaggagcttttagagaatgggcatatgaagttgctctaaaagaatatcgtgattttatagttacggaagaagaaataaaccagggtaaaccagatcaaggtaaaataattctaaatgatagaattgctgataatatgttccaacaaataataataagaccagaagaatatgatataattttagcaccaaacgtaaacggtgactatatttctgatgcggccggtgcattaatcggcaatattggaatgctaggaggagctaatattggcgacgagggaggaatgtttgaagctattcatggtacagcaccaaagtatgctggcaaaaatgtagctaacccaacaggaattataaaagctggagaattgatgctaagatggatgggatggaatgaagctgctgacttaatagaaaaagctattaatatggcaataagagacaagaaagttacacaggatattgctaggtttatgggagtaaaagcattaggtaccaaagagtacgcagatgaactaataaagataatggacacaatttga

SEQ ID NO: 27914 - protein, 409 aa, Sulfolobus tokodaii str. 7
MLYKEPEDGEKIKFDKGKWIVPNKPVILYIEGDGIGPEITNAAIKVINKAVERAYGSSREIKWLEVYAGEKAEKLVNDRFPKETQEMLLKYRVVLKGPLETPIGKGWKSVNVAIRLMLDLYANIRPVKYIEGLESPLKHPEKVDMIIFRENTDDLYRGIEYPFNSEEAKKIRDFLRKELKVEIEDDTGIGIKVMSKYKTQRITRLAIQYAIEHKRKKVTIMHKGNVMKYTEGAFREWAYEVALKEYRDFIVTEEEINQGKPDQGKIILNDRIADNMFQQIIIRPEEYDIILAPNVNGDYISDAAGALIGNIGMLGGANIGDEGGMFEAIHGTAPKYAGKNVANPTGIIKAGELMLRWMGWNEAADLIEKAINMAIRDKKVTQDIARFMGVKALGTKEYADELIKIMDTI

SEQ ID NO: 27915 - DNA, 1218 bp, Thermoplasma acidophilum DSM 1728
  CDS (1)..(1218): transl_table=11
atggcatatattcaagtgaaggaggatggaacccttcaggttccagatagagtaactataggatatatagagggcgatggaataggacctgatatatcaaagacaacgataaacgtactcaacgcagctcttgacatcgcctatggtggaaagcgttcaatagaatggaagaagatacttgcaggagatgaggcctacgataagaccggtgacaggcttccccagtcatcgctagatgaactgaaaaagtgtgtagtttcgctgaagggacctctgacaaccccaataggagaaggcttcaggagccttaacgtcactttgaggcagtacctcgatctttatgcgaacatcaggcctgtaagatacttcccaggcgtgccttcccctgtagttcatccagaatatatgaacatggtcgtcttcagggagaacaccgaggacctgtatgccggcatagaatggaggtacgattcagatggagccaagaaggtcagggaattcttggcgtcaacattcaacataaacctaacaagcgataccggcatagggataaagcccataagcaagttcaagtccacgaggcttgtcaggaaggctatacagtatgctatagctaacaagaggaagagcgtaacgcttgtgcataagggaaacataatgaagtacactgagggggcattcaaggaatggggttatgaggttgctaagacggagttcggcaactacaccgtgacggaaacggaataccttcaggatcctgaaaaatactcgaacaagatcgtcataaaggatcgaataacggacaacatgttccagcaggtcctgaccaggacgcaggagtacgatgtcattgcgacgcccaatctgaatggcgactacctttcagatgccctggcggcccaggtcggcggcataggcctggcacctggagcgaatataggcgaccactatgccgtatttgaggccgtgcatggaacagcaccgaagtacgctggcatggatgttgcaaacccaacatcgctgatactctccggagagatgatgctgcaacacattggctggaacgaggctgcgaacatactcgatgaggcaataatgcagacgtacagggatcagaagctgacgcaggacattgcaaggcttcttaacgtaaaagcacttaaatgctctgaattcggtgaggagataatcaacaggatgaaaaaacctgttcactga

SEQ ID NO: 27916 - protein, 405 aa, Thermoplasma acidophilum DSM 1728
MAYIQVKEDGTLQVPDRVTIGYIEGDGIGPDISKTTINVLNAALDIAYGGKRSIEWKKILAGDEAYDKTGDRLPQSSLDELKKCVVSLKGPLTTPIGEGFRSLNVTLRQYLDLYANIRPVRYFPGVPSPVVHPEYMNMVVFRENTEDLYAGIEWRYDSDGAKKVREFLASTFNINLTSDTGIGIKPISKFKSTRLVRKAIQYAIANKRKSVTLVHKGNIMKYTEGAFKEWGYEVAKTEFGNYTVTETEYLQDPEKYSNKIVIKDRITDNMFQQVLTRTQEYDVIATPNLNGDYLSDALAAQVGGIGLAPGANIGDHYAVFEAVHGTAPKYAGMDVANPTSLILSGEMMLQHIGWNEAANILDEAIMQTYRDQKLTQDIARLLNVKALKCSEFGEEIINRMKKPVH

SEQ ID NO: 27917 - DNA, 1428 bp, Synechocystis sp. PCC 6803
  CDS (1)..(1428): transl_table=11
atgtacgaaaaacttcagccccccagcgttgggtcaaaaatcacctttgttgcaggtaagcccgtagtacccaacgatccgattattccctacatccggggggacggcaccggggttgatatttggcccgctacggaattagtcatcaatgcagcgatcgccaaggcctatggcggcgagaggaaaatcaactggttcaaagtctatgccggggacgaagcctgtgaattgtacggcacttatcagtatttaccggaagacactttaacagcgattaaggagtatggggtagccatcaaagggcctctcacaaccccggtgggcggtggtatccgttccctaaacgtggccctgagacaaatttttgacctctacacctgtgtgcggccctgtcgttactatcccggtactccgtctccccacaaaaccccggaaaaattagacattatcgtttatcgggaaaatacggaagatatttacctaggcattgaatgggcggaaggtacggaaggggcgaaaaagttaatcgcttaccttaacgatgaactgattcccacaactccagctttgggcaaaaaacaaattcgcctcgactctggcattggtattaaaccgattagtaagactggttcccaacggttggtgcggcgggctattctccatgcattgcgcttgccgaaagcaaaacagatggtgacgttggtccataagggcaacattatgaagttcaccgaaggggcgtttcgggattggggttacgagttggctacgacggaatttcgggcggaatgcgttacggaacgggaatcttggattttgggcaataaggaaagtaatccggacttaaccattgaggccaacgcccacatgattgaccccggttatgacactttgaccgaagaaaaacaagcggtcattaaacaagaagtggagcaggttttaaattccatttgggaatcccatggtaatggccagtggaaagaaaaagtcatggtcaatgaccgcattgccgatagtattttccaacagatccaaacccgccccgatgagtattccattctggcgaccatgaatttgaacggggattacctttccgatgccgccgccgctgtggtgggaggtttgggcatgggccccggagctaacattggggatagtgcagccatttttgaagccacccacggcactgcccccaaacatgctggtttagaccggatcaaccccggctctgtgatcctttccggcgtaatgatgctggaatttatgggctggcaggaggccgctgatctgattaaaaaaggtatcggagcggcgatcgccaatcgggaagttacctacgatttagcccggttaatggaaccgaaggtggataaacccctaaaatgctccgagtttgcccaggcgatcgtcagtcatttcgatgattaa

SEQ ID NO: 27918 - protein, 475 aa, Synechocystis sp. PCC 6803
MYEKLQPPSVGSKITFVAGKPVVPNDPIIPYIRGDGTGVDIWPATELVINAAIAKAYGGERKINWFKVYAGDEACELYGTYQYLPEDTLTAIKEYGVAIKGPLTTPVGGGIRSLNVALRQIFDLYTCVRPCRYYPGTPSPHKTPEKLDIIVYRENTEDIYLGIEWAEGTEGAKKLIAYLNDELIPTTPALGKKQIRLDSGIGIKPISKTGSQRLVRRAILHALRLPKAKQMVTLVHKGNIMKFTEGAFRDWGYELATTEFRAECVTERESWILGNKESNPDLTIEANAHMIDPGYDTLTEEKQAVIKQEVEQVLNSIWESHGNGQWKEKVMVNDRIADSIFQQIQTRPDEYSILATMNLNGDYLSDAAAAVVGGLGMGPGANIGDSAAIFEATHGTAPKHAGLDRINPGSVILSGVMMLEFMGWQEAADLIKKGIGAAIANREVTYDLARLMEPKVDKPLKCSEFAQAIVSHFDD

SEQ ID NO: 27919 - DNA, 1263 bp, Listeria monocytogenes EGD-e
  CDS (1)..(1263): transl_table=11
atgagtcaaaaaattcaagtagaaaacggtgtgctaaaaacaccaaacaatccagtcattccttttattgaaggggacggaactggtccagacatctgggcagctgcgaaacgcgttttagatgccgcagtaaaaaaagcttacaatggtgaaaaagaaattgcttggaaagaagtattagctggcgaaaaagcattcaagcaaacaggagaatggttaccacaggcgactttagatacaattgacgaatatttgattgctattaaaggaccacttactactccaatcgggggaggcattcgttcactaaacgttgccctgcgccaagagttagatttatatgtttgtttacgtccagttcgttatttcaaaggtgttccttcaccagtgaaacgtccagaagacacagatatggtcattttccgtgagaatacagaagatatttatgcagggattgaatttaaagaaggtagcatagaatcgaaaaaactaatcgacttcttaaaatctgaatttggtgttgataaaatccgtttcccggaaacttctggaattggtatcaagccgatttccaaagaaggaacggagcgtttagtgcgttcggcgattgaatatgcaattaaagaaggtcgtaaatcattaacgctcgtacacaaagggaatatcatgaagttcacagaaggagctttcaaaaattggggctatgacttatgtgaacgcgaatatggtgataaagtatttacttggaatgagtatgatcgaattaaagaagcagaaggaacagaagttgctgacgcgaaacaaaacgaagcgcttgctgctgggaaaattttagtcaaagattcgattgcggatattttcttgcaacaaatcttaactcgcccagctgaatttgatgtagttgctacaatgaacttgaatggagactacatttccgatgcgcttgctgctcaagtaggtggaatcggtattgctccaggagcaaacattaactacttaactggtcatgcgattttcgaagcgacgcatggtactgctccgaaatatgccggtcttgataaagtaaatccgtcatcggttattttatctgggacacttctgcttgaacacattggttggggtgaagcggctgccttaattaatcaatcaatggaaaaaaccattgctgcgaaaacggtaacctatgattttgctcgattaatggatggtgcgacagaagttaaatgttcggaatttgcggacgaattaataaaaaacttctaa

SEQ ID NO: 27920 - protein, 420 aa, Listeria monocytogenes EGD-e
MSQKIQVENGVLKTPNNPVIPFIEGDGTGPDIWAAAKRVLDAAVKKAYNGEKEIAWKEVLAGEKAFKQTGEWLPQATLDTIDEYLIAIKGPLTTPIGGGIRSLNVALRQELDLYVCLRPVRYFKGVPSPVKRPEDTDMVIFRENTEDIYAGIEFKEGSIESKKLIDFLKSEFGVDKIRFPETSGIGIKPISKEGTERLVRSAIEYAIKEGRKSLTLVHKGNIMKFTEGAFKNWGYDLCEREYGDKVFTWNEYDRIKEAEGTEVADAKQNEALAAGKILVKDSIADIFLQQILTRPAEFDVVATMNLNGDYISDALAAQVGGIGIAPGANINYLTGHAIFEATHGTAPKYAGLDKVNPSSVILSGTLLLEHIGWGEAAALINQSMEKTIAAKTVTYDFARLMDGATEVKCSEFADELIKNF

SEQ ID NO: 27921 - DNA, 1263 bp, Listeria innocua Clip11262
  CDS (1)..(1263): transl_table=11
atgagtcaaaaaattcaagtagaaaatggtgttttaaaaacaccgaacaacccagtcattccttttattgaaggagatggaacaggtccagacatctgggcagctgcaaaacgcgttttagatgcggcagtaaaaaaagcttacaatggcgaaaaagaaattgcttggaaagaagttctggctggcgaaaaagcatttaaacaaactggtgaatggcttccacaagagacactagatacaattgatgagtatttaattgctatcaaaggaccgcttacaacaccaattggtggcggtattcgctctctaaacgtcgctttacgccaagagttagatttatatgtatgtttacgtccagttcgttatttcaaaggtgttccttccccagtaaaacgtcctgaagatactgatatggtcattttccgtgaaaatacagaagatatttatgcgggaattgaatttaaagaaggtagcgcagaatcgaaaaaattaattgatttcttaaaatcggagtttggcgtggataaaattcgtttcccggaaacttctggtattgggattaaaccaatttcaaaagaaggaacagagcgtttagtccgttcagcgattgaatatgcgattaaagaaggacgtaaatctttaacacttgtacacaaaggaaatatcatgaaattcactgaaggagctttcaaaaactggggctatgatttatgtgaacgcgaatacggcgataaagtatttacttggaatgagtatgatcgtatcaaagaagcagaaggtacagaagctgctgatgcaaaacaaaaagaagagcttgctgctgggaaaatattagtaaaagattcgattgcagatattttcttacaacaaatcctcactcgcccagctgaatttgatgtagtagctacgatgaatttaaatggagattacatttctgatgcccttgctgctcaagtaggtggaattggaattgctcctggagcgaacattaattatttaactggtcatgcgatttttgaagcaacacatggtactgctccaaaatatgctggtcttgataaagtcaatccatcttctgttattttatctggaacattactacttgaacatattggctggggtgaagcagcagcactcattaaccactctatggaaaaaactatcgctgcaaaaaccgtaacatatgatttcgctagattaatggatggagctacagaagttaaatgttcggaatttgcggacgagttaatcaaaaacttctaa

SEQ ID NO: 27922 - protein, 420 aa, Listeria innocua Clip11262
MSQKIQVENGVLKTPNNPVIPFIEGDGTGPDIWAAAKRVLDAAVKKAYNGEKEIAWKEVLAGEKAFKQTGEWLPQETLDTIDEYLIAIKGPLTTPIGGGIRSLNVALRQELDLYVCLRPVRYFKGVPSPVKRPEDTDMVIFRENTEDIYAGIEFKEGSAESKKLIDFLKSEFGVDKIRFPETSGIGIKPISKEGTERLVRSAIEYAIKEGRKSLTLVHKGNIMKFTEGAFKNWGYDLCEREYGDKVFTWNEYDRIKEAEGTEAADAKQKEELAAGKILVKDSIADIFLQQILTRPAEFDVVATMNLNGDYISDALAAQVGGIGIAPGANINYLTGHAIFEATHGTAPKYAGLDKVNPSSVILSGTLLLEHIGWGEAAALINHSMEKTIAAKTVTYDFARLMDGATEVKCSEFADELIKNF

SEQ ID NO: 27923 - DNA, 1251 bp, Ralstonia solanacearum GMI1000
  CDS (1)..(1251): transl_table=11
atgtaccaacacatcaaggtcccggccggagagaagatcaccgtcaaccaagacttctccctgaacgtccccgataaccccatcattccttacatcgagggcgacggcaccggcttcgatatcacccccgtgatgatcaaggtggtggacgcggccgtggagaaggcctatgccggcaagcgcaagatttcctggatggaaatctacgccggcgagaagtcgaccaaggtgtacggcccggacgtgtggctgccggaagaaaccctgcaggtcctcaaggactacgtggtctcgatcaagggcccgctgacgacgccggtgggcggcggcatccgttcgctgaacgtggcgctgcgccaggagctggacctgtacgtctgcctgcgcccggtgcgctacttcaagggcgtgccctcgccggtcaaggagccggagaagaccgacatggtcatcttccgcgagaactcggaagacatctacgccggcatcgagttcgaagcccagagcgacaaggccaagaagctgatcaagatcctgcaggacgagttcggcgttaagaagatccgcttcccggagacctcgggcatcggcgtcaagccggtctcgaaggaaggcactgagcgcctggtgcgcaaggccatccagtacgcgatcgacaacgacaagccgtcggtcacgatcgtgcacaagggcaatatcatgaagttcacggaaggcggtttccgtgactgggcctacgcgctggcgcaaaaggaattcggcgccgagctgatcgatggcggtccgtggtgcaagttcaagaacccgaagacgggcaaggaaatcgtcgtcaaggacgcgattgccgacgccttcctgcagcagatcctgctgcgtccggccgagtactcggtggtggcgacgctgaacctgaacggcgactacatctccgacgcgctggccgcacaggtcggcggcatcggcatcgccccgggcgcgaacctgagcgactccgtcgcgatgttcgaggccacccacggcacggctccgaagtacgccggcaaggactacgtgaacccgggttcggaaatcctgtcggccgaaatgatgctgcgccacatgggctggacggaagccgctgacctgatcatctcgtcgatcgagaagtcgatcctgtcgaagaaggtcacgtatgacttcgcccgcctgctggaaggcgcgacgcaggtgtcgtgctcgggctttggtcaggtgatgatcgacaatatgtaa

SEQ ID NO: 27924 - protein, 416 aa, Ralstonia solanacearum GMI1000
MYQHIKVPAGEKITVNQDFSLNVPDNPIIPYIEGDGTGFDITPVMIKVVDAAVEKAYAGKRKISWMEIYAGEKSTKVYGPDVWLPEETLQVLKDYVVSIKGPLTTPVGGGIRSLNVALRQELDLYVCLRPVRYFKGVPSPVKEPEKTDMVIFRENSEDIYAGIEFEAQSDKAKKLIKILQDEFGVKKIRFPETSGIGVKPVSKEGTERLVRKAIQYAIDNDKPSVTIVHKGNIMKFTEGGFRDWAYALAQKEFGAELIDGGPWCKFKNPKTGKEIVVKDAIADAFLQQILLRPAEYSVVATLNLNGDYISDALAAQVGGIGIAPGANLSDSVAMFEATHGTAPKYAGKDYVNPGSEILSAEMMLRHMGWTEAADLIISSIEKSILSKKVTYDFARLLEGATQVSCSGFGQVMIDNM

SEQ ID NO: 27925 - DNA, 1320 bp, Pyrobaculum aerophilum str. IM2
  CDS (1)..(1320): transl_table=11
atggctgtagatatagagaaaatcaaacagggaatacccaacatagtcccctacgctgggaagtatgtagaccctccagagggggattacgtagagtacacgggcccgggccaattcaaagtccccgataaggtcgttatcgggtacatagagggagacgggatagggccagaggtggcttatgcggctattagagtggcaaacgccgcagttgaaaaggcatatgggaagtctagaaaagtaatctggtatgaggtagtggtcggcgaaaaggccgaaaaaatcttcggcaacagactgcctgaccagagcattaacgtcttgaagaaaatacgggtgtttcttaaagccccgcttgagactccagtgggaggagggtttagaagtataaacgtgacgttgcgccagctctttgatctctacgccaatattagacctgtgaagtacttcccgggcctcccctcgcctctgaaaaggccagaggttgtcgatttagtaatttttagagaaaacacagaggacgtctatgctggcattgagtggccttacaacagccctgaggcgtctaaaatccgggatttcctgcgtagggagttcggaattaatataagagacgacgccggcattggcataaagcccattagcaaattcggcacgcagagaattgcaaggctggccttgaaatttgcaattgaaaacaagaggcgtgtggtaacagttatgcataagggaaatatccagaaatacaccgaaggcgcatttaaagattgggcgtttgaagtggctaggaatgagtttagggaacacgtggtgtttgaagacgagctggcccagtacggcggccaggtgcccccgggcaaagtccttgttaacgacagaattgccgacaatatgttacaacagctactcacgagaacgggggaatacgacgtaattctagcccccaacttaaatggggattacgtctctgacgaggccgctggcctagtcggaggcctcggcgtcgcccccggcattgacgtgggagactggggaatgatggcggagccggtccacggcacagcgcctaaatatagaggtaaaaattacgtaaaccccactgccacaatactagcccttgaactactcttccgattcttggggtggagagaagccgcgaattatattatcaaaggagttgagactgcatatagggagggctatttcaccggagatctggcaaggcaaatggacgaggaggagaggaaacatcgggttaaggaggtgcttgggacgcaggaatttgccgataaagtagtagagataataaaaagattgtaa

SEQ ID NO: 27926 - protein, 439 aa, Pyrobaculum aerophilum str. IM2
MAVDIEKIKQGIPNIVPYAGKYVDPPEGDYVEYTGPGQFKVPDKVVIGYIEGDGIGPEVAYAAIRVANAAVEKAYGKSRKVIWYEVVVGEKAEKIFGNRLPDQSINVLKKIRVFLKAPLETPVGGGFRSINVTLRQLFDLYANIRPVKYFPGLPSPLKRPEVVDLVIFRENTEDVYAGIEWPYNSPEASKIRDFLRREFGINIRDDAGIGIKPISKFGTQRIARLALKFAIENKRRVVTVMHKGNIQKYTEGAFKDWAFEVARNEFREHVVFEDELAQYGGQVPPGKVLVNDRIADNMLQQLLTRTGEYDVILAPNLNGDYVSDEAAGLVGGLGVAPGIDVGDWGMMAEPVHGTAPKYRGKNYVNPTATILALELLFRFLGWREAANYIIKGVETAYREGYFTGDLARQMDEEERKHRVKEVLGTQEFADKVVEIIKRL

SEQ ID NO: 27927 - DNA, 1125 bp, Arabidopsis thaliana
  CDS (1)..(1125)
atgaccatggcagcaaatctagcgcgacggctgatcggaaaccgatcgactcagatccttggagccgtgaactctagctcaggtgcggctagttctgtcgctagggctttctgctcctccaccactccgatcaccgcaactctcttccctggcgatgggatcggtcccgagatcgccgaatctgtcaaaaaggtgtttacaacagctggtgtaccaattgagtgggaagaacactatgttgggactgagatagatccgagaacacagagtttcttgacatgggaaagtctcgaatctgtgcgtagaaacaaagttggtttgaaaggtccaatggctactccaattgggaaaggtcaccgttctttgaacctgactcttaggaaagagcttaatctatatgccaatgttagaccttgttacagtcttcctggttacaaaactcgttacgatgatgttgatctcattaccatcagagaaaacacggaaggagaatacagtggccttgaacatcaggttgttagaggtgtggtggaaagtcttaaaatcattacccgtcaggcgagtttgagagttgcagagtatgcttttctctatgccaagactcatggaagagagagagtttctgctatccacaaagccaacattatgcagaaaactgacggtctctttctcaagtgttgtcgtgaggttgctgagaagtatcctgagatcacttacgaggaggtcgttattgacaactgctgtatgatgcttgtgaaaaacccagcactttttgatgtcttggtgatgccaaacctgtacggtgacattattagcgatctgtgtgccggattggttggaggactaggattgactccaagttgtaatattggagaagatggtgtagcccttgctgaagcagttcacggttctgcacctgatatcgctggaaagaacttggcgaacccaaccgcgttgcttctgagtggagtgatgatgttgcgtcacctgaagttcaacgaacaagcagaacaaatccacagtgcaatcatcaacaccatagcagagggcaaatacagaaccgcggatcttggaggtagttcgaccaccacggaattcacaaaggcaatctgtgatcatctctga

SEQ ID NO: 27928 - protein, 374 aa, Arabidopsis thaliana
MTMAANLARRLIGNRSTQILGAVNSSSGAASSVARAFCSSTTPITATLFPGDGIGPEIAESVKKVFTTAGVPIEWEEHYVGTEIDPRTQSFLTWESLESVRRNKVGLKGPMATPIGKGHRSLNLTLRKELNLYANVRPCYSLPGYKTRYDDVDLITIRENTEGEYSGLEHQVVRGVVESLKIITRQASLRVAEYAFLYAKTHGRERVSAIHKANIMQKTDGLFLKCCREVAEKYPEITYEEVVIDNCCMMLVKNPALFDVLVMPNLYGDIISDLCAGLVGGLGLTPSCNIGEDGVALAEAVHGSAPDIAGKNLANPTALLLSGVMMLRHLKFNEQAEQIHSAIINTIAEGKYRTADLGGSSTTTEFTKAICDHL

SEQ ID NO: 27929 - DNA, 1065 bp, Drosophila melanogaster
  CDS (1)..(1065)
atggctgctagattcatacagaaaattgtcaacgcgactcccgccgccagccggtcctactcctccggcaccaagaaagtcaccctcatccctggcgatggcatcggacctgagatctctgcggccgtgcagaaaatcttcaccgccgccaatgtccccatcgagtgggaggccgtggacgtgacccccgtccggggacccgacggaaagttcggcatcccacaggccgccattgactcggtgaacacgaacaagatcggcctgaagggtcctctgatgacgcccgtcggcaagggccatcggtctctgaatctggccctgcgcaaggagttcaatctgtacgccaacgtgcgtccctgccgcagtctcgagggctacaagacgctgtacgacgatgtggacgtggtcaccatccgtgagaacaccgagggcgagtactccggcatcgagcacgagatcgtcgacggcgtcgttcagagcatcaagctgatcaccgaggaagcctccaagcgtgtggccgagtacgccttccagtacgccaagaacaacaaccgcaagaaggtcaccgtggtgcacaaggcgaacattatgcgcatgtccgatggtctcttcctgcgctgcgtccgcgacatggcccagaagttcccagaaatccagttcgaagagaagtatctggatacggtgtgcctgaacatggtccagaaccccggaaaatacgacgtgctggtcatgcccaatctgtacggtgatattctgtctgacatgtgcgccggtttggtgggcggcctcggcctgacgccctccggcaacatgggcctgaacggtgccctgttcgagtctgtgcacggaaccgcccccgatattgccggcaaggacctggccaatcccactgccctgttgctgtcggcggtcatgatgctgcgccacatggagctcaacacgtacgccgataaaatcgagcgtgccgccttcgagaccatcaaggagggcaaatacctcaccggcgatctgggcggccgtgccaagtgctccgagttcacgaacgagatctgtgccaagctgtag

SEQ ID NO: 27930 - protein, 354 aa, Drosophila melanogaster
MAARFIQKIVNATPAASRSYSSGTKKVTLIPGDGIGPEISAAVQKIFTAANVPIEWEAVDVTPVRGPDGKFGIPQAAIDSVNTNKIGLKGPLMTPVGKGHRSLNLALRKEFNLYANVRPCRSLEGYKTLYDDVDVVTIRENTEGEYSGIEHEIVDGVVQSIKLITEEASKRVAEYAFQYAKNNNRKKVTVVHKANIMRMSDGLFLRCVRDMAQKFPEIQFEEKYLDTVCLNMVQNPGKYDVLVMPNLYGDILSDMCAGLVGGLGLTPSGNMGLNGALFESVHGTAPDIAGKDLANPTALLLSAVMMLRHMELNTYADKIERAAFETIKEGKYLTGDLGGRAKCSEFTNEICAKL

SEQ ID NO: 27931 - DNA, 1203 bp, Pyrococcus furiosus DSM 3638
  CDS (1)..(1203): transl_table=11
atgagcattagacttccacaagaaggaaaagttattgaagttgtcaacggctctctaaagatccctaatgagcccatagttgcctatatagaaggtgatggaattgggagagaagttatcccagcagcgattaaagtagttgacaaggccgtcgaaactgcatacaaaggaaagagaagaattgtttggtggaagttacttgctggaaaagaagccctccagaaagttggaaaacttcttcctgaagaaacggtaaaagggatcgcggaggtaaaggtcgcactcaaaggacccatggagacaccaatagggacgggacataggagtataaacgtggcattaaggaagatgttcgatctttatgcaaacataagaccaatcaaatactatggagtcccaactgtctatccatatgccgacaaagtggacttaataatatttagggagaacacggaagatgtttatgctggaatagaatgggaggcttatagtagagaggctcaaaaactcagggagttcctaaaaaatgaatttggaatagagataagagaggactctggaattacactaaaaccaatttccaagtttgcaactcaaagaatagtgagaaaagcaataaaatgggccatagaaaagggaagaaagagagttacaataatgcataaaggaaatgtaatgaagtttacagaaggagcattcagaaactgggcatttgaagttgctgaaaaggagttttccgaatacgtaagcataggcaaaccagaagaaggcaaaattctagttgatgacaagatagcagataatatgctccaacagataattctcagaccctgggagtatgacattatagtgactccaaacttaaacggagattacctcagtgatgctgctgcggccttagttggaggagttggaatggcagctgggataaatgttggagattacatagcaatagcagaaccagtccacggcacggccccagacatcgctggaaaaggaatagcaaacccctcagcggccattttaagtgcagcacttcttctcgaatatctcggctgggtagaagcggctgagttaattagagcttctctaaggaaaacgatagagaagggtaaagtaactcccgacctagcgagaggagaaaaagctctttcaacggaagaattcattcaggaagtcataaaagaaattgagggggaataa

SEQ ID NO: 27932 - protein, 400 aa, Pyrococcus furiosus DSM 3638
MSIRLPQEGKVIEVVNGSLKIPNEPIVAYIEGDGIGREVIPAAIKVVDKAVETAYKGKRRIVWWKLLAGKEALQKVGKLLPEETVKGIAEVKVALKGPMETPIGTGHRSINVALRKMFDLYANIRPIKYYGVPTVYPYADKVDLIIFRENTEDVYAGIEWEAYSREAQKLREFLKNEFGIEIREDSGITLKPISKFATQRIVRKAIKWAIEKGRKRVTIMHKGNVMKFTEGAFRNWAFEVAEKEFSEYVSIGKPEEGKILVDDKIADNMLQQIILRPWEYDIIVTPNLNGDYLSDAAAALVGGVGMAAGINVGDYIAIAEPVHGTAPDIAGKGIANPSAAILSAALLLEYLGWVEAAELIRASLRKTIEKGKVTPDLARGEKALSTEEFIQEVIKEIEGE

SEQ ID NO: 27933 - DNA, 1068 bp, Pyrococcus furiosus DSM 3638
  CDS (1)..(1068): transl_table=11
atgataaagatagctgtgatcccaggtgatgggataggaaaggaggtagtggctgaggggctaaaggttcttcgcaaaatagaggagctgagcaacgttaagttcgactttcaagagtatccattcggagcagaacattacttgaaaactggagaaacccttccagactgggctcttgaggagtttagacactttgatgcaatttactttggagcaattggggatccaagggtaaagccgggaattctagaacacggaattctacttaagctcagattttccctagacctttacgtaaacttaagacctgtaaagttataccacccaaaactaactccgctaaagggaaaggaaaagattgacatggtgttcataagggaaaacactgagggcctatatgcaggagcgggtggttttcttaggaaggggacccctcatgaggtcgctattcaagaaatgataaatactaggtttggagtcgagagaaccattaggtttgcctttgaatatgcaaagactaaggggagaaaaaaggtaactctagtagataaggccaacgttcttacctatgctcacgatctctggcagagagtgtttaaggaagttgcttcggaataccaggaaatagagactgaccactactatgttgatgctatggcaatgaaaatgatccgttctccagagatcttcgaagtagttgtaactccaaacatgtttggagacattctcactgacttgggagcagagattgtgggaggattaggattagcagcttctggaaatatcaatccaaggggagtttccatgtttgagccagtccacggttctgccccagacattgcaggaaagggcattgcaaatccactagctgcgattttaacagcagctctaatgcttgagcacctgggattggacagggaagcctcacttgtggaaaaggccgttgcgaagacaatagaagaaaacaaagtaacaccagacttgggaggagagttgaagactagcgaagttggtaatgaagttgtgaaaaatttagaggtgttatgggatgagggagaggagagttga

SEQ ID NO: 27934 - protein, 355 aa, Pyrococcus furiosus DSM 3638
MIKIAVIPGDGIGKEVVAEGLKVLRKIEELSNVKFDFQEYPFGAEHYLKTGETLPDWALEEFRHFDAIYFGAIGDPRVKPGILEHGILLKLRFSLDLYVNLRPVKLYHPKLTPLKGKEKIDMVFIRENTEGLYAGAGGFLRKGTPHEVAIQEMINTRFGVERTIRFAFEYAKTKGRKKVTLVDKANVLTYAHDLWQRVFKEVASEYQEIETDHYYVDAMAMKMIRSPEIFEVVVTPNMFGDILTDLGAEIVGGLGLAASGNINPRGVSMFEPVHGSAPDIAGKGIANPLAAILTAALMLEHLGLDREASLVEKAVAKTIEENKVTPDLGGELKTSEVGNEVVKNLEVLWDEGEES

SEQ ID NO: 27935 - DNA, 1008 bp, Methanopyrus kandleri AV19
  CDS (1)..(1008): transl_table=11
gtgaacgcgtcgccgaccgtcgtggtaatccccggggacgggatcgggccggaagtcatcgacgcggccctgaaggtcgtgcgggcggttctgggtgacgaactcgagatcgtggaggaacaggccgggtactcgctgtggaagaagaggggagtcacgatcgaggacgagacgatcgagcgctgccgcgaggcggacgccatgctcttcggcgcgtgcacgactccggaggacccggaggccaagagtcccatcgtgacgctgcggaaagagctcggactctacgccaacgtccgtcccgctcgctcctggcccgtaccgcgacctgtcgacaccgagttcgacctggtgatcgtccgggagaacaccgagggtctctacaccggatgcgagtgcgagatccacgacggtgttaccgtcgccctgcgtaagatctccgaggagggtacgcgcagggtcgctgaggtcgcctgcgatctcgccgaggagcgctccggtcgcgtgacgatagtgcacaaggccaacgtgctgaagctcacgtgcggaacgttcaagcgcgtcgcggcggaaaccgtggagcgtcgcggtctggagtgggacgacgagtacgtggacgcggcggcgtacaagctggtgcgtgagccggacagcttcgacgtgatcctcacctccaacctgttcggggacatactctcggacctggcggcgggtctgatggggagcctcgggctcgcacccagcgcgaacctgggggacgacgccgccctattcgagcctgtacacgggtcggcacccgacatcgcgggtaaggggatcgcgaacccggtggcggcgatcctctcggccgccatgatgctggatcacctcgggtacggggaggaggctcggatcatcgagcgtgccgtcgaggaggtgctgcgcgagggcgtgaggactcccgacctcggcggttccgcgaccacggaggaggtggccgaggcgatcgcggagcgtgtggctaccgggtga

SEQ ID NO: 27936 - protein, 335 aa, Methanopyrus kandleri AV19
MNASPTVVVIPGDGIGPEVIDAALKVVRAVLGDELEIVEEQAGYSLWKKRGVTIEDETIERCREADAMLFGACTTPEDPEAKSPIVTLRKELGLYANVRPARSWPVPRPVDTEFDLVIVRENTEGLYTGCECEIHDGVTVALRKISEEGTRRVAEVACDLAEERSGRVTIVHKANVLKLTCGTFKRVAAETVERRGLEWDDEYVDAAAYKLVREPDSFDVILTSNLFGDILSDLAAGLMGSLGLAPSANLGDDAALFEPVHGSAPDIAGKGIANPVAAILSAAMMLDHLGYGEEARIIERAVEEVLREGVRTPDLGGSATTEEVAEAIAERVATG

SEQ ID NO: 27937 - DNA, 1128 bp, Methanosarcina acetivorans C2A
  CDS (1)..(1128): transl_table=11
atgacgcagtataaggttccggtccttcccggcgacgggataggcccagaaatcatcgccgaaggcaagaaagtaatagatgccgcaggcgaaagattcggttttgatgtagaatggattgaatacccgcatggagcagatcactacctgaaaacaggagaactgatctcggaagagaccttaaaggaattatccggctaccctgccatttaccttggctccatcggagaccccaggattgccccaggagttcttgaaaagggaatcttattaactgcacgcttttactttgaccagtacatcaacctgcgcccgataaaacttctcgaaggagtctggaccccgattaaagacaagacagcaaaagacatcgactttgtcgtggtcagggaaaacaccgaagacttctacataggagtcggcggcagagcaaagaaaggagagagcaaagacctccttgaagtcaaaaggacgctctactctgcaaaattcggcctggacatcgagactgacagcgaagaaataggctaccagataggccttatctccaaagaaggcacaaaaagagttatcgaatacgcctttgaccttgcagaaaacaggaagaaacacgtctcctcggttgataaagcaaacgtcctttccgacatttacggcttctggagagaagagttcaatgcagtcgccgcagcccacccggacattaccaccgacttcaacttcgttgacgccatcacaatgtggtttgtgaaaaaccccgaatggttcgatgtggtcgtaaccccgaacatgttcggagacatcatcaccgacctcggagccatgatccagggcggcctcggacttgcccccggcggaaacatcaacccgaagggcacaagcatgtttgagcccatccacggttcagccccgaaatacaagggccagaacaaagtcaacccgattgcaacaatctgggcaggcgccatgctcatagaacagctcggagaaaaggaagctgctgacaccatagttaatgcaatccagaaaaacatcctggaaggcaaagtcaaaacctacgacatgggaggcaaaaacaccacttcagatgtcggagacgacattgcaaggatagtaaagggagaataa

SEQ ID NO: 27938 - protein, 375 aa, Methanosarcina acetivorans C2A
MTQYKVPVLPGDGIGPEIIAEGKKVIDAAGERFGFDVEWIEYPHGADHYLKTGELISEETLKELSGYPAIYLGSIGDPRIAPGVLEKGILLTARFYFDQYINLRPIKLLEGVWTPIKDKTAKDIDFVVVRENTEDFYIGVGGRAKKGESKDLLEVKRTLYSAKFGLDIETDSEEIGYQIGLISKEGTKRVIEYAFDLAENRKKHVSSVDKANVLSDIYGFWREEFNAVAAAHPDITTDFNFVDAITMWFVKNPEWFDVVVTPNMFGDIITDLGAMIQGGLGLAPGGNINPKGTSMFEPIHGSAPKYKGQNKVNPIATIWAGAMLIEQLGEKEAADTIVNAIQKNILEGKVKTYDMGGKNTTSDVGDDIARIVKGE

SEQ ID NO: 27939 - DNA, 1029 bp, Methanosarcina acetivorans C2A
  CDS (1)..(1029): transl_table=11
atgactaaaaccgcagcagtaatcaaaggtgacggggttggccccgaacttgtggaagcaatgcttaaagttgcaaacgccgctggcactgatgttgaattcgtaatgtgtgaagcaggagccggctggtgggaagagcatggcggcaattcccttgtccctgatgagacctggcagatccttgacagctccgatgcctgtttcaaggggccgaccacaacccccggcgggataggctccccgagaagtgtggccgtatccatcaggagaaagtacgacctctatgcaaatgtcaggccgataaagaccttcccgaactcaaatgcacctctcggggatgtcgagatggtctgtgtgcgagaggggactgaaggactttacattggtgaggaaatccagctcacagacgatgtttccattgcaatccgaaaaattacccgtactgcatccggtaagattgcccgctatgcctttgaggaagccaaaaggagaggttacgacacggttgtgcccatccataaaagcaatatcctgaaactgacctgcggctctttcttagaagaagtcgaaaaggttgcacaggactaccctaacattgaggtctggccctatcacattgataacatcgcccagcagcttatcaaaaaccctcagatcttcaataaaaaggtcctcctttccaccaacctcttcatggatgtaatcagtgaagagtgttcagcccttgttggcagtatcgggctcatttactctgcaaatctcggggacaattttgcaatgttcgagccggctcacggctcagccccgaagtatgccgggctggataaagtaaaccctgttgcaaccgtgcttgcaggagcctggatgctggactacctgggtgagaaggaaaagtccgaagctatcttcaaagccacagagcgcgtaatctccgaaggcaagtatgtgacctacgacgttggaggcaacgcaaaactcagccagatggcagacgagatcgcaaaatacaccgccgaaatcctgaaataa

SEQ ID NO: 27940 - protein, 342 aa, Methanosarcina acetivorans C2A
MTKTAAVIKGDGVGPELVEAMLKVANAAGTDVEFVMCEAGAGWWEEHGGNSLVPDETWQILDSSDACFKGPTTTPGGIGSPRSVAVSIRRKYDLYANVRPIKTFPNSNAPLGDVEMVCVREGTEGLYIGEEIQLTDDVSIAIRKITRTASGKIARYAFEEAKRRGYDTVVPIHKSNILKLTCGSFLEEVEKVAQDYPNIEVWPYHIDNIAQQLIKNPQIFNKKVLLSTNLFMDVISEECSALVGSIGLIYSANLGDNFAMFEPAHGSAPKYAGLDKVNPVATVLAGAWMLDYLGEKEKSEAIFKATERVISEGKYVTYDVGGNAKLSQMADEIAKYTAEILK

SEQ ID NO: 27941 - DNA, 1029 bp, Methanosarcina mazei Go1
  CDS (1)..(1029): transl_table=11
atgaccaaaaccgcagcagtaatcaaaggtgacggggtaggccccgaactggtggatgcaatgcttaaagttgcagaagcctctggcactgatgtcgaattcgtaatgtgtgaagcaggagccggctggtgggaggagcatggaggtaattcccttattcctgaagagacctggcagatccttgacagttctgacgcatgtttcaagggtcctacaaccactcccggaggaatcggctccccgagaagtgtggctgtatccatcaggagaaagtacgacctttatgccaatgtcaggccaataaaaaccttcccgaattcaagtgcacctctcggagatgtcgaaatggtttgtgttcgtgaagggacagaaggtctctacataggagaagaaatccagctcacagacgatgtatccattgcaatcaggaaaattacccggacggcatccagcaagattgcccgctatgcttttgaagacgcaaaaaagagaggttacgacacagttgtgccaatccacaaaagtaacatcctgaaattgacctgcggctcattccttgaagaggtcgaaaaggttgctcacgacttcccggatatcgaggtctggccctaccatattgataatattgcccagcagcttatcaagaacccccagatctttaacaagaaagtcctcctttccaccaacctcttcatggacgtgatcagtgaggaatgctcagcccttgttggcagtatcgggcttatctattccgcaaatatcggggacaactttgcaatgtttgaacctgctcacggctcagccccgaagtatgcaggccttgacaaggtaaaccctgttgcaaccgttcttgcgggcgcctggatgctggactaccttggagaaaaggacaaatccgacgcgatctttaaagccactgagcgtgttatttccgaaggcaaatacgtgacttatgacctcggaggaagcgcaaagctcagccagatggcagatgagatcgcaaaatacacagaagaaatcctgaaataa

SEQ ID NO: 27942 - protein, 342 aa, Methanosarcina mazei Go1
MTKTAAVIKGDGVGPELVDAMLKVAEASGTDVEFVMCEAGAGWWEEHGGNSLIPEETWQILDSSDACFKGPTTTPGGIGSPRSVAVSIRRKYDLYANVRPIKTFPNSSAPLGDVEMVCVREGTEGLYIGEEIQLTDDVSIAIRKITRTASSKIARYAFEDAKKRGYDTVVPIHKSNILKLTCGSFLEEVEKVAHDFPDIEVWPYHIDNIAQQLIKNPQIFNKKVLLSTNLFMDVISEECSALVGSIGLIYSANIGDNFAMFEPAHGSAPKYAGLDKVNPVATVLAGAWMLDYLGEKDKSDAIFKATERVISEGKYVTYDLGGSAKLSQMADEIAKYTEEILK

SEQ ID NO: 27943 - DNA, 1128 bp, Methanosarcina mazei Go1
  CDS (1)..(1128): transl_table=11
atgacgcagtataaggttcccgtcctcccaggagatgggattggaccagaaatcatcgccgaaggcagaaaagtcatagatgctgcaggcgaaagatttggttttgatgtagaatggatagaatatcctcatggagcagaccactacctggaaacgggtgagctgatctcggaagagaccttaaaggaattatccggctaccctgcaatttatcttggctccataggagacccgaggattgccccaggtgtccttgaaaaggggatcttattaactgcacgcttttactttgaccagtacattaacctgcgcccgataaaactccttgagggtgtctggaccccgataaaggacaagacatcaaaagacattgactttgtcgtggtaagggaaaataccgaggacttctacataggcattggcggcagggcaaaaaaaggagcgagtaaagacctccttgaagtcaagaggacactttactccgcaaagttcggcctcgacatcgagaccgacagcgaagaaataggataccagataggccttatctccaaagagggcacaaagcgtgttattgagtacgcttttgaccttgcagaaaaccggaagaaacacgtctcatctgttgacaaggcaaacgtcctttccgacatctacgggttctggagagaagagttcaacgcagttgccgaaaagcatcctggttttaccacagacttcaacttcgttgacgctatcacaatgtggtttgtgaaaaaccctgaatggttcgatgtggtagtaaccccgaacatgttcggagacatcatcaccgacctcggagccatgatccagggcggcctcggactcgccccgggcgggaacattaacccgaacggcacaagcatgtttgagcccatccacggttcagcccctaagtacaagggccagaacaaggtaaacccgatcgcaacaatctgggcaggtgcaatgctcatagaacagctcggagaaaaggaagccgcagataccatagtcaatgcaatccagaaaaatatcctggacggcaaagtaaagacctacgatatgggcggcaaaaatactacctcagatgtcggagacgacattgcaaggataataaagggagaataa

SEQ ID NO: 27944 - protein, 375 aa, Methanosarcina mazei Go1
MTQYKVPVLPGDGIGPEIIAEGRKVIDAAGERFGFDVEWIEYPHGADHYLETGELISEETLKELSGYPAIYLGSIGDPRIAPGVLEKGILLTARFYFDQYINLRPIKLLEGVWTPIKDKTSKDIDFVVVRENTEDFYIGIGGRAKKGASKDLLEVKRTLYSAKFGLDIETDSEEIGYQIGLISKEGTKRVIEYAFDLAENRKKHVSSVDKANVLSDIYGFWREEFNAVAEKHPGFTTDFNFVDAITMWFVKNPEWFDVVVTPNMFGDIITDLGAMIQGGLGLAPGGNINPNGTSMFEPIHGSAPKYKGQNKVNPIATIWAGAMLIEQLGEKEAADTIVNAIQKNILDGKVKTYDMGGKNTTSDVGDDIARIIKGE

SEQ ID NO: 27945 - DNA, 1008 bp, Xanthomonas axonopodis pv. citri str. 306
  CDS (1)..(1008): transl_table=11
atgacgcagacaatcacggtcatccgcggcgacggcatcggcccggagatcatggatgccacgctgttcgtgctcgacgcgctgcaggctggcctgacctacgaatacgccgacgccggcctggttgcgctggaaaagcatggcgatctgctgcccgagtccactctggcgtcgatcaccaagaacaaggtggcgctgaaaagtccgctgaccacgccggtcggcgagggtttcagctcgatcaacgtcgccatgcgtcgcaagttcgacctgtacgccaacgtgcgtccggccaagtcgttcccgaacaccaagtcgcgttttgccgacggcgttgacctgatcacggtccgcgaaaacaccgaaggtgcgtatctgagcgaaggccagacggtgtccgaggatggcgagaccgcgttctccggcacccggatcacccgcaagggctccgagcgcatcgtgcgctacgccttcgagctggccaagagcaccggccgcaagaaggtcaccgccgtgcacaaggccaacatcatcaagtcgacctcgggcctgttcctgaaggtggcacgcgatgtggccgcgcagtatccggaaatcgaattccaggaaatgatcgtcgacaacacctgcatgcagctggtgatgcgtcccgagcaattcgacatcatcgtgaccaccaacctgttcggcgacatcatctccgacctgtgcgccggcctggtcggcggcctgggcctggcgccgggcgccaacatcggtctggacgcggcgatcttcgaagccgtgcacggctcggcgccggatatcgcagggcagggcaaggccaacccgtgcgcgctgctgcttggcgcggcgcagatgctcgaccacatcggtcagccgcagaatgccgagcgcctgcgcgaagccatcgtcgccaccctggaagccaaggattcgctgacccccgacctgggcggcaccggcaacaccatgggctttgccaaggccatcgccagccgcctctga

SEQ ID NO: 27946 - protein, 335 aa, Xanthomonas axonopodis pv. citri str. 306
MTQTITVIRGDGIGPEIMDATLFVLDALQAGLTYEYADAGLVALEKHGDLLPESTLASITKNKVALKSPLTTPVGEGFSSINVAMRRKFDLYANVRPAKSFPNTKSRFADGVDLITVRENTEGAYLSEGQTVSEDGETAFSGTRITRKGSERIVRYAFELAKSTGRKKVTAVHKANIIKSTSGLFLKVARDVAAQYPEIEFQEMIVDNTCMQLVMRPEQFDIIVTTNLFGDIISDLCAGLVGGLGLAPGANIGLDAAIFEAVHGSAPDIAGQGKANPCALLLGAAQMLDHIGQPQNAERLREAIVATLEAKDSLTPDLGGTGNTMGFAKAIASRL

SEQ ID NO: 27947 - DNA, 1305 bp, Yersinia pestis KIM
  CDS (1)..(1305): transl_table=11
ttgacacgaatcttacaaagcattaacaaaattgcgctgaaggagaggttgatggaaagcaaagtagttgttccggcagaaggtaagaaaattactgtcgatgctcagggtaaactggttgttccgcataatccgatcattccatttattgaaggtgacggtattggtgttgatgtaaccccggcgatgatcaacgtggtagatgctgcggttaagaaagcttataacggtgaacgtaaaatttcctggatggaaatttacactggtgagaaatcaacccatgtctatggtaaagatgtttggttgccagaagaaaccttagatctgatccgtgattatcgcgttgctatcaaaggcccgttgaccactcctgtcggtggcggcatccgttctttgaacgttgctctgcgtcaacaacttgacctgtatgtgtgtctgcgtccggtgcgttattatgaaggcaccccaagcccggtaaaacaccctgaactgaccaacatggtgattttccgtgaaaacgctgaagatatctatgcgggtatcgaatggaaagcgggttcacccgaagcagagaaagtgatcaagttcctgcgtgaagagatgggtgtgaagaaaatccgtttccctgaacaatgtggtatcggtgtgaaaccgtgttcagaagaagggactaagcgtttggtacgtgcagcgattgaatatgcaattaccaacgatcgtgaatcagttacgctggttcataaaggcaatattatgaaattcaccgaaggcgcgtttaaagactggggttatcagttagcgcgtgaggaatttggtggtgaactgatcgacggtggcccatgggttaaaatcaaaaacccaaataacggcaaagaaattatcgttaaagatgtgattgccgatgctttcctgcaacagatcctgctgcgtcctgcggaatatgatgttatcgcttgtatgaacctgaacggtgattacatctctgatgcattggcagctcaggttggcggtattggtattgctccgggggctaacattggtgatgactgcgcactgttcgaagccactcacggtactgcaccaaaatatgctggtcaggataaagtgaacccaggttctattattctttcagcagaaatgatgctgcgtcacatgggctggtttgaagccgctgacttaatcattaaaggcactgaaggcgcaattcaagccaagaccgtgacttatgatttcgaacgtctgatggaaggcgctaagttgttgaagtgtagtgagtttggcgacgccattattaagcacatgtag

SEQ ID NO: 27948 - protein, 434 aa, Yersinia pestis KIM
MTRILQSINKIALKERLMESKVVVPAEGKKITVDAQGKLVVPHNPIIPFIEGDGIGVDVTPAMINVVDAAVKKAYNGERKISWMEIYTGEKSTHVYGKDVWLPEETLDLIRDYRVAIKGPLTTPVGGGIRSLNVALRQQLDLYVCLRPVRYYEGTPSPVKHPELTNMVIFRENAEDIYAGIEWKAGSPEAEKVIKFLREEMGVKKIRFPEQCGIGVKPCSEEGTKRLVRAAIEYAITNDRESVTLVHKGNIMKFTEGAFKDWGYQLAREEFGGELIDGGPWVKIKNPNNGKEIIVKDVIADAFLQQILLRPAEYDVIACMNLNGDYISDALAAQVGGIGIAPGANIGDDCALFEATHGTAPKYAGQDKVNPGSIILSAEMMLRHMGWFEAADLIIKGTEGAIQAKTVTYDFERLMEGAKLLKCSEFGDAIIKHM

SEQ ID NO: 27949 - DNA, 1077 bp, Thermosynechococcus elongatus BP-1
  CDS (1)..(1077): transl_table=11
atgtcccacgctgtcaccttaattcgcggcgacggtattggtcctgaggttgccgcggcagctcgcaccgccattgatgccacaggcgtcaaaattgactgggtggtggtggatgccggcgtggccatgatggagcgctacggtacccccttgcccgaagaggttatcgatgccatcaaaagtacgaaaactgccatcaaaggcccaattaccacccccgtggggacaggctttcgttctgtcaatgtcgagatccgcaagcggctcaatctctatgcgaacctacggcctgctaaatccattgttggggtgaaaagctattttcaaaacattgacctcgtcattgttcgcgagaataccgaagacctctacgccgggattgagtttgcatacaccagtcccgaagcagctaaagctcgcgcctttttgagtgatctatcgggcaagccgattcgggaggatgcagccattggtgttaagcccatttctgtcctagggagcgatcgcatcctggagtttgccttcaaatatgccaaggctaacggccgcaaaaaagtgacagccgttcacaaggccaacatcatgaaatttaccgatggcctcttccttgaacgtgcccgcgaaattgccagccgttaccccgatattgtctttgaagatcgcattgtcgataacatgtgcatgcagttgatgcagaagcccgaactctacgatgtgatggtgatgccaaacctctacggcgatattctgtcagacctttgtgcagggatgattggtggtctaggggtggctcccggcgccaatattggcgatgaatgtgcggtttttgaggcgattcacggttcagcccccaaatatgcaggtcaaaacaaagccaatcccacggccttgattctctcaggggttttgatgctgcaacacctgggtgaaatggaggcggcacagcgtctgcaagcggctgtcgaaaaagtaattgctgaggggcgctttgtcacctacgatttggcggcgccgggcaaagaacccgtaggtacccaagagatggctgcggcgattgccgagtacgccgccccctaa

SEQ ID NO: 27950 - protein, 358 aa, Thermosynechococcus elongatus BP-1
MSHAVTLIRGDGIGPEVAAAARTAIDATGVKIDWVVVDAGVAMMERYGTPLPEEVIDAIKSTKTAIKGPITTPVGTGFRSVNVEIRKRLNLYANLRPAKSIVGVKSYFQNIDLVIVRENTEDLYAGIEFAYTSPEAAKARAFLSDLSGKPIREDAAIGVKPISVLGSDRILEFAFKYAKANGRKKVTAVHKANIMKFTDGLFLERAREIASRYPDIVFEDRIVDNMCMQLMQKPELYDVMVMPNLYGDILSDLCAGMIGGLGVAPGANIGDECAVFEAIHGSAPKYAGQNKANPTALILSGVLMLQHLGEMEAAQRLQAAVEKVIAEGRFVTYDLAAPGKEPVGTQEMAAAIAEYAAP

SEQ ID NO: 27951 - DNA, 1269 bp, Oceanobacillus iheyensis HTE831
  CDS (1)..(1269): transl_table=11
atgacacaagctgaaaaaatcgtagtagaaaacggaaaaatgaacgtacctgatacgccaatcattccatttattgaaggagacggaactggtccagatatttgggcttctgctcaaaaagttatagaagcagcggttgataaagcgtatgatggtaagaaaagtattgagtggatggaagtatatgctggtcaaaaggcatatgacaaaactggcgaatggttgccaaaagatacacttgataaaattaatgaatataaaattgctatcaaaggtcccttaactacaccgatcggtggaggtattcgttcccttaatgtagcattacgtcaagagttagatttatttacatgtttacgaccagtgcgttactttgaaggagtaccttcgccagttaaacgtccagaagaagtagatatggttattttccgtgaaaatacagaggatatttatgctggaatagaatggcaaaaaggttctgacgaagtgaaaaaagtaattaacttcctaaaagaagaaatgggagtaaaaaatattcgcttcccagaaacgtcaggaattggtgtaaaaccagtatctgaagaaggtacaaaacgattagtgcgttcagctattgactatgcacttaatgaaggtcgtaaaaatgttactttagtacataaaggtaacatcatgaaatttacagaaggtgcttttaaaaactggggttatgaagtagctgagcaagaatacggtgataaagtatttacttgggcagagtacgatcgtattgtagaagcagaaggtaaggatgcagctaataaagcacaagacgaagcacttgcttctggtaaaattcttgtgaaagatgcaattgctgacattttcttacaacaagttcttactcgtccgaaagagtttgatgttgtagctacgatgaatttaaatggtgactacatttctgatgcacttgcagcacaagtaggtggaattggaattgcacctggagcgaacatcaattatgatactggacatgcgatttttgaagcgacacatggtactgcacctaagtatgcgggattagataaagtaaatccatcttctgttattctatccgctgtacttatgttagaacacttaggttggagagaagctgcagacttaattacgaaatcaatggacaagacgattggttcaaaagtagttacgtatgactttgcacgcctaatggatggagcaaaagaggttaaatgctctgaatttggacaagaactaattaaaaatatgtaa

SEQ ID NO: 27952 - protein, 422 aa, Oceanobacillus iheyensis HTE831
MTQAEKIVVENGKMNVPDTPIIPFIEGDGTGPDIWASAQKVIEAAVDKAYDGKKSIEWMEVYAGQKAYDKTGEWLPKDTLDKINEYKIAIKGPLTTPIGGGIRSLNVALRQELDLFTCLRPVRYFEGVPSPVKRPEEVDMVIFRENTEDIYAGIEWQKGSDEVKKVINFLKEEMGVKNIRFPETSGIGVKPVSEEGTKRLVRSAIDYALNEGRKNVTLVHKGNIMKFTEGAFKNWGYEVAEQEYGDKVFTWAEYDRIVEAEGKDAANKAQDEALASGKILVKDAIADIFLQQVLTRPKEFDVVATMNLNGDYISDALAAQVGGIGIAPGANINYDTGHAIFEATHGTAPKYAGLDKVNPSSVILSAVLMLEHLGWREAADLITKSMDKTIGSKVVTYDFARLMDGAKEVKCSEFGQELIKNM

SEQ ID NO: 27953 - DNA, 1008 bp, Shewanella oneidensis MR-1
  CDS (1)..(1008): transl_table=11
atgtcaaaaagaacgataaccgtaattccaggtgatggaattggcccaagtattattgattcagccttaaaaattcttgataaagcaggttgtgattttgaatatgaatttgccgatgctggtttagcagcactcgaaaaacaaggcgagttacttccgcagcgtactttagaactgattgaaaaaaaccgcatcactctgaaaggcccgctgactacaccagtgggtgaaggctttacctctatcaacgtgacattacgtaaaaaattcggcctgtacgcgaacgtgcgcccagtgttgtctttcaaaggcacccaagcccgttatgaaaacattgatatcatcacagtgcgtgaaaacaccgaaggtatgtattcaggccacggtcaaaaagtgtcagaagacggtagcacagctgaagccaccagtattgtcactcgccaaggtgccgaacaaatcgcgacctttgcctacgaactggcccgtaaagaaagccgcaagaaagtcactatcgtgcacaaggcaaacatcatgaagtcaacttcaggtctgttcctgaaagtagctcgtgaagtaagcctacgctatccagatatcaaaaccgaagaaatgatcgtcgatgcgacttgcatgaagttagtaatgaacccagaaaactttgatgtgatcgtgaccactaacctgtttggtgacattctgtcggatctgtgtgcgggtttagtcggtggtttaggtatggcaccaggcgccaacattggccgtgatgcagcgattttcgaagcggttcacggcagcgcgccagatatcgcaggtaaaaacctcgcgaacccaacctcagtgatcttggcctctatccaaatgctggaatacttaggtatggccgataaagcggctccgatccgtaaagcggtatctgctgtgattgaagaaggcgaccgtacgactcgcgatttaggcggcacccacggcacaactgacttcacacaagcggtgcttgaccgtctgtga

SEQ ID NO: 27954 - protein, 335 aa, Shewanella oneidensis MR-1
MSKRTITVIPGDGIGPSIIDSALKILDKAGCDFEYEFADAGLAALEKQGELLPQRTLELIEKNRITLKGPLTTPVGEGFTSINVTLRKKFGLYANVRPVLSFKGTQARYENIDIITVRENTEGMYSGHGQKVSEDGSTAEATSIVTRQGAEQIATFAYELARKESRKKVTIVHKANIMKSTSGLFLKVAREVSLRYPDIKTEEMIVDATCMKLVMNPENFDVIVTTNLFGDILSDLCAGLVGGLGMAPGANIGRDAAIFEAVHGSAPDIAGKNLANPTSVILASIQMLEYLGMADKAAPIRKAVSAVIEEGDRTTRDLGGTHGTTDFTQAVLDRL

SEQ ID NO: 27955 - DNA, 2160 bp, Drosophila melanogaster
  CDS (1)..(2160)
atgtccggcaattggttcaaatggactgctcttcacgggcggccaagaactgtcggcttaaacactaatggaagaattctacggcttttggacgatgccgtagttcgatttcggcagccattctacgaatcttggcggcgtcgtaggcgccttgaagacattgaaaagagagaaatcccagtgcgacagcaagttccaaggatacggcacaatcgttgtccaggggcgaaggaaaatccttgccgcaaaatgcccagtgttcttcctgggaagggtgaagtgcttgttccctctcgcattcaaccgccacggaattcaatgggtttctcagttataagattatttggaagctccactaatgatgggggttccggtgaaccaccggaaaatcgcgaaggaaagctcattaagtttacagtgggttctcgcatagccaaacccaaaacgggcaagattgaaatatcaaaaaaaggaccattaggttttgagacaactaaactaccagttcaagaatcattaccgcagtctgattacttatcaggactatcgaaaaaaagtccagacaaggatacaactccagacaccagcaccacacaagcttcagatcgatcgggaaaagaagggaatgaggaaaaaattaaagatgatatacctagatcattctcagaatacatcatacattgggattccgaatccaaaaatccttcaggaattcagtcccagcaacccgaaagatgcgaaagtgctggaaatcctccatctggagggaaaccacccaccaaacctccaacaggacccagtactccgtcaggtcccagcaatccttcaagaccaccatcaagaaaggataataatccatttagcggaatgggatccgaaccgcctaagaagccacctttgggaagtaagcctcctagcaaattaccaccaagaagtacgtctcccaaaaaaccaccaacaggcagtacaccgccccaaaaaccaacaaaatctagtaagccgccaaataaaccaccagcgggaccagggaaaaagtcagccagtaaaccacccacagcaagtaagcctcctgttaaatctccagcaggaggacaaggtcagaaaggtggagctggaggtaagtctggaaaggcttcaggtgaaccgagggtcataaccctaatgccaggcgatggcatcgggccagagatatcgatggcagtgataaagatccttgaggccgcaaaaactcctttaatctttgagcctgttgacgtgacccccgtgttgaatagccaaggtatgacatcggtgcccgagcaggtgatcgagagtatgaaccgaacgaaagttggtctcaaaggtccactgatgacacccgtgggcactggcttccgctccctcaatcttaccctgcgccagctatttaacctatatgccaacattcgaccgtgcagatccctgccaggtgtggaaaccgtttacggcgatgtggacatagtgaccatacgcgagaacaccgagggtgagtactcgggcatcgagcacaccctggttaacggtgtggtgcagagcatcaagctgatcactcggaatgcctcgctccgggtggccgagtacaccttccagtacgccctggctatgaagcggaaaaaggttacggccgtggctgaatcgcaggttatgaggatgtcggacgggctatttctgcggtgtgtccgcgaaatggcagcaaagtataagagcaaaatggatcaggcaggcattaaatatgaagagtccaccatgactaccgtctgtctgaatattgtccaggatcccaagcgatacgatatgctggtgctgcccaatctgtacggggatatcatttcggacacctgcgccggattgattggtggattgggtctgacgccgtcgggaaatgtaggcaccaatggcgccattttcgagtccgttcacggaactgcgcctgatattgctggcaaggatttggccaacccgaccgccttactgctttcctccgtgatgatgctgcactacatcggattgcatgagcatgcggacaagatagagaaggcagtgctgaagactattagggatgataatattcgcaccatggatctgggcggcaaggccaaatgctccgagtacaccgatgccctgatcaaaaaccttaagtga

SEQ ID NO: 27956 - protein, 719 aa, Drosophila melanogaster
MSGNWFKWTALHGRPRTVGLNTNGRILRLLDDAVVRFRQPFYESWRRRRRLEDIEKREIPVRQQVPRIRHNRCPGAKENPCRKMPSVLPGKGEVLVPSRIQPPRNSMGFSVIRLFGSSTNDGGSGEPPENREGKLIKFTVGSRIAKPKTGKIEISKKGPLGFETTKLPVQESLPQSDYLSGLSKKSPDKDTTPDTSTTQASDRSGKEGNEEKIKDDIPRSFSEYIIHWDSESKNPSGIQSQQPERCESAGNPPSGGKPPTKPPTGPSTPSGPSNPSRPPSRKDNNPFSGMGSEPPKKPPLGSKPPSKLPPRSTSPKKPPTGSTPPQKPTKSSKPPNKPPAGPGKKSASKPPTASKPPVKSPAGGQGQKGGAGGKSGKASGEPRVITLMPGDGIGPEISMAVIKILEAAKTPLIFEPVDVTPVLNSQGMTSVPEQVIESMNRTKVGLKGPLMTPVGTGFRSLNLTLRQLFNLYANIRPCRSLPGVETVYGDVDIVTIRENTEGEYSGIEHTLVNGVVQSIKLITRNASLRVAEYTFQYALAMKRKKVTAVAESQVMRMSDGLFLRCVREMAAKYKSKMDQAGIKYEESTMTTVCLNIVQDPKRYDMLVLPNLYGDIISDTCAGLIGGLGLTPSGNVGTNGAIFESVHGTAPDIAGKDLANPTALLLSSVMMLHYIGLHEHADKIEKAVLKTIRDDNIRTMDLGGKAKCSEYTDALIKNLK

SEQ ID NO: 27957 - DNA, 1257 bp, Pseudomonas putida KT2440
  CDS (1)..(1257): transl_table=11
atgggataccagaaaatcaaggttccgaccgacggcaccaaaattaccgtcaatgcagaccattcgcttaacgtgcctgaccatccgatcattccttacatcgaaggcgacgggatcggcgtcgatgtttcgccggtaatgatcaaggtggtcgatgccgccgtgcagaaggcctacggcggcaagcgcaagattgcctggatggaggtgtacgctggcgagaaagccacccaggtgtatgaccaggatacctggctaccgcaggaaaccctcgatgccgtgcgtgattatgtggtatcgatcaagggcccgctgaccacgcccgtcggtggcggcatccgctccctcaacgtggccctgcgccagcaactggacctgtatgtatgcctgcggccggtgctgtggttccagggtgtgccaagcccggtgaaaaagccgggcgacgtcgacatggtgatcttccgcgagaactccgaagacatctatgccggcatcgagtggaaggccgggtcgcccgaggcgaacaaggtgatcaagtttctcaaggaggaaatgggggtcaccaagatccgcttcgaccaggactgcggtatcggcgtcaagccggtgtcgaaggagggtaccaagcgtctggtgcgcaaggccctgcaatacgtggtggataacgaccgcgaatcactgaccctggtgcacaagggcaacatcatgaagttcaccgagggtgccttcaaggactgggggtacgaggtggcgcgtgacgagttcggcgctgaactgcttgatggcggcccttggatgaagttcaagaaccccaagaccggtcgcgaggtcatcgtcaaggacgccatcgccgacgccatgctgcagcagatcctgctacgcccggccgagtacgacgtgatcgccaccctcaacctcaacggtgactacctgtccgatgccctggccgcagaagtgggcggtatcggcattgccccgggcgccaacctgtccgacaccgtggccatgttcgaggccactcacggcactgcgcccaagtatgccgggcaggacaaggtcaacccgggctcggtgatcctctcggcagagatgatgctgcgccacatggggtggaccgaggccgccgacctgatcatcaagggcaccaatggcgccattgcggccaagaccgtgacctacgatttcgagcgattgatggagggcgccaagctggtaagcagctcaggctttggcgatgaaatgatcaaacacatgtaa

SEQ ID NO: 27958 - protein, 418 aa, Pseudomonas putida KT2440
MGYQKIKVPTDGTKITVNADHSLNVPDHPIIPYIEGDGIGVDVSPVMIKVVDAAVQKAYGGKRKIAWMEVYAGEKATQVYDQDTWLPQETLDAVRDYVVSIKGPLTTPVGGGIRSLNVALRQQLDLYVCLRPVLWFQGVPSPVKKPGDVDMVIFRENSEDIYAGIEWKAGSPEANKVIKFLKEEMGVTKIRFDQDCGIGVKPVSKEGTKRLVRKALQYVVDNDRESLTLVHKGNIMKFTEGAFKDWGYEVARDEFGAELLDGGPWMKFKNPKTGREVIVKDAIADAMLQQILLRPAEYDVIATLNLNGDYLSDALAAEVGGIGIAPGANLSDTVAMFEATHGTAPKYAGQDKVNPGSVILSAEMMLRHMGWTEAADLIIKGTNGAIAAKTVTYDFERLMEGAKLVSSSGFGDEMIKHM

SEQ ID NO: 27959 - DNA, 1008 bp, Xylella fastidiosa Temecula1
  CDS (1)..(1008): transl_table=11
atgacgcaaacaattacggtgatccgcggtgatggtatcggcccggaaatcatggatgccaccctgtcggtattaaacgcgttacaagcgaatctgaattacgaattcgcagatgcaggcttgagcgcacttgaaaaacacggagacttgctaccggaatccaccctgaattcaatcagcaagaacaaaatcgcgctaaaaagcccgctcacaaccccggtaggtgaaggtttcagctcgatcaatgtcgccctgcgacgtaaattcgacttatacgccaacgttcgccccgcaaaatctttcccaaataccaagtcacgctttagcgataacgtagacctgatcaccgtacgggaaaataccgagggtgcctacctgagcgagggtcaaaccatctctcctgacggagaagttgccacttcaagcgcacgagtgacccgtaaagggtcggaacgtatcgtccgttacgcattcgacttagcccgaacaacgggccgcaaaaaggtcaccgcagtacacaaagccaacatcattaaatcaacctctggactatttctgaaaaccgcccgagacgtcgcaagccagtacccagaaatcgatttccaagaaatgatcgtcgacaacacttgcatgcaacttgtaatgcgcccagaacaattcgacatcattgtcaccacaaacttgttcggtgacatcctctcagatttgtgcgcaggcttggtcggcggtttaggcttggctccgggcgccaacattggtaatgaacaagccatcttcgaagccgtacatggctcggctccagacatcgctggacaaggtaaagccaatccatgcgcgctgctgctaggtgctgtacaaatgctggatcatatcggtcaaccacaaaacgccgaacgcctacgcaacgcaatcgtggccacactgaatgccaaagattcgctgactcccgatctggggggtaacggcaacaccatgggattcgccaaggcaattgcaagcagactctaa

SEQ ID NO: 27960 - protein, 335 aa, Xylella fastidiosa Temecula1
MTQTITVIRGDGIGPEIMDATLSVLNALQANLNYEFADAGLSALEKHGDLLPESTLNSISKNKIALKSPLTTPVGEGFSSINVALRRKFDLYANVRPAKSFPNTKSRFSDNVDLITVRENTEGAYLSEGQTISPDGEVATSSARVTRKGSERIVRYAFDLARTTGRKKVTAVHKANIIKSTSGLFLKTARDVASQYPEIDFQEMIVDNTCMQLVMRPEQFDIIVTTNLFGDILSDLCAGLVGGLGLAPGANIGNEQAIFEAVHGSAPDIAGQGKANPCALLLGAVQMLDHIGQPQNAERLRNAIVATLNAKDSLTPDLGGNGNTMGFAKAIASRL

SEQ ID NO: 27961 - DNA, 1191 bp, Bacteroides thetaiotaomicron VPI-5482
  CDS (1)..(1191): transl_table=11
atgaacaaaataaccatgcaaaaagatggtacgctatcggtgcccgatgtgcctgtcgtaccttatattaccggagacggagtaggagcggaagtgactccgtcgatgcagtccgttgtgaacgcggctgttcagaaagcatacggcggcaaacgtcggattgaatggaaagaagtgctggcgggcgaacgcgctttcaacgagacaggttcgtggttgccggatgaaacgatgaaggctttccaagaatatctgatcggcatcaaggggccgctgacgacccctgtcggcggtggaatccgttctttgaacgtggctttgcgccaaactctggatttgtatgtttgtctgcgtccggtccgttggtatcaaggcgttcattctccggtgaaagcaccggaaaaagtgaacatgtgcgtgttccgtgaaaatacggaggatatatatgcaggaatcgagtgggaggcaggtactcccgaagccgaaaagttctatcaattcctgaaaaacgagatgggagtgacgaaagtccgcttccccgagacctcttcttttggagtgaaacctgtttcccgtgagggcacggaacgtcttgtgcgggctgcctgccagtatgcgctcgaccatcatctgccttccgtgacactggtgcacaaaggaaacattatgaagttcaccgaaggaggcttcaagaaatggggctatgagctggcgcaacgtgagttcggcgacgccttggcagacggccggttggtgataaaggactgcatcgccgatgctttcctgcaaaatacattactgattcccgaagaatattccgtgattgccacgctgaacctgaacggagactacgtttccgaccagttggcggcaatggtaggcggcatcggcattgctccgggagcaaatattaactacaagacggggcacgccatttttgaagcgactcatggaaccgcccccaacattgccggaaaggatgtcgtgaatccttgttctatcattctttcggcggtgatgatgcttgaatatctgggatggaaagaagcggccgcgcttatcgaaaaggcgttggaacagagtttcctcgatgcccgtgccacgcacgatctggctcgctttatgccgggaggtacatccctgtctaccaccgctttcacacgcgaaattgtggaaagaatcgaaaagtaa

SEQ ID NO: 27962 - protein, 396 aa, Bacteroides thetaiotaomicron VPI-5482
MNKITMQKDGTLSVPDVPVVPYITGDGVGAEVTPSMQSVVNAAVQKAYGGKRRIEWKEVLAGERAFNETGSWLPDETMKAFQEYLIGIKGPLTTPVGGGIRSLNVALRQTLDLYVCLRPVRWYQGVHSPVKAPEKVNMCVFRENTEDIYAGIEWEAGTPEAEKFYQFLKNEMGVTKVRFPETSSFGVKPVSREGTERLVRAACQYALDHHLPSVTLVHKGNIMKFTEGGFKKWGYELAQREFGDALADGRLVIKDCIADAFLQNTLLIPEEYSVIATLNLNGDYVSDQLAAMVGGIGIAPGANINYKTGHAIFEATHGTAPNIAGKDVVNPCSIILSAVMMLEYLGWKEAAALIEKALEQSFLDARATHDLARFMPGGTSLSTTAFTREIVERIEK

SEQ ID NO: 27963 - DNA, 1284 bp, Coxiella burnetii RSA 493
  CDS (1)..(1284): transl_table=11
atgacggagttaaccggagtatccatcgtgacttaccaacacatcaaagttcccagccaaggtgaaaaaatcaccgttaataaagccgttttagaagttcctgaccgacccattattccctttatcgaaggagatgggattggcattgatatcgcgcccgtcatgaaaaacgtggtcgatgccgccgtggaaaaatcctacgctggaaagcgaaaaattgaatggatggagatctacgccggagaaaaggctacgaaagtgtatggcaaagacaattggctgcctgatgagacactcgaagccattaaagaataccaagtggccattaaaggtcccttaaccacgccggtggggggtggcatacgttcgctcaatgtcgcgctgcgccaacagttagacctgtatgtttgccttaggcccgtccgttattttacgggtgtgccaagcccggtcaaaacgcctgaaaaggtgaatatggtgattttccgcgaaaattctgaagatatttacgccggaattgaatggccggcgggaagcccggaagcggtgaaattaatcaacttccttcaaaacgaaatgggcgtaaagaaaatccgtttcccggaaacggcggggatagggattaaaccggtttctaaagaaggcacgagccgtttagtacgccgagcgattcaatatgccattgataatgaccgcgattccgtgacgctcgtccataaaggtaacatcatgaaattcacggagggggcttttaaagattggggctatgaagtcgctgtcaaagaatttggagcaaagcccttagatggcggaccctggcatgtctttgagaatccgaaaacaggccaaaagattacgattaaagacgttattgccgacgcctttttacaacaaattttattgcgtcccgccgagtacagcgtcatcgccaccttgaacctcaatggagattatatctccgacgcgttagcggccgaagtcggcggcattggcattgctccgggcgctaatttaagcgacaccgtcggtctttttgaagccactcatgggacagcgcctaaatatgcggggcaagataaagtcaatccaggctctctaattttatcagcagaaatgatgctccgttacctaggctggaaagaagccgccgaccttgtcgttcaaggtattgagggggcgattgaaagtaaaacagtaacttacgattttgcccgtttgatgaccggcgccaaagaagtaagtacctctcagttcggcaaagccataattaagcatattctgtag

SEQ ID NO: 27964 - protein, 427 aa, Coxiella burnetii RSA 493
MTELTGVSIVTYQHIKVPSQGEKITVNKAVLEVPDRPIIPFIEGDGIGIDIAPVMKNVVDAAVEKSYAGKRKIEWMEIYAGEKATKVYGKDNWLPDETLEAIKEYQVAIKGPLTTPVGGGIRSLNVALRQQLDLYVCLRPVRYFTGVPSPVKTPEKVNMVIFRENSEDIYAGIEWPAGSPEAVKLINFLQNEMGVKKIRFPETAGIGIKPVSKEGTSRLVRRAIQYAIDNDRDSVTLVHKGNIMKFTEGAFKDWGYEVAVKEFGAKPLDGGPWHVFENPKTGQKITIKDVIADAFLQQILLRPAEYSVIATLNLNGDYISDALAAEVGGIGIAPGANLSDTVGLFEATHGTAPKYAGQDKVNPGSLILSAEMMLRYLGWKEAADLVVQGIEGAIESKTVTYDFARLMTGAKEVSTSQFGKAIIKHIL

SEQ ID NO: 27965 - DNA, 1248 bp, Nitrosomonas europaea ATCC 19718
  CDS (1)..(1248): transl_table=11
atgtatcagcatatcaaagtaccaaccactggcagcaaaattcgggtaaaggatgattcttccctggttgtgcccgacaacccgatcattccttttatcgaaggcgatggtatcggtgtggatatcacacctgtcatgatcagcgttgtcgatggtgcagtaaaaaaagcatacggcgactcccggaaaatttcctggatggaaatatatgccggtgagaaatctacccgggtctatggtcaggatatctggctgccagatgagactttgcaggcagccaaagaattcgtggtatccatcaaagggccgctgaccacaccggtaagtggaggtatccgctcgatcaacgtggcattgcgccagttactggatctgtatgtgtgcctgcgcccggtacgctatttccaaggggtacccagtccggtcaaacaaccggagaaagtggacatggtcatatttcgtgaaaactcggaagatatctatgcgggaatcgaatgggaagccggaacggaagctgttgaaaaagtgatcaatttcctgacggcagaaatgggaattaccaaaatccgattccctcgttcctctgcgatcgggatcaaaccggtttcaaaagaaggcagtgagcgtctgatcagaaaagccatccagtatgcaatcgaccataaacgtcgctctgtcacactggtgcacaaaggtaatatcatgaagttcactgaaggtgccttcaagaaatggggttatgaactggcagcgaaggaattcggtgcggagctactggatggcgggccatggatgatactgcggcacaacggtaatgaaatcatcatcaaagatgtcatcgccgacgcctttctccagcaaatcctgctgcgcccggatgaatatgatgtcatcgccacccttaatttgaacggtgactacatttccgatgctctggccgcacaggtaggcggcattggaatcgcgcccggtgcaaatatgagtgacagcatcgcaatattcgaagcgacacacggcactgcacccaaatatgctggtaaggatcaggtcaacccggggtcaattattctgtcagcagaaatgatgctcagacatatcggctggcatgaagcagccaatattgtcatcagctcaatggaaaaaacgattcaggatcgaatcatgacctacgatctggcaagacttacgccgaacgccaaacaggccacttcttcagaatttgggaatgccatggtagcgaggatgtaa

SEQ ID NO: 27966 - protein, 415 aa, Nitrosomonas europaea ATCC 19718
MYQHIKVPTTGSKIRVKDDSSLVVPDNPIIPFIEGDGIGVDITPVMISVVDGAVKKAYGDSRKISWMEIYAGEKSTRVYGQDIWLPDETLQAAKEFVVSIKGPLTTPVSGGIRSINVALRQLLDLYVCLRPVRYFQGVPSPVKQPEKVDMVIFRENSEDIYAGIEWEAGTEAVEKVINFLTAEMGITKIRFPRSSAIGIKPVSKEGSERLIRKAIQYAIDHKRRSVTLVHKGNIMKFTEGAFKKWGYELAAKEFGAELLDGGPWMILRHNGNEIIIKDVIADAFLQQILLRPDEYDVIATLNLNGDYISDALAAQVGGIGIAPGANMSDSIAIFEATHGTAPKYAGKDQVNPGSIILSAEMMLRHIGWHEAANIVISSMEKTIQDRIMTYDLARLTPNAKQATSSEFGNAMVARM

SEQ ID NO: 27967 - DNA, 1092 bp, Arabidopsis thaliana
  CDS (1)..(1092)
atgtctcgccaatcgttttctctactgaagaatcttcgtagcatcgcttccggttccaaaatccagacccgatccgtgacttacatgcccagacccggtgacggaaaaccaagaccagtgacgttaatccccggagacggagttggtccgttggtaacaaacgcggttcaacaagtgatggaagcgatgcacgctccggtttacttcgaaccgttcgaagttcatggagatatgaagagtttacctgaaggattgttggaatcgattaagaagaacaaagtttgtttgaaaggtggtcttaagactcccgtcggtggtggtgtgagctctctcaatgttaatctgagaaaggagcttgatctctttgcttctttggtcaactgtttcaatttgcctggtttagcttctcgtcatgagaatgttgatattgttgtgattagagagaacactgaaggtgaatatgcaggtcttgaacatgaagttgttcctggtgttgttgagagccttaagttctgttcagagcgtattgcaaagtatgcgtttgagtatgcctacttgaacaacaggaagaaagttacagcagtgcacaaggctaatatcatgaaattggctgatggtttgttcttggagtcttgtcaagaggttgctaagaagtatccaagcattgcttacaatgaaatcattgttgataattgttgtatgcaacttgtggctagaccagagcaattcgatgtcatggtgacgcctaatctctatggtaatctagtggcaaacactgctgctggtattgctggaggtactggagtcatgcctggaggaaatgttggggcggagtatgcggtctttgagcaaggtgcatcagcgggaaacgtggggaaggatacaacggaagagcaaaagaatgcaaaccctgtggctttgttgctgtcatcagccatgatgcttagacaccttcagttcccttcttttgctgacaggcttgaaaccgctgtgaagcgtgttatcgctgaagggaattgtcggactgaagatcttggtggaaacagtaccactcaagaggtcgttgacgctgtcattgcaaatttggattga

SEQ ID NO: 27968 - protein, 363 aa, Arabidopsis thaliana
MSRQSFSLLKNLRSIASGSKIQTRSVTYMPRPGDGKPRPVTLIPGDGVGPLVTNAVQQVMEAMHAPVYFEPFEVHGDMKSLPEGLLESIKKNKVCLKGGLKTPVGGGVSSLNVNLRKELDLFASLVNCFNLPGLASRHENVDIVVIRENTEGEYAGLEHEVVPGVVESLKFCSERIAKYAFEYAYLNNRKKVTAVHKANIMKLADGLFLESCQEVAKKYPSIAYNEIIVDNCCMQLVARPEQFDVMVTPNLYGNLVANTAAGIAGGTGVMPGGNVGAEYAVFEQGASAGNVGKDTTEEQKNANPVALLLSSAMMLRHLQFPSFADRLETAVKRVIAEGNCRTEDLGGNSTTQEVVDAVIANLD

SEQ ID NO: 27969 - DNA, 1125 bp, Arabidopsis thaliana
  CDS (1)..(1125)
atgaccatgacagcatttctcgcgagacggcttatcggtaacggatcgagccagattctcgggacttcgagttctagctccggtccgttcatttccgtttctagggctttcttctcctcctccactccgatcaaagctactctctttcccggtgatgggatcggtcccgaaatcgctgaatctgtcaagcaggtgtttactgccgctgatgtggttattgattgggacgaacagtttgttggtactgaagtagatcctagaaccaatagtttcttgacatgggataatcttcaatctgtgcttaaaaacaaggttggtttgaaaggaccaatggctactccaattggaaagggtcaccgttccttgaaccttactcttaggaaagagctgaatttgtatgccaatgttaggccttgttacagtcttcctggttacaaaacccgttatgatgatgttgatctcattaccattcgtgagaacactgaaggagagtacagtgggcttgaacaccaggtcgtcaagggtgtagtggaaagtcttaaaattattacccgtaaggcgagtatgagagttgccgagtatgcctttctttatgccaagactcacggaaggaagaaagtttctgcaattcacaaagccaacattatgcagaaaactgatggtcttttcctgcagtgttgtgatgaagttgctgcgaagtatcctgagatatattacgagaaggttgttattgacaattgctgtatgatgcttgtgaaaaacccagcactttttgatgtcttggtgatgccaaatctctatggagatattatcagcgatttgtgtgctggacttgttgggggactaggactgactcctagtatgaatattggggaggatggtattgcccttgctgaagctgttcacggctctgcacctgatattgctggaatgaacctggcgaacccaacagctttgctactgagtggagtgatgatgttgcggcacctgaagctcaacaaacaagcagagcaaatccacagtgccatcatcaacacaatagccgagggaaagtatagaactgctgatctcggaggttcctcaactacaacagatttcacaaaagccatctgtgatcatctctaa

SEQ ID NO: 27970 - protein, 374 aa, Arabidopsis thaliana
MTMTAFLARRLIGNGSSQILGTSSSSSGPFISVSRAFFSSSTPIKATLFPGDGIGPEIAESVKQVFTAADVVIDWDEQFVGTEVDPRTNSFLTWDNLQSVLKNKVGLKGPMATPIGKGHRSLNLTLRKELNLYANVRPCYSLPGYKTRYDDVDLITIRENTEGEYSGLEHQVVKGVVESLKIITRKASMRVAEYAFLYAKTHGRKKVSAIHKANIMQKTDGLFLQCCDEVAAKYPEIYYEKVVIDNCCMMLVKNPALFDVLVMPNLYGDIISDLCAGLVGGLGLTPSMNIGEDGIALAEAVHGSAPDIAGMNLANPTALLLSGVMMLRHLKLNKQAEQIHSAIINTIAEGKYRTADLGGSSTTTDFTKAICDHL

SEQ ID NO: 27971 - DNA, 1425 bp, Prochlorococcus marinus subsp. marinus str. CCMP1375
  CDS (1)..(1425): transl_table=11
atggttcattatgagaagctctctccaccaaccacaggagaaaaaattaaattcaataatggattgcctatagtgcccgcaaatcccatcattccttatataagaggagatggaacaggggtagacatctggcccgcaacacaaaaggtaattgatcaagccatagaaaaagcctatgggattgatagaaaaatagaatggttcaaaatatatgcaggcgatgaagcttgtgatttatatggcacttaccaatatctacctaaggacaccatagaggcaattcgagagtatggagtggcaattaaagggcccttaacaacaccaattgggggaggcattagatctttaaatgttgctcttaggcaaaaatttgatctatatagttgtgtacgaccatgccgttattatcaaggtacaccaagtcctcataaacatcctgaaaacctagatgtaattgtttatcgcgagaatactgaagatatatatattggtattgaatgggagtcaaatgatccaattggcataaagcttatagagcatctaaacaatgatgtaattcctgctagtccgtctcttaaaaatcgaattattcctcaaggatcaggtattggaatcaagcccgttagtaaagatggtagccaacgacatattcgaagagctatacaacatgctttgaaactgaatggcaataaacgtcatgtaacgctagtacataaaggaaatattatgaaatttactgaaggctcatttcgagattggggatatgaattagcaactaatgaatttcgtaatgaatgtataactgaaagggaaagctggatactttccaatctagagcaaaatcctagattaagtattgaaaataatgcaaagttgattgaccctggttatgaatcattaacaaaagaaaaaaaagatattatttgcaatgaggttcaacttgtaattaataatattcataaaacacatggaaataacaaatggaaaaaaatggttttagttgacgataggattgcagacagtatattccaacaaatacaaaccagacctcaagaatattccatattagcaacattaaatttgaatggggactacatatcagatgccgctgctgcaattgttggaggattaggaatggctcccggtgcaaatattggtgatcgagctgcgatttttgaagccacacatggcactgctccaaagcatgctggactcgatagaattaatccaggttcagtgattttaagcggcgtaatgatgctggaatatataggttggcaagaagctgctgacttaattacaaaaggtttgagtcaatcaatttacgataaacaagtcacttatgaccttgccaggttaatggaacctcctcaatctccattaagttgtagtgaatttgcaaatgcggtaattgaacgattctaa

SEQ ID NO: 27972 - protein, 474 aa, Prochlorococcus marinus subsp. marinus str. CCMP1375
MVHYEKLSPPTTGEKIKFNNGLPIVPANPIIPYIRGDGTGVDIWPATQKVIDQAIEKAYGIDRKIEWFKIYAGDEACDLYGTYQYLPKDTIEAIREYGVAIKGPLTTPIGGGIRSLNVALRQKFDLYSCVRPCRYYQGTPSPHKHPENLDVIVYRENTEDIYIGIEWESNDPIGIKLIEHLNNDVIPASPSLKNRIIPQGSGIGIKPVSKDGSQRHIRRAIQHALKLNGNKRHVTLVHKGNIMKFTEGSFRDWGYELATNEFRNECITERESWILSNLEQNPRLSIENNAKLIDPGYESLTKEKKDIICNEVQLVINNIHKTHGNNKWKKMVLVDDRIADSIFQQIQTRPQEYSILATLNLNGDYISDAAAAIVGGLGMAPGANIGDRAAIFEATHGTAPKHAGLDRINPGSVILSGVMMLEYIGWQEAADLITKGLSQSIYDKQVTYDLARLMEPPQSPLSCSEFANAVIERF

SEQ ID NO: 27973 - DNA, 1257 bp, Bordetella parapertussis 12822
  CDS (1)..(1257): transl_table=11
atgtcctatcaacatatcaaggttcccactgggggccaaaaaatcacggtcaacgccgattactcgctgaatgtgcccgatcaggtcatcattccggtcatcgagggtgacggtacgggcgccgacatcacgccggtgatgatcaaggtcgtcgacgcggccgtgcagaaggcctatgcgggcaagcgcaagatccactggatggaagtctacgccggcgagaaggccaccaaggtctacggcccggacgtctggctgcccgaggaaaccctcgacgccgtcaaggactacgtggtgtcgatcaagggtccgctgaccacgccggtcggcggcggcatccgttcgctgaacgtggcgctgcgccagcagctggacctgtatgtctgcctgcgcccggtgcgctatttcaagggcgtgccctcgccggtgcgcgagcccgagaagaccgacatggtcatcttccgcgagaactcggaagacatctacgcgggcatcgagtacatggccgagtccgagcaggccaaggacctgatccagtacctgcagaccaagctgggcgcgaccaagatccgcttcccgaacacctcgtcgatcggcatcaagccggtttcgcgcgaaggcaccgagcgcctggtgcgcaaggcgctgcagtacgccatcgacaatgaccgcgcctcggtgaccctggtccacaagggcaacatcatgaagttcacggaaggcggcttccgcgactggggctacgccctggcccagaacgagttcggcgcgcagccgatcgacggcggcccgtggtgcaagttcaagaatcccaagacgggtcgcgagatcatcgtcaaggattcgatcgccgacgccttcctgcagcagatcctgctgcgtccggccgaatacgacgtgatcgccacgctgaacctgaacggcgactacatctccgacgcgctggccgcgcaagtgggcggcatcggcattgccccgggcgccaacctgtcggactccgtggccatgttcgaagccacccacggcaccgcgccgaagtacgcgggcaaggactacgtgaaccccggttccgaaatcctgtcggccgaaatgatgctgcgccacatgggctggaccgaggccgccgacctgatcatcgccagcatggagaaatccatcctgtccaagaaggtcacctatgacttcgcccgtctgctcgaaggcgccacccaggtgtcgtgctcgggcttcggtcaggtcatgatcgacaatatgtaa

SEQ ID NO: 27974 - protein, 418 aa, Bordetella parapertussis 12822
MSYQHIKVPTGGQKITVNADYSLNVPDQVIIPVIEGDGTGADITPVMIKVVDAAVQKAYAGKRKIHWMEVYAGEKATKVYGPDVWLPEETLDAVKDYVVSIKGPLTTPVGGGIRSLNVALRQQLDLYVCLRPVRYFKGVPSPVREPEKTDMVIFRENSEDIYAGIEYMAESEQAKDLIQYLQTKLGATKIRFPNTSSIGIKPVSREGTERLVRKALQYAIDNDRASVTLVHKGNIMKFTEGGFRDWGYALAQNEFGAQPIDGGPWCKFKNPKTGREIIVKDSIADAFLQQILLRPAEYDVIATLNLNGDYISDALAAQVGGIGIAPGANLSDSVAMFEATHGTAPKYAGKDYVNPGSEILSAEMMLRHMGWTEAADLIIASMEKSILSKKVTYDFARLLEGATQVSCSGFGQVMIDNM

SEQ ID NO: 27975 - DNA, 1257 bp, Bordetella bronchiseptica RB50
  CDS (1)..(1257): transl_table=11
atgtcctatcaacatatcaaggttcccactgggggccaaaaaatcacggtcaacgccgattactcgctgaatgtgcccgatcaggtcatcattccggtcatcgagggtgacggtacgggcgccgacatcacgccggtgatgatcaaggtcgtcgacgcggctgtgcagaaggcctatgcgggcaagcgcaagatccactggatggaagtctacgccggcgagaaggccaccaaggtctacggcccggacgtctggctgcccgaggaaaccctcgacgccgtcaaggactacgtggtgtcgatcaagggtccgctgaccacgccggtcggcggcggcatccgttcgctgaacgtggcgctgcgccagcagctggacctgtatgtctgcctgcgcccggtgcgctacttcaagggcgtgccctcgccggtgcgcgagcccgagaagaccgacatggtcatcttccgcgagaactcggaagacatctacgcgggcatcgagtacatggccgagtccgagcaggccaaggacctgatccagtacctgcagaccaagctgggcgtgaccaagatccgcttcccgaacacctcgtcgatcggcatcaagccggtttcgcgcgaaggcaccgagcgcctggtgcgcaaggcgctgcagtacgccatcgacaatgaccgcgcctcggtgaccctggtccacaagggcaacatcatgaagttcacggaaggcggcttccgcgactggggctacgccctggcccagaacgagttcggcgcgcagccgatcgacggcggcccgtggtgcaagttcaagaatcccaagacgggtcgcgagatcatcgtcaaggattcgatcgccgacgccttcctgcagcagatcctgctgcgtccggccgaatacgacgtgatcgccacgctgaacctgaacggcgactacatctccgacgcgctggccgcgcaagtgggcggcatcggcattgccccgggcgccaacctgtcggattccgtggccatgttcgaagccacccacggcaccgcgccgaagtacgcgggcaaggactacgtgaaccccggttccgaaatcctgtcggccgaaatgatgctgcgccacatgggctggaccgaggccgccgacctgatcatcgccagcatggagaaatccatcctgtccaagaaggtcacctatgacttcgcccgtctgctcgaaggcgccacccaggtgtcgtgctcgggcttcggtcaggtcatgatcgacaatatgtaa

SEQ ID NO: 27976 - protein, 418 aa, Bordetella bronchiseptica RB50
MSYQHIKVPTGGQKITVNADYSLNVPDQVIIPVIEGDGTGADITPVMIKVVDAAVQKAYAGKRKIHWMEVYAGEKATKVYGPDVWLPEETLDAVKDYVVSIKGPLTTPVGGGIRSLNVALRQQLDLYVCLRPVRYFKGVPSPVREPEKTDMVIFRENSEDIYAGIEYMAESEQAKDLIQYLQTKLGVTKIRFPNTSSIGIKPVSREGTERLVRKALQYAIDNDRASVTLVHKGNIMKFTEGGFRDWGYALAQNEFGAQPIDGGPWCKFKNPKTGREIIVKDSIADAFLQQILLRPAEYDVIATLNLNGDYISDALAAQVGGIGIAPGANLSDSVAMFEATHGTAPKYAGKDYVNPGSEILSAEMMLRHMGWTEAADLIIASMEKSILSKKVTYDFARLLEGATQVSCSGFGQVMIDNM

SEQ ID NO: 27977 - DNA, 1425 bp, Prochlorococcus marinus subsp. pastoris str. CCMP1986
  CDS (1)..(1425): transl_table=11
atgcctaaatttgaaaaattaaatttaccaaaagaaggagagttaattacttttaatcaaggtaagcctaatgttcctaataatcctattgtcccttatataagaggtgacggtactggggtagatatttggccagctactcaacttgttcttgatgaagcaataaaaaaaagttatggagatgagagaaaaataaattggttcaaagtctatgctggtgacgaagcttgtgaaatatacggaacttacaactatttaccacaggatactattgaagcaataagacactttggagttgcaattaaaggcccattaacaactcctataggagggggaattagatctttaaatgtcgctttaagacaaatttttgacttatatagctgcgttagaccttgtaaatactattcagggactcctagccctcataaaaatccacaaaatttagacgtaattgtttatagagaaaatacagaagatatttatatgggtattgaatgggaagccgatgatcatacatgcattgatttaattaatcatctaaataatgttgtcattccaaatagcaaaaatttaaaaaatagatcaataccggacggttcaggtattgggataaaacccgtaagtaagttaggaagtcaaaggcatataagaaaggccatagaacatgcaaaaagattatcaggaaataaaaagcatgtaactcttgttcataaaggaaatatcatgaaatatacagaaggtgcatttagagattggggatatgaattagcagtaaatgaattcagagcagactgcattacggaaagagaaagctggattttagacaatattcacaaaaatccagaaattacaatcgaaaataatgccagaaagatagagccaggctatgacaagctaacaagtaataaaaaagcatttatttgcgaagaaataaaagaagtaatagcctcaatatcaaattctcatggaaataataaatgggaagaactcattatggttgatgatcgaattgctgacagtattttccaacaaattcaaacaaggcctcaagaatattctattcttgcgaccttgaacttaaacggagattatgtttctgatgctgctgctgcaattgtgggaggcctaggtatggctcccggagctaatattggagataattccgcaatttttgaagcaacgcatggaacagctccaaaacatgcaggattaaacaaaattaatccgggttcggtaattcttagtggagtaatgatgcttgaatattttggttggaatgaagcagcgaagctggtgacttctggaattagtaaagctattgaagaaaaaaaagtcacctatgatctagcacgcttaatggaaccaaaggtagcaccactatcctgtagtggttttgctgaagcaattatctcaaatttttaa

SEQ ID NO: 27978 - protein, 474 aa, Prochlorococcus marinus subsp. pastoris str. CCMP1986
MPKFEKLNLPKEGELITFNQGKPNVPNNPIVPYIRGDGTGVDIWPATQLVLDEAIKKSYGDERKINWFKVYAGDEACEIYGTYNYLPQDTIEAIRHFGVAIKGPLTTPIGGGIRSLNVALRQIFDLYSCVRPCKYYSGTPSPHKNPQNLDVIVYRENTEDIYMGIEWEADDHTCIDLINHLNNVVIPNSKNLKNRSIPDGSGIGIKPVSKLGSQRHIRKAIEHAKRLSGNKKHVTLVHKGNIMKYTEGAFRDWGYELAVNEFRADCITERESWILDNIHKNPEITIENNARKIEPGYDKLTSNKKAFICEEIKEVIASISNSHGNNKWEELIMVDDRIADSIFQQIQTRPQEYSILATLNLNGDYVSDAAAAIVGGLGMAPGANIGDNSAIFEATHGTAPKHAGLNKINPGSVILSGVMMLEYFGWNEAAKLVTSGISKAIEEKKVTYDLARLMEPKVAPLSCSGFAEAIISNF

SEQ ID NO: 27979 - DNA, 1425 bp, Prochlorococcus marinus str. MIT 9313
  CDS (1)..(1425): transl_table=11
atggctcagttcgagaaactctccccaccaagccagggcacggccatccgcttcgtgaacggtcagccagtcatacccaacgagccaatcattcccttcatccgcggtgatggcacaggtgtggacatctggccggcgacccaacgagtgctggatgcagctgtaacaaaggcctatcaaggcgtgcgtcgtatcgaatggttcaaggtctatgcaggcgacgaggcctgcgatctctacggcacctaccagtacctaccagaggacacccttgaagcgatccgaacctatggggtcgccatcaaaggtcccctcacgactccaattggtgggggcatccgttccctcaatgtggccctacgtcaaatcttcgatttgtattcctgcgtccgcccatgtcgctactacaagggcacacccagtccccacaaacggcctcaggatcttgatgtcatcgtctaccgagaaaacacggaagatatctacatgggggtggaatgggaagccgatgatccagtcggcaagacattgcgcgaacatctcaacactgtcgtcattcccgccaacggcaagctcggcaaacgccagattcctgaaggctcaggcatcggcatcaagccggtaagcaagcacggcagccagcgtcatatccgcaaagcgattcaacatgctcttcggctaaagggcgacaagcgccacgtcaccttggtgcacaaaggcaacatcatgaagttcactgaaggagccttccgtgactggggctatgaactcgccacaagtgagttccgcgacgtgtgcatcaccgaaagggagagctggattctcggcaatcttgaaaacgatccacaactaagcatccaagccaatgcccgcatgatcgagcctggctacgacagcctcacgcctgagagaaaggccagcatcgatgccgaagtgcacggcgtgctggatgccatcggcaccagtcatggcaacggccaatggaaagcgatggtgcttgtcgatgaccgcatcgccgacagcatcttccaacagatccaaacacggccgcaggaatactcaatcctggcaacactcaacctcaatggcgactacatctccgacgcagccgcggcgatggtgggcggattaggcatggccccgggagccaacatcggcgagaacgctgccatcttcgaggcgacccacggaacagcacccaagcatgccggccttgatcgcatcaaccctggatcggtgatcctcagcggcgtgatgatgctggagtttctgggctggcaagaagccgcagacttgatcacaaaagggctcagtgctgcgattgccaatcaacaggtcacctatgacctggctcgcctcatggacccacccgtagaccctgtgagctgcagtggcttctctgaggccgtcatcagccacttctaa

SEQ ID NO: 27980 - protein, 474 aa, Prochlorococcus marinus str. MIT 9313
MAQFEKLSPPSQGTAIRFVNGQPVIPNEPIIPFIRGDGTGVDIWPATQRVLDAAVTKAYQGVRRIEWFKVYAGDEACDLYGTYQYLPEDTLEAIRTYGVAIKGPLTTPIGGGIRSLNVALRQIFDLYSCVRPCRYYKGTPSPHKRPQDLDVIVYRENTEDIYMGVEWEADDPVGKTLREHLNTVVIPANGKLGKRQIPEGSGIGIKPVSKHGSQRHIRKAIQHALRLKGDKRHVTLVHKGNIMKFTEGAFRDWGYELATSEFRDVCITERESWILGNLENDPQLSIQANARMIEPGYDSLTPERKASIDAEVHGVLDAIGTSHGNGQWKAMVLVDDRIADSIFQQIQTRPQEYSILATLNLNGDYISDAAAAMVGGLGMAPGANIGENAAIFEATHGTAPKHAGLDRINPGSVILSGVMMLEFLGWQEAADLITKGLSAAIANQQVTYDLARLMDPPVDPVSCSGFSEAVISHF

SEQ ID NO: 27981 - DNA, 1425 bp, Synechococcus sp. WH 8102
  CDS (1)..(1425): transl_table=11
atggcccagtttgagaagctcaccgcccccagccagggcacaccgattcgcttcgagaacggccaacctgtcgtggccgacaatccgatcattcccttcatccgcggtgatgggaccggcgtagacatctggcctgccacccagaaggtattggatgccgccgtggcaaaggcctatggcggagttaaaaccatcgagtggttcaaggtgtatgccggcgatgaggcctgcgacctctacggcacctatcagtacctgcccgaagacaccctcgaagcgatccgcacctacggcgtggccatcaagggccccctcaccacccccgtgggtggcggcatccgttcgctgaacgtggccctgcgccagatcttcgatctttactcctgcgtgcgcccttgccgttattacgagggcacccccagtcctcacaagcgtccccaggatctggacgtgatcgtctaccgggagaacaccgaagacatctacatgggagttgagtgggaggccgatgacgcggttggtcaggagctgcgcaagcacctcaacgaggtggtgattcctgccaacggcaagctgggcaaacgacagatcccggaaggctccggcatcggcatcaaaccggtgagcaaacacggcagccagcgccacatccgcaaagcgatccagcacgccctacgcctggagggcaacaagcgccacgtgaccctggtgcacaagggcaacatcatgaaattcaccgaaggtgcgtttcgcgactggggctacgaactggccaccacggagttccgcgacgtgtgcatcaccgagcgggagagctggatcctcggcaacctcgagaaggattcaggactgagtgtgcaggccaacgcccggatgattgaaccgggctacgacagcctcacccccgagaagaaagcggacatcgatgctgaagtgcaggccgtgatcgatgccatcggcagcagccatgggggcggcaagtggaggtcgatggtgctggtggatgaccgcatcgccgacagcatcttccagcagatccagacccgccctcaggagtattcgatcctggccaccctcaacctcaatggcgactacatctccgatgcagccgcggccatggtgggcggtctgggcatggcccccggcgccaatatcggcgaaaccgccgccatcttcgaagccacccacggcaccgccccgaaacatgccggtctcgaccgcatcaaccccggttcagtgatcctcagcggcgtgatgatgctggaattcctgggttggcaggaggctgcagacctggtgaccaaaggcctgagtgccgccattaccgacaaacaaatcacctacgacctggccaggctgatggaaccgcaggtggaccctgtgagctgcagcggcttcgctgaagcgattatccagcgattctga

SEQ ID NO: 27982 - protein, 474 aa, Synechococcus sp. WH 8102
MAQFEKLTAPSQGTPIRFENGQPVVADNPIIPFIRGDGTGVDIWPATQKVLDAAVAKAYGGVKTIEWFKVYAGDEACDLYGTYQYLPEDTLEAIRTYGVAIKGPLTTPVGGGIRSLNVALRQIFDLYSCVRPCRYYEGTPSPHKRPQDLDVIVYRENTEDIYMGVEWEADDAVGQELRKHLNEVVIPANGKLGKRQIPEGSGIGIKPVSKHGSQRHIRKAIQHALRLEGNKRHVTLVHKGNIMKFTEGAFRDWGYELATTEFRDVCITERESWILGNLEKDSGLSVQANARMIEPGYDSLTPEKKADIDAEVQAVIDAIGSSHGGGKWRSMVLVDDRIADSIFQQIQTRPQEYSILATLNLNGDYISDAAAAMVGGLGMAPGANIGETAAIFEATHGTAPKHAGLDRINPGSVILSGVMMLEFLGWQEAADLVTKGLSAAITDKQITYDLARLMEPQVDPVSCSGFAEAIIQRF

SEQ ID NO: 27983 - DNA, 1293 bp, Wolinella succinogenes DSM 1740
  CDS (1)..(1293): transl_table=11
atggctaattttgaaggctacaatccccgatttctccccttgcccaccgaaggcgaggcaatcaccctcacccctgagggaatcctccaggtccctgatcaccccattatcccctacattgagggcgatggcattggcatggatatcacgccagcgatgaaaagtgttgtggacgctgcggtgaacaaggcctatggaggcaaaagaaaaatcgcatggtatgaggtctacacgggcgagaagtgctatgaaaagtttaaaaatgaaaagagcctctctccgatggatcagtggctcctccctgatacgattgatgcaatcaactacttcaaggtctccatcaaaggccctctaaccacgcccgtgggcgaaggatttcgcagcctgaatgttgccttgcgccagatgatggatctctatgtctgcctccgccctgtgcgctggtatggcagccccagccctgtcaaagagcctcacaaggtcgatatggtgatctatcgcgaaaatagtgaggatatctacgcgggaatcgagtttgccgccgagagcaaagaggccaacaaagtgatccaattcctccaaaacgaaatggaggtgaaaaagattcgattccccaaaacaagcgccatcggaatcaagcccgtgagcaaagaggggagtgagcgtctcatcagaaaagccatccaatacgctatcgacaacgaccgcgcctccctcacctttgttcacaaaggcaacatcatgaaattcaccgagggcggattcatgaagtggggttatgagctgctcaaacgagaatttggcgcgaccgagatcgatggaggtccttggtgctccatgaaaaacccaaaaacaggcaaagagatcatcatcaaagacgtcattgctgatgccttcttgcagcagattctcttgcgccctgctgaatatgatgtcattgccaccatgaatctcaatggcgactatatctctgacgcgctcgctgcgatggttggaggaatcgggatcgctcctggtgccaacctcaatgatagcgtggcgatgtttgaggcgactcatggaaccgcgcccaaatacgctggacttgacaaggtcaaccccggctctcttatcctaagtgcagagatgatgctgcgccacatgggctggatcgaggcggccgacctcgtcgtctcctccatgaaaaaggcgatcgaatccaaaaatgtcacttacgactttgcccgcttgatggagggcgccaaagaggtgaaatgctccgaatttgcccaagtcatgattgagcgaatgtaa

SEQ ID NO: 27984 - protein, 430 aa, Wolinella succinogenes DSM 1740
MANFEGYNPRFLPLPTEGEAITLTPEGILQVPDHPIIPYIEGDGIGMDITPAMKSVVDAAVNKAYGGKRKIAWYEVYTGEKCYEKFKNEKSLSPMDQWLLPDTIDAINYFKVSIKGPLTTPVGEGFRSLNVALRQMMDLYVCLRPVRWYGSPSPVKEPHKVDMVIYRENSEDIYAGIEFAAESKEANKVIQFLQNEMEVKKIRFPKTSAIGIKPVSKEGSERLIRKAIQYAIDNDRASLTFVHKGNIMKFTEGGFMKWGYELLKREFGATEIDGGPWCSMKNPKTGKEIIIKDVIADAFLQQILLRPAEYDVIATMNLNGDYISDALAAMVGGIGIAPGANLNDSVAMFEATHGTAPKYAGLDKVNPGSLILSAEMMLRHMGWIEAADLVVSSMKKAIESKNVTYDFARLMEGAKEVKCSEFAQVMIERM

SEQ ID NO: 27985 - DNA, 1089 bp, Oryza sativa (japonica cultivar-group)
  CDS (1)..(1089)
atggcgctacggaggctgctccaggggagcgtcctgccgcggatggcgggcagagccgccgcggcgccgttctcgacggcgtccggggagaccgtccgcgccacgctcttcccaggcgacggcatcgggccggagatcgccgagtcggtcaagcaggtattcaatgttgcaggggtaccaatagaatgggaagaacactatgttggtacagaagttgatcccagaacagagagttttctgacttgggaaagcttggagtcggtgcggagaaacaaagttggcttgaaaggtcctatggctacgcctattggaaaaggccaccgttcattgaatcttacactaaggaaagagcttggtctttatgcaaatgttagaccttgcaacagcctcccaggatacaagactcgatatgatgatgtgaaccttgtgactattcgtgaaaataccgagggagaatatagtggccttgagcatcaggttgtgaggggtgttgtggaaagcttaaaaattatcactcgccaagcaagtttaagagtggcagagtatgctttccactatgccaagaccaatggccgggagagggtctctgcgatacacaaggccaatatcatgaggaagaccgatggtcttttcctcaagtgctgtcgtgaagtggctgagaagtaccctgaaattgtatacgaggaggtcatcattgacaattgttgtatgacgcttgtgaagaatcctggtctttttgatgtactggtgatgccaaatctttatggtgatattattagtgatctttgtgctggtctgattggaggcttgggcttgacacccagctgcaacattggtgaaggtggcatttgtctggcagaagctgttcacggttctgctcctgatattgctggcaagaaccttgcaaacccgaccgctcttatgctgagtgctgttatgatgttgcgccacttgcaattcaataaccaagcagaccggatccacaacgccatcctccagaccatctccgaggggaaattcaggactgctgatctcggcggaaaggcgtcgacttcagacttcacgaaggcagtctgtgatcatatctga

SEQ ID NO: 27986 - protein, 362 aa, Oryza sativa (japonica cultivar-group)
MALRRLLQGSVLPRMAGRAAAAPFSTASGETVRATLFPGDGIGPEIAESVKQVFNVAGVPIEWEEHYVGTEVDPRTESFLTWESLESVRRNKVGLKGPMATPIGKGHRSLNLTLRKELGLYANVRPCNSLPGYKTRYDDVNLVTIRENTEGEYSGLEHQVVRGVVESLKIITRQASLRVAEYAFHYAKTNGRERVSAIHKANIMRKTDGLFLKCCREVAEKYPEIVYEEVIIDNCCMTLVKNPGLFDVLVMPNLYGDIISDLCAGLIGGLGLTPSCNIGEGGICLAEAVHGSAPDIAGKNLANPTALMLSAVMMLRHLQFNNQADRIHNAILQTISEGKFRTADLGGKASTSDFTKAVCDHI

SEQ ID NO: 27987 - DNA, 1080 bp, Gloeobacter violaceus PCC 7421
  CDS (1)..(1080): transl_table=11
gtgtccccatatcgtgtcacactgatccgcggcgatgggatcggcccggaagtgacgcaggcagcccggatcgtgctcgacgccaccgggatcgactttgagtgggtcgtggtcgatgccggcgccgaggtgatggagaagtccggcacaccccttccggccccagtgatcgaagcggtgcgcgcgagcgacgccgccatcaaaggcccgatcaccacccccgcaggttcgggcatccgttcggtcaacgtcgccttgcgtcgggccctcgacttgtacgccaacctgcgcccggcccgcaccctgcccggggtgcactcgcgctacgacaatatcgatctggtggtcgtgcgcgaaaataccgaggacctctacagcggcatcgagtttgaaaaaaattctccccaggctcttgaagtaatcgagatgctcatgcgcctgggcggcaaaaaaatctttccaagatccggccttgcggtcaaaccaatctccagcgaggcgagcgagcggatcgcccgcttcgccttcgagtacgcccgccgccacgcccgccgcaaagttaccgccgtccacaaggcgaatatcttgaagcacaccgacggtctgtttctggaggctgcccgccaggtggcttcggagtatccggatgtcgagtttgaagatcggatcgtggacaacctttgcatgcaactcgtccagaggccggaatcctacgacgtcctggtgctgcccaacctctatggcgatatcgtctcggatctgaccgccgggctggtgggcggtctcggggtggcgccgggggccaatatcggcgatcgcagcgccgtcttcgaagcgatccacggctcggcgccgcgctacgccggtcagaacaaggtcaatccctcggcactcatcctgagcggcgcgctgttgcttcggcacctgggcgagcaggaggccgccgtgcgcgtcgagcaggccgtggccgccgtgatcgccgaaggccgcagcgttacctacgacctggccccggcgggagcgacccccgccggtacccgccagatggccgaggcgattgcccagaaggtagcgggctga

SEQ ID NO: 27988 - protein, 359 aa, Gloeobacter violaceus PCC 7421
MSPYRVTLIRGDGIGPEVTQAARIVLDATGIDFEWVVVDAGAEVMEKSGTPLPAPVIEAVRASDAAIKGPITTPAGSGIRSVNVALRRALDLYANLRPARTLPGVHSRYDNIDLVVVRENTEDLYSGIEFEKNSPQALEVIEMLMRLGGKKIFPRSGLAVKPISSEASERIARFAFEYARRHARRKVTAVHKANILKHTDGLFLEAARQVASEYPDVEFEDRIVDNLCMQLVQRPESYDVLVLPNLYGDIVSDLTAGLVGGLGVAPGANIGDRSAVFEAIHGSAPRYAGQNKVNPSALILSGALLLRHLGEQEAAVRVEQAVAAVIAEGRSVTYDLAPAGATPAGTRQMAEAIAQKVAG

SEQ ID NO: 27989 - DNA, 1254 bp, Photorhabdus luminescens subsp. laumondii TTO1
  CDS (1)..(1254): transl_table=11
atggaaagcaaagtagttattccggcggaaggtaaaaaaataacagtcgacgctaaaggtaaactggttgttccgaataacccggtcatcccttatatcgaaggggatgggattggtgtcgatgttacccctgcaatgttgaaagttgtcgatgcagcggttcagaaagcctatcagggtgagcgtaaaatttcctggatggaaatctacaccggtgaaaaatcgactcatgtatacggtaaagatgtttggttgccggatgaaacgttggatctgatccgtgaatatcgcgtcgccattaaaggccctctgacgacgccagttggtggcggcattcgttctctgaacgtagcattgcgccagcaattagatctgtatgtttgcctgcgtcctgttcgttattatcagggaacgccaagcccggtcaaacaacctgaattgaccgatatggttattttccgtgaaaacgcggaagatatttacgccggtattgaatggaaagcggggtctgttgaagcggataaagtgatcaaattcctgcaagaagagatgggcgtgaataaaatccgtttcccacagcaatgtggtatcggtgtgaaaccctgttctgaagagggcactaaacgcttagttcgtgctgccatcgaatacgcaattgataatgaccgtgaatctgtcactctggttcacaaaggcaacattatgaagttcaccgaaggtgctttcaaagattggggttatcagcttgctcgtgaagagttcggcggtgaactgttggatggtggtccttgggtaaaaattaagaatccgaaaaacggtaaagagatcattgtcaaagatgtcatcgcagatgcgtttttacaacagattctgctgcgtcctgctgaatatgatgttattgcctgtatgaacctgaatggtgactatatttctgatgcactagctgctcaggttggtggtatcggtatcgctccgggagcaaatatcggtgatgaatgtgctctgtttgaagcgactcatggtacagcacctaaatatgccggtcaggataaggtgaatccaggttctgtgattctttccgctgagatgatgttacgccatatggggtggacagaagccgcagatctgattgttaaaggtatggaaggcgcgattgccgcgaagactgtgacttatgatttcgaacgtctgatggaaggggctaagctgctgaaatgcagtgaatttggtgacgcgattattcagcatatgtaa

SEQ ID NO: 27990 - protein, 417 aa, Photorhabdus luminescens subsp. laumondii TTO1
MESKVVIPAEGKKITVDAKGKLVVPNNPVIPYIEGDGIGVDVTPAMLKVVDAAVQKAYQGERKISWMEIYTGEKSTHVYGKDVWLPDETLDLIREYRVAIKGPLTTPVGGGIRSLNVALRQQLDLYVCLRPVRYYQGTPSPVKQPELTDMVIFRENAEDIYAGIEWKAGSVEADKVIKFLQEEMGVNKIRFPQQCGIGVKPCSEEGTKRLVRAAIEYAIDNDRESVTLVHKGNIMKFTEGAFKDWGYQLAREEFGGELLDGGPWVKIKNPKNGKEIIVKDVIADAFLQQILLRPAEYDVIACMNLNGDYISDALAAQVGGIGIAPGANIGDECALFEATHGTAPKYAGQDKVNPGSVILSAEMMLRHMGWTEAADLIVKGMEGAIAAKTVTYDFERLMEGAKLLKCSEFGDAIIQHM

SEQ ID NO: 27991 - DNA, 1098 bp, Danio rerio
  CDS (1)..(1098)
atggctaacgcatggaggtcagcggtttcctgtataatgggagctatcaagactcagactccacagcccagagtcttctccagagggattcaaactgtaacattaattcctggagatggaattggtccagagatctccactgcagtaatgaagatatttgaagcagcaaagaccccaattcaatgggaagagagaaatgtgactgctatcaagggacctggaggcaggtggatgatacctcctgaggcaaaagaatcgatggacaaaaacaaaattgggttaaaaggacccctgaaaacaccaattgctgctggccacccatccatgaacctgctgcttaggaagacctttgacctgtatgccaatgtgcgtccttgcgtgtccattgagggctataaaacaccttacactgatgtggatctagtcaccatcagagaaaacacagaaggagagtacagtgggattgaacatgtgatcgtggatggagttgttcagagtattaaactaatcacagaggaggccagcagacgcattgctgagtatgcatttgagtatgccaggaataaccaaagaaccagtgtcactgctgttcacaaagccaacatcatgcggatgtcagatggtctgtttttgcggaagtgcagagaggttgcagaaaattttaaggatgtgaaattcactgagatgtatctggatacagtgtgtctcaatatggtgcaagatccctctcagtttgatgtcctcgtaatgcctaacctttatggtgacatcttgagtgatctgtgtgctggattgattggcggtcttggagtcactcccagtgggaacattggagccaatggcgttgccatatttgaatctgtacatggaacggcgcctgatattgcaggcaaagacatggcaaaccccactgcccttttgcttagtgccgtcatgatgctgcgccacatgggactgcatggtcatgcaaaaaagattgagactgcttgctttgacaccatacgagataaaaaggttttgaccaaagatcttggtggaaactcgaagtgctcagagtttacagctgacatctgccgaagagtgcaggacatggaataa

SEQ ID NO: 27992 - protein, 365 aa, Danio rerio
MANAWRSAVSCIMGAIKTQTPQPRVFSRGIQTVTLIPGDGIGPEISTAVMKIFEAAKTPIQWEERNVTAIKGPGGRWMIPPEAKESMDKNKIGLKGPLKTPIAAGHPSMNLLLRKTFDLYANVRPCVSIEGYKTPYTDVDLVTIRENTEGEYSGIEHVIVDGVVQSIKLITEEASRRIAEYAFEYARNNQRTSVTAVHKANIMRMSDGLFLRKCREVAENFKDVKFTEMYLDTVCLNMVQDPSQFDVLVMPNLYGDILSDLCAGLIGGLGVTPSGNIGANGVAIFESVHGTAPDIAGKDMANPTALLLSAVMMLRHMGLHGHAKKIETACFDTIRDKKVLTKDLGGNSKCSEFTADICRRVQDME

SEQ ID NO: 27993 - DNA, 1419 bp, Wolbachia endosymbiont of Drosophila melanogaster
  CDS (1)..(1419): transl_table=11
atgtcaacactaatcacagttgcatatggcgacggtatcggaccagaaatcatggaagcggtgctgtcgatattgcgcgaagcagaagcggaaatctcaatagatattattgaaataggggagcgtgtttacagtaaagaatggtctcacggaatttctccaagtggttgggaatcaattgaaaggacaaaaatattattaaaatctccgacaacaactcctcaaggtaaagggaacaaaagcttaaacgttgcactcagaaaaaatctagggttgtatgcaaatatcagaccatgcatttcatatcatcatgttatagaaaataaattcgataagtttgatatcgtagtgatacgtgaaaatgaagaggacgtttacaccggaatagagcataggctcactggtgactcttaccaatgcactaaaattattactagatctggctcagagaagatatgcaggtacgcttttgaatatgcaaaaaaacacaacagaaaaaaagtaacttgcctgactaaagataacatcatgaaaatgactgacggaactttccatgccgcgtttgatcgcattgcaaaggaatacccagatataaaggcagaacattatatagttgatattggaatggcgcgtgttgcaacagaaccggagaattttgatgttatagtaaccgagaacttatatggcgacatattatcagatatagtcgcacaaacctctggatctgtggggcttgccggaagtagcaacatcgggaatgaatacgcaatgtttgaagcagtgcacggttctgcccctgatattgcaggaaaaaacatagccaatccttctggtcttttaaatgctgcagtgcatatgctaatttacataggtcaagtgggtactgcaaaactaatctacgatgcatggctcaagactttggaggatggaatacacactgccgatttatataaggagaaaagaagtaaacagaaagttggtacaaaagaatttgcagaagctgttatagacaatctaggaaaaaaaccgaaaacattatctgagcttataattggcagtgatccaaatagtaaagtggataaaatacaggataattatgaacaggattataagattaaaaaactagtgggtagcgatataacgcttgcctggagtaagccggctgactttgaccaaatagtgaagttgtttgaaacaagtaatccgcagattatagcaatatattcaaaaggccttgcgatttggccaggaagttcaaagtcttcaagtgaccaaataacctgcaggttcattgcaaataatgaaattacaaatagtgatgtgaataacttgctaatcaaatttgaggaacataattttgatgtggtgagaatggataagttgtatttgtatgatgggaaagagggtttcttctcttag

SEQ ID NO: 27994 - protein, 472 aa, Wolbachia endosymbiont of Drosophila melanogaster
MSTLITVAYGDGIGPEIMEAVLSILREAEAEISIDIIEIGERVYSKEWSHGISPSGWESIERTKILLKSPTTTPQGKGNKSLNVALRKNLGLYANIRPCISYHHVIENKFDKFDIVVIRENEEDVYTGIEHRLTGDSYQCTKIITRSGSEKICRYAFEYAKKHNRKKVTCLTKDNIMKMTDGTFHAAFDRIAKEYPDIKAEHYIVDIGMARVATEPENFDVIVTENLYGDILSDIVAQTSGSVGLAGSSNIGNEYAMFEAVHGSAPDIAGKNIANPSGLLNAAVHMLIYIGQVGTAKLIYDAWLKTLEDGIHTADLYKEKRSKQKVGTKEFAEAVIDNLGKKPKTLSELIIGSDPNSKVDKIQDNYEQDYKIKKLVGSDITLAWSKPADFDQIVKLFETSNPQIIAIYSKGLAIWPGSSKSSSDQITCRFIANNEITNSDVNNLLIKFEEHNFDVVRMDKLYLYDGKEGFFS

SEQ ID NO: 27995 - DNA, 1002 bp, Bdellovibrio bacteriovorus HD100
  CDS (1)..(1002): transl_table=11
atgatgaaactgacagtgattcccggtgatggtatcggccctgagattatggctcaggtcgttcgcgttcttaaacacgtccatgctccatttgaatatgaagagcaccaggccggcgaagtggctctgaattccctgggcgaattgctgcctcagaccaccattgattccatcaacaaaaccaagctggcaatcaaaggcccaacgaccactcccgtcggcggaggccacaagtccatcaacgtgaccatgagacaaaagttcgatctttatgccaacgtgcgcccggttcgttctttgcctggtgttcagtgcgtttgctcggatgtggacctgaccatcgtgcgtgaaaacaccgaagacctttacgcgggtattgagcgcatggtcgatgaagacactgcagaaagcatcaagcgcatcacacgcaaaggatctgagcgcattgcccgttatgcttatgatctggctcagaaaaccggcaaacctcgtatggctatcgtgcacaaagccaacatcatgaaactttctgacggtctgttccttaaagtggcgcaggaagtgggctggcagtatccggaaatcacaaccaaagatgtgatcgtggataacgcctgcatgcagctggtgaccaagcctcagcagtttgatgtgatcgtgactgaaaacctttacggcgacattctgtcggacctgtgcgcgggtctggtgggcggtctgggtgtggttcctggcgccaacattggtgccaatcacgcgatctttgaagcggttcacggttctgcaccggatatcgcgggccagaacaaagccaatccaacagcacttcttcaatctgcagtgatgatgcttcagcacgtgggcgaaaatgccaaagccgatgcaatcatgaaggctttgattgccgcactttctgacgtcaacgcaagaactggggatctgggtggtaaaggcacgacggtgtccttcaccgacgctatcatccagcgcctgggccactaa

SEQ ID NO: 27996 - protein, 333 aa, Bdellovibrio bacteriovorus HD100
MMKLTVIPGDGIGPEIMAQVVRVLKHVHAPFEYEEHQAGEVALNSLGELLPQTTIDSINKTKLAIKGPTTTPVGGGHKSINVTMRQKFDLYANVRPVRSLPGVQCVCSDVDLTIVRENTEDLYAGIERMVDEDTAESIKRITRKGSERIARYAYDLAQKTGKPRMAIVHKANIMKLSDGLFLKVAQEVGWQYPEITTKDVIVDNACMQLVTKPQQFDVIVTENLYGDILSDLCAGLVGGLGVVPGANIGANHAIFEAVHGSAPDIAGQNKANPTALLQSAVMMLQHVGENAKADAIMKALIAALSDVNARTGDLGGKGTTVSFTDAIIQRLGH

SEQ ID NO: 27997 - DNA, 1308 bp, Bacillus cereus ATCC 10987
  CDS (1)..(1308): transl_table=11
atgggggttatcacattgacgacaggtgaaaaaattactgtaactaatggtgttatgaatgtaccaaacaatccgattattccatttattgaaggagatggaattggtcctgatatttgggcagctgcatctcgtgtactagaagcagcagttgaaaaagcttatgatggtgagaagaaaatcgtttggaaagaagtgcttgcaggggaaaaagcattcaaccaaacaggcgagtggttaccagaagaaactttaaatttaattcgtgaatatttaatcgcgattaaaggtccacttacaactccagttggcggtggtattcgttctctaaacgtagcacttcgtcaagaattagatttatatgtatgtctacgtccagttcgttattttgaaggtgttccttcacctgtaaagcgtccggaagatactgatatggttattttccgtgaaaatacagaagacatttatgctggaattgaatatgcgcaaggatctccagaagcagaaaaagttcttactttcttaaaagaagcaatgggtgtgaataaaattcgcttcccagaaacatctggtattggtattaagccaatctcagaagaagggacaaagcgtcttgttcgtgctgcaattcaatatgcaattaacgaaaaacgctcttctgttacattagttcataaaggaaacattatgaaatttacagaaggtgctttcaaaaactggggttacgaagtagcggaacaagaattcggcgacaaagtatttacttgggctgaatatgatcgtatcgttgagaaagatggaaaagatgcagcgaataaagcgatggcagacgctgaagtggctggaaaaatcatcgtaaaagattctattgcagacatcttcttacaacaaattttaactcgtccacgtgagttcgatgttgttgcaacaatgaacttaaacggagactacatctctgatgcacttgctgcacaagtaggtggaattggtattgcacctggtgcaaacattaactatgtgactggacatgctatctttgaagctacacacggtacagctccaaaatatgcaggtttagataaagtaaacccatcttcagttcttctttctggtgtattattattagagcacttaggatggaacgaagctgcgaaattagtaactgcttcagttgagaaaacaattgcttcaaaagtagtgacttatgatttcgcacgcttaatggaaggtgcaacagaagtgaaatgttctgagttcgctaatgaacttattaaaaacatggatgtagcgataatcaaaaacgcataa

SEQ ID NO: 27998 - protein, 435 aa, Bacillus cereus ATCC 10987
MGVITLTTGEKITVTNGVMNVPNNPIIPFIEGDGIGPDIWAAASRVLEAAVEKAYDGEKKIVWKEVLAGEKAFNQTGEWLPEETLNLIREYLIAIKGPLTTPVGGGIRSLNVALRQELDLYVCLRPVRYFEGVPSPVKRPEDTDMVIFRENTEDIYAGIEYAQGSPEAEKVLTFLKEAMGVNKIRFPETSGIGIKPISEEGTKRLVRAAIQYAINEKRSSVTLVHKGNIMKFTEGAFKNWGYEVAEQEFGDKVFTWAEYDRIVEKDGKDAANKAMADAEVAGKIIVKDSIADIFLQQILTRPREFDVVATMNLNGDYISDALAAQVGGIGIAPGANINYVTGHAIFEATHGTAPKYAGLDKVNPSSVLLSGVLLLEHLGWNEAAKLVTASVEKTIASKVVTYDFARLMEGATEVKCSEFANELIKNMDVAIIKNA

SEQ ID NO: 27999 - DNA, 1104 bp, Eremothecium gossypii
  CDS (1)..(1104)
atgcacagaagcagtgcgacgtccctgatccataaagcaacgtatgccacctccaagacactcacaataggcttgattccaggcgacggaatcggcaaggaggtgatcccagccgggcagcgggttttggaggctatcggcaagaaacatgatataaggttcagctatgagcatctggatgctggctggcaaacgtttttagagacgggcaacgcccttccaggagcaacagtggaagctttgcgggaaagatgccagggtgcactgtttggcgcagtccagtcgccgaccacgaaggtggaagggtactcatcacccattgttgcgctacgcaggcagctggggctttacgccaacataaggcccgtcaagtctgtttctgggactgggcagccagtggatctcgtaatcgtgagagaaaataccgaagatctatatgttcaacaggaacggacttacgtggatgcggcgaccggcaagcgggtagcggaggccatcaagagaatctcggagccggcaaccgagcggatagctgaaatttcgttgcggcttgcactacagcgccagcggatgggagggcgcggagcgctaaccgtcactcataagtcgaacgtgttatcccagacagatgggctcttcaaagaggtatgcagggaggtatacgaggccaacaaaaaatcttatgggtcgatagagtacaacgagcagattgtggattcaatggtttatcggcttttcaaggaaccccattgtttcgacgtggtagttgcgcctaatctgtacggagacctgctatctgacggtgcagcagctttagtcggctcacttggactggttccgagcgttaatgttggcaacaacatcattatcggagaaccatgtcatggctctgcacctgatatcgctggaagggggattgcgaaccccatcgctacaatcagatcagtgtcactaatgcttcagttcctaggtttagaggaggctgcaagtgacatcgaccaggctgttacagggaacttgaaggatcgccaggttgtttcccccgaccttggcgggaagaacaccacacaggaggtgctggacgatattctggcaaggatttga

SEQ ID NO: 28000 - protein, 367 aa, Eremothecium gossypii
MHRSSATSLIHKATYATSKTLTIGLIPGDGIGKEVIPAGQRVLEAIGKKHDIRFSYEHLDAGWQTFLETGNALPGATVEALRERCQGALFGAVQSPTTKVEGYSSPIVALRRQLGLYANIRPVKSVSGTGQPVDLVIVRENTEDLYVQQERTYVDAATGKRVAEAIKRISEPATERIAEISLRLALQRQRMGGRGALTVTHKSNVLSQTDGLFKEVCREVYEANKKSYGSIEYNEQIVDSMVYRLFKEPHCFDVVVAPNLYGDLLSDGAAALVGSLGLVPSVNVGNNIIIGEPCHGSAPDIAGRGIANPIATIRSVSLMLQFLGLEEAASDIDQAVTGNLKDRQVVSPDLGGKNTTQEVLDDILARI

SEQ ID NO: 28001 - DNA, 1104 bp, Eremothecium gossypii
  CDS (1)..(1104)
atgctgagacagaagctatttcaaggaagccgcaggtggttagcgtctgtgcggcagcccagtatcgggcggtatgcgggtaagccgaacgcggcgggcaagtacacggtgtcgttcattgagggcgatggtgtgggccccgagatctcgcagtcggtcaaggacatcttctcggcggcgtctgtgccagtcgagtgggagtactgcgacgtgacgccccttctggtgaacgggctgacgacgatccccgagcctgcggtggcgtcgattaacaagaacctagtggcgctgaaggggccgctggcaacgcccatcggcaagggccaccggtcgctgaacttgacgctacgtaagaccttcgggctgtttgcgaacgtgcgcccggcgaagtcgatcgagggctacaagacgacatactcagacgtggacctggtgctgatccgggagaacacggaaggcgagtactccgggattgagcacgtggtatcgccgggcgtggtgcagtcgatcaagcttatcacgcgcgaggcgtccgagcgcgtgatccgctacgcgttcgagtacgcgaggaccgtggggcggcccaaggttgtggtggtgcacaagtccaccatccagcggctggccgatgggctgttcgtgaacgttgcgcaggagctgggccgcgaatacccggacattgagctgcagaccgagctgctcgacaacaccgtcctcaacgtggtcacgaagccagaggcgtacaaggacgtcgtcgccgtctgccccaacctgtacggcgacattctatctgacctgaacagtgggctttctgccggctcgcttggtctcaccccctccgccaatattgggcaccaggtctctatctttgaggccgtccacggttcggcgccggacatcgctggccagaaccgcgccaacccaaccgcgctattgctctcctccgttatgatgttgaatcacatgggcttgcacgagcacgccggccggatcgagaaggccgtgctttccaccattgcctctagccgtgagaaccgcactgcggaccttgctggtactgcctccacctcttcgttcacaaatgccgtcatcgaacggttgtaa

SEQ ID NO: 28002 - protein, 367 aa, Eremothecium gossypii
MLRQKLFQGSRRWLASVRQPSIGRYAGKPNAAGKYTVSFIEGDGVGPEISQSVKDIFSAASVPVEWEYCDVTPLLVNGLTTIPEPAVASINKNLVALKGPLATPIGKGHRSLNLTLRKTFGLFANVRPAKSIEGYKTTYSDVDLVLIRENTEGEYSGIEHVVSPGVVQSIKLITREASERVIRYAFEYARTVGRPKVVVVHKSTIQRLADGLFVNVAQELGREYPDIELQTELLDNTVLNVVTKPEAYKDVVAVCPNLYGDILSDLNSGLSAGSLGLTPSANIGHQVSIFEAVHGSAPDIAGQNRANPTALLLSSVMMLNHMGLHEHAGRIEKAVLSTIASSRENRTADLAGTASTSSFTNAVIERL

SEQ ID NO: 28003 - DNA, 993 bp, Methanococcus maripaludis S2
  CDS (1)..(993): transl_table=11
atgcataagatttgcgtaatcgaaggcgatgggattggaaaagaagtggttcctgctgccgtagaagttttaaaagctacgggtgtcgaatttgaatttaatcatgccttggcaggggacgaggtatttgaaaaaacaggtgtagcacttccagaagaaacaattgctgctgcaaaagctgctgatgcaatattattcggtgctgctggagagactgccgctgacgttattgtaaaattgagaaaaatattggatacttatgcaaatataaggccagtaaaatcatacaatggaataaactgcctaaaaacaggtatcgactacataatagtaagggaaaacacagaaggcctctataaaggtattgaagctgaaattgcagacggagttactgttgcaacaagggttattaccaaagatgcatctgaaagaatattcaaacacgcatttgaaatggcaaaagacaggaaaaaacaaggaactgccggaaaagtcacatgtgcacacaaagcaaacgttttaaaaataactgatgggttatttaagaaaacattctacgaagtttcaaatgattacaaagatatacaaactgaagacttttatgtcgatgcaatgaacatgtttataatttcaagacctgaaacatttgacatagttgttacatcgaatttatttggagacattttatcagacggggctgttggaatggttggcggacttggaatggcaccatcaggaaatgttggtgacaaatacggtctttttgaaccaatccacggttcagctccagatatcgctggaaaaggacttgcaaatccaactgcaacaatactgaccgcagtaatgatgttaagatacttaaaagaaaatgaagctgctgaaaaagtcgaaaaagcgcttgaagaagttttaagccttggattaacaacacctgatttaggtggtactctttcaacaagtgaaatgggtcaggaagttgcaaaaagagtataa

SEQ ID NO: 28004 - protein, 330 aa, Methanococcus maripaludis S2
MHKICVIEGDGIGKEVVPAAVEVLKATGVEFEFNHALAGDEVFEKTGVALPEETIAAAKAADAILFGAAGETAADVIVKLRKILDTYANIRPVKSYNGINCLKTGIDYIIVRENTEGLYKGIEAEIADGVTVATRVITKDASERIFKHAFEMAKDRKKQGTAGKVTCAHKANVLKITDGLFKKTFYEVSNDYKDIQTEDFYVDAMNMFIISRPETFDIVVTSNLFGDILSDGAVGMVGGLGMAPSGNVGDKYGLFEPIHGSAPDIAGKGLANPTATILTAVMMLRYLKENEAAEKVEKALEEVLSLGLTTPDLGGTLSTSEMGQEVAKRV

SEQ ID NO: 28005 - DNA, 1020 bp, Methanococcus maripaludis S2
  CDS (1)..(1020): transl_table=11
atgagaaacactcccaaaatttgtgttatcaatggtgacggtattggaaacgaagtagttcctgaaacggtgcgagttttaaatgaacttggtgacttcgaattcattcatgcccatgcaggttacgaatgttttaaaagatgtggcgatgcgataccagaaaacacaattgaaattgcaaaagaatctgattgtattttatttggatcagttaccactccaaaaccgactgaattaaaaaataaatcatatagaagtccaatattaactttaagaaaagaacttgacctttatgcaaatattaggccaacttataactttgataatcttgattttgttataattcgagaaaatactgaaggactctatgtaaaaaaagaatattacgacgaaaaaaacgaagttgcaattgctgagcgaataatttcaaaatttggaagttctagaattgtaaaatttgcttttgattatgcggttcaaaataacagaaaaaaagtatcctgcatacataaagcaaacgtattacgggttactgacggattatttttagaagttttcgaagaaatgtctaaacattacgaaaaattaggaataaagtctgatgactacctaattgacgcgacagcaatgtatttgattagaaacccgcaaatgtttgatgtattggttacaacaaatctttttggagatattttatctgatgaagctgcaggacttattggcggacttggaatgtctccttcagcaaacattggtgataaaaacggattatttgagccagttcatggatctgcaccagacattgctggaaaaggaatttcaaacccgattgcaacaatattgagtgctgcaatgatgcttgaccatttaaaaatgaataaagaagccgaatacattagaaaagcggttaaaaaaacggttgaatgtaaatatttaactcctgatcttgggggaaacttaaaaacttttgaagttacggaaaaaatcattgaatccataaggtctcagatgattcagtga

SEQ ID NO: 28006 - protein, 339 aa, Methanococcus maripaludis S2
MRNTPKICVINGDGIGNEVVPETVRVLNELGDFEFIHAHAGYECFKRCGDAIPENTIEIAKESDCILFGSVTTPKPTELKNKSYRSPILTLRKELDLYANIRPTYNFDNLDFVIIRENTEGLYVKKEYYDEKNEVAIAERIISKFGSSRIVKFAFDYAVQNNRKKVSCIHKANVLRVTDGLFLEVFEEMSKHYEKLGIKSDDYLIDATAMYLIRNPQMFDVLVTTNLFGDILSDEAAGLIGGLGMSPSANIGDKNGLFEPVHGSAPDIAGKGISNPIATILSAAMMLDHLKMNKEAEYIRKAVKKTVECKYLTPDLGGNLKTFEVTEKIIESIRSQMIQ

SEQ ID NO: 28007 - DNA, 1101 bp, Xenopus tropicalis
  CDS (1)..(1101)
atggctggcagcgcctggaggtcactgatctctcgtgtggcgggggcactcactgcaccagaatatggagccaggcagctttctaaccatgtgcagactgtcactcttataccaggggatggaattggcccagagatttcaacagctgtcatgaaaatttttgagactgccaaagcacctgtacagtgggaagagagaaatgtcacagcaattaaaggccctggtggaaagtggatgattcctcctgaagccaaagaatccatggataagaacaagatgggcttaaaaggacctttaaagacacccattgctgctgggcatccgtccatgaacttgctgctccgcaagacatttgatctctatgcaaatgtgcgaccctgtgtttctattgagggctacaggaccccatacacagatgtagacctggtcacaattcgtgagaacacagagggagaatatagtggtatcgagcatgtgattgtagatggtgtggtgcaaagcattaagctgattacggaggaagccagccatcgcattgcacagtttgcctttgagtatgcaaggaacaaccagagaagcacagtgactgcagtgcacaaagctaatattatgaggatgtctgatgggctgttcctaaaaaaatgtcgagaagttgcagaaaactttaaagacattaaatttaatgaaatgtatctggataccgtgtgtcttaatatggtccaggatcctacccagtttgatgtgttagtcatgccaaacctttatggtgacatcttgagtgacctttgtgcaggtttaattggaggcctgggagtgacgccaagtggaaatattggtgctaatggggtagcaatctttgaatcggttcatggcacagctccagatattgctggaaaagacttggctaatcccactgctcttcttctaagcgcagtcatgatgttgcggcacatgggtctccacgaacatgcacgcaaaatagaaaatgcttgctttgagacaatcaaatctgggaaggctctgactaaagacttgggtggtaactccaagtgctctgaatttaccaatgaaatctgtcgcagaatacaggacagtgattag

SEQ ID NO: 28008 - protein, 366 aa, Xenopus tropicalis
MAGSAWRSLISRVAGALTAPEYGARQLSNHVQTVTLIPGDGIGPEISTAVMKIFETAKAPVQWEERNVTAIKGPGGKWMIPPEAKESMDKNKMGLKGPLKTPIAAGHPSMNLLLRKTFDLYANVRPCVSIEGYRTPYTDVDLVTIRENTEGEYSGIEHVIVDGVVQSIKLITEEASHRIAQFAFEYARNNQRSTVTAVHKANIMRMSDGLFLKKCREVAENFKDIKFNEMYLDTVCLNMVQDPTQFDVLVMPNLYGDILSDLCAGLIGGLGVTPSGNIGANGVAIFESVHGTAPDIAGKDLANPTALLLSAVMMLRHMGLHEHARKIENACFETIKSGKALTKDLGGNSKCSEFTNEICRRIQDSD

SEQ ID NO: 28009 - DNA, 1161 bp, Ustilago maydis 521
  CDS (1)..(1161)
atgttcacggtccctgctttccgatcggccagctcgtcgctggccaagcgccccacgctcgcctcgtcggcgctcaagctcaacaggatgtcggtccgtggcctcgcgatgcctgtcaccaacgcccctacctcggcttacaacaagcaaaagggctccgatggcaagtacacggtcaccttgattcccggtgatggtattggtcccgaggtctcgaatgccgtcaaggagatctaccacgctgctaacgtacccatcaagtgggaggaggtctcggtcgctccgttcatcaaggatggcaagcagaccatccccgaagagtcaatcgtctcgatcaagaagaacacggttgcactcaagggtcccctcgctacgcccatcggcaagggtcacgtctcgctcaacttgacgctccgacgaaccttccatctctttgccaacgtccgaccgtgcaagtcgatcgagggcttcaagaccgcctacgacaacgtcgacactgtgctcatccgtgaaaacaccgagggtgagtactcgggtatcgagcacgaggtcgtcgacggcgtcgtccagtcgattaagctcatcacctacgaggcttcggagcgtgttgcccgctacgctttccaccacgccgaacagaacggccgtaacaaggtgactgctgttcacaaggctcccatcatgcgcatgtcggacggcatgttcctgcacgcctgccgacaggttgccaaggagtatccgcacatcgcctacgacgaggatctgctcgaccgagcctgcctccgtatcgtgcaggaccctgcaccttacgccgaccgcgtcatggtgatgcccaacttgtacggtgacattctctcggacatgtgcgccggtctcattggtggtctcggtctcacgccttccggtaacattggcaaggacgcttcgattttcgaggcagtccacggctctgcccccgacattgctggccaggacaaggcgaaccctactgcgctgttgctctcttcgatcatgatgctccgacacatgagcctgtttgacaaggctgaccagatcgagaatgccatcttcaagaccatcgctgccggcgagcgtaccggggatcttggcggcaagctcggcacccgcgctttcaccgacaagatcatctctcgcttgtaa

SEQ ID NO: 28010 - protein, 386 aa, Ustilago maydis 521
MFTVPAFRSASSSLAKRPTLASSALKLNRMSVRGLAMPVTNAPTSAYNKQKGSDGKYTVTLIPGDGIGPEVSNAVKEIYHAANVPIKWEEVSVAPFIKDGKQTIPEESIVSIKKNTVALKGPLATPIGKGHVSLNLTLRRTFHLFANVRPCKSIEGFKTAYDNVDTVLIRENTEGEYSGIEHEVVDGVVQSIKLITYEASERVARYAFHHAEQNGRNKVTAVHKAPIMRMSDGMFLHACRQVAKEYPHIAYDEDLLDRACLRIVQDPAPYADRVMVMPNLYGDILSDMCAGLIGGLGLTPSGNIGKDASIFEAVHGSAPDIAGQDKANPTALLLSSIMMLRHMSLFDKADQIENAIFKTIAAGERTGDLGGKLGTRAFTDKIISRL

SEQ ID NO: 28011 - DNA, 1467 bp, Leptospira interrogans serovar Copenhageni str. Fiocruz L1-130
  CDS (1)..(1467): transl_table=11
atgtccgaaaaaactaaaatcgcaattgcctacggtgatggaatcggtcctgagattatggatgcgactcttaaaattttaaatgctgccggagctaaaattgaaccgattgaaatcgaaatcggcgaaaaagtttataaggaaggacactcttccggaattaaaccggaagcctgggatattctgagacaaactaaagtatttctaaaagcacccattacaactcctcaaggaggcggttacaaaagtttaaacgttactgtcagaactaccctaggtctatttgcaaacgttagaccctgtttttcactgtatccatacgtagaaaccaaacacccttccctagatattgtaatcatccgtgaaaatgaagaagatctttatactggaatagaacacagacaaaccaatgacacggttcaatgccttaaattaatttcccacccaggatcagaaaagatcattcgttacgcattcgaatatgcaagagcttacggaagaaaaaaagtaaccgcgatggtaaaggacaatattatgaaacaaacagacggtttgtttcatgacattttcaaagaagtagccaaagaatatccagaattagaagtaaattctcaaatcatagatataggcgcagccaacctagcagacagacctcaaaattttgacgtagtagttactttaaatttatatggagatattatttctgatatagtcgctcagatcgcgggttcagtaggaatggcaggttcttccaacatcggagaaattgtttctatgttcgaagcaatccacggttctgctccggacatagcaggaaaaaatctggcaaatccatctggcttactcaacgccgcagtgatgatgctcgttcacattggacaaccggacatcgctgcaaaaattaataacgcgtggttattgaccatagaagaaggaattcataccggagatatttttaaaccgggagtaagcagaattaaagtgggaaccaaagaattttccgacgcggtaatcggaaatttaggtcatcttcctggaaaattcaaaccagtttcttttggaaaggctaagaaaattataattcctgaatataaaagaaacattcaaaagaaagatttagtaggagtggatatttttctggattgggtaggaaaggatccgaacgaactcggaaataaactcaaatctgtttccgacgaactgatgttaaaaatcatcaccaaccggggagtcaaagtttatcctgacggccaaccggaaacttttttgatcgatcattggagatgtagatttgtaagcaaaaatgcactgattaaacaagaggacccttcctaccatccaatttctcataaacaagtagcagaacttcttttaaagttagacttggccggttttgatacaatcaaaacggaaaatctttattactttaacggaaaaagagccttttctttagggcaaggagaatga

SEQ ID NO: 28012 - protein, 488 aa, Leptospira interrogans serovar Copenhageni str. Fiocruz L1-130
MSEKTKIAIAYGDGIGPEIMDATLKILNAAGAKIEPIEIEIGEKVYKEGHSSGIKPEAWDILRQTKVFLKAPITTPQGGGYKSLNVTVRTTLGLFANVRPCFSLYPYVETKHPSLDIVIIRENEEDLYTGIEHRQTNDTVQCLKLISHPGSEKIIRYAFEYARAYGRKKVTAMVKDNIMKQTDGLFHDIFKEVAKEYPELEVNSQIIDIGAANLADRPQNFDVVVTLNLYGDIISDIVAQIAGSVGMAGSSNIGEIVSMFEAIHGSAPDIAGKNLANPSGLLNAAVMMLVHIGQPDIAAKINNAWLLTIEEGIHTGDIFKPGVSRIKVGTKEFSDAVIGNLGHLPGKFKPVSFGKAKKIIIPEYKRNIQKKDLVGVDIFLDWVGKDPNELGNKLKSVSDELMLKIITNRGVKVYPDGQPETFLIDHWRCRFVSKNALIKQEDPSYHPISHKQVAELLLKLDLAGFDTIKTENLYYFNGKRAFSLGQGE

SEQ ID NO: 28013 - DNA, 1005 bp, Thermus thermophilus HB27
  CDS (1)..(1005): transl_table=11
atggcgtaccggatctgcttgattgagggcgacggcatcgggcacgaggtcatccccgcggcgcggagggtgctggaggccaccggcctccccctggagttcgtggaggcggaggcgggctgggagacctttgagagaagagggacctccgtccccgaggagacggtggagaagatcctgtcctgccacgccaccctcttcggggccgccaccagccccacccgtaaagtgccgggcttcttcggggcgatccgctacctcaggcgcaggctggacctctacgccaacgtccgccccgccaagagccgccccgtcccgggaagccgccccggcgtggacctggtcatcgtccgggagaacaccgaagggctttacgtggagcaggaaaggcgctacctggacgtggccatcgccgacgccgtcatctccaagaaggccagcgagcgcatcggccgggccgccttaaggatcgccgagggccggccccgcaaaacccttcacatcgcccacaaggccaacgtcctccccctcacccaggggctcttcctggacacggtcaaggaggtggccaaggacttccccctggtgaacgtgcaggacatcatcgtggacaactgcgccatgcagctcgtcatgcgtcccgagcgctttgacgtcatcgtcaccaccaacctcctgggggacatcctctccgacctcgccgcggggctcgtggggggcctgggcctcgccccctcgggcaacatcggggacaccaccgcggtctttgagcccgtccacggctccgcccccgacatcgccggcaagggcatcgccaaccccacggcggccatcctctccgcggccatgatgctggactacctgggggagaaggaggcggccaagcgggtggagaaggcggtggacctggtgctggagcgggggcccaggacccctgacctgggcggggacgccaccacggaagccttcaccgaggccgtggtggaggcgctcaagagcctgtag

SEQ ID NO: 28014 - protein, 334 aa, Thermus thermophilus HB27
MAYRICLIEGDGIGHEVIPAARRVLEATGLPLEFVEAEAGWETFERRGTSVPEETVEKILSCHATLFGAATSPTRKVPGFFGAIRYLRRRLDLYANVRPAKSRPVPGSRPGVDLVIVRENTEGLYVEQERRYLDVAIADAVISKKASERIGRAALRIAEGRPRKTLHIAHKANVLPLTQGLFLDTVKEVAKDFPLVNVQDIIVDNCAMQLVMRPERFDVIVTTNLLGDILSDLAAGLVGGLGLAPSGNIGDTTAVFEPVHGSAPDIAGKGIANPTAAILSAAMMLDYLGEKEAAKRVEKAVDLVLERGPRTPDLGGDATTEAFTEAVVEALKSL

SEQ ID NO: 28015 - DNA, 1491 bp, Thermus thermophilus HB27
  CDS (1)..(1491): transl_table=11
atgcccctgatcaccacggaaaccggcaagaagatgcacgttctcgaggacgggcgcaagctcatcaccgtcatccccggagacggcgtcgggcccgagtgcgtggaggctaccctcaaggtcctagaggcggccaaggcccccctggcctacgaggtgcgagaggcgggggcgagcgtcttccggcggggcatcgcctcgggcgttccccaggagaccattgagtccatccgcaagacccgggtggtcctgaagggtcccctggaaaccccggtgggctacggggagaagagcgccaacgtcaccctaaggaagctctttgagacctacgccaacgtccgccccgtgcgggagttccccaacgtccccaccccctatgcgggccggggcattgacctcgtggtggtgcgggagaacgtggaggacctctacgccgggattgagcacatgcagaccccgagcgtggcccagaccctcaagctcatctcctggaagggatcggagaagatcgtccgcttcgcctttgagctggcccgggccgaggggcggaagaaggtccactgcgccaccaagtccaacatcatgaagctcgccgaagggaccctgaagcgggcctttgagcaggtggcccaggagtaccccgacatagaagcggtccacatcatcgtggacaacgctgcccaccagctggtgaaaaggcccgagcagtttgaggtgatcgtcaccaccaacatgaacggagacatcctctccgacctcacctcggggctcatcgggggcctgggcttcgctccctcggccaacatcggcaacgaggtggccatctttgaggccgtccacggttccgcccccaagtacgccgggaagaacgtcatcaaccccaccgcggtcctcctctcggcggtgatgatgctccgctacctggaggagttcgccacggcggaccttatagagaacgccctcctctacaccctcgaggagggccgggtcctcacgggggacgtggtgggctacgaccggggggccaagaccacggagtacaccgaggccatcatccagaacctgggcaagaccccaaggaagacccaggtgcggggctacaagcccttccgcctgccccaggtggacggggccatcgcccccatcgtccctaggagccgccgggttgtgggggtggacgtcttcgtggaaaccaacctcctgcccgaggccctgggaaaggccctggaggaccttgccgcgggcacccccttccggctcaagatgatctccaaccggggcacccaggtctacccccccaccggcgggctcacggacctggtggaccactaccgctgccgcttcctctacacgggggagggggaggctaaggacccggagatcctggacctcgtaagccgggtggcaagccgcttccgctggatgcacctggagaagctccaggaatttgacggcgagcccggcttcaccaaggcccaaggggaagactaa

SEQ ID NO: 28016 - protein, 496 aa, Thermus thermophilus HB27
MPLITTETGKKMHVLEDGRKLITVIPGDGVGPECVEATLKVLEAAKAPLAYEVREAGASVFRRGIASGVPQETIESIRKTRVVLKGPLETPVGYGEKSANVTLRKLFETYANVRPVREFPNVPTPYAGRGIDLVVVRENVEDLYAGIEHMQTPSVAQTLKLISWKGSEKIVRFAFELARAEGRKKVHCATKSNIMKLAEGTLKRAFEQVAQEYPDIEAVHIIVDNAAHQLVKRPEQFEVIVTTNMNGDILSDLTSGLIGGLGFAPSANIGNEVAIFEAVHGSAPKYAGKNVINPTAVLLSAVMMLRYLEEFATADLIENALLYTLEEGRVLTGDVVGYDRGAKTTEYTEAIIQNLGKTPRKTQVRGYKPFRLPQVDGAIAPIVPRSRRVVGVDVFVETNLLPEALGKALEDLAAGTPFRLKMISNRGTQVYPPTGGLTDLVDHYRCRFLYTGEGEAKDPEILDLVSRVASRFRWMHLEKLQEFDGEPGFTKAQGED

SEQ ID NO: 28017 - DNA, 1452 bp, Parachlamydia sp. UWE25
  CDS (1)..(1452): transl_table=11
gtgatggcagcacaactgataccgattactgtggccgagggagatggaattgggccggaaattatggatgctacgctaagaattttaaaagcagctggagctcctttagatataaaaaatgttgaaattggagaaaaggtttatttaagtggacaaccaacaggaattgaaaattccacttgggatttaattagacaatccaaagctcttttaaaagccccaattaccactccccaaggtggtggctttaaaagtctaaacgtgaccattcgcaccactctaggattatatgctaatgtgcgcccttgtgtagcttattacccattcgttgaaaccaaatatccaggcatgaacgttgtgattgtcagagaaaacgaagaagacctttatactggaattgaatatcgacaaactcccgacgtctacgaagcacttaaactcattacaagacccggatgtgagaaaatcattcgttatgctttcgaatatgcgcaaatctatcaccgcaaaaaagtcacttgttttacaaaagataatattttgaagttaactgatgggcttttccataaaatttttgatgaaattggagccgaatatccacaaattgaaaaagagcattggattgttgatatcggagcagctaaactagctgatacaccaacagcttttgatgtaattgttatgcctaatttgtatggagacattttatcagatgttgctgctcaaattgctggatctgtcggtctagccggatctgcaaatattggtaattcgggagccatgtttgaagctattcatggatctgcgcctagacgggctggacaaaatctagccaatccttcaggtcttttactggctgccattcaaatgcttgttcatttagaacaatcgaatttagctgaactcattcataatgcctggctaaaaacgcttgaagaagggattcatacttatgatatttttaaagaaaaaacaagtaagcagaaagttggaacaaaggaatttgcgaatgccgtaactgcccgtttaggaaaaaaacccgaaacattacccgcagctcactatagcacatcttttcatatcaaacattccaacttttcatctcttaaaaatttcaaacaagaattatatgggatagacatttttattaaatggagcgaagatgtagaaacattagcgactcttcttcaatccacgtctaatcacgatttaaaattaaaaatgatcaataaccgaggtgtaaaagtatggccaaataaaatgcctgaaacagcttgcatagacaactggcgttgtagattcatatcttctacaaataaaatcgtatcccaagagcaaattctcaatttactaaacagacttgtacaaaaaaaacttacgctgacacaaactgcttatttatttgcttttgatggacaggcgggttatactttagctcaagatgaacaataa

SEQ ID NO: 28018 - protein, 483 aa, Parachlamydia sp. UWE25
MMAAQLIPITVAEGDGIGPEIMDATLRILKAAGAPLDIKNVEIGEKVYLSGQPTGIENSTWDLIRQSKALLKAPITTPQGGGFKSLNVTIRTTLGLYANVRPCVAYYPFVETKYPGMNVVIVRENEEDLYTGIEYRQTPDVYEALKLITRPGCEKIIRYAFEYAQIYHRKKVTCFTKDNILKLTDGLFHKIFDEIGAEYPQIEKEHWIVDIGAAKLADTPTAFDVIVMPNLYGDILSDVAAQIAGSVGLAGSANIGNSGAMFEAIHGSAPRRAGQNLANPSGLLLAAIQMLVHLEQSNLAELIHNAWLKTLEEGIHTYDIFKEKTSKQKVGTKEFANAVTARLGKKPETLPAAHYSTSFHIKHSNFSSLKNFKQELYGIDIFIKWSEDVETLATLLQSTSNHDLKLKMINNRGVKVWPNKMPETACIDNWRCRFISSTNKIVSQEQILNLLNRLVQKKLTLTQTAYLFAFDGQAGYTLAQDEQ

SEQ ID NO: 28019 - DNA, 1263 bp, Listeria monocytogenes str. 4b F2365
  CDS (1)..(1263): transl_table=11
atgagtcaaaaaattcaagtagaaaacggtgtgctcaaaacaccaaacaatccagtcattccttttattgaaggggacggaactggtccagacatctgggcagctgcaaaacgcgttttagatgccgcagtaaaaaaagcttacaatggcgaaaaagaaattgcttggaaagaagtactagctggtgaaaaagcatttaaacaaacaggagaatggttaccacaagcgactttagatacaattgatgaatatttgattgctattaaaggaccgcttactactccaatcggtggaggcattcgttcgttaaacgttgccctgcgccaagagttagatttatatgtttgtttacgtccagttcgttatttcaaaggcgttccttcaccggtgaaacgtccggaagacacagatatggtcattttccgtgagaatacagaagatatatatgcagggattgaatttaaagaaggcagcgaagaatcaaaaaaactaatcgacttcttaaaatctgagtttggcgttgacaaaattcgtttcccggaaacttctggtattggtattaagccaatttccaaagagggaacagagcgtttagtgcgttcggcgattgaatatgcaattaaagaaggtcgtaaatcattaacgcttgtacacaaagggaatatcatgaaattcacagaaggagctttcaaaaattggggctatgacttatgtgaacgcgaatatggcgataaagtatttacttggaatgagtatgatcgcattaaagaagcagaaggaacagaagttgctgatgcgaaacaaaaagaagcgcttgctgctgggaaaattttagtcaaagattcgattgcggatattttcttgcaacaaatcttaactcgcccggctgaatttgatgtagttgctacaatgaacttgaatggagattacatttctgatgcacttgctgctcaagtaggcggaatcggtattgctccaggagcaaacattaactacttaactggccatgcaattttcgaagcgacgcatggtactgcaccgaaatatgcaggtcttgataaagtgaatccttcatcagttattttatctgggacacttcttcttgaacatattggttggggtgaagcggctgcattaattaatcagtcaatggaaaaaacaatcgctgcgaaaaccgtaacttatgattttgctcgattaatggatggtgcgacagaagttaaatgttcggaatttgcagatgaattaataaaaaatttctaa

SEQ ID NO: 28020 - protein, 420 aa, Listeria monocytogenes str. 4b F2365
MSQKIQVENGVLKTPNNPVIPFIEGDGTGPDIWAAAKRVLDAAVKKAYNGEKEIAWKEVLAGEKAFKQTGEWLPQATLDTIDEYLIAIKGPLTTPIGGGIRSLNVALRQELDLYVCLRPVRYFKGVPSPVKRPEDTDMVIFRENTEDIYAGIEFKEGSEESKKLIDFLKSEFGVDKIRFPETSGIGIKPISKEGTERLVRSAIEYAIKEGRKSLTLVHKGNIMKFTEGAFKNWGYDLCEREYGDKVFTWNEYDRIKEAEGTEVADAKQKEALAAGKILVKDSIADIFLQQILTRPAEFDVVATMNLNGDYISDALAAQVGGIGIAPGANINYLTGHAIFEATHGTAPKYAGLDKVNPSSVILSGTLLLEHIGWGEAAALINQSMEKTIAAKTVTYDFARLMDGATEVKCSEFADELIKNF

SEQ ID NO: 28021 - DNA, 1179 bp, Picrophilus torridus DSM 9790
  CDS (1)..(1179): transl_table=11
atggacagaataatgtttgaaaatggaagctggatagtaccagaaaagcctgtaattttgtatgcaaatggagacggcataggtcctgagataatggatgcaaccaggaaggttgtggatgctgccacggccatggagaaaaaatccatagcatggaaggagatcctccttggagatagggccgaggaattaaagggcgatagatttccggaggaatcaataaaggcaataaatgattacagggttcttttaaaggcgcctttgaatacacctgttggcaagggctttaaatcgataaatgttagaataaggatgttgcttgatctgtacgcaaacataaggcctgtaaagttcatgccgggtcttgaaagcccattaaaaaatccagaaaaggttaatttaacgatctttagagaaaacactgacgatctttaccttggctatgaatggagctacgacacggatgaggcaaaaaggataagaaaattcctcaaagatgagtttaacatagatataagcgacgactctggtataggcataaagccaatgagcaggtataaaacacagagaataacaaggcttgcggtaaaatatgccatggataacaatcttaaaaagataacaataatgcacaagggaaacgtcatgaagtacacagaaggtgcattcagggagtgggcatatgaaacagcactgaatgaattttctgattacgtatcaagagacgatgataaaaagataataataaacgatataatcgcggataacatgttccagcagataataaccaggccagatgagtatcaattaattcttgcgccaaatgttgacggtgattacatctcggatgcggccggtgccttaataggcaatataggcacgcttggcggtgcaaacatcggcgacaacggtgcaatgttcgaggctgttcatggtacagcgccaaagtacgccggaaagaacgttgcagatccgcttgggctgatacgcggtgcgcagttaatgcttagatacatgggctggaaccgtgcagctgatgcaatagaaaaggcaatacaggcatcaataaacgaaaagaaggttacaaacgatcttgcaaggttctttaacgttgagcctcttggcaccagggaatatggtgattaccttgtagataaaataaaggtattagtttcttaa

SEQ ID NO: 28022 - protein, 392 aa, Picrophilus torridus DSM 9790
MDRIMFENGSWIVPEKPVILYANGDGIGPEIMDATRKVVDAATAMEKKSIAWKEILLGDRAEELKGDRFPEESIKAINDYRVLLKAPLNTPVGKGFKSINVRIRMLLDLYANIRPVKFMPGLESPLKNPEKVNLTIFRENTDDLYLGYEWSYDTDEAKRIRKFLKDEFNIDISDDSGIGIKPMSRYKTQRITRLAVKYAMDNNLKKITIMHKGNVMKYTEGAFREWAYETALNEFSDYVSRDDDKKIIINDIIADNMFQQIITRPDEYQLILAPNVDGDYISDAAGALIGNIGTLGGANIGDNGAMFEAVHGTAPKYAGKNVADPLGLIRGAQLMLRYMGWNRAADAIEKAIQASINEKKVTNDLARFFNVEPLGTREYGDYLVDKIKVLVS

SEQ ID NO: 28023 - DNA, 1308 bp, Bacillus anthracis str. Sterne
  CDS (1)..(1308): transl_table=11
atgggggttatcacattgacgacaggtgaaaaaattactgtaactaatggtgttatgaatgtaccaaacaatccgattattccatttatcgaaggagatggaattggtcctgatatttgggcagctgcatctcgtgtactagaagcagcagttgaaaaagcttatgatggtgagaagaaaatcgtttggaaagaagtgcttgcaggggaaaaagcattcaaccaaacaggcgagtggttaccagaagaaactttaaatttaattcgtgaatatttaatcgcgattaaaggtccacttacaactccagttggcggtggtattcgttctctaaacgtagcacttcgtcaagaattagatttatatgtatgtctacgtccagttcgttattttgaaggtgttccttcacctgtaaaacgtccggaagatactgatatggttattttccgtgaaaatacagaagacatttatgctggaattgaatatgcgcaaggatctccagaagcagaaaaagttcttgctttcttaaaagaagcaatgggtgttaataaaatccgcttcccagaaacatctggtattggtattaaaccaatctcagaagaagggacaaagcgtcttgttcgtgctgcaattcaatatgcaattaacgaaaaacgctcttctgttacattagttcataaaggaaacattatgaaattcacagaaggtgctttcaaaaactggggttacgaagtagcggaacaagaattcggcgacaaagtatttacttgggctgaatatgatcgtatcgttgagaaagatggtaaagatgcagcgaataaagcgatggcagacgctgaagtggctggaaaaatcatcgtaaaagattctattgcagacatcttcttacaacaaattttaactcgtccacgtgagttcgatgttgttgcaacaatgaacttaaacggagactacatctctgatgcacttgctgcacaagtaggtggaattggtattgcacctggtgcaaacattaactatgtgactggacatgctatctttgaagctacgcacggtacagctccaaaatatgcaggtttagataaagtaaacccatcttcagttcttctttctggtgtattattattagagcacttaggatggaacgaagctgcgaaattagtaactgcttcagttgagaaaacaattgcttcaaaagtagtaacttatgatttcgcacgcttaatggaaggtgcaacagaagtgaaatgttctgagttcgctaatgaacttattaaaaacatggatgtagcgataatcaaaaacgcataa

SEQ ID NO: 28024 - protein, 435 aa, Bacillus anthracis str. Sterne
MGVITLTTGEKITVTNGVMNVPNNPIIPFIEGDGIGPDIWAAASRVLEAAVEKAYDGEKKIVWKEVLAGEKAFNQTGEWLPEETLNLIREYLIAIKGPLTTPVGGGIRSLNVALRQELDLYVCLRPVRYFEGVPSPVKRPEDTDMVIFRENTEDIYAGIEYAQGSPEAEKVLAFLKEAMGVNKIRFPETSGIGIKPISEEGTKRLVRAAIQYAINEKRSSVTLVHKGNIMKFTEGAFKNWGYEVAEQEFGDKVFTWAEYDRIVEKDGKDAANKAMADAEVAGKIIVKDSIADIFLQQILTRPREFDVVATMNLNGDYISDALAAQVGGIGIAPGANINYVTGHAIFEATHGTAPKYAGLDKVNPSSVLLSGVLLLEHLGWNEAAKLVTASVEKTIASKVVTYDFARLMEGATEVKCSEFANELIKNMDVAIIKNA

SEQ ID NO: 28025 - DNA, 1311 bp, Acinetobacter sp. ADP1
  CDS (1)..(1311): transl_table=11
atgtcctttgtggcatacatttattcgccagttacaaaagggagtacctgtacaatgggttatcagaagatcgtggtgcctgtcgatggtgacagaataaaagtcaatgcagacctgtcacttaacgttccaaaccatccgatcattcctttcattgagggtgacggtattggtgtggatattacaccagctatgaaggcagtggtagatgctgcgattgtcaaagcttatggcggcaaacgttcgatcgaatggatggaagtatactgcggtgaaaaagcaaatactatctatggcagctatatgcctgaagaaacttttgaagcattacgtgaatttgtcatttcaattaaagggccgcttaccacgccagtgggtggaggtattcgttcactcaacgtggctttacgtcaagaactagatttatatgtttgtgtcagacctgtacgctggtttgaaggtgtaccaagtcctgtacaacaccctgaactcaccgatatggtgatttttcgtgaaaattcagaagatatttatgctggcattgagtggaaagcagattctccagaggcaaaaaaagtcattcagtttttacaagaagaaatgggtgttcaaaaaatccgttttcccgaacactgtgggattggaattaaaccggtctctaaagaaggaacccagcgtctggtacgaaaagcgattcagttcgccatcgataatgataagccaagtgttactttggtacacaaaggcaatattatgaaatataccgaaggtgctttcaaagaatggggttatgagcttgcaatcgagcgttttggaggagagttgatcgatggtgggccatgggttcaaattaaaaaccccaaaacaggcaaggatattgtgattaaagatgtcattgcagacgctttcttgcagcaaattttaatgcgtccagccgattattcagtcattgcaaccctcaatctaaatggtgattatatttcagatgcacttgctgctgaggtgggtggaattgggattgcaccaggtgccaatattggtggtgcaattgctgtttatgaagcaacccatggaacagcaccgaaatatgctgggcaagataaagtaaatccaggctctattattttatcggcagaaatgatgctacgcgatatgggatggacagaagcagctgatctgatcatcaaaggtatatctggtgcgattgaagccaaaacagtgacttacgattttgagcgtttaatgccaggcgcaactctattaacctgttcagagtttgggcaagccatcattaagcatatggatgattaa

SEQ ID NO: 28026 - protein, 436 aa, Acinetobacter sp. ADP1
MSFVAYIYSPVTKGSTCTMGYQKIVVPVDGDRIKVNADLSLNVPNHPIIPFIEGDGIGVDITPAMKAVVDAAIVKAYGGKRSIEWMEVYCGEKANTIYGSYMPEETFEALREFVISIKGPLTTPVGGGIRSLNVALRQELDLYVCVRPVRWFEGVPSPVQHPELTDMVIFRENSEDIYAGIEWKADSPEAKKVIQFLQEEMGVQKIRFPEHCGIGIKPVSKEGTQRLVRKAIQFAIDNDKPSVTLVHKGNIMKYTEGAFKEWGYELAIERFGGELIDGGPWVQIKNPKTGKDIVIKDVIADAFLQQILMRPADYSVIATLNLNGDYISDALAAEVGGIGIAPGANIGGAIAVYEATHGTAPKYAGQDKVNPGSIILSAEMMLRDMGWTEAADLIIKGISGAIEAKTVTYDFERLMPGATLLTCSEFGQAIIKHMDD

SEQ ID NO: 28027 - DNA, 1254 bp, Erwinia carotovora subsp. atroseptica SCRI1043
  CDS (1)..(1254): transl_table=11
atggaaagcaaagtagtggtaccgacagaaggtcagaaaatcacggttgatgctcaaggtaaactggttgttccaaacaatccggttatcccgtttatcgaaggtgatggcattggtatcgatgtaacgccagccatgatcaacgtagtggacgccgccgtgaagaaagcctatcagggcaagcgcgcgatctcctggatggagatctacaccggtgagaaatccacgcaagtttacggtaaagatgtctggctgccagacgaaacgctggatctgatccgtgaatatcgtgtggcgattaagggcccgctgacaacgccagtcggtggtggtattcgttctctgaacgttgcactgcgccaacagttggacctgtatgtttgcctgcgtccggtacgctactacgaaggtacacctagcccggttaaacaacctgaactgaccgacatggtgatcttccgcgaaaacgccgaagacatctatgcaggtattgagtggaaagcgggttctgttgaagcagacaaagtgatcaaattcctgcgtgaagaaatgggtgttagcaaaatccgtttccctgagcagtgtggtatcggcgtgaagccgtgttccgaagaaggtaccaaacgtctggttcgcgctgcgatcgaatacgcgattaccaacgaccgtgattccctcacgttggtacacaaaggcaatatcatgaaattcaccgaaggcgcgtttaaagactggggctaccagttggcgcgtgaagaattcggcggtgagctgatcgatggcggcccgtgggtgaaaatcaagaacccgaacacaggcaaagagatcgttgtaaaagacgtcatcgccgatgcattcctgcaacaaatcctgctgcgtcctgctgaatatgacgtaatcgcctgtatgaacctgaacggtgactacatttctgatgcgctggcagcacaggttggcggtatcggtattgctccgggtgcgaacatcggtgacgaatgtgcactgtttgaagctacgcacggtacggcaccaaaatatgctggtcaggataaagtgaatccaggttccgttattctgtctgctgaaatgatgttacgtcacctgcaatggttcgaagcggctgacctgattgttaaaggcgttgaaggcgcgatcaagaacaagaccgtgacttacgatttcgaacgtctgatggaaggcgctaagctacggaaatgtagtgagtttgcgcaagacatcatcgataacatgtaa

SEQ ID NO: 28028 - protein, 417 aa, Erwinia carotovora subsp. atroseptica SCRI1043
MESKVVVPTEGQKITVDAQGKLVVPNNPVIPFIEGDGIGIDVTPAMINVVDAAVKKAYQGKRAISWMEIYTGEKSTQVYGKDVWLPDETLDLIREYRVAIKGPLTTPVGGGIRSLNVALRQQLDLYVCLRPVRYYEGTPSPVKQPELTDMVIFRENAEDIYAGIEWKAGSVEADKVIKFLREEMGVSKIRFPEQCGIGVKPCSEEGTKRLVRAAIEYAITNDRDSLTLVHKGNIMKFTEGAFKDWGYQLAREEFGGELIDGGPWVKIKNPNTGKEIVVKDVIADAFLQQILLRPAEYDVIACMNLNGDYISDALAAQVGGIGIAPGANIGDECALFEATHGTAPKYAGQDKVNPGSVILSAEMMLRHLQWFEAADLIVKGVEGAIKNKTVTYDFERLMEGAKLRKCSEFAQDIIDNM

SEQ ID NO: 28029 - DNA, 1254 bp, Yersinia pseudotuberculosis IP 32953
  CDS (1)..(1254): transl_table=11
atggaaagcaaagtagttgttccggcagaaggtaagaaaattactgtcgatgctcagggtaaactggttgttccgcataatccgatcattccatttattgaaggtgacggtattggtgttgatgtaaccccggcgatgatcaacgtggtagatgctgcggttaagaaagcttataacggtgaacgtaaaatttcctggatggaaatttacactggtgagaaatcaacccatgtctatggtaaagatgtttggttgccagaagaaaccttagatctgatccgtgattatcgcgttgctatcaaaggcccgttgaccactcctgtcggtggcggcatccgttctttgaacgttgctctgcgtcaacaacttgacctgtatgtgtgtctgcgtccggtgcgttattatgaaggcaccccaagcccggtaaaacaccctgaactgaccaacatggtgattttccgtgaaaacgctgaagatatctatgcgggtatcgaatggaaagcgggttcacccgaagcagagaaagtgatcaagttcctgcgtgaagagatgggtgtgaagaaaatccgtttccctgaacaatgtggtatcggtgtgaaaccgtgttcagaagaagggactaagcgtttggtacgtgcagcgattgaatatgcaattaccaacgatcgtgaatcagttacgctggttcataaaggcaacattatgaaattcaccgaaggcgcgtttaaagactggggttatcagttagcgcgtgaggaatttggtggtgaactgatcgacggtggcccatgggttaaaatcaaaaacccaaataacggcaaagaaattatcgttaaagatgtgattgccgatgctttcctgcaacagatcctgctgcgtcctgcggaatatgatgttatcgcttgtatgaacctgaacggtgattacatctctgatgcattggcagctcaggttggcggtattggtattgctccgggggctaacattggtgatgactgcgcactgttcgaagccactcacggtactgcaccaaaatatgctggtcaggataaagtgaacccaggttctattattctttcagcagaaatgatgctgcgtcacatgggctggttcgaagccgctgacttaatcattaaaggcactgaaggcgcaattcaagccaagaccgtgacttatgatttcgaacgtctgatggaaggcgctaagttgttgaagtgtagtgagtttggcgacgccattattaagcacatgtaa

SEQ ID NO: 28030 - protein, 417 aa, Yersinia pseudotuberculosis IP 32953
MESKVVVPAEGKKITVDAQGKLVVPHNPIIPFIEGDGIGVDVTPAMINVVDAAVKKAYNGERKISWMEIYTGEKSTHVYGKDVWLPEETLDLIRDYRVAIKGPLTTPVGGGIRSLNVALRQQLDLYVCLRPVRYYEGTPSPVKHPELTNMVIFRENAEDIYAGIEWKAGSPEAEKVIKFLREEMGVKKIRFPEQCGIGVKPCSEEGTKRLVRAAIEYAITNDRESVTLVHKGNIMKFTEGAFKDWGYQLAREEFGGELIDGGPWVKIKNPNNGKEIIVKDVIADAFLQQILLRPAEYDVIACMNLNGDYISDALAAQVGGIGIAPGANIGDDCALFEATHGTAPKYAGQDKVNPGSIILSAEMMLRHMGWFEAADLIIKGTEGAIQAKTVTYDFERLMEGAKLLKCSEFGDAIIKHM

SEQ ID NO: 28031 - DNA, 1266 bp, Symbiobacterium thermophilum IAM 14863
  CDS (1)..(1266): transl_table=11
gtggcgaagtttaccaagctgaccccgcccgaaggccagaagatcaccatggagaacggccggttggtggtaccggacaaccccatcatcccgtttatcgagggcgacggcacgggccccgacatctgggcggccgcgcagcccgtgatcgacgccgccgtggagaaggcctacggcggcaggcggaagatcgcctggttcgaggtctacgccggcgagaagtgcctgaacaagttcggcgagtggctgatcgacgacacggtggaggccatccgcgagtaccgggtcgcgatcaaggggcccctcaccacgccggtgggcggcggcatccggtcgctgaacgtcaccctgcggcaggtgctggacctgtacgcctgcgtccggcccgtgcgctggttccccggcgtgcccagcccggtgaaggagccgcacaagaccgacgtggtgatcttccgggagaacaccgaggacatctacgccggcatcgagtggaaggccggcaccccggaggcccgcaaggtccaggccctgctggccgaggagatgggcgtcaagttccccaacagcgacaagagcgacatgatcggcgtgggcatcaagccggtctcggagttcggctccaagcggctggtccgcgcggccatccagtacgccatcgacaacaagcgcaagtccgtcacgctggtccacaagggcaacatccagaagttcaccgagggcgccttccgcgactggggctaccaggtcgcgctggaggagttccgcccgtacgtcatcaccgaggaagagctctggtccgatgagtacaagggcaagatgcccgagggcaagatcctgatccgcgaccgcatcgccgacatcaccttccagcagctgctgctccggcccgaggagtgggacgtgatcgccaccctcaacctgaacggcgactacctctctgaccacgtcgcggctatcgtgggcggcatcggcatcgcccccggcgccaacatctcgtacagcggcggctacggcctgttcgaggccacccacggcaccgcgcccaagtacgccgggctcgacaaggtcaaccccggttcggtcatcctctcgggcgagatgatgctccgctacatgggctggcacgaggcggcggacctgatcatcaagggcctttccgccaccatcgcccagaagacggtcacctacgacttcgcccggctcaccgagggcgcgaccgaggtgaagtgctccgagttcggccggctcatcatcgcgaacatgtag

SEQ ID NO: 28032 - protein, 421 aa, Symbiobacterium thermophilum IAM 14863
MAKFTKLTPPEGQKITMENGRLVVPDNPIIPFIEGDGTGPDIWAAAQPVIDAAVEKAYGGRRKIAWFEVYAGEKCLNKFGEWLIDDTVEAIREYRVAIKGPLTTPVGGGIRSLNVTLRQVLDLYACVRPVRWFPGVPSPVKEPHKTDVVIFRENTEDIYAGIEWKAGTPEARKVQALLAEEMGVKFPNSDKSDMIGVGIKPVSEFGSKRLVRAAIQYAIDNKRKSVTLVHKGNIQKFTEGAFRDWGYQVALEEFRPYVITEEELWSDEYKGKMPEGKILIRDRIADITFQQLLLRPEEWDVIATLNLNGDYLSDHVAAIVGGIGIAPGANISYSGGYGLFEATHGTAPKYAGLDKVNPGSVILSGEMMLRYMGWHEAADLIIKGLSATIAQKTVTYDFARLTEGATEVKCSEFGRLIIANM

SEQ ID NO: 28033 - DNA, 1317 bp, Bacillus licheniformis ATCC 14580
  CDS (1)..(1317): transl_table=11
atgtttttctatattgaagaattacatattatgggaggttttattgtggcacaaggcgaaaaaattacagtctccggcggagtattaaacgttccaaacaacccggtcatcccgtttattgaaggggacggaacaggtcctgatatttggagagcggcttccagggttcttgaagcggctgtggagaaagcgtataacggcgaaaagaaaatcacttggaaagaagtctacgccggggaaaaagcgtacaacaaaaccggcgaatggcttccggaagaaacgcttgatacgatccgcgaatacctgatcgcgattaaaggtcctttaacaactcctgtaggcgggggaatccgctcattaaacgtagcgctcagacaagagcttgacttgtttacatgcctgcgtcctgtccgctatttcacaggcgttccttcaccggttaagcgccctgaagatacggacatggtcatcttccgtgagaatactgaagatatctacgccggcatcgagtacgcgaaaggctctgaagaagtgcaaaagctgatttcattcctgaaaaacgagcttggcgttaacaaaatccgcttccctgaaacatcgggcatcggcatcaagccggtttctgaagaaggaacatcaaggcttgtcagagctgcgatcgagtatgcgatcgagcacggccgcaaatctgtgacgctcgtccataaaggaaacatcatgaaattcacggaaggcgcctttaaaaactggggctatgaagtggctgaaaaagaattcggcgataaagtattcacttgggccgaatacgaccgcatcgctgaaaaagacggcaaagacgctgcaaacaaagcgcaaagcgaagctgaagctgccggcaaaatcatcatcaaagacagcatcgccgacatcttcctgcagcagattctgacacgtcctgccgagtttgacgttgtggcgacaatgaacctgaacggggactacatttcagatgcgctggctgcccaagtcggcggaatcggcatcgcacctggagcaaacatcaactatgagacaggacatgccatctttgaggcgacacatggtacagcgcctaaatacgccggcctcgacaaagtaaacccgtcttcagtcatcctatccggcgtgctgcttcttgagcatttgggctggaatgaggcggccgaccttgtcattaaatcaatggagaaaacaatcgcatccaaagtcgtcacatacgatttcgctcgtttgatggacggcgcgactgaagtcaaatgctctgaattcggtgatgagcttatcaaaaacatgtcttaa

SEQ ID NO: 28034 - protein, 438 aa, Bacillus licheniformis ATCC 14580
MFFYIEELHIMGGFIVAQGEKITVSGGVLNVPNNPVIPFIEGDGTGPDIWRAASRVLEAAVEKAYNGEKKITWKEVYAGEKAYNKTGEWLPEETLDTIREYLIAIKGPLTTPVGGGIRSLNVALRQELDLFTCLRPVRYFTGVPSPVKRPEDTDMVIFRENTEDIYAGIEYAKGSEEVQKLISFLKNELGVNKIRFPETSGIGIKPVSEEGTSRLVRAAIEYAIEHGRKSVTLVHKGNIMKFTEGAFKNWGYEVAEKEFGDKVFTWAEYDRIAEKDGKDAANKAQSEAEAAGKIIIKDSIADIFLQQILTRPAEFDVVATMNLNGDYISDALAAQVGGIGIAPGANINYETGHAIFEATHGTAPKYAGLDKVNPSSVILSGVLLLEHLGWNEAADLVIKSMEKTIASKVVTYDFARLMDGATEVKCSEFGDELIKNMS

SEQ ID NO: 28035 - DNA, 1248 bp, Mannheimia succiniciproducens MBEL55E
  CDS (1)..(1248): transl_table=11
atgcaatcaaaagttaaaattccacaaggtgataaaattcaactcgccgataacggcgcacttatcgtccctcataatcctattattccttttattgaaggcgacggtattggcgttgatgtgacgccggcgatgaaagcggtgattgatgcggcggtggaaaaagcatacggaggtacgcgtaaaatatcatggatggaaatctatgccggcggtaaagcaaatcaggtttatggcgaaaatacctggctgcctgcagaaacgctggagttgatccgtcaatatcatgtggcgattaaaggtccgttaatgacaccggtaggcggcggcattcgttctttaaacgtggcgatgcgccaaggtttggatttgtataactgcttacgtccgattcgttattatgaaggtacgccaagtccggttaaacacccggaatttgtcaatatggttattttccgtgaaaactccgaagatatttatgcgggcgttgaatgggtagccggctccccgggggcggataaactgattaacttcctgcaacgggaaatgggggtgactaaaatccgctttaccgaagattgcggaatcggcattaaaccggtttccaagcagggatcgcaacgtttggtgcgggctgctttacaatatgtaatagataatgaccgcagttcgcttaccttagtacataaaggcaatatcatgaaatttaccgaaggcgctttcaaagaatggggctatcaggttgcaaaagaattcggtgcggaacttattgatcaaggtccgtggatgaaattgaaaaatcctaatacgggcaccgaaattatcattaaagattgcattgccgacgcctttttacaagaagtgttattgcatcctaaagattacgatgtgattgccaccttaaaccttaacggcgattacatttccgacgcattagccgcgcaggttggcggtatcggtatttcaccgggcgccaatatcggtgacgatgcggcaatttttgaggctactcacggcacggcaccgaaaattgccggccaaaataaaggcaacccgggttcattaattcttagcggagaaatgatgctgcgccatttaggctggttggaagccgccgatttagtagtaaacgccgttgccaaaactattgcggacaaaaccgtaacatttgattttgccgaaatgctcgaaggagcgaccttgcgctcaacttccgagtttgccgaagacattattgccaatatgtag

SEQ ID NO: 28036 - protein, 415 aa, Mannheimia succiniciproducens MBEL55E
MQSKVKIPQGDKIQLADNGALIVPHNPIIPFIEGDGIGVDVTPAMKAVIDAAVEKAYGGTRKISWMEIYAGGKANQVYGENTWLPAETLELIRQYHVAIKGPLMTPVGGGIRSLNVAMRQGLDLYNCLRPIRYYEGTPSPVKHPEFVNMVIFRENSEDIYAGVEWVAGSPGADKLINFLQREMGVTKIRFTEDCGIGIKPVSKQGSQRLVRAALQYVIDNDRSSLTLVHKGNIMKFTEGAFKEWGYQVAKEFGAELIDQGPWMKLKNPNTGTEIIIKDCIADAFLQEVLLHPKDYDVIATLNLNGDYISDALAAQVGGIGISPGANIGDDAAIFEATHGTAPKIAGQNKGNPGSLILSGEMMLRHLGWLEAADLVVNAVAKTIADKTVTFDFAEMLEGATLRSTSEFAEDIIANM

SEQ ID NO: 28037 - DNA, 1191 bp, Bacteroides fragilis YCH46
  CDS (1)..(1191): transl_table=11
atgagtaaaattaccaaacagcaaaatggagtattgtcagtgccggatgtaccgacaataccttttataacgggtgatggagtaggagcggaaataactccggccatgcaggcgatagtagatgcggcggtagacatgtcgtatggtggtgtccggcgcatcgaatggaaagaagtactggccggtgaacgtgctttccgggctaccggttcgtggttgccggacgaaacgatggaggttttcaaggagtatctgataggcatcaaaggaccgttgactactccggtaggaggaggaatacgttcgttaaacgtggctttgcgccagacactcgatttatatgtctgcctgcgtccggtacgttggttccgcggagtggtgtctccggtcaaagagcccgaaaaggtgaatatgtacatctttcgtgagaatacggaagatatctatgccggtatcgaatgggaagcaggcactccggaagctaagaagttctaccggttcttgcacgaagagatgggagtcagtaaagtacgtttccccgaaacctcttcttttggtgtgaaaccggtttcgcgtgaggggacggagcgtctggtacgcgctgcctgccgttatgcgttgcagcatgaattgccctcggtcaccttggtgcacaaaggtaatatcatgaaattcacagaaggaggttttaagaagtgggggtacgaattggctgagcgggagtttgcagaggctcttgcctcaggtaaactggtgatcaaagactgtatagccgatgcctttttgcagaacactcttttgattcctgaagaatattcggtcattgccactctgaatctgaacggagactatatttccgaccaactggctgcgatggtaggtggcattggtattgcaccgggagccaatatcaattatgattccggacacgccatctttgaggccactcatgggacagcccccaatattgccggaaagaatgtggtgaatccctgttcactgatactttcggccgttatgatgcttgaatatataggctggcaagaacccgccgatcttatcgtcgaggcgcttgaagccagttttgccgaggggaaagccactaatgacctggcacgtttcatgcacaaaggccagccgctctctacttcggaatttacccgggaaatcattaaccgaattaaaaattaa

SEQ ID NO: 28038 - protein, 396 aa, Bacteroides fragilis YCH46
MSKITKQQNGVLSVPDVPTIPFITGDGVGAEITPAMQAIVDAAVDMSYGGVRRIEWKEVLAGERAFRATGSWLPDETMEVFKEYLIGIKGPLTTPVGGGIRSLNVALRQTLDLYVCLRPVRWFRGVVSPVKEPEKVNMYIFRENTEDIYAGIEWEAGTPEAKKFYRFLHEEMGVSKVRFPETSSFGVKPVSREGTERLVRAACRYALQHELPSVTLVHKGNIMKFTEGGFKKWGYELAEREFAEALASGKLVIKDCIADAFLQNTLLIPEEYSVIATLNLNGDYISDQLAAMVGGIGIAPGANINYDSGHAIFEATHGTAPNIAGKNVVNPCSLILSAVMMLEYIGWQEPADLIVEALEASFAEGKATNDLARFMHKGQPLSTSEFTREIINRIKN

SEQ ID NO: 28039 - DNA, 1023 bp, Methylococcus capsulatus str. Bath
  CDS (1)..(1023): transl_table=11
atgcacaagatcaccctcatccccggcgacggtatcggcccctccatcgtcgacgccgccgtcaaggtcatcgaggccaccggcgtccaggtccaatgggacacccaatccgccggcatggcggcggtcgagaaattcggtaccccgttgccggacgccacgctggattccatccgcgccaaccgcatctgcttcaagggaccgctcaccactcccgtcggcggaggttaccgcagcgtcaacgtcaccctgcgccaagccttcaacctctatgccaacgtccgtccggccatctccttcgagggcaccgacaccgccttcagcgacgtcaacctcgtcaccgtccgcgagaacaccgaaggcttgtacgccggcatcgagcatttcatcaaggtcgacgaggaaaagatcgcggcggaaagcatcgcggtcgtcacccgcaagggctctgagcgcatcatccgctatgccttcgactatgcccgccgcgcccggcgcaagaaggtcaccctggtgcacaaggccaacatcctcaagtgcacctccggcctgttcctggaaatcggtcgcgaaatcgccaaggaatatccggacatcgaattcgacgaccgtatcgtcgatgcctgctcaatgcagatggtcatgcagcctcagcgcttcgacgtgctggtcaccaccaatctgttcggcgatatcctgtcggacctggcggccggcctgatcggcggcctcgggctcacggcgggcgccaacatcggcaccgacgcggcgctgttcgaagccgtgcacggcagcgcgccggacatcgccgacaaaggcatcgccaatcccaccgccatgatcatggccggcgccatgatgctcgaacacatcggcgaaccggacgccgcgcgcaggatcgaacgcgcggtgcgcgaggtgatcgaggacggccgctcggtcacgccggacctggccaaggactccccctgcggcaccgcacagatggccgaagccatcgtcgagcgggtgcgtcaggcgtag

SEQ ID NO: 28040 - protein, 340 aa, Methylococcus capsulatus str. Bath
MHKITLIPGDGIGPSIVDAAVKVIEATGVQVQWDTQSAGMAAVEKFGTPLPDATLDSIRANRICFKGPLTTPVGGGYRSVNVTLRQAFNLYANVRPAISFEGTDTAFSDVNLVTVRENTEGLYAGIEHFIKVDEEKIAAESIAVVTRKGSERIIRYAFDYARRARRKKVTLVHKANILKCTSGLFLEIGREIAKEYPDIEFDDRIVDACSMQMVMQPQRFDVLVTTNLFGDILSDLAAGLIGGLGLTAGANIGTDAALFEAVHGSAPDIADKGIANPTAMIMAGAMMLEHIGEPDAARRIERAVREVIEDGRSVTPDLAKDSPCGTAQMAEAIVERVRQA

SEQ ID NO: 28041 - DNA, 1257 bp, Legionella pneumophila str. Lens
  CDS (1)..(1257): transl_table=11
atgacatacgataaaatcaaagtgcctgcccaaggcgaagctattactgttgctgctgaccattcacttcatgttcctgataatccaattattccttttattgagggtgatggtatcggtgttgatgtaacacctccgatgatccgtgttgttgatgctgcagttcaaaaagcatatggcaacaagaggaaaatttcctggatggaggtttatgccggggaaaaggctactaaggtttatggtggcgatcaatggcttcccaaagagactctggatgccatgaaaaaatatgtggtttcaattaaaggtcctttaactacccctgttggtggcggtatacgttcattgaatgtcgctattcgccaagacatggatctctatgtttgtttacgtccaattcgctattttaatggtgttccaagcccagttcgggaaccatggaaaaccgatatggttattttcagggaaaattctgaagatatttatgccggtattgaatggcaggcagataccccggaagctaaaaaagtgattcaatttttaactcaggaaatgggtgttaagaagattcgttttcctgagcattgtggtatcggtgtaaagcctgtttccagagaaggtaccactcgacttgtcaaagcggcaattcagtatgcaattgataatgaccgcagtacagtgactctggtacataaaggcaatatcatgaagtttactgaaggggcttttaaagattggggatatcaggttgcgcgcgattcttttggagcaaaagaatatcaaggtgggccatggatggaatttaaaaatcctaaaaccggtaagcagattatcattaatgatgtgatcgctgatgcctttttgcaacaaatcctgttaagacccgaagactatagtgtcattgctacattaaatttgaatggtgattatatttctgatgctttggctgctcaggttggcggaataggtatagctcccggagcgaacattagtgatcaaatggctgtgtttgaagcaactcatggaacagcgcctaaatacgctggccagaataaagtaaaccccggttctattattctttctgccgaaatgatgttacgtcatatggggtggtatgaagcggctgatttgattatcagaggtatggaaggcgcgatagaagccaaaaccgtaacttatgattttgaacgtggtatgcaaggagcaacgttagtcagcagctctggttttgcagatgccatgattaagcatatgtaa

SEQ ID NO: 28042 - protein, 418 aa, Legionella pneumophila str. Lens
MTYDKIKVPAQGEAITVAADHSLHVPDNPIIPFIEGDGIGVDVTPPMIRVVDAAVQKAYGNKRKISWMEVYAGEKATKVYGGDQWLPKETLDAMKKYVVSIKGPLTTPVGGGIRSLNVAIRQDMDLYVCLRPIRYFNGVPSPVREPWKTDMVIFRENSEDIYAGIEWQADTPEAKKVIQFLTQEMGVKKIRFPEHCGIGVKPVSREGTTRLVKAAIQYAIDNDRSTVTLVHKGNIMKFTEGAFKDWGYQVARDSFGAKEYQGGPWMEFKNPKTGKQIIINDVIADAFLQQILLRPEDYSVIATLNLNGDYISDALAAQVGGIGIAPGANISDQMAVFEATHGTAPKYAGQNKVNPGSIILSAEMMLRHMGWYEAADLIIRGMEGAIEAKTVTYDFERGMQGATLVSSSGFADAMIKHM

SEQ ID NO: 28043 - DNA, 1254 bp, Photobacterium profundum SS9
  CDS (1)..(1254): transl_table=11
atggatagtaaagtagttgtaccagtagacggtcagaaaatcacattggattctgaaggtaaactggtcgttcctaacaacccggtaatcccatacattgaaggtgatggtatcggtgttgatgtaagccctgcaatgatcaaagttgtcgatgcggcagtaaataaagcgtatgcaggtgatcgcaagattgagtggatggaaatctacactggtgagaaatcaactcaagtttacggcgaagatgcatggctaccgcaagaaactttagaattcattcgtgaatacaaagtcgcaatcaaaggtccactaacaactccagttggtggcggcattcgttctttaaacgttgctttacgtcaagaacttgatttatacatttgtgtacgtcctgttcgttattttgatggcgtacctagcccagttaaacgtccagatttaacagacatggtaatttaccgtgagaactctgaagatatctatgctggcgttgaataccaagctggcactgcagaagcagataaagtcattaaatttctacaagatgaaatgggcgcaactaaaatccgtttcacacagcaatgtggtatcggtattaagccgatttcagaggaaggcactaagcgtttaattcgcgcagcacttcagtacacaattgataacgaccgtgactcgctaacgcttgtacacaaaggcaatatcatgaagtttactgaaggtgcctttaaagattggggttacgaagttgctctacaagagtttggcgctgagttattggacggtggtccatggatgacgcttaaaaatccaaatactggcaaagagatcgttatcaaagactgtatcgctgatgcattcttacaacagatcctacttcgccctgctgagtacgatgtaattgcaaccatgaatcttaacggtgactacgtttctgatgcactagctgcacaggttggtggtatcggtatcgcacctggtgcaaacatcggtgatggtgttgcattgtttgaagcaactcacggtactgcacctaagtatgctggacaagataaagtaaaccctggttcactcattctttctgctgaaatgatgcttcgtcatatgggctggcttgaagctgctgatctgatcatcagctcaatggaagctgcaatcaataacaaaactgtgacttatgacttcgaacgccaaatggaaggtgctaccttacgtaagtgttcagagtttgcagatgacatgattgaacacatgtaa

SEQ ID NO: 28044 - protein, 417 aa, Photobacterium profundum SS9
MDSKVVVPVDGQKITLDSEGKLVVPNNPVIPYIEGDGIGVDVSPAMIKVVDAAVNKAYAGDRKIEWMEIYTGEKSTQVYGEDAWLPQETLEFIREYKVAIKGPLTTPVGGGIRSLNVALRQELDLYICVRPVRYFDGVPSPVKRPDLTDMVIYRENSEDIYAGVEYQAGTAEADKVIKFLQDEMGATKIRFTQQCGIGIKPISEEGTKRLIRAALQYTIDNDRDSLTLVHKGNIMKFTEGAFKDWGYEVALQEFGAELLDGGPWMTLKNPNTGKEIVIKDCIADAFLQQILLRPAEYDVIATMNLNGDYVSDALAAQVGGIGIAPGANIGDGVALFEATHGTAPKYAGQDKVNPGSLILSAEMMLRHMGWLEAADLIISSMEAAINNKTVTYDFERQMEGATLRKCSEFADDMIEHM

SEQ ID NO: 28045 - DNA, 984 bp, Haloarcula marismortui ATCC 43049
  CDS (1)..(984): transl_table=11
atgacacacgagatagccgttattccgggcgatggaatcggacaggaggtcacacccgccgcggtcgaagtgctggaggccatcgacggcgtcgacttcgacttcgtcgagggtgaagccggcgacgcagtgaaggaagaaaccggcgacgcgctcccggaggagacgcgcgaactggcggccgacgccgacgcgacgctgttcggcgcggctggcgagacagcggccgatgtcatcttgccgctccggcaggtcgtcggttccttcgcaaacgtccgcccggcccgctcgtatccgggactcgatgccgtccagcccgacaccgatatcgtattcattcgggagaacaccgagggtgtctacaagggcatcgagagcgagatttcggaaggcgtcactacctgtacgcgggtcatcaccgaagacgcctctgagaaaatcgccgaatacgggttcagctacgcgaagcagaacagctacgacgatgtgacgattgcccacaaagccaacgtcatgcgcactacagacgggctgttcctcgatgcggcctcggcagtcggcgaggaccgggacgcgtcctacgatacggcgctcatggacgcgcttgcgatgcatctggtcatgaacccacaggattacggcgtcgtcatctgtccgaacctcgccggcgatatgctatcggacctcgccgcgggcctcgtcggcggcctcggcctgctgccgtcggccaacatcggcgaggagaacgcgctgttcgagccggtccacggctccgccccggacatcgctggcgaaggcatcgccaacccttcagcgatgattctctccgcagcgatgttgctcgaccacctcggctacgacgagcagggcgatgcagttcggacggctgtcgagtccgtgctcgattcggggcctcgaacgccggatctgggcggcgacgcatccactgaggacgtgaccgccgcggttatcgacgaactgtaa

SEQ ID NO: 28046 - protein, 327 aa, Haloarcula marismortui ATCC 43049
MTHEIAVIPGDGIGQEVTPAAVEVLEAIDGVDFDFVEGEAGDAVKEETGDALPEETRELAADADATLFGAAGETAADVILPLRQVVGSFANVRPARSYPGLDAVQPDTDIVFIRENTEGVYKGIESEISEGVTTCTRVITEDASEKIAEYGFSYAKQNSYDDVTIAHKANVMRTTDGLFLDAASAVGEDRDASYDTALMDALAMHLVMNPQDYGVVICPNLAGDMLSDLAAGLVGGLGLLPSANIGEENALFEPVHGSAPDIAGEGIANPSAMILSAAMLLDHLGYDEQGDAVRTAVESVLDSGPRTPDLGGDASTEDVTAAVIDEL

SEQ ID NO: 28047 - DNA, 1263 bp, Haloarcula marismortui ATCC 43049
  CDS (1)..(1263): transl_table=11
atgggctacgattacgacaaagtggaggttcccgacgagggacagcagattcaggtcacggaggacgacgaactcgacgttccggaaaacccgattatccctatcatccacggggacggtatcgggaccgacgtgggtccggccgcacagaaagtgctcgaagccgccgcgaacgcaaccggtcgtgacatctcttggatgcgcatctacgccggccagtccgcccgagacaagtacgacgagaacctccctgatgacaccgtcgaagccatcaaagagttcaacgtcgctatcaagggcccgctaacgacaccggtcggcgctggcttccgctcgctgaacgtcgcacttcgcaagacgctcgacctctacgcgaacgttcgcccgacctatcacatcgagggcgtcccgtcaccggtcaaagaccccgaggagatggacatggtcaccttccgggagaacaccgaggacgtctacgccggcatcgagtgggaggccggcaccgacgaagtcgaggaggtcaaggagttcgtcgaggacgagatgaacttcgacgagaccatccacgacggcccggtcggcatcggcgtcaagccgatcaccgagttcgggaccaagcgcctcgtccgtgaggccatcgactacgccctcgaagaggaccgcgacagcgtcacgctggtccacaagggcaatatcatgaagttcactgagggagccttccgtgactggggctacgaggtcgccgaagaggagtacggcgagcacgtcatcaccgaggacgagctgtgggacgagtacgacggcgaggcgcccgaggactcactggtcgttaacgaccgcatcgccgacaacatgctccagcagctcctgacccgtaccgacgagtacgacgtcatcgcgacgatgaacctcaacggggactacatgtccgacgctgccggcgcacagatcggcggcctcggcatcgcccccggtgcgaacttcggttcggcccgctgtctcgcagagccggtccacggctccgcgccgaagtacgccggcgaggacaaggtcaacccgaccgcaatgatcctctccggccgcctcatgctcgaatacatgggctggaaggacgccggccagctcgttcgtgacgccgtcgaggagaccatctcctctggcaacgtcacctacgacctcgaacgccagatcgaaggcggtacgaagctcgccaccagcgagttcgccgagaaggtcgtcgaaaacatcgagaaacttgcataa

SEQ ID NO: 28048 - protein, 420 aa, Haloarcula marismortui ATCC 43049
MGYDYDKVEVPDEGQQIQVTEDDELDVPENPIIPIIHGDGIGTDVGPAAQKVLEAAANATGRDISWMRIYAGQSARDKYDENLPDDTVEAIKEFNVAIKGPLTTPVGAGFRSLNVALRKTLDLYANVRPTYHIEGVPSPVKDPEEMDMVTFRENTEDVYAGIEWEAGTDEVEEVKEFVEDEMNFDETIHDGPVGIGVKPITEFGTKRLVREAIDYALEEDRDSVTLVHKGNIMKFTEGAFRDWGYEVAEEEYGEHVITEDELWDEYDGEAPEDSLVVNDRIADNMLQQLLTRTDEYDVIATMNLNGDYMSDAAGAQIGGLGIAPGANFGSARCLAEPVHGSAPKYAGEDKVNPTAMILSGRLMLEYMGWKDAGQLVRDAVEETISSGNVTYDLERQIEGGTKLATSEFAEKVVENIEKLA

SEQ ID NO: 28049 - DNA, 1176 bp, Streptococcus thermophilus LMG 18311
  CDS (1)..(1176): transl_table=11
atggcagaaagaatccttatgactaatggcaatctcaaagttactgataatccgattattcctttcattgaaggagatggtgttggacgtgatatttggaagaatgctcaagcaatttttgataaagcggtagaagtggcctatggaggacagcgtcgtattgagtggcaagagtttttggcaggtaaaaaggcttttgataaaacaggtgagtggttgccgcaagaaactttagaggctattcgagaaagcctggtagctattaaggggccacttgaaacacctgtcggaggaggaattcgttctttaaatgtagctttacgtcaagaacttgatctctacgcttgtgttcgaccggttcggtatttcgaaggagtagcaagtccgcttaaggaaccagaaaaaacagacattactatttttcgtgagaatactgaggatatttatgcaggaattgaatgggaagcaggaacggtagatgtagagcgcgttattgctttttttcaaacagaaatgaatgtcgataaaattcgctttcccaagtcaagtagtattggaattaagcctatttcaatagaaggaagtaaacgattgattcgttcagctattgactatgctcttaagaacaatctaaagaaagtgacattggtgcataaagggaatattcaaaaattcacagaaggtggctttcgtaaatggggctatgaagtggctgaggaagaatataaggaagaaatgcttgctggccgtctagaagttaatgatataatcgctgataattttctacaacagattcttttgaatcccgaaaaatttgatgttgttgcattaaccaacttgaatggcgattatgcaagtgatgctctagctgcccaggttggtggtatcggaatctcccctggagctaatattaactatcaaacaggccatgctatctttgaagctactcatggaacggctccagatattgcggatcaagatagggctaatccttgctctattctcttatctggctgtatgcttttagaatatatcggttggtctgaagcagctgaactcattataagtgctattgaaaaaaactttaaatcagggatttttacagctgacctagcctttggaaaacgagcctattcaaccagtggtttcagcaatcaaattctctcaattatatga

SEQ ID NO: 28050 - protein, 391 aa, Streptococcus thermophilus LMG 18311
MAERILMTNGNLKVTDNPIIPFIEGDGVGRDIWKNAQAIFDKAVEVAYGGQRRIEWQEFLAGKKAFDKTGEWLPQETLEAIRESLVAIKGPLETPVGGGIRSLNVALRQELDLYACVRPVRYFEGVASPLKEPEKTDITIFRENTEDIYAGIEWEAGTVDVERVIAFFQTEMNVDKIRFPKSSSIGIKPISIEGSKRLIRSAIDYALKNNLKKVTLVHKGNIQKFTEGGFRKWGYEVAEEEYKEEMLAGRLEVNDIIADNFLQQILLNPEKFDVVALTNLNGDYASDALAAQVGGIGISPGANINYQTGHAIFEATHGTAPDIADQDRANPCSILLSGCMLLEYIGWSEAAELIISAIEKNFKSGIFTADLAFGKRAYSTSGFSNQILSII

SEQ ID NO: 28051 - DNA, 1272 bp, Geobacillus kaustophilus HTA426
  CDS (1)..(1272): transl_table=11
gtgacgcaaggagaaaaaattacagtccaaaatggtgtgctcaacgttccgaacaacccgatcattccgttcatcgagggggatggaaccggcccggacatttgggcggccgcttcgcgcgtgctcgaagcagcggtggaaaaagcgtacaaaggtgagaaaaaaatcgtctggaaggaagtgctcgctggtgaaaaagcgtacaagctgacgggcagctggcttccggatgaaacgcttgagacgatccgcgaatacataatcgccattaaagggccgttgacgacgccggtcggcggcggcatccgctcgctgaacgtagcgctccgccaagagctcgacctgtttgtctgcttgcgcccggttcgctacttcccaggcgttccgtcgccggtgaaacgcccggaagacaccgatatggtcattttccgggaaaacacggaagacatctacgctggcattgaatatgccaaaggcacgccggaagtgaaaaaagtcatcgactttttgcaaaacgaaatgggcgtgcgcaaaatccgcttcccggaaacgtccggcatcggcattaaaccgatttccgaacaagggacgaaacggcttgtgcgcgcggcgatcaactacgcgatcgaacacggccgcaagtcggtgacgctcgttcataaaggaaacattatgaaattcaccgaaggcgcgtttaaaaactggggttatgaattggcggaggaagaattcgccgacaaagtgttcacgtgggcgcaatacgaccgaatcgttgaaacggaaggcaaggaagcggcgaacaaagcgcttgctgatgcggaagcgtccggcaaaatcattatcaaagatgtcatcgccgacatcttcctgcaacaaattttgacgcgtccgcgcgaatttgacgtcatcgcgacgatgaacttaaacggcgactacatttccgacgcgctggccgctcaagtcggcggcatcggcatcgcgccgggggccaacatcaactacgaaaccggccacgcgattttcgaagcgacgcacggcacggcgccgaaatacgcagggcttgacaaagtcaacccgtcgtccgtcattctctcgggcgtcatgatgtttgagcatcttggttggaacgaagcagcgaaattgatcatcaaagcgatggagaaaaccatcgccgcgaaaatcgtcacgtatgacttcgcccgcctgatggaaggggcgacggaagtgaaatgctccgaatttgctgatgcgctcatccgcaatatggactaa

SEQ ID NO: 28052 - protein, 423 aa, Geobacillus kaustophilus HTA426
MTQGEKITVQNGVLNVPNNPIIPFIEGDGTGPDIWAAASRVLEAAVEKAYKGEKKIVWKEVLAGEKAYKLTGSWLPDETLETIREYIIAIKGPLTTPVGGGIRSLNVALRQELDLFVCLRPVRYFPGVPSPVKRPEDTDMVIFRENTEDIYAGIEYAKGTPEVKKVIDFLQNEMGVRKIRFPETSGIGIKPISEQGTKRLVRAAINYAIEHGRKSVTLVHKGNIMKFTEGAFKNWGYELAEEEFADKVFTWAQYDRIVETEGKEAANKALADAEASGKIIIKDVIADIFLQQILTRPREFDVIATMNLNGDYISDALAAQVGGIGIAPGANINYETGHAIFEATHGTAPKYAGLDKVNPSSVILSGVMMFEHLGWNEAAKLIIKAMEKTIAAKIVTYDFARLMEGATEVKCSEFADALIRNMD

SEQ ID NO: 28053 - DNA, 1467 bp, Anaplasma marginale str. St. Maries
  CDS (1)..(1467): transl_table=11
ttgtgttgggagtctatgtcagtacctataaccgtagcgtatggagatggagtagggccggaaattatggaggccgtgctgttcatcttgaaggaggccagagcagatgtttctatagaaaccgtggatataggccacaaccagtataaaaaggagtggacttctggcatcgctccctctgcgtgggagtcaatcagcaggactaggctgctgcttaaggcccctactatgaccccacagggtagtgggcataagagtttgaatgtcgccctcaggcagaggctggggctttatgtaaacgtgcggccctgcgtttcttattttcccgttgtaggcactaagcatccagatttggatgtggtaatcatcagagagaatgaggaagacacctacagcggtgttgagcacaaactatctgaagacacccatgagtgcgtgaagatttcaaccaggtccgcctcggaaaaaatctgtgcgtatgcgtttaactacgccagggctcacaatagaaagaaggttacgtgtttcgtgaaagataacatcatgaaaatgactgacggaatactgcacgcttctttcgacaaggtcgccaagggctatccagatattgaagcaaactactacatagttgatgtgggcatggctaagatcgccagcaacccggaggattttgatgttgtggtaaccacaaatctgtatggagacattgtatcagacatagtgtcgctctcttctgggtctatagggctgactggcagtgcgaacataggtgattattacgccatgttcgaggcagtacacggctcagcacccgatatagcaggcaagaatgtggccaatccctcagggctgctcaacgcggctgtgcaaatgttagtgcacatcgggcagctggacaaggccggggtgatccgtaacgcatttttgaagaccttagaagatggcgtgcatactgccgatatatatagcgagaaaaccagcttgcgtagggcatccaccatggagttcgcgcaggcaatagtgggaaacttaggaacaacacctcagcggcttaagggcctctctctcggcaaggaaacaccaagtaccgggagttcgggctacgtgcgcagcaatcccaaaagggtgttggtgggcgttgatgtcacggtacattgggacaagggcactgacatcaaggagttagttgggtccctttcagggctcagttcggaactgaagttgcagctggtgtacgccaaaggactggagttgtggcctaaagctccatattcttacacgtacgtcgatcttgtgtcttgcaggttttacgcggaagggaaggaagaggatggcgttgacggccgggaggttggaaatctgctgctcaaaatggaagacgctggcatagacacggtgaagatggtgaagttgtacctgtacgatgggggccagggttttttactccgtagcagctttggatcctga

SEQ ID NO: 28054 - protein, 488 aa, Anaplasma marginale str. St. Maries
MCWESMSVPITVAYGDGVGPEIMEAVLFILKEARADVSIETVDIGHNQYKKEWTSGIAPSAWESISRTRLLLKAPTMTPQGSGHKSLNVALRQRLGLYVNVRPCVSYFPVVGTKHPDLDVVIIRENEEDTYSGVEHKLSEDTHECVKISTRSASEKICAYAFNYARAHNRKKVTCFVKDNIMKMTDGILHASFDKVAKGYPDIEANYYIVDVGMAKIASNPEDFDVVVTTNLYGDIVSDIVSLSSGSIGLTGSANIGDYYAMFEAVHGSAPDIAGKNVANPSGLLNAAVQMLVHIGQLDKAGVIRNAFLKTLEDGVHTADIYSEKTSLRRASTMEFAQAIVGNLGTTPQRLKGLSLGKETPSTGSSGYVRSNPKRVLVGVDVTVHWDKGTDIKELVGSLSGLSSELKLQLVYAKGLELWPKAPYSYTYVDLVSCRFYAEGKEEDGVDGREVGNLLLKMEDAGIDTVKMVKLYLYDGGQGFLLRSSFGS

SEQ ID NO: 28055 - DNA, 1005 bp, Idiomarina loihiensis L2TR
  CDS (1)..(1005): transl_table=11
atgagtagaactatcacagttattccaggtgacggcatcggcccggatattgtcgagtctgcaacagccattcttgataaagcaggttgtgactttgaatatgaatacgtcgacgctggtctgactgctttggaaaaaaccggagagttattacctcaaaatactcttgatgcgattgaacgtaacggtgttacattaaaaggtccactgactactccggttggcgaaggcttcacctctattaatgtcagcctgcgtaaacacttttcgctatatgctaacgtacgccctgttttgtcttttaccggcacccaagcgcgctacgaaaacattgatattattaccattcgtgaaaataccgaaggtatgtattccggcttaggccaaaaagtgtctgaagacggtaatgaagcagaagcagtcagcaaaattacccgtgaaggcgctgagcggattgtccgtttcgcctatgaaaccgcacgccgcgaaggccgtaagaaagtcaccgcagtgcataaagccaatattctgaagtccacttctggtctattcttaaaagtagcgcgtgaaattgcggaagagtatccggacattgaatcaacagaaatgattgttgatgcggcctgcatgcgcttagttatgaaccctgaagagtttgacgttattgttaccaccaacctgtttggcgatatcctgtcagacctgtgcgcaggtttggtcggcggcttaggtatggcacccggcgctaacattggtaaagactgcgccattttcgaagctgtacacggctcagccccggatattgccggtaaaaacctggcaaacccaacctcagttatcttagcgtcaattcagatgctggaatacttgggcatgcaagagcaagccgaaaaaatcaccaaagcactagaagacgtgatttccagtggtgaccgtaccactcgtgatttaggcggttcgcacggtaccactgattttactcaggcagttattgagcgtctttaa

SEQ ID NO: 28056 - protein, 334 aa, Idiomarina loihiensis L2TR
MSRTITVIPGDGIGPDIVESATAILDKAGCDFEYEYVDAGLTALEKTGELLPQNTLDAIERNGVTLKGPLTTPVGEGFTSINVSLRKHFSLYANVRPVLSFTGTQARYENIDIITIRENTEGMYSGLGQKVSEDGNEAEAVSKITREGAERIVRFAYETARREGRKKVTAVHKANILKSTSGLFLKVAREIAEEYPDIESTEMIVDAACMRLVMNPEEFDVIVTTNLFGDILSDLCAGLVGGLGMAPGANIGKDCAIFEAVHGSAPDIAGKNLANPTSVILASIQMLEYLGMQEQAEKITKALEDVISSGDRTTRDLGGSHGTTDFTQAVIERL

SEQ ID NO: 28057 - DNA, 1263 bp, Zymomonas mobilis subsp. mobilis ZM4
  CDS (1)..(1263): transl_table=11
atgagtgaaaaaataacgtttaccgaaggtaaattacaggttcccgattatcccgttattccctttattgaaggcgatggtgtcggacccgaaatctggcaatctgctcagacgattttcgataaagccatagaaaaggcttatggcgacaaacgccgcgttgaatggaaacaggttttagctggcggcaaggcttttgatcaaacaggctcatggatgcctgatgaaacgatgactgccttcaaagactatcttgtcggtattaaaggccctctgacaacgcctatcggcggcggtattcgttctttaaatgtagctttgcggcaggaactggatctctttgtttgtttgcgcccagttcgctggtttaaaggtgtcgaaacaccggtcaaacaccctgaaaaagtcaatatgactatttttcgggaaaataccgaagacatttatgcgggtattgaatggctggaaggcacggatgatgccaaaaagctttataaattcttgcatgaagaaatgggcgttaccaaggttcgtttccctgaaacatcttctttcggcatcaaacccgtttctattgacggctctgaacggcttgttcgtgcggctatcgaatatgctattgcccagaaagcaccatcgattaccttggtgcataaaggcaatatcatgaaattcacagaaggcggctttaaacaatggggctatgccttagctgaacgtgaatttggcgataaactctttacgatgaaccaatatgatcagctgaaaaaggcacaaggtgctgaagccgctgacaaggctttgcaagcggccaaggctgctggaaaaattattgttaaagatgtgattaccgatgccttcttgcagaatactcttctgaaacctgaagattattcggttattgcaaccatgaatttgaacggcgattatatctccgatcagttggccgccatggttggcggtattggtatcgcaccgggtgctaatatcaactatgccaccggacatgcgatctttgaagcgacccatggcacggcaccggatatcgctggggaagataaggctaacccgtcttcgctgttactgtcaggtgccatgatgtttgactatcttggatggttcgaagtcggcaagctgattagtcaggctatggaaaaactgttccagaagagacatgctacggttgatttggcgcgattcatgccagaaggcgttgcgctgcctaccagccaatttacagaagagatggtagcccatctataa

SEQ ID NO: 28058 - protein, 420 aa, Zymomonas mobilis subsp. mobilis ZM4
MSEKITFTEGKLQVPDYPVIPFIEGDGVGPEIWQSAQTIFDKAIEKAYGDKRRVEWKQVLAGGKAFDQTGSWMPDETMTAFKDYLVGIKGPLTTPIGGGIRSLNVALRQELDLFVCLRPVRWFKGVETPVKHPEKVNMTIFRENTEDIYAGIEWLEGTDDAKKLYKFLHEEMGVTKVRFPETSSFGIKPVSIDGSERLVRAAIEYAIAQKAPSITLVHKGNIMKFTEGGFKQWGYALAEREFGDKLFTMNQYDQLKKAQGAEAADKALQAAKAAGKIIVKDVITDAFLQNTLLKPEDYSVIATMNLNGDYISDQLAAMVGGIGIAPGANINYATGHAIFEATHGTAPDIAGEDKANPSSLLLSGAMMFDYLGWFEVGKLISQAMEKLFQKRHATVDLARFMPEGVALPTSQFTEEMVAHL

SEQ ID NO: 28059 - DNA, 1428 bp, Synechococcus elongatus PCC 6301
  CDS (1)..(1428): transl_table=11
atgtacgagaagattcaaccccctagcgaaggcagcaaaattcgctttgaagccggcaagccgatcgttcccgacaacccgatcattcccttcattcgtggtgacggcgctggcgttgatatctggcccgcaactgagcgcgttctcgatgccgctgtcgctaaagcctatggcggtcagcgcaaaatcacttggttcaaagtctacgcgggtgatgaagcctgcgacctctacggcacctaccaatatctgcctgaagatacgctgacagcgatccgcgagtacggcgtggcaatcaaaggcccgctgacgacgccgatcggtggtggcattcgatcgctgaacgtggcgctacggcaaatcttcgatctctatgcctgcgtccgcccctgtcgctactacaccggcacaccctcgccccaccgcacgcccgaacaactcgatgtggtggtctaccgcgaaaacaccgaggatatctacctcggcatcgaatggaagcaaggtgatcccaccggcgatcgcctgatcaagctgctgaacgaggacttcattcccaacagccccagcttgggtaaaaagcaaatccgtttggattccggcattggtattaagccgatcagtaaaacgggtagccagcgtctgattcgtcgtgcgatcgagcatgccctacgcctcgaaggccgcaagcgacatgtcacccttgtccacaagggcaacatcatgaagttcacggaaggtgctttccgggactggggctatgaactggccacgactgagttccgaaccgactgtgtgactgaacgggagagctggattcttgccaaccaagaaagcaagccggatctcagcttggaagacaatgcgcggctcatcgaacctggctacgacgcgatgacgcccgaaaagcaggcagcagtggtggctgaagtgaaagctgtgctcgacagcatcggcgccacccacggcaacggtcagtggaagtctaaggtgctggttgacgatcgcattgctgacagcatcttccagcagattcaaacccgcccgggtgaatactcggtgctggcgacgatgaacctcaatggcgactacatctctgatgcagcggcggcggtggtcggtggcctgggcatggcccccggtgccaacattggcgacgaagcggcgatctttgaagcgacccacggcgcagcgcccaagcacgctggcctcgatcgcattaaccccggctcggtcatcctctccggcgtgatgatgctggagtacctaggctggcaagaggctgctgacttgatcaccaagggcatcagccaagcgatcgctaaccgtgaggtcacctacgatctggctcggttgatggaaccggcggttgatcaaccactcaagtgctcggaatttgccgaagccatcgtcaagcatttcgacgattag

SEQ ID NO: 28060 - protein, 475 aa, Synechococcus elongatus PCC 6301
MYEKIQPPSEGSKIRFEAGKPIVPDNPIIPFIRGDGAGVDIWPATERVLDAAVAKAYGGQRKITWFKVYAGDEACDLYGTYQYLPEDTLTAIREYGVAIKGPLTTPIGGGIRSLNVALRQIFDLYACVRPCRYYTGTPSPHRTPEQLDVVVYRENTEDIYLGIEWKQGDPTGDRLIKLLNEDFIPNSPSLGKKQIRLDSGIGIKPISKTGSQRLIRRAIEHALRLEGRKRHVTLVHKGNIMKFTEGAFRDWGYELATTEFRTDCVTERESWILANQESKPDLSLEDNARLIEPGYDAMTPEKQAAVVAEVKAVLDSIGATHGNGQWKSKVLVDDRIADSIFQQIQTRPGEYSVLATMNLNGDYISDAAAAVVGGLGMAPGANIGDEAAIFEATHGAAPKHAGLDRINPGSVILSGVMMLEYLGWQEAADLITKGISQAIANREVTYDLARLMEPAVDQPLKCSEFAEAIVKHFDD

SEQ ID NO: 28061 - DNA, 1266 bp, Bacillus clausii KSM-K16
  CDS (1)..(1266): transl_table=11
atggcagcagaaaaaattcaaactcaaaacggtgttttaaacgttccaaacgagccaatcgttccattcattgaaggcgacggtacaggcccagacatttgggcagcagcttctcgtgttcttgatgctgcagttgagaaagcatacaacggcgagcgcaaaatccactggaaagaaattcttgccggtgaaaaagcgtacaacgaaacaggagaatggcttccagcagaaacgcttgacgctgtccgcgaatatttaattgcgattaaaggacctttaacgacgccaattggcggcggcatccgctcattaaacgtagcgctccgccaagagcttgatttgttcacgtgtctccgtccagtccgttattttacaggagtgccatctccagtgaaacgtcctgaagatacggacatggtcatcttccgggaaaatacagaagacatttatgcagggattgaatttaaagaaggctctgacgaagtgaaaaagctaattgcctttttgcaagatgagcttggtgcaacgaatatccgcttccctgaaacttctggtatcggcgtaaaacctgtatcgaaggaaggaacagagcgcctcgtccgttctgccattcaatatgcgcttgatgaaggccgcaagagcgtgacgcttgtccataaaggcaacatcatgaaatttacagaaggcgcgtttaaaaactggggttacgaattggctgagcgtgagtttggcgataaagtatttacatgggctgagtacgataaaattgtggaagaaagtggccgcgaagctgccgataaagcgcaaagcgaagcagaagctgctggcaaaatcattgtgaaagatgccattgccgacattttcttgcagcaaattttgactcgcccgaaagagtttgatgtggttgcgacgatgaacttaaacggcgattacatttccgatgctcttgctgctcaagtaggcggaatcggcattgctccaggagcaaacatcaactatgatacaggtcatgccatttttgaagcgacacatggcacggcgccaaaatatgcgggactcgacaaagtcaacccttcctcagtcctgttgtcaggagaactgcttttgcgtcaccttggctggacagaagcagcagatttaattatggcgtcaatggacaaaacgattgccagcaaagttgttacttatgattttgcccgcttgatggatggcgcaacagaagtgtcttgctcaggatttgcagatgaattgatcaaaaatctataa

SEQ ID NO: 28062 - protein, 421 aa, Bacillus clausii KSM-K16
MAAEKIQTQNGVLNVPNEPIVPFIEGDGTGPDIWAAASRVLDAAVEKAYNGERKIHWKEILAGEKAYNETGEWLPAETLDAVREYLIAIKGPLTTPIGGGIRSLNVALRQELDLFTCLRPVRYFTGVPSPVKRPEDTDMVIFRENTEDIYAGIEFKEGSDEVKKLIAFLQDELGATNIRFPETSGIGVKPVSKEGTERLVRSAIQYALDEGRKSVTLVHKGNIMKFTEGAFKNWGYELAEREFGDKVFTWAEYDKIVEESGREAADKAQSEAEAAGKIIVKDAIADIFLQQILTRPKEFDVVATMNLNGDYISDALAAQVGGIGIAPGANINYDTGHAIFEATHGTAPKYAGLDKVNPSSVLLSGELLLRHLGWTEAADLIMASMDKTIASKVVTYDFARLMDGATEVSCSGFADELIKNL

SEQ ID NO: 28063 - DNA, 1080 bp, Dehalococcoides ethenogenes 195
  CDS (1)..(1080): transl_table=11
atgtctcataacgtaacccttatacccggtgacgggattggccctgaaatatctgaggcaacccgccgggtactggaagctaccggtgtaaagtttaactgggagatagtaaatgccggtgcggatgtggtagccgaatatggcacgcctctaccggatatggtgcttgaatccattcgtaaaaacaaggttgccatcaaagggccggtgactaccccggtcggctcagggtttagaagtgtaaatgtgggtatgcgcaaggctcttaatctttatacctgcctgcgcccctgcaagacctatcccggtgttccctcccgctatgacaatgtggatattgttatcgtgcgggaaaacatggaagacctgtatgccggtattgagtttgaaaagggcagccccgaagccctaaggcttatagagtttatcaaagagaataaaaaggttgaaatacgggcggattcgggtatcagcataaagcctatcagcgtgttcggcaccgaacgcatattccgctgggcttttaaatatgcccgggacaacaaacgcaaaagggttacggctgtccacaaagctaatatcatgaaatattctgacgggcttttcctggctataggccgcaaagtggccgaggaatacccggagatagagtttgaagaccgtattgtagacaatatgactatgcagctggtcaaaaacccctcccagtttgatattctggtctgcccaaatctgtacggggacattctgtctgatttgtgtgccgggttggtgggcggcctgggggttgcaccgggtgctaatatcggtgatgagtatgccctgtttgagcctacccatggctctgcccccaagtacaaggggatgaataaggtaaaccccatggccatgatgctttccggggtgctgatgcttcgctacctgaaagaggaaaaggccgctgataagctggaaaatgctattgcagctgttattgccgaaggcaagagtgttacctatgatatgctttcacctgacaaacaggcggcggcggtaggcacttcgcaggtggcagacgccataatagccaaaatgaaataa

SEQ ID NO: 28064 - protein, 359 aa, Dehalococcoides ethenogenes 195
MSHNVTLIPGDGIGPEISEATRRVLEATGVKFNWEIVNAGADVVAEYGTPLPDMVLESIRKNKVAIKGPVTTPVGSGFRSVNVGMRKALNLYTCLRPCKTYPGVPSRYDNVDIVIVRENMEDLYAGIEFEKGSPEALRLIEFIKENKKVEIRADSGISIKPISVFGTERIFRWAFKYARDNKRKRVTAVHKANIMKYSDGLFLAIGRKVAEEYPEIEFEDRIVDNMTMQLVKNPSQFDILVCPNLYGDILSDLCAGLVGGLGVAPGANIGDEYALFEPTHGSAPKYKGMNKVNPMAMMLSGVLMLRYLKEEKAADKLENAIAAVIAEGKSVTYDMLSPDKQAAAVGTSQVADAIIAKMK

SEQ ID NO: 28065 - DNA, 1023 bp, Gluconobacter oxydans 621H
  CDS (1)..(1023): transl_table=11
atgaccaagaccattcccgccacgctcatcgccggtgacggaattggcccggaaatcatgcaatcggtcacgaccgtcatggatgccctcggcgcccccttcctctgggatcaccagagcgcaggcgtaggcgcattcgaccagcacggtacggccctgcccgaggccacgctcgacagcatccgccgcaccggcctcgtgctgaaagggccgctgaccacgcctgtgggcaagggcttccgctccatcaacgtcacgctgcgtcaggccttcgacctgtacgccaatgtccgcccgacccagacgatcgtccccggcggacgctacgagaacgtcgatctggtcgtgatccgcgagaacatcgaaggcctgtatgccgcgatggagtattacatggccgtggatggcgacccggaagccgtggcatacggcgccgggttcaatacccgcaccgaatgcaaccggatcgtccgcttcgccttcgaatacgccgtgaaaaacaaccgcaagaaggtgacgcttgtccacaaggcgaacatcctcaaaatcctgagcggcctgttcctgcatgaaggccgcaaggtcgccgcggaatatgaaggccgcgtggcactggaagagcgcatcgttgacgcctgcgcgatggaacttgtgatccgcccggagaactacgacgtcatcgtcacgaccaatctgttcggcgatatcctgtctgatctgacagccggtctcgtgggcggcctgggtatggcgccaggtgcgaatatcggcgagaaaatgggcatcttcgaggctgtgcacggctcagcacccgacatcgccggacagggaatcgccaatccgctggcgctgatgatggcgggtagcatgatgctggcccatgtcgggcggcaggacctgtcccagcgtctggacggtgcgatgaagcagatccttcaggtcgaaggccttcgcacgcgcgatctgggcggtaaggccaccacgcaggacgtcacgcaggcccttctgcgcgccatccagtaa

SEQ ID NO: 28066 - protein, 340 aa, Gluconobacter oxydans 621H
MTKTIPATLIAGDGIGPEIMQSVTTVMDALGAPFLWDHQSAGVGAFDQHGTALPEATLDSIRRTGLVLKGPLTTPVGKGFRSINVTLRQAFDLYANVRPTQTIVPGGRYENVDLVVIRENIEGLYAAMEYYMAVDGDPEAVAYGAGFNTRTECNRIVRFAFEYAVKNNRKKVTLVHKANILKILSGLFLHEGRKVAAEYEGRVALEERIVDACAMELVIRPENYDVIVTTNLFGDILSDLTAGLVGGLGMAPGANIGEKMGIFEAVHGSAPDIAGQGIANPLALMMAGSMMLAHVGRQDLSQRLDGAMKQILQVEGLRTRDLGGKATTQDVTQALLRAIQ

SEQ ID NO: 28067 - DNA, 1452 bp, Ehrlichia ruminantium str. Gardel
  CDS (1)..(1452): transl_table=11
atgtcaattccagtaacagttgcttatggagatggtattggtccagaaattatggaagctgtacttttaatcttaagtgaagctaaatcaggtttggttatagagactatagagctggggcacaatttatataaaaaagaatggtcttgtggtattgctccttcttcttgggattctatccatagaactaaggtattactaaaatctcctacaatgaccccacagggacaaggacataaaagcttaaatgttacattgagaaagaagttgggactatatgcaaatgttagaccatgtatttcttatcatcctgtaataaaaacaaaatatcctaatttgaatgtagtaataattagagaaaacgaggaagatacttatactggtatagaacatagattaactagtgatacatatcaatgtttaaaagtaataacaagatcaggttcagaaaggatatgtaattatgcttttcaatatgcgataactcataataggaaaaaagttacatgtttggtaaaagataatattatgaagatgacagatggcatatttcataagtctttttcaaaaattgcagagggttatcctagtattatatctgatcattatattgttgacattggtatggcaagagtagccactaatccagaaaattttgatgttatagtaactactaatttatatggtgatataatttctgatatagttgctgaactatctggatcaattggtcttgcaggaagtgccaatataggggacaattatgcaatgtttgaggctgtacatggatcagccccagatatagctggtaaaaatatagctaatccttctggtttattgagtgctgcaatacagatgctagtttatttgaagaagtttaatgaagcagaattaattcataatgcatttcttaaaactttagaagatggaattcacacagcagatatttaccaagataatattagtaaagaaaaagtttctactatggattttgctaaagctgtggttgagaattttgggcaatctccttgtaacatacaaaaacctgtattaagtattatgaatagtacaagtggtacaacaagtgtgccatatgtatatcagccatcttataccgataaaattttggttggtgtggatgttactattggttgtgatgttatagatctgaatcttaatcaattgattgttgatttacgaaatataaaacatgatcagttagaacttgtattagttcatagtaaaggattggaaatttggccagatgaatcttctactgtaaatctttcttatgttgatcaaatatgttgtagattttatatgaaatgtaaaagtgaaatcattcatgaccatgtgaatcaattgcttttggaattagataaaaagaaaataaatgtagtgaaaatggaaaagctctatctgtatgatgatcaacctggattttttacgtag

SEQ ID NO: 28068 - protein, 483 aa, Ehrlichia ruminantium str. Gardel
MSIPVTVAYGDGIGPEIMEAVLLILSEAKSGLVIETIELGHNLYKKEWSCGIAPSSWDSIHRTKVLLKSPTMTPQGQGHKSLNVTLRKKLGLYANVRPCISYHPVIKTKYPNLNVVIIRENEEDTYTGIEHRLTSDTYQCLKVITRSGSERICNYAFQYAITHNRKKVTCLVKDNIMKMTDGIFHKSFSKIAEGYPSIISDHYIVDIGMARVATNPENFDVIVTTNLYGDIISDIVAELSGSIGLAGSANIGDNYAMFEAVHGSAPDIAGKNIANPSGLLSAAIQMLVYLKKFNEAELIHNAFLKTLEDGIHTADIYQDNISKEKVSTMDFAKAVVENFGQSPCNIQKPVLSIMNSTSGTTSVPYVYQPSYTDKILVGVDVTIGCDVIDLNLNQLIVDLRNIKHDQLELVLVHSKGLEIWPDESSTVNLSYVDQICCRFYMKCKSEIIHDHVNQLLLELDKKKINVVKMEKLYLYDDQPGFFT

SEQ ID NO: 28069 - DNA, 1428 bp, Wolbachia endosymbiont strain TRS of Brugia malayi
  CDS (1)..(1428): transl_table=11
atgtcaacaccaatcacagttgcatatggtgacggtatcgggccagaaattatggaagcggtgctgtcgatgctgcgcgaagcagaggcaaagatttcaatagatgttattgaaataggagagcgtgtttataataaggaatggtcttacggaatttctccaagtggttgggagtctattgaaagaacaaaggtattgctcaagtctccgacaacaacttcacaaggtaaagggcacaaaagcttaaatgttgcactcagaaaaagtctagggttatatgcaaacatcaggccatgcacttcatatcatcctgttatagaaaataaattcgataggtttgatattgtagtgatacgcgaaaatgaagaggacgtttatacaggaatagagcataggcttactggtaattcctaccagtgcactaaaattattactagatctggctcagagaaaatatgcagatacgcttttaattatgcaaaaagacacaataggaagaaagtaacttgcctaactaaagataacataatgaaaatgactgatggcattttccatacagcatttgattctattgcaaaagaatatccagatataaaggcagaacattatatagttgacattggaatggcacgtgttgccacagaacctgaaaatttcgatgttatagtaactgagaacctatatggcgatatattgtcagacatagtagcacaaacctcaggttctgtagggcttgctggaagtagtaatataggtagtgaatatgcaatgtttgaagcagttcatggttctgctcctaatattgcaggaaaaaacatagctaatccttctggccttttaaatgccgcggtgcatatgttgatctatataggtcaggcagatgttgcaaaattagttcacgatgcatggctaaagactttggaggatgggatacacactgctgatttgtataaagagaagaagagtaaacagaaagttggtacgaaagagtttgcagaggctgttatagataatataggaaagaaacctggaatattgcctgagcttataattagcaatggtgtaagtagtaaaattagtaaaatacaaggtaactgtgaacaagactataaagttaggaaactggttggtagcgacataacgctcgcttgggacaaatccagcaattttaatcaaatagtgaaattatttgagtcaagtaatccaaaggttatagcaatatactcaaaagggctggcgatctggcctggagactcaaaatctttgagtgaccaagtaacttgcaggtttattgcaaataacgaaaagaaaactatcacaaacattgatgtaaacaacctgctaatcaaacttgaaagaaatagctttgatgtggtgagaatggataagttgtatttgtatgatgagaaagaagggttcttttcttaa

SEQ ID NO: 28070 - protein, 475 aa, Wolbachia endosymbiont strain TRS of Brugia malayi
MSTPITVAYGDGIGPEIMEAVLSMLREAEAKISIDVIEIGERVYNKEWSYGISPSGWESIERTKVLLKSPTTTSQGKGHKSLNVALRKSLGLYANIRPCTSYHPVIENKFDRFDIVVIRENEEDVYTGIEHRLTGNSYQCTKIITRSGSEKICRYAFNYAKRHNRKKVTCLTKDNIMKMTDGIFHTAFDSIAKEYPDIKAEHYIVDIGMARVATEPENFDVIVTENLYGDILSDIVAQTSGSVGLAGSSNIGSEYAMFEAVHGSAPNIAGKNIANPSGLLNAAVHMLIYIGQADVAKLVHDAWLKTLEDGIHTADLYKEKKSKQKVGTKEFAEAVIDNIGKKPGILPELIISNGVSSKISKIQGNCEQDYKVRKLVGSDITLAWDKSSNFNQIVKLFESSNPKVIAIYSKGLAIWPGDSKSLSDQVTCRFIANNEKKTITNIDVNNLLIKLERNSFDVVRMDKLYLYDEKEGFFS

SEQ ID NO: 28071 - DNA, 1209 bp, Xanthomonas oryzae pv. oryzae KACC10331
  CDS (1)..(1209): transl_table=11
gtgctgaaagatcgtgctaatcaggtaccttcttgcagttcatccacctggcgttcctggcactgctgctcaggagatcgtgaacaggttcttaggtgttcagtcccggcatcgggcataattgccggtgagacctcattgcgccgatctgccgggtttgacggctggcgctccccccttcaagttcggaaacccaacgttatgacgcagacaatcacggtcatccgcggcgacggtatcggcccggagatcatggatgccacgctgttcgtgctcgacgcgctgcaagctggcctgacctacgaatacgcagacgccggcctggtcgcgctggaaaagcacggcgatctgctgcccgagtcgaccctggcctcgatcagcaagaacaaggtggcgctgaaaagcccgttgaccacgccggtcggcgagggcttcagctcgatcaacgtcgccatgcgtcgcaagttcgacctgtacgcgaacgtgcgtccggccaagtcgttcccgaacaccaagtcgcgtttcgccgatggcgtggacctgatcacggtgcgcgaaaacaccgaaggtgcctacctgagcgaaggccagaccgtgtccgaggatggcgagaccgcgttctccggcatcctgatcactcgcaagggctccgagcgcatcgtgcgctacgccttcgacctggcgcgcgccaccggccgcaagaaggtcaccgcggtgcacaaggccaacatcatcaagtcgacctcgggcctgttcctgaaggtcgcccgcgatgtggccgcgcagtacccggaaatcgaattccaggaaatgatcgtcgacaacacctgcatgcagctggtgatgcgtccggagcagttcgacatcatcgtcaccaccaacctgttcggcgacatcctctccgacctgtgcgccggtctggtcggcggcctgggcctggccccgggcgccaacatcggtctggacgcggcgatcttcgaagccgtgcacggctcggcgccggatatcgcagggcagggcaaggccaatccgtgcgcgctgctgctgggcgccgcgcagatgctggaccacatcggccagccgcagaacgccgagcgcctgcgcgaagccatcgtcgccacgctggaagccaaggattccttgaccccggacctgggcggcagcggcaacaccatgggcttcgccaaggccatcgccagccgcctctga

SEQ ID NO: 28072 - protein, 402 aa, Xanthomonas oryzae pv. oryzae KACC10331
MLKDRANQVPSCSSSTWRSWHCCSGDREQVLRCSVPASGIIAGETSLRRSAGFDGWRSPLQVRKPNVMTQTITVIRGDGIGPEIMDATLFVLDALQAGLTYEYADAGLVALEKHGDLLPESTLASISKNKVALKSPLTTPVGEGFSSINVAMRRKFDLYANVRPAKSFPNTKSRFADGVDLITVRENTEGAYLSEGQTVSEDGETAFSGILITRKGSERIVRYAFDLARATGRKKVTAVHKANIIKSTSGLFLKVARDVAAQYPEIEFQEMIVDNTCMQLVMRPEQFDIIVTTNLFGDILSDLCAGLVGGLGLAPGANIGLDAAIFEAVHGSAPDIAGQGKANPCALLLGAAQMLDHIGQPQNAERLREAIVATLEAKDSLTPDLGGSGNTMGFAKAIASRL

SEQ ID NO: 28073 - DNA, 1191 bp, Bacteroides fragilis NCTC 9343
  CDS (1)..(1191): transl_table=11
atgagtaaaattaccaaacagcaaaatggagtattgtcagtgccggatgtaccgacaataccttttataacgggtgatggagtaggagcggaaataactccggccatgcaggcgatagtagatgcggcggtagacatgtcgtatggtggtgtccggcgcatcgaatggaaagaagtactggccggtgaacgtgctttccgggctaccggttcgtggttgccggacgaaacgatggaggttttcaaggagtatctgataggcatcaaaggaccgttgactactccggtaggaggaggaatacgttcgttaaacgtggctttgcgccagacactcgatttatatgtctgcctgcgtccggtacgttggttccgcggagtggtgtctccggtcaaagagcccgaaaaggtgaaaatgtacatctttcgtgagaacacggaagatatctatgccggtatcgaatgggaagcaggcactccggaagctaagaagttctaccggttcttgcacgaagagatgggagtcagtaaagtacgtttccccgaaacctcttcttttggtgtgaaaccggtttcgcgtgaggggacggagcgtctggtacgcgctgcctgccgttatgcgttgcagcatgaattgccctcggtcaccttggtgcacaaaggtaatatcatgaaattcacagaaggaggttttaagaagtgggggtacgaattggctgagcgggagtttgcagatgctcttgcctcaggtaaactggtgatcaaagactgtatagccgatgcctttttgcagaacactcttttgattcctgaagaatattcggtcattgccactctgaatctgaacggagactatatttccgaccaactggctgcgatggtaggtggcattggtattgcaccgggagccaatatcaattatgattccggacacgccatctttgaggccactcatgggacagcccccaatattgccggaaagaatgtggtgaatccctgttcactgatactttcggccgttatgatgcttgaatatataggctggcaagaacccgccgatcttatcgtcgaggcgcttgaagccagttttgccgaggggaaagccactaatgacctggcacgtttcatgcacaaaggccagccgctctctacttcggaatttacccgggaaatcattaaccgaattaaaaattaa

SEQ ID NO: 28074 - protein, 396 aa, Bacteroides fragilis NCTC 9343
MSKITKQQNGVLSVPDVPTIPFITGDGVGAEITPAMQAIVDAAVDMSYGGVRRIEWKEVLAGERAFRATGSWLPDETMEVFKEYLIGIKGPLTTPVGGGIRSLNVALRQTLDLYVCLRPVRWFRGVVSPVKEPEKVKMYIFRENTEDIYAGIEWEAGTPEAKKFYRFLHEEMGVSKVRFPETSSFGVKPVSREGTERLVRAACRYALQHELPSVTLVHKGNIMKFTEGGFKKWGYELAEREFADALASGKLVIKDCIADAFLQNTLLIPEEYSVIATLNLNGDYISDQLAAMVGGIGIAPGANINYDSGHAIFEATHGTAPNIAGKNVVNPCSLILSAVMMLEYIGWQEPADLIVEALEASFAEGKATNDLARFMHKGQPLSTSEFTREIINRIKN

SEQ ID NO: 28075 - DNA, 1008 bp, Xanthomonas campestris pv. campestris str. 8004
  CDS (1)..(1008): transl_table=11
atgacgcagacaatcacggtcatccgcggcgacggtattggcccggagatcatggatgccacgctgttcgtgctcgacgcgctgcaggctggcctgacctacgagtacgccgatgccggcctggtcgcgctggaaaagcacggcgatctgctgcctgagtccaccctggcctcgatcaccaagaacaaggtggcgctgaagagcccgctgaccacgccggtcggtgagggtttcagctcgatcaacgtcgccatgcgtcgcaagttcgacctgtacgccaacgtgcgtccggccaagtcgttccccaacaccaagtcgcgtttcgccgatggcgtggacctgatcacggtgcgtgagaacaccgaaggcgcctacctgagcgaaggccaggaagtctcggccgacggcgaagtggccgtttccggcgcccgcgtcacccgcaagggctccgagcgcatcgtgcgctacgccttcgacctggcgcgcgccaccggccgcaagaaggtcaccgcggtgcacaaggccaacatcatcaagtcgacctcgggcctgttcctgaaagtcgcccgcgatgtcgccacgcagtacccggaaatcgaattccaggaaatgatcgtcgacaacacctgcatgcagctggtgatgcgtccggagcagttcgacatcatcgtgaccaccaacctgttcggcgacatcatctccgacctgtgtgccggtctggtcggcggcctgggcctggctccgggcgccaacatcggtgtggacgcggcgatcttcgaggccgtgcacggctcggcgccggatatcgcagggcagggcaaggccaacccgtgcgcgctgctgctgggcgcggcacagatgctggaccacatcggccagccgcagaacgccgaacgcctgcgcgaagcgatcgtcgccacgctggaagccaaggactcgctgacccccgacctgggtggcaccggcaacaccatgggctttgccaaggccatcgccagccgcctctga

SEQ ID NO: 28076 - protein, 335 aa, Xanthomonas campestris pv. campestris str. 8004
MTQTITVIRGDGIGPEIMDATLFVLDALQAGLTYEYADAGLVALEKHGDLLPESTLASITKNKVALKSPLTTPVGEGFSSINVAMRRKFDLYANVRPAKSFPNTKSRFADGVDLITVRENTEGAYLSEGQEVSADGEVAVSGARVTRKGSERIVRYAFDLARATGRKKVTAVHKANIIKSTSGLFLKVARDVATQYPEIEFQEMIVDNTCMQLVMRPEQFDIIVTTNLFGDIISDLCAGLVGGLGLAPGANIGVDAAIFEAVHGSAPDIAGQGKANPCALLLGAAQMLDHIGQPQNAERLREAIVATLEAKDSLTPDLGGTGNTMGFAKAIASRL

SEQ ID NO: 28077 - DNA, 1476 bp, Rickettsia felis URRWXCal2
  CDS (1)..(1476): transl_table=11
atgtacttaacaagagagtattatatggcagaatttacaccgattacaattgcatacggggacggtataggtcctgaaataatggaggcagtgctttatatattacgtaaagccgaggctcgtattcgcttagaaaccattgaagtaggtgaaaagctttacaagaagcattatacttcaggcataagtgaagaaagttgggaatcaatacaacgtaccggtattatacttaaagccccgattactactccgcaaggtggaggatataaaagtttaaacgtcacgattcgtaaaacattacagctttttgctaatattcgtccttctgtttcgtttcatccttttactatgacattacatccgcatctgaacctcactatcatacgtgagaatgaggaagatttatacgcaggtatagaataccgacaaacgcataatatgtatgaatcaataaagttgataagtcatacgggttgtgaaaaaattattagatatgcttttgaatatgcggtaaaaaataaccgcaaaaaagtcacgtgcttaagcaaagataatattatgaaattttccgatggggtttttcataaaatatttaatgagattgcaaaagaatatccgcaaattaataatgagcattatattatcgatatcgggactgcaaggcttgcaaccaaacctgaaatatttgacgttatcgtaacttctaatttatacggtgatatcatatccgatgtagctgccgagatttcagggtcggtaggactcgccggttctgcaaatatcggacaacattatgctatgtttgaagcggtacatggaagtgctcccgatattgccggcaaagatatcgcaaatccgtcagggcttctaaatgctgctataatgatgcttgtacatatagggcaaggtgatattgctagtttaatcgaaaatgcttggaaaaaaactatagaggatggagttcatacagccgatatatataatgagcagaattctagtaaaaaagttggtacaaaagaatttgctgaagaagtaacgaaaagattaggacagataccgacaaagctacctaaagcagattatccgttgattgccgagaaacaagaaagtaatatagattataaaattgatactaacgaagttaagaaattggtaggtacggatatatttgtgaatatgaatatatcttccgctcacgatatagctgataaaattaataagcttgatcttggtaatattgagctaaaaacaatctcgtccaaagggctaaaattatggcctcgtgatacaaggtttgaaactatttccgatcattggtgttgtcgttttatgaataaagacggcacggaaataaagcatttagatataacaaggttgcttgaagctttaagcaaagcaaatattgattttatcaaagtagagaatttatttgagtttgatggtgtggcagggtatagcttggctcaaggcgagtaa

SEQ ID NO: 28078 - protein, 491 aa, Rickettsia felis URRWXCal2
MYLTREYYMAEFTPITIAYGDGIGPEIMEAVLYILRKAEARIRLETIEVGEKLYKKHYTSGISEESWESIQRTGIILKAPITTPQGGGYKSLNVTIRKTLQLFANIRPSVSFHPFTMTLHPHLNLTIIRENEEDLYAGIEYRQTHNMYESIKLISHTGCEKIIRYAFEYAVKNNRKKVTCLSKDNIMKFSDGVFHKIFNEIAKEYPQINNEHYIIDIGTARLATKPEIFDVIVTSNLYGDIISDVAAEISGSVGLAGSANIGQHYAMFEAVHGSAPDIAGKDIANPSGLLNAAIMMLVHIGQGDIASLIENAWKKTIEDGVHTADIYNEQNSSKKVGTKEFAEEVTKRLGQIPTKLPKADYPLIAEKQESNIDYKIDTNEVKKLVGTDIFVNMNISSAHDIADKINKLDLGNIELKTISSKGLKLWPRDTRFETISDHWCCRFMNKDGTEIKHLDITRLLEALSKANIDFIKVENLFEFDGVAGYSLAQGE

SEQ ID NO: 28079 - DNA, 1269 bp, Staphylococcus haemolyticus JCSC1435
  CDS (1)..(1269): transl_table=11
atgtcagctgaaaaaattactagaattaacgatggattaaatgtacctaatgaaccaattattccttttattattggtgatggtattggaccagatatttggaaagcagcgagtcgcgttattgatgcagctgttgaaaaagcatataacggcgaaaaacgtattgaatggaaagaagtactagcaggtcaaaaagcttttgatgaaacaggtgaatggttacctcaagaaacgcttgacacgattaaagaatatttaatcgctattaagggaccattaactacaccaattggtggtggtattcgttcattaaatgttgcattacgtcaagaattagacctatttacatgtttacgtccagttcgttggttcaaaggtgtcccttcaccagttaaacgtccacaagatgttgatatggtcatcttccgtgaaaatactgaagatatttatgcaggtatcgaatttaaagaaggtactgatgaagttaaaaaaattattgatttcttacaaaatgaaatgggtgctactaacattcgcttcccagaaacttcaggtattggtgtgaaaccagtttctaaagaaggtactgaacgtttagttagagctgcaattcagtatgcaatcgataataaccgtaaaactgttacgcttgttcacaaaggtaatattatgaaattcaccgaaggcgcatttaagcaatggggctatgatgtagctcataatgaatttgctgataaggtatttacttggcaacaatatgatgaaattgttgaaaaagatggtaaagatgcagcaaatcaagctcaagaaaaagctgaacaagatggaaaaatcattattaaagattctatcgctgacattttcttacaacaaattttaactcgtccagcagaacatgatgtagttgctacaatgaatctaaatggtgactatatttcagatgctttagcagctcaagtgggcggaattggaattgcacctggtgcaaacattaactatgagtcaggacacgctattttcgaagcaacacatggtactgcacctaaatatgctggtttaaacaaagttaacccatcttctgaattattaagttcagttctaatgttagaacatttaggttggcaagaagccgctgataagattactgatgcaattgaagctactattgcttctaaagttgtaacttatgattttgctcgtttaatggatgatgctactgaagtatcaacttcagaattcgctgatgagttaattaaaaacttaaagtaa

SEQ ID NO: 28080 - protein, 422 aa, Staphylococcus haemolyticus JCSC1435
MSAEKITRINDGLNVPNEPIIPFIIGDGIGPDIWKAASRVIDAAVEKAYNGEKRIEWKEVLAGQKAFDETGEWLPQETLDTIKEYLIAIKGPLTTPIGGGIRSLNVALRQELDLFTCLRPVRWFKGVPSPVKRPQDVDMVIFRENTEDIYAGIEFKEGTDEVKKIIDFLQNEMGATNIRFPETSGIGVKPVSKEGTERLVRAAIQYAIDNNRKTVTLVHKGNIMKFTEGAFKQWGYDVAHNEFADKVFTWQQYDEIVEKDGKDAANQAQEKAEQDGKIIIKDSIADIFLQQILTRPAEHDVVATMNLNGDYISDALAAQVGGIGIAPGANINYESGHAIFEATHGTAPKYAGLNKVNPSSELLSSVLMLEHLGWQEAADKITDAIEATIASKVVTYDFARLMDDATEVSTSEFADELIKNLK

SEQ ID NO: 28081 - DNA, 1236 bp, Sulfolobus acidocaldarius DSM 639
  CDS (1)..(1236): transl_table=11
ttggtcatgttgtacaaagaacctcaagatggggagccaataaagtttgaaaagggaaaatgggtagtaccaaataaaccaataattctatatatagagggagacggaataggacctgaaattactaattcagctatcagagtagtgaataaggctgtagagaaagcttataaaagttctagagagatcaaatggttagaagtgtatgcaggagagaaagcaaacaagattacgggagatagattcccgaaagagacacaggacatgctattaaagtacagggttgtattaaagggacctttagaaactcccataggaaaaggatggaaatccataaatgttgcaataagattgatgcttgacctctacgcaaacataagaccagttaagtatattgaagggcttgaaagcccacttaaacatccagaaaaagtggatatgattatatttagggaaaatacagacgacctttacaggggcatagaatttccctatgatagcgaagaggcaaagaaaataagaaaattccttagagaggaattaaaggtcgatattgaagatgatacaggaataggactaaaggttatgagtaagtttaaaacccagagaattaccaggcttgcattaaactacgctcttcagaactcgagaaagaaagtcactgtaatgcataaaggaaatgtaatgaaatataccgaaggatccttcagggaatgggcatatgaagtagcactaaatgaatacagagataagattgtgactgaggaggaaattaaccggggggttaattcggaaggaaaggttatacttaatgataggatagcggataacatgcttcaacaaataatcattagacctgatgagtacgatataatacttgcccctaacgtaaatggtgattacatatcagatgctgctggagcattaatcggaaacataggaatgctaggaggtgccaacattggagatacaggaggaatgtttgaagctatacatggtacagcgccaaaatatgcaggcaagaatgtggcaaatcctacaggaataataaaatcatgtgaattaatgttatactttatgggatggagtgaagcagctagactaatagagaaagctattaatgaatccattaaacaaaagaaagtcacccaggatatagcgagatacctaggtatcacacctctaggaacaaaggaatatactgacacacttgtgcaaataatggactccttctga

SEQ ID NO: 28082 - protein, 411 aa, Sulfolobus acidocaldarius DSM 639
MVMLYKEPQDGEPIKFEKGKWVVPNKPIILYIEGDGIGPEITNSAIRVVNKAVEKAYKSSREIKWLEVYAGEKANKITGDRFPKETQDMLLKYRVVLKGPLETPIGKGWKSINVAIRLMLDLYANIRPVKYIEGLESPLKHPEKVDMIIFRENTDDLYRGIEFPYDSEEAKKIRKFLREELKVDIEDDTGIGLKVMSKFKTQRITRLALNYALQNSRKKVTVMHKGNVMKYTEGSFREWAYEVALNEYRDKIVTEEEINRGVNSEGKVILNDRIADNMLQQIIIRPDEYDIILAPNVNGDYISDAAGALIGNIGMLGGANIGDTGGMFEAIHGTAPKYAGKNVANPTGIIKSCELMLYFMGWSEAARLIEKAINESIKQKKVTQDIARYLGITPLGTKEYTDTLVQIMDSF

SEQ ID NO: 28083 - DNA, 1257 bp, Pseudomonas fluorescens Pf-5
  CDS (1)..(1257): transl_table=11
atgggatacaagaagattcaggttccagcagtcggcgacaaaatcaccgtcaacgcagaccattctctcaatgttcctaacaacccgattattcctttcatcgaaggcgacggtattggtgttgatatcagcccggtcatgatcaaggttgtcgatgctgcggttaagaaggcttacggcggcgaacgcaagatttcctggatggaagtgtatgccggggaaaaagcgactcaagtgtacgaccaggacacctggcttcctcaggaaaccctggacgcagtgaaggattacgtggtttccatcaagggcccgctgaccactccggtcggtggtggcatccgttccctgaacgtggccctgcgtcagcaactcgatctttatgtatgcctgcgccctgtgcgctggttcgaaggcgtgcccagcccggtgaaaaagccgggtgacgtggacatgaccatcttccgtgaaaactccgaagacatttacgccggcatcgagtggaaagccggctcggcagaagccaccaaggtcatcaagttcctcaaggaggaaatgggtgtcaccaagatccgtttcgacgaaaactgcggcatcggcgtcaagccggtttccctgcagggcaccaagcgtctggcgcgcaaggcgctgcaatatgtagtggataacgaccgcgactcgctgaccatcgtgcacaaaggcaacatcatgaagttcaccgaaggtgccttcaaggaatgggcctacgaagtggcggccgaagagttcggcgcgaccctgctggacggcggtccctggatgcagttcaagaacccgaaaaccggcaagaacgtcatcgtcaaggatgccatcgccgacgccatgctccagcagatcctgctgcgcccggccgaatacgatgtgatcgcgaccctcaacctcaacggtgactacctgtccgacgccctggcggcggaagtgggcggcatcggcattgcgccaggcgccaacctgtccgataccgtggccatgttcgaagccacccacggtaccgcgcccaagtatgccggcaaggaccaggtcaacccgggttcgctgatcctctccgcagagatgatgctgcgccacatgggctggaccgaagcggccgacctgatcatcaagggtaccaatggcgcaatctcggccaagaccgtgacctatgacttcgaacgcctgatggacggtgcaaccctgctgtcttcctcggccttcggcgatgcgctgatctcgcacatgtaa

SEQ ID NO: 28084 - protein, 418 aa, Pseudomonas fluorescens Pf-5
MGYKKIQVPAVGDKITVNADHSLNVPNNPIIPFIEGDGIGVDISPVMIKVVDAAVKKAYGGERKISWMEVYAGEKATQVYDQDTWLPQETLDAVKDYVVSIKGPLTTPVGGGIRSLNVALRQQLDLYVCLRPVRWFEGVPSPVKKPGDVDMTIFRENSEDIYAGIEWKAGSAEATKVIKFLKEEMGVTKIRFDENCGIGVKPVSLQGTKRLARKALQYVVDNDRDSLTIVHKGNIMKFTEGAFKEWAYEVAAEEFGATLLDGGPWMQFKNPKTGKNVIVKDAIADAMLQQILLRPAEYDVIATLNLNGDYLSDALAAEVGGIGIAPGANLSDTVAMFEATHGTAPKYAGKDQVNPGSLILSAEMMLRHMGWTEAADLIIKGTNGAISAKTVTYDFERLMDGATLLSSSAFGDALISHM

SEQ ID NO: 28085 - DNA, 1251 bp, Colwellia psychrerythraea 34H
  CDS (1)..(1251): transl_table=11
atgactaatcaaatcatcatccccactaccggagataaaattacctttgttgatggtaagttatcagtaccaaataatccgataatcccttttattgaaggtgatggcattggtgttgatgtaacacccccaatgctaaaagttgtgaatgcagcagttgctaaagcgtatgccggcgaaagagaaattgcgtggatggaagtctatgcgggtgaaaaagcgactaaaatgtatgatagtgaaacgtggcttcctgaagaaacacttgccatattacaagaatataaagtttctattaaaggacctctaactacacccgtaggtggtggcatgagttctttaaatgttgcaataagacaaatgcttgatctttacgtctgtcaacgtcctgttcaatggtttactggtgttccaagtccagtaaaaagaccttctgaagttgatatggtcatctttcgtgaaaataccgaagatatctatgctggcatagaatataaagcgggtagtgataaagcgaaagcggtgattgaattcttaactgaagaaatgggtgctagtaatatccgttttactgataactgtggtatcggtataaagccagtatcaaaagaaggaagtcaacgtttagtaagacaagcgattcaatacgcaattgataatgataaagactcggtaactctggttcataaaggtaatattatgaaattcacagagggcgcttttaaagattggggttatgagcttgctcgtgatgaatttggcgcaagtttgattgatggcggaccttggagtacgcttacaaacccaaatacaggtaatgagattatcatcaaggatgttattgctgatgccatgttacagcaaatcttgttacgtcctgctgaatatagtgttatcgccactttaaacttaaatggtgattacctatctgatgctcttgctgctcaagttggtggtattggtattgctcctggagctaatttaggcgacgaagttgctgtatttgaagcaactcatggaacagctcctaaatatgccggtaaaaataaagtaaatcctggttctgtaattctttctgcagaaatgatgttaagacatatgggctggcttgaagcggctgatttattgcttaaagggatgtcaggagcaatcaaagcgaaaacagtaacctatgattttgagcgccttatggatgatgcgacgttagtctcttgttcagcgtttggagattgtattattgatcatatgtaa

SEQ ID NO: 28086 - protein, 416 aa, Colwellia psychrerythraea 34H
MTNQIIIPTTGDKITFVDGKLSVPNNPIIPFIEGDGIGVDVTPPMLKVVNAAVAKAYAGEREIAWMEVYAGEKATKMYDSETWLPEETLAILQEYKVSIKGPLTTPVGGGMSSLNVAIRQMLDLYVCQRPVQWFTGVPSPVKRPSEVDMVIFRENTEDIYAGIEYKAGSDKAKAVIEFLTEEMGASNIRFTDNCGIGIKPVSKEGSQRLVRQAIQYAIDNDKDSVTLVHKGNIMKFTEGAFKDWGYELARDEFGASLIDGGPWSTLTNPNTGNEIIIKDVIADAMLQQILLRPAEYSVIATLNLNGDYLSDALAAQVGGIGIAPGANLGDEVAVFEATHGTAPKYAGKNKVNPGSVILSAEMMLRHMGWLEAADLLLKGMSGAIKAKTVTYDFERLMDDATLVSCSAFGDCIIDHM

SEQ ID NO: 28087 - DNA, 1008 bp, Colwellia psychrerythraea 34H
  CDS (1)..(1008): transl_table=11
atgactaaacaaaccatcacggtaattcctggcgacggtatcggtccgagcattatagatgctacgattaaaatattagataaagcaggctgtggttttgattatgaatttgcagatgcaggtttaaccgccttagaaaagcatggtgaattagtaccagaagaaacgatcaaccttatcgaaaaaaacaagatcactttaaaggggccattaacgactcctgtaggtgaaggttttacttcaatcaacgtaaccttacgtaagcagtttaaattatacgcaaaccttcgtcctgtattatcatttaagggcacaaaagcacgttatgaaaacattgatattctaacggttcgtgaaaatactcaaggcatgtattctggtgctggccaagttacttctgaggacggtactgaagctcaagcaatgagtattgttactcgtgaaggcgctgaaaaaatattaacatttgcttacgagactgcaattaaagaaggtcgtaaaaaaataacagctgttcataaagctaatatcctaaaatcgacttcaggtttatttttaaaagttgctcgtgaagttgcccagcgttacccacaaattgaatcaacagaaatgattgttgataactgttgtatgcaactggttatgaaccctgaacagtttgatgttatcgtaacaacgaatctatttggtgatattttatcagacttatgtgctggtttagttggcggccttggtatggcgccaggtgctaatattggtgaagattgtgcgatttttgaagcggtacacggtagtgcaccagatattgctggtaaaaacttagcaaacccaacgtctgtgatattagcagcaattcaaatgctggaatacttagacatgggtgataaagcagaaaagatcagagctgctattacagatgttattgcatcaggtgatagaactaccggtgatttaggtggtactcatggtactacggactttactgaagcagtacttgagagactataa

SEQ ID NO: 28088 - protein, 335 aa, Colwellia psychrerythraea 34H
MTKQTITVIPGDGIGPSIIDATIKILDKAGCGFDYEFADAGLTALEKHGELVPEETINLIEKNKITLKGPLTTPVGEGFTSINVTLRKQFKLYANLRPVLSFKGTKARYENIDILTVRENTQGMYSGAGQVTSEDGTEAQAMSIVTREGAEKILTFAYETAIKEGRKKITAVHKANILKSTSGLFLKVAREVAQRYPQIESTEMIVDNCCMQLVMNPEQFDVIVTTNLFGDILSDLCAGLVGGLGMAPGANIGEDCAIFEAVHGSAPDIAGKNLANPTSVILAAIQMLEYLDMGDKAEKIRAAITDVIASGDRTTGDLGGTHGTTDFTEAVLERL

SEQ ID NO: 28089 - DNA, 1242 bp, Dechloromonas aromatica RCB
  CDS (1)..(1242): transl_table=11
atgacttctcacatcaaggttccgcaaggtggttcgaaaatcgttccgggtcaggcgattccggataacccgatcatcccgttcatcgaaggcgatggcatcggcatcgacatcacgccggtcatgatcaaggtcatcgatgcggcagttgagaaggcctatggcggcaagaagaaaatccactggatggaagtctatgccggcgaaaagtctacccgcctgtacggttcggacgaatggctgcccaaggaaaccttcgatgccctgaaggaatactccgtctccatcaaggggccgatgacgacgccggttggtggcggcatccgttccctgaacgtggcgctgcgccaggaactggatctctaccagtgcgtccggccggtgcggtatttcaagggcgtgccatccccgctgaagcacccggaactgaccaatatggtcatcttccgcgagaataccgaagacatctacgctggtatcgaatgggcctgtggctctgaaggcgtcaagaaagtcgtcaagttcctgcaggaggaaatgggcgtcaagaaaatccggtttccggagacttccggtattggcatcaagccgatttccatcgaaggaacgtcgcgcctggtccgtgctgcgatcaaatacgccatcgacaatgatcgcaagtcggtgaccatcgtgcacaagggcaatatcatgaagttcacggaagggctgttccgtgatgcctgctacaagctggctcaggatgaattcggggccgaactgatcgacggtggcccgtggtgcaggatcaagaacccgaagaacggtcgtgagatcatcatcaaggattccattgccgatgccttcctgcaacagatcctgctgcgtccggccgagtacgacgtgatcgctactaccaacctgaacggcgactacatctccgatgcgctggcggcccaggtcggtggcatcggtatcgcgccaggggccaacatctccgaccggtacgcctgcttcgaggccacccacggcacggcgccgaagtacgccggcctggacaaggtcaatccgggttccttgatcctctcggccgaaatgatgctgcgccacctcggctggggcgacgccgccaatctggtgctcaaggccatggaagcggcgattggcgacaagcaggtgacctacgacttcgcccgccagatggaaggcgccaacgagttgtcctgctccgaattcggcgatgcgatgattgcccgcatgtaa

SEQ ID NO: 28090 - protein, 413 aa, Dechloromonas aromatica RCB
MTSHIKVPQGGSKIVPGQAIPDNPIIPFIEGDGIGIDITPVMIKVIDAAVEKAYGGKKKIHWMEVYAGEKSTRLYGSDEWLPKETFDALKEYSVSIKGPMTTPVGGGIRSLNVALRQELDLYQCVRPVRYFKGVPSPLKHPELTNMVIFRENTEDIYAGIEWACGSEGVKKVVKFLQEEMGVKKIRFPETSGIGIKPISIEGTSRLVRAAIKYAIDNDRKSVTIVHKGNIMKFTEGLFRDACYKLAQDEFGAELIDGGPWCRIKNPKNGREIIIKDSIADAFLQQILLRPAEYDVIATTNLNGDYISDALAAQVGGIGIAPGANISDRYACFEATHGTAPKYAGLDKVNPGSLILSAEMMLRHLGWGDAANLVLKAMEAAIGDKQVTYDFARQMEGANELSCSEFGDAMIARM

SEQ ID NO: 28091 - DNA, 1425 bp, Prochlorococcus marinus str. NATL2A
  CDS (1)..(1425): transl_table=11
atggcaaattttgaaaagcttactgccccatcagaaggccaaagaattactttttctgatggaaacccagtagtcccagaccatccaattattccatttatcagaggtgatggaacagggattgatatttggccagctacacaattagtcatcgataaagctattgaaaaagcttatggaaaaaatcgatccattgaatggttcaaaatctatgcaggtgatgaagcttgcgagttatacggaacttatcaatatttaccaaacgataccctcgaagcgatccgaacttacgggatagctatcaaaggacctttaacaactcctgtaggtggtgggattagatctttaaacgtatctctaagacagatttttgatctatattcatgtgttaggccttgcaaatattacgaagggactccaagccctcataaaaagcctcaggatttagatgtaattgtttatagagaaaatactgaagatatttatatgggtattgaatgggaatctgatgatcctgaatgcatcaaattgattgaccaaatcaataatgaaataattccagccagccaaaaactaaaaaacaggaaaattccaagcggatcaggaataggcattaaaccagttagtaaaattggtagtcaaagacatatcagacgtgcaattaaacatgcactcaccctggaagggagcaaaagacatgtgaccttggttcacaagggaaacatcatgaaattcactgaaggagctttcagagattggggatacgaattagcaaccacagaatttaggaatgaatgcgttaccgagagagaaagttggattttaggtaatgtagaaaaaaatcctcacatctcctatgaggagaatgctgagttaattgatccaggttattcgtctttaacagaagagaaaaagaaagctatttgtgatgaggtttgttccgttctttcaatcattggcagtagtcatggcagtggtaaatggaaagatatggtgatggttgatgaccgaatagcagatagtatttttcaacaaattcaaactcgtcctcaagagtattccatacttgcaactctcaatcttaatggtgactacatatcggatgcggccgctgcaattgttggtggactggggatggcaccaggtgcaaacattggagataaagcggctattttcgaagctacccatggaacagctcctaaacatgcaggtttggacagaataaatccaggttcagtaatactaagtggagtaatgatgctggaatatttgggttggaatgaggcagcaaaattaattacaaatggattgagcaaatctatttcagacaaacaagttacttacgatctagcacgattaatggaaccacgcgtagagcctcttagttgtagtgattttgcgaactcaattgttgaaagattttaa

SEQ ID NO: 28092 - protein, 474 aa, Prochlorococcus marinus str. NATL2A
MANFEKLTAPSEGQRITFSDGNPVVPDHPIIPFIRGDGTGIDIWPATQLVIDKAIEKAYGKNRSIEWFKIYAGDEACELYGTYQYLPNDTLEAIRTYGIAIKGPLTTPVGGGIRSLNVSLRQIFDLYSCVRPCKYYEGTPSPHKKPQDLDVIVYRENTEDIYMGIEWESDDPECIKLIDQINNEIIPASQKLKNRKIPSGSGIGIKPVSKIGSQRHIRRAIKHALTLEGSKRHVTLVHKGNIMKFTEGAFRDWGYELATTEFRNECVTERESWILGNVEKNPHISYEENAELIDPGYSSLTEEKKKAICDEVCSVLSIIGSSHGSGKWKDMVMVDDRIADSIFQQIQTRPQEYSILATLNLNGDYISDAAAAIVGGLGMAPGANIGDKAAIFEATHGTAPKHAGLDRINPGSVILSGVMMLEYLGWNEAAKLITNGLSKSISDKQVTYDLARLMEPRVEPLSCSDFANSIVERF

SEQ ID NO: 28093 - DNA, 1251 bp, Ralstonia eutropha JMP134
  CDS (1)..(1251): transl_table=11
atgtaccaacacatcaaggtcccggccggcgagaagatcacggtcaaccaggatttctcgctgaatgtcccggacactccgatcattccttacattgaaggcgatggtacgggcctcgacatcacgcctgtgatgatcaaggtggtggatgccgcggtggaaaaggcctacgccggcaagcgcaagatctcgtggatggaaatctacgccggcgagaagtccaccaaggtctatggcccggacgtgtggctgcctgacgaaaccctggacgtgctcaaggaatacgtcgtctcgatcaagggcccgctgaccacgccggtcggcggcggcatccgctcgctgaacgtggcgctgcgccagcagctcgacctgtacgtgtgcctgcgcccggtgcgctacttcaagggcgtgccttcgccggtgcgcgagccggaaaagaccgacatggtcattttccgcgagaactcggaagacatctacgccgggatcgaatgggaggccgaaagcccgcaggcccagaagctgattgccttcctgcagaacgaaatgggtgtgaagaagatccgcttcccggaaacgtcgggcattggcgtcaagcctgtgtcgaagcagggcacccagcgcctggtgcgcaaggctatccagtacgccatcgataacgacaagccgtcggtcacgctggtgcacaagggcaacatcatgaagttcacggaaggcggtttccgtgactggggctatgagctggcccagaaggaattcggcgccgagctggtcgatggaggcccgtggtgcaagttcaagaactcgaagacgggccgcgacatcgtcatcaaggacgccattgccgacgccttcctgcagcagatcctgctgcgcccggctgagtattcagtgatcgcgacgctgaacctgaacggcgactatatctcggacgcactggcagcacaggtcggtggtatcggcattgcccccggtgcgaacctgtccgactccgtggccatgttcgaagccacgcacggcacggcgccgaagtacgctggcaaggactacgtgaacccgggttcggaaatcctgtcggcagaaatgatgctgcgccacatgggctggaccgaagcggccgacctgatcatcgcctcgatggaaaagtcgatcctgtcgaagaaggtcacttatgacttcgcccgcctgctggaaggtgcgacccaggtgtcgtgctcgggttttggtcaggtgatgatcgaaaacatgtga

SEQ ID NO: 28094 - protein, 416 aa, Ralstonia eutropha JMP134
MYQHIKVPAGEKITVNQDFSLNVPDTPIIPYIEGDGTGLDITPVMIKVVDAAVEKAYAGKRKISWMEIYAGEKSTKVYGPDVWLPDETLDVLKEYVVSIKGPLTTPVGGGIRSLNVALRQQLDLYVCLRPVRYFKGVPSPVREPEKTDMVIFRENSEDIYAGIEWEAESPQAQKLIAFLQNEMGVKKIRFPETSGIGVKPVSKQGTQRLVRKAIQYAIDNDKPSVTLVHKGNIMKFTEGGFRDWGYELAQKEFGAELVDGGPWCKFKNSKTGRDIVIKDAIADAFLQQILLRPAEYSVIATLNLNGDYISDALAAQVGGIGIAPGANLSDSVAMFEATHGTAPKYAGKDYVNPGSEILSAEMMLRHMGWTEAADLIIASMEKSILSKKVTYDFARLLEGATQVSCSGFGQVMIENM

SEQ ID NO: 28095 - DNA, 1266 bp, Staphylococcus saprophyticus subsp. saprophyticus ATCC 15305
  CDS (1)..(1266): transl_table=11
atggcaggcgaaaaagtagcaaaaacaaatgaaggtttaacagtaccaaataatccaatcattccatttattattggtgatggtattggaccagatatttggaaagcagcaagcagagtaatcgatgctgcagtagagcaagcttataatggtgaaaagaaaattgaatggaaagaagtattggcaggccaaaaagcctatgatgaaacaggtgaatggttaccacaagcaacgcttgatacaattgaagaatatttaattgctatcaaagggcctttaactacaccaattggtggcggtattcgttcacttaacgttgcgttacgacaagaattagatttattcacatgcttacgtccagtacgttggttccaaggtgttccatcaccagttaaacgtccagaagatacagacatggttatcttccgtgaaaacactgaagacatttatgctggtattgaatttaaagaaggcacaccagaagttaaaaaactaatcgactttttacaagatgaaatgggcgctaaaaatattagattccctgaaacatcaggtattggtgttaaaccagtatcaaaagaaggtacagagcgtttagttcgtgcagcgattcaatacgcggtagacaataaccgtaaatcattaacattagtccacaaaggtaatatcatgaaatttactgagggcgcatttaaacaatggggttatgatgtagcgcataacgaatttggtgacaaagtatttacatggcaacaatatgatgaaatcgttgaaaaagaaggtaaagacaaagcgaatgcggctcaagaacaagctgaaaaagatggtaaaattatagtgaaggattcaattgctgatatcttcctacaacaaatcttaacacgtccgtcagatcacgatgttgttgctactatgaatttaaatggtgactatgtatcagatgcattagcagcacaagttggtggtatcggtatagctccaggagcaaatataaattatgaaactggacatgctatttttgaagcaacacatggtactgcgcctaaatatgctgacttaaataaagtgaatccatcatcagaaattttaagtgccgtattaatgttagaacatttaggatggcaagaagctgcagataaaattactgcatctatcgaaaaaacaatcgcgtctaaagtagttacttatgactttgctcgtttaatggatggtgcgaaggaagtttctacatctgactttgctgatgaattaattaaaaatctataa

SEQ ID NO: 28096 - protein, 421 aa, Staphylococcus saprophyticus subsp. saprophyticus ATCC 15305
MAGEKVAKTNEGLTVPNNPIIPFIIGDGIGPDIWKAASRVIDAAVEQAYNGEKKIEWKEVLAGQKAYDETGEWLPQATLDTIEEYLIAIKGPLTTPIGGGIRSLNVALRQELDLFTCLRPVRWFQGVPSPVKRPEDTDMVIFRENTEDIYAGIEFKEGTPEVKKLIDFLQDEMGAKNIRFPETSGIGVKPVSKEGTERLVRAAIQYAVDNNRKSLTLVHKGNIMKFTEGAFKQWGYDVAHNEFGDKVFTWQQYDEIVEKEGKDKANAAQEQAEKDGKIIVKDSIADIFLQQILTRPSDHDVVATMNLNGDYVSDALAAQVGGIGIAPGANINYETGHAIFEATHGTAPKYADLNKVNPSSEILSAVLMLEHLGWQEAADKITASIEKTIASKVVTYDFARLMDGAKEVSTSDFADELIKNL

SEQ ID NO: 28097 - DNA, 1449 bp, Ehrlichia canis str. Jake
  CDS (1)..(1449): transl_table=11
atgtcaatcccaatcacggttgcttatggagatggtattggcccagaaattatggaagctgtactattaatcttgagtgaagcagagtcaggtttagttatagaaactatagaagtaggacataatttatataaaaaggaatggtcttctggtattgctccttcatcttgggattctatttttaggacaaaagtactacttaagtctcctactatgactccacaaggacaaggtcataagagtcttaatgtaacattgaggaagaaattaggactgtatgcaaatattaggccatgtatttcttatcatcctgtaataaagacaaaatatcctaatcttaatatagtaataattagggaaaatgaagaagatacttatactggcatagaacataggttaacaagtgatacgtatcaatgttcaaaagtaattacaagatcagggtcagaaaggatatgtaattatgcatttcactatgctactgttcataatagaaaaaaggttacttgtttgataaaagataatattatgaaaatgacagatggaatttttcataaatctttttcaaaaattgcggaaaattatcctagtatcacatcagatcattatattgttgatattggtatggcaaaagtagctgctaacccagaaaattttgatgttatagttactactaatctttatggtgatattgtatctgatatagttgctgagttatcaggttctatcggtcttgctggtagtgctaatataggtgataattatgcaatgtttgaagccgtgcatgggtcagcaccagatatagctgggaaaaacatagctaatccttctggcttactaaatgcagctatacaaatgttaatttatttaaagaagtttgataaggcagagttgatatataatgcattacttaaaactttagaagatggtatgcatactgcagatatttaccaaagtcaggtcagtaagggaaaagtttctactatgggttttgccaaggcgattattgataattttgggcaatcccctactcaatttccaaagtctatatttcaaaatagcgcaggtgaatcaggtatatcttatacatataagccatcttatgctactaaagttcttgttggagtagatctgagtattagttgtgatagtgcagatttaaatttaaagcagttaattagtaatattcaaggtgttacgcatgataaattagaacttgtgctgattcatagtaaaggattggaaatttggcctgacgaatcttctaatgcaaacctttcttatatggaccaaatatgttgtaggttttatatgaagggtcaaagtgataagattgttaatgagcatgttaatcaattactttttgacatgagtaaaaagaaaatagatgttgtaaaaatggaaaaattgtatttgtacgacaatcaacctggatttttcactatgtaa

SEQ ID NO: 28098 - protein, 482 aa, Ehrlichia canis str. Jake
MSIPITVAYGDGIGPEIMEAVLLILSEAESGLVIETIEVGHNLYKKEWSSGIAPSSWDSIFRTKVLLKSPTMTPQGQGHKSLNVTLRKKLGLYANIRPCISYHPVIKTKYPNLNIVIIRENEEDTYTGIEHRLTSDTYQCSKVITRSGSERICNYAFHYATVHNRKKVTCLIKDNIMKMTDGIFHKSFSKIAENYPSITSDHYIVDIGMAKVAANPENFDVIVTTNLYGDIVSDIVAELSGSIGLAGSANIGDNYAMFEAVHGSAPDIAGKNIANPSGLLNAAIQMLIYLKKFDKAELIYNALLKTLEDGMHTADIYQSQVSKGKVSTMGFAKAIIDNFGQSPTQFPKSIFQNSAGESGISYTYKPSYATKVLVGVDLSISCDSADLNLKQLISNIQGVTHDKLELVLIHSKGLEIWPDESSNANLSYMDQICCRFYMKGQSDKIVNEHVNQLLFDMSKKKIDVVKMEKLYLYDNQPGFFTM

SEQ ID NO: 28099 - DNA, 1080 bp, Dehalococcoides sp. CBDB1
  CDS (1)..(1080): transl_table=11
atgtatcataatgtaacccttatacccggtgacgggattggtcctgaaatatctgaagctacccgtcgggtgctggaagctactggtgttaagtttaactgggaagtggtaaatgccggtgcggacgtggtggctgaatatggcacacccttgccggatatggtgcttgaatccatcaggaaaaataaggttgccataaaagggccggtaaccaccccggttggctcaggcttcagaagcgtaaatgtgggtatgcgtaaagcccttaatctgtatacctgccttcgcccctgtaagacctatcccggtgttccctcccgttatgacaatgtggatatagtcatagtgcgggaaaacatggaagacctgtatgccggtattgagtttgaaaagggcagtgccgaagccctaaggcttattgagtttattaaagaaaataaaaaggtggaaatacggactgattcgggtatcagcataaaaccaatcagtgtgtttggtaccgaacgcatattccgctgggcttttaaatatgccaaagataacaaccgcaaaaaggtaactgctgtccacaaggccaatattatgaaatattcagacgggctgtttctggctgtaggccgcaaagtggcggaggaataccctgaaatagagtttgaagaccggattgtagacaatatgactatgcagctggttaaaacccccacccagtttgatatactggtctgccccaacctgtacggagacatcttatctgatttgtgtgccggactggtgggtggtttgggggttgcaccgggtgccaatatcggtgatgaatacgccctgtttgagcctacccatggttctgcccccaagtacaaggggttgaacaaggtaaatcccatggctatgatgctttcaggtgtgcttatgctccgctatcttaaagaagaaaaggctgctgacaagctggaaaatgctattgcggcggttattgccgaaggcaagagtgttacttacgatatgctttctcctgacaaacaggcagtggcagtgggtacttcgcaggtggcagatgccataatagccaaaatgaaataa

SEQ ID NO: 28100 - protein, 359 aa, Dehalococcoides sp. CBDB1
MYHNVTLIPGDGIGPEISEATRRVLEATGVKFNWEVVNAGADVVAEYGTPLPDMVLESIRKNKVAIKGPVTTPVGSGFRSVNVGMRKALNLYTCLRPCKTYPGVPSRYDNVDIVIVRENMEDLYAGIEFEKGSAEALRLIEFIKENKKVEIRTDSGISIKPISVFGTERIFRWAFKYAKDNNRKKVTAVHKANIMKYSDGLFLAVGRKVAEEYPEIEFEDRIVDNMTMQLVKTPTQFDILVCPNLYGDILSDLCAGLVGGLGVAPGANIGDEYALFEPTHGSAPKYKGLNKVNPMAMMLSGVLMLRYLKEEKAADKLENAIAAVIAEGKSVTYDMLSPDKQAVAVGTSQVADAIIAKMK

SEQ ID NO: 28101 - DNA, 1242 bp, Thiobacillus denitrificans ATCC 25259
  CDS (1)..(1242): transl_table=11
atgacttatcagcacatccagatccccgctgccggccagaagatcacggtcaacgccgacaacaccctcaacgtgcccgacacgccgatcattcccttcatcgaaggcgacggcacgggcgtcgacatcacgcctgcgatgaagaaggtcgtcgacgcggcggtcgccaaggcctacggcggccggcgccagatcgcctggatggaggtctttgccggcgagaaagccgtcaaggtctacggcggcgaccagtggttgcccgaagaaaccgtttccgccgtcagggactacgtgatttcgatcaagggcccgctgacgacgccgacgtcgggcggcatccgttcgctcaacgtcgcgttgcgccagatcctcgatctctacgtctgcctgcgcccagtgcgctacttcgcgggcgtgcccagcccggtgaaggcgcccgagaaggtcgacatggttatcttccgcgagaacaccgaagacatttacgccggcgtcgaatgggaagccaactccgacgaggcgaagcgcgtcatcaagtacctgcagcggcagatgggcgtgaagaagatccgcttccccgccacctcggcgatcggcatcaagcccgtctcgatcgagggttcggaacggctgatcagaaaagcgatccagtacgcgatcgacaacaagcgccgctcggtgaccctcgtgcacaagggcaacatcatgaagttcaccgaaggcggtttcaagaagtggggctacgaactcgccgcgcgtgagttcggcgccaagctgatcggcgaaggcccgtggatggaattgccgaacggaatcgtgatcaaggacgtgattgccgacgccttcctgcaacagatcctgctgcgccccgacgagtacgacgtgatcgcgacgctgaacctcaacggcgactacatctccgacgcgctggcggcggaagtcggcggcatcggcatcgcgccgggcgcgaacctctcggacaccgtcgcgatgttcgaagccacgcacggcaccgcgccgaagtacgccggcaaggactacgtcaaccccggttcgctgatcctgtcggccgagatgatgctgcgccacctcggctggatcgaagccgccgacctcatcgtcgcgagcatggaaaaggcgatcgcggcgaaggccgtcacctacgacttcgcgcgactcatggaaggcgcgaccgaagtcaagtgctcgcagttcgccgaggcgatggtcgcgaagatgtga

SEQ ID NO: 28102 - protein, 413 aa, Thiobacillus denitrificans ATCC 25259
MTYQHIQIPAAGQKITVNADNTLNVPDTPIIPFIEGDGTGVDITPAMKKVVDAAVAKAYGGRRQIAWMEVFAGEKAVKVYGGDQWLPEETVSAVRDYVISIKGPLTTPTSGGIRSLNVALRQILDLYVCLRPVRYFAGVPSPVKAPEKVDMVIFRENTEDIYAGVEWEANSDEAKRVIKYLQRQMGVKKIRFPATSAIGIKPVSIEGSERLIRKAIQYAIDNKRRSVTLVHKGNIMKFTEGGFKKWGYELAAREFGAKLIGEGPWMELPNGIVIKDVIADAFLQQILLRPDEYDVIATLNLNGDYISDALAAEVGGIGIAPGANLSDTVAMFEATHGTAPKYAGKDYVNPGSLILSAEMMLRHLGWIEAADLIVASMEKAIAAKAVTYDFARLMEGATEVKCSQFAEAMVAKM

SEQ ID NO: 28103 - DNA, 1149 bp, Desulfovibrio desulfuricans G20
  CDS (1)..(1149)
atgcgcaagactgtgtatttcatcgaaggtgacggcatcggaccggaggtctggaacgccgcccgtcctgtcatcgacaaggccgtggaactggcatacggcaacgggcgttctctggaatggaaggaactgcttgccggcgaaaaagcctatgccgaaacaggcacctatctgcctcaggaaacgctcgacacgctggccggtgccgaactggccatcaaggggccgctgggcacccccgtgggcaaggggttccgcagtctcaacgtgaccatgcgccagactctcgacctgtatgcctgcatccggcccatacggtatttcgaaggcatcgaatcaccggtgaagcatccggagcgggtcaatatggttgtcttccgcgaaaacaccgaagacgtgtacgccggtatagaatacaaggctgacaccgacgaagccagaaagctgattgcctttctgcgcgacgaactgggcgccaatgtggacgagcgctgcgccgtgggcataaagcccatgagtgaaaaaggctccaagcgtctggtgcgccgcgccatggactttgctctggcgcaggggctgcccagcgtcacgctggtgcacaaaggcaatatcatgaaatttaccgaaggcggattccgccagtggggctacgaactggcgcatgacgaatacgccggacgcgcggtgaccgaagcacaggcagccgccggcgaaaccggtctggtggtcaaggaccgtatagccgacgccatgttccaggaagtgctcatccgtccggaacagtacagcgtggttgccaccagcaacctgaacggcgattatatttcggatgcgcttgctgcgcaggtgggcggtctgggactggctccgggcgtgaacatgtccgatacgctggccttctttgaagccacccacggcacggcacccaccattgccggaaaagatatggccaacccgggcagtcttattctgtgcgggggcatgctgctggaacatcttggctggcatgaggctgcaacccgtatccataccgccatgaacaccgtcataggcaaccgcacggtcaccgtggatctggccagccagatgcagggtgcctccactgtgggctgccggcagttcggcgaattgctgggcgcggcattgtag

SEQ ID NO: 28104 - protein, 382 aa, Desulfovibrio desulfuricans G20
MRKTVYFIEGDGIGPEVWNAARPVIDKAVELAYGNGRSLEWKELLAGEKAYAETGTYLPQETLDTLAGAELAIKGPLGTPVGKGFRSLNVTMRQTLDLYACIRPIRYFEGIESPVKHPERVNMVVFRENTEDVYAGIEYKADTDEARKLIAFLRDELGANVDERCAVGIKPMSEKGSKRLVRRAMDFALAQGLPSVTLVHKGNIMKFTEGGFRQWGYELAHDEYAGRAVTEAQAAAGETGLVVKDRIADAMFQEVLIRPEQYSVVATSNLNGDYISDALAAQVGGLGLAPGVNMSDTLAFFEATHGTAPTIAGKDMANPGSLILCGGMLLEHLGWHEAATRIHTAMNTVIGNRTVTVDLASQMQGASTVGCRQFGELLGAAL

SEQ ID NO: 28105 - DNA, 1257 bp, Burkholderia cepacia R18194
  CDS (1)..(1257)
atgccgtatcagcacatcaaggttccggaaggcggtgacaagatcaccgtcaacaaggacttctcgctcaacgtttccgatcagccgatcattccctatatcgaaggcgacggtacgggcttcgatatcacgccggtcatgatcaaggtcgtcgacgcggcggtcgcgcatgcctacaagggcaagcgcaagatccactggatggagattttcgcgggcgagaaggcgacgaaggtgtacggtccggacgtgtggctcccggacgaaacgctgcaggtgctgaaggaatacgtggtgtcgatcaaggggccgctcacgaccccggtcggcggcggcatccgttcgctgaacgtcgcgctgcgccaggaactcgacctgtacgtgtgcctgcgcccggtccagtacttcaagggcgtgccgtcgccggtgcgcgagccgcaaaagatcgacatggtgatcttccgcgagaactcggaagacatctacgcgggcatcgaatgggccgcgggctccgagcaggcgaagaaggtgatcaagttcctgcaggacgagatgggcgtgaagaagatccgcttcccggaaacctcggggatcggcgtcaagcccgtgtcgaccgaaggcaccgagcgtctcgtgcgcaaggcgatccagtacgcgatcgacaacgatcgcaagtcggtcacgctggtgcacaagggcaacatcatgaagttcacggaaggcctgttccgtgacgccggctacgcgcttgcacagaaggaattcggcggcgagctgatcgacggcggcccgtggatgcgcgtgaagaacccgaagacgggcaacgagatcgtgatcaaggattcgatcgccgatgcgttcctgcagcagatcctgctgcgcccggccgaatacgacgtgatcgccacgctgaacctgaacggcgactacatctccgacgcgctggccgcgcaggtcggcggcatcgggatcgcgccgggcgcgaacctgtcggattcggtcgcgatgttcgaagcgacgcacggcaccgcaccgaagtacgcaggcaaggattacgtgaaccccggttccgagatcctgtcggcggaaatgatgctgcgccacctcggctggacggaagcggccgacacgatcatcgccgcgatggagaagtcgatcctgcagaagcgcgtcacgtacgatttcgcgcgcttgatggaaggtgcgacgcaggtgtcgtgctcgggcttcggtgaagtgctgatcgagaacatgtaa

SEQ ID NO: 28106 - protein, 418 aa, Burkholderia cepacia R18194
MPYQHIKVPEGGDKITVNKDFSLNVSDQPIIPYIEGDGTGFDITPVMIKVVDAAVAHAYKGKRKIHWMEIFAGEKATKVYGPDVWLPDETLQVLKEYVVSIKGPLTTPVGGGIRSLNVALRQELDLYVCLRPVQYFKGVPSPVREPQKIDMVIFRENSEDIYAGIEWAAGSEQAKKVIKFLQDEMGVKKIRFPETSGIGVKPVSTEGTERLVRKAIQYAIDNDRKSVTLVHKGNIMKFTEGLFRDAGYALAQKEFGGELIDGGPWMRVKNPKTGNEIVIKDSIADAFLQQILLRPAEYDVIATLNLNGDYISDALAAQVGGIGIAPGANLSDSVAMFEATHGTAPKYAGKDYVNPGSEILSAEMMLRHLGWTEAADTIIAAMEKSILQKRVTYDFARLMEGATQVSCSGFGEVLIENM

SEQ ID NO: 28107 - DNA, 1269 bp, Pseudomonas fluorescens PfO-1
  CDS (1)..(1269)
atggagttcagcatgggttacaagaagattcaggttccagccgtcggcgacaaaatcaccgtcaacgcagaccattctctcaatgtccctgataacccgatcattcccttcatcgaaggtgacggcattggcgtcgacgtcagccctgtgatgatcaaagtggttgatgctgccgtagagaaagcctacgggggtaagcgcaagatttcctggatggaggtttatgctggcgaaaaagcaactcaggtctatgaccaggacacctggctgccccaggaaaccctggacgcggtcaaggattacgtggtctccatcaaaggcccgctgaccactccggtcggtggcggcatccgttccctcaacgtcgccctgcgccaacagctcgatctctatgtctgccttcgccctgtggtgtggttcgaaggtgtgccgagcccggtgaaaaagcctggcgacgtcgacatggtgatcttccgcgagaactccgaagacatttatgccggtatcgaatggaaagccggctcccctgaggccaccaaggtcatcaaattcctgaaagaagaaatgggcgtcaccaagatccgtttcgaccaggattgcggcatcggcatcaagccggtttccaaagaaggcaccaagcgtctggtgcgcaaggcgctgcaatacgtggtggacaacgaccgcaagtcgctgaccatcgtgcacaagggcaacatcatgaaattcaccgaaggtgccttcaaggactggggctacgaggtggcgaaggaagaattcggcgccgagctgctcgatggcggcccatggatgaaattcaagaacccgaaaaccggccgcgaagtcgtcgtcaaggacgccatcgccgacgccatgctccagcagatcctgctgcgtccggccgaatacgatgtgatcgccaccctcaacctcaacggtgactacctgtccgacgccctggcggcggaagtgggcggtatcggtatcgcgccgggtgccaacctgtccgacaccgtagccatgttcgaggcgacccacggtactgcgccgaaatatgccggcaaggaccaggtcaacccgggttcggtgattttgtcggcggaaatgatgctgcgccacctgggctggaccgaggcggccgacctgatcatcaagggcaccaatggcgccatcaaggccaagaccgtgacctacgacttcgaacgtctgatggaaggcgccacactggtgtcttcttcgggcttcggtgaagcgctgatcaagcacatgtaa

SEQ ID NO: 28108 - protein, 422 aa, Pseudomonas fluorescens PfO-1
MEFSMGYKKIQVPAVGDKITVNADHSLNVPDNPIIPFIEGDGIGVDVSPVMIKVVDAAVEKAYGGKRKISWMEVYAGEKATQVYDQDTWLPQETLDAVKDYVVSIKGPLTTPVGGGIRSLNVALRQQLDLYVCLRPVVWFEGVPSPVKKPGDVDMVIFRENSEDIYAGIEWKAGSPEATKVIKFLKEEMGVTKIRFDQDCGIGIKPVSKEGTKRLVRKALQYVVDNDRKSLTIVHKGNIMKFTEGAFKDWGYEVAKEEFGAELLDGGPWMKFKNPKTGREVVVKDAIADAMLQQILLRPAEYDVIATLNLNGDYLSDALAAEVGGIGIAPGANLSDTVAMFEATHGTAPKYAGKDQVNPGSVILSAEMMLRHLGWTEAADLIIKGTNGAIKAKTVTYDFERLMEGATLVSSSGFGEALIKHM

SEQ ID NO: 28109 - DNA, 1257 bp, Burkholderia fungorum LB400
  CDS (1)..(1257)
atgccgtatcagcacatcaaggttccgaccggtggtgacaagatcaccgtcaatcccgatttctcgctcaacgtgtcggaccagccgatcattccgtacatcgaaggcgacggcaccggcatcgacatcacgccggtcatgatcaaggtcgtggatgccgctgtggaaaaagcgtatgcaggcaagcgaaaaatccactggatggaaatctacgccggcgagaaatccaccaaggtgtacggcccggatgtgtggctgcccgaagagacgctgcaggtgctcaaggaatatgtcgtctcgatcaagggcccgctcaccacgccggtgggcggcggcatccgttcgctgaacgtcgcgttgcgccaggaactggatctgtatgtgtgcttgcggccggtgcagtatttcaagggcgtgccttcgccggtgcgcgagccggagaaaaccaacatggtgatcttccgcgagaactcggaagacatctacgcgggtatcgagtggccggccgaatcggagcaggcgaaaaaaatcatcaggttcctgcgcgaagaaatgggcgtgaagaagatccgtttcccggaaacgtcggggatcggcatcaagccggtgtcgcgtgaaggaacggagcgtctggtgcgcaaggcgatccagtacgcgatcgaccacgatcgccgttcggtcacgctggtgcacaagggcaacatcatgaagttcaccgaaggcgcgttccgcgactacggttacgcgctggcgcaaaaggaattcgccgcggaactgatcgacggcggcccgtggatgaagatcaagaatccgaaaacgggcggcgacgtcgtcctcaaggacgtgatcgccgacgcgttcctgcagcagatcctgctgcgtccggctgaatacgacgtgatcgccacgctgaacctgaatggcgactacgtatcggatgcgttggccgcgcaggtcggcggtattggtatcgcaccgggcgcgaatatgtcggattcagtcgcgatgttcgaagccacgcacggcaccgcgccgaaatacgccggcaaggactacgtgaatccgggctcggaaattctctcggcagaaatgatgctgcgccatctcggctggaccgaggcggcggatctgatcatcaagtcgatggaaaaatcgattctgcaaaaacgcgtcacatacgatttcgcgcgcttgatggaaggcgcgactcaggtgtcgtgttccggatttggtcaggtgctgatcgaaaatctgtaa

SEQ ID NO: 28110 - protein, 418 aa, Burkholderia fungorum LB400
MPYQHIKVPTGGDKITVNPDFSLNVSDQPIIPYIEGDGTGIDITPVMIKVVDAAVEKAYAGKRKIHWMEIYAGEKSTKVYGPDVWLPEETLQVLKEYVVSIKGPLTTPVGGGIRSLNVALRQELDLYVCLRPVQYFKGVPSPVREPEKTNMVIFRENSEDIYAGIEWPAESEQAKKIIRFLREEMGVKKIRFPETSGIGIKPVSREGTERLVRKAIQYAIDHDRRSVTLVHKGNIMKFTEGAFRDYGYALAQKEFAAELIDGGPWMKIKNPKTGGDVVLKDVIADAFLQQILLRPAEYDVIATLNLNGDYVSDALAAQVGGIGIAPGANMSDSVAMFEATHGTAPKYAGKDYVNPGSEILSAEMMLRHLGWTEAADLIIKSMEKSILQKRVTYDFARLMEGATQVSCSGFGQVLIENL

SEQ ID NO: 28111 - DNA, 1239 bp, Lactococcus lactis subsp. cremoris SK11
  CDS (1)..(1239)
atgaaaattgaaatgaagaatgggaaattaattgtaccagattatccaacaattggttacataagaggagatggtgttggtgaggacatttttccacaagcaaagcgtgtttttgatgctgctgttctaaaaatctttggcgaaaaaaagaaaatagattggcaaaaattattggcaggcggagaagctttcgcaagtaggggtgaatatcttcctgatgaaacacttgagcagattaaagaaaatatgatcgcaattaagggaccgttaatgactccagttggtgagagttttcgttctattaatgtcactttgagacaaaagctagatttgtatgcttgcgtaagacctgtagaatactttacagggataaaatctcctataagagcaccagagaaagtcaatatgacaatttttagggaaaatacagaggatatttatgcaggaattgaattttcttcttcgtcaaaagaatctaaaaagttaataaattttttggaaagagagctgtctgtccattcgattcgctttgcagaaacttctgcgattggaatcaaacccgttagccctgatggaagcaaacgtctggttagcgcagcctttgattatgctataaagatgaataagaagcgcgtgacatttgttcataagggaaatatcatgaaatttacagaaggaggatttagaaaatggggctatgaggtagctaaaaattatccaacttttacaaaactagaacacgataagataaaagaagaaaaaggcactgaacaggctgaaaaagagaaaaatattgcactaaaatcaggtaaaatttatgttgatgatgtgattgctgataattttcttcaacagattatccttaatcctgataattttgaggttgttgccactcttaatttaaatggggattatatttctgatgcccttgctgcccaagttggaggtattggaatcgcacctggagcaaatattaactatgaaagtggccatgctatttttgaagcaactcatggaacagctccggatatcgctggtttgaatcttgccaatccctctagccttttattatcaggagtcatgatgtttgaatatattggatggcaagatgtggcatatattattagaagagctttagtttctacttttaaactaaaaaaatacacttctgatttaggtgggaatctttcaacatcttcttttggagatcttcttatagcttatattgagaatgattaa

SEQ ID NO: 28112 - protein, 412 aa, Lactococcus lactis subsp. cremoris SK11
MKIEMKNGKLIVPDYPTIGYIRGDGVGEDIFPQAKRVFDAAVLKIFGEKKKIDWQKLLAGGEAFASRGEYLPDETLEQIKENMIAIKGPLMTPVGESFRSINVTLRQKLDLYACVRPVEYFTGIKSPIRAPEKVNMTIFRENTEDIYAGIEFSSSSKESKKLINFLERELSVHSIRFAETSAIGIKPVSPDGSKRLVSAAFDYAIKMNKKRVTFVHKGNIMKFTEGGFRKWGYEVAKNYPTFTKLEHDKIKEEKGTEQAEKEKNIALKSGKIYVDDVIADNFLQQIILNPDNFEVVATLNLNGDYISDALAAQVGGIGIAPGANINYESGHAIFEATHGTAPDIAGLNLANPSSLLLSGVMMFEYIGWQDVAYIIRRALVSTFKLKKYTSDLGGNLSTSSFGDLLIAYIEND

SEQ ID NO: 28113 - DNA, 1176 bp, Streptococcus thermophilus LMD-9
  CDS (1)..(1176)
atggcagaaagaatccttatgactaatggcaagctcaaagttactgataatccgattattccttttattgaaggagatggtgttggacgtgatatttggaagaatgctcaagcaatttttgataaagcggtagaagtagcctatggaggacagcgtcgtattgagtggcaagagtttttggcaggtaaaaaggcttttgataaaacaggtgagtggctgccgcaagaaactttagaggctattcgagaaagcctggtagctattaaggggccacttgaaacacctgtcggaggaggaattcgctctttaaatgtagctttacgtcaagaacttgatctctacgcttgtgttcgaccagttcggtatttcgaaggagtagcaagtccacttaaggaaccagaaaaaacagacattactattttccgtgagaatactgaggatatttatgcaggaattgaatgggaagcaggaacggtcgatgtagagcgcgttattactttttttcaaacagaaatgaatgtcgataaaattcgctttcccaagtcaagtagtattggaattaagcctatttcaatagaaggaagtaaacgattgattcgttcagctattgactatgctcttaagaacaatctaaagaaagtgacattggtgcataaagggaatattcaaaaatttacagaaggtggctttcgtaaatggggctatgaagtggctgaggaagaatataaggaagaaatgcttgctggccgtctagaagttaatgatataatcgctgataattttctacaacagattcttttgaatcccgaaaaatttgatgttgttgcattaaccaacttgaatggcgattatgcaagtgatgctctagctgcccaggttggtggtatcggaatctcccctggagctaatattaactatcaaacaggccatgctatctttgaagctactcatggaacggctccagatattgcggatcaagatagggctaatccttgctctattctcttatctggctgtatgcttttagaatatatcggttggtctgaagcagctgaactcattataagtgctattgaaaaaaactttaaatcagggatttttacagctgacctagcctttggaaaacgagcctattcaaccagtggtttcagcaatcaaattatctcaattatatga

SEQ ID NO: 28114 - protein, 391 aa, Streptococcus thermophilus LMD-9
MAERILMTNGKLKVTDNPIIPFIEGDGVGRDIWKNAQAIFDKAVEVAYGGQRRIEWQEFLAGKKAFDKTGEWLPQETLEAIRESLVAIKGPLETPVGGGIRSLNVALRQELDLYACVRPVRYFEGVASPLKEPEKTDITIFRENTEDIYAGIEWEAGTVDVERVITFFQTEMNVDKIRFPKSSSIGIKPISIEGSKRLIRSAIDYALKNNLKKVTLVHKGNIQKFTEGGFRKWGYEVAEEEYKEEMLAGRLEVNDIIADNFLQQILLNPEKFDVVALTNLNGDYASDALAAQVGGIGISPGANINYQTGHAIFEATHGTAPDIADQDRANPCSILLSGCMLLEYIGWSEAAELIISAIEKNFKSGIFTADLAFGKRAYSTSGFSNQIISII

SEQ ID NO: 28115 - DNA, 1257 bp, Burkholderia vietnamiensis G4
  CDS (1)..(1257): transl_table=11
atgccgtatcagcacatcaaggttccggaaggcggtgacaagatcaccgtcaacaaggacttctcgctcaacgtttccgatcagccgatcatcccttacatcgaaggcgacggtaccggcttcgacatcacgccggtgatgatcaaggtcgtcgatgcggcggtcgcgcatacgtacaagggcaagcgcaagatccactggatggagatcttcgccggcgagaaggcgacgaaggtgtacggcccggacgtatggctgcccgacgaaacgctgcaggtgctgaaggaatacgtcgtttcgatcaaggggccgctcacgacgccggtcggcggcggcatccgctcgctgaacgtcgcgctgcgccaggagctcgacctctacgtgtgcctgcgcccgatccagtatttcaagggcgtgccgtcgccggtgcgcgagccgcagaagatcgacatggtgatcttccgcgagaactcggaagacatctacgcgggcatcgagtgggcggccggctccgagcaggcgaagaaggtcatcaagttcctgcaggacgagatgggcgtgaagaagatccgcttcccggaaacctcggggatcggcatcaagcccgtgtcgaccgaaggcaccgagcgtctcgtgcgcaaggcgatccagtatgcgatcgacaacgatcgcaagtcggtcacgctggtgcacaagggcaacatcatgaagttcacggaaggcctgttccgtgacgccggttatgcgctcgcgcagaaggaattcggcggcgagctgatcgacggtggcccgtggatgcgcgtgaagaacccgaagacgggcgccgagatcgtcatcaaggattcgatcgccgacgcgttcctgcagcagatcctgctgcgtccggccgaatacgacgtgatcgccacgctgaacctgaacggcgactacgtctccgacgcactggccgcgcaggtcggcgggatcgggatcgcgccgggtgcgaacctgtcggactcggtcgcgatgttcgaggcgacccacggcacggcgccgaagtacgcgggcaaggactacgtgaaccccggttccgagatcctgtcggccgaaatgatgctgcgccacctcggctggacggaagcggccgacacgatcatcgccgcgatggagaagtcgatcctgcagaagcgcgtcacgtacgacttcgcgcgcctgatggaaggtgcgacgcaggtgtcgtgctcgggcttcggcgacgtgctgatcgagaacatgtaa

SEQ ID NO: 28116 - protein, 418 aa, Burkholderia vietnamiensis G4
MPYQHIKVPEGGDKITVNKDFSLNVSDQPIIPYIEGDGTGFDITPVMIKVVDAAVAHTYKGKRKIHWMEIFAGEKATKVYGPDVWLPDETLQVLKEYVVSIKGPLTTPVGGGIRSLNVALRQELDLYVCLRPIQYFKGVPSPVREPQKIDMVIFRENSEDIYAGIEWAAGSEQAKKVIKFLQDEMGVKKIRFPETSGIGIKPVSTEGTERLVRKAIQYAIDNDRKSVTLVHKGNIMKFTEGLFRDAGYALAQKEFGGELIDGGPWMRVKNPKTGAEIVIKDSIADAFLQQILLRPAEYDVIATLNLNGDYVSDALAAQVGGIGIAPGANLSDSVAMFEATHGTAPKYAGKDYVNPGSEILSAEMMLRHLGWTEAADTIIAAMEKSILQKRVTYDFARLMEGATQVSCSGFGDVLIENM

SEQ ID NO: 28117 - DNA, 1260 bp, Burkholderia pseudomallei 668
  CDS (1)..(1260)
atgccgtatcagcacatcaaggttccggaaggcggtgacaagatcaccgtcaacaaggatttctcgctcaacgtttccgatcagccgatcatcccttacatcgagggcgacggcacgggcttcgacatcacgccggtgatgatcaaggtcgtcgacgcggcggtcgagaaggcgtacggcggcaagaagaagattcactggatggagatctacgccggcgagaaggcgacgaaggtctacggcccggacgtgtggctgccggaagagacgctgcaggtgctgaaggaatacgtcgtgtcgatcaaggggccgctcacgaccccggtcggcggcggcatccgctcgctgaacgtcgcgctgcgccaggaactcgacctgtacgtctgcctgcgcccgatccagtacttcaagggcgtgccttcgcccgtgcgcgagccggagaagaccaacatggtcatcttccgcgagaactcggaagacatctacgccggcatcgaatgggcggccgaatccgagcaggcgaagaaggtcatcaagttcctgcaggaagagatgggcgtgaagaagatccgcttcccgcagacctcgggcatcggcatcaagcccgtgtcgaaggaaggcaccgagcgcctcgtgcgcaaggcgatccagtacgcgatcgacaacgaccgcaagtcggtcacgctcgtccacaagggcaacatcatgaagttcacggaaggtgcgttccgtgacgccggctatgcgctcgcgcagaaggaattcggcgccgagctgatcgacggcggcccgtggatgaagttcaagaacccgaagacgggcaacgagatcgtggtcaaggattcgatcgccgacgcgttcctgcagcagatcctgctgcgcccggccgaatacgacgtgatcgcgacgctgaacctgaacggcgactacatctcggacgcgctcgccgcgcaagtcggcggcatcggcatcgcgccgggcgcgaacctgtcggattcggtcgcgatgttcgaagcgacgcacggcacggcgccgaagtacgcgggcaaggattacgtgaacccgggttcggaaatcctgtcggccgaaatgatgctgcgccacctcggctggaccgaagcggccgatgtgatcatttccgcgatggagaagtcgatcaagcagaagcgcgtcacgtacgacttcgcgcgcctgatggaaggcgcgacgcaagtgtcgtgctcgggcttcggtcaggtgctgatcgaaaacatgcagtaa

SEQ ID NO: 28118 - protein, 419 aa, Burkholderia pseudomallei 668
MPYQHIKVPEGGDKITVNKDFSLNVSDQPIIPYIEGDGTGFDITPVMIKVVDAAVEKAYGGKKKIHWMEIYAGEKATKVYGPDVWLPEETLQVLKEYVVSIKGPLTTPVGGGIRSLNVALRQELDLYVCLRPIQYFKGVPSPVREPEKTNMVIFRENSEDIYAGIEWAAESEQAKKVIKFLQEEMGVKKIRFPQTSGIGIKPVSKEGTERLVRKAIQYAIDNDRKSVTLVHKGNIMKFTEGAFRDAGYALAQKEFGAELIDGGPWMKFKNPKTGNEIVVKDSIADAFLQQILLRPAEYDVIATLNLNGDYISDALAAQVGGIGIAPGANLSDSVAMFEATHGTAPKYAGKDYVNPGSEILSAEMMLRHLGWTEAADVIISAMEKSIKQKRVTYDFARLMEGATQVSCSGFGQVLIENMQ

SEQ ID NO: 28119 - DNA, 1491 bp, Crocosphaera watsonii WH 8501
  CDS (1)..(1491): transl_table=11
atgaggagtttaacctattttgggagtttaataaaagagcaacccttgattaatgatcattgtatgtacgaaaaactgacagcacccaccacaggttctaaaattacctttgaagacggtaaccccattgttcctaatgatcccattattcccttcattcgtggggacggaacaggaatcgatatttggcctgctacggagaaagtgatcgacgctgcggtaaaaactgcctacggagacagcaaaaaaattaactggtttaaggtgtatgcaggggatgaagcttgtgatcagtatggaacttatcaatatttgcccgaagataccttaaccgctatcaaagagtatggtatcgccatcaaaggacccctgacaaccccagtcggtgggggtattaggtctcttaacgtcgctttacgacaaatttttgaattatacgcttgtgtgcgtccctgtcgctattatcctgggactccttccccccataagtctcctgaaaaattaaatgtgatcgtctatcgggaaaataccgaggatatctacttaggaattgagtggacagaaggcacagaaattgctcaaaagttaatcaactatttgaacaatgaactgatacctgcaacggcagaacatgggaaaaaacagattcgtatagactcaggaattggggttaaacccattagtaaaactggttctcaacggttggttcgtcgggcaattgaacacgccttacgtttgccaaaagctaaacaaatggttactttagtgcataaaggtaacattatgaaatacactgaaggagcctttagagattggggatatgagttagcaacctcagaatttagagatgtttgtgttaccgaaagagaatcgtggattttgagtaacaaagaaggtaaggctgatatttctatcgaagataatgccagaaaagttgaacccggttatgatagtttgacccctgaaaagaaacaagaaatttgtgacgaggttaaaggagttattgacgctatttgggacagtcatggggatggtaaatggaaagaaaagatcatggtaaatgatcgcattgcggatagtattttccaacaaattcaaacccgtcccgatgaatattcgatcctggcaaccatgaacttaaatggggattatttatccgacgctgcggccgctgttgtggggggtttaggtatgggccctggggcaaatattggcgatacttgcgctatttttgaggcaactcatggcaccgcacctaaacacgcaggactggatagaattaatcctggatctgttattctttctggggtgatgatgttagaatatatgggctggcaagaagccgcagacctcattaaaaaaggtattgggaatgcgatcgcaaatcgtcaggtaacctatgatctcgctcgtttgatggaacctaaagttgatcctccactgaaatgttcagaatttgctcaggcaataattgattattttaatgattaa

SEQ ID NO: 28120 - protein, 496 aa, Crocosphaera watsonii WH 8501
MRSLTYFGSLIKEQPLINDHCMYEKLTAPTTGSKITFEDGNPIVPNDPIIPFIRGDGTGIDIWPATEKVIDAAVKTAYGDSKKINWFKVYAGDEACDQYGTYQYLPEDTLTAIKEYGIAIKGPLTTPVGGGIRSLNVALRQIFELYACVRPCRYYPGTPSPHKSPEKLNVIVYRENTEDIYLGIEWTEGTEIAQKLINYLNNELIPATAEHGKKQIRIDSGIGVKPISKTGSQRLVRRAIEHALRLPKAKQMVTLVHKGNIMKYTEGAFRDWGYELATSEFRDVCVTERESWILSNKEGKADISIEDNARKVEPGYDSLTPEKKQEICDEVKGVIDAIWDSHGDGKWKEKIMVNDRIADSIFQQIQTRPDEYSILATMNLNGDYLSDAAAAVVGGLGMGPGANIGDTCAIFEATHGTAPKHAGLDRINPGSVILSGVMMLEYMGWQEAADLIKKGIGNAIANRQVTYDLARLMEPKVDPPLKCSEFAQAIIDYFND

SEQ ID NO: 28121 - DNA, 1242 bp, Methylobacillus flagellatus KT
  CDS (1)..(1242): transl_table=11
atgtctacaaaaatcaaagtacccactactggcgagaaaatcagcgttaatgcggacaactcgctcaatgtgcccgatcacccgattatcccatttatcgaaggcgacggtatcggcgtcgatatcaccccacccatgcgccatgtcgtcgacagcgccgtcgccaaggcctatggcggcaaacgcgccattgcctggatggaggtatatgccggcgaaaaagccgtgaagacctatggtgacaacacctggctacccgatgaaacactcaaggccgtcaaagattatgtcatttccatcaagggaccgctgaccactcccgtaggcggtggcatccgctcgctcaacgtgaccttgcgccaggaactcgacctgtatgtctgcctgcgtccgatccagtattttcaaggcgtgcccagcccggtcaagcatcctgaaaaaaccaacatggtgattttccgcgagaataccgaggacatctatgccggtatcgaatgggctgccggtaccgacgaggtgaaaaaggtggtggacttcctcagtgacatgggtgtgcgcaagaagatacgcttcccagaagcttccgccatcggcatcaagccggtgtcaatcgacggcagcaagcgcctggtgcgcaaggcgatccagtacgccatcgacaacaaccgcaagtccgtaaccattgcccacaagggcaacatcatgaagttcaccgaaggcggatttaagacttggggttacgaagtcgccaaggaagagttcggtgcagtggaaattgacggcgggccgtggtgcaagctgcccaatggcatcatcatcaaggactgcatcgccgatgccttcctgcaggaaatcctgctgcaccctgcagactacgacgtagtggccaccctaaacctgaacggcgactatatctcagatgcgctcgcagcccaggtaggtggtatcggcattgcgcccggtgccaatatctcggataccgtggccatgttcgaggccacccacggtacggctcccaagatcgcgggcaaggatatcgccaatccaagttcgctgatcctgtcagccgagatgatgttgcgccacctgggatggactgaggccgccgacctggtcattaacggtgtggccaaggcgatccaggcaaagcgtgttacccatgacttctcatcacaaatggaaggcgccacgcaagtcggcagtgcagaattcggtgcggagatcgtcaagcacatgtcatga

SEQ ID NO: 28122 - protein, 413 aa, Methylobacillus flagellatus KT
MSTKIKVPTTGEKISVNADNSLNVPDHPIIPFIEGDGIGVDITPPMRHVVDSAVAKAYGGKRAIAWMEVYAGEKAVKTYGDNTWLPDETLKAVKDYVISIKGPLTTPVGGGIRSLNVTLRQELDLYVCLRPIQYFQGVPSPVKHPEKTNMVIFRENTEDIYAGIEWAAGTDEVKKVVDFLSDMGVRKKIRFPEASAIGIKPVSIDGSKRLVRKAIQYAIDNNRKSVTIAHKGNIMKFTEGGFKTWGYEVAKEEFGAVEIDGGPWCKLPNGIIIKDCIADAFLQEILLHPADYDVVATLNLNGDYISDALAAQVGGIGIAPGANISDTVAMFEATHGTAPKIAGKDIANPSSLILSAEMMLRHLGWTEAADLVINGVAKAIQAKRVTHDFSSQMEGATQVGSAEFGAEIVKHMS

SEQ ID NO: 28123 - DNA, 1011 bp, Moorella thermoacetica ATCC 39073
  CDS (1)..(1011): transl_table=11
ttgttgaaacatgtagttactctgattcccggggatggtaccggcccggagttaatcgccgccgccaggcgggtcctggaagccagcggtgcggaactggaatgggaggttatggcagccggggagggcgcccaggagaaatacggcagcgtgttgccagaagagaccctggcttcaatccgtaaaaatggcgtcgcccttaaaggccctatcaccaccccggtgggcaccggcttccggagcgtcaatgtggccctgcggaaagagctggatctctatgccaatgtccggcccttccgcaacttgcccaatgtcccctcacgctatcagggtgttgacctggtgatctaccgggagaacaccgaggacctctatgccggggttgaacatatggtgggtgaagatgcggctgaaagcattaagattattaccaggaagggctccgaacgtatcgcccgggcagcctttgaatacgcccggcgccagggccggaaacgggtgacagccggccacaaggccaatattatgaagttcagcgacggtcttttcctgcggaccttctacgacgtagccagggattatccggaaataacggctgatgaccgtattgtggacaacctgagcatgcagctggtccagaagccggagcaatatgatgtcctggtactgcccaacctttacggcgatatcctctccgacctctgcgccggcctggtgggcggcctgggagtggcccctggagccaatatcggggagaaggcagccgtctttgaaccaatccacggcagcgcacccaagtatgccggccagaataaggtaaatcccctggccactatcctctccggggttatgatgctggaacacctgggcgagaaggaagcagcagccaggatccagcgcgctatcctggcggtcctggcagaaggcaagtacttgacctacgatctgggcggcagtgccggtacgagcgatatggccgacgccatcgtcaggcgactggaagtagaataa

SEQ ID NO: 28124 - protein, 336 aa, Moorella thermoacetica ATCC 39073
MLKHVVTLIPGDGTGPELIAAARRVLEASGAELEWEVMAAGEGAQEKYGSVLPEETLASIRKNGVALKGPITTPVGTGFRSVNVALRKELDLYANVRPFRNLPNVPSRYQGVDLVIYRENTEDLYAGVEHMVGEDAAESIKIITRKGSERIARAAFEYARRQGRKRVTAGHKANIMKFSDGLFLRTFYDVARDYPEITADDRIVDNLSMQLVQKPEQYDVLVLPNLYGDILSDLCAGLVGGLGVAPGANIGEKAAVFEPIHGSAPKYAGQNKVNPLATILSGVMMLEHLGEKEAAARIQRAILAVLAEGKYLTYDLGGSAGTSDMADAIVRRLEVE

SEQ ID NO: 28125 - DNA, 1251 bp, Ralstonia metallidurans CH34
  CDS (1)..(1251): transl_table=11
atgtatcagcacatcaaggtgccggcaggcgagaagatcaaggtcaacgccgatctttcgctgaacgtgccggataatccgatcattccctacatcgaaggtgacggcacgggtgtcgatatcaccccggtgatgctgaaagtggtggatgccgccgtggccaaggcgtatggcggcaagcgcaagatctcgtggatggagatctacgcgggcgagaagtcgaccaaggtctatggcccggatgtgtggctgccggaagagaccatggaagtggtcaaggaatacgtggtgtcgatcaagggcccgctgaccacgccggtcggtggtggcatccgctcgctgaacgtggcactgcgtcagcagctcgatctctatgtctgcttgcgcccggtgcgttatttcaaaggcgtgccgtccccggtgcgcgagcccgagaagaccgacatggtgatcttccgcgagaactcggaagacatctatgccggcatcgagtgggaagccgaaagcgaaggcgcgaagaagctgatcgccttcctgcagaacgaaatgggcgtgaagaagatccgcttcccggaaacgtccggcatcggcatcaagcccgtctcgaaggaaggcacgcagcgcctggtgcgcaaggcgctccagtacgcgatcgacaacgacaagccgtcggtgacgctcgtgcacaagggcaacatcatgaagttcaccgaaggcggcttccgcgactggggctatgaactcgcgcagcaggaatttggcgcggaactggtcgatggcggcccgtggtgcaagttcaagaatccgaagactggccgcgatatcgtcgtcaaggacgctatcgccgacgcattcctgcagcagattctgctgcgtccagctgaatattcggtgatcgccacgctgaacctgaacggtgactacatctccgacgccctggccgcccaggtgggtggcatcggcatcgcaccgggcgcgaacatgtccgattcggtcgccatgttcgaagccacgcacggcaccgcgccgaagtatgcaggcaaggactacgtgaatccaggttcggaaatcctctccgcggaaatgatgctgcgccacatgggctggaccgaagcggccgacctgatcatccgctcgatggagaagtcgatccagtcgaagaaggtcacgtacgacttcgcccggctgctagaaggtgcgacgcaggtgtcgtgctcggggtttggtcaggtgatgatcgacaatatgtaa

SEQ ID NO: 28126 - protein, 416 aa, Ralstonia metallidurans CH34
MYQHIKVPAGEKIKVNADLSLNVPDNPIIPYIEGDGTGVDITPVMLKVVDAAVAKAYGGKRKISWMEIYAGEKSTKVYGPDVWLPEETMEVVKEYVVSIKGPLTTPVGGGIRSLNVALRQQLDLYVCLRPVRYFKGVPSPVREPEKTDMVIFRENSEDIYAGIEWEAESEGAKKLIAFLQNEMGVKKIRFPETSGIGIKPVSKEGTQRLVRKALQYAIDNDKPSVTLVHKGNIMKFTEGGFRDWGYELAQQEFGAELVDGGPWCKFKNPKTGRDIVVKDAIADAFLQQILLRPAEYSVIATLNLNGDYISDALAAQVGGIGIAPGANMSDSVAMFEATHGTAPKYAGKDYVNPGSEILSAEMMLRHMGWTEAADLIIRSMEKSIQSKKVTYDFARLLEGATQVSCSGFGQVMIDNM

SEQ ID NO: 28127 - DNA, 1173 bp, Rubrobacter xylanophilus DSM 9941
  CDS (1)..(1173): transl_table=11
atggtagaggccatccggctgtctcttcccccactacttcccgcagggtcttcagagaactattctacagcacccacgggcgtgccggagctcgttagtcctccgcggcgccgctcgctatacttgggcgtgccctttggtcgagagaggagacagcatcccgtggcaaggaccgttaccctcatacccggagacggaatagggccggaggtcactggctcggcgaaggaggtcatcggcgcgctcggcgtggacatcgagtgggagatagccgaggccggcgagacggtgatggagagggaggggacgcccctccccgagtacgtgctggagtccatccggcgcaacaaggtggccctgaagggcccgctgaccacccccgtgggcaccggcttccgctcggtgaacgtggccctgcgcaaggagctcgacctctacgccaacatccgcccggcgctcagcctcccggggctcgacctgccgtacagggacatagacatcctgcttttccgggagaacaccgaggatctgtacgcgggcgtcgagcacatggtcggcaagcacgccgccgagtccatcaagatcatcacccgcgagggcaccgagcgcatctgccgcatggccttcgagtactcgcgggaccagggccgcaggcacgtcacggtggtgcacaaggccaacatcatgaagtacaccgacggcctcttccgggaggtcttctacgaggtcgccagagactacgaggacgacttcgaggagatcgacgagcgcatcgtggacaacatggcgatgcagctggtgatgaagccgaacctctacgacgttctggtctgccccaacctctacggggacatcctctcggacctgtgcgccgggctgaccggcgggctcggggtcgccccgggggcgaacatcggggaggacatcgcgctgttcgagccggtgcacggctcggcccccaagtacgccgggcagaaccgggccaaccccttggcgaccctgctgtcggcgaagaacatgctctactacctggggtacggcgaggccgccgaccgcatgcagggggccatcaacgccgccctgaagaaccccgaaacccggacgaaggacctcggcggcagcgccgggacgcgggagttcacccgggcggtgatctccaacctgacgggctag

SEQ ID NO: 28128 - protein, 390 aa, Rubrobacter xylanophilus DSM 9941
MVEAIRLSLPPLLPAGSSENYSTAPTGVPELVSPPRRRSLYLGVPFGRERRQHPVARTVTLIPGDGIGPEVTGSAKEVIGALGVDIEWEIAEAGETVMEREGTPLPEYVLESIRRNKVALKGPLTTPVGTGFRSVNVALRKELDLYANIRPALSLPGLDLPYRDIDILLFRENTEDLYAGVEHMVGKHAAESIKIITREGTERICRMAFEYSRDQGRRHVTVVHKANIMKYTDGLFREVFYEVARDYEDDFEEIDERIVDNMAMQLVMKPNLYDVLVCPNLYGDILSDLCAGLTGGLGVAPGANIGEDIALFEPVHGSAPKYAGQNRANPLATLLSAKNMLYYLGYGEAADRMQGAINAALKNPETRTKDLGGSAGTREFTRAVISNLTG

SEQ ID NO: 28129 - DNA, 1179 bp, Ferroplasma acidarmanus Fer1
  CDS (1)..(1179): transl_table=11
atggcaaaaataacatttgaaaatggaaagtggaaagtgcccgataatccgacaattctgtacacagacggtgatggcataggcccagaaatcatggatgtaacgaggaaagttgtggatgctgcagttaaaaaggcatacaaaaataaaaaaatagagtggaaagaaattcttgtaggggacaaagcactgaaagagaaaaatgatcgtttcccggaagaatcacaggaggcaataaaacaataccgtgtactgttaaaatcgccgcttggaacacctataggtactggttttaagtcaatcaatgtaaggataagagttatgctcgacctttattcaaatataaggcctgttagttttatgaaaggtttagaaagcccactcaaacacccggaaaatgtaaatttaaccatattcagggaaaatactgatgatctttacaccggaattgagtataagtatgacagcaaagaggctgccgaaattagaaaatttttcaaagacaaattacatgttgaaataagcgacgattctggaattggaataaagccaatgagcaaatataaaacccagagaatcacaagagcggctgcaaaatttgcaattgaaaacaacaaaaagaagatcactataatgcataagggaaatgtaatgaaatacacggaaggcgctttcagggaatgggcatatgaaacacttaaaaacgaattcggtaattatacatcaaccgatgattcaagtaaaatacttgtaaacgacatgatagccgataatatgttccagcagataataacaaggcctgaaaactatgaagtgatattagctccaaatatagatggggattatatttctgatgcagcaggtgcattaataggaaatatcgggactctaggcggcgcaaatgttggagacgatgcaggaatgtttgaagcagtgcatggaaccgcaccgaaatatgcagggcagaatgtagcagacccgctgggattgataagaggagcgcagcttatgattaaatacctgaactggcacgaagcatttgatgtgatagaaaaagctataggggaagctatagagacaaagaaagtcacaaaggaccttgctaaattctttgatgttccggcaatggggacaaaggaatttggtgactcgcttgtgaaaattatagatgggctataa

SEQ ID NO: 28130 - protein, 392 aa, Ferroplasma acidarmanus Fer1
MAKITFENGKWKVPDNPTILYTDGDGIGPEIMDVTRKVVDAAVKKAYKNKKIEWKEILVGDKALKEKNDRFPEESQEAIKQYRVLLKSPLGTPIGTGFKSINVRIRVMLDLYSNIRPVSFMKGLESPLKHPENVNLTIFRENTDDLYTGIEYKYDSKEAAEIRKFFKDKLHVEISDDSGIGIKPMSKYKTQRITRAAAKFAIENNKKKITIMHKGNVMKYTEGAFREWAYETLKNEFGNYTSTDDSSKILVNDMIADNMFQQIITRPENYEVILAPNIDGDYISDAAGALIGNIGTLGGANVGDDAGMFEAVHGTAPKYAGQNVADPLGLIRGAQLMIKYLNWHEAFDVIEKAIGEAIETKKVTKDLAKFFDVPAMGTKEFGDSLVKIIDGL

SEQ ID NO: 28131 - DNA, 1260 bp, Psychrobacter cryohalolentis K5
  CDS (1)..(1260): transl_table=11
atgtcatataacaaggttatcgtaccaataaacggcgaaaaaataaccgtaaatgctgatttatccttcaatattccaaatcatccgatcattccctttatcgaaggcgatggcatcggcgttgatatcacacctgtcatgattgaagtgattgatgcggcagttgaaaaagcttataaaggcaaaaagtccatcgtttggatggagacctattgcggtgaaaaagcctctaaaatttatgacggcgaatttatgccagaagagacgcttgatgtgttgtgtgattatgtcatcagtataaaaggtccgctgaccacgccagttggcggtggtatgcgctcgctgaacgtggcaatgcgacaagagcttgatttgtacgtttgtcagcgtcctgtacgttggttcgaaggcgttccaagtcctgtccaacatcctgagttgactgatatgattattttccgcgaaaactcagaagatatctatgccggtatcgagtggaaagcaggcagtgaggatgccaaaaaagtcattaagtttttaaaagaagagatgggcgtgacacagattcgcttttcagaagattgtggcattggtatcaagccagtatcaaaagagggctcacagcgtttgatttgtaaagcgattcagcacgccatcgacaatgacttgcccaatgtgacgcttgtgcataaaggcaatattatgaagttcactgaaggcgcttttaaagagtggggatatgaagttgctactgagtgctttggtgctcaattactagatggtggcccttggatgacgataacaaatcctaagacgggtcataagattgtgattaaagatgtgattgcggatgcgtttttgcagcaaatcctgatgcgtccagctgactactcagtgattgcgacattaaacctaaacggcgactacatctctgacgcgttagccgcgcaagtcggtggtatcggtattgctccgggtgctaataaaggagttgctattgccgtatatgaggcaacccatggtacagctccaaagtacgccggacaaaacaaagtcaatccgggttcgcttattttgtcagctgagatgatgttacgtgatatgggctggacaaaggccgctgacttggtcatcgaaggtatccaaggtgctatcaaaaataagaccgtgacctacgattttgaacgcttgatgccggatgccaccttactgagtacctctgagtttggtaaagcaatcatcaaacatatgaatgcgtaa

SEQ ID NO: 28132 - protein, 419 aa, Psychrobacter cryohalolentis K5
MSYNKVIVPINGEKITVNADLSFNIPNHPIIPFIEGDGIGVDITPVMIEVIDAAVEKAYKGKKSIVWMETYCGEKASKIYDGEFMPEETLDVLCDYVISIKGPLTTPVGGGMRSLNVAMRQELDLYVCQRPVRWFEGVPSPVQHPELTDMIIFRENSEDIYAGIEWKAGSEDAKKVIKFLKEEMGVTQIRFSEDCGIGIKPVSKEGSQRLICKAIQHAIDNDLPNVTLVHKGNIMKFTEGAFKEWGYEVATECFGAQLLDGGPWMTITNPKTGHKIVIKDVIADAFLQQILMRPADYSVIATLNLNGDYISDALAAQVGGIGIAPGANKGVAIAVYEATHGTAPKYAGQNKVNPGSLILSAEMMLRDMGWTKAADLVIEGIQGAIKNKTVTYDFERLMPDATLLSTSEFGKAIIKHMNA

SEQ ID NO: 28133 - DNA, 1236 bp, Syntrophobacter fumaroxidans MPOB
  CDS (1)..(1236): transl_table=11
atgacggatcacaggggaaatgggacgtggatcgatttggaccgggatcgtaacctggtggtgccgcccgacccgatcatcgggttcatcgagggcgacggcatcggacccgatatctgggccgccacccgactggtgctggagtccgcggtccggagggcctacggcgggtcgaaacggatccgctggcatgagcttgcagccggcgagaaggccctcgcggccgtcggcgagcccctcccccaaatcacgttcgacgaaatccgcaagtgcgtggtggccatcaaggggccgctcaccactccggtcggcaagggatttcgcagcctcaacgtcacattgaggcaggtgttgaacctctacgcctgcgttcggccagtgcggtatttcccgggattgccctccccggtcaagcaccccgaaaaggtgaacatgatcgtgttccgcgaaaacaccgaagacgtttacgccggaatcgaatgggcgtcgggatcgaaggaggcccgccgcctggaagccatcctgaaggaggagttcaaggtttcgctgcccccggattcgggcatcggcatcaagcccatcagccgcgcgggaacccagcgtttggtacggcgggcgatccggtacgccatcgaaaacgggttgccttcggtcacgctggtccacaagggcaatatcatgaagtacaccgaaggggcgttcaggaactggggctacgagctggccgccacggaattcgccgatctcgcggtgaccgagaccgacctggagcagaagcacggcgggcacgtcccggagggcaaggtggtcatcaaggaccgcatggccgattccatgttccagcaggtgctcctgcgccccgaggaatacagtgtcatcgcgactccgaaccttgacggcgattacctttcggacgctctggccgcgcaggtcggagggctcggcatggcccccggcgcaaacatcggcgacgaatgcgcggtcttcgaagccacgcacgggagcgctcccaagtacgcgggtctggacaaggtcaaccccggttcactcatcctttcgggcgtcatgatgctcgagcacatcggctggcgggaagcggggaagctgatcgaggatgcgcttacgcgcaccatccaggcgggtgtggtgacctacgacctcgcccgacagatggacggggccagggaagtcaggtgctcggagttcgcccgggccgtcgtggagcgcatggattag

SEQ ID NO: 28134 - protein, 411 aa, Syntrophobacter fumaroxidans MPOB
MTDHRGNGTWIDLDRDRNLVVPPDPIIGFIEGDGIGPDIWAATRLVLESAVRRAYGGSKRIRWHELAAGEKALAAVGEPLPQITFDEIRKCVVAIKGPLTTPVGKGFRSLNVTLRQVLNLYACVRPVRYFPGLPSPVKHPEKVNMIVFRENTEDVYAGIEWASGSKEARRLEAILKEEFKVSLPPDSGIGIKPISRAGTQRLVRRAIRYAIENGLPSVTLVHKGNIMKYTEGAFRNWGYELAATEFADLAVTETDLEQKHGGHVPEGKVVIKDRMADSMFQQVLLRPEEYSVIATPNLDGDYLSDALAAQVGGLGMAPGANIGDECAVFEATHGSAPKYAGLDKVNPGSLILSGVMMLEHIGWREAGKLIEDALTRTIQAGVVTYDLARQMDGAREVRCSEFARAVVERMD

SEQ ID NO: 28135 - DNA, 1248 bp, Nitrosomonas eutropha C71
  CDS (1)..(1248): transl_table=11
atgtatcaacatatcaaggtaccggccatcggcagcaaaattcaggtaaaaaatgactctaccctgatcgtaccagataacccgatcatcccttttattgagggagatggtacaggtatagatatcacacccgtcatgatcaaagtgatcgatggcgcagtaaaaaaagcatatggtgattcccggaaaatttcctggatggaaatttacgcgggtgagaaatcgactcgcgtctatggacaggatgtctggctgccagacgaaaccttgcaagcagcaaaggaatttgtggtatccatcaaggggccattgaccacaccagtaagcggtggcattcggtcaatcaatgtagcattacgccaactgctggatctgtatgtttgtctgcgcccggtacggtatttccaaggggttcccagcccggtcaaacaaccggagaaagtagatatgatcatatttcgcgaaaactcggaagatatctatgcgggcatcgaatgggaagctggaacagcagctgttggaaaagtaattaatttcctgacaacagaaatggaaatcaccaagatccgatttcctcaatcttctgcgatcgggataaaaccggtttcaaaagaaggcagcgaacgtttgatcaggaaagccattcagtatgcgattgaccataaacggcgctctgtcaccttggtgcacaaaggaaatattatgaaattcacagaaggggctttcaagaaatggggttacgaactagcagcaaaagaatttggcgcagaattactggatggcggtccgtggatgaaactgcggtatgatggtaatgaaattaccatcaaggatgttattgctgatgccttcctccagcaaatcttgctgcgtccggatgaatacgatgttatcgccacacttaatttaaatggtgactatatttctgacgctctggctgcacaggtgggtggtatcggaatcgctcccggagcaaatttgagcgacagcatagcgatatttgaggcgacacacggcacagcaccaaagtacgctggcaaggatcaagtcaatccaggatcaatcatcctgtcagcagaaatgatgctcagatacattaactggcacgaagcagccgatatcattatcagctcaatggagaaaacgatacaagacaaaatcatgacctatgatctggcaagacttacaccgaatgccaggcaggccacttcttcagaatttgggagtgcaatgatacaaagaatgtaa

SEQ ID NO: 28136 - protein, 415 aa, Nitrosomonas eutropha C71
MYQHIKVPAIGSKIQVKNDSTLIVPDNPIIPFIEGDGTGIDITPVMIKVIDGAVKKAYGDSRKISWMEIYAGEKSTRVYGQDVWLPDETLQAAKEFVVSIKGPLTTPVSGGIRSINVALRQLLDLYVCLRPVRYFQGVPSPVKQPEKVDMIIFRENSEDIYAGIEWEAGTAAVGKVINFLTTEMEITKIRFPQSSAIGIKPVSKEGSERLIRKAIQYAIDHKRRSVTLVHKGNIMKFTEGAFKKWGYELAAKEFGAELLDGGPWMKLRYDGNEITIKDVIADAFLQQILLRPDEYDVIATLNLNGDYISDALAAQVGGIGIAPGANLSDSIAIFEATHGTAPKYAGKDQVNPGSIILSAEMMLRYINWHEAADIIISSMEKTIQDKIMTYDLARLTPNARQATSSEFGSAMIQRM

SEQ ID NO: 28137 - DNA, 1419 bp, Trichodesmium erythraeum IMS101
  CDS (1)..(1419): transl_table=11
atgtacgaaaaaataacccccccaaccacagggtctaaagtcactttcagtaacggccaacccatcgttcccgacgaccctattatcccatttattaggggcgatggtactggattagatttgtggccagcatctcaaaaagtctttgacgcagcgatcgctactgcctatggagacaaacgcaaaattaattggtttaaaatctacgctggtgatgaagcgtgtgacaaatatggcactttccaatatttgccggaagatactctaaatgccataaaagaatatggtattgccattaaaggtcctttaacaacacccataggtggaggtattcgttccctaaatgtcgcattgcgtcaaattaatgatttatatgcttgtgttcgtccttgtagatattacacgggtacaccttctcctcacaaaacaccggaaaaattagatgtcatcatttaccgggaaaatacagaagatatttatctgggaatagaatggcgcgagggaactgatattgctagcaaattgattgacattttaaataaagacttaattcctgctactctcgaacacggcaaaaagcaaattcgcttcgactctggtattggtattaaacctgtaagtaaaactggttcccaacgtttggttaaacgtgctattcaaaatgctttgcgtttacctaagtccaaacaaatggtaactttggtacataaaggtaatattatgaagtacaccgaaggcgcatttcgtgactggggttatgagttagcaactacagaatttcgtcaagaatgtgtcactgaaagagaatcttggattctttctaataaagaggaaaaccttaatattagtagtgaggaaaattctcgaaaaattgaccctggttatgatgctttaacaccagaaaaacaagcagaaatttgccaagaagttgaggatgtattggcagctatttgggatagtcatgggcatggaaaatggaaagagaaaatcatggtaaatgaccgaattgctgatagtattttccaacaaattcaaactcgaccagaggagtattctattctggcaactatgaatttgaatggggattatttatccgacgcagcagcagctattgttggtggtttaggtatgggtccaggtgctaatattggtgataaatgtgctatttttgaagccactcatggtactgctccaaaacacgcaggtttagatagagtaaaccctggttctttaattctttctggtgtaatgatgttagaatatataggctggcaagaagctgcagatttgattaaaaaaggtattgagatttctatttctaatggtgaggtaacttatgatttagcaagattaatggaaccatctgtgccggctttgaaatgttctgagtttgctgatgcaattatcaagcatttttaa

SEQ ID NO: 28138 - protein, 472 aa, Trichodesmium erythraeum IMS101
MYEKITPPTTGSKVTFSNGQPIVPDDPIIPFIRGDGTGLDLWPASQKVFDAAIATAYGDKRKINWFKIYAGDEACDKYGTFQYLPEDTLNAIKEYGIAIKGPLTTPIGGGIRSLNVALRQINDLYACVRPCRYYTGTPSPHKTPEKLDVIIYRENTEDIYLGIEWREGTDIASKLIDILNKDLIPATLEHGKKQIRFDSGIGIKPVSKTGSQRLVKRAIQNALRLPKSKQMVTLVHKGNIMKYTEGAFRDWGYELATTEFRQECVTERESWILSNKEENLNISSEENSRKIDPGYDALTPEKQAEICQEVEDVLAAIWDSHGHGKWKEKIMVNDRIADSIFQQIQTRPEEYSILATMNLNGDYLSDAAAAIVGGLGMGPGANIGDKCAIFEATHGTAPKHAGLDRVNPGSLILSGVMMLEYIGWQEAADLIKKGIEISISNGEVTYDLARLMEPSVPALKCSEFADAIIKHF

SEQ ID NO: 28139 - DNA, 1254 bp, Rhodoferax ferrireducens DSM 15236
  CDS (1)..(1254): transl_table=11
atgtaccagcacatcaaggttccctcagaaggccaaaagatcactgtcaatgccgatatgtcgttaaacgttcccgatcagccgatcattccttttattgaaggtgacggcaccgggttggacatcacaccggtgatgattaaagtggtggatgcggcggtgaccagggcgtacggtagcaagaagaagattcactggatggaagtttatgctggtgaaaaggcaaccaaggtctatggtcccgatgtctggttcccaactgaaacgctggacgctttgcgtgactatgtggtgtccatcaaaggcccactgacaaccccaatcggtggcggtattcgctcgctcaatgtctttatgcgtcaggagcttgacctgtttgtctgcctgcgtccgattcagtattttgaaggcgtacccagccccgtcaaagagccggaaaaaaccaatatggtgatcttccgtgaaaacaccgaagacatctactgcggcatcgaatttgaagccgaatcgcccaaggcaaaaaaactcatcaagttcctgcaggatgagctgggtgtcaccaaaatccgctttcccaatacgtcgggcatcggcatcaaaccggtatcacgtgagggtaccgagcgcttggtgcgtaaggcgatccggtacgccattgacaatgacaaacctaatgtcacgctggtgcataagggcaacatcatgaaatttaccgaaggtgctttccgtgactggggttatgccttggcgcagaatgagtttggtgccgaacttattgacggcggaccctggtgcaaattcaagagccccaaaacgggcaaagagatcatcgtgaaagactgcattgcggatgccttcctgcaacaaattctgttgcgcccggctgaatacagtgtgatagcgaccttgaacctgaatggggactacatttctgacgcattggcggctcaagtgggcggcatcggcattgcggccggggccaacctgtcagactcggtcgcttgctttgaagccacccatggcacagcccccaaatatgctggaaaagattatgtgaatccaggctctgaaattctgtcggctgaaatgatgctacgccacatgggctggtttgaagctgccgatgccgtcatcaagtcgatggaacgctctatcaagagcaagaaagtcacgtacgatttcgctcgtctgatggacggtgcgacccaggtcagttgctctggatttggtcaggtgatgatcgacaatatgtag

SEQ ID NO: 28140 - protein, 417 aa, Rhodoferax ferrireducens DSM 15236
MYQHIKVPSEGQKITVNADMSLNVPDQPIIPFIEGDGTGLDITPVMIKVVDAAVTRAYGSKKKIHWMEVYAGEKATKVYGPDVWFPTETLDALRDYVVSIKGPLTTPIGGGIRSLNVFMRQELDLFVCLRPIQYFEGVPSPVKEPEKTNMVIFRENTEDIYCGIEFEAESPKAKKLIKFLQDELGVTKIRFPNTSGIGIKPVSREGTERLVRKAIRYAIDNDKPNVTLVHKGNIMKFTEGAFRDWGYALAQNEFGAELIDGGPWCKFKSPKTGKEIIVKDCIADAFLQQILLRPAEYSVIATLNLNGDYISDALAAQVGGIGIAAGANLSDSVACFEATHGTAPKYAGKDYVNPGSEILSAEMMLRHMGWFEAADAVIKSMERSIKSKKVTYDFARLMDGATQVSCSGFGQVMIDNM

SEQ ID NO: 28141 - DNA, 1278 bp, Bacillus israeli
  CDS (1)..(1278): transl_table=11
atgattgtggcagaaggtcaaaaaattacaatgacaaatggtactttaaacgttccaaatgatcctataattccgtttattgaaggagacggcactggtcctgatatttggagagctgcgtcaaaagtgctggaagcagctgtagaaaaagcatacaatggcgaaaagaaaatcgtttggaaagaagtgcttgctggtgaaaaagcttttaaagagactggggaatggcttcctcaagaaacgcttgatgtgatacgcgagtatatgattgcgatcaaaggtccgttaacaactcctgtaggtggaggaatccgttctttaaacgttgctcttcgccaagagctggatttatttgtgtgcttaagacctgtccgttatttcaatggagttccttcccctgtaaaacgtcctcaagatacagacatggtaattttccgtgaaaataccgaagacatctatgccggcatagagtatgcaaaagggacagaagaagtaaaaaaagtcattgaatttttacaaaaagagctgggagtaaacaaaatccgtttccctgaaacgtccggaatcggcattaagcctatttctgaagaaggaacgaaacggcttgtccgtgcggccattaactatgcaattgaacacggaagaaaatctgtcacccttgttcataaagggaacattatgaaatttacagaaggcgcgtttaaaaattggggatatgaattggctgagcaagagtttggcgataaagtattcacatgggctgagtatgaccgcattgttgaaaaagaaggaaaagaagcggctaacaaagcgcaagaagaagcagaaaaagctggaaaaattattattaaagatgcaattgcagatattttcctacagcaaattcttactcgtccgcgcgagtttgatgtagtagcaacgatgaatttaaatggagactacatttcggatgctttggctgcacaagtaggcggaatcggtattgctccaggagcaaacattaactacgagacagggcatgcgatttttgaagcaacacacggtacagcaccaaaatacgccggacttgataaagtgaatccatcttccgtaattctttctggagtgcttatgctcgaacatttaggctggaaagaagcagctgatttaatcattcaagcaatggaaaaaacgatcgcttcaaaagttgtcacctatgactttgcacgcctcatggacggagctacggaagtaaaatgctctgaattcggcaatgaattgattaaaaacatgggttaa

SEQ ID NO: 28142 - protein, 425 aa, Bacillus israeli
MIVAEGQKITMTNGTLNVPNDPIIPFIEGDGTGPDIWRAASKVLEAAVEKAYNGEKKIVWKEVLAGEKAFKETGEWLPQETLDVIREYMIAIKGPLTTPVGGGIRSLNVALRQELDLFVCLRPVRYFNGVPSPVKRPQDTDMVIFRENTEDIYAGIEYAKGTEEVKKVIEFLQKELGVNKIRFPETSGIGIKPISEEGTKRLVRAAINYAIEHGRKSVTLVHKGNIMKFTEGAFKNWGYELAEQEFGDKVFTWAEYDRIVEKEGKEAANKAQEEAEKAGKIIIKDAIADIFLQQILTRPREFDVVATMNLNGDYISDALAAQVGGIGIAPGANINYETGHAIFEATHGTAPKYAGLDKVNPSSVILSGVLMLEHLGWKEAADLIIQAMEKTIASKVVTYDFARLMDGATEVKCSEFGNELIKNMG

SEQ ID NO: 28143 - DNA, 1170 bp, Salmonella enterica I
  CDS (1)..(1170): transl_table=11
atgcaaaacggcaaactcaacgttcctgagaatccgattatcccgtttattgaaggcgatggtatcggtgttgatgtcactccagccatgcttaaagtggtcgatgccgccgtcgagaaagcctataaaggcgagcgtaaaatttcctggatggaaatttacaccggagaaaaatccacacaggtttacggccaggatgtctggcttcccgctgaaacccttgatttaattcgtgactaccgcgtagcgattaaaggtccattgaccacgccggttggcggcggtatccgctctctgaacgttgccctgcgtcaggagcttgacctgtacgtttgtctgcgtcccgttcgttactatcagggcacgccaagtccggtgaaacatccggagctgaccgatatggtcatcttccgtgaaaactctgaagacatctacgccggaattgaatggaaagctgactctgcagacgctgagaaagtgatcaagttcctgcgcgaagagatgggcgtgaagaaaattcgcttcccggagcactgcggtatcggtatcaaaccgtgttctgaagaaggcactaaacgtctggttcgcgcggcgattgaatacgctattaccaacgatcgcgattccgtcacgctggtacataaaggcaatatcatgaagttcaccgaaggcgcgtttaaagactggggctaccagttggcgcgcgacgagttcggcggtgagcttattgacggcggtccgtggctgaaaattaagaacccgaacacgggtaaagagatcgtggttaaagacgttatcgccgatgcgttcctgcaacaaatcctgttgcgtccggcggaatacgacgttatcgcctgtatgaacctgaacggtgactatatttccgatgccctggcggctcaggttggcggtatcggtattgcaccgggtgcgaatatcggcgacgaatgcgcgttgtttgaagcgactcacgggactgcgccgaaatatgcgggccaggataaagtcaacccaggctccattattctgtctgcggagatgatgctgcgccacatgcagtggttcgaagcggcggatctgattgttaaaggtatggaaggcgcgattgccgcgaagaccgtgacctatgactttgaacgcctgatggacggcgctaagctgctgaaatag

SEQ ID NO: 28144 - protein, 389 aa, Salmonella enterica I
MQNGKLNVPENPIIPFIEGDGIGVDVTPAMLKVVDAAVEKAYKGERKISWMEIYTGEKSTQVYGQDVWLPAETLDLIRDYRVAIKGPLTTPVGGGIRSLNVALRQELDLYVCLRPVRYYQGTPSPVKHPELTDMVIFRENSEDIYAGIEWKADSADAEKVIKFLREEMGVKKIRFPEHCGIGIKPCSEEGTKRLVRAAIEYAITNDRDSVTLVHKGNIMKFTEGAFKDWGYQLARDEFGGELIDGGPWLKIKNPNTGKEIVVKDVIADAFLQQILLRPAEYDVIACMNLNGDYISDALAAQVGGIGIAPGANIGDECALFEATHGTAPKYAGQDKVNPGSIILSAEMMLRHMQWFEAADLIVKGMEGAIAAKTVTYDFERLMDGAKLLK

SEQ ID NO: 28145 - DNA, 1170 bp, Salmonella enterica subsp
  CDS (1)..(1170): transl_table=11
atgcaaaacggcaaactcaacgttcctgagaatccgattatcccgtttattgaaggcgatggtatcggtgttgatgtcactccagccatgcttaaagtggtcgatgccgccgtcgagaaagcctataaaggcgagcgtaaaatttcctggatggaaatttacaccggagaaaaatccacacaggtttacggccaggatgtctggcttcccgctgaaacccttgatttaattcgtgattaccgcgtagcgattaaaggtccgttgaccacgccggttggcggcggtattcgctctctgaacgttgccctgcgtcaggagcttgacctgtacgtttgtctgcgtcccgttcgttactatcagggcacgccaagtccggtgaaacatccggaactgaccgatatggtcattttccgtgaaaactctgaagatatctacgccggaattgaatggaaagctgactctgcagacgctgagaaagtgatcaagttcctgcgcgaagagatgggcgtgaagaaaattcgcttcccggagcactgcggtatcggtatcaaaccgtgttctgaagaaggcaccaagcgtctggttcgcgcggcgattgaatacgctattaccaacgctcgcgattccgtcacgctggtgcataaaggcaatatcatgaagttcaccgaaggcgcgtttaaagactggggctaccagttggcgcgcgacgagttcggcggtgagcttatcgatggcggtccgtggctgaaaattaagaacccgaacacgggtaaagagatcgtggttaaagacgttatcgccgatgcgttcctgcaacaaatcctgttgcgtccggcggaatacgacgttatcgcctgtatgaacctgaacggtgactatatttccgatgccttggcggctcaggtaggcgggatcggcattgcaccgggtgcgaatatcggcgacgaatgcgcgttgtttgaagcgactcacgggacggcgccgaagtatgcgggccaggataaagtcaaccctggctccattattctctctgcggagatgatgctgcgccatatgcagtggttcgaagcggcggatctgattgttaaaggtatggaaggcgcgattgccgcgaagaccgtgacctatgactttgaacgcctgatggaaggcgctaagctgctgaaatag

SEQ ID NO: 28146 - protein, 389 aa, Salmonella enterica subsp
MQNGKLNVPENPIIPFIEGDGIGVDVTPAMLKVVDAAVEKAYKGERKISWMEIYTGEKSTQVYGQDVWLPAETLDLIRDYRVAIKGPLTTPVGGGIRSLNVALRQELDLYVCLRPVRYYQGTPSPVKHPELTDMVIFRENSEDIYAGIEWKADSADAEKVIKFLREEMGVKKIRFPEHCGIGIKPCSEEGTKRLVRAAIEYAITNARDSVTLVHKGNIMKFTEGAFKDWGYQLARDEFGGELIDGGPWLKIKNPNTGKEIVVKDVIADAFLQQILLRPAEYDVIACMNLNGDYISDALAAQVGGIGIAPGANIGDECALFEATHGTAPKYAGQDKVNPGSIILSAEMMLRHMQWFEAADLIVKGMEGAIAAKTVTYDFERLMEGAKLLK

SEQ ID NO: 28147 - DNA, 1170 bp, Salmonella enterica subsp
  CDS (1)..(1170): transl_table=11
atgcaaaacggcaaactcaacgttcctgagaatccgattatcccgtttattgaaggcgatggtatcggtgttgatgtcactccagccatgcttaaagtggtcgatgccgccgtcgagaaagcctataaaggcgagcgtaaaatttcctggatggaaatttacaccggagaaaaatccacacaggtttacggccaggatgtctggcttcctgctgaaactcttgatttaattcgtgattatcgcgtagcgattaaaggcccgttaaccacgccggttggcggcggtattcgctctctcaacgttgccctgcgtcaggagcttgacctgtacgtttgtctgcgtcccgttcgttactatcagggcacgccgagtccggtgaaacatccggaactgaccgatatggtcattttccgtgaaaactctgaagatatttacgccggaattgaatggaaagctgattctgcagacgctgagaaggtgatcaagttcctgcgcgaagagatgggtgtgaagaagattcgcttcccggagcactgcggtatcggtatcaaaccgtgttctgaagaaggcaccaggcgtctggttcgcgcggcgcttgaatacgctattaccaacgatcgcgattccgtcacgctggtgcataaaggcaatatcatgaagttcaccgaaggcgcgtttaaagactggggctaccagttggcgcgcgacgagttcggcggtgagcttattgacggtggtccgtggctgaaaattaagaacccgaacacgggtaaagagattgtggttaaagacgttatcgctgatgcgttcctgcaacaaattctgttgcgtccagcagaatacgatgttatcgcttgtatgaacctgaacggggactatatttccgatgccctggcggctcaggttggcggtatcggtattgcaccgggtgcgaatatcggcgacgaatgcgcgctgtttgaagcgactcacgggacagcgccgaaatacgcgggccaggataaagtcaaccctggctccattattctgtctgcggagatgatgctgcgccacatgcagtggttcgaagccgcagacctgattgttaaaggtatggaaggcgcgattgccgcgaagaccgtgacctatgactttgaacgcctgatggaaggcgctaagctgctgaaatag

SEQ ID NO: 28148 - protein, 389 aa, Salmonella enterica subsp
MQNGKLNVPENPIIPFIEGDGIGVDVTPAMLKVVDAAVEKAYKGERKISWMEIYTGEKSTQVYGQDVWLPAETLDLIRDYRVAIKGPLTTPVGGGIRSLNVALRQELDLYVCLRPVRYYQGTPSPVKHPELTDMVIFRENSEDIYAGIEWKADSADAEKVIKFLREEMGVKKIRFPEHCGIGIKPCSEEGTRRLVRAALEYAITNDRDSVTLVHKGNIMKFTEGAFKDWGYQLARDEFGGELIDGGPWLKIKNPNTGKEIVVKDVIADAFLQQILLRPAEYDVIACMNLNGDYISDALAAQVGGIGIAPGANIGDECALFEATHGTAPKYAGQDKVNPGSIILSAEMMLRHMQWFEAADLIVKGMEGAIAAKTVTYDFERLMEGAKLLK

SEQ ID NO: 28149 - DNA, 1170 bp, Salmonella bongori
  CDS (1)..(1170): transl_table=11
atgcaaaacggcaaactcaacgttcctgagaatccgattatcccgtttattgaaggcgacggtatcggtgttgatgtaacccctgccatgctcaaagtggtcgatgccgcagtcgaaaaagcctataaaggtgagcgtaaaatttcctggatggaaatttacaccggtgagaaatccacccaggtttacggccaggacgtctggctacctgctgaaacccttgatctgattcgtgaataccgtgtggctatcaaaggcccgttgaccacgccggtcggtggcggtattcgttctctgaacgtggcgctgcgtcaggaactcgacctgtacgtttgtctgcgcccggtccgttactatcagggcaccccgagcccggtaaagcatcctgaactgaccgatatggtcatcttccgtgaaaactccgaagatatctacgcgggtattgagtggaaagccgattccgccgacgctgagaaagtgatcaaattcctgcgcgaagagatgggcgtgaagaaaattcgcttccctgaacattgcggtattggtatcaaaccgtgttctgaagaaggcaccaaacgtctggtccgtgcggcaattgagtacgccatcactaacgatcgtgactccgtgacactggtccataaaggcaacatcatgaagttcaccgaaggcgcgtttaaagactggggttaccagttggcgcgtgacgagttcggtggcgaactgatcgacggcggcccgtggatgaaaatcaagaacccgaacaccggcaaagagatcgtggtgaaagacgttatcgccgatgccttcctgcagcagatcctgctgcgtccggcggaatatgacgttatcgcctgcatgaacctgaacggtgactatatctccgatgcgctggcagcgcaggttggcggtattggtattgcgcctggggcaaacattggtgatgaatgtgcgctgttcgaagcaacccacggtactgcgccgaaatatgcaggccaggacaaagtaaacccaggctctatcattctgtccgctgagatgatgctgcgtcacatgcagtggttcgaagcggcggatctgattgttaaaggtatggaaggcgcgattgccgcgaagaccgtgacctatgactttgaacgcctgatggaaggcgctaagctgctgaaatag

SEQ ID NO: 28150 - protein, 389 aa, Salmonella bongori
MQNGKLNVPENPIIPFIEGDGIGVDVTPAMLKVVDAAVEKAYKGERKISWMEIYTGEKSTQVYGQDVWLPAETLDLIREYRVAIKGPLTTPVGGGIRSLNVALRQELDLYVCLRPVRYYQGTPSPVKHPELTDMVIFRENSEDIYAGIEWKADSADAEKVIKFLREEMGVKKIRFPEHCGIGIKPCSEEGTKRLVRAAIEYAITNDRDSVTLVHKGNIMKFTEGAFKDWGYQLARDEFGGELIDGGPWMKIKNPNTGKEIVVKDVIADAFLQQILLRPAEYDVIACMNLNGDYISDALAAQVGGIGIAPGANIGDECALFEATHGTAPKYAGQDKVNPGSIILSAEMMLRHMQWFEAADLIVKGMEGAIAAKTVTYDFERLMEGAKLLK

SEQ ID NO: 28151 - DNA, 1095 bp, Nicotiana tabacum
  CDS (1)..(1095)
atggcttttcagattgcgagaagactcctacgtagccgcgctagttcgtcgattaggtatttggatcggagcttcagttcggagtccaattcgaatttgatccgcgctactcttttccccggcgatggtattggccctgagatcgccgactccgtcagacagattttcaagactgctgaggtaccaattgaatgggaagaacactatgtagggaaggagatagaccctagaaccaatagttttctgacatgggagagtcttgaatcagtgagaagaaataaggttggtttgaaagggccaatggctacacctatcgggaaaggtcatcgttccttgaaccttacattgaggaaagagttaaatctatatgccaatgttagaccttgctacagcctacctggatacaagactcgctacgatgatgtcaatctcattactatcagggaaaacactgaaggagagtacagtggtgtggaacatcaagtcgtaaggggtgtggttgaaagtctcaagatcatcactcgtcaagcaagcttaagggttgcggagtacgcgtttcactatgccaaggctcatggaagagagagagtgtctgcaattcacaaagctaacatcatgcaaaagactgatggtcttttccttaagtgttgccgagaggtagcagagaagtaccctgagataaagtatgaggaagttgtcattgacaattgttgtatgatgcttgtgaaaaatccagcactttttgatattttggtgatgcctaacctttatggtgacattatcagtgacctttgtgctggtgtgattggtggtttgggcctaactccaagttgcaatattggtgagggaggtattgctcttgctgaggctgtgcatggttcagcacctgatattgctggaaagaacttggcaaatccaactgctttgcttttgagtgctgtaaccatgctacggcatttggagcttcatgataaagctgatcgtatccaaggtgctgtcctaaacacaattgcggaggggaagtaccgaacaggtgatcttggtggtacttcatcaactactgacttcacaaatgctatctgtgaccatctttaa

SEQ ID NO: 28152 - protein, 364 aa, Nicotiana tabacum
MAFQIARRLLRSRASSSIRYLDRSFSSESNSNLIRATLFPGDGIGPEIADSVRQIFKTAEVPIEWEEHYVGKEIDPRTNSFLTWESLESVRRNKVGLKGPMATPIGKGHRSLNLTLRKELNLYANVRPCYSLPGYKTRYDDVNLITIRENTEGEYSGVEHQVVRGVVESLKIITRQASLRVAEYAFHYAKAHGRERVSAIHKANIMQKTDGLFLKCCREVAEKYPEIKYEEVVIDNCCMMLVKNPALFDILVMPNLYGDIISDLCAGVIGGLGLTPSCNIGEGGIALAEAVHGSAPDIAGKNLANPTALLLSAVTMLRHLELHDKADRIQGAVLNTIAEGKYRTGDLGGTSSTTDFTNAICDHL

SEQ ID NO: 28153 - DNA, 1104 bp, Arabidopsis thaliana
  CDS (1)..(1104)
atgtctcgccaatcgtcttctctactgaagaatcttcgtagcatcgcttcccgttccaaaatccagacccgatccgtgacttacatgcccagacccggtgacggaaaaccaagaccagtgacgttaatccccggagacggagttggtccgttggtaacaaacgcggttcaacaagtgatggaagcgatgcacgctccggtttacttcgaaccgttcgaagttcatggagatatgaagagtttacctgaaggattgttggaatcgattaagaagaacaaagtttgtttgaaaggtggtcttaagactcccgtcggtggtggtgtgagctctctcaatgttaatctgagaaaggagcttgatctctttgcttctctcgtcaactgtttcaatttgcctggtttagcttctcgtcatgagaatgttgatattgttgtgattagagagaacactgaaggtgaatatgcaggtcttgaacatgaagttgttcctggtgttgttgagagccttaaggtgattacaaagttctgttcagagcgtatcgcaaagtatgcgtttgagtatgcctacttgaacaacaggaagaaagttacagcagtgcacaaggctaatatcatgaaattggctgatggtttgttcttggagtcttgtcaagaggttgctaagaagtatccaagcattgcttacaatgaaatcattgttgataattgttgtatgcaacttgtggctagaccagagcaattcgatgtcatggtgacgcctaatctctatggtaatctagtggcaaacactgctgctggtattgctggaggctctggagtcatgcctggaggaaatgttggggcggagtatgcggtctttgagcaaggtgcatcagcgggaaacgtggggaaggatacaacggaagagcaaaagaacgcaaaccctgtggctttgttgctgtcatcagccatgatgcttagacaccttcagttcccttcttttgctgacaggcttgaaaccgctgtgaagcgtgttatcgctgaagggaattgtcggactgaagatcttggtggaaacagtaccactcaagaggtcgttgacgctgtcattgcaaatttggattga

SEQ ID NO: 28154 - protein, 367 aa, Arabidopsis thaliana
MSRQSSSLLKNLRSIASRSKIQTRSVTYMPRPGDGKPRPVTLIPGDGVGPLVTNAVQQVMEAMHAPVYFEPFEVHGDMKSLPEGLLESIKKNKVCLKGGLKTPVGGGVSSLNVNLRKELDLFASLVNCFNLPGLASRHENVDIVVIRENTEGEYAGLEHEVVPGVVESLKVITKFCSERIAKYAFEYAYLNNRKKVTAVHKANIMKLADGLFLESCQEVAKKYPSIAYNEIIVDNCCMQLVARPEQFDVMVTPNLYGNLVANTAAGIAGGSGVMPGGNVGAEYAVFEQGASAGNVGKDTTEEQKNANPVALLLSSAMMLRHLQFPSFADRLETAVKRVIAEGNCRTEDLGGNSTTQEVVDAVIANLD

SEQ ID NO: 28155 - DNA, 1104 bp, Arabidopsis thaliana
  CDS (1)..(1104)
atgtctcgcagatcgctaactctcctcaagaatctagctagaaacgcgaatggatcaggtattcaaacccgatccgtgacttacatgcccagacccggtgacggagcaccacgcgcagtgacgctgatccccggagatggaatcggtcctctggtgacgaacgccgtggaacaggtgatggaagcgatgcacgctccgatcttcttcgagaagtacgatgttcacggagaaatgagccgtgtgccgccggaagtgatggagtcgataaggaagaataaggtttgtttgaaaggtgggcttaagactcctgttggtggtggtgttagttctcttaacgtccagcttaggaaagagcttgacctctttgcttctctggtcaactgttttaatttgcctggtttacctactcgccatgagaatgttgacatcgttgtcatcagagagaacactgaaggtgagtacgcggggcttgagcacgaggttgttcctggtgtcgttgagagtctgaaggtgatcacgaagttctgttcggagcgtattgcaaagtatgcttttgagtatgcctacctgaacaacaggaagaaagttacagcggtgcataaggctaacatcatgaaacttgcggatggtttgttcttggaatcttgtcgcgaggttgcgaaaaagtatcccagcatcacctacaatgaaatcattgttgataactgctgtatgcaacttgtagccaaaccagagcaattcgatgtcatggtaacgccgaatctctatgggaatttagttgcaaacactgctgctggtattgctggaggcacaggagtcatgcctggaggaaatgttggggctgaccatgcggtattcgagcaaggtgcatcagcaggaaatgttgggaaagacaagatagtattggaaaacaaagcaaacccagtggcattgcttctctcatcagcgatgatgcttagacaccttcagtttccttcatttgctgaccggcccgaaacagcagtgaagaaagtcaccgctgaaggaaagtgccggacgaaagatcttggtggaacaagcacgacccaagaggtcgttgatgcgggcattgcaaaactagactga

SEQ ID NO: 28156 - protein, 367 aa, Arabidopsis thaliana
MSRRSLTLLKNLARNANGSGIQTRSVTYMPRPGDGAPRAVTLIPGDGIGPLVTNAVEQVMEAMHAPIFFEKYDVHGEMSRVPPEVMESIRKNKVCLKGGLKTPVGGGVSSLNVQLRKELDLFASLVNCFNLPGLPTRHENVDIVVIRENTEGEYAGLEHEVVPGVVESLKVITKFCSERIAKYAFEYAYLNNRKKVTAVHKANIMKLADGLFLESCREVAKKYPSITYNEIIVDNCCMQLVAKPEQFDVMVTPNLYGNLVANTAAGIAGGTGVMPGGNVGADHAVFEQGASAGNVGKDKIVLENKANPVALLLSSAMMLRHLQFPSFADRPETAVKKVTAEGKCRTKDLGGTSTTQEVVDAGIAKLD

SEQ ID NO: 28157 - DNA, 1281 bp, Thermus aquaticus
  CDS (1)..(1281): transl_table=11
atggcctaccagcgcatccagattccccaggagggcgaaaagatcaccatccaagagggcgtcctgaaggtgccggaccagcccatcatcggcttcattgagggggatgggaccggccctgacatctggagagcggcccaacccgtcctagacgccgccgtggccaaagcctacggcgggcaacggcgcatcgtctgggtggagctttacgccggggaaaaggccaaccaggtctacggggagcccatctggctccccgaggagaccctggagttcatccgggagtacctggtggccatcaagggccccctgaccacgccggtgggcggcggcatccggagcatcaacgtggccctcaggcaggagctggacctctacgcctgcgtgcgccccgtgcgctggttccagggggtgcccagtccggtgaagcacccggagctggtcaacatggtcatcttccgggagaacaccgaggacatctacgccgggattgagtggccggcggggagcgaggaggtaaagaaggtcctagacttcttgaagcgggagttccccaaggcctacgccaagatccgcttccccgagacctcgggcctgggcctgaagcccatctccaaggagggcacggagcgcctggtggaggcggccattgagtacgccatcaaggaggacctccccagcgtgaccctggtccacaaaggcaacatcatgaagttcaccgaaggggccttccgggagtggggctacgccctggcccgggaaaagtacggggccacgcccctggacggcgggccctggcacgtcctcaaaaacccccgcaccggcagggagatcgttatcaaggacatgatcgccgacaacttcctgcagcagatcctcctccgccccgacgaatactcggtgatcgccaccatgaacctgaacggggactacatctccgatgccctggccgcccaggtggggggcatcggcatcgcccccggggccaacatcaactacaagacgggccacgccgtctttgaggccacccacggcaccgcccccaagtacgctggccaggacaaggtgaaccccagcagcgtcatcctctccggggagatgatgcttcgctacctgggctggaacgaggcggcggacctcatcatcagggccatggagaggaccatcagcaagggcctggtcacctacgacttccaccgcctcctggtggccgagggcaagcccgccacgcttcttaagaccagcgagttcggccaggccctgatccagcacatggactga

SEQ ID NO: 28158 - protein, 426 aa, Thermus aquaticus
MAYQRIQIPQEGEKITIQEGVLKVPDQPIIGFIEGDGTGPDIWRAAQPVLDAAVAKAYGGQRRIVWVELYAGEKANQVYGEPIWLPEETLEFIREYLVAIKGPLTTPVGGGIRSINVALRQELDLYACVRPVRWFQGVPSPVKHPELVNMVIFRENTEDIYAGIEWPAGSEEVKKVLDFLKREFPKAYAKIRFPETSGLGLKPISKEGTERLVEAAIEYAIKEDLPSVTLVHKGNIMKFTEGAFREWGYALAREKYGATPLDGGPWHVLKNPRTGREIVIKDMIADNFLQQILLRPDEYSVIATMNLNGDYISDALAAQVGGIGIAPGANINYKTGHAVFEATHGTAPKYAGQDKVNPSSVILSGEMMLRYLGWNEAADLIIRAMERTISKGLVTYDFHRLLVAEGKPATLLKTSEFGQALIQHMD

SEQ ID NO: 28159 - DNA, 1056 bp, Haemophilus parasuis
  CDS (1)..(1056): transl_table=11
atgctatctcaactcactacaccaaaagggcaagctattcaactaaatcatgatggttcattgtctgttccaaattacccaattattccttttattgagggagatggaattggcgttgatgtcacaccagccatgcgttttgtaattgatgctgcggtagaaaaagcctatcaaggtcaacgaaaaattgactggttagagatttatgcaggggaaaaagctaaccgactttacggtgaaaacacatggctacccgaagaaacattagcatcaattaaacagtatcatattgcgatcaaaggtccattaatgacccctgtcggcaaggggattcgttctttaaacgtagcaatgcgtcaagagttagatctctataattgcttgcgtccaatccgttactaccaaggtacgccaagtcctgtgaaatatccagaattagtggatatagtgatctttcgtgaaaattcagaggatatttatgctggggtagaatgggcggcaggttcctatgaagctgaaaaagtaatcgcttttttacggcaggaaatgggcgtgaaaaaaattcgctttacggaagaatgtggcattggtattaagcccgtttcacaagaagggactcagcgtttagtgcgggctgcattacagtacgcgattgataatgatcgtaaatcactcactttagtgcataaaggcaacatcatgaaatttaccgagggggcatttaaagagtggggataccaagttgccaaagactttggtgcagagccaatagataatggctcttggcatcgtttaaaaaatccaaatacaggacgagagatcatcatcaaagattgcattgctgatgcttttttacaagaaattttattacatccaagtgattacgatgtgattgcaacgcttaatcttaatggtgactacatatccgatgcacttgcggcacaagttggcggtattggtattgcacctggtgcaaacataggggaagaggcggctatttttgaagcaacgcatggtacagcgcctaaaatcgcaggtcaaaacaaagcaaattag

SEQ ID NO: 28160 - protein, 351 aa, Haemophilus parasuis
MLSQLTTPKGQAIQLNHDGSLSVPNYPIIPFIEGDGIGVDVTPAMRFVIDAAVEKAYQGQRKIDWLEIYAGEKANRLYGENTWLPEETLASIKQYHIAIKGPLMTPVGKGIRSLNVAMRQELDLYNCLRPIRYYQGTPSPVKYPELVDIVIFRENSEDIYAGVEWAAGSYEAEKVIAFLRQEMGVKKIRFTEECGIGIKPVSQEGTQRLVRAALQYAIDNDRKSLTLVHKGNIMKFTEGAFKEWGYQVAKDFGAEPIDNGSWHRLKNPNTGREIIIKDCIADAFLQEILLHPSDYDVIATLNLNGDYISDALAAQVGGIGIAPGANIGEEAAIFEATHGTAPKIAGQNKAN

SEQ ID NO: 28161 - DNA, 1278 bp, Leishmania major
  CDS (1)..(1278)
atggcggaatccatctctttcgcgaagggggcgctggtggtgccaagttgccccattatcccctacattgagggggacggcattggcaaggagatcacggaggtggcgcaccgcgtctttgatgcggcggtggcaaaggagtacggcaccacccggaagatttcgtggctagaggtgctcgcgggggagaaagcgttcgagcagaagggcagctggctgccggaggagaccatcgaggcatttgacaagcaccgcattggcatgaagggcccactgacaaccccggttggtgaggggatccgctcgctcaacgtggtgctgcgtcaccggctggacttgttcgtctgccagcgccccgtacgatggttcaccggcgtcggatcgccgatccgacacccggagtgggtggacatggttgtgtttcgcgagaacacggaggacatatactctggcattgagtggggccagggcacccctgaggctgccaaatttgcagactttctgacgaaggagatgggtgtgacgacggtgcgcttccctgagacgagcgcgtacggcgtgaagccggtttcgctggagggaagcgagcggctggtgcgtgcggcggtgcagtacgctatcgatcaccatcttccgtctgttacgctggtgcacaaaggcaacatcatgaagttcacagagggttgcttcaagaagtggggctacgccttggccgagcgtgagttccccgatgccgccttcaccatgacgcagtacgacgccatcaaggagaaaggcggcaaggaggcggctgagacggcgctgcgcgaggcgatggacagcggcaaagtcgttatcaaggattgcatctgtgacgcctttctgcaaaacacgattctccgcccattggactatagcgtgattgccaccatgaacctgaacggcgattacgtgtctgatcagctggccgcgcttgtcggtggcatcggcatcgcgccaggcgcgaacatcaactatgtgaccggccacgctattttcgaggcgacgcatgggacggcgccggatatcgctgggcaaggtaaagcgaacccatcctcgctcatcctatctggggctatgatgtttgactacatgggctggtccgaggtgtcggcgcgcatcatcaacgcgcttgagatggtctttcaggcaaacatggcaaccgtcgatcttgcgcggcagatgaccggtgccagggcactctcgacagcagaattcggggaggcgatcatcaagaagatcaacggcgacgaggcgtag

SEQ ID NO: 28162 - protein, 425 aa, Leishmania major
MAESISFAKGALVVPSCPIIPYIEGDGIGKEITEVAHRVFDAAVAKEYGTTRKISWLEVLAGEKAFEQKGSWLPEETIEAFDKHRIGMKGPLTTPVGEGIRSLNVVLRHRLDLFVCQRPVRWFTGVGSPIRHPEWVDMVVFRENTEDIYSGIEWGQGTPEAAKFADFLTKEMGVTTVRFPETSAYGVKPVSLEGSERLVRAAVQYAIDHHLPSVTLVHKGNIMKFTEGCFKKWGYALAEREFPDAAFTMTQYDAIKEKGGKEAAETALREAMDSGKVVIKDCICDAFLQNTILRPLDYSVIATMNLNGDYVSDQLAALVGGIGIAPGANINYVTGHAIFEATHGTAPDIAGQGKANPSSLILSGAMMFDYMGWSEVSARIINALEMVFQANMATVDLARQMTGARALSTAEFGEAIIKKINGDEA

SEQ ID NO: 28163 - DNA, 1101 bp, Homo sapiens
  CDS (1)..(1101)
atggctgggcccgcgtggatctctaaggtctctcggctgctgggggcattccacaacccaaaacaggtgaccagaggttttactggtggtgttcagacagtaactttaattccaggagatggtattggcccagaaatttcagctgcagttatgaagatttttgatgctgccaaagcacctattcagtgggaggagcggaacgtcactgccattcaaggacctggaggaaagtggatgatcccttcagaggctaaagagtccatggataagaacaagatgggcttgaaaggccctttgaagaccccaatagcagccggtcacccatctatgaatttactgctgcgcaaaacatttgacctttacgcgaatgtccgaccatgtgtctctatcgaaggctataaaaccccttacaccgatgtaaatattgtgaccattcgagagaacacagaaggagaatacagtggaattgagcatgtgattgttgatggagtcgtgcagagtatcaagctcatcaccgagggggtgagcaagcgcattgctgagtttgcctttgagtatgcccggaacaaccaccggagcaacgtcacggcggtgcacaaagccaacatcatgcggatgtcagatgggctttttctacaaaaatgcagggaagttgcagaaagctgtaaagatattaaatttaatgagatgtaccttgatacagtatgtttgaatatggtacaagatccttcccaatttgatgttcttgttatgccaaatttgtatggagacatccttagtgacttgtgtgcaggattgatcggaggtctcggtgtgacaccaagtggcaacattggagccaatggggttgcaatttttgagtcggttcatgggacggctccagacattgcaggcaaggacatggcgaatcccacagccctcctgctcagtgccgtgatgatgctgcgccacatgggactttttgaccatgctgcaagaattgaggctgcgtgttttgctacaattaaggacggaaagagcttgacaaaagatttgggaggcaatgcaaaatgctcagacttcacagaggaaatctgtcgccgagtaaaagatttagattaa

SEQ ID NO: 28164 - protein, 366 aa, Homo sapiens
MAGPAWISKVSRLLGAFHNPKQVTRGFTGGVQTVTLIPGDGIGPEISAAVMKIFDAAKAPIQWEERNVTAIQGPGGKWMIPSEAKESMDKNKMGLKGPLKTPIAAGHPSMNLLLRKTFDLYANVRPCVSIEGYKTPYTDVNIVTIRENTEGEYSGIEHVIVDGVVQSIKLITEGVSKRIAEFAFEYARNNHRSNVTAVHKANIMRMSDGLFLQKCREVAESCKDIKFNEMYLDTVCLNMVQDPSQFDVLVMPNLYGDILSDLCAGLIGGLGVTPSGNIGANGVAIFESVHGTAPDIAGKDMANPTALLLSAVMMLRHMGLFDHAARIEAACFATIKDGKSLTKDLGGNAKCSDFTEEICRRVKDLD

SEQ ID NO: 28165 - DNA, 1113 bp, Gallus gallus
  CDS (1)..(1113)
atggctgcagccgcgtggatgcccgcggtttcccgactgctcggtgctttcaaaaaccaaaaacaggtgaccagaagttttagtagtgctgtacaaacggtgactttaatcccaggagatggcataggacctgagatttctgctgctgtcatgaagatctttgatgctgccaaagttcctattcagtgggaagaaaggaatgtcacagcaatccaaggaccaggaggaaagtggatgatacctccagatgccaaagaatccatggataaaaacaaaatgggattaaaagggcccttaaaaaccccaatcgctgcagggcacccctcgatgaatctgctgctgcgtaaaacctttgacctctatgcaaacgtccgtccctgcgtctcaattgaggggtacaaaaccccttacacagacgtaaatatcgtcacaatacgagagaacacagaaggcgaatacagtgggattgagcatgtgattgttgaaggcgttgtgcaaagcatcaagctaatcacagaggaagctagcaagcgcattgcagagtttgcttttgagtatgctagaaataaccagagaagccatgttactgctgtgcacaaggcaaatattatgagaatgtctgatgggcttttcttgagaaaatgcagggaagcagcagaaaactgtaaagacattaaatttaatgaaatgtatctggatactgtgtgtctgaatatggttcaggatccttcacaatttgatgtgcttgttatgcctaacttgtatggtgacatcctcagtgacttgtgtgctggattgattggaggtcttggagtaacaccaagtggaaatattggtgctaacggagttgccatttttgaatcggttcatggaacagcacctgatattgcaggaaaagacttggcaaatccaactgctcttctcctgagcgctgtaatgatgctgcgtcatatgggactacacaagcatgccacaaaaatcgagacagcttgctttgatacaattaaagatggaaaggccttgacaaaagacttgggtggcaatgccaagtgttcagagttcacagaagagatctgcagcagagtacgcggacacagactaaacttcatttga

SEQ ID NO: 28166 - protein, 370 aa, Gallus gallus
MAAAAWMPAVSRLLGAFKNQKQVTRSFSSAVQTVTLIPGDGIGPEISAAVMKIFDAAKVPIQWEERNVTAIQGPGGKWMIPPDAKESMDKNKMGLKGPLKTPIAAGHPSMNLLLRKTFDLYANVRPCVSIEGYKTPYTDVNIVTIRENTEGEYSGIEHVIVEGVVQSIKLITEEASKRIAEFAFEYARNNQRSHVTAVHKANIMRMSDGLFLRKCREAAENCKDIKFNEMYLDTVCLNMVQDPSQFDVLVMPNLYGDILSDLCAGLIGGLGVTPSGNIGANGVAIFESVHGTAPDIAGKDLANPTALLLSAVMMLRHMGLHKHATKIETACFDTIKDGKALTKDLGGNAKCSEFTEEICSRVRGHRLNFI

SEQ ID NO: 28167 - DNA, 1107 bp, Xenopus laevis
  CDS (1)..(1107)
atgaacatggctggcagcgcctggaggtcactgatttctcgtgtggcgggggcaatcactgcaccagaatatggcgccaggcggctttcaagtcatgtgcagactgtcactctcataccaggggatggaattggcccagagatttcagcagctgtcatgaagatttttgagactgccaaagctcctgtacagtgggaagagaggaatgttacagcaattaaaggacctggtggaaagtggatgattcccccagaagccaaagaatccatgcataagaacaaaatgggcttaaaaggacctttaaagacacccatagctgctggacatccatccatgaacttgttgctccgcaaaacatttgatctgtatgcaaatgtgcgtccatgtgtttccattgagggatacaggaccccttacacagatgtagacctggtcacaattcgtgagaacacagagggagaatatagtggaattgagcatgtgattgtggatggtgttgtacaaagtattaagcttattacagaagaagcaagccatcgcattgcacagtttgcctttgagtatgcaaggaacaaccagagaagcacggtgactgcagtgcacaaagcaaatatcatgagaatgtctgatgggctattcctgaaaaaatgtcgagaagttgcagaaaactttaaagacattaagtttaatgaaatgtatctggatacagtgtgtcttaatatggtgcaggatcctatccagtttgatgtgcttgtcatgccaaacctctacggtgacatcttgagtgatctttgcgcaggtctaattggaggcctgggagtgacacctagtggaaatatcggtgctaatggggtagcaatctttgaatcggttcatggcacagccccagatattgctggaaaagactttgccaaccccactgctcttcttctaagtgcagtcatgatgctgcggcacatgggtctccacgagtatggacgcaaaatagaaagtgcctgctttgagaccataaaatctggcaaggttctgactaaagacttgggtggtaactccaagtgctctgaatttaccaatgaaatctgccgcagaatacaggacagtgattag

SEQ ID NO: 28168 - protein, 368 aa, Xenopus laevis
MNMAGSAWRSLISRVAGAITAPEYGARRLSSHVQTVTLIPGDGIGPEISAAVMKIFETAKAPVQWEERNVTAIKGPGGKWMIPPEAKESMHKNKMGLKGPLKTPIAAGHPSMNLLLRKTFDLYANVRPCVSIEGYRTPYTDVDLVTIRENTEGEYSGIEHVIVDGVVQSIKLITEEASHRIAQFAFEYARNNQRSTVTAVHKANIMRMSDGLFLKKCREVAENFKDIKFNEMYLDTVCLNMVQDPIQFDVLVMPNLYGDILSDLCAGLIGGLGVTPSGNIGANGVAIFESVHGTAPDIAGKDFANPTALLLSAVMMLRHMGLHEYGRKIESACFETIKSGKVLTKDLGGNSKCSEFTNEICRRIQDSD

SEQ ID NO: 28169 - DNA, 1023 bp, Thermoproteus tenax
  CDS (1)..(1023): transl_table=11
atgtttaaaactcacacattttctggcgttatgaagcttgccgtaatcccgggcgacggcatagggcccgaggtagtgtcggccacgctgaaggtgatagaggcggccgcgcggcgtttctcaataccgctcgatataaaggtcgtggaggcgggcgacgtagccgcgaggaagtatggcaaacctatgcccgacgaggcgtggaagatcgtggactccgccgacgccgtactgaagggccccgtgggcgagaccgcctacgatgtaacgtccgcgataaggatgaagtacgtgttgtacgccaacataaggcctgcaaagaacctccccggcgtgcctgctgtcaagcccatcgattgcgtcttcgtgagggagaacgtcgaagatgtctatgtgggcgccgaatatagagtgggcgatgtggcgattgctctgaaggtcataacgagggagggcacggcgagggtggctagagtggcgaggaggtacgccgaaatgaggaggcggaaagtgactatcgtcacaaagtccaatgtgttgagggtggtcgacgccttctttagggatgtggccaggggggagctcgatgggcttcaagtggaggaaatgtacgtagacgcagcagcgatggagcttgtaaggaatccctcgcgcttcgacgttgtgttgacgacgaaccaatacggggatatcctcaccgatctcgccgcacaagtggcaggtagcttggggctggcgccctcggcgaatattggagacaaaaaggccatgttcgagccgatccacggggcggccttcgacatagctggaaaggggatagccaatccgatagcgaccatattgtccgccgcaatgatgttcgaatggatgggccgccaagacgctgcaaacgctgttagaggcgccgttgaggaggccttgaggcgcggggtagctacgccggacataggagggcgggccaccactgaggaggtcggcagacagatcgccgctattgttgaatcttggccaacaacgagctga

SEQ ID NO: 28170 - protein, 340 aa, Thermoproteus tenax
MFKTHTFSGVMKLAVIPGDGIGPEVVSATLKVIEAAARRFSIPLDIKVVEAGDVAARKYGKPMPDEAWKIVDSADAVLKGPVGETAYDVTSAIRMKYVLYANIRPAKNLPGVPAVKPIDCVFVRENVEDVYVGAEYRVGDVAIALKVITREGTARVARVARRYAEMRRRKVTIVTKSNVLRVVDAFFRDVARGELDGLQVEEMYVDAAAMELVRNPSRFDVVLTTNQYGDILTDLAAQVAGSLGLAPSANIGDKKAMFEPIHGAAFDIAGKGIANPIATILSAAMMFEWMGRQDAANAVRGAVEEALRRGVATPDIGGRATTEEVGRQIAAIVESWPTTS

SEQ ID NO: 28171 - DNA, 1320 bp, Thermoproteus tenax
  CDS (1)..(1320): transl_table=11
atgtcagattacctagagaaaataaaggcgcagatacccaatatccagccgtttgccggcaaatacgctgagcccgtcgagggctcgtacataacttacacaggcccaggacagttgaaagtaccagataaggtagtcataggctacattgagggcgacggcacagggcctgaggtcgcctacgccgccattaaggtggccaacgcggccgtcgagagggcctacggcaagtcgcgcagagtgctctggtatgaggtgctcgtggggtctaaggctgagaaaatattgggcagtagactgcccgatcagagcgtggaagtgctaaagaagatcagagtgttcctcaaggcgcctttagagacgcctgtgggcggcggcttccgtagccttaacgtaacattgagacagatatttgacctctacgccaacatcaggcccgtcaagtacttccccggtctaccctcgcctctgaagaggccggagagcgtagacttagtcatattcagagagaacactgaggacgtctatatgggcattgaatggccttggaattcgccggaggccgccaaggtgagagagttcttgaggagagagctcaaagtcgatataagggacgacgccggcataggcataaagcccataagcaagttcgggacccagaggatagcgcggctcgcgttgaagttcgctgtggagaacaagagaagggtcgtcaccataatgcacaaaggaaatattcagaagtacacggagggcgcgtttagagattgggcctatgaggtggccaagaacgagttcagagaccacgtggttctggaggaggagttggcccagtatggaggcaaagtgccgccgggcaagatcttggtcaatgataggatagccgacaatatgttgcaacagctgttaacgcgcaccggcgagtacgacgtcatcctagcgcccaatctcaatggggactacgtgagcgatgaggcggcgggcctagtgggcggactcggcgtggcgcccggcatagatgtgggcgattgggggatgatggccgagccagtgcatggcactgcgcccaaatacacgggcaagaactacgtcaaccccactgcgactatcctggcgcttgagctgctcttcaggttcatcggctggagagaggccgctgacttgataacgaggggcgtcagcaaggcctactcagaggggtacttcaccggcgacttagccaggcagatgaccgatgaggaaaggaaagttgtaaaggaagtgcttggaactcaagaatttgctgagaaagtagctgagataatcaaaaccgagctataa

SEQ ID NO: 28172 - protein, 439 aa, Thermoproteus tenax
MSDYLEKIKAQIPNIQPFAGKYAEPVEGSYITYTGPGQLKVPDKVVIGYIEGDGTGPEVAYAAIKVANAAVERAYGKSRRVLWYEVLVGSKAEKILGSRLPDQSVEVLKKIRVFLKAPLETPVGGGFRSLNVTLRQIFDLYANIRPVKYFPGLPSPLKRPESVDLVIFRENTEDVYMGIEWPWNSPEAAKVREFLRRELKVDIRDDAGIGIKPISKFGTQRIARLALKFAVENKRRVVTIMHKGNIQKYTEGAFRDWAYEVAKNEFRDHVVLEEELAQYGGKVPPGKILVNDRIADNMLQQLLTRTGEYDVILAPNLNGDYVSDEAAGLVGGLGVAPGIDVGDWGMMAEPVHGTAPKYTGKNYVNPTATILALELLFRFIGWREAADLITRGVSKAYSEGYFTGDLARQMTDEERKVVKEVLGTQEFAEKVAEIIKTEL

SEQ ID NO: 28173 - DNA, 1266 bp, Hydrogenobacter thermophilus
  CDS (1)..(1266): transl_table=11
atgttaaaggtggaaagtgtttataggtgggaaggtagcctgaaggtgccacaagaaggaaagtttataaaactcaaggaggacaaaagtatagaagtgcctaactttcccatcatacctttcatagagggggatggaataggtgccgagattatgcctgccatgatacacatagtaaatactgccgtagagaaggcttacggaggttcaagaaacatcttttgggtagagcttctggccggggacaaggctgaagaaaagacaggcaagcgtatgccagaagagactatagagtttttaaaggaagcggttgttggcataaagggacctcttggcacacccgtaggtaagggaggtaaatctctcaatgctatcttgcgccagtctatggacttctattcagccataagacctgtctattggctgggtcagcctgcacccatacctaaccccgagagggtcaatgtggctgtctttagagaaaattctgacgatgtttatatgtccatagagtacatgcctaaggaggaaaggacgcagaaggttaggaagttctttattgaagagatgggagtgtccgaatatgcccttcccgaggattgtggcatcacggtaaagcctatgagtgagtttaagacaaaaaggcatgtaagaaaagctctccgttgggctttgcagaataacaaaaaggtggtagctgttgtaggcaaaggcaacataatgaaagctacggaaggtgcctttatgaactgggcttttgaggtggcaaaagagcctgagtttgaaggaaaagtgataacggagggagagccaaaagatggtcaggttttgatggttaaagttatcaccgatcagatgctcatgcagctggtgttaaagccggaggcttaccatgtgataataactcaaaacctgaatggagattacatatctgaccttgcctccgcattggtgggtggtccagggtttgtgcccagcggaaacataggtgacggatatgccctgtttgaaagcactcacggaaccgcctacgacatagcaggcaaaggtattgccaatcctctatcgctgacgctgtccggtgctatgatgcttgaatacttgggttggaaagaagcctccgagcttatatactccgcagtcaaaaggaccatagctgaaaggcttggaacgccggacatagctaacggctttagaaagcagggattggaagctaaagagcttaccaccttagagtttgctaaagctatagccgataggatttaa

SEQ ID NO: 28174 - protein, 421 aa, Hydrogenobacter thermophilus
MLKVESVYRWEGSLKVPQEGKFIKLKEDKSIEVPNFPIIPFIEGDGIGAEIMPAMIHIVNTAVEKAYGGSRNIFWVELLAGDKAEEKTGKRMPEETIEFLKEAVVGIKGPLGTPVGKGGKSLNAILRQSMDFYSAIRPVYWLGQPAPIPNPERVNVAVFRENSDDVYMSIEYMPKEERTQKVRKFFIEEMGVSEYALPEDCGITVKPMSEFKTKRHVRKALRWALQNNKKVVAVVGKGNIMKATEGAFMNWAFEVAKEPEFEGKVITEGEPKDGQVLMVKVITDQMLMQLVLKPEAYHVIITQNLNGDYISDLASALVGGPGFVPSGNIGDGYALFESTHGTAYDIAGKGIANPLSLTLSGAMMLEYLGWKEASELIYSAVKRTIAERLGTPDIANGFRKQGLEAKELTTLEFAKAIADRI

SEQ ID NO: 28175 - DNA, 975 bp, Halobacterium volcanii
  CDS (1)..(975): transl_table=11
atgactgaggaaatcgtcgtcatccccggcgacggcatcggcgcggaggtcatcccggcggcggttgacgtgctgaaggccgtcggcgacttcgagttcgtcgaggccgacgccggcgaccacgtcaaagaagagaccggcgaggcgctcccgcaggagacgtacgacctcgccgccgaggccgacgcgacgctgttcggcgcggccggcgagaccgcggcggacgtcatcctgccgcttcggaccgcggtggactccttcgtcaacgtccgcccggcgaaggcctaccccggcgtcgacgcgctccgcccggagacggacctcgtcttcctccgggagaacaccgaaggcgtctactcgggccacgaggaccgcctctccgaggacctctcgacgctcacgcgcgtcgtcaccacctcggcgtccgagcgactcgccgagtacgcctgcgactacgtcggcggcgagggcggcagcttccaggtcgcccacaaggcgaacgtgatgcgcgagacggacggtcgcttccgcgacgccgccgtcgccgtcgccgacgagcgcggcgtcgagaccgaggaggtcctgatggacgccttcgcgacgcgcgtctgtctcgaccccacgcagttcgacaccatcgtctgtccgaacctcgcgggcgacgtgctgtcggacctcgccgccggcctcgtcggcggcctcggactgctcccctcggcgaacatcggcccggacgccgcgctgttcgaaccggtccacggctccgcgcccgacatcgccggcgagggcatcgccaacccggccgcgacgattctgtccgcggcgatgctgctcgactacctcgaccacgaggccgaagccgaccgcgtccggtcggccgtcgaaggcgtcctcgccgacgggccgcgcacgcccgacctcggcggcgacgcctccacggaggacgtgaccgccgcgattctcgaccgactctga

SEQ ID NO: 28176 - protein, 324 aa, Halobacterium volcanii
MTEEIVVIPGDGIGAEVIPAAVDVLKAVGDFEFVEADAGDHVKEETGEALPQETYDLAAEADATLFGAAGETAADVILPLRTAVDSFVNVRPAKAYPGVDALRPETDLVFLRENTEGVYSGHEDRLSEDLSTLTRVVTTSASERLAEYACDYVGGEGGSFQVAHKANVMRETDGRFRDAAVAVADERGVETEEVLMDAFATRVCLDPTQFDTIVCPNLAGDVLSDLAAGLVGGLGLLPSANIGPDAALFEPVHGSAPDIAGEGIANPAATILSAAMLLDYLDHEAEADRVRSAVEGVLADGPRTPDLGGDASTEDVTAAILDRL

SEQ ID NO: 28177 - DNA, 1098 bp, Brachydanio rerio
  CDS (1)..(1098)
atggctaacgcatggaggtcaacggtttcctgtataatgggagctatcaagactcagaccccacagcccagagtcttctccagagggattcaaactgtaacattaattcctggagatggaattggtccagagatctccactgcagtaatgaagatatttgaagcagcaaagaccccaattcaatgggaagagagaaatgtgactgctatcaagggacctggaggcaggtggatgatacctcctgaggcaaaagaatcgatggacaaaagcaaaattgggttaaaaggacccctgaaaacaccaattgctgctggccacccatccatgaacctgctgcttaggaagacctttgacctgtatgccaatgtgcgtccttgcgtgtccattgagggctataaaacaccttacactgatgtggatctagtcaccatcagagaaaacacagaaggagagtacagtgggattgaacatgtgatcgtggatggagttgttcagagtattaaactaatcacagaggaggccagcagacgcattgctgagtatgcatttgagtatgccaggaataaccaaagaaccagtgtcactgctgttcacaaagccaacatcatgcggatgtcagatggtctgtttttgcggaagtgcagagaggttgcagaaaattttaaggatgtgaaattcactgagatgtatctggatacagtgtgtctcaatatggtgcaagatccctctcagtttgatgtcctcgtaatgcctaacctttatggtgacatcttgagtgatctgtgtgctggattgattggcggtcttggagtcactcccagtgggaacattggagccaatggcgttgccatatttgaatctgtacatggaacggcgcctgatattgcaggcaaagacatggcaaaccccactgcccttttgcttagtgccgtcatgatgctgcgccacatgggactgcatggtcatgcaaaaaagattgagactgcttgctttgacaccatacgagataaaaaggttttgaccaaagatcttggtggaaactcgaagtgctcagagtttacagctgacatctgccgaagagtgcaggacatggaataa

SEQ ID NO: 28178 - protein, 365 aa, Brachydanio rerio
MANAWRSTVSCIMGAIKTQTPQPRVFSRGIQTVTLIPGDGIGPEISTAVMKIFEAAKTPIQWEERNVTAIKGPGGRWMIPPEAKESMDKSKIGLKGPLKTPIAAGHPSMNLLLRKTFDLYANVRPCVSIEGYKTPYTDVDLVTIRENTEGEYSGIEHVIVDGVVQSIKLITEEASRRIAEYAFEYARNNQRTSVTAVHKANIMRMSDGLFLRKCREVAENFKDVKFTEMYLDTVCLNMVQDPSQFDVLVMPNLYGDILSDLCAGLIGGLGVTPSGNIGANGVAIFESVHGTAPDIAGKDMANPTALLLSAVMMLRHMGLHGHAKKIETACFDTIRDKKVLTKDLGGNSKCSEFTADICRRVQDME

SEQ ID NO: 28179 - DNA, 1176 bp, Streptococcus thermophilus
  CDS (1)..(1176): transl_table=11
atggcagaaagaatccttatgactaatggcaagctcaaagttactgataatccgattattcctttcattgaaggagatggtgttggacgtgatatttggaagaatgctcaagcaatttttgataaagcggtagaagcagcctatgaaggacagcgtcgtattgagtggcaagagtttttggcaggtaaaaaggcttttgataaaacaggtgagtggttgccgcaagaaactttagaggctattcgagaaagcctggtagctattaaggggccacttgaaacacctgtcggaggaggaattcgttctttaaatgtagctttacgtcaagaacttgatctctacgcttgtgttcgaccggttcggtattttgaaggagtagcaagtccacttaaggaaccagaaaaaacagacattactatttttcgtgagaatactgaggatatttatgcaggaattgaatgggaagcaggaacggtagatgtagagcgcgttattgctttttttcaaacagaaatgaatgtcgataaaattcgctttcccaagtcaagtagtattggaattaagcctatttcaatagaaggaagtaaacgattgattcgttcagctattgactatgctcttaagaacaatctaaagaaagtaacattggtgcataaagggaatattcaaaaattcacagaaggtggctttcgtaaatggggctatgaagtggctgaggaagaatataaggaagaaatgcttgctggccgtctagaagttaatgatataatcgctgataattttctacaacagattcttttgaatcccgaaaaatttgatgttgttgcattaaccaacttgaatggcgattatgcaagtgatgctctagctgcccaggttggtggtatcggaatctcccctggagctaatattaactatcaaacaggccatgctatctttgaagctactcatggaacggctccagatattgcggatcaagatagggctaatccttgctctattctcttatctggctgtatgcttttagaatatatcggttggtctgaagcagctgaactcattataagtgctattgaaaaaaactttaaatcagggatttttacagttgacctagcctttggaaaacgagcctattcaaccagtggtttcagcaatcaaattctctcaattatatga

SEQ ID NO: 28180 - protein, 391 aa, Streptococcus thermophilus
MAERILMTNGKLKVTDNPIIPFIEGDGVGRDIWKNAQAIFDKAVEAAYEGQRRIEWQEFLAGKKAFDKTGEWLPQETLEAIRESLVAIKGPLETPVGGGIRSLNVALRQELDLYACVRPVRYFEGVASPLKEPEKTDITIFRENTEDIYAGIEWEAGTVDVERVIAFFQTEMNVDKIRFPKSSSIGIKPISIEGSKRLIRSAIDYALKNNLKKVTLVHKGNIQKFTEGGFRKWGYEVAEEEYKEEMLAGRLEVNDIIADNFLQQILLNPEKFDVVALTNLNGDYASDALAAQVGGIGISPGANINYQTGHAIFEATHGTAPDIADQDRANPCSILLSGCMLLEYIGWSEAAELIISAIEKNFKSGIFTVDLAFGKRAYSTSGFSNQILSII

SEQ ID NO: 28181 - DNA, 1299 bp, Myxococcus xanthus
  misc_feature (794)..(794): n is a, c, g, or t
  misc_feature (968)..(968): n is a, c, g, or t
  CDS (1)..(1299): transl_table=11
atggcgcccccgtcatccggagaaaagatctccctgcagagcggcaagctgtccgtcccggacaacccgatcatccccttcatcgagggcgatggcaccggccgcgacatctggcgtgcgtcccaggcggtgttcgacgccgcggtggagaaggcctacaagggcaagaagaagatcgcctggtacgaagtcctggccggcgagaagtccttcaaggcggtcaacaactggctgcccgaggagacggtcgaggcgttccgcacctatctggtgggcatcaagggccccctgacgacgccggtgggcggcggcatccggtcgctgaacgtggccctgcggcagatgctggacctgtacgtctgcctgcgccccgtgcgctacttcaagggcgtgcccagcccggtgaagatgccggacaaggtcgacatgaccatcttccgtgagaacacggaagacatctacgcgggcatcgagttcgaggccggcacggccgccgcggagaagttcctgggcctgctgaagcaggagttcccgaaggagttcgggaagatccgcttcccgtccgacgtgggcctgggcatcaagccggtgtcccacgagggcagcgaccggctgatccgcgccgccatccagtacgccgtggaccacaagcgcaagagcgtcacgctggtccacaagggcaacatcatgaagttcaccgagggcgccttccgcaagtggggctacgagctggccgcccgggagttcggtgacaaggtctacacctgggaccagtgggaggccaccaaggccgncaagggcgaggacgccgccaacgcggagcagaaggccgcgctggccgccgggaagatcctgatcaaggactccatcgcggacatcaccctgcagcaggtcctcacccgtccggatgagttcgacgtcatcgccacgctgaacctcaacggtgactacctgtcggacgcgctggnggcgcaggtgggcggcatcggcatcgcgccgggcggcaacatcaactacgtcacgggccacgcggtgttcgaggccacgcacggcacggcgcccaagtacgccgaccaggacaaggtgaacccgggctcggtcatcctctccggtgagatgatgttccggcacctgggctggtacgaggcggccgacctgatgatccagggcatggaccgcgccatcgccagcaagacggtgacctacgacttcgcccgcctgatgaagcaggaagggcagagcggcgtctccgaggtcaagtgctccgagttcgggcaggccatcatcaagaacatgtag

SEQ ID NO: 28182 - protein, 432 aa, Myxococcus xanthus
  misc_feature (265)..(265): Xaa can be any naturally occuring amino acid
  misc_feature (323)..(323): Xaa can be any naturally occuring amino acid
MAPPSSGEKISLQSGKLSVPDNPIIPFIEGDGTGRDIWRASQAVFDAAVEKAYKGKKKIAWYEVLAGEKSFKAVNNWLPEETVEAFRTYLVGIKGPLTTPVGGGIRSLNVALRQMLDLYVCLRPVRYFKGVPSPVKMPDKVDMTIFRENTEDIYAGIEFEAGTAAAEKFLGLLKQEFPKEFGKIRFPSDVGLGIKPVSHEGSDRLIRAAIQYAVDHKRKSVTLVHKGNIMKFTEGAFRKWGYELAAREFGDKVYTWDQWEATKAXKGEDAANAEQKAALAAGKILIKDSIADITLQQVLTRPDEFDVIATLNLNGDYLSDALXAQVGGIGIAPGGNINYVTGHAVFEATHGTAPKYADQDKVNPGSVILSGEMMFRHLGWYEAADLMIQGMDRAIASKTVTYDFARLMKQEGQSGVSEVKCSEFGQAIIKNM

SEQ ID NO: 28183 - DNA, 993 bp, Brassica napus
  CDS (1)..(993)
atggctactctttttcccggtgatggaatcggccccgagatcgctgaatccgtcaaaaaggtgtttacaacggccggtgtgccgattgattgggaagaacacttcgttgggaccgagatagatccgagaacgcagagtttcttaacctgggagagtctcgaatccgtgcgcagaaacaaagtcggtttgaaagggccaatggcgactccgatcgggaaaggtcaccgttctttgaatttgactcttaggaaagagctgaatctatacgccaatgttaggccttgctacagtcttcctggctacaagactcgttacgatgatgttaatctcatcaccattagggagaacactgagggagaatacagtgggcttgaacatcaggttgttagaggtgtggtggagagtcttaagatcattacacgtcaggcgagtttgagagttgcggagtatgcttttcactatgctaagactcatgggagagagagggtttctgctattcacaaagctaacattatgcagaaaactgatggtcttttcctcaagtgttgtcgtgaggttgctgagaagtatcctgagatcacttacgaggaagtagtcattgacaactgctgtatgatgcttgtgaaaaacccagcactgtttgatgtgttggtgatgccaaacctgtacggtgacattatcagcgacttgtgtgctggattggttggaggactaggattgactccaagttgtaatataggagaagatggagtggcccttgctgaagcagttcacggttctgcacctgatatcgctggaaagaacttggcaaacccaacagcattgctactgagtggagtgatgatgttgcgtcacctgaagctgaacgaacaagcagaacagatccacagagcaatcatcaacaccatagcagagggaaaatacagaaccgcggatcttggaggaagttcgaccaccacggatttcacaaaagcaatctgtgatcatctctga

SEQ ID NO: 28184 - protein, 330 aa, Brassica napus
MATLFPGDGIGPEIAESVKKVFTTAGVPIDWEEHFVGTEIDPRTQSFLTWESLESVRRNKVGLKGPMATPIGKGHRSLNLTLRKELNLYANVRPCYSLPGYKTRYDDVNLITIRENTEGEYSGLEHQVVRGVVESLKIITRQASLRVAEYAFHYAKTHGRERVSAIHKANIMQKTDGLFLKCCREVAEKYPEITYEEVVIDNCCMMLVKNPALFDVLVMPNLYGDIISDLCAGLVGGLGLTPSCNIGEDGVALAEAVHGSAPDIAGKNLANPTALLLSGVMMLRHLKLNEQAEQIHRAIINTIAEGKYRTADLGGSSTTTDFTKAICDHL

SEQ ID NO: 28185 - DNA, 1104 bp, Brassica napus
  CDS (1)..(1104)
atgtctcgcagatcgctaactctcctcaagaacctcgccagaaactcaaacgcctcatgcatccaaacccgatccgtgacctacatgccccgacccggcgacggatccccgcgcgcagtcacgctcatccccggtgatgggatcggccctctcgtgaccaacgccgtggagcaggtgatggaagcgatgcacgcgccgatctacttcgagaagtacgacgtccagggggagatgagccgcgtgccggcggaggtgatggagtcgatacggaagaacaaggtgtgcttgaaaggcgggctcaagacccccgtgggcggcggcgtgagctcgctgaacgtgcagctgaggaaggagcttgacctctttgcctcgcttgtcaactgcttcaacttgcccgggttgcccaccaggcatgagaatgttgatatcgttgtgattagggagaatactgaaggcgagtatgctgggcttgagcatgaggttgttcctggtgttgttgagagtcttaaggtgatcacgaagttctgttcggagcgtatagcgaagtatgcttttgagtatgcttacctgaacaacaggaagaaagtgacggcggtgcacaaggctaacatcatgaagcttgctgatggtttgttcttggagtcttgtcgtgaggttgctaaaaagtatccagggatcacttacaatgagattattgtcgataactgctgcatgcaacttgtagccaagccagagcagtttgacgtcatggtaacacccaatctctatggtaatttagttgcaaacactgccgctggtattgctggaggcaccggagtcatgcctggaggaaacgttggggctgaccatgcggtgtttgagcaaggtgcatcagcaggaaatgtcgggaaagactcgatagtaaggaaaaacaaagcaaacccagtggcgttgcttctctcatcagccatgatgcttagacatcttcagtttccttcatttgctgaccggctcgaaacagcagtgaagaaagtgatctctgaaggaaagtgccggactaaagatcttggtggacaaagcactactcaagaggtcgttgacgcagtcattgcaaagttggagtga

SEQ ID NO: 28186 - protein, 367 aa, Brassica napus
MSRRSLTLLKNLARNSNASCIQTRSVTYMPRPGDGSPRAVTLIPGDGIGPLVTNAVEQVMEAMHAPIYFEKYDVQGEMSRVPAEVMESIRKNKVCLKGGLKTPVGGGVSSLNVQLRKELDLFASLVNCFNLPGLPTRHENVDIVVIRENTEGEYAGLEHEVVPGVVESLKVITKFCSERIAKYAFEYAYLNNRKKVTAVHKANIMKLADGLFLESCREVAKKYPGITYNEIIVDNCCMQLVAKPEQFDVMVTPNLYGNLVANTAAGIAGGTGVMPGGNVGADHAVFEQGASAGNVGKDSIVRKNKANPVALLLSSAMMLRHLQFPSFADRLETAVKKVISEGKCRTKDLGGQSTTQEVVDAVIAKLE

SEQ ID NO: 28187 - DNA, 1104 bp, Brassica napus
  CDS (1)..(1104)
atgtctcgcagatcgctaactctcctcaagaacctcgccagaaactcaaacgcctcatgcatccaaacccgatccgtgacctacatgccccgacccggcgacggatccccgcgcgcagtgaccctcatccccggcgatgggatcggccctctggtgacgaacgccgtggagcaggtgatggaagcgatgcacgcgccgatctacttcgagaagtacgacgtgcagggggagatgagccgcgtgccggcggaggtgatggagtcgatacggaagaacaaggtgtgcttgaaaggcgggctcaagacccccgtgggcggcggcgtgagctcgctcaacgtgcagctgaggaaggagcttgacctctttgcctcgcttgtcaactgcttcaacttgcccgggttgcccaccaggcatgagaatgttgatatcgttgtgattagggagaatactgaaggcgagtatgctgggcttgagcatgaggttgttcctggtgttgttgagagtcttaaggtgatcacgaagttctgttcggagcgtatagcgaagtatgcttttgagtatgcttacctgaacaacaggaagaaagtgacggcggtgcacaaggctaacatcatgaagcttgctgatggtttgttcttggagtcttgtcgtgaggttgctaaaaagtatccagggatcacttacaatgagattattgtcgataactgctgcatgcaacttgtagccaagccagagcagtttgacgtcatggtaacacccaatctctatggtaatttagttgcaaacactgccgctggtattgctggaggcaccggagtcatgcctggaggaaacgtgggggctgaccatgcggtgtttgagcaaggtgcatcagcaggaaatgtcgggaaagactcgatagtaagggaaaacaaagcaaacccagtggcgttgcttctctcatcagccatgatgcttagacatcttcagtttccttcatttgctgaccggctcgaaacagcagtgaagaaagtgatctctgaaggaaagtgccggactaaagatcttggtggacaaagcactactcaagaggtcgttgacgcagtcattgcaaagttggagtga

SEQ ID NO: 28188 - protein, 367 aa, Brassica napus
MSRRSLTLLKNLARNSNASCIQTRSVTYMPRPGDGSPRAVTLIPGDGIGPLVTNAVEQVMEAMHAPIYFEKYDVQGEMSRVPAEVMESIRKNKVCLKGGLKTPVGGGVSSLNVQLRKELDLFASLVNCFNLPGLPTRHENVDIVVIRENTEGEYAGLEHEVVPGVVESLKVITKFCSERIAKYAFEYAYLNNRKKVTAVHKANIMKLADGLFLESCREVAKKYPGITYNEIIVDNCCMQLVAKPEQFDVMVTPNLYGNLVANTAAGIAGGTGVMPGGNVGADHAVFEQGASAGNVGKDSIVRENKANPVALLLSSAMMLRHLQFPSFADRLETAVKKVISEGKCRTKDLGGQSTTQEVVDAVIAKLE

SEQ ID NO: 28189 - DNA, 1290 bp, Thiobacillus thiooxidans
  CDS (1)..(1290): transl_table=11
atgacgacccatattcagaaacccgcaacaggcagtcccttaacactgctgaatggggtgttgcaggtgcctgatcaacccattattcccttcattgaaggcgacggaattggttgtgatgtaaccccggccatgcgcagtgtggtggatgcggcagtggccaaagtctatggaggacagcggcagattgcctggatggagttgtttgcaggtcagaaggccgtgcaactgtatggtgaagggcagtatttgcccgatgagaccatggccgccattcgggaatataaagtcgccatcaaaggtcctctggaaactccggtgggcggggggattcgtagcctgaatgtggccatgcgtcaggatcttgatttgtatgtctgcctccggccggtgcgttattttgaggggacgcccagccccatgcggcatccggaaaaagtggatatggtcatttttcgcgaaaactccgaggacatttacgccggtattgaatggcctgcgggtagtcccgaagcagaaaaaatcatccgttttctgcgggaagaaatgggcgtcacaaaaatccgctttcccgacagctctgccattggcatcaaacccgtatcgacggaaggttcggaacgtctgatccggcgtaccattcaatacgctctggaacatggcaagccctctgtgagtctggtgcacaagggtaatatcatgaaattcaccgaaggcggtttccgtgactggggttatgccctggcggagcgggagttcgccggtcgggtgtttacctggaggcaaaaggccgccatcagcaaggcagagggtaaggcggcagggcagaaagccgagcagcaggccattgccgacgggaagctgatcatcaaggacgtgattgccgataattttctgcagcagattttgctgcgcccggaagattactctgtggttgccacgctgaacttgaatggtgactatgtttctgatgccctggccgcagaagtagggggtattggtatggcacccggtgccaacctttctgatacccacgcgatttttgaagctacccatggtacggcaccggatattgccgggcagggcaaagccaaccccagctcgctgattttgtcggctgtcatgatgctggagcatctgggctggggagaagctgctcaggcgattgtggcggccatgaatgccaccattgcggctggtgaagtcaccggtgatctggcggccttgcggggtgatgtgccggcactgagcaccacagagtttacggcagcactgatccggcgtttttaa

SEQ ID NO: 28190 - protein, 429 aa, Thiobacillus thiooxidans
MTTHIQKPATGSPLTLLNGVLQVPDQPIIPFIEGDGIGCDVTPAMRSVVDAAVAKVYGGQRQIAWMELFAGQKAVQLYGEGQYLPDETMAAIREYKVAIKGPLETPVGGGIRSLNVAMRQDLDLYVCLRPVRYFEGTPSPMRHPEKVDMVIFRENSEDIYAGIEWPAGSPEAEKIIRFLREEMGVTKIRFPDSSAIGIKPVSTEGSERLIRRTIQYALEHGKPSVSLVHKGNIMKFTEGGFRDWGYALAEREFAGRVFTWRQKAAISKAEGKAAGQKAEQQAIADGKLIIKDVIADNFLQQILLRPEDYSVVATLNLNGDYVSDALAAEVGGIGMAPGANLSDTHAIFEATHGTAPDIAGQGKANPSSLILSAVMMLEHLGWGEAAQAIVAAMNATIAAGEVTGDLAALRGDVPALSTTEFTAALIRRF

SEQ ID NO: 28191 - DNA, 1329 bp, Alcaligenes eutrophus
  CDS (1)..(1329): transl_table=11
atgccacagcgccatctccccgaatctcgccgaccggccatgaaccggcggcagtcacaaccgttccgtactggagacgtcatgtaccaacatatcaaggttccggccggcgaaaagatcacggtcaaccaggacttttcgctgaatgtcccggacaatccgatcattccttacatcgaaggcgacggtacgggcctcgatatcaccccggtgatgatcaaggtggtcgacgcggctgtggccaaggcctattgcggcaagcgcaagatcgcctggatggagatctacgccggcgagaagtccaccaaggtctacggcctggacgtgtggctgccggacgaaaccctggaggtgctcaaggattacgtggtctcgatcaagggtccgctgaccacgccggtgggcggcggcatccgctcgctgaacgtggcactgcgccagactggacctgacgtctgcctgcgcccggtgcgctacttcaagggcgtgccctcgcggtgcgtgagctcggaaaagaccgacatggtgatcttccgcgagaactcggaagacatctacgccggcatcgaatgggcggcggaaagcgagcatgcgaagaagctcatcaagttcctgcaggacgagatgggcgtgaagaagatccgcttcccgcgaacctcgggcatcggcatcaagccggtctcgcgcgagggcaccgagcgtctggtgcgcaaggcgatccagtacgccatcgacaacgacaagccgtcggtgacgctggtgcacaagggcaacatcatgaagttcaccgaaggtggcttccgtgactggggctacgagctggcgcataaggaattcggcgccgagctggtcgacggcgggccgtggtgcaagttcaagaacccgaagaccggcaaggacatcgtgatcaaggacgccattgccgacgccttcctgcagcagatcctgctgcgtccggccgaatactcggtgatcgccacgctgaacctgaacggcgactatgtctccgacgcgctggccgcacaggtcggcggcatcggcatcgccccgggcgccaatatgtctgactcggttgccatgttcgaggccacccacggcaccgcgccgaagtacgccggcaaggactacgtcaacccgggctcggaaatcctgtcggccgaaatgatgctgcgtcacatgggctggaccgaagccgcggacctgatcatctcgtcgatggagcagtcgatcctgtccaagaaggtgacgtatgacttcgcccgcctgctggaaggcgcgacgcaggtgtcgtgctcgggctttggccaggtgatgatcgacaatatgtaa

SEQ ID NO: 28192 - protein, 442 aa, Alcaligenes eutrophus
MPQRHLPESRRPAMNRRQSQPFRTGDVMYQHIKVPAGEKITVNQDFSLNVPDNPIIPYIEGDGTGLDITPVMIKVVDAAVAKAYCGKRKIAWMEIYAGEKSTKVYGLDVWLPDETLEVLKDYVVSIKGPLTTPVGGGIRSLNVALRQTGPDVCLRPVRYFKGVPSRCVSSEKTDMVIFRENSEDIYAGIEWAAESEHAKKLIKFLQDEMGVKKIRFPRTSGIGIKPVSREGTERLVRKAIQYAIDNDKPSVTLVHKGNIMKFTEGGFRDWGYELAHKEFGAELVDGGPWCKFKNPKTGKDIVIKDAIADAFLQQILLRPAEYSVIATLNLNGDYVSDALAAQVGGIGIAPGANMSDSVAMFEATHGTAPKYAGKDYVNPGSEILSAEMMLRHMGWTEAADLIISSMEQSILSKKVTYDFARLLEGATQVSCSGFGQVMIDNM

SEQ ID NO: 28193 - DNA, 1104 bp, Arabidopsis thaliana
  CDS (1)..(1104)
atgtctcgcagatcgctaactctcctcaagaatctagctagaaacgcgaatggatcaggtattcaaacccgatccgtgacttacatgcccagacccggtgacggagcaccacgcgcagtgacgctgatccccggagatggaatcggtcctctggtgacgaacgccgtggaacaggtgatggaagcgatgcacgctccgatcttcttcgagaagtacgatgttcacggagaaatgagccgtgtgccgccggaagtgatggagtcgataaggaagaataaggtttgtttgaaaggtgggcttaagactcctgttggtggtggtgttagttctcttaacgtccagcttaggaaagagcttgacctctttgcttctctggtcaactgttttaatttgcctggtttacctactcgccatgagaatgttgacatcgttgtcatcagagagaacactgaaggtgagtacgcggggcttgagcacgaggttgttcctggtgtcgttgagagtctgaaggtgatcacgaatttctgttcggagcgtattgcaaagtatgcttttgagtatgcctacctgaacaacaggaagaaagttacagcggtgcataaggctaacatcatgaaacttgcggatggtttgttcttggaatcttgtcgcgaggttgcgaaaaagtatcccagcatcacctacaatgaaatcattgttgataactgctgtatgcaacttgtagccaaaccagagcaattcgatgtcatggtaacgccgaatctctatgggaatttagttgcaaacactgctgctggtattgctggaggcacaggagtcatgcctggaggaaatgttggggctgaccatgcggtattcgagcaaggtgcatcagcaggaaatgttgggaaagacaagatagtattggaaaacaaagcaaacccagtggcattgcttctctcatcagcgatgatgcttagacaccttcagtttccttcatttgctgaccggctcgaaacagcagtgaagaaagtcatcgctgaaggaaagttccggacgaaagatcttggtggaacaagcacgactcaagaggtcgttgatgcggtcattgcaaaactagactga

SEQ ID NO: 28194 - protein, 367 aa, Arabidopsis thaliana
MSRRSLTLLKNLARNANGSGIQTRSVTYMPRPGDGAPRAVTLIPGDGIGPLVTNAVEQVMEAMHAPIFFEKYDVHGEMSRVPPEVMESIRKNKVCLKGGLKTPVGGGVSSLNVQLRKELDLFASLVNCFNLPGLPTRHENVDIVVIRENTEGEYAGLEHEVVPGVVESLKVITNFCSERIAKYAFEYAYLNNRKKVTAVHKANIMKLADGLFLESCREVAKKYPSITYNEIIVDNCCMQLVAKPEQFDVMVTPNLYGNLVANTAAGIAGGTGVMPGGNVGADHAVFEQGASAGNVGKDKIVLENKANPVALLLSSAMMLRHLQFPSFADRLETAVKKVIAEGKFRTKDLGGTSTTQEVVDAVIAKLD

SEQ ID NO: 28195 - DNA, 1125 bp, Arabidopsis thaliana
  CDS (1)..(1125)
atgaccattacagcatttctcgcgagacggcttatcggtaacggatcgagccagattctcgggacttcgagttctagctccggtccgttcatttccgtttctagggctttcttctcctcctccactccgatcaaagctactctctttcccggtgatgggatcggtcccgaaatcgctgaatctgtcaagcaggtgtttactgccgctgatgtggttattgattgggacgaacagtttgttggtactgaagtagatcctagaaccaatagtttcttgacatgggataatcttcaatctgtgcttaaaaacaaggttggtttgaaaggaccaatggctactccaattggaaagggtcaccgttccttgaaccttactcttaggaaagagctgaatttgtatgccaatgttaggccttgttacagtcttcctggttacaaaacccgttatgatgatgttgatctcattaccattcgtgagaacactgaaggagagtacagtgggcttgaacaccaggtcgtcaagggtgtagtggaaagtcttaaaattattacccgtaaggcgagtatgagagttgccgagtatgcctttctttatgccaagactcacggaaggaagaaagtttctgcaattcacaaagccaacattatgcagaaaactgatggtcttttcctgcagtgttgtgatgaagttgctgcgaagtatcctgagatatattacgagaaggttgttattgacaattgctgtatgatgcttgtgaaaaacccagcactttttgatgtcttggtgatgccaaatctctatggagatattatcagcgatttgtgtgctggacttgttgggggactaggactgactcctagtatgaatattggggaggatggtattgcccttgctgaagctgttcacggctctgcacctgatattgctggaatgaacctggcgaacccaacagctttgctactgagtggagtgatgatgttgcggcacctgaagctcaacaaacaagcagagcaaatccacagtgccatcatcaacacaatagccgagggaaagtatagaactgctgatctcggaggttcctcaactacaacagatttcacaaaagccatctgtgatcatctctaa

SEQ ID NO: 28196 - protein, 374 aa, Arabidopsis thaliana
MTITAFLARRLIGNGSSQILGTSSSSSGPFISVSRAFFSSSTPIKATLFPGDGIGPEIAESVKQVFTAADVVIDWDEQFVGTEVDPRTNSFLTWDNLQSVLKNKVGLKGPMATPIGKGHRSLNLTLRKELNLYANVRPCYSLPGYKTRYDDVDLITIRENTEGEYSGLEHQVVKGVVESLKIITRKASMRVAEYAFLYAKTHGRKKVSAIHKANIMQKTDGLFLQCCDEVAAKYPEIYYEKVVIDNCCMMLVKNPALFDVLVMPNLYGDIISDLCAGLVGGLGLTPSMNIGEDGIALAEAVHGSAPDIAGMNLANPTALLLSGVMMLRHLKLNKQAEQIHSAIINTIAEGKYRTADLGGSSTTTDFTKAICDHL

SEQ ID NO: 28197 - DNA, 1047 bp, Coccidioides immitis
  CDS (1)..(1047)
atggctgaaaaaatcgctaagtttcctggtacaaagggacctgatggcaaatataccgtgacattgatcgaaggagacggaattggacctgagatatcgcaatctgttaaggatatcttcagtgctgcaaaggtgccaattaaatgggaacccgtcgacgttactccaatcttaaaggacggcaaaactgccattcccgatgaagctatcaacagtgtgaaaaaaaactatgttgcattaaaagggccgcttgctaccccagtaggcaagggccacgtttccttgaacctaaccctccgaagaactttcaatctgttcgcaaatgttcgaccttgtcgttcaattgccggctacaaaaccccgtatgataacgtcaacgcggtccttatacgcgagaacacggaaggcgaatactctggcattgaacacgtcgtggtagatggtgttgttcaaagtatcaaacttattacacgggaagcttcagaacgcgtcctccgctttgctttccagtatgcgcaagaggtcggcaagcccaaagtccgcgctgttcacaaggccactatcatgaagatgtcagatgggcttttcttgcggaccgccaaagaaatttcaaaagaattcccggatattgaattcgacgcagagctccttgataacacatgcttgaggatggtcactgatccagccccgtacaatgacaaggttcttgtgatgcctaacctttatggagacatcctgtccgatatgtgtgcaggtctcatcggtggtcttggtttaaccccatccggtaacattggaaacgagtgctctatttttgaggctgtccatggatctgctcccgatattgctggcagggcattggccaaccctaccgctcttttgctgagcagtattatgatgctccgacacatgggattgaacgaccatgctaagaagatcgagactgctattttcgaaacccttgcagagggaaagaccctcactggtgaccttggtggtaaagctaagacacacgaatatgctggcgccatcattaagcgcctataa

SEQ ID NO: 28198 - protein, 348 aa, Coccidioides immitis
MAEKIAKFPGTKGPDGKYTVTLIEGDGIGPEISQSVKDIFSAAKVPIKWEPVDVTPILKDGKTAIPDEAINSVKKNYVALKGPLATPVGKGHVSLNLTLRRTFNLFANVRPCRSIAGYKTPYDNVNAVLIRENTEGEYSGIEHVVVDGVVQSIKLITREASERVLRFAFQYAQEVGKPKVRAVHKATIMKMSDGLFLRTAKEISKEFPDIEFDAELLDNTCLRMVTDPAPYNDKVLVMPNLYGDILSDMCAGLIGGLGLTPSGNIGNECSIFEAVHGSAPDIAGRALANPTALLLSSIMMLRHMGLNDHAKKIETAIFETLAEGKTLTGDLGGKAKTHEYAGAIIKRL

SEQ ID NO: 28199 - DNA, 1218 bp, Thermoplasma acidophilum
  CDS (1)..(1218): transl_table=11
atggcatatattcaagtgaaggacgatggaacccttcaggttcctgatagagtaactataggatatatagagggcgatgggatagggcctgacatatccaagacaacgataaacgtactcaacgctgctcttgaaatagcctatggtggaaagcgttcaatagagtggaagaagatactcgctggggatgaagcctacgataagacgggtgacaggctgccacagtcatcgctggacgaactgaagaagtgtgttgtggcgctgaaggggcccctcacaacgccgataggtgaaggcttcaggagccttaacgtcacgctgaggcagtacctcgatctttatgcgaacatcagaccggtaagatacttcccaggcgtgccttcccccgtggttcatccggaatatatgaacatggtcgtcttcagggagaacaccgaggatctgtacgccggaatagaatggaggtacgattcggacgggccaaagaaggtcagggaattcctggcgtcaacattcaacataaacctcacggccgatacaggcatagggataaagccaataagcaagttcaagtcaacgaggcttgtcaggaaggccatacagtacgccatagccaacaagaggaagagcgtcacgcttgtgcacaagggaaacataatgaagtacacggagggtgccttcaaggaatggggctatgaggttgcaaagacggagttcggcaactacacggtgacggaaacggaataccttcaggatcctgagaaatactcaaacaagatcgtcataaaggatcgcataacggacaacatgttccagcaggttctgaccaggactcaggagtacgatgtcattgctacgcctaacctgaacggcgattacctttcggacgctctggcggcacaggtaggcggcataggcctggcaccaggagcgaacataggtgaccactacgccgtgtttgaggcagtgcatggaaccgcaccgaagtacgccggcatggacgtcgcaaacccaacatcgctgatactctcgggagaaatgatgctgcagcacattggctggaacgaggccgctaacatactagatgaggccataatgcagacatacaaggatcagaagctgacgcaggacattgcgaggcttctcaacgtaaaagcacttaaatgctctgaattcggtgaggagataataaacaggatgaaaaagcctgttcactga

SEQ ID NO: 28200 - protein, 405 aa, Thermoplasma acidophilum
MAYIQVKDDGTLQVPDRVTIGYIEGDGIGPDISKTTINVLNAALEIAYGGKRSIEWKKILAGDEAYDKTGDRLPQSSLDELKKCVVALKGPLTTPIGEGFRSLNVTLRQYLDLYANIRPVRYFPGVPSPVVHPEYMNMVVFRENTEDLYAGIEWRYDSDGPKKVREFLASTFNINLTADTGIGIKPISKFKSTRLVRKAIQYAIANKRKSVTLVHKGNIMKYTEGAFKEWGYEVAKTEFGNYTVTETEYLQDPEKYSNKIVIKDRITDNMFQQVLTRTQEYDVIATPNLNGDYLSDALAAQVGGIGLAPGANIGDHYAVFEAVHGTAPKYAGMDVANPTSLILSGEMMLQHIGWNEAANILDEAIMQTYKDQKLTQDIARLLNVKALKCSEFGEEIINRMKKPVH

SEQ ID NO: 28201 - DNA, 1260 bp, Halobacterium volcanii
  CDS (1)..(1260): transl_table=11
atgagctacgaccagattgaggttccggacgacggcgagaaaatcacggtcgacgaggagacgggcgagctctccgtccccgacaacccgattattccgatcatccacggcgacggaatcggaacggacgtcggccccgccgcacagaaggtcctcgacgccgccgccgaggcgaccggccgctctgtctcttggatgcgcgtctacgccggttcgtccgcccgcgacaagtacgacgagaacctcccggaggacacggtaagcgccatccgcaaccaccgcgtcgcaatcaagggcccgctcacgacacccgtcggtgccggcttccgctcgctcaacgtcgcgctccgcaagaagctcgacctctacgcgaacgtccgcccgacctaccacctcgacggcgtcccgtcgcccgtgaagaacccctcggcgatggacatggtcacgttccgcgagaacaccgaagacgtgtacgccggcatcgagtgggaagccggcaccgacgaggtccagaaggtcaaggagttcgtcgaagaagagatgggcgcggacggcgtcatccacgacggtcccgtcggcatcggcatcaagcccatcaccgagttcgggacgaagcgcctcgtccgcgaggctatcgagtacgccctcgaaaacgaccgcccgtcggtcacgctcgtccacaagggcaacatcatgaagttcaccgagggtgccttccgtgactggggctacgaactcgcagaagaggagttcggcgacgtcaccatcaccgaagacgaactgtgggaagagtacgacggcaagcgtcccgaggacaaggtcgttgtcaaggaccgcatcgccgacaacatgctccagcagcttctcacccgcaccgccaactacgatgtcatcgccacgatgaacctcaacggcgactacatgtccgacgccgccggcgcgcagattggcggcctcggcatcgcccccggtgcgaacttcggtgagggcctctgtctcgcagagcccgtccacggctccgcacccaagtacgccggcaaggacaaggtcaacccgaccgcgatgattctctccggccgtctcatgttcgagtacatgggctggaaggacgccggtaagctcatccgcgacaccgtcgagaagaccatctcggacggcgacgtgacctacgacctcgaacgccagatcgagggcggcaacaagctcgccacgagcgagtacgccgacaaggtcgtcgagaacatcaaagagttagcttaa

SEQ ID NO: 28202 - protein, 419 aa, Halobacterium volcanii
MSYDQIEVPDDGEKITVDEETGELSVPDNPIIPIIHGDGIGTDVGPAAQKVLDAAAEATGRSVSWMRVYAGSSARDKYDENLPEDTVSAIRNHRVAIKGPLTTPVGAGFRSLNVALRKKLDLYANVRPTYHLDGVPSPVKNPSAMDMVTFRENTEDVYAGIEWEAGTDEVQKVKEFVEEEMGADGVIHDGPVGIGIKPITEFGTKRLVREAIEYALENDRPSVTLVHKGNIMKFTEGAFRDWGYELAEEEFGDVTITEDELWEEYDGKRPEDKVVVKDRIADNMLQQLLTRTANYDVIATMNLNGDYMSDAAGAQIGGLGIAPGANFGEGLCLAEPVHGSAPKYAGKDKVNPTAMILSGRLMFEYMGWKDAGKLIRDTVEKTISDGDVTYDLERQIEGGNKLATSEYADKVVENIKELA

SEQ ID NO: 28203 - DNA, 1182 bp, Escherichia coli
  CDS (1)..(1182): transl_table=11
atgaagatcaccctgcaaaacggcaaactcaacgttcctgaaaatccgattatcccttacattgaaggtgatggaatcggtgtagatgtaaccccagccatgctgaaagtggtcgacgctgcagtcgagaaagcctataaaggcgagcgtaaaatctcctggatggaaatttacaccggtgaaaaatccacacaggtttatggtcaggatgtctggctgcctgctgaaacccttgatctgattcgtgaatatcgcgttgccattaaaggtccgctgaccactcctgttggtggcggtattcgctctctgaacgttgccctgcgccaggaactggatctctacatctgcctgcgtccggtacgttactatcaaggcactccaagcccggttaaacaccctgaactgaccgatatggttatcttccgtgaaaactcggaagacatttatgcgggtatcgaatggaaagcagactctgccgacgccgagaaagtgattaaattcctgcgtgaagagatgggcgtgaagaaaattcgcttcccggaacattgcggtatcggtatcaagccgtgttctgaagaaggcaccaaacgtctggtccgtgccgcgattgaatacgcaattgccaacgaccgtgactctgtgaccctggtgcacaaaggcaacatcatgaagttcaccgaaggcgcgtttaaagactggggctaccagctggcgcgtgaagagtttggcggtgaactgatcgacggcggcccgtggctgaaagttaaaaacccgaacaccggcaaagagatcgtcattaaagacgtgattgctgatgcattcctgcaacagatcctgctgcgtccggctgaatatgatgttatcgcctgtatgaacctgaacggtgactacatttctgacgccctggcagcgcaggttggcggtatcggtatcgcccctggtgcaaacatcggtgacgaatgcgccctgtttgaagccacccacggtactgcgccgaaatacgccggtcaggacaaagtaaaccctggctctattattctctccgctgagatgatgttacgccatatgggttggactgaagccgctgacctgattgttaaaggtatggaaggtgcaatcaacgccaagaccgtaacctatgacttcgaacgtctgatggaaggcgctaagctgctgaaatag

SEQ ID NO: 28204 - protein, 393 aa, Escherichia coli
MKITLQNGKLNVPENPIIPYIEGDGIGVDVTPAMLKVVDAAVEKAYKGERKISWMEIYTGEKSTQVYGQDVWLPAETLDLIREYRVAIKGPLTTPVGGGIRSLNVALRQELDLYICLRPVRYYQGTPSPVKHPELTDMVIFRENSEDIYAGIEWKADSADAEKVIKFLREEMGVKKIRFPEHCGIGIKPCSEEGTKRLVRAAIEYAIANDRDSVTLVHKGNIMKFTEGAFKDWGYQLAREEFGGELIDGGPWLKVKNPNTGKEIVIKDVIADAFLQQILLRPAEYDVIACMNLNGDYISDALAAQVGGIGIAPGANIGDECALFEATHGTAPKYAGQDKVNPGSIILSAEMMLRHMGWTEAADLIVKGMEGAINAKTVTYDFERLMEGAKLLK

SEQ ID NO: 28205 - DNA, 1119 bp, Arabidopsis thaliana
  CDS (1)..(1119)
atggcagcaaatctagcgcgacggctgatcggaaaccgatcgactcagatccttggagccgtgaactctagctcaggtgcggctagttctgtcgctagggctttctgctcctccaccactccgatcaccgcaactctcttccctggcgatgggatcggtcccgagatcgccgaatctgtcaaaaaggtgtttacaacagctggtgtaccaattgagtgggaagaacactatgttgggactgagatagatccgagaacacagagtttcttgacatgggaaagtctcgaatctgtgcgtagaaacaaagttggtttgaaaggtccaatggctactccaattgggaaaggtcaccgttctttgaacctgactcttaggaaagagcttaatctatatgccaatgttagaccttgttacagtcttcctggttacaaaactcgttacgatgatgttgatctcattaccatcagagaaaacacggaaggagaatacagtggccttgaacatcaggttgttagaggtgtggtggaaagtcttaaaatcattacccgtcaggcgagtttgagagttgcagagtatgcttttctctatgccaagactcatggaagagagagagtttctgctatccacaaagccaacattatgcagaaaactgacggtctctttctcaagtgttgtcgtgaggttgctgagaagtatcctgagatcacttacgaggaggtcgttattgacaactgctgtatgatgcttgtgaaaaacccagcactttttgatgtcttggtgatgccaaacctgtacggtgacattattagcgatctgtgtgccggattggttggaggactaggattgactccaagttgtaatattggagaagatggtgtagcccttgctgaagcagttcacggttctgcacctgatatcgctggaaagaacttggcgaacccaaccgcgttgcttctgagtggagtgatgatgttgcgtcacctgaagttcaacgaacaagcagaacaaatccacagtgcaatcatcaacaccatagcagagggcaaatacagaaccgcggatcttggaggtagttcgaccaccacggaattcacaaaggcaatctgtgatcatctctga

SEQ ID NO: 28206 - protein, 372 aa, Arabidopsis thaliana
MAANLARRLIGNRSTQILGAVNSSSGAASSVARAFCSSTTPITATLFPGDGIGPEIAESVKKVFTTAGVPIEWEEHYVGTEIDPRTQSFLTWESLESVRRNKVGLKGPMATPIGKGHRSLNLTLRKELNLYANVRPCYSLPGYKTRYDDVDLITIRENTEGEYSGLEHQVVRGVVESLKIITRQASLRVAEYAFLYAKTHGRERVSAIHKANIMQKTDGLFLKCCREVAEKYPEITYEEVVIDNCCMMLVKNPALFDVLVMPNLYGDIISDLCAGLVGGLGLTPSCNIGEDGVALAEAVHGSAPDIAGKNLANPTALLLSGVMMLRHLKFNEQAEQIHSAIINTIAEGKYRTADLGGSSTTTEFTKAICDHL

SEQ ID NO: 28207 - DNA, 1284 bp, Coxiella burnetii
  CDS (1)..(1284): transl_table=11
atgacggagttaaccggagtatccatcgtgacttaccaacacatcaaagttcccagccaaggtgaaaaaatcaccgttaataaagccgttttagaagttcctgaccgacccattattccctttatcgaaggagatgggattggcattgatatcacgcccgtcatgaaaaacgtggtcgatgccgccgtggaaaaatcctacgctggaaagcgaaaaattgaatggatggagatctacgccggagaaaaggctacgaaagtgtatggcaaagacaattggctgcctgatgagacactcgaagccattaaggaataccaagtggccattaaaggtcccttaaccacgccggtggggggtggcatacgttcgctcaatgtcgcgctgcgccaacagttagacctgtatgtttgccttaggcccgtccgttattttacgggtgtgccaagcccggtcaaaacgcctgaaaaggtgaatatggtgattttccgcgaaaattccgaagatatttacgccggaattgaatggccggcgggaagcccggaagcggtgaaattaatcaacttccttcaaaacgaaatgggcgtaaagaaaatccgtttcccggaaacggcggggatagggattaaaccggtttctaaagaaggcacgagccgtttagtacgccgagcgattcaatatgccattgataatgaccgcgattccgtgacgctcgtccataaaggtaacatcatgaaattcacggagggggcttttaaagattggggctatgaagtcgctgtcaaagaatttggagcaaagcccttagatggcggaccctggcatgtctttgagaatccgaaaacaggccaaaagattacgattaaagacgttattgccgacgcctttttacaacaaattttattgcgtcccgccgagtacagcgtcatcgccaccttgaacctcaatggagattatatctccgacgcgttagcggccgaagtcggcggcattggcattgctccgggcgctaatttaagcgacaccgtcggtctttttgaagccactcatgggacagcgcctaaatatgcggggcaagataaagtcaatccaggctctctaattttatcagcagaaatgatgctccgttacctaggctggaaagaagccgccgaccttgtcgttcaaggtattgagggggcgattgaaagcaaaacagtaacttacgattttgcccgtttgatgaccggcgccaaagaagtaagtacctctcagttcggcaaagccataattaagcatattctgtag

SEQ ID NO: 28208 - protein, 427 aa, Coxiella burnetii
MTELTGVSIVTYQHIKVPSQGEKITVNKAVLEVPDRPIIPFIEGDGIGIDITPVMKNVVDAAVEKSYAGKRKIEWMEIYAGEKATKVYGKDNWLPDETLEAIKEYQVAIKGPLTTPVGGGIRSLNVALRQQLDLYVCLRPVRYFTGVPSPVKTPEKVNMVIFRENSEDIYAGIEWPAGSPEAVKLINFLQNEMGVKKIRFPETAGIGIKPVSKEGTSRLVRRAIQYAIDNDRDSVTLVHKGNIMKFTEGAFKDWGYEVAVKEFGAKPLDGGPWHVFENPKTGQKITIKDVIADAFLQQILLRPAEYSVIATLNLNGDYISDALAAEVGGIGIAPGANLSDTVGLFEATHGTAPKYAGQDKVNPGSLILSAEMMLRYLGWKEAADLVVQGIEGAIESKTVTYDFARLMTGAKEVSTSQFGKAIIKHIL

SEQ ID NO: 28209 - DNA, 1284 bp, Coxiella burnetii
  CDS (1)..(1284): transl_table=11
atgacggagttaaccggagtatccatcgtgacttaccaacacatcaaagttcccagccaaggtgaaaaaatcaccgttaataaagccgttttagaagttcctgaccgacccattattccctttatcgaaggagatgggattggcattgatatcacgcccgtcatgaaaaacgtggtcgatgccgccgcggaaaaatcctacgctggaaagcgaaaaattgaatggatggagatctacgccggagaaaaggctacgaaagtgtatggcaaagacaattggctgcctgatgagacactcgaagccattaaggaataccaagtggccattaaaggtcccttaaccacgccggtggggggtggcatacgttcgctcaatgtcgcgctgcgccaacagttagacctgtatgtttgccttaggcccgtccgttattttacgggtgtgccaagcccggtcaaaacgcctgaaaaggtgaatatggtgattttccgcgaaaattccgaagatatttacgccggaattgaatggccggcgggaagcccggaagcggtgaaattaatcaacttccttcaaaacgaaatgggcgtaaagaaaatccgtttcccggaaacggcggggatagggattaaaccggtttctaaagaaggcacgagccgtttagtacgccgagcgattcaatatgccattgataatgaccgcgattccgtgacgctcgtccataaaggtaacatcatgaaattcacggagggggcttttaaagattggggctatgaagtcgctgtcaaagaatttggagcaaagcccttagatggcggaccctggcatgtctttgagaatccgaaaacaggccaaaagattacgattaaagacgttattgccgacgcctttttacaacaaattttattgcgtcccgccgagtacagcgtcatcgccaccttgaacctcaatggagattatatctccgacgcgttagcggccgaagtcggcggcattggcattgctccgggcgctaatttaagcgacaccgtcggtctttttgaagccactcatgggacagcgcctaaatatgcggggcaagataaagtcaatccaggctctctaattttatcagcagaaatgatgctccgttacctaggctggaaagaagccgccgaccttgtcgttcaaggtattgagggggcgattgaaagcaaaacagtaacttacgattttgcccgtttgatgaccggcgccaaagaagtaagtacctctcagttcggcaaagccataattaagcatattctgtag

SEQ ID NO: 28210 - protein, 427 aa, Coxiella burnetii
MTELTGVSIVTYQHIKVPSQGEKITVNKAVLEVPDRPIIPFIEGDGIGIDITPVMKNVVDAAAEKSYAGKRKIEWMEIYAGEKATKVYGKDNWLPDETLEAIKEYQVAIKGPLTTPVGGGIRSLNVALRQQLDLYVCLRPVRYFTGVPSPVKTPEKVNMVIFRENSEDIYAGIEWPAGSPEAVKLINFLQNEMGVKKIRFPETAGIGIKPVSKEGTSRLVRRAIQYAIDNDRDSVTLVHKGNIMKFTEGAFKDWGYEVAVKEFGAKPLDGGPWHVFENPKTGQKITIKDVIADAFLQQILLRPAEYSVIATLNLNGDYISDALAAEVGGIGIAPGANLSDTVGLFEATHGTAPKYAGQDKVNPGSLILSAEMMLRYLGWKEAADLVVQGIEGAIESKTVTYDFARLMTGAKEVSTSQFGKAIIKHIL

SEQ ID NO: 28211 - DNA, 1284 bp, Coxiella burnetii
  CDS (1)..(1284): transl_table=11
atgacggagttaaccggagtatccatcgtgacttaccaacacatcaaagttcccagccaaggtgaaaaaatcaccgttaataaagccgttttagaagttcctgaccgacccattattccctttatcgaaggagatgggattggcattgatatcgcgcccgtcatgaaaaacgtggtcgatgccgccgtggaaaaatcctacgctggaaagcgaaaaattgaatggatggagatctacgccggagaaaaggctacgaaagtgtatggcaaagacaattggctgcctgatgagacactcgaagccattaaaggataccaagtggccattaaaggtcccttaaccacgccggtggggggtggcatacgttcgctcaatgtcgcgctgcgccaacagttagacctgtatgtttgccttaggcccgtccgttattttacgggtgtgccaagcccggtcaaaacgcctgaaaaggtgaatatggtgattttccgcgaaaattctgaagatatttacgccggaattgaatggccggccggaagcccggaagcggtgaaattaatcaacttccttcaaaacgaaatgggcgtaaagaaaatccgtttcccggaaacggcggggatagggattaaaccggtttctaaagaaggcacgagccgtttagtacgccgagcgattcaatatgccattgataatgaccgcgattccgtgacgctcgtccataaaggtaacatcatgaaattcacggagggggcttttaaagattggggctatgaagtcgctgtcaaagaatttggagcaaagcccttagatggcggaccctggcatgtctttgagaatccgaaaacaggccaaaagattacgattaaagacgttattgccgacgcctttttacaacaaattttattgcgtcccgccgagtacagcgtcatcgccaccttgaacctcaatggagattatatctccgacgcgttagcggccgaagtcggcggcattggcattgctccgggcgctaatttaagcgacaccgtcggtctttttgaagccactcatgggacagcgcctaaatatgcggggcaagataaagtcaatccaggctctctaattttatcagcagaaatgatgctccgttacctaggctggaaagaagccgccgaccttgtcgttcaaggtattgagggggcgattgaaagtaaaacagtaacttacgattttgcccgtttgatgaccggcgccaaagaagtaagtacctctcagttcggcaaagccataattaagcatattctgtag

SEQ ID NO: 28212 - protein, 427 aa, Coxiella burnetii
MTELTGVSIVTYQHIKVPSQGEKITVNKAVLEVPDRPIIPFIEGDGIGIDIAPVMKNVVDAAVEKSYAGKRKIEWMEIYAGEKATKVYGKDNWLPDETLEAIKGYQVAIKGPLTTPVGGGIRSLNVALRQQLDLYVCLRPVRYFTGVPSPVKTPEKVNMVIFRENSEDIYAGIEWPAGSPEAVKLINFLQNEMGVKKIRFPETAGIGIKPVSKEGTSRLVRRAIQYAIDNDRDSVTLVHKGNIMKFTEGAFKDWGYEVAVKEFGAKPLDGGPWHVFENPKTGQKITIKDVIADAFLQQILLRPAEYSVIATLNLNGDYISDALAAEVGGIGIAPGANLSDTVGLFEATHGTAPKYAGQDKVNPGSLILSAEMMLRYLGWKEAADLVVQGIEGAIESKTVTYDFARLMTGAKEVSTSQFGKAIIKHIL

SEQ ID NO: 28213 - DNA, 1284 bp, Coxiella burnetii
  CDS (1)..(1284): transl_table=11
atgacggagttaaccggagtatccatcgtgacttaccaacacatcaaagttcccagccaaggtgaaaaaatcaccgttaataaagccgttttagtagttcctgaccgacccattattccctttatcgaaggagatgggattggcattgatatcgcgcccgtcatgaaaaacgtggtcgatgccgccgtggaaaaatcctacgctggaaagcgaaaaattgaatggatggagatctacgccggagaaaaggctacgaaagtgtatggcaaagacaattggctgcctgatgagacactcgaagccattaaagaataccaagtggccattaaaggtcccttaaccacgccggtggggggtggcatacgttcgctcaatgtcgcgctgcgccaacagttagacctgtatgtttgccttaggcccgtccgttattttacgggtgtgccaagcccggtcaaaacgcctgaaaaggtgaatatggtgattttccgcgaaaattctgaagatatttacgccggaattgaatggccggcgggaagcccggaagcggtgaaattaatcaacttccttcaaaacgaaatgggcgtaaagaaaatccgtttcccggaaacggcggggatagggattaaaccggtttctaaagaaggcacgagccgtttagtacgccgagcgattcaatatgccattgataatgaccgcgattccgtgacgctcgtccataaaggtaacatcatgaaattcacggagggggcttttaaagattggggctatgaagtcgctgtcaaagaatttggagcaaagcccttagatggcggaccctggcatgtctttgagaatccgaaaacaggccaaaagattacgattaaagacgttattgccgacgcctttttacaacaaattttattgcgtcccgccgagtacagcgtcatcgccaccttgaacctcaatggagattatatctccgacgcgttagcggccgaagtcggcggcattggcattgctccgggcgctaatttaagcgacaccgtcggtctttttgaagccactcatgggacagcgcctaaatatgcggggcaagataaagtcaatccaggctctctaattttatcagcagaaatgatgctccgttacctaggctggaaagaagccgccgaccttgtcgttcaaggtattgagggggcgattgaaagtaaaacagtaacttacgattttgcccgtttgatgaccggcgccaaagaagtaagtacctctcagttcggcaaagccataattaagcatattctgtag

SEQ ID NO: 28214 - protein, 427 aa, Coxiella burnetii
MTELTGVSIVTYQHIKVPSQGEKITVNKAVLVVPDRPIIPFIEGDGIGIDIAPVMKNVVDAAVEKSYAGKRKIEWMEIYAGEKATKVYGKDNWLPDETLEAIKEYQVAIKGPLTTPVGGGIRSLNVALRQQLDLYVCLRPVRYFTGVPSPVKTPEKVNMVIFRENSEDIYAGIEWPAGSPEAVKLINFLQNEMGVKKIRFPETAGIGIKPVSKEGTSRLVRRAIQYAIDNDRDSVTLVHKGNIMKFTEGAFKDWGYEVAVKEFGAKPLDGGPWHVFENPKTGQKITIKDVIADAFLQQILLRPAEYSVIATLNLNGDYISDALAAEVGGIGIAPGANLSDTVGLFEATHGTAPKYAGQDKVNPGSLILSAEMMLRYLGWKEAADLVVQGIEGAIESKTVTYDFARLMTGAKEVSTSQFGKAIIKHIL

SEQ ID NO: 28215 - DNA, 1074 bp, Nicotiana tabacum
  CDS (1)..(1074)
atggctcgaaaatccttcccaatcctaaaacaactcatccaacaatccaccaatcgttttttcaccactaacgcgtcgccacgagccgtgacgctgatcccaggcgacggcgttggtccactggtaaccgattcagtggaacaagtgatgcaggcgatgaaagcacccgtttacttcgagcgatacgaagtacgcggtgatatgaaatgtataccggaggaagtaattgattcaattaagaagaataaggtttgtttaaaaggagggttaaagacaccggtcggcggaggtgttagttcgctgaatgtgcttatgaggaaagaacttgatctgtccgcttctattgtgcattgtttcactttcccagggttgcctacgcggcatgaggatgtggatattgttgtgattagggagaatactgagggagagtatgcaggtcttgagcatgaggttgttcctggcgtcgttgagagccttaaggtgataacaaaatattgttcagagcgtatagcaaaatttgcgtttgagtatgctgatgtaaacaaaagaaagaaggtcacagctgtgcacaaagccaacattatgaaacttgcagatggtcttttcctaaaatcttgtagggaagttgcaagtaaatatccagaaatacagtatgaggagattattgtggacaactgctgcatgcaacttgtctcaaggccagaacaatttgatgtcatggtgactcccaacctctacggaaatctaattgcaaatacagctgctggtttagctggtggcacaggagtcttgccaggaggaaatgttggactgatcaagccagtttttgagcaaggtgcttcacctgggaatgttggccatgaaaaaattttgaagcttaagaaagcaaatccagtggcacttcttctgtcgtcagcaatgatgcttcgacatcttgaatttccatcatttgctgatcgtttagaaacagctgtaaaacgtgtaatagcagagggaaaagtcaggacaaaggaccttggaggggatagcactacccaagaagttgttgatgcaattatagctgctctagactaa

SEQ ID NO: 28216 - protein, 357 aa, Nicotiana tabacum
MARKSFPILKQLIQQSTNRFFTTNASPRAVTLIPGDGVGPLVTDSVEQVMQAMKAPVYFERYEVRGDMKCIPEEVIDSIKKNKVCLKGGLKTPVGGGVSSLNVLMRKELDLSASIVHCFTFPGLPTRHEDVDIVVIRENTEGEYAGLEHEVVPGVVESLKVITKYCSERIAKFAFEYADVNKRKKVTAVHKANIMKLADGLFLKSCREVASKYPEIQYEEIIVDNCCMQLVSRPEQFDVMVTPNLYGNLIANTAAGLAGGTGVLPGGNVGLIKPVFEQGASPGNVGHEKILKLKKANPVALLLSSAMMLRHLEFPSFADRLETAVKRVIAEGKVRTKDLGGDSTTQEVVDAIIAALD

SEQ ID NO: 28217 - DNA, 1116 bp, Nicotiana tabacum
  CDS (1)..(1116)
atggccaaacgaaccctacctcttctcaggcacctcctcagctccccatcccatggcttttcccattcattaacgtcaacccgatccgtcacctacatgccccgacccggtgatggcacaccacgcgccgtcactctcatccctggtgacgggatcgggccgctcgtcaccggcgctgtcgaacaagtcatggacgcgatgcacgctcctgtgtacttcgagcgatacgacgttcacggcgacatgaagagtgtgcctccagaggttatggaatcgatccggaagaataaggtctgtttaaaaggaggattgaagactcctgtgggtggtggtgttagttcccttaacgttcagcttaggaaggagcttgatctatatgcttcccttgttcactgcttcaacttgcaaggattacctacgcgtcatgagaacgtggatattgttgtcatcagggaaaatactgagggtgaatattccggcttggaacatgaggttgttcctggtgtcgttgaaagccttaaggtgatgacaaagttttgctcggaacgaattgcaaaatatgcctttgaatatgcatacctcaacaatcgcaaggtattgactgctgtgcacaaagcaaacattatgaaacttgcagatggtttatttttggagtcttgtcccgaggttgcaaccaaatatcctgggatcaagtacaatgaaatcattgtggacaactgttgcatgcaacttgtttcaaggcctgagcaatttgatgttatggtcactccaaatctctacggaaatctggtggcaaatacagcagctggtattgctggaggcactggtgttatgcctggaggcaatgtgggggctgaccatgctgtgtttgagcaaggtgcttcagcaggaaatgtaggaaatgagaagatactagagcaaaagaaggcgaatccagttgccttgtttctttcatcagccatgatgttgagacatctgcagtttccttcatttgcagatagactaaagacttcggtgaagcgtgtaattgctgagggtaaatacatgaccaaagatcttggtggaaattgcaccacccaagaaatcacggatgctgtcattgcaaatctggactaa

SEQ ID NO: 28218 - protein, 371 aa, Nicotiana tabacum
MAKRTLPLLRHLLSSPSHGFSHSLTSTRSVTYMPRPGDGTPRAVTLIPGDGIGPLVTGAVEQVMDAMHAPVYFERYDVHGDMKSVPPEVMESIRKNKVCLKGGLKTPVGGGVSSLNVQLRKELDLYASLVHCFNLQGLPTRHENVDIVVIRENTEGEYSGLEHEVVPGVVESLKVMTKFCSERIAKYAFEYAYLNNRKVLTAVHKANIMKLADGLFLESCPEVATKYPGIKYNEIIVDNCCMQLVSRPEQFDVMVTPNLYGNLVANTAAGIAGGTGVMPGGNVGADHAVFEQGASAGNVGNEKILEQKKANPVALFLSSAMMLRHLQFPSFADRLKTSVKRVIAEGKYMTKDLGGNCTTQEITDAVIANLD

SEQ ID NO: 28219 - DNA, 1044 bp, Methanococcus jannaschii
  CDS (1)..(1044): transl_table=11
atgatgaaggtgtgtgttatagaaggggatggaataggaaaagaagtgattccagaggccataaaaatattaaatgagttgggagagtttgaaataataaaaggagaggcaggattagaatgtttaaaaaaatatggtaatgcacttccagaggatacaatagaaaaagctaaagaggcagatattattttgtttggggctataacctcaccaaagccaggggaagttcaaaattataaaagccctataataacgttgaggaagatgtttcatttatatgcaaatgtaagaccaataaacaactttggaattggacaattaattgggaaaattgcagattatgaattcttaaatgctaagaatattgatatagttattataagagagaatacggaagatttatatgttggtagagagagattagaaaatgatacagcaatagctgagagggttataacaagaaagggtagcgagagaataataagatttgcatttgaatatgctataaaaaataataggaaaaaggtatcttgcatccataaagctaatgttttaagaataactgatggtttattcttagaggtttttaatgaaataaaaaaacattataatatagaggcagatgattatttagttgattcaacagctatgaacttaataaaacatcctgaaaaatttgatgttattgttacaacaaacatgtttggggatattttatcagatgaggcatctgcattaattggaggacttggtttagctccttcagcaaatataggagatgataaagcattatttgagccagttcatggttcagctccagatatagctgggaaaggtatagcaaatccaatggcatctatattaagtattgctatgctttttgattatattggagagaaagaaaagggagatttgattagagaggcagtgaaatactgcttaataaacaaaaaagttactcctgacttgggaggggatttaaagacaaaagatgttggagacgaaattctaaattacattagaaagaagttaaagggatattga

SEQ ID NO: 28220 - protein, 347 aa, Methanococcus jannaschii
MMKVCVIEGDGIGKEVIPEAIKILNELGEFEIIKGEAGLECLKKYGNALPEDTIEKAKEADIILFGAITSPKPGEVQNYKSPIITLRKMFHLYANVRPINNFGIGQLIGKIADYEFLNAKNIDIVIIRENTEDLYVGRERLENDTAIAERVITRKGSERIIRFAFEYAIKNNRKKVSCIHKANVLRITDGLFLEVFNEIKKHYNIEADDYLVDSTAMNLIKHPEKFDVIVTTNMFGDILSDEASALIGGLGLAPSANIGDDKALFEPVHGSAPDIAGKGIANPMASILSIAMLFDYIGEKEKGDLIREAVKYCLINKKVTPDLGGDLKTKDVGDEILNYIRKKLKGY

SEQ ID NO: 28221 - DNA, 1167 bp, Ajellomyces capsulata
  CDS (1)..(1167)
atgttctctctgagaaccgcgcagccagcgcagtctcttttccgcgctgcgacgaatacttactcgacatctctccctcgctccgcaattgctgctagatcattcgctaccgtgcaatcggacatcttcaagcctaccaagtatggcggcaaatacacagttacgctgatcccaggcgacggcatcggcacggaagtagcagaatcagtgaaaacaattttcaaagccgataatgtaccaattgagtgggagcaggtcgacgttagcgggttggacgccgggaataaacattcggaagatttgttcaaagaatctattgcctcgctgaagcgcaacaagctcggtctcaagggtatccttcacaccccagttgagcgatccggccatcaatcgttcaatgttgccctacgtcaggaactagatatctatgcgtctatcgttttgattaagaacattcccggctacaagaccagacatgacaatgtcgacctctgcattatccgtgaaaataccgaaggcgaatattctggcctcgagcatcagtctgtcagcggcgtcgtcgaatctctcaagataattactcgtgccaagtcagaacgaattgccaagtttgcttttagctttgctctagccaacaaccgtaagaaggttacctgcatccacaaggccaacatcatgaaattggccgacggccttttccgctccaccttccataaagttgccgaaagctaccccactctagaaacgaatgatatgattgtggataatgcatctatgcaagcggttgctcgtcctcagcagtttgacgtcatggttatgcctaacctttacggaggaatcctctccaacgttggagctgctctcgtcggtggccccggtattgtacctggttgcaacatgggtcgcgatgtggctgtcttcgaaccgggatgtcgacacgttggacttgatattaaaggcaaggatcaagctaaccccacagccttgattctttctggatccatgctcctgcgccacttgggtctcgatgagcatgccaacagaatctccaaggcagtttatgacgtgattggagaaggcgtcacccgcacgcgcgatatgggtggtcaagcttccacccatgaattcacccgtgctgtcctcgataagatggaatcagctctgtaa

SEQ ID NO: 28222 - protein, 388 aa, Ajellomyces capsulata
MFSLRTAQPAQSLFRAATNTYSTSLPRSAIAARSFATVQSDIFKPTKYGGKYTVTLIPGDGIGTEVAESVKTIFKADNVPIEWEQVDVSGLDAGNKHSEDLFKESIASLKRNKLGLKGILHTPVERSGHQSFNVALRQELDIYASIVLIKNIPGYKTRHDNVDLCIIRENTEGEYSGLEHQSVSGVVESLKIITRAKSERIAKFAFSFALANNRKKVTCIHKANIMKLADGLFRSTFHKVAESYPTLETNDMIVDNASMQAVARPQQFDVMVMPNLYGGILSNVGAALVGGPGIVPGCNMGRDVAVFEPGCRHVGLDIKGKDQANPTALILSGSMLLRHLGLDEHANRISKAVYDVIGEGVTRTRDMGGQASTHEFTRAVLDKMESAL

SEQ ID NO: 28223 - DNA, 1248 bp, Colwellia maris
  CDS (1)..(1248)
atgaccaataaaatcatcattccaacgactggagataaaattacctttatcgacggtaagttatcagtacctaacaatcccattattccttatattgaaggtgacggtataggcgttgatgttactcctcctatgctcaaagttgttaatgcagcggttgctaaagcttatggtggcgatagaaaaatagaatggttggaagtgtatgcgggtgagaaagcaaccaaaatgtatgatagtgaaacatggttgccagaagaaacacttaacattcttcaagaatataaagtgtctataaaagggccgctgacaaccccagtaggtggtggtatgagctctttaaatgttgctatacgacaaatgcttgacctttatgtgtgtcaacgaccagttcaatggtttactggtgtacctagtccggtaaaaagaccttcagaagttgatatggttatctttcgtgaaaatactgaagatatttatgcgggtattgagtataaagcaggtagtgacaaggcaaagtcggttattaagtttctaattgaagaaatgggtgccagtaatattcgctttactgaaaattgtggtatcggcataaaaccggtatcaaaagaaggctcacaacgcttggtaagacaagccattcaatacgccattgataataataaagactcagtaacgttagttcataaaggtaatattatgaagtttactgaaggcgcttttaaagattggggctatgaacttgcgatagaagaatttggtgcaagtttactgcacggtgggccttggtgctcacttaaaaaccctaataccggtaaagaaatcattattaaagatgttatcgctgatgctatgttgcaacaagtattattacgtcctgcggaatatagtgttatagcaacgttaaacttaaatggtgattatttatcggatgcactggccgctcaagtaggtggtataggtattgcaccaggcgcaaatttaggtgatgaagttgctgtgtttgaagcaactcatggaaccgcacctaaatatgcaggtaaaaataaagtaaacccaggctcggtaattctttcagcggaaatgatgttaagacatatgggctggcttgaagctgatttattacttaaaggtatgtcaggagcaattcaagcaaaaacagttacctatgattttgagcgacttatggatgatgcaaccttagtttcttgttctgcatttggcgattgtattattgatcatatgtag

SEQ ID NO: 28224 - protein, 415 aa, Colwellia maris
MTNKIIIPTTGDKITFIDGKLSVPNNPIIPYIEGDGIGVDVTPPMLKVVNAAVAKAYGGDRKIEWLEVYAGEKATKMYDSETWLPEETLNILQEYKVSIKGPLTTPVGGGMSSLNVAIRQMLDLYVCQRPVQWFTGVPSPVKRPSEVDMVIFRENTEDIYAGIEYKAGSDKAKSVIKFLIEEMGASNIRFTENCGIGIKPVSKEGSQRLVRQAIQYAIDNNKDSVTLVHKGNIMKFTEGAFKDWGYELAIEEFGASLLHGGPWCSLKNPNTGKEIIIKDVIADAMLQQVLLRPAEYSVIATLNLNGDYLSDALAAQVGGIGIAPGANLGDEVAVFEATHGTAPKYAGKNKVNPGSVILSAEMMLRHMGWLEADLLLKGMSGAIQAKTVTYDFERLMDDATLVSCSAFGDCIIDHM

SEQ ID NO: 28225 - DNA, 1086 bp, Kluyveromyces lactis
  CDS (1)..(1086)
atgttgagacaaggtattgctgctcaaaaaaagtccttcgctaccctagcagctgaacaattgttgccaaagaagtacggtggtcgctacactgtaactttgattccaggtgatggtgttggtaaggaagtgaccgactcagtagtcaagatcttcgaaaacgaaaatattccaatcgactgggaaactatcgacatttctggtctagaaaacactgaaaatgtacaaagagctgtcgaatctttaaagagaaacaaggttggtttgaaaggtatctggcacactccagccgaccaaaccggtcatggctcattgaacgttgctttgagaaagcaactggatattttcgccaatgtcgccttgttcaaatcaattccaggtgtcaagactagattgaataacatcgacatggttatcatcagagaaaacactgaaggtgaatactctggtttagaacacgaatctgttccaggtgtcgttgaatctttgaagatcatgaccagggctaagtcagaaagaattgctagattcgcctttgatttcgccttgaaaaacaacagaaagtcggtctgcgctgttcacaaagctaacatcatgaaattgggtgatggtttgttcagaaacaccgttaatgaaattggtgctaacgaatacccagaactcgatgtcaagaacatcatcgttgacaacgcttccatgcaagctgttgccaagccacatcaattcgatgttttggtgacaccaaacttgtacggttctatcttgggtaacattggttctgctttgatcggtggtcccggtctagtcccaggtgctaacttcggtagagaatacgctgtctttgaaccaggttccagacatgttggtttggacatcaagggtcaaaacgttgctaacccaactgctatgatcttgtcctctactctaatgttgagacatctaggtttgaacgcttacgctgatagaatttccaaagctacatatgatgtcatttctgaaggtaagtcaacaacaagagacatcggtggttcagcctccacttctgagttcaccaacgctgttatcgagaagttagccaagttatga

SEQ ID NO: 28226 - protein, 361 aa, Kluyveromyces lactis
MLRQGIAAQKKSFATLAAEQLLPKKYGGRYTVTLIPGDGVGKEVTDSVVKIFENENIPIDWETIDISGLENTENVQRAVESLKRNKVGLKGIWHTPADQTGHGSLNVALRKQLDIFANVALFKSIPGVKTRLNNIDMVIIRENTEGEYSGLEHESVPGVVESLKIMTRAKSERIARFAFDFALKNNRKSVCAVHKANIMKLGDGLFRNTVNEIGANEYPELDVKNIIVDNASMQAVAKPHQFDVLVTPNLYGSILGNIGSALIGGPGLVPGANFGREYAVFEPGSRHVGLDIKGQNVANPTAMILSSTLMLRHLGLNAYADRISKATYDVISEGKSTTRDIGGSASTSEFTNAVIEKLAKL

SEQ ID NO: 28227 - DNA, 1071 bp, Schizosaccharomyces pombe
  CDS (1)..(1071)
atgttcaaatcactagtaagaaaatcctcagcttttcaaccattaaagtatggaggtaaatacacggtaacgttgattccaggcgatggaattggacgagaaacgagcaatgcagtgacagagatctttaaaacggcaaacgttcctatcgaatttgaagaaattgatgttacaggaatggaaaaaaacaataaatcgtctggagacgcgctacatgaggcaattcaatctctcaagagaaataaagtgggtttaaagggaattctgttcactccatttgaaaaaggaggccatacctcgttcaatgttgccttgagaaaagaactcgatatctatgcctctctagtgctcatcaaaaacattcctggatttaagactcgtcatgacaatgttgattttgcaattattcgtgaaaacactgaaggtgaatactcgggtctcgagcaccagtcggtaccgggagtcgtggaatctttgaaaatcattacagaatacaaatcaaagagaattgcacaatttgcttttgattttgccttacaaaatggccgcaaatcggtcacttgcatccacaaggctaacatcatgaaattggccgacggtctctttcgaaggacgttttacgacgttgctaacggttacgacgctattactcctaaggatttaattgtcgacaatgcctccatgcaggctgtttctcgtccccagcaattcgatgttttagtgatgccgaacttgtacggtagcattcttagcaacattggaagtgctttggtcggtggccccggtgtcattccaggtgccaattttggtcgtgactatgctctattcgagcctggttgccgtcatgttggtttaagtattactggacgtggggaagccaatcctacagctgccatccttagcgcttgcttgatgcttcgtcatttaggcctaaaagattatgctgatcttatcaatgccgctacttattctgtcattgaagagggtaaaaccctgaccaaagacttgggtggttcggcttccactggtgatttcacgcatgccattttagaaagaatggaaagcttataa

SEQ ID NO: 28228 - protein, 356 aa, Schizosaccharomyces pombe
MFKSLVRKSSAFQPLKYGGKYTVTLIPGDGIGRETSNAVTEIFKTANVPIEFEEIDVTGMEKNNKSSGDALHEAIQSLKRNKVGLKGILFTPFEKGGHTSFNVALRKELDIYASLVLIKNIPGFKTRHDNVDFAIIRENTEGEYSGLEHQSVPGVVESLKIITEYKSKRIAQFAFDFALQNGRKSVTCIHKANIMKLADGLFRRTFYDVANGYDAITPKDLIVDNASMQAVSRPQQFDVLVMPNLYGSILSNIGSALVGGPGVIPGANFGRDYALFEPGCRHVGLSITGRGEANPTAAILSACLMLRHLGLKDYADLINAATYSVIEEGKTLTKDLGGSASTGDFTHAILERMESL

SEQ ID NO: 28229 - DNA, 1107 bp, Kluyveromyces lactis
  CDS (1)..(1107)
atgttcagacaatcaattgtgaagcaatcgtgtagatttttggctaccaagaaacaaccaagtatcggtagatacaccggtaagccaaacccaaagactggtaagtacactgtttccttcattgaaggtgatggtgttggtccagaaatttccaaatccgttaaggcgatcttttccgcagccaaggttcctattgaatgggaaagttgtgatgtgagtccaattttcgttaacggattaactactattccagatccagctgttgcttcaattaacaagaacttgattgctttgaagggtccattggctactccaattggtaagggtcacagatccttgaacttaaccttaagaaagactttcggtttgttcgctaatgtgcgtccagctaaatctatcgagggttacaagactacttacgaaaacgttaacttagttttgatcagagaaaacactgaaggtgaatattctggtatcgaacacgttgttgctccaggtgtcgtccaatccatcaagttgattactcaggatgcttctgaaagagtcattagatacgcttttgaatacgctagagccgttgatagatcaaaggtccttgttgttcacaaatccactatccaaagattggccgatggtttgttcgttgacgttgccaagaaattgtcttctgaataccctgacatcgaactacaaactgaattgctagataacaccgtcttgaagactgtccaacacccagaagcctacgatgatgtcgttgtcgtttgtccaaacttgtacggtgatatcttgtccgatttgaactccggtttgtccgctggttctctaggtttgactccatccgctaacattggtcacaccgtttctatcttcgaagctgtccacggttctgccccagatattgctggtcaaaacaaggctaacccaactgccttgttgctatcctctgtcatgatgttgaaccacatgggtttgactgaacacgccgacaagattgaaaaggctgtcttgaccaccattgcttctgatgctaagaacagaactggtgacttgggtggttctgcttccacatcttctttcactgatgctgtcattgaaagattataa

SEQ ID NO: 28230 - protein, 368 aa, Kluyveromyces lactis
MFRQSIVKQSCRFLATKKQPSIGRYTGKPNPKTGKYTVSFIEGDGVGPEISKSVKAIFSAAKVPIEWESCDVSPIFVNGLTTIPDPAVASINKNLIALKGPLATPIGKGHRSLNLTLRKTFGLFANVRPAKSIEGYKTTYENVNLVLIRENTEGEYSGIEHVVAPGVVQSIKLITQDASERVIRYAFEYARAVDRSKVLVVHKSTIQRLADGLFVDVAKKLSSEYPDIELQTELLDNTVLKTVQHPEAYDDVVVVCPNLYGDILSDLNSGLSAGSLGLTPSANIGHTVSIFEAVHGSAPDIAGQNKANPTALLLSSVMMLNHMGLTEHADKIEKAVLTTIASDAKNRTGDLGGSASTSSFTDAVIERL

SEQ ID NO: 28231 - DNA, 1137 bp, Schizosaccharomyces pombe
  CDS (1)..(1137)
atgtcaatgctttctactttacgtactgcaggttctttacggacgttttcaagaagcgcctgttactcttttagattttcttcaacgaaggctgccgctgggacatatgaaggagtaaagaatgccaacgggaactacacagtaacgatgattgctggcgatggcattggtccagaaattgctcagtctgtagaacgtatatttaaggctgcaaaggtccctatcgaatgggaacgtgtaaaagtatatcctattttgaaaaatggtactactactattcctgatgatgctaaggaatctgttaggaaaaataaagtggctttgaaaggtccattggcaaccccaattgggaagggtcatgtttctatgaaccttactttgcgtcgtactttcggcttgtttgccaatgttcgtccctgtgtatctattacgggatacaaaacaccttatgataacgttaataccgttttgattcgtgagaacactgagggtgaatactcaggcatcgagcatgaagttataccaggcgttgttcaatcgattaaattaattactcgcgcagcatctgagcgtgttattcgttatgcattccaatatgctcgccaaactggcaagaacaacatcaccgtagtccacaaggctaccattatgcgcatggctgacggtttatttttggaatgcgccaaggagcttgcacctgaatatcctgatatcgagcttagggaggaaatcttggataacgcctgcttgaagattgtcaccgatcctgtcccttataacaacacagttatggttatgcccaatttatacggtgatattgtttctgatatgtgcgctggtttaattggcggtcttggtttgactccttccggaaacattggcaaccaagcttccatctttgaagctgttcatggtactgcccctgatattgctggaaaaggtttagccaaccctactgctttactgttatcttctgtaatgatgttgaagcacatgaatttaaatgattatgccaaacgcatcgaatcagctatctttgatacccttgcaaacaatcccgatgctcgcaccaaggatttgggcggcaagtcaaacaatgttcaatataccgatgccattatttctaaactgaagtaa

SEQ ID NO: 28232 - protein, 378 aa, Schizosaccharomyces pombe
MSMLSTLRTAGSLRTFSRSACYSFRFSSTKAAAGTYEGVKNANGNYTVTMIAGDGIGPEIAQSVERIFKAAKVPIEWERVKVYPILKNGTTTIPDDAKESVRKNKVALKGPLATPIGKGHVSMNLTLRRTFGLFANVRPCVSITGYKTPYDNVNTVLIRENTEGEYSGIEHEVIPGVVQSIKLITRAASERVIRYAFQYARQTGKNNITVVHKATIMRMADGLFLECAKELAPEYPDIELREEILDNACLKIVTDPVPYNNTVMVMPNLYGDIVSDMCAGLIGGLGLTPSGNIGNQASIFEAVHGTAPDIAGKGLANPTALLLSSVMMLKHMNLNDYAKRIESAIFDTLANNPDARTKDLGGKSNNVQYTDAIISKLK

SEQ ID NO: 28233 - DNA, 1110 bp, Saccharomyces cerevisiae
  CDS (1)..(1110)
atgttgagaaatactttttttagaaacacctcgaggaggtttttggctactgtaaagcaaccttcaatcggaagatataccggcaaacctaacccttctaccggcaaatacacggtctcgttcattgaaggtgatggtatcggacctgaaatttccaagtctgtaaagaaaatctttagtgcagcaaacgtccccatagaatgggaatcttgtgatgttagccctatctttgtcaacggattaacgaccattcctgaccctgccgtacaatctatcacaaaaaacctggttgcactaaaaggtccactagctacacctattggtaaaggtcacagatctttgaatttgacattgagaaaaacatttgggttatttgccaacgttcgtcccgcaaagtctattgaaggttttaagaccacttacgaaaacgttgatttagttcttatcagagagaataccgaaggtgaatattctggtatcgaacacatagtttgccctggcgttgttcaatctattaaactgatcacaagagatgcctctgagcgagtcattagatacgcttttgaatatgcaagagccatcggcagaccaagagttattgtggtacataaatctactatccagagattagctgatggtttattcgttaatgttgccaaagaactatccaaagagtatcctgaccttactttagaaactgaacttattgataacagtgtgttaaaggtggtcaccaacccatctgcttacacagacgctgtttctgtttgtccaaatctatacggtgatatcttgtccgacttgaactctggtttgagcgccggttctttaggtttaactccatctgccaatattggtcataaaatctcgatctttgaagctgtccatggctctgcccctgatattgccggtcaagataaagcgaatccaactgccctacttttatcttcagtaatgatgttaaaccacatgggtctaacgaatcatgctgaccaaattcaaaatgcagtattgtctactatcgcatcaggtccagaaaacagaacaggtgacttggctggtactgctactacttcatcattcactgaagcagtcatcaagagattataa

SEQ ID NO: 28234 - protein, 369 aa, Saccharomyces cerevisiae
MLRNTFFRNTSRRFLATVKQPSIGRYTGKPNPSTGKYTVSFIEGDGIGPEISKSVKKIFSAANVPIEWESCDVSPIFVNGLTTIPDPAVQSITKNLVALKGPLATPIGKGHRSLNLTLRKTFGLFANVRPAKSIEGFKTTYENVDLVLIRENTEGEYSGIEHIVCPGVVQSIKLITRDASERVIRYAFEYARAIGRPRVIVVHKSTIQRLADGLFVNVAKELSKEYPDLTLETELIDNSVLKVVTNPSAYTDAVSVCPNLYGDILSDLNSGLSAGSLGLTPSANIGHKISIFEAVHGSAPDIAGQDKANPTALLLSSVMMLNHMGLTNHADQIQNAVLSTIASGPENRTGDLAGTATTSSFTEAVIKRL

SEQ ID NO: 28235 - DNA, 1101 bp, Bos taurus
  CDS (1)..(1101)
atggcagggcccgcgtggatctccaaggtctctcggctgctgggggcattccacaaccaaaaacaggtgaccagaggttttgctggtggtgttaagacagtaactttaattccaggagatggaattggcccagaaatttctgctgcagttatgaagatttttgatgctgccaaagcacctattcagtgggaggagcgaaacgtcgccgccattcaaggtccgggaggcaagtggatgatccctccagaagccaaagagtccatggataagaacaagatgggcttgaaaggccctttaaaaacaccaatagctgctggtcacccatctatgaatttattgctgcgtaaaacatttgacctttatgcaaatgtccgaccatgtgtctcaatcgaaggctataaaaccccttaccatgatgtaaatattgtcaccattcgagagaacacggaaggagaatacagtggaatcgagcatgtgatcgtggatggagttgtgcagagtatcaagctcatcaccgaggcagcgagcaagcgcatcgcggagtttgcatttgaatacgcacggaacaaccaccggagcaacgtcacagccgtgcacaaagccaacatcatgcgaatgtcagatgggctttttctgcaaaaatgcagggaagttgcagaaaactgtaaagatattaaatttaatgagatgtaccttgatacagtatgtttgaatatggtccaagacccgtcccagtttgatgttcttgttatgccaaatttgtatggagacatccttagtgacctgtgtgcgggattgattggaggtcttggtgtgacaccaagcggcaacattggagccaacggagttgcaatcttcgagtcggttcacgggaccgccccggacattgcgggcaaggacatggccaatcccacagccctcctgctcagcgccgtgatgatgctgcgccacatggggctttttgaccacgctgcgaagattgagacggcgtgttttgctacaattaaggatggaaagagcttaaccaaagatttgggaggcaattcaaagtgctcggacttcacagaagaaatctgtcgccgagtaaaagatttagattaa

SEQ ID NO: 28236 - protein, 366 aa, Bos taurus
MAGPAWISKVSRLLGAFHNQKQVTRGFAGGVKTVTLIPGDGIGPEISAAVMKIFDAAKAPIQWEERNVAAIQGPGGKWMIPPEAKESMDKNKMGLKGPLKTPIAAGHPSMNLLLRKTFDLYANVRPCVSIEGYKTPYHDVNIVTIRENTEGEYSGIEHVIVDGVVQSIKLITEAASKRIAEFAFEYARNNHRSNVTAVHKANIMRMSDGLFLQKCREVAENCKDIKFNEMYLDTVCLNMVQDPSQFDVLVMPNLYGDILSDLCAGLIGGLGVTPSGNIGANGVAIFESVHGTAPDIAGKDMANPTALLLSAVMMLRHMGLFDHAAKIETACFATIKDGKSLTKDLGGNSKCSDFTEEICRRVKDLD

SEQ ID NO: 28237 - DNA, 1077 bp, Caenorhabditis elegans
  CDS (1)..(1077)
atgcttggcaagtgcatcaaaaaggcgtcgtctaccgtcggacaatccatcagatacagctccggagacgttcgccgtgtcactttaattccaggagacggaattgggccggaaatttcagcttctgtacagaagatttttgaggccgccgatgccccgattgcttgggacccagttgatgtgactccagttaagggacgcgatggagtcttccgtattccaagtcgttgcatcgagcttatgcacgcgaacaaagttggacttaaaggaccactcgagaccccaattggaaaaggacacagatctttgaatttggctgtgagaaaagagtttagcctttacgccaacgttcgtccatgccgttcccttgaaggacacaagacattgtacgacaatgtcgatgttgtcacaattcgtgagaacacagagggagagtactctggaattgagcacgagattgtcccgggagttgttcaatctatcaagcttattactgaaactgcttctcgcaatgtcgccagcttcgccttcgagtatgctcgtcaaaatgggcgcaaagttgtgactgctgtccacaaagccaacattatgagacaatccgacggtttgtttttgtccatctgccgcgagcaagctgccctctacccagatatcaagttcaaggaagcctacctcgacacagtttgcttgaacatggtccaggatccatcacaatacgatgttcttgtcatgccaaacttgtatggagacattctttccgatttgtgcgctggtcttgttggaggactcggagtcaccccatctggaaatattggaaaaggagccgccgtatttgaatccgttcacggaaccgccccagatattgctggacaagacaaagcaaacccaactgctcttcttctatctgccgtcatgatgctccgttacatgaaccttccacaacacgctgctcgtatcgaaaaggctgtatttgatgcaattgctgatggacgtgccaaaactggagatctcggaggtactggaacttgctcttcattcaccgctgatgtttgtgcccgtgttaaagacctcgaataa

SEQ ID NO: 28238 - protein, 358 aa, Caenorhabditis elegans
MLGKCIKKASSTVGQSIRYSSGDVRRVTLIPGDGIGPEISASVQKIFEAADAPIAWDPVDVTPVKGRDGVFRIPSRCIELMHANKVGLKGPLETPIGKGHRSLNLAVRKEFSLYANVRPCRSLEGHKTLYDNVDVVTIRENTEGEYSGIEHEIVPGVVQSIKLITETASRNVASFAFEYARQNGRKVVTAVHKANIMRQSDGLFLSICREQAALYPDIKFKEAYLDTVCLNMVQDPSQYDVLVMPNLYGDILSDLCAGLVGGLGVTPSGNIGKGAAVFESVHGTAPDIAGQDKANPTALLLSAVMMLRYMNLPQHAARIEKAVFDAIADGRAKTGDLGGTGTCSSFTADVCARVKDLE

SEQ ID NO: 28239 - DNA, 1134 bp, Drosophila melanogaster
  CDS (1)..(1134)
atggctgctagattcatacagaaaattctcaatcaactgggtttgattgcagcgcgtgatgctccggcggtgactgcgacgccagcagtgagccaggtcaacgcgactcccgccgccagccggtcctactcctccggcaccaagaaagtcaccctcatccctggcgatggcatcggacctgagatctctgcggccgtgcagaaaatcttcaccgccgccaatgtccccatcgagtgggaggccgtggacgtgacccccgtccggggacccgacggaaagttcggcatcccacaggccgccattgactcggtgaacacgaacaagatcggcctgaagggtcctctgatgacgcccgtcggcaagggccatcggtctctgaatctggccctgcgcaaggagttcaatctgtacgccaacgtgcgtccctgccgcagtctcgagggctacaagacgctgtacgacgatgtggacgtggtcaccatccgtgagaacaccgagggcgagtactccggcatcgagcacgagatcgtcgacggcgtcgttcagagcatcaagctgatcaccgaggaagcctccaagcgtgtggccgagtacgccttccagtacgccaagaacaacaaccgcaagaaggtcaccgtggtgcacaaggcgaacattatgcgcatgtccgatggtctcttcctgcgctgcgtccgcgacatggcccagaagttcccagaaatccagttcgaagagaagtatctggatacggtgtgcctgaacatggtccagaaccccggaaaatacgacgtgctggtcatgcccaatctgtacggtgatattctgtctgacatgtgcgccggtttggtgggcggcctcggcctgacgccctccggcaacatgggcctgaacggtgccctgttcgagtctgtgcacggaaccgcccccgatattgccggcaaggacctggccaatcccactgccctgttgctgtcggcggtcatgatgctgcgccacatggagctcaacacgtacgccgataaaatcgagcgtgccgccttcgagaccatcaaggagggcaaatacctcaccggcgatctgggcggccgtgccaagtgctccgagttcacgaacgagatctgtgccaagctgtag

SEQ ID NO: 28240 - protein, 377 aa, Drosophila melanogaster
MAARFIQKILNQLGLIAARDAPAVTATPAVSQVNATPAASRSYSSGTKKVTLIPGDGIGPEISAAVQKIFTAANVPIEWEAVDVTPVRGPDGKFGIPQAAIDSVNTNKIGLKGPLMTPVGKGHRSLNLALRKEFNLYANVRPCRSLEGYKTLYDDVDVVTIRENTEGEYSGIEHEIVDGVVQSIKLITEEASKRVAEYAFQYAKNNNRKKVTVVHKANIMRMSDGLFLRCVRDMAQKFPEIQFEEKYLDTVCLNMVQNPGKYDVLVMPNLYGDILSDMCAGLVGGLGLTPSGNMGLNGALFESVHGTAPDIAGKDLANPTALLLSAVMMLRHMELNTYADKIERAAFETIKEGKYLTGDLGGRAKCSEFTNEICAKL

SEQ ID NO: 28241 - DNA, 1101 bp, Homo sapiens
  CDS (1)..(1101)
atggctgggcccgcgtggatctctaaggtctctcggctgctgggggcattccacaacccaaaacaggtgaccagaggttttactggtggtgttcagacagtaactttaattccaggagatggtattggcccagaaatttcagctgcagttatgaagatttttgatgctgccaaagcacctattcagtgggaggagcggaacgtcactgccattcaaggacctggaggaaagtggatgatcccttcagaggctaaagagtccatggataagaacaagatgggcttgaaaggccctttgaagaccccaatagcagccggtcacccatctatgaatttactgctgcgcaaaacatttgacctttacgcgaatgtccgaccatgtgtctctatcgaaggctataaaaccccttacaccgatgtaaatattgtgaccattcgagagaacacagaaggagaatacagtggaattgagcatgtgattgttgatggagtcgtgcagagtatcaagctcatcaccgagggggcgagcaagcgcattgctgagtttgcctttgagtatgcccggaacaaccaccggagcaacgtcacggcggtgcacaaagccaacatcatgcggatgtcagatgggctttttctacaaaaatgcagggaagttgcagaaagctgtaaagatattaaatttaatgagatgtaccttgatacagtatgtttgaatatggtacaagatccttcccaatttgatgttcttgttatgccaaatttgtatggagacatccttagtgacttgtgtgcaggattgatcggaggtctcggtgtgacaccaagtggcaacattggagccaatggggttgcaatttttgagtcggttcatgggacggctccagacattgcaggcaaggacatggcgaatcccacagccctcctgctcagtgccgtgatgatgctgcgccacatgggactttttgaccatgctgcaagaattgaggctgcgtgttttgctacaattaaggacggaaagagcttgacaaaagatttgggaggcaatgcaaaatgctcagacttcacagaggaaatctgtcgccgagtaaaagatttagattaa

SEQ ID NO: 28242 - protein, 366 aa, Homo sapiens
MAGPAWISKVSRLLGAFHNPKQVTRGFTGGVQTVTLIPGDGIGPEISAAVMKIFDAAKAPIQWEERNVTAIQGPGGKWMIPSEAKESMDKNKMGLKGPLKTPIAAGHPSMNLLLRKTFDLYANVRPCVSIEGYKTPYTDVNIVTIRENTEGEYSGIEHVIVDGVVQSIKLITEGASKRIAEFAFEYARNNHRSNVTAVHKANIMRMSDGLFLQKCREVAESCKDIKFNEMYLDTVCLNMVQDPSQFDVLVMPNLYGDILSDLCAGLIGGLGVTPSGNIGANGVAIFESVHGTAPDIAGKDMANPTALLLSAVMMLRHMGLFDHAARIEAACFATIKDGKSLTKDLGGNAKCSDFTEEICRRVKDLD

SEQ ID NO: 28243 - DNA, 1101 bp, Mus musculus
  CDS (1)..(1101)
atggccgggtccgcgtgggtgtccaaggtctctcggctgctgggtgcattccacaacacaaaacaggtgacaagaggttttgctggtggtgttcagacagtaactttaattcctggagatggaattggcccagaaatttcagcctcagtcatgaagatttttgatgctgccaaagcacctattcagtgggaggagcgcaatgtcacagcaattcaaggaccaggaggaaagtggatgatccctccagaagccaaggagtccatggataagaacaagatgggcttgaaaggcccactaaagaccccaatagccgctggccatccatctatgaatctgttgcttcgtaagacatttgacctttatgccaatgtccggccatgtgtctcaattgaaggttataaaaccccttacacggatgtaaatatcgtcaccatccgagagaacacggaaggagaatacagtggaattgagcatgtgatcgttgatggggttgtgcagagcatcaagctcatcaccgaagaagcaagcaagcgcattgcagagtttgccttcgagtacgctcggaacaaccaccggagcaacgtcacagctgtgcacaaagctaacatcatgaggatgtcagatgggctctttctgcaaaaatgcagggaagttgcggagaactgtaaagacattaaatttaacgagatgtaccttgatactgtatgtttaaatatggtacaagacccatcccagtttgatgttcttgtcatgccaaatttatacggagacatccttagtgatctgtgtgcaggactgattggaggtcttggggtgactccaagtggcaatattggagccaacggtgttgccatctttgaatcggttcatggaacagccccggacattgcaggcaaggacatggccaaccccacggccctcctgcttagtgctgtgatgatgcttcgccacatgggactttttgaccatgcagcaaaaatcgaggctgcatgttttgctacaattaaggatggaaagagcttaacaaaagatctgggaggcaacgcgaagtgctctgacttcacagaagaaatctgtcgtagagtcaaagacttagattag

SEQ ID NO: 28244 - protein, 366 aa, Mus musculus
MAGSAWVSKVSRLLGAFHNTKQVTRGFAGGVQTVTLIPGDGIGPEISASVMKIFDAAKAPIQWEERNVTAIQGPGGKWMIPPEAKESMDKNKMGLKGPLKTPIAAGHPSMNLLLRKTFDLYANVRPCVSIEGYKTPYTDVNIVTIRENTEGEYSGIEHVIVDGVVQSIKLITEEASKRIAEFAFEYARNNHRSNVTAVHKANIMRMSDGLFLQKCREVAENCKDIKFNEMYLDTVCLNMVQDPSQFDVLVMPNLYGDILSDLCAGLIGGLGVTPSGNIGANGVAIFESVHGTAPDIAGKDMANPTALLLSAVMMLRHMGLFDHAAKIEAACFATIKDGKSLTKDLGGNAKCSDFTEEICRRVKDLD

SEQ ID NO: 28245 - DNA, 1422 bp, Anabaena sp
  CDS (1)..(1422): transl_table=11
atgtacaacaagattaccccccctacaaccggagaaaaaattaccttcaaaaatggtgagccggttgtgcctgacaatccaattatcccctttattcggggcgatggaacaggaattgatatttggccggctacagaaaaagtactagatgcggcggtagccaaagcgtatcaaggcaagcgtaaaattagctggtttaaggtttacgctggggatgaagcctgtgatttatacgggacttatcagtatttaccagaggatacattaacagccattagggaatatggtgtggcaattaaagggcctttgactacccctgtcggtggtggtatccgttccttaaatgtggcactcagacaaatttttgacctatatgcctgtgtacgtccttgccgttattatgcaggtacaccctcaccccacaaaaatcctgaaaaacttgatgtaattgtctatcgggaaaacacggaagatatttatttagggattgagtggaaacaaggtagtgaaataggcgatcgcctcatctctatcctcaacaaagaactcatccccgccaccccagaacacggtaaaaagcaaatccccctcgattctggtatagggatcaaacccatcagtaaaacaggttcccagcgcctagtacgccgcgccattaaacacgccctcacattacccaaagacaagcaacaagtgactttggtgcataagggtaacatcatgaagtacaccgaaggcgctttccgtgattggggttacgaattagctacaagtgagttccgccaagagactgtcactgaacgggaatcttggattttaagcaacaaggagaaaaacccgaacatttccttggaagacaacgcccgtcaaattgaccctggttttgatgcccttactccagagaaaaaggcgcaaattgtcaaggaagtagaaacagttcttaactcaatttgggaaagccacggtaacggtaagtggaaagaaaaagtgttagtcaatgaccggattgctgacagtatctttcaacaaatccaaaccagaccagatgagtattcaattctggcgacaatgaacttaaacggcgattacttgtctgatgcggcggctgctattgtcggcggcttaggaatggggccaggggcaaatattggcgattcctgcgctgtgtttgaagccactcatggtacagcacctaaacacgctggcttagacagaattaacccaggttcagtcattttatctggggtaatgatgttggagtatatgggttggcaagaagccgcagacctaattaagaaaggtttaagcgatgcgatcgctaacagtcaagtcacctatgatttagctagattactcgaaccaccagttgaacctctaaaatgttctgaatttgccgacgcaattatcaaacattttggttaa

SEQ ID NO: 28246 - protein, 473 aa, Anabaena sp
MYNKITPPTTGEKITFKNGEPVVPDNPIIPFIRGDGTGIDIWPATEKVLDAAVAKAYQGKRKISWFKVYAGDEACDLYGTYQYLPEDTLTAIREYGVAIKGPLTTPVGGGIRSLNVALRQIFDLYACVRPCRYYAGTPSPHKNPEKLDVIVYRENTEDIYLGIEWKQGSEIGDRLISILNKELIPATPEHGKKQIPLDSGIGIKPISKTGSQRLVRRAIKHALTLPKDKQQVTLVHKGNIMKYTEGAFRDWGYELATSEFRQETVTERESWILSNKEKNPNISLEDNARQIDPGFDALTPEKKAQIVKEVETVLNSIWESHGNGKWKEKVLVNDRIADSIFQQIQTRPDEYSILATMNLNGDYLSDAAAAIVGGLGMGPGANIGDSCAVFEATHGTAPKHAGLDRINPGSVILSGVMMLEYMGWQEAADLIKKGLSDAIANSQVTYDLARLLEPPVEPLKCSEFADAIIKHFG

SEQ ID NO: 28247 - DNA, 1281 bp, Aquifex aeolicus
  CDS (1)..(1281): transl_table=11
atgaataaaacaacgtttgaaaatgtttactactgggaaggaaaggcacaaatcccccaggaagggcagtttataaagctcaaagaagataaaaccttagaagttccagacaacccgataattcccttcatagagggagatgggataggtcctgaaataacgcaggctatgctccttattatcaacacagcggttgaaaaaacttacaacggaagcaagaagatttactgggtagaactcctcgcgggggataaggcggaagaaaagactggagagaggcttcctcaggaaaccctggacgttttaaaagaatcaatagtaggtataaaaggacccctcggaacgcccgtaggaaaaggtgtccgctccataaactccgccctcaggagggcatttgattactactctgcggtaagacccgtttactggatgggccaggcaactccgattccaaatcctgagagggttgacctcgtagttttcagagaaaacaccgacgacgtctacgcgggagtggagttctttgcgggaacgcccgaagccaaaaaggtaagagaattcctcataaaggagatgggggcaaaagaggaaggcttccccgaagatgtgggaataacggtaaagcccatgagcgagttcaagacaaagagacacgtgaggaaagcactcagatacgcccttgaaaacaacaagaagaacgtcgcggtaataggaaaaggaaacataatgaaggcaacggaaggggccttcataaactgggcttttgaggtagcagaagagcccgaattcaaaggaaaggtagtaacggacccggaagcagagcccggcgaaggacaggtaaaactcacaaaagtgataaccgaccagatgcttatgcaacttgtcctcaagcccgaagcttgggacgtgataatcgctcagaacttgaacggtgactacgtttccgaccttgcagcttctctgataggaggtccaggatttgttccgagcggaaacataggggacggatatgccctctttgaaagcacccacggaacagcttgggacatagcaggcaagggaatagcaaatcccctttcccttacactatctggcgcgatgatgcttgaatacataggctggaaagaagcagctcaaaaggtctacgacgcagtaagaagaacccttgcggaacatataggaacgcccgatatcgcaagcggattccagaaacagggaatagaagctaaagcagtaggcacgatggagttcgccgaagaaatttccaagaggattgagtaa

SEQ ID NO: 28248 - protein, 426 aa, Aquifex aeolicus
MNKTTFENVYYWEGKAQIPQEGQFIKLKEDKTLEVPDNPIIPFIEGDGIGPEITQAMLLIINTAVEKTYNGSKKIYWVELLAGDKAEEKTGERLPQETLDVLKESIVGIKGPLGTPVGKGVRSINSALRRAFDYYSAVRPVYWMGQATPIPNPERVDLVVFRENTDDVYAGVEFFAGTPEAKKVREFLIKEMGAKEEGFPEDVGITVKPMSEFKTKRHVRKALRYALENNKKNVAVIGKGNIMKATEGAFINWAFEVAEEPEFKGKVVTDPEAEPGEGQVKLTKVITDQMLMQLVLKPEAWDVIIAQNLNGDYVSDLAASLIGGPGFVPSGNIGDGYALFESTHGTAWDIAGKGIANPLSLTLSGAMMLEYIGWKEAAQKVYDAVRRTLAEHIGTPDIASGFQKQGIEAKAVGTMEFAEEISKRIE

SEQ ID NO: 28249 - DNA, 1239 bp, Archaeoglobus fulgidus
  CDS (1)..(1239): transl_table=11
atgcagtacgagaaggtcaaacctccagagaacggagaaaagataagatatgaaaacggcaaactcatcgttccagataaccccatcatcccgtatttcgagggagatggcataggcaaggatgtggttccagctgcaatcagagttctcgatgccgctgctgataagattggcaaggaagtcgtctggtttcaggtttatgctggggaggatgcctacaagctctacggcaactatctgcctgatgacactctgaacgccataaaggagttcagagttgccttaaaaggccctctcacaacccccgttggaggtggctacaggagtctaaatgtcacaatcagacaggttctcgacctctatgccaatgttaggccagtctactacctgaaaggagttccaagcccgataaagcatcctgaaaaggtcaacttcgttattttcagggagaacaccgaagacgtttacgctggcattgagtggccgaggggtagcgaggaagcccttaagttaataagattcctcaagaacgagtttggtgtcaccataagggaggactctggaatcggaataaagccgatcagcgagtttgccaccaagaggcttgtcaggatggccatcagatatgcaatagagaacaacaggaaaagcgtgactctcgtccacaagggcaacataatgaagtacacggagggagccttcagggattggggctacgaggtggcaaagcaggagtttggcgagtattgcataacagaggacgagctctgggacaagtacggcgggaagcagcctgagggcaagatcgtggtgaaggacaggattgcggacaacatgttccagcagattctgacgaggacagatgagtatgacgtcattgccctgccaaacctcaatggtgattacctcagcgatgctgctgctgccctgattgggggacttggaatagctccgggcagcaacataggtgatggcattggcgtcttcgagcctgtgcacggctctgcaccgaagtacgctggccagaacaaggtcaaccccacagccgaaattctcacaggagcgctgatgttcgagtacatcggctggaaggatgcgagcgagatgataaagaaagctgtggagatgacgataagcagcggaattgttacctacgacatccaccgccacatgggcgggacgaaggtaggaacgagggagtttgcagaggctgtggttgaaaacctgcagtcgctatga

SEQ ID NO: 28250 - protein, 412 aa, Archaeoglobus fulgidus
MQYEKVKPPENGEKIRYENGKLIVPDNPIIPYFEGDGIGKDVVPAAIRVLDAAADKIGKEVVWFQVYAGEDAYKLYGNYLPDDTLNAIKEFRVALKGPLTTPVGGGYRSLNVTIRQVLDLYANVRPVYYLKGVPSPIKHPEKVNFVIFRENTEDVYAGIEWPRGSEEALKLIRFLKNEFGVTIREDSGIGIKPISEFATKRLVRMAIRYAIENNRKSVTLVHKGNIMKYTEGAFRDWGYEVAKQEFGEYCITEDELWDKYGGKQPEGKIVVKDRIADNMFQQILTRTDEYDVIALPNLNGDYLSDAAAALIGGLGIAPGSNIGDGIGVFEPVHGSAPKYAGQNKVNPTAEILTGALMFEYIGWKDASEMIKKAVEMTISSGIVTYDIHRHMGGTKVGTREFAEAVVENLQSL

SEQ ID NO: 28251 - DNA, 1272 bp, Bacillus subtilis
  CDS (1)..(1272): transl_table=11
gtggcacaaggtgaaaaaattacagtctctaacggagtattaaacgtaccaaacaacccgattatcccatttatcgaaggagacggaaccggtcctgatatttggaacgcggcttcgaaggttttggaagcagcagtagaaaaagcatacaaaggcgaaaagaaaattacatggaaagaagtttacgccggagaaaaggcttataataaaacaggtgagtggctccctgctgaaacattagatgtgatccgcgaatatttcatcgcgattaaaggcccgttaacgacacctgtcggcggcggtatccgttctttgaacgtagcgctcagacaagagcttgacctattcgtctgcttaagacctgtaagatactttactggagtgccgtcaccggtaaaacgccctgaagatactgatatggtcatcttccgtgaaaatacagaagatatttacgcaggcatcgagtatgcaaaaggctctgaagaagtgcaaaagcttatcagcttccttcaaaatgagttaaacgtcaataaaatccgtttccctgagacatcaggtatcggcattaagcctgtttcagaagaaggaacaagccgcttggtcagagctgccattgattatgcgatcgagcatggccgcaaatctgtaacacttgttcacaaaggaaacatcatgaagttcacagaaggcgccttcaaaaactggggctatgaacttgctgaaaaagaatacggagataaagtcttcacatgggctcaatatgaccgcattgctgaagaacaaggaaaagacgctgccaacaaagcgcaaagcgaagcggaagcagcaggaaaaatcattatcaaagacagcattgctgacattttccttcagcagatcttaacgcgtccaaacgagtttgatgtcgttgcgacaatgaacttgaacggagattacatttctgatgctcttgctgcgcaagtcggcggaatcggcattgctcctggagcgaacatcaactacgaaacaggacatgcgattttcgaggcgacgcacggaacggctcctaaatatgcaggccttgataaagtaaacccatcttcagttattctttcaggcgttctgcttcttgagcatttaggatggaacgaagcggctgatttggttatcaaatctatggaaaaaacaatcgcttctaaagtcgtaacttacgattttgccagattaatggacggggcgactgaagtgaaatgttcagagttcggagaagaactgatcaaaaacatggactaa

SEQ ID NO: 28252 - protein, 423 aa, Bacillus subtilis
MAQGEKITVSNGVLNVPNNPIIPFIEGDGTGPDIWNAASKVLEAAVEKAYKGEKKITWKEVYAGEKAYNKTGEWLPAETLDVIREYFIAIKGPLTTPVGGGIRSLNVALRQELDLFVCLRPVRYFTGVPSPVKRPEDTDMVIFRENTEDIYAGIEYAKGSEEVQKLISFLQNELNVNKIRFPETSGIGIKPVSEEGTSRLVRAAIDYAIEHGRKSVTLVHKGNIMKFTEGAFKNWGYELAEKEYGDKVFTWAQYDRIAEEQGKDAANKAQSEAEAAGKIIIKDSIADIFLQQILTRPNEFDVVATMNLNGDYISDALAAQVGGIGIAPGANINYETGHAIFEATHGTAPKYAGLDKVNPSSVILSGVLLLEHLGWNEAADLVIKSMEKTIASKVVTYDFARLMDGATEVKCSEFGEELIKNMD

SEQ ID NO: 28253 - DNA, 1290 bp, Caldococcus noboribetus
  CDS (1)..(1290): transl_table=11
atggtctctcacccatgcactgcagatgaggctaagcctccttcagagggccagctggcaaggtttgagaacggcaagctcatagtgcctgacaacctaatagttgcttacttcaagggcgacggcatagggcctgagatagttgaaagcgctaagaaggtgcttgacgcagcagttgacaaggcctacgggggcaccaggaggatagtctggtgggaggtgacagctggcgaggaggcccagaaggagtgcggctccctcctgcccgacggcacgcttcaggccttcaagctggctcgcgtcaaccttaaggggcccctgaccacgcccgttggaggcggcttcaggagcctcaacgtgaccctcaggatggtgcttgacctgtactcaaacgtcaggccagtcaagtggtacggccagccgactccgcactgccacccagagaatatagactgggtgatatttagggagaacacggaggacgtctacgctggcatcgagtggcccttcgacagccccgaggcccagaagataagggacttcctcaagaaggagttcggtatagagctgacgccagacacaggcataggcattaagcccatatccaagtggaggacgcagaggcacgtcaggagggccatggagtgggccataaggaacggctataagcacgtgactataatgcacaagggcaacataatgaagtacacggagggcgccttcaggcagtgggcctacgacctcatactctcagagttcagggactacgtggtcaccgaggaggaggttaacaccaagtacggcggcaaggcgccggagggcaagataatagttaatgacaggattgctgacaacatgttgcagcagataataaccaggcccggcgagtacaacgttatagtaacccccaacctgaacggtgactacataagcgacgaggccaacgccctggtgggcggcattggaatggctgcgggacttgacatgggcgatggcatagcggttgcggagccagtccacggcagcgcccccaagtacgctggtaagaacgtcataaacccgaccgccgagatactgagcggcatgtacctgctcagcgacttcgtgggatggccagaggtcaagctgctggttgagtacgcagtcaagcaggcgatagcccacaagcaggtgacctatgacctggccagggagatgggaggggtaacgccaatatcgaccacggagtacaccgatgtcctagttgactacataaggcacgcggacctcaaggccctcaagggccagtga

SEQ ID NO: 28254 - protein, 429 aa, Caldococcus noboribetus
MVSHPCTADEAKPPSEGQLARFENGKLIVPDNLIVAYFKGDGIGPEIVESAKKVLDAAVDKAYGGTRRIVWWEVTAGEEAQKECGSLLPDGTLQAFKLARVNLKGPLTTPVGGGFRSLNVTLRMVLDLYSNVRPVKWYGQPTPHCHPENIDWVIFRENTEDVYAGIEWPFDSPEAQKIRDFLKKEFGIELTPDTGIGIKPISKWRTQRHVRRAMEWAIRNGYKHVTIMHKGNIMKYTEGAFRQWAYDLILSEFRDYVVTEEEVNTKYGGKAPEGKIIVNDRIADNMLQQIITRPGEYNVIVTPNLNGDYISDEANALVGGIGMAAGLDMGDGIAVAEPVHGSAPKYAGKNVINPTAEILSGMYLLSDFVGWPEVKLLVEYAVKQAIAHKQVTYDLAREMGGVTPISTTEYTDVLVDYIRHADLKALKGQ

SEQ ID NO: 28255 - DNA, 1278 bp, Helicobacter pylori J99
  CDS (1)..(1278): transl_table=11
atggcttacaaccctaaaattttacaaaagcctaaagagggcgaagaaattacgattaaagacggcaaattgcatgtgccaaattaccccattatccctttcattgagggcgatggcattggatcggatattaccccagcgatgattaaagtcgtggatagcgcggttcaaaaagcgtataagggcgagaaaaaaatcgcatggtatgaagtgtttgtgggcgaaaaatgctatcaaaaattcaaagaccataaagagttaagccctgaagagcaatggctcttaccggacactattgaagcgatcaaccactataaagtctctattaaagggcctttgaccacgcctattggtgaggggtttagatctttgaatgtggcgttacgccaaaaaatggatttgtatgtgtgcttgagaccggtaaggtggtatgggagtcctagcccggtgaaagaaccacaaaaagtggatatggtgatttttagagaaaattctgaagacatttatgcgggcattgaatggcaagaaggcagtgcggaagcgaaaaaactcatccattttttacaaaatgaactaaaggtagaaaaaatccgcttccctgaaagcagcggcgtagggataaaacccatcagcaaagaaggcacagagaggttggtgagaaaagcgattgaatacgcgattgataacgacaagccaagcgtgacttttgtgcataagggcaacatcatgaaatataccgaaggggcgttcatgaaatggggctatgcgctcgctcaaaaagaatttaacgctcaagtcattgataaaggcccatggtgttctttgaaaaaccctaaaaccggtaaagaaatcatcattaaagacatgatcgctgacgcgtttttgcaacaaattctcttgcgccctagtgaatacagcgtcattgcgaccatgaatttgaacggggattatatctctgatgcgttagcggcgatggtggggggtattggtatcgctcctggggctaatctcaatgacacggtgggcatgtttgaagccacccatggcaccgctcctaaatacgccgggctggataaagtcaatccggggtctattattttgagcgcggaaatgatgttaaggcatatgggctgggtggaagcggctgatttgatcgtttctgctatggaaaaagcgattaagagcaagaaagtaacttatgatttcgctcgtttaatggatggggctaaagaagtgaaatgctctgaattcgctagcgtgatgattgaaaacatgtga

SEQ ID NO: 28256 - protein, 425 aa, Helicobacter pylori J99
MAYNPKILQKPKEGEEITIKDGKLHVPNYPIIPFIEGDGIGSDITPAMIKVVDSAVQKAYKGEKKIAWYEVFVGEKCYQKFKDHKELSPEEQWLLPDTIEAINHYKVSIKGPLTTPIGEGFRSLNVALRQKMDLYVCLRPVRWYGSPSPVKEPQKVDMVIFRENSEDIYAGIEWQEGSAEAKKLIHFLQNELKVEKIRFPESSGVGIKPISKEGTERLVRKAIEYAIDNDKPSVTFVHKGNIMKYTEGAFMKWGYALAQKEFNAQVIDKGPWCSLKNPKTGKEIIIKDMIADAFLQQILLRPSEYSVIATMNLNGDYISDALAAMVGGIGIAPGANLNDTVGMFEATHGTAPKYAGLDKVNPGSIILSAEMMLRHMGWVEAADLIVSAMEKAIKSKKVTYDFARLMDGAKEVKCSEFASVMIENM

SEQ ID NO: 28257 - DNA, 1278 bp, Helicobacter pylori
  CDS (1)..(1278): transl_table=11
gtggcttacaaccctaaaattttacaaaagcctaaagagggcgaagaaattacgattaaagacaacaaattgcatgtgccaaaccaccccattatccccttcattgagggcgatggcattggatcagatattaccccggcgatgattaaagtcgtggatagcgcggttcaaaaagcgtataagggcgagaaaaaaatcgcatggtatgaggtgtttgtgggcgaaaaatgctatcaaaaatttaaagattataaagaattaagcccagaagagcaatggctcttaccggacactattgaagcgattaaccattataaagtttctattaaagggcctttgacaacgcctattggtgaagggtttagatctttgaatgtagcgttacgccaaaaaatggatttgtatgtgtgcttgaggccggtaaggtggtatgggagtcctagcccggtgaaagaaccacaaaaagtggatatggtgatttttagagaaaattctgaagacatttatgcgggcattgaatggcaagaaggcagtgcggaagcgaaaaaactcatccattttttacaaaatgaactaaaggttaaaaaaatccgcttccctgaaagcagcggcataggggtaaaacccatcagtaaagaaggcacagagaggctagtgagaaaggcgattgaatacgcaattgataacgacaagccaagcgtgacttttgtgcataaaggtaacatcatgaaatacaccgaaggggcgttcatgaaatggggctatgcgctcgctcaaaaagaatttaacgctcaagtcattgataaaggcccatggtgttctttgaaaaaccctaaaaacggtaaagaaatcatcattaaagacatgatcgctgacgcgtttttgcaacaaatcttattgcgccctagcgaatacagcgtcattgcgaccatgaatttgaacggggattatatctctgatgcgttagcggcgatggtggggggtattggtatcgctcctggggctaatctcaatgacacggtgggcatgtttgaagccacccatggcaccgctcctaaatatgccgggctggataaagtcaatccggggtctattattttgagcgcggaaatgatgttaaggcatatgggttgggtggaagcggctgatttgatcgtttctgcgatggaaaaagcgattaaaagcaagaaagtaacttacgatttcgctcgtttaatggatggggctaaagaagtgaaatgctctgaatttgctagcgtgatgattgaaaacatgtga

SEQ ID NO: 28258 - protein, 425 aa, Helicobacter pylori
MAYNPKILQKPKEGEEITIKDNKLHVPNHPIIPFIEGDGIGSDITPAMIKVVDSAVQKAYKGEKKIAWYEVFVGEKCYQKFKDYKELSPEEQWLLPDTIEAINHYKVSIKGPLTTPIGEGFRSLNVALRQKMDLYVCLRPVRWYGSPSPVKEPQKVDMVIFRENSEDIYAGIEWQEGSAEAKKLIHFLQNELKVKKIRFPESSGIGVKPISKEGTERLVRKAIEYAIDNDKPSVTFVHKGNIMKYTEGAFMKWGYALAQKEFNAQVIDKGPWCSLKNPKNGKEIIIKDMIADAFLQQILLRPSEYSVIATMNLNGDYISDALAAMVGGIGIAPGANLNDTVGMFEATHGTAPKYAGLDKVNPGSIILSAEMMLRHMGWVEAADLIVSAMEKAIKSKKVTYDFARLMDGAKEVKCSEFASVMIENM

SEQ ID NO: 28259 - DNA, 1452 bp, Rickettsia conorii
  CDS (1)..(1452): transl_table=11
atggcagaatttacaccgattacaattgcatacggggacggtataggtcctgaaataatggaggcagtgctttatatattacgtaaagccgaggctcgtattcgtttagaaaccattgaagtaggtgaaaagctttacaagaagcattatacttcaggcataagcgaggaaagctgggaatcaatacaacgcactggtattatacttaaagccccgattactactccgcaaggtggaggatataaaagtttaaatgtcacgattcgtaaaacattacagctttttgctaatattcgtcctgccgtttcgcttcatccttttactagaacattacatccaaatttgaacctaactattatacgtgagaatgaggaagatttatacgcaggtatagaataccgtcaaacgcataatatgtatgagtcaatgaagttgataagtcatacaggatgtgagaagattattagatatgcttttgaatatgcagtaaaaaataaccgtaaaaaagtcatgtgtttaagcaaagataatattatgaaattttccgatggggttttgcataaagtatttaatgagattgcaaaagaatacccgcaaattaataacgcgcattatattatcgatatcgggacggcaaggcttgctaccaaaccggaaatatttgatgttatcgtaacttctaatttatacggtgatatcatatctgacgtagctgctgaaatttcaggctcggtaggtcttgcaggttctgcaaatattgggcagcattatgcgatgtttgaagcggtacatggaagtgctcccgatattgccggtaaagatatcgcaaatccttcagggcttttaaatgctgcaataatgatgctagtacatatagggcagggtgatatcgctacattaatcgaaaatgcttggaaaaaaactatagaggatggcgttcatacagccgatatatataacgagcagagttctagtaaaaaagtcggtacaaaagaatttgccgaagaagtaacgaaaagattaggacagttaccgacaaagctacctaaagcagattatcccttaattgctgagaagcaagaaagcaatatagattataaaattgatactaaagaagttaagaaattggttggtacggatatatttgtgaatatgaatgtatcttccgctcatgatatagcagataaaattaataaacttgatcttggtaattttgagttaaaaacaatctcgtcaaaaggattaaagctgtggcctcgtgatacaaggtttgaaactgtttccgatcattggtgttgtcgttttatgaataaagatggcacagaaataaagcatttagatataacaagattgcttgaagctttaagcacagcaaatatcgattttatcaaagtagagaatctgtttgaatttgacggggttgcaggttatagcttggctcaaggtgagtaa

SEQ ID NO: 28260 - protein, 483 aa, Rickettsia conorii
MAEFTPITIAYGDGIGPEIMEAVLYILRKAEARIRLETIEVGEKLYKKHYTSGISEESWESIQRTGIILKAPITTPQGGGYKSLNVTIRKTLQLFANIRPAVSLHPFTRTLHPNLNLTIIRENEEDLYAGIEYRQTHNMYESMKLISHTGCEKIIRYAFEYAVKNNRKKVMCLSKDNIMKFSDGVLHKVFNEIAKEYPQINNAHYIIDIGTARLATKPEIFDVIVTSNLYGDIISDVAAEISGSVGLAGSANIGQHYAMFEAVHGSAPDIAGKDIANPSGLLNAAIMMLVHIGQGDIATLIENAWKKTIEDGVHTADIYNEQSSSKKVGTKEFAEEVTKRLGQLPTKLPKADYPLIAEKQESNIDYKIDTKEVKKLVGTDIFVNMNVSSAHDIADKINKLDLGNFELKTISSKGLKLWPRDTRFETVSDHWCCRFMNKDGTEIKHLDITRLLEALSTANIDFIKVENLFEFDGVAGYSLAQGE

SEQ ID NO: 28261 - DNA, 1452 bp, Rickettsia prowazekii
  CDS (1)..(1452): transl_table=11
atggcagcatttacaccgattacaatagcatatggggacggtataggccctgaaatcatggaggcagtactttatatattacgtaaagctgaggctcggattagtttagaaacaattgaagtaggtgaaaagctttacaaaaagcattatacttcaggcatcagcgaggaaagttgggatgtaatacaacgtacagggattatacttaaagcaccgattactactccgcaaagtggaggatataaaagtttaaacgtcacgattcgtaaaacattacagctttttgctaatattcgtcctgttgtttcattttatccttttactagaactctacatccaaatttaaacctcactattatacgtgagaatgaggaagatttatattcaggtgtagaataccgtcaaactcataatatgtatgagtcaatgaagttgataagtcatacaggatgtaaaaaaattattagatatgcttttgaatatgcaataaaaaataaccgtaaaaaagtcacgtgtttaactaaagataatattatgaaattttctgatgggatttttcatagagtatttaatgaaattgcaaaagaatatccacaaattaataatgagcattatattatcgatatcggaacggcaaagcttgctacaaagccggaaatatttgacataatcgtaacttctaatttatatggtgatattatctctgatgtcgctgctgaaatttctggttcggtgggacttgcaggttctgcaaatattgggcagcattatgcaatgtttgaagcagtacacgggagtgctccagatattgcaggtaaaggtattgctaatccttcagggcttttaaatgccgctataatgatgctagttcatataggacagggtgatattgctagtttaatcgaaaatgcttggaagaaaaccatagaggatggagtacatacattcgatatatataatgagcatagttctagtaaaaaagtatgtacaaaagaatttgctgtagaagtaattaaaagattagggcagttaccgattactttacctaaagcagcttatcctttaattgttaagaaacaagagagtaatatagattataaaattgatactagagaagttaagaagttggtcggtacagatatttttattaatatgcacgtattttctgctcatgatatagcagataaaattaataagcttgatattggtaattttgagctcaaaacaatttcgtcaaaaggattaaaattgtggcctcatgattcaaggtttgaaattatttctgatcattggtgttgtcgttttatgaataaagatggcacggaaataaagcatttagatatcacaatgttgcttcaatctttaagcaaagcaaatattgattttattaaagtagaaaatttatttgagtttgatggagtagcatggtatagccttgcacagggtgaatag

SEQ ID NO: 28262 - protein, 483 aa, Rickettsia prowazekii
MAAFTPITIAYGDGIGPEIMEAVLYILRKAEARISLETIEVGEKLYKKHYTSGISEESWDVIQRTGIILKAPITTPQSGGYKSLNVTIRKTLQLFANIRPVVSFYPFTRTLHPNLNLTIIRENEEDLYSGVEYRQTHNMYESMKLISHTGCKKIIRYAFEYAIKNNRKKVTCLTKDNIMKFSDGIFHRVFNEIAKEYPQINNEHYIIDIGTAKLATKPEIFDIIVTSNLYGDIISDVAAEISGSVGLAGSANIGQHYAMFEAVHGSAPDIAGKGIANPSGLLNAAIMMLVHIGQGDIASLIENAWKKTIEDGVHTFDIYNEHSSSKKVCTKEFAVEVIKRLGQLPITLPKAAYPLIVKKQESNIDYKIDTREVKKLVGTDIFINMHVFSAHDIADKINKLDIGNFELKTISSKGLKLWPHDSRFEIISDHWCCRFMNKDGTEIKHLDITMLLQSLSKANIDFIKVENLFEFDGVAWYSLAQGE

SEQ ID NO: 28263 - DNA, 1452 bp, Rickettsia typhi
  CDS (1)..(1452): transl_table=11
atggcagaatttacaccgattacaatagcatatggggacggtataggccctgaaatcatggatgcagtactttatatattacgtcaagctgaagctaggattagtttagaaacaattgaagtaggtgaaaaactttataagaagcattatacttcaggcataagtgaggaaagttggaatgtaatacaacgtacagggattatacttaaagcaccgattactactccgcaaagtggaggatataaaagtttaaacgttacgattcgtaaaacattacagctttttgctaatattcgtcctgctgtttcatttcatccttttactagaactctacatccaaatttaaacctaactattatacgtgagaatgaagaagatttatattcaggtatagagtaccgtcaaacgcataatatgtatgagtcactgaagttgataagtcatacaggatgtaaaaaaattattagatatgcttttgaatatgcagtaaaaaataaccgtaaaaaagttacgtgtttaagtaaagataatattatgaaattttctgatggaatttttcatagagtatttaatgaaatcgctaaagaatatccacaaattgataatgagcattatattatcgatatcggcacggcaaagcttgctacaacgccggaaatatttgacataatcgtaacttctaatttatatggtgatattatttctgatgtagctgctgaaatttctggttcagttggtcttgcaggttctgcaaatatcggtcagcattatgccatgtttgaagcagtacacggcagtgctccagatattgctggtaaaggtattgctaatccttcaggacttttaaatgccgctataatgatgctagttcatataggacaaggtgatattgctagtttaatcgaaaacgcttggaagaaaaccatagaggatggagtacatacattcgatatatatagtgagcatagttctagtaaaaaagtatgtacaaaagaatttgctgaagaagtaattaaaagattagggcagttgccgatgacattacctaaagcatcttatcctttaattgttaagaagcaagagagtaagatagagtataaaattgatactacagaagttaagaagttggtcggtacagatatttttattaatattcatgtattttctgctcatgatatagcagataaaattaataagcttgatattggtaattttgagctcaaaaccatttcgtcaaaaggattaaaattgtggcctcatgatttaaggtttgaaattatttctgatcattggtgttgtcgctttatgaataaagacggtacagaaataaagcatttagatatcataatattgcttcaagctttaagcaaagcaaatattgattttattaaagtagaaaatttatttgagtttgatggagttgcatgttatagccttgcacaaggtgaatag

SEQ ID NO: 28264 - protein, 483 aa, Rickettsia typhi
MAEFTPITIAYGDGIGPEIMDAVLYILRQAEARISLETIEVGEKLYKKHYTSGISEESWNVIQRTGIILKAPITTPQSGGYKSLNVTIRKTLQLFANIRPAVSFHPFTRTLHPNLNLTIIRENEEDLYSGIEYRQTHNMYESLKLISHTGCKKIIRYAFEYAVKNNRKKVTCLSKDNIMKFSDGIFHRVFNEIAKEYPQIDNEHYIIDIGTAKLATTPEIFDIIVTSNLYGDIISDVAAEISGSVGLAGSANIGQHYAMFEAVHGSAPDIAGKGIANPSGLLNAAIMMLVHIGQGDIASLIENAWKKTIEDGVHTFDIYSEHSSSKKVCTKEFAEEVIKRLGQLPMTLPKASYPLIVKKQESKIEYKIDTTEVKKLVGTDIFINIHVFSAHDIADKINKLDIGNFELKTISSKGLKLWPHDLRFEIISDHWCCRFMNKDGTEIKHLDIIILLQALSKANIDFIKVENLFEFDGVACYSLAQGE

SEQ ID NO: 28265 - DNA, 1269 bp, Staphylococcus aureus
  CDS (1)..(1269)
atgactgcagaaaaaattactcaaggaactgaaggattaaacgtacctaatgaaccaattatcccatttattatcggtgatggaattggaccggatatttggaaggcagcaagccgagttatagatgctgctgttgagaaagcctataatggcgaaaaacgcattgaatggaaagaagtgctagctggccaaaaagcatttgatacaactggtgaatggttacctcaagaaacacttgatacaattaaagaatatttaattgctgttaaaggacctttaacaacaccaattggtggtggtattagatcattaaatgtggctttacgccaagaattagatttatttacttgcttaagaccggtacgttggtttaaaggagtaccatcacctgttaaacgtccacaagatgttgatatggttattttccgtgaaaatactgaagacatttatgctggtattgaatttaaagaaggtacaacagaagttaaaaaggtaattgacttcttacaaaacgaaatgggtgcgacaaacattcgattcccagaaacttcaggtattggtattaaaccagtttctaaagaaggaactgagcgattagttagagcagctatacaatatgctatcgataataaccgtaaatcagttactttagttcataaaggtaatattatgaaatttacagaaggctcatttaagcagtggggttacgatttagcattatctgaatttggtgatcaagtattcacttggcaacaatatgacgaaattgttgaaaatgaaggcagagatgctgctaatgctgctcaagaaaaagctgaaaaagaaggcaagattatcattaaagattctattgctgacattttcttacaacaaattttaactcgtccagctgagcatgatgttgtagcaactatgaacttgaatggtgactatatttcagatgctttagctgcacaagttggtggtattggtattgcgccaggtgcaaacattaattatgaaacaggtcatgctatttttgaagcaacacatggtacagctccaaaatatgcaggtttaaataaagtgaatccatcttcagtaattttaagttctgtattaatgttagaacatttaggatggcaagaagcggcagataagattacagattcaattgaagatacaattgcttcaaaagttgttacttatgactttgcccgtttaatggatggtgctgaagaagtttctacatcagcatttgcagatgaattgattaaaaatttaaaataa

SEQ ID NO: 28266 - protein, 422 aa, Staphylococcus aureus
MTAEKITQGTEGLNVPNEPIIPFIIGDGIGPDIWKAASRVIDAAVEKAYNGEKRIEWKEVLAGQKAFDTTGEWLPQETLDTIKEYLIAVKGPLTTPIGGGIRSLNVALRQELDLFTCLRPVRWFKGVPSPVKRPQDVDMVIFRENTEDIYAGIEFKEGTTEVKKVIDFLQNEMGATNIRFPETSGIGIKPVSKEGTERLVRAAIQYAIDNNRKSVTLVHKGNIMKFTEGSFKQWGYDLALSEFGDQVFTWQQYDEIVENEGRDAANAAQEKAEKEGKIIIKDSIADIFLQQILTRPAEHDVVATMNLNGDYISDALAAQVGGIGIAPGANINYETGHAIFEATHGTAPKYAGLNKVNPSSVILSSVLMLEHLGWQEAADKITDSIEDTIASKVVTYDFARLMDGAEEVSTSAFADELIKNLK

SEQ ID NO: 28267 - DNA, 1269 bp, Staphylococcus aureus
  CDS (1)..(1269): transl_table=11
atgactgcagaaaaaattactcaaggaactgaaggattaaacgtacctaatgagccaattatcccatttattatcggtgatggaattggaccggatatttggaaggcagcaagccgagttatagatgctgctgttgagaaagcctataatggcgaaaaacgcattgaatggaaagaagtgctagctggtcaaaaagcatttgatacaactggcgaatggttacctcaagaaacacttgatacaattaaagaatatttaattgctgttaaaggacctttaacaacaccaattggtggtggtattagatcattaaatgtagctttacgccaagaattagatttatttacttgtttaagaccggtacgttggtttaaaggagtaccatcacctgttaaacgtccacaagatgttgatatggttattttccgtgaaaatactgaagacatttatgctggtattgaatttaaagaaggaacaacagaagttaaaaaggtaattgatttcttacaaaacgaaatgggtgcgacaaatattcgattcccagaaacttcaggtattggtattaagccagtttctaaagaaggtactgagcgattagttagagcagcaattcaatatgctatcgataataaccgtaaatcagttactttagttcataaaggtaatattatgaaatttacagaaggctcatttaagcagtggggttacgatttagcattaactgaatttggtgatcaagtatttacttggcaacaatatgacgaaattgttgaaaaagaaggcagagatgctgctaatgttgcacaagaaaaagctgaaaaagaaggcaagattatcattaaagattctattgctgacattttcttacaacaaattttaactcgtccagctgagcatgatgttgtagcaactatgaacttgaatggtgactacatttcagatgcattagctgcacaagttggtggtattggtattgcgccaggtgcaaacattaattatgaaacagggcatgctatttttgaagcaacacatggtacagctccaaaatatgcaggtttaaataaagtgaatccatcttcagtaattttaagttctgtattaatgttagaacatttaggatggcaagaagcggcagataagattacagattcaattgaagatacaattgcttcaaaagttgttacttatgactttgcccgtttaatggatggtgctgaagaagtttctacatcagcatttgcagatgaattgattaaaaatttaaaataa

SEQ ID NO: 28268 - protein, 422 aa, Staphylococcus aureus
MTAEKITQGTEGLNVPNEPIIPFIIGDGIGPDIWKAASRVIDAAVEKAYNGEKRIEWKEVLAGQKAFDTTGEWLPQETLDTIKEYLIAVKGPLTTPIGGGIRSLNVALRQELDLFTCLRPVRWFKGVPSPVKRPQDVDMVIFRENTEDIYAGIEFKEGTTEVKKVIDFLQNEMGATNIRFPETSGIGIKPVSKEGTERLVRAAIQYAIDNNRKSVTLVHKGNIMKFTEGSFKQWGYDLALTEFGDQVFTWQQYDEIVEKEGRDAANVAQEKAEKEGKIIIKDSIADIFLQQILTRPAEHDVVATMNLNGDYISDALAAQVGGIGIAPGANINYETGHAIFEATHGTAPKYAGLNKVNPSSVILSSVLMLEHLGWQEAADKITDSIEDTIASKVVTYDFARLMDGAEEVSTSAFADELIKNLK

SEQ ID NO: 28269 - DNA, 1269 bp, Staphylococcus aureus
  CDS (1)..(1269): transl_table=11
atgactgcagaaaaaattactcaaggaactgaaggattaaacgtacctaatgaaccaattatcccatttattatcggtgatggaattggaccggatatttggaaggcagcaagccgagttatagatgctgctgttgagaaagcctataatggcgaaaaacgcattgaatggaaagaagtgctagctggccaaaaagcatttgatacaactggtgaatggttacctcaagaaacacttgatacaattaaagaatatttaattgctgttaaaggacctttaacaacaccaattggtggtggtattagatcattaaatgtggctttacgccaagaattagatttatttacttgtttaagaccggtacgttggtttaaaggagtaccatcacctgttaaacgtccacaagatgttgatatggttattttccgtgaaaatactgaagacatttatgctggtattgaatttaaagaaggtacaacagaagttaaaaaggtaattgacttcttacaaaacgaaatgggtgcgacaaatattcgattcccagaaacttcaggtattggtattaaaccagtttctaaagaaggaactgagcgattagttagagcagctatacaatatgctatcgataataaccgtaaatcagttactttagttcataaaggtaatattatgaaatttacagaaggctcatttaagcagtggggttacgatttagcattatctgaatttggtgatcaagtattcacttggcaacaatatgacgaaattgttgaaaaagaaggcagagatgctgctaatgctgctcaagaaaaagctgaaaaagaaggcaagattatcattaaagattctattgctgacattttcttacaacaaattttaactcgtccagctgagcatgatgttgtagcaactatgaacttgaatggtgactatatttcagatgctttagctgcacaagttggtggtattggtattgcgccaggtgcaaacattaattatgaaacaggtcatgctatttttgaagcaacacatggtacagctccaaaatatgcaggtttaaataaagtgaatccatcttcagtaattttaagttctgtattaatgttagaacatttaggatggcaagaagcggcagataagattacagattcaattgaagatacaattgcttcaaaagttgttacttatgactttgcccgtttaatggatggtgctgaagaagtttctacatcagcatttgcagatgaattgattaaaaatttaaaataa

SEQ ID NO: 28270 - protein, 422 aa, Staphylococcus aureus
MTAEKITQGTEGLNVPNEPIIPFIIGDGIGPDIWKAASRVIDAAVEKAYNGEKRIEWKEVLAGQKAFDTTGEWLPQETLDTIKEYLIAVKGPLTTPIGGGIRSLNVALRQELDLFTCLRPVRWFKGVPSPVKRPQDVDMVIFRENTEDIYAGIEFKEGTTEVKKVIDFLQNEMGATNIRFPETSGIGIKPVSKEGTERLVRAAIQYAIDNNRKSVTLVHKGNIMKFTEGSFKQWGYDLALSEFGDQVFTWQQYDEIVEKEGRDAANAAQEKAEKEGKIIIKDSIADIFLQQILTRPAEHDVVATMNLNGDYISDALAAQVGGIGIAPGANINYETGHAIFEATHGTAPKYAGLNKVNPSSVILSSVLMLEHLGWQEAADKITDSIEDTIASKVVTYDFARLMDGAEEVSTSAFADELIKNLK

SEQ ID NO: 28271 - DNA, 1269 bp, Staphylococcus epidermidis
  CDS (1)..(1269): transl_table=11
atgtctgcagaaaaaataacacagagtaaagatggtttaaatgtacctaatgaacctattattccgtttattattggtgatggtattggaccagatatttggaaagcagctagccgagtaatcgatgctgctgttgaaaaagcgtataatggagaaaaacgtatagaatggaaagaagtcttagcaggtcaaaaagcttatgatgaaactggagaatggttgccacaagaaacgttagaaacaatcaaagaatatttaattgctgttaaaggtcctttaacaactccaattggtggtggaattcgttcattaaacgtagcactgagacaagagttagatttattcacttgtttacgtccggtacgttggttcaaaggcgttccttcaccagttaagcgacctgaagatgttgatatggttattttccgtgaaaataccgaagatatatatgcagggatagaatttaaacaaggtacatcagaagtaaaaaaagttatagatttcttacaaaatgaaatgggagcaactaatattcgtttccctgaaacttctggtattggtataaagccagtatctaaagaaggtacagaacgtctagtaagagcagctattcaatatgcacttgataataatcgtaaatcagtaactttagttcataaaggtaatattatgaaatttactgaaggttcatttaagcagtggggctatgatttagctcataatgaatttggtgataaagtgtttacatggcaacaatatgatgaaattgttgaacaaaagggtaaagatgctgcgaatgaagcacaaagtaaagctgaacaagaaggtaaaattattattaaagactctattgctgatatcttcttacaacaaatattaactcgtccagctgaacatgatgttgtggcaactatgaatttaaatggtgactatatctctgatgctcttgcagctcaagttggaggcattggtattgcgcctggtgctaacattaactatgaaactggacatgctatttttgaagcaacacatggtactgcacctaaatatgctggtttaaataaggttaatccgtcatcagaaattttaagttcagttttaatgcttgaacatttaggttggcaagaagccgcagataaaatcactgactctattgaggcaacaattgcttcaaaaatcgtaacatatgattttgcgcgtcttatggatggtgcaaaagaagtttcaacatctgattttgctgatgaactaattaagaatattagataa

SEQ ID NO: 28272 - protein, 422 aa, Staphylococcus epidermidis
MSAEKITQSKDGLNVPNEPIIPFIIGDGIGPDIWKAASRVIDAAVEKAYNGEKRIEWKEVLAGQKAYDETGEWLPQETLETIKEYLIAVKGPLTTPIGGGIRSLNVALRQELDLFTCLRPVRWFKGVPSPVKRPEDVDMVIFRENTEDIYAGIEFKQGTSEVKKVIDFLQNEMGATNIRFPETSGIGIKPVSKEGTERLVRAAIQYALDNNRKSVTLVHKGNIMKFTEGSFKQWGYDLAHNEFGDKVFTWQQYDEIVEQKGKDAANEAQSKAEQEGKIIIKDSIADIFLQQILTRPAEHDVVATMNLNGDYISDALAAQVGGIGIAPGANINYETGHAIFEATHGTAPKYAGLNKVNPSSEILSSVLMLEHLGWQEAADKITDSIEATIASKIVTYDFARLMDGAKEVSTSDFADELIKNIR

SEQ ID NO: 28273 - DNA, 1182 bp, Streptococcus mutans
  CDS (1)..(1182): transl_table=11
atggcagaaaaagtaagttttgaagaagggaaattacaggtgcctgataagcccgttattccttacattgaaggagatggtgttggtcaggatatttggaagaatgcgcaaatcgtttttgataaagccattgctaaagtttatggaggtcacaagcaggttatttggcgggaggtcttagctggtaaaaaagcttataatgaaacaggcaactggctgcctaatgagactttagaaattatcaagacgcatttacttgctattaaaggtccattggaaactcctgttggaggtggcattcgttccttaaatgttgccctgcgtcaagaattggatctctttgcttgcgtgcgtccagtgcgttatttcaaaggtgtccctagtccacttaagcatcctgaaaaaacggctattaccatttttcgagaaaatactgaagatatttacgcaggtatcgaatggaatgcgggtacagcagaagttcaaaaggtcatcaactttttacaagatgatatgcaggttaagaaaattcgttttccaaaaagcagcagtatagggattaaacctatttcaattgaaggcagccaacgtttgattcgtgcagctatcgaatatgctctggccaacaatctgaccaaggtaactttggttcataaaggaaatattcaaaaattcactgaaggtggctttagaaaatggggctatgaattagcaaaacgtgagtatgctgccgaacttgccagtggtcaattggtagttgatgatattattgctgacaatttcttgcaacaaattctgctcaagcctgagcgttttgatgtagttgccttaacgaatctcaatggagactatgccagcgatgccttagcagcacaagttggcggtattggtatttcgccaggagctaatattaactatcaaacgggacatgctatttttgaagcaacccatggaacggctccagatattgcaggtcaagacttggccaacccatcttctgttttattatcaggctgcatgctttttgactatattggttggtcaaaagtctcagatttaatcatgaaagctgttgaaaaagctattgcaaatggtcaagttaccattgattttgccaaggaactaggggttgaagcattgacaacccgtcagttttctgaagttctattgacttatttatag

SEQ ID NO: 28274 - protein, 393 aa, Streptococcus mutans
MAEKVSFEEGKLQVPDKPVIPYIEGDGVGQDIWKNAQIVFDKAIAKVYGGHKQVIWREVLAGKKAYNETGNWLPNETLEIIKTHLLAIKGPLETPVGGGIRSLNVALRQELDLFACVRPVRYFKGVPSPLKHPEKTAITIFRENTEDIYAGIEWNAGTAEVQKVINFLQDDMQVKKIRFPKSSSIGIKPISIEGSQRLIRAAIEYALANNLTKVTLVHKGNIQKFTEGGFRKWGYELAKREYAAELASGQLVVDDIIADNFLQQILLKPERFDVVALTNLNGDYASDALAAQVGGIGISPGANINYQTGHAIFEATHGTAPDIAGQDLANPSSVLLSGCMLFDYIGWSKVSDLIMKAVEKAIANGQVTIDFAKELGVEALTTRQFSEVLLTYL

SEQ ID NO: 28275 - DNA, 1176 bp, Streptococcus salivarius
  CDS (1)..(1176): transl_table=11
atggcagaaaaaatcgtaatgaaaaatggacagcttcaagtttctgatcgtccaattatcccttttattgaaggcgatggtgttggacatgatatctggaagaatgcccaagcaatctttgataaagcagtagaagtagcctatgaaggaaagcgtcatattgaatggcaagagcttctagccggtaagaaggcttatgacaaaacaggtgaatggttgccgaaagaaactttggaagctattcgagaaagtttagtagctattaagggaccgcttgagacgccagtaggtggtggtatccgttcattaaatgtagcattacgtcaagaacttgatctctacgcttgtgttagacctgttcgttactttgacggagtagcaagtccacttaaggaaccagaaaaaacaaatattactatcttccgtgaaaataccgaagatatttatgctgggattgaatgggaagcaggaacggcagatgtcaagcgcgtgattgagtttctccagacagaaatgaatgttaataaaattcgcttcccagagtcaagtagtatcggaattaagccaatttcaatagaaggaagtaaacgtctcattcgctctgctatcgactatgctctcaagaacaatctaaagaaagtgacattggttcataaagggaatattcaaaaattcacagaaggtggcttccgtaaatggggttatgaagtagctcaggaagactataaagaagaattgctggctggtcgtttagagattaatgatataatcgctgataactttctccaacagattcttttaaatccagaaaaatttgatgttgttgccttaaccaacttgaatggtgattatgccagtgatgccttggctgcacaagttggtggtatcggcatctcccctggagccaacattaactatcaaacaggccatgctatttttgaagcaacacatggaacagctccggatattgcagatcaagataaggctaatccttgctcagttttattatctggctgcatgcttctagattatattggttggactgaggcagctcaactgattacaagtgctattgagaagacatttaaagctgatatctttacagctgacttagcatttgggaaacaagcttattcaacgagtgcctttagcaatcaaattctttcaattatgtga

SEQ ID NO: 28276 - protein, 391 aa, Streptococcus salivarius
MAEKIVMKNGQLQVSDRPIIPFIEGDGVGHDIWKNAQAIFDKAVEVAYEGKRHIEWQELLAGKKAYDKTGEWLPKETLEAIRESLVAIKGPLETPVGGGIRSLNVALRQELDLYACVRPVRYFDGVASPLKEPEKTNITIFRENTEDIYAGIEWEAGTADVKRVIEFLQTEMNVNKIRFPESSSIGIKPISIEGSKRLIRSAIDYALKNNLKKVTLVHKGNIQKFTEGGFRKWGYEVAQEDYKEELLAGRLEINDIIADNFLQQILLNPEKFDVVALTNLNGDYASDALAAQVGGIGISPGANINYQTGHAIFEATHGTAPDIADQDKANPCSVLLSGCMLLDYIGWTEAAQLITSAIEKTFKADIFTADLAFGKQAYSTSAFSNQILSIM

SEQ ID NO: 28277 - DNA, 1428 bp, Synechocystis sp
  CDS (1)..(1428): transl_table=11
atgtacgaaaaacttcagccccccagcgttgggtcaaaaatcacctttgttgcaggtaagcccgtagtacccaacgatccgattattccctacatccggggggacggcaccggggttgatatttggcccgctacggaattagtcatcaatgcagcgatcgccaaggcctatggcggccgagaggaaatcaactggttcaaagtctatgccggggacgaagcctgtgaattgtacggcacttatcagatatttccggaagacactttaacagcgattaaggagtatggggtagccatcaaagggcctctcacaaccccggtgggcggtggtatccgttccctaaacgtggccctgagacaaatttttgacctctacacctgtgtgcggccctgtcgttactatcccggtactccgtctccccacaaaaccccggaaaaattagacattatcgtttatcgggaaaatacggaagatatttacctaggcattgaatgggcggaaggtacggaaggggcgaaaaagttaatcgcttaccttaacgatgaactcattcccacaactccagctttgggcaaaaaacaaattcgcctcgactctggcattggtattaaaccgattagtaagactggttcccaacggttggtgcggcgggctattctccatgctaagcgcttgccgaaagcaaaacagatggtgacgttggtccataagggcaacattatgaagttcaccgaagggccgtttcgggattggggttacgagttggctacgacggaatttcgggcggaatgcgttacggaacgggaatcttggatttgcggcaataaggaaagtaatccggacttaaccattgaggccaacgcccacatgattgaccccggttatgacactttgaccgaagaaaaacaagcggtcattaaacaagaagtggagcaggttttaaattccatttgggaatcccatggtaatggccagtggaaagaaaaagtcatggtcaatgaccgcattgccgatagtattttccaacagatccaaacccgccccgatgagtattccattctggcgaccatgaatttgaacggggattacctttccgatgccgccgccgctgtggtgggaggtttgggcatgggccccggagctaacattggggatagtgcagccatttttgaagccacccacggcactgcccccaaacatgctggtttagaccggatcaaccccggctctgtgatcctttccggcgtaatgatgctggaatttatgggctggcaggaggccgctgatctgattaaaaaaggtatcggagcggcgatcgccaatcgggaagttacctacgatttagcccggttaatggaaccgaaggtggataaacccctaaaatgctccgagtttgcccaggcgatcgtcagtcatttcgatgattaa

SEQ ID NO: 28278 - protein, 475 aa, Synechocystis sp
MYEKLQPPSVGSKITFVAGKPVVPNDPIIPYIRGDGTGVDIWPATELVINAAIAKAYGGREEINWFKVYAGDEACELYGTYQIFPEDTLTAIKEYGVAIKGPLTTPVGGGIRSLNVALRQIFDLYTCVRPCRYYPGTPSPHKTPEKLDIIVYRENTEDIYLGIEWAEGTEGAKKLIAYLNDELIPTTPALGKKQIRLDSGIGIKPISKTGSQRLVRRAILHAKRLPKAKQMVTLVHKGNIMKFTEGPFRDWGYELATTEFRAECVTERESWICGNKESNPDLTIEANAHMIDPGYDTLTEEKQAVIKQEVEQVLNSIWESHGNGQWKEKVMVNDRIADSIFQQIQTRPDEYSILATMNLNGDYLSDAAAAVVGGLGMGPGANIGDSAAIFEATHGTAPKHAGLDRINPGSVILSGVMMLEFMGWQEAADLIKKGIGAAIANREVTYDLARLMEPKVDKPLKCSEFAQAIVSHFDD

SEQ ID NO: 28279 - DNA, 1491 bp, Thermus thermophilus
  CDS (1)..(1491): transl_table=11
atgcccctgatcaccacggaaaccggcaagaagatgcacgttctcgaggacgggcgcaagctcatcaccgtcatccccggagacggcatcgggcccgagtgcgtggaggctaccctcaaggtcctagaggcggccaaggcccccctggcctacgaggtgcgagaggcgggggcgagcgtcttccggcggggcatcgcctcgggcgttccccaggagaccattgagtccatccgcaagacccgggtggtcctgaagggtcccctggaaaccccggtgggctacggggagaagagcgccaacgtcaccctaaggaagctctttgagacctacgccaacgtccgccccgtgcgggagttccccaacgtccccaccccctatgcgggccggggcattgacctcgtggtggtgcgggagaacgtggaggacctctacgccgggattgagcacatgcagaccccgagcgtggcccagaccctcaagctcatctcctggaagggatcggagaagatcgtccgcttcgcctttgagctggcccgggccgaggggcggaagaaggtccactgcgccaccaagtccaacatcatgaagctcgccgaagggaccctgaagcgggcctttgagcaggtggcccaggagtaccccgacatagaagcggtccacatcatcgtggacaacgctgcccaccagctggtgaaaaggcccgagcagtttgaggtgatcgtcaccaccaacatgaacggagacatcctctccgacctcacctcggggctcattgggggcctgggcttcgctccctcggccaacatcggcaacgaggtggccatctttgaggccgtccacggttccgcccccaagtacgccgggaagaacgtcatcaaccccaccgcggtcctcctctcggcggtgatgatgctccgctacctggaggagttcgccacggcggaccttatagagaacgccctcctctacaccctcgaggagggccgggtcctcacgggggacgtggtgggctacgaccggggggccaagaccacggagtacaccgaggccatcatccagaacctgggcaagaccccaaggaagacccaggtgcggggctacaagcccttccgcctgccccaggtggacggggccatcgcccccatcgtccctaggagccgccgggttgtgggggtggacgtcttcgtggaaaccaacctcctgcccgaggccctgggaaaggccctggaggaccttgccgcgggcacccccttccggctcaagatgatctccaaccggggcacccaggtctacccccccaccggcgggctcacggacctggtggaccactaccgctgccgcttcctctacacgggggagggggaggctaaggacccggagatcctggacctcgtaagccgggtggcaagccgcttccgctggatgcacctggagaagctccaggaatttgacggcgagcccggcttcaccaaggcccaaggggaagactaa

SEQ ID NO: 28280 - protein, 496 aa, Thermus thermophilus
MPLITTETGKKMHVLEDGRKLITVIPGDGIGPECVEATLKVLEAAKAPLAYEVREAGASVFRRGIASGVPQETIESIRKTRVVLKGPLETPVGYGEKSANVTLRKLFETYANVRPVREFPNVPTPYAGRGIDLVVVRENVEDLYAGIEHMQTPSVAQTLKLISWKGSEKIVRFAFELARAEGRKKVHCATKSNIMKLAEGTLKRAFEQVAQEYPDIEAVHIIVDNAAHQLVKRPEQFEVIVTTNMNGDILSDLTSGLIGGLGFAPSANIGNEVAIFEAVHGSAPKYAGKNVINPTAVLLSAVMMLRYLEEFATADLIENALLYTLEEGRVLTGDVVGYDRGAKTTEYTEAIIQNLGKTPRKTQVRGYKPFRLPQVDGAIAPIVPRSRRVVGVDVFVETNLLPEALGKALEDLAAGTPFRLKMISNRGTQVYPPTGGLTDLVDHYRCRFLYTGEGEAKDPEILDLVSRVASRFRWMHLEKLQEFDGEPGFTKAQGED

SEQ ID NO: 28281 - DNA, 981 bp, Archaeoglobus fulgidus
  CDS (1)..(981): transl_table=11
atgaagaaaattgtggtaatccccggagacggcataggcaaggaggttatggaggctgcgatgctaattctcgagaagctcgacctgccctttgaatacagctactacgatgctggagatgaggctctggagaagtacggaaaagctctgcctgatgagacgctggaagcttgcaggaagagcgatgcggtgcttttcggtgccgccggggaaacggcggcagatgtcatagtgaggctgagaagggagctcggaacctttgccaacgtcaggccagcgaaggcaattgagggcattgaatgcctctatcccggcttagacattgttgtggtgagggaaaacacagagtgcctttacatgggcttcgagttcggcttcggggacgttactgaagccatcagagtgattacgagagaggcttccgagagaattgcgaggtatgcttttgagctggctaaaagggagggcaggaagaaggttacagccctgcacaaagccaatgttatgaagaaaacatgcgggctatttagggatgtgtgcagagaagttgcgaaagattatcccgaaattcagtacaatgactactacatcgatgcagcttgcatgtacctcgttatggaccccttccgcttcgatgtaatcgttacgacaaacatgtttggtgatatcgtctctgacttagctgcaggcctcgttggaggacttggtcttgccccctcagccaatgttggggagaggacggccattttcgagccggtacatggtgctgccttcgacatcgctggaaagggaattgcaaatccaactgccatgattctcacagcctgcatgatgctccgccacttcggctatgttgaggaggccaagaaggttgaggaagctgttgagaagaccattaaggaggggaagaagactccggatttgggaggtaacctcaaaactatggagtttgccaacgaagttgcatcccttttggattag

SEQ ID NO: 28282 - protein, 326 aa, Archaeoglobus fulgidus
MKKIVVIPGDGIGKEVMEAAMLILEKLDLPFEYSYYDAGDEALEKYGKALPDETLEACRKSDAVLFGAAGETAADVIVRLRRELGTFANVRPAKAIEGIECLYPGLDIVVVRENTECLYMGFEFGFGDVTEAIRVITREASERIARYAFELAKREGRKKVTALHKANVMKKTCGLFRDVCREVAKDYPEIQYNDYYIDAACMYLVMDPFRFDVIVTTNMFGDIVSDLAAGLVGGLGLAPSANVGERTAIFEPVHGAAFDIAGKGIANPTAMILTACMMLRHFGYVEEAKKVEEAVEKTIKEGKKTPDLGGNLKTMEFANEVASLLD

SEQ ID NO: 28283 - DNA, 1002 bp, Methanococcus jannaschii
  CDS (1)..(1002): transl_table=11
atgcataaaatatgtgttatagaaggagatggaattggtaaagaggttgttccagcaacaattcaagttttagaagctactggtttgccatttgagtttgtctatgctgaggcaggggatgaggtttataaaagaactggtaaggcattaccagaagaaacaattgaaactgccttagactgtgatgctgttttatttggagcggctggagaaacagcggcagatgttattgttaaattgaggcatatattggatacttatgcaaacattagaccagttaaagcatacaaaggagttaagtgcctaaggccagatattgattacgttatagttagggaaaacactgaagggctttataaaggaatagaggcagagattgatgaaggaattacaatagctacaagagttataacagaaaaagcatgtgagagaatatttagatttgcttttaacttagcaagggaaagaaagaagatgggcaaagaaggaaaggttacatgtgctcacaaagcaaatgtcttaaaattaactgatgggttatttaaaaagatattttataaagttgcagaggaatatgacgatataaaagcagaagattattacatagatgcaatgaatatgtatatcataacaaaaccgcaagtatttgatgttgtagttacttccaacttatttggagatattttatcagatggagctgctggaactgttgggggattaggtttagctccttcagcgaatataggagatgaacatggattatttgagccggttcatggttcagctccagatattgctggaaaaaagatagctaatccaacagctacaatattaagtgctgttttaatgcttagatacttaggagagtatgaagctgcagataaagttgaaaaagcattggaggaagttttagctttaggtttaacaacacctgacttaggaggtaatttaaatacatttgaaatggctgaagaagtagctaaaagagtaagagaagaataa

SEQ ID NO: 28284 - protein, 333 aa, Methanococcus jannaschii
MHKICVIEGDGIGKEVVPATIQVLEATGLPFEFVYAEAGDEVYKRTGKALPEETIETALDCDAVLFGAAGETAADVIVKLRHILDTYANIRPVKAYKGVKCLRPDIDYVIVRENTEGLYKGIEAEIDEGITIATRVITEKACERIFRFAFNLARERKKMGKEGKVTCAHKANVLKLTDGLFKKIFYKVAEEYDDIKAEDYYIDAMNMYIITKPQVFDVVVTSNLFGDILSDGAAGTVGGLGLAPSANIGDEHGLFEPVHGSAPDIAGKKIANPTATILSAVLMLRYLGEYEAADKVEKALEEVLALGLTTPDLGGNLNTFEMAEEVAKRVREE

SEQ ID NO: 28285 - DNA, 990 bp, Methanobacterium thermoautotrophicum
  CDS (1)..(990): transl_table=11
gtgaaatcaatgaagatagcagtcatacccggtgatggaatcggagtggaggtgatggaggcagccctccacatcctgaacaccctcgaccttgaccttgaattcatacatgcagatgccggtgatgcctgccttaaaaggacagggacggcactgccagaggagacccttgaagccgtgggtgaagccagggcaaccctcttcggggctgcgggtgaaagcgcagctgacgttatagtccgcctgaggcgtgaatttgatctttttgcgaatttgaggcctgttaagtccctgccaggtgtcccctgcctctacccggaccttgactttgtgattgtgcgggagaacaccgaggacctctatgtcggtgacgaggagtacacccctgagggcgccgttgcaaaaagaatcataacaagaaccgcctccaggagaatcagccaattcgccttccagtacgcccagaaagagggcatgcaaaaggtaacagcagtccacaaggccaacgtactcaaaaaaaccgacggaatcttcagagacgaattctataaagtggcatcagaatacccccagatggaggccaccgactactacgtggacgccacagcaatgtacctcataacccagccccaggaattccagaccatcgtcacaaccaacctattcggagacatactatcagacgaagccgcaggactcatcggaggactcggactcgcaccatcagcaaacataggagaaaaaaacgcactattcgaaccagtgcacggatcagcaccccaaatcgcaggaaaaaacatagccaaccccacagccatgatactaacaaccacactaatgctaaaacacctcaacaaaaaacaagaagcccaaaaaatagaaaaagcactccaaaaaacccttgcagagggtcttgtgacaccggacctcggtgggaagcttggcaccatggagatggctgccgagatagccagacacctggaggattga

SEQ ID NO: 28286 - protein, 329 aa, Methanobacterium thermoautotrophicum
MKSMKIAVIPGDGIGVEVMEAALHILNTLDLDLEFIHADAGDACLKRTGTALPEETLEAVGEARATLFGAAGESAADVIVRLRREFDLFANLRPVKSLPGVPCLYPDLDFVIVRENTEDLYVGDEEYTPEGAVAKRIITRTASRRISQFAFQYAQKEGMQKVTAVHKANVLKKTDGIFRDEFYKVASEYPQMEATDYYVDATAMYLITQPQEFQTIVTTNLFGDILSDEAAGLIGGLGLAPSANIGEKNALFEPVHGSAPQIAGKNIANPTAMILTTTLMLKHLNKKQEAQKIEKALQKTLAEGLVTPDLGGKLGTMEMAAEIARHLED

SEQ ID NO: 28287 - DNA, 1074 bp, Solanum tuberosum
  CDS (1)..(1074)
atggctcttcagattgcgaaaagactccttcgatgccgcgctgattctgttgcatcctctgttagatttttcgatcggaccttcacttccgaatccaattccaacttgatccgcgctacgcttttccccggcgatggtattggacctgaaatcgccgagtccgtcaggcagatattcaaggttgctgaggtaccaattgaatgggaagaacactatgtggggacggaggtagaccctagaaccaacagctttctaacatgggaaagtcttgaatcagtgagacggaataaggttggtttgaaagggccaatggccactcctattggaaaaggtcatcgttccttgaaccttacattgaggaaggagttaaatctatatgccaatgtcagaccttgctacagcctacctggatataagactcgctacgatgatgtgaatctcatcactattagagagaacactgaaggagagtacagtggtcttgaacatcaagtagtaagaggtgtggttgaaagtctcaagatcattacccgtcaagcaagtttaagggttgcagagtatgcatttcactatgccaagacccatggaagagagagagtgtctgcaattcacaaagccaacatcatgcagaagacagatggtctttttcttaagtgttgccgagaggtcgcggaaaagtaccctgagataaagtatgaggaagttgtcattgacaattgctgtatgatgcttgtgaaaaatccagcactttttgatgttctggtgatgcctaatctttatggtgacataatcagtgatctttgtgctggtttgattggtggtttgggcttaactccaagttgcaatattggcgagggaggtattgcccttgctgaggctgtgcatggttcagcacctgatattgccggaaagaatttggcgaatccaactgctttgcttttgagttctgtctctatgcttcgtcatctagagcttcatgataaagctgatcgcatccaagatgccatcctaaaaacaattgcaggagggaaagtaccgaactggcgaccttggaggcactgctacaacaactga

SEQ ID NO: 28288 - protein, 357 aa, Solanum tuberosum
MALQIAKRLLRCRADSVASSVRFFDRTFTSESNSNLIRATLFPGDGIGPEIAESVRQIFKVAEVPIEWEEHYVGTEVDPRTNSFLTWESLESVRRNKVGLKGPMATPIGKGHRSLNLTLRKELNLYANVRPCYSLPGYKTRYDDVNLITIRENTEGEYSGLEHQVVRGVVESLKIITRQASLRVAEYAFHYAKTHGRERVSAIHKANIMQKTDGLFLKCCREVAEKYPEIKYEEVVIDNCCMMLVKNPALFDVLVMPNLYGDIISDLCAGLIGGLGLTPSCNIGEGGIALAEAVHGSAPDIAGKNLANPTALLLSSVSMLRHLELHDKADRIQDAILKTIAGGKVPNWRPWRHCYNN

SEQ ID NO: 28289 - DNA, 25 bp, Artificial sequence
  Primer sequence
atggaaagtaaagtagttgttccgg

SEQ ID NO: 28290 - DNA, 24 bp, Artificial sequence
  Primer sequence
ttacatgttttcgatgatcgcgtc

SEQ ID NO: 28291 - protein, 481 aa, Artificial sequence
  Consensus
  Variant (2)..(3): Xaa in position 2 to 3 is any amino acid
  Variant (5)..(5): Xaa in position 5 is any amino acid
  Variant (11)..(11): Xaa in position 11 is any amino acid
  Variant (14)..(19): Xaa in position 14 to 19 is any amino acid
  Variant (21)..(23): Xaa in position 21 to 23 is any amino acid
  Variant (25)..(26): Xaa in position 25 to 26 is any amino acid
  Variant (27)..(34): Xaa in position 27 to 34 is any or no amino acid
  Variant (36)..(36): Xaa in position 36 is any or no amino acid
  Variant (38)..(38): Xaa in position 38 is any amino acid
  Variant (39)..(42): Xaa in position 39 to 42 is any or no amino acid
  Variant (44)..(52): Xaa in position 44 to 52 is any amino acid
  Variant (53)..(62): Xaa in position 53 to 62 is any or no amino acid
  Variant (65)..(65): Xaa in position 65 is any amino acid
  Variant (66)..(67): Xaa in position 66 to 67 is any or no amino acid
  Variant (69)..(70): Xaa in position 69 to 70 is any amino acid
  Variant (72)..(75): Xaa in position 72 to 75 is any amino acid
  Variant (77)..(77): Xaa in position 77 is any amino acid
  Variant (83)..(83): Xaa in position 83 is any amino acid
  Variant (88)..(93): Xaa in position 88 to 93 is any or no amino acid
  Variant (95)..(96): Xaa in position 95 to 96 is any or no amino acid
  Variant (101)..(101): Xaa in position 101 is any amino acid
  Variant (104)..(107): Xaa in position 104 to 107 is any amino acid
  Variant (110)..(111): Xaa in position 110 to 111 is any amino acid
  Variant (115)..(118): Xaa in position 115 to 118 is any amino acid
  Variant (119)..(119): Xaa in position 119 is any or no amino acid
  Variant (121)..(122): Xaa in position 121 to 122 is any or no amino acid
  Variant (124)..(125): Xaa in position 124 to 125 is any amino acid
  Variant (126)..(139): Xaa in position 126 to 139 is any or no amino acid
  Variant (143)..(143): Xaa in position 143 is any amino acid
  Variant (149)..(150): Xaa in position 149 to 150 is any amino acid
  Variant (152)..(152): Xaa in position 152 is any amino acid
  Variant (156)..(164): Xaa in position 156 to 164 is any amino acid
  Variant (165)..(193): Xaa in position 165 to 193 is any or no amino acid
  Variant (196)..(196): Xaa in position 196 is any or no amino acid
  Variant (199)..(200): Xaa in position 199 to 200 is any amino acid
  Variant (203)..(203): Xaa in position 203 is any amino acid
  Variant (206)..(208): Xaa in position 206 to 208 is any amino acid
  Variant (210)..(211): Xaa in position 210 to 211 is any amino acid
  Variant (214)..(216): Xaa in position 214 to 216 is any amino acid
  Variant (217)..(221): Xaa in position 217 to 221 is any or no amino acid
  Variant (223)..(224): Xaa in position 223 to 224 is any amino acid
  Variant (227)..(227): Xaa in position 227 is any amino acid
  Variant (236)..(236): Xaa in position 236 is any amino acid
  Variant (240)..(240): Xaa in position 240 is any amino acid
  Variant (242)..(247): Xaa in position 242 to 247 is any amino acid
  Variant (250)..(251): Xaa in position 250 to 251 is any amino acid
  Variant (252)..(322): Xaa in position 252 to 322 is any or no amino acid
  Variant (324)..(326): Xaa in position 324 to 326 is any or no amino acid
  Variant (328)..(328): Xaa in position 328 is any amino acid
  Variant (330)..(330): Xaa in position 330 is any amino acid
  Variant (332)..(336): Xaa in position 332 to 336 is any amino acid
  Variant (339)..(340): Xaa in position 339 to 340 is any amino acid
  Variant (342)..(343): Xaa in position 342 to 343 is any amino acid
  Variant (345)..(345): Xaa in position 345 is any amino acid
  Variant (346)..(347): Xaa in position 346 to 347 is any or no amino acid
  Variant (350)..(352): Xaa in position 350 to 352 is any amino acid
  Variant (355)..(355): Xaa in position 355 is any amino acid
  Variant (358)..(358): Xaa in position 358 is any amino acid
  Variant (362)..(363): Xaa in position 362 to 363 is any amino acid
  Variant (366)..(366): Xaa in position 366 is any amino acid
  Variant (367)..(367): Xaa in position 367 is any or no amino acid
  Variant (374)..(374): Xaa in position 374 is any amino acid
  Variant (376)..(376): Xaa in position 376 is any amino acid
  Variant (380)..(383): Xaa in position 380 to 383 is any amino acid
  Variant (384)..(387): Xaa in position 384 to 387 is any or no amino acid
  Variant (393)..(393): Xaa in position 393 is any amino acid
  Variant (399)..(400): Xaa in position 399 to 400 is any amino acid
  Variant (403)..(406): Xaa in position 403 to 406 is any amino acid
  Variant (409)..(409): Xaa in position 409 is any amino acid
  Variant (416)..(416): Xaa in position 416 is any amino acid
  Variant (420)..(420): Xaa in position 420 is any amino acid
  Variant (421)..(421): Xaa in position 421 is any or no amino acid
  Variant (424)..(428): Xaa in position 424 to 428 is any amino acid
  Variant (430)..(431): Xaa in position 430 to 431 is any amino acid
  Variant (433)..(434): Xaa in position 433 to 434 is any amino acid
  Variant (437)..(439): Xaa in position 437 to 439 is any amino acid
  Variant (441)..(445): Xaa in position 441 to 445 is any amino acid
  Variant (446)..(447): Xaa in position 446 to 447 is any or no amino acid
  Variant (449)..(449): Xaa in position 449 is any amino acid
  Variant (451)..(459): Xaa in position 451 to 459 is any amino acid
  Variant (460)..(472): Xaa in position 460 to 472 is any or no amino acid
  Variant (474)..(476): Xaa in position 474 to 476 is any amino acid
  Variant (478)..(480): Xaa in position 478 to 480 is any amino acid
IXXIXGDGIGXDIXXXXXXVXXXAXXXXXXXXXXIXWXXXXXGXXXXXXXXXXXXXXXXXXXLPXXXLXXIXXXXVXIKGPLXTPVGXXXXXXGXXSLNVXLRXXXXLYXXLRPXXXXXGXXSXXXXXXXXXXXXXXXXMVIXRENTEXXYXGIEXXXXXXXXXXXXXXXXXXXXXXXXXXXXXXXXXXXXXXIKXISXXGSXRLXXXAXXYAXXXXXXXXRXXVTXVHKGNIMKXTEGXFXXXXXXVAXXXXXXXXXXXXXXXXXXXXXXXXXXXXXXXXXXXXXXXXXXXXXXXXXXXXXXXXXXXXXXXXXXXXXXXXXIXXXDXIXDXXXXXILXXPXXYXXXVIXXXNLXGDXISDXXAAXXVGGIGIXPXANIXXXXXXXXAIFEAXHGTAPXXAGXXXXNPXSLILSAXMMLXXHLXXXXXAXXIXXAIXXXIXXXXXXXTXDXXXXXXXXXXXXXXXXXXXXXXFXXXIXXXL

SEQ ID NO: 28292 - protein, 7 aa, Artificial sequence
  Consensus
  Variant (2)..(2): Xaa in position 2 is any amino acid
  Variant (6)..(6): Xaa in position 6 is any amino acid
IXGDGXG

SEQ ID NO: 28293 - protein, 30 aa, Artificial sequence
  Consensus
  Variant (2)..(2): Xaa in position 2 is any amino acid
  Variant (3)..(3): Xaa in position 3 is any or no amino acid
  Variant (5)..(5): Xaa in position 5 is any or no amino acid
  Variant (7)..(7): Xaa in position 7 is any amino acid
  Variant (8)..(8): Xaa in position 8 is Ala, Gly or Ser
  Variant (9)..(9): Xaa in position 9 is any amino acid
  Variant (11)..(12): Xaa in position 11 to 12 is any amino acid
  Variant (14)..(14): Xaa in position 14 is Ile, Leu, Met or Val
  Variant (16)..(16): Xaa in position 16 is Leu or Val
  Variant (17)..(17): Xaa in position 17 is any amino acid
  Variant (18)..(18): Xaa in position 18 is Ile, Leu, Met or Val
  Variant (20)..(23): Xaa in position 20 to 23 is any amino acid
  Variant (25)..(25): Xaa in position 25 is Phe or Tyr
  Variant (26)..(26): Xaa in position 26 is any amino acid
  Variant (27)..(27): Xaa in position 27 is Cys or Asn
  Variant (28)..(28): Xaa in position 28 is any amino acid
PXXTXPXXXGXXSXNXXXRXXXXLXXXXRP

SEQ ID NO: 28294 - protein, 12 aa, Artificial sequence
  Consensus
  Variant (4)..(4): Xaa in position 4 is Glu, Ser or Thr
  Variant (6)..(6): Xaa in position 6 is Asp or Gly
  Variant (7)..(7): Xaa in position 7 is any amino acid
  Variant (9)..(9): Xaa in position 9 is any amino acid
  Variant (11)..(11): Xaa in position 11 is Ile, Leu or Val
RENXEXXYXGXE

SEQ ID NO: 28295 - protein, 35 aa, Artificial sequence
  Consensus
  Variant (2)..(5): Xaa in position 2 to 5 is any amino acid
  Variant (6)..(6): Xaa in position 6 is any or no amino acid
  Variant (8)..(15): Xaa in position 8 to 15 is any amino acid
  Variant (16)..(19): Xaa in position 16 to 19 is any or no amino acid
  Variant (21)..(23): Xaa in position 21 to 23 is any amino acid
  Variant (25)..(25): Xaa in position 25 is Ala, Asp or Gly
  Variant (27)..(27): Xaa in position 27 is Ile or Val
  Variant (28)..(28): Xaa in position 28 is any amino acid
  Variant (29)..(29): Xaa in position 29 is Lys or Arg
  Variant (30)..(30): Xaa in position 30 is any amino acid
  Variant (31)..(31): Xaa in position 31 is Ala, Ser or Thr
  Variant (32)..(32): Xaa in position 32 is any amino acid
  Variant (34)..(34): Xaa in position 34 is any amino acid
RXXXXXAXXXXXXXXXXXXTXXXKXNXXXXXXGXF

SEQ ID NO: 28296 - protein, 31 aa, Artificial sequence
  Consensus
  Variant (2)..(3): Xaa in position 2 to 3 is any amino acid
  Variant (4)..(5): Xaa in position 4 to 5 is any or no amino acid
  Variant (8)..(8): Xaa in position 8 is any amino acid
  Variant (11)..(12): Xaa in position 11 to 12 is any amino acid
  Variant (15)..(20): Xaa in position 15 to 20 is any amino acid
  Variant (21)..(21): Xaa in position 21 is any or no amino acid
  Variant (23)..(23): Xaa in position 23 is Gly or Ser
  Variant (24)..(24): Xaa in position 24 is Ile, Leu, Pro or Val
  Variant (26)..(26): Xaa in position 26 is Phe, Ile, Leu, Met or Val
  Variant (27)..(27): Xaa in position 27 is any amino acid
  Variant (28)..(28): Xaa in position 28 is Ala, Gly or Pro
  Variant (29)..(29): Xaa in position 29 is Gly or Ser
  Variant (30)..(30): Xaa in position 30 is any amino acid
  Variant (31)..(31): Xaa in position 31 is Asp or Asn
VXXXXNLXGDXXSDXXXXXXXGXXGXXXXXX

SEQ ID NO: 28297 - protein, 29 aa, Artificial sequence
  Consensus
  Variant (2)..(2): Xaa in position 2 is Ala, Pro or Ser
  Variant (3)..(3): Xaa in position 3 is any amino acid
  Variant (6)..(6): Xaa in position 6 is Ser or Thr
  Variant (9)..(10): Xaa in position 9 to 10 is any amino acid
  Variant (13)..(13): Xaa in position 13 is any amino acid
  Variant (14)..(14): Xaa in position 14 is Ala, Asp, Gly or Asn
  Variant (15)..(16): Xaa in position 15 to 16 is any amino acid
  Variant (19)..(20): Xaa in position 19 to 20 is any amino acid
  Variant (21)..(22): Xaa in position 21 to 22 is any or no amino acid
  Variant (24)..(28): Xaa in position 24 to 28 is any amino acid
  Variant (29)..(29): Xaa in position 29 is Phe, Ile, Leu or Met
EXXHGXAPXXAGXXXXNPXXXXLXXXXXX

SEQ ID NO: 28298 - DNA, 1392 bp, Escherichia coli K12
  CDS (1)..(1392): transl_table=11
atgagtcactcatccgcccccgaaagggctactggagctgtcattacagattggcgaccggaagatcctgcgttctggcaacaacgcggtcaacgtattgccagccgcaacctgtggatttccgttccctgtctgctgctggcgttttgcgtatggatgttgttcagcgctgttgcggtgaacctaccgaaagtcggctttaattttacgaccgatcagctatttatgttgactgcgctgccttcggtttctggcgcgttattacgtgttccatactcctttatggttcctatcttcggtggtcgtcgctggacggcgttcagcaccggtattctgattattccttgcgtctggctgggttttgccgtgcaggatacctccacgccttatagcgtcttcatcatcatctctctgctatgcggctttgctggcgcgaacttcgcatccagtatggcaaacatcagcttcttctttccgaaacagaagcagggtggcgcgctgggtctgaatggtggtctgggaaacatgggcgtcagcgtcatgcagttggttgctccgctggtggtatcactgtcgattttcgcagtatttggtagccagggcgtcaaacagccggatgggactgagctgtatctggcgaatgcgtcctggatatgggtgccgttccttgccatcttcaccattgcggcgtggtttggcatgaacgatcttgctacctcgaaagcctccatcaaggagcagttgccggtactcaaacggggtcatctgtggattatgagcctgctgtatctggcaaccttcggctccttcatcggcttctccgcgggctttgcaatgctgtcaaaaacgcagttcccggatgttcagattctgcaatacgctttcttcgggccgtttattggtgcgctggcgcgttctgcaggtggtgcattatctgaccgtctgggcggaactcgtgtcacgctggtgaactttattctgatggcgattttcagcggcctgctgttcctgaccttaccgactgacgggcagggcggaagcttcatggcgttcttcgcggtcttcctggcgctgttcctgacagctgggctgggtagtggttccactttccagatgatttcagtgatcttccgtaaactgacaatggatcgcgtgaaagcagaagggggttctgacgaacgtgcgatgcgtgaagcggcaaccgacacggcggcggcgctgggtttcatctctgcgattggcgcgattggtggcttctttatcccgaaagcgtttggtagctcgctggcattaacgggttcgccagtcggcgcaatgaaggtatttttgattttctatatcgcctgcgtagtgattacctgggcggtatatggtcggcattctaaaaaataa

SEQ ID NO: 28299 - protein, 463 aa, Escherichia coli K12
MSHSSAPERATGAVITDWRPEDPAFWQQRGQRIASRNLWISVPCLLLAFCVWMLFSAVAVNLPKVGFNFTTDQLFMLTALPSVSGALLRVPYSFMVPIFGGRRWTAFSTGILIIPCVWLGFAVQDTSTPYSVFIIISLLCGFAGANFASSMANISFFFPKQKQGGALGLNGGLGNMGVSVMQLVAPLVVSLSIFAVFGSQGVKQPDGTELYLANASWIWVPFLAIFTIAAWFGMNDLATSKASIKEQLPVLKRGHLWIMSLLYLATFGSFIGFSAGFAMLSKTQFPDVQILQYAFFGPFIGALARSAGGALSDRLGGTRVTLVNFILMAIFSGLLFLTLPTDGQGGSFMAFFAVFLALFLTAGLGSGSTFQMISVIFRKLTMDRVKAEGGSDERAMREAATDTAAALGFISAIGAIGGFFIPKAFGSSLALTGSPVGAMKVFLIFYIACVVITWAVYGRHSKK

SEQ ID NO: 28300 - DNA, 1428 bp, Aquifex aeolicus VF5
  CDS (1)..(1428): transl_table=11
atgaatttcctgaaggagataattgaagcaattaagaagggaaatccaaaagctctgtttgccagttttatatactttgaccattcattcagtatatggctactcttaggagctcttggaccttttatagctgagtccttcggactctcaggagcccaaaaaggttttatggttgcaattcccgtaatagccgcagccatattcagactcaacttcggacatatgttccagtatatagacgggaagtacatagcgataatgggcataatcctttcctctatccctcacctttacatgatactcagcggatatcgtgtaacctacgatgaccttctctggatgggggtttttctcggtatcgcaggagcaagctttgcgatagccctccctatggcgggaagtaactacccgaaagaggttcaaggactcgtacttggacttgccgcggcgggaaacataggagctgttttagacggtatactctttcctcctattgcaaggtccatcggttgggaaaataccttcgttctttcgggaatactccttcttatagccctgttttttgtcgttatctgggcgcgggaccttaccaagaagaacgaagggaataggttttatcccgtatttgcattctttgccactatagcttttatggtaatactggctctcggttttcaaaagggatggttcggtataaccggaaacgctggaaaactcctcataccggtacttggttctgtatttgctatactccttatgcctcttgcctttaaaaaggtgttcctggaaagggacacgtgggtacttatgctcgcttactccataactttcggcggttttgtaggaatgtcctcgtacgtggctatgctccttagggacatatacggtatatccaaagtggaggcaggagctcttatgtccctttttgcctttacgggtgcgatgataagacctctggggggacatatcgcggataaaataagcggagctacagcacttctctttttcctcgcgggcatagcgggagttaacttcatattttccctcgtaacaccgcctctggcggtaggtatagttttattccttgcactctactccttctatggacttggaaacggtgctgtatttcagctcgttcctcacaggtggccatatcaaactggacttatgacgggaataatcggagctgccggaggtatcggtggtttttacctgcccgttgtaaacggaatagtctttgagtccacgggagcttacaacctggcgtttgcactcttcggaggaatagccctgctgtgtctccttatagttaagcttcttcatgctcgctggatggaatgggcctacgttcgctacgactacgaaaaagaaacgttggttggtattgatcctaagagtggaagggtaattatggagttggcaagatga

SEQ ID NO: 28301 - protein, 475 aa, Aquifex aeolicus VF5
MNFLKEIIEAIKKGNPKALFASFIYFDHSFSIWLLLGALGPFIAESFGLSGAQKGFMVAIPVIAAAIFRLNFGHMFQYIDGKYIAIMGIILSSIPHLYMILSGYRVTYDDLLWMGVFLGIAGASFAIALPMAGSNYPKEVQGLVLGLAAAGNIGAVLDGILFPPIARSIGWENTFVLSGILLLIALFFVVIWARDLTKKNEGNRFYPVFAFFATIAFMVILALGFQKGWFGITGNAGKLLIPVLGSVFAILLMPLAFKKVFLERDTWVLMLAYSITFGGFVGMSSYVAMLLRDIYGISKVEAGALMSLFAFTGAMIRPLGGHIADKISGATALLFFLAGIAGVNFIFSLVTPPLAVGIVLFLALYSFYGLGNGAVFQLVPHRWPYQTGLMTGIIGAAGGIGGFYLPVVNGIVFESTGAYNLAFALFGGIALLCLLIVKLLHARWMEWAYVRYDYEKETLVGIDPKSGRVIMELAR

SEQ ID NO: 28302 - DNA, 1212 bp, Pseudomonas aeruginosa PAO1
  CDS (1)..(1212): transl_table=11
atgaacaacagcttctggaaggccggccatgcgccgaccctgttcgcggcgtttctctatttcgacctgagcttcatggtctggtacgtgctcggcccgctgggggtgcagattgccggcgacctgcaactgagcacccaacagcgcgcgatgatggtcgccacgccgatcctcgccggcgccgtactgcgcttcctgctcggcctgctggccgatcgctggtcgccgaagagcgccggcatcctcgcccaggtcatcgtcatcgccgccctggcggccgcctggctgctgggcgtgaacagctatgcgcaggcactgctgctggggttgttcctcggcttcgccggggcatccttcgccgtggccctgccgctcgcatcgcaatggtacccgccgcaacaccagggcaaggccatgggcatcgccggcgcgggcaactccggcaccgtgctcgccgccctcttcgcccccggcctggccgccgcgttcggctggaacaatgtgttcggcttcgccctgctgccgctcgtcctgaccctcctggtgttcgccatggtcgcgcgcaacgccccgcagcggccggcgcccaaggccatgggcgattacctgaaagccctcggcgaccgcgacagctggtggttcatgttcttctacagcgtcaccttcggcggcttcctcggcctggccagcaccctgcccggctatttccacgaccagtacggcctgaacccggtgaccgccggctactacaccgccgcctgcgtcttcgccggcagcctgatgcgcccgctcggtggcgccctcgccgatcgcatcggcggcatccgcagcctgctgatggtgtacaccctggccgccatctgcatcgccgcggtcggtttccacttgcccagcgcgatggccgccctcggcctgttcgtggtcgccatgctcagtctcggtgccggtaatggcgcggtgttccagttggtaccgcagcgcttccacaaggaaatcggcgtgatgaccgggctgatcggcatggccggcggcatcggcggcttctgcctgactgccggcctcggcgcgatcaagcaaagcaccggcgactaccagctcggcctgtggctgttcgccagtctcggcgtgctggcctggttcggcctccacggggtgaagcggcgctggcgcaccacctggggctcggccgcggtcaccgccgcgcgggtctga

SEQ ID NO: 28303 - protein, 403 aa, Pseudomonas aeruginosa PAO1
MNNSFWKAGHAPTLFAAFLYFDLSFMVWYVLGPLGVQIAGDLQLSTQQRAMMVATPILAGAVLRFLLGLLADRWSPKSAGILAQVIVIAALAAAWLLGVNSYAQALLLGLFLGFAGASFAVALPLASQWYPPQHQGKAMGIAGAGNSGTVLAALFAPGLAAAFGWNNVFGFALLPLVLTLLVFAMVARNAPQRPAPKAMGDYLKALGDRDSWWFMFFYSVTFGGFLGLASTLPGYFHDQYGLNPVTAGYYTAACVFAGSLMRPLGGALADRIGGIRSLLMVYTLAAICIAAVGFHLPSAMAALGLFVVAMLSLGAGNGAVFQLVPQRFHKEIGVMTGLIGMAGGIGGFCLTAGLGAIKQSTGDYQLGLWLFASLGVLAWFGLHGVKRRWRTTWGSAAVTAARV

SEQ ID NO: 28304 - DNA, 1407 bp, Pseudomonas aeruginosa PAO1
  CDS (1)..(1407): transl_table=11
atgggcatgatcgccaatacccaactgaaagccgcacggggaccgctgctgctcgactggcgccccgaggaccccgagttctgggcgcgcaacggcaagcgcatcgccagccgcaacctgtggatctcgatccccgcgctgctgctcgccttcgccgtgtggatgatctggagcacggtgactgtgcgcctgaacagcgccggcttcgccttcagcaacgaccagctgttcctgctcgcggcgctgccgtcgatctccggcgccaccctgcgggtgttctattcgttcatggtgccgatcttcggcggtcgtcgctggaccgccctgagcaccgcctcgatgctgatcccgtgcatctggctgggcttcgccgtgcaggacccgagtaccccgtactgggtgttcgccctgatcgcgctgctctgcggcttcggcggcggcaacttcgcctcgagcatgtccaatatcagcttcttctatccgaagagccagcagggcaccgccctcggcctgaatgccgggctcggcaacctcggcgtctcggtgatgcagttcgccgtgccgctggcggtggccggcggcctgttcggcgccttcggcggcgagccgcagcagctcggcgacggcggtcgcctgtggctgcagaacgccggctggatctgggtgccgttcatcgccgtggtatcggtcgcggcctggttcgggatgaacgacatcgccgacgccaaggcctcgttccgcgaccaggcggtgatcttcaagcgcaagcacaactggctgatgtgctggctgtacgtggccaccttcggctcgttcatcggcttctcggccggcttcgcgatgctcagcaagacccagttccccgacgtcaacccgctgcaatacgccttcctcggtccgctggtgggcgccctcagccggcctctgggcggctggctggcggacaagttcggcggcgcgcggatcaccctgtggaactacgcgctgatgatcggcggggtgttcgcggtgatcgccttcctgccgggcgacggcggccagggcaacttcttcggcttccttggcgccttcatcctgctgttcttcttcgccggcatcggcaacggctccaccttccgcatgatcccggtgatcttccgcaacgagtgggcccggcgggtgcgcgacggccaggccgacgaagccggcgcggcgcgcaacgcgagcatggagtcggccgcggtgatcggcttctccgccgccatcggcgccttcggcgggttcttcatcccgaaggcgttcggcacctcgctgcacatgaccggcagcgccgagggcgccctctacgtgttcatcgcctactacctgagctgcatcgtcgccacctggtggtggtacgcgcgcaagggtgcggagagtccctgttga

SEQ ID NO: 28305 - protein, 468 aa, Pseudomonas aeruginosa PAO1
MGMIANTQLKAARGPLLLDWRPEDPEFWARNGKRIASRNLWISIPALLLAFAVWMIWSTVTVRLNSAGFAFSNDQLFLLAALPSISGATLRVFYSFMVPIFGGRRWTALSTASMLIPCIWLGFAVQDPSTPYWVFALIALLCGFGGGNFASSMSNISFFYPKSQQGTALGLNAGLGNLGVSVMQFAVPLAVAGGLFGAFGGEPQQLGDGGRLWLQNAGWIWVPFIAVVSVAAWFGMNDIADAKASFRDQAVIFKRKHNWLMCWLYVATFGSFIGFSAGFAMLSKTQFPDVNPLQYAFLGPLVGALSRPLGGWLADKFGGARITLWNYALMIGGVFAVIAFLPGDGGQGNFFGFLGAFILLFFFAGIGNGSTFRMIPVIFRNEWARRVRDGQADEAGAARNASMESAAVIGFSAAIGAFGGFFIPKAFGTSLHMTGSAEGALYVFIAYYLSCIVATWWWYARKGAESPC

SEQ ID NO: 28306 - DNA, 1296 bp, Pseudomonas aeruginosa PAO1
  CDS (1)..(1296): transl_table=11
atggcttccctacgtcagaaacagtactccgtcctcggcatgagtaccttgtccttcgcggtgaatttcgccgtgtggacgatgttttcgatcatcggcatccgcatcaaggacgagctcggcctgagcgaatcccagttcggcttgatggtcgccctgccgatcctcaccggctccctggtgcgcctgccgctgggcctgatcaccgaccgcttcggcggccgcatcgtgttcttcatccacatgctgctggtggccatcccgatctacggcctggccttcgccagccagtactggcactacctggtgctcggcctgttcgtcggcctggccggcggctccttcgcggtcggcatcgcctacacctcggcctggttcgagaaggagcgccagggcaccgcgatgggcatcttcggcgccggcaacgccggcgcggcgatcaccaacctggtggcgccgatgatcgtggtcgccttcggctggcgcatggtgccgcaggtctactcggtggccatgctggtcaccgccgtgctgttctggctgttcacctggaccgatccggcgcaccttaagggtgccgccgaggccagccagcggccgaacctggccaagcaactggcgccgctcgccgagctgcgcgtctggcgcttcggcctgtactacttcttcgtcttcggcggcttcgtcgccctggccctgtggctgccgaagtactacatcgccgaatacggcctggacctgaagaccgcatccttcatcaccatgctgttcaccttgccgtccggcctgatccgcgccctcggcggctggttcagcgaccactacggcgcgcgctcggtgaactggggcgtgttctgggtctgcctggtgtgcctgttcttcctctcctacccgcagaccaccatgaccatccacggcatccagggcgacctcagcctgggcatcggcctgaacgtctggctgttcaccttcctggtgttcgtcgtcggcattgcccagggcttcggcaaggccagcgtgtaccggatcatccacgactactacccgagcaacatgggcaccgtcggcggcatggtcggggtgatcggcggcctcggcggcttctgcctgccgatcctgttcggctacgccgccgaccacatcggcgtgcgctcctcctgcttcatgttgctgttcggcctgaccgtggtctgcatggtctggatgcactacgcgatcaagcagcaacgccgcatcgacggccaggccgcctcggccgacgtcgaccttcctcccacccttcccacccactcctga

SEQ ID NO: 28307 - protein, 431 aa, Pseudomonas aeruginosa PAO1
MASLRQKQYSVLGMSTLSFAVNFAVWTMFSIIGIRIKDELGLSESQFGLMVALPILTGSLVRLPLGLITDRFGGRIVFFIHMLLVAIPIYGLAFASQYWHYLVLGLFVGLAGGSFAVGIAYTSAWFEKERQGTAMGIFGAGNAGAAITNLVAPMIVVAFGWRMVPQVYSVAMLVTAVLFWLFTWTDPAHLKGAAEASQRPNLAKQLAPLAELRVWRFGLYYFFVFGGFVALALWLPKYYIAEYGLDLKTASFITMLFTLPSGLIRALGGWFSDHYGARSVNWGVFWVCLVCLFFLSYPQTTMTIHGIQGDLSLGIGLNVWLFTFLVFVVGIAQGFGKASVYRIIHDYYPSNMGTVGGMVGVIGGLGGFCLPILFGYAADHIGVRSSCFMLLFGLTVVCMVWMHYAIKQQRRIDGQAASADVDLPPTLPTHS

SEQ ID NO: 28308 - DNA, 1554 bp, Mycobacterium leprae TN
  CDS (1)..(1554): transl_table=11
atggatcagctggtgttgctgcaagccgaggagtcgctgtacggccccggtcgcagatcgaaaactgtaccgattgaccatcggcacagtctaaagtcgagctttttccggctgcgtttgaggagagcgtgtcgcatctcgcattgggaccccgaggatcaagcggcttgggaggctggcaacaaaaccatcgcccggctcaatctgctctggtcggtcctgaccgtccacctggggtattcggtgtggacgctctggccggtgatggagctgttcatgcccaaggacgtatatggcttttccgcgggtgacaagtttctgctcgctaccaccgcaaccttggttggggcgtgcctgcgggtgccgtactcgttggccaccgcacttttcggtggccgcaactgggcgattttctcggtgatggtgctgttgatccccactattgccaccatggtgctgttggctcatccaggcttgccgctttggccttatctggcgtgcgcggcactgaccggcttgggcggcggtaatttcgcggcgtcgatgactaacgccaacgccttctacccgcatcggctcaagggtgcggcattcgggctcgctggtggggccggcaaccttggggtgtcggtgatccaggtggtcgggatgctggtcatcgccagcgtcggtgaccgaaagccttacattgtgtgtggactttatgtggtgctgttgataatcgccgggatcggagcaatgttgttcatgaacgacattgagcatcaccgtatcggggtgaacaccatccggccagtactgttcgtcgtggtttccacgcgtgatagctgggttctcgcgctgctctacctggcgagtttcggttcgttcatcggtttttcattcgcattcggccaggtgctggaaaccaacttcgtcgccggcggacaaagtacggctcaggccgcgttgcacgccgctgagcttgcattcatcggaccgacgttggccgcggtagcccggttttggggtggccgactggccgaccgacttggagggagtcgcgtcaccctggtggtcttcggtgccatggtttttgccgccgggttgctgggtgtactgggcataattgagggctcacgcgtgtgcccgatcaggggtgtcatgatggccagctacttcgctggattcatcactctgttcatcttgtctgggttgggcaatggatcggtgtacaagatgatcccgacaattttcgaggcctgcagccattccctgggaatcaacgacgacgagtgccgcgactggtcacgagtgatttccggggtcgtcattggctttgtcgcggaggtcggcgcactcggcggtgttgggatcgacctggcgttgcgagagtcctacctcaacactggcggggttaccgcagcgttttggatattcatgttgtgctatgccgcggccggtgtcctgacctggaagatgtacgtgtgtcgaccattgccaggcaacttgcacgacgaagcggctaatgcgtttgcggccagcgtcggagccagcagaactcaccggggctga

SEQ ID NO: 28309 - protein, 517 aa, Mycobacterium leprae TN
MDQLVLLQAEESLYGPGRRSKTVPIDHRHSLKSSFFRLRLRRACRISHWDPEDQAAWEAGNKTIARLNLLWSVLTVHLGYSVWTLWPVMELFMPKDVYGFSAGDKFLLATTATLVGACLRVPYSLATALFGGRNWAIFSVMVLLIPTIATMVLLAHPGLPLWPYLACAALTGLGGGNFAASMTNANAFYPHRLKGAAFGLAGGAGNLGVSVIQVVGMLVIASVGDRKPYIVCGLYVVLLIIAGIGAMLFMNDIEHHRIGVNTIRPVLFVVVSTRDSWVLALLYLASFGSFIGFSFAFGQVLETNFVAGGQSTAQAALHAAELAFIGPTLAAVARFWGGRLADRLGGSRVTLVVFGAMVFAAGLLGVLGIIEGSRVCPIRGVMMASYFAGFITLFILSGLGNGSVYKMIPTIFEACSHSLGINDDECRDWSRVISGVVIGFVAEVGALGGVGIDLALRESYLNTGGVTAAFWIFMLCYAAAGVLTWKMYVCRPLPGNLHDEAANAFAASVGASRTHRG

SEQ ID NO: 28310 - DNA, 1389 bp, Escherichia coli O157:H7
  CDS (1)..(1389): transl_table=11
atggcactgcaaaatgagaaaaatagtcgttatcttttacgcgactggaaaccagaaaatccggccttctggaaaaataaaggaaaacatattgctcgaagaaacctctggatatcagtcagttgtctacttcttgccttctgtgtctggatgctatttagcgcagttaccgttaatctcaataaaatcggttttaatttcactaccgatcaactctttttattaaccgcattaccctccgtttctggcgcattattacgtgtcccctactcctttatggtgcctatattcggtggacgtcgatggacggtttttagtactgcaatcctgattattccttgcgtctggctcggaattgccgtgcagaatccgaatactccttttgggatatttatcgttatcgctttgctatgcggttttgcaggtgcgaactttgcttcgagcatgggcaatatcagtttcttctttccaaaagccaggcaaggtagcgctcttgggattaatggcggattaggaaacttaggtgtaagtgtaatgcagctggttgcaccgctggtcatttttgtacccgtatttgcctttctcggcgtcaatggagtaccgcaggccgacggttcggtgatgtcgctggcgaatgccgcatggatttgggtaccgctactagcgattgccacgatcgccgcctggtcagggatgaatgatatcgccagttcacgcgcgtcaattgccgaccagctccctgtcttacaacgcctgcatctctggctgctgagcctgctttaccttgccaccttcggttcgtttatcggtttttctgcgggtttcgccatgctggcaaaaacccagttcccggatgtgaatattctgcgcctggcgttctttggcccatttatcggtgccatcgcgcggtcggtgggtggtgctatttccgataaattcggcggcgtgcgggtgacgttgatcaactttatttttatggcgattttcagcgccctgctgttccttaccttaccgggcacaggctccggtaacttcatcgccttttacgccgtatttatggggctgtttctgaccgcgggtctgggaagtggttctactttccagatgatcgccgtcatctttcgccagataaccatttatcggatgaagatgaaaggcggtagtgatgagcaagctcagagagaagccgtcaccgaaacggcggcggctctgggctttatctcagccatcggcgcagtgggcggcttttttattccgcaggcatttggcatgtcactcaatatgaccggctctccagtgggcgcgatgaaagtgtttttaatcttctacatcgtttgtgtgctactgacctggctggtttatggtcggcggaagttcagccaaaaataa

SEQ ID NO: 28311 - protein, 462 aa, Escherichia coli O157:H7
MALQNEKNSRYLLRDWKPENPAFWKNKGKHIARRNLWISVSCLLLAFCVWMLFSAVTVNLNKIGFNFTTDQLFLLTALPSVSGALLRVPYSFMVPIFGGRRWTVFSTAILIIPCVWLGIAVQNPNTPFGIFIVIALLCGFAGANFASSMGNISFFFPKARQGSALGINGGLGNLGVSVMQLVAPLVIFVPVFAFLGVNGVPQADGSVMSLANAAWIWVPLLAIATIAAWSGMNDIASSRASIADQLPVLQRLHLWLLSLLYLATFGSFIGFSAGFAMLAKTQFPDVNILRLAFFGPFIGAIARSVGGAISDKFGGVRVTLINFIFMAIFSALLFLTLPGTGSGNFIAFYAVFMGLFLTAGLGSGSTFQMIAVIFRQITIYRMKMKGGSDEQAQREAVTETAAALGFISAIGAVGGFFIPQAFGMSLNMTGSPVGAMKVFLIFYIVCVLLTWLVYGRRKFSQK

SEQ ID NO: 28312 - DNA, 1410 bp, Mycobacterium tuberculosis CDC1551
  CDS (1)..(1410): transl_table=11
atgggccgttcccaccagatctccgactgggatcccgaagactcggtggcgtgggaggccggcaacaaattcatcgcccgacgcaatctgatctggtcggtggccgccgagcacgtcggattttccgtctggtccctctggtcggtgatggtgctgttcatgcccacatcggtgtacggcttttccgccggcgacaagttcctgctcggcgccaccgcgaccttggtcggggcatgcctgcgcttcccttacacatttgccaccgcaaagttcggggggcgcaactggaccatcttttccgcactggtgctgttgattccgaccgttggcagcattctgttgctggccaaccctggtttgccactgtggccgtatctggtgtgcggtgcgctagccggcctcggcggcggcaacttcgccgcctccatgacgaacatcaacgctttctttccgcaacgactcaagggcgccgcgcttgcgctcaacgcgggtggcggcaacctcggggtgccgatggtgcagttggtcggcctgctggtgatcgcaacggccggtgaccgcgagccctactgggtgtgcgcgatatatctggtgctgctggcggtcgccggcctcggcgccgcactgtacatggacaacctgacggagtatcgcatcgagctgaacaccatgcgtgcggtagtgtccgagccgcacacctgggtgatctcgctgctgtacatcggcactttcggctcgttcatcgggttctctttcgcattcggtcaggtgctgcagatcaacttcatcgccagcggtcagagcacggcgcaggcctcgctgcatgcggcccagatcgccttcctggggccgctattgggatcgctgtcccgaatatatggcggcaagctcgccgaccgtatcggtggcggccgagtcaccctagctgccttctgcgccatgctgctggccaccggaatactcatcagcgcaagcactttcggtgaccacctggccgggccgatgccgactgcgacgatggtcggctacgtcatcggcttcacggctctgttcattttgtccggcatcggcaatggctctgtgtacaagatgattccgtcgatcttcgaggcgcgcagccattcgctgcagatcagtgaagccgagcgcaggcagtggtcgcggtcgatgtcaggcgcgctgatcggcctggccggggcggtcggcgcgctcggcggagtgggcgtcaacctggctctgcgagagtcctacctgaccagtggcacggccacctcggcattttgggccttcggggtgttctacctggtcgcctcggtgctgacctgggcgatttatgtgcgtcggggcctaaagagcgccggcgagctcgtgccggcgaccaccgcacccgcgggcttggcctacgtctag

SEQ ID NO: 28313 - protein, 469 aa, Mycobacterium tuberculosis CDC1551
MGRSHQISDWDPEDSVAWEAGNKFIARRNLIWSVAAEHVGFSVWSLWSVMVLFMPTSVYGFSAGDKFLLGATATLVGACLRFPYTFATAKFGGRNWTIFSALVLLIPTVGSILLLANPGLPLWPYLVCGALAGLGGGNFAASMTNINAFFPQRLKGAALALNAGGGNLGVPMVQLVGLLVIATAGDREPYWVCAIYLVLLAVAGLGAALYMDNLTEYRIELNTMRAVVSEPHTWVISLLYIGTFGSFIGFSFAFGQVLQINFIASGQSTAQASLHAAQIAFLGPLLGSLSRIYGGKLADRIGGGRVTLAAFCAMLLATGILISASTFGDHLAGPMPTATMVGYVIGFTALFILSGIGNGSVYKMIPSIFEARSHSLQISEAERRQWSRSMSGALIGLAGAVGALGGVGVNLALRESYLTSGTATSAFWAFGVFYLVASVLTWAIYVRRGLKSAGELVPATTAPAGLAYV

SEQ ID NO: 28314 - DNA, 1392 bp, Mycobacterium tuberculosis CDC1551
  CDS (1)..(1392): transl_table=11
atggcactcaccaccgccccggcaatcgattatgcgctgccacgccagcaggatgagggcgatcactggatcgacgactggcgcccggaagacccggtgttctgggagacgatcggcaggccgatcgcccgccgtaacctgatcttctccatcttcgccgagcacgtcggcttcagcgtgtggatgctgtggagcatcgtggttgtccagatgaccgccgccgctcccgggcaccccgccgcgtccggctgggcgctgtccgccagccaggccctatgtttggtcgccgtccccagcggtgtcggggcgttcctccggctgccgtacaccttcgcgatcccgatctttggtggccgcaactggacgaccgtctcggcggcgctgctggtgatcccgtgcctgctgctggcttgggcggtgagccacccttccctgccgttcgcggtgttggtggtgatcgcggccaccgccggtttcggtggcggcaactttgcctcatcgatggccaacatctcgttcttctacccggagaaggacaagggttgggcgctgggcctgaacgcggccggaggcaacatcggggtggcggtggtgcagaagatcattccgcccatcgtggtcgccggcagtggggtggcactgtcgcgtgccggactgttcttcgtgcccttggccgtcgccgccgcggtgtgcgcattcctgtttatgaacaacctcacggaggccaaggccgatgtgaagccggtgtggcagtcgctgcggcatgccgacacctggatcatgtcgctgctgtacatcggcacctttgggtcgttcatcgggtattcggcggccttcccgacgttgctcaagaccgtgtttggccgtggtgacatcgcgttgggttgggccttcctcggcgcgggcatcggttccctggtccgtccgctgggcggcaagctcgccgaccggatcggcggtgcgcggatcaccgcggccagtttcgtcatgctggcggccggggcggctgcggcgttgtggtcggtgcagtcggtcaatctgccggtgttcttcgtcagcttcatgttcttgttcgttgccaccggcatcggcaatggttcgagctaccggatgatctcgaggatcttccaggtcaaaggcgaagtcgccggcggggatccggaaacgatggtgaacatgcgccgacaggccgccggagcgctgggcatcatctcctcgatcggcgcgttcggcgggtttgtggtgccgctggcctacgcctggtcgaaggtgcacttcggcaatatcgaacccgccctgcacttctacgtggcgttcttccttgccctgctcgtcgtcacctggtactgctacctgcgtagaaccacccccatgggccaggtgggggtgtag

SEQ ID NO: 28315 - protein, 463 aa, Mycobacterium tuberculosis CDC1551
MALTTAPAIDYALPRQQDEGDHWIDDWRPEDPVFWETIGRPIARRNLIFSIFAEHVGFSVWMLWSIVVVQMTAAAPGHPAASGWALSASQALCLVAVPSGVGAFLRLPYTFAIPIFGGRNWTTVSAALLVIPCLLLAWAVSHPSLPFAVLVVIAATAGFGGGNFASSMANISFFYPEKDKGWALGLNAAGGNIGVAVVQKIIPPIVVAGSGVALSRAGLFFVPLAVAAAVCAFLFMNNLTEAKADVKPVWQSLRHADTWIMSLLYIGTFGSFIGYSAAFPTLLKTVFGRGDIALGWAFLGAGIGSLVRPLGGKLADRIGGARITAASFVMLAAGAAAALWSVQSVNLPVFFVSFMFLFVATGIGNGSSYRMISRIFQVKGEVAGGDPETMVNMRRQAAGALGIISSIGAFGGFVVPLAYAWSKVHFGNIEPALHFYVAFFLALLVVTWYCYLRRTTPMGQVGV

SEQ ID NO: 28316 - DNA, 1188 bp, Mycobacterium tuberculosis CDC1551
  CDS (1)..(1188): transl_table=11
atgagagggcaagcggccaatctcgtgctggccacctggatctcggtggtcaacttctgggcgtggaacctgatcggcccgctgtcgaccagctacgcgcgtgacatgtcactgtccagcgccgaggcgtcgctgctcgtcgccaccccgatcctggtgggtgcccttggccgcatcgtcaccgggccgctcaccgaccgcttcggcgggcgcgccatgctcatcgcggtgacgctggcgtcgatcctcccggtgctcgcggtcggggtcgcggcaaccatgggctcctacgcgttgctggtgtttttcgggctcttcctgggcgttgccggcacgatcttcgccgtcggcatcccgttcgccaacaactggtaccagccggcgcggcgcggtttctccaccggcgtgttcggtatgggcatggtcggcaccgcgctctcggcgttcttcaccccgcggtttgtacggtggttcggcctgttcaccacccacgccatcgtcgcggccgcgctcgcgtcgaccgccgtggtggccatggtcgtgcttcgtgatgcaccctactttcggcccaacgccgacccggtgctgcccaggctcaaggccgcggcacggttgccggtgacctgggagatgtcgtttctgtacgcgatcgtgttcggcgggttcgtggcgttcagcaactacctgcccacctacatcaccacgatctacgggttctccacggtcgacgcgggcgctcgcaccgccgggttcgccctggcggcggtgctggcccggccggtgggcgggtggctctccgaccggatcgcaccgaggcacgtggtgctggcctcgctcgccgggaccgcgctgctggcgttcgccgcggcgttgcagccgccgccggaggtgtggtcggcggccaccttcatcaccctggcggtctgcctcggcgtgggcaccggcggcgtgttcgcgtgggtggcccgccgcgccccggccgcatcggtcggctcggtcaccggaatcgtcgccgcggcaggcggattgggcggttacttcccgccgctggtgatgggcgcgacctacgacccggtcgacaacgactacacggtcgggttgctgctgctggtggcgaccgcgctggtcgcgtgtacctacaccgcgctgcacgcgcgggagccggtgagtgaggaggcgtccaggtga

SEQ ID NO: 28317 - protein, 395 aa, Mycobacterium tuberculosis CDC1551
MRGQAANLVLATWISVVNFWAWNLIGPLSTSYARDMSLSSAEASLLVATPILVGALGRIVTGPLTDRFGGRAMLIAVTLASILPVLAVGVAATMGSYALLVFFGLFLGVAGTIFAVGIPFANNWYQPARRGFSTGVFGMGMVGTALSAFFTPRFVRWFGLFTTHAIVAAALASTAVVAMVVLRDAPYFRPNADPVLPRLKAAARLPVTWEMSFLYAIVFGGFVAFSNYLPTYITTIYGFSTVDAGARTAGFALAAVLARPVGGWLSDRIAPRHVVLASLAGTALLAFAAALQPPPEVWSAATFITLAVCLGVGTGGVFAWVARRAPAASVGSVTGIVAAAGGLGGYFPPLVMGATYDPVDNDYTVGLLLLVATALVACTYTALHAREPVSEEASR

SEQ ID NO: 28318 - DNA, 1548 bp, Mycobacterium tuberculosis CDC1551
  CDS (1)..(1548): transl_table=11
atggaacagcacacgctgctgcaacgcgaggagtcgccgcgcagtcccgcggccccttcgctcaggcgcctgggtggctcacgtcacatcacgcattgggatcccgaggatctaggagcgtgggaggcaggcaacaagggcattgcccgacgcaatctgctttggtcggtcgtgacggttcacctgggttactcggtgtggacgctctggccggtgctggagttgctgatgccccaggacgtctacggcttttcaaccagtgacaagtttctgctcggcaccatcgcgacgctgtttggcgcgttcctgcggatgccctacgcgttggccagcgcgatctttggcggtcgcaactgggcgactttttcggcaatcgtgttgctaattccggccattggcacaacggtgttgttgacccatccggggctaccgctgtggccgtatctggtgtgtgcggccctgaccggcttaggcggcggcaacttcgcgtcgtcaatgagcaacgccaatgctttctatccacatcggctcaagggttcggcgctcggaattgccggtggggtaggcaatctcggggtgccggcgatccagctagttgggttgttggcaatcgccactgtcggtgagcggaagccttacctggtctgcgcactgtatgtggttctggtggcaatcgcggtaatcggagtgtcgctgttcatgaacaatgtcgaacagcaccgggtgcaggtgaaccggcttcggccgatcgtttccgcggttctgtcgacccgcgacacgtggttgctctcgctgctctacctcggcactttcggctcattcatcggcttctccttcgtgtttggccaggtgttgcagaccaacttcctggcgtgcggacaaagcccggcgcgcgcgacgctgcatgccgtcgagttggcgtttgtcgggccgttgctggcggcggtggcccggatttacggtggccggctggccgatcgagtcggtggaagccgcttgacccttatagtctttgtggcgatgacgctcgccgctgggctgctgatcagtgccagcaccctcgaaggccgacatgtcggccagcatcggggcgctaccatggtcggctacttcgtctgcttcgtcgcgttgttcgtcctatccgggttgggcaacgggtctgtgtacaagatgattccgacgatttttgaggcgtgcagccgctccctggatctcagtgaagccgaacgccgcgactggtcacgcatcatctcaggagtagtcatcgggtttgtggccgccttcggcgcgctcggcggggtcggaatcaatatggcgctgcgtgagtcctacctcagcaccggcagtgggaccgatgcgttctggatcttcatgatgtgctacgccgctgccgccgttctgacttggaaagtgtacgaccgccgaacggtcaccgacatggggatgttgcaggcggccttggtgcggcagccggcatcgacgccagccgaacttatcggtcccagaactcaatcggaccgattctccgggtgcagcatctcggcgtaa

SEQ ID NO: 28319 - protein, 515 aa, Mycobacterium tuberculosis CDC1551
MEQHTLLQREESPRSPAAPSLRRLGGSRHITHWDPEDLGAWEAGNKGIARRNLLWSVVTVHLGYSVWTLWPVLELLMPQDVYGFSTSDKFLLGTIATLFGAFLRMPYALASAIFGGRNWATFSAIVLLIPAIGTTVLLTHPGLPLWPYLVCAALTGLGGGNFASSMSNANAFYPHRLKGSALGIAGGVGNLGVPAIQLVGLLAIATVGERKPYLVCALYVVLVAIAVIGVSLFMNNVEQHRVQVNRLRPIVSAVLSTRDTWLLSLLYLGTFGSFIGFSFVFGQVLQTNFLACGQSPARATLHAVELAFVGPLLAAVARIYGGRLADRVGGSRLTLIVFVAMTLAAGLLISASTLEGRHVGQHRGATMVGYFVCFVALFVLSGLGNGSVYKMIPTIFEACSRSLDLSEAERRDWSRIISGVVIGFVAAFGALGGVGINMALRESYLSTGSGTDAFWIFMMCYAAAAVLTWKVYDRRTVTDMGMLQAALVRQPASTPAELIGPRTQSDRFSGCSISA

SEQ ID NO: 28320 - DNA, 1170 bp, Staphylococcus aureus subsp. aureus Mu50
  CDS (1)..(1170): transl_table=11
atgtacaaaacaaaaggtggctttcaacttacattacaaacattaagtttagtggttgggtttatggcttggagtataattgcgccattaatgccctttattaaacaagatgtcaatgttactgaaggtcaaatatcaatcattttagcgataccagttattttgggatcagtgctccgtgtgccatttggttatttaacaaatattgttggtgctaaatgggtattctttacaagttttatcgtattgttattcccgatatttttcttaagccaagcacaaacgccgggtatgttaatggcatcaggatttttccttggcgtaggtggcgcaattttctctgttggtgttacatcagttcctaaatatttcccaaaagaaaaagtaggtctagcaaatggtatttatggtatggggaatatcggtacagcagtttcttcatttttagcaccaccgatagcgggtattattggttggcaaacaacagttagaagttacttaattattatcgctttatttgcattaattatgttcatttttggtgacacacaagaacgtaaaattaaagtgccattaatggcccaaatgaaaacattatctaaaaactacaaattatattacttaagttattggtatttcattacttttggtgcttttgtagcatttggtattttcttacctaactacttagtaaatcattttggaattgacaaagtagatgctggtattcgttcaggtgtattcattgcgctggcaacattcttgagaccaataggtggtatactaggtgataaatttaatgcagttaaagtactgatgattgattttgttattatgattatcggtgccgttattttaggtatttcagaccatatcgcattattcactgtaggctgtttaacaataagtatttgtgcaggtattggtaacggcttaatttttaaattagtaccatcctacttctcaaatgaagcaggatcagcaaatggtatcgtatcaatgatgggtggtttaggaggattcttcccaccgttggtcatcacatacgtagctaatttaacaggttcaagccatttagcatttattttcttagcggtatttggatgcattgcattatttaccatgcgccatttatatcaaaaagaatatggttcattgaaacacagttga

SEQ ID NO: 28321 - protein, 389 aa, Staphylococcus aureus subsp. aureus Mu50
MYKTKGGFQLTLQTLSLVVGFMAWSIIAPLMPFIKQDVNVTEGQISIILAIPVILGSVLRVPFGYLTNIVGAKWVFFTSFIVLLFPIFFLSQAQTPGMLMASGFFLGVGGAIFSVGVTSVPKYFPKEKVGLANGIYGMGNIGTAVSSFLAPPIAGIIGWQTTVRSYLIIIALFALIMFIFGDTQERKIKVPLMAQMKTLSKNYKLYYLSYWYFITFGAFVAFGIFLPNYLVNHFGIDKVDAGIRSGVFIALATFLRPIGGILGDKFNAVKVLMIDFVIMIIGAVILGISDHIALFTVGCLTISICAGIGNGLIFKLVPSYFSNEAGSANGIVSMMGGLGGFFPPLVITYVANLTGSSHLAFIFLAVFGCIALFTMRHLYQKEYGSLKHS

SEQ ID NO: 28322 - DNA, 1422 bp, Caulobacter crescentus CB15
  CDS (1)..(1422): transl_table=11
ttgctgagcaagcgtgcgagattgcagagcctgagggcggcccgtcgccgcgcaggtgactccgatcctccgccacgctcaactcggatcaaggccaccgaacaacggcgttcgcggctgccagaggaccgctccgatgcggtcagtcgcccgaggcgccgccgcctcgctctcgcagacacgcagacgatcgaggccattatgctctcccgcgaattcctgaaggctggacacgcgccgaccctgttcgccgcctttctctatttcgacctcagcttcatggtctgggtgatcctgggtccgctgggcgtggcgatcgccaaggacttcaatctggacccggcccagaagggcctgatggtcgccgtgccggtgctcgccggcgcggtcctgcggctcgtgaacggcgtgctcgtcgatcgtatcggccccaagaagaccgggatcatcggccagctgatcgtgctggcgggtctggtcaccgcctgggctgttggtcttcacaactatcagcagatcctggcgctgggcctggtgctgggcgtggccggcgcgtccttcgcggtggcgctgccgctggcctcgcgctggtatccgcaggagcatcaggggctggccctgggcatcgccggggccggcaactccggcacggccctggccgccctgttcgcgccggccttggccaagaccttcggctggcagaacgtcatcggcctggcggcgatcccgctggccttcgccttcgtcgcctatctggtcctggccaaggacgcccccgagcagcccgcgcccaagaagctcgccgagtacctggatgtcctgaaggttcccgacgcctggtggctgatgctgctttacggtgtcacgttcggcggcttcgtcggtctcgcctcgtccctgaccatgtacttcaactccgagtacggcctggacccggtgatcgccgggttcttcaccgccgcctgtgtgttcgccggctcgttcatccgcccggtcggcggggcgctcgccgaccgctacggcggggtgcgaaccctgggcgtggtctatgtcctggccgcgatcggcctgacggtggccggcttccaattgccgtccgctggcctcgccctggccgtcctgctgttcgcgatgctggccctgggcgcgggcaatggcgcggtgttccagctggccccgcaaaggttccgtaatgagatcggggtgatgaccggcctgatcggcatgaccggcgggatcggcggcttctatctcgcctcgacgctcggtctggccaagaagatgaccggctcctaccagtccggcttcatcggtttcgccctgctggccgtcttcgccttgatcgcgctgttcagtctcaaggcccgctggcgagccgtgtggccgaccctgcacggcgacgccgcgcccgtccgcgtctaa

SEQ ID NO: 28323 - protein, 473 aa, Caulobacter crescentus CB15
MLSKRARLQSLRAARRRAGDSDPPPRSTRIKATEQRRSRLPEDRSDAVSRPRRRRLALADTQTIEAIMLSREFLKAGHAPTLFAAFLYFDLSFMVWVILGPLGVAIAKDFNLDPAQKGLMVAVPVLAGAVLRLVNGVLVDRIGPKKTGIIGQLIVLAGLVTAWAVGLHNYQQILALGLVLGVAGASFAVALPLASRWYPQEHQGLALGIAGAGNSGTALAALFAPALAKTFGWQNVIGLAAIPLAFAFVAYLVLAKDAPEQPAPKKLAEYLDVLKVPDAWWLMLLYGVTFGGFVGLASSLTMYFNSEYGLDPVIAGFFTAACVFAGSFIRPVGGALADRYGGVRTLGVVYVLAAIGLTVAGFQLPSAGLALAVLLFAMLALGAGNGAVFQLAPQRFRNEIGVMTGLIGMTGGIGGFYLASTLGLAKKMTGSYQSGFIGFALLAVFALIALFSLKARWRAVWPTLHGDAAPVRV

SEQ ID NO: 28324 - DNA, 1275 bp, Sinorhizobium meliloti 1021
  CDS (1)..(1275): transl_table=11
atgtccgctcttcaccagacgcagtcgacctataagggcgcaccaggacgcgctttgtgggtctcaacgggtgcatttacggtctgtttcgccatatggaccattttttcgatcatcggcgtgcgcataaaggatgaactcggcctgagcgaagccgagttcgggctcctgatcggcatgccgatcctgacgggctcgctcgtccgcatcgtcctgggcatctggaccagccggtatggcggccgcctcgtctacacgctcaccatgctggcggcagcactcgccaccttcctgctcgcttatgctacgacctatccgcagatgctcctcgcagggctgggtgtcggtctggcgggaggctcttttgccgtgggggtcgcctatgtttcgcctttctttccgccggaaaaacagggcaccgctctcgggattttcggtgccggcaacgtcggcgccgcggtcacgaaatttctggcgccattcgttctcgtcgccttcggctggcaggccgtcgcggaggtctgggcggccgcgcttctcgtcacggcggtcgtcttctggttctcgacggaagacgatccgcaattccgcgcccgccgcgatgtcggtgcaccaaggaagagcttcctgagtgaattcgagccactcaagaacattcaggtctggcgcttctcgctctactacttctttgccttcggcggcttcgtggcgctcgcgctctggctgccgcgctatctcgtcggcgtctacggtttcgacatcgagaccgccggcatgatcgccgccgcctattccattcccggcagtatcttccgcgcctatggcggcgctttgtcggacaagctcggcgcccgcaggatcatgtatgccatgttcgccgtgtctgccgtcgcaacggccattctgtcgatacctgcaggtgctgccggcggtgcgatgccgatcctggttaccccgatcgtcttcgtcgtcgtgaccttcgtgctcggcttcgtcatgagcctcggcaaggcagcggtctacaagcacatacccgtctattatccctcccatgtgggcgccgtcggcggcatcgtcggcatgatgggcgggctcggcggcttcgtcctgccgatcgccttcggcttcctcaaggatgtgaccggcctttggtccagctgcttcatgctgctcttcgtcatcgtagccgtctccatggtctggatgaatgtctcgatccggcagatcaagcgcgaggccgaccgaggtgtcccggccggggcgcttgcacgatag

SEQ ID NO: 28325 - protein, 424 aa, Sinorhizobium meliloti 1021
MSALHQTQSTYKGAPGRALWVSTGAFTVCFAIWTIFSIIGVRIKDELGLSEAEFGLLIGMPILTGSLVRIVLGIWTSRYGGRLVYTLTMLAAALATFLLAYATTYPQMLLAGLGVGLAGGSFAVGVAYVSPFFPPEKQGTALGIFGAGNVGAAVTKFLAPFVLVAFGWQAVAEVWAAALLVTAVVFWFSTEDDPQFRARRDVGAPRKSFLSEFEPLKNIQVWRFSLYYFFAFGGFVALALWLPRYLVGVYGFDIETAGMIAAAYSIPGSIFRAYGGALSDKLGARRIMYAMFAVSAVATAILSIPAGAAGGAMPILVTPIVFVVVTFVLGFVMSLGKAAVYKHIPVYYPSHVGAVGGIVGMMGGLGGFVLPIAFGFLKDVTGLWSSCFMLLFVIVAVSMVWMNVSIRQIKREADRGVPAGALAR

SEQ ID NO: 28326 - DNA, 1398 bp, Salmonella typhimurium LT2
  CDS (1)..(1398): transl_table=11
atgagtcacttatccgccccggaaagggcaactggcgctgttatcacggaatggcgtccggaagatccggcattctggcagcagcgcggccatcgtgtcgccagccgtaatttgtggatttctgtgccgtgtttactgctggcgttttgcgtctggatgctattcagcgcagtggcggtgaacctgccgaaagtgggatttaattttacgaccgatcagctctttatgttgactgcgctgccatctgtttccggcgcgctgctacgggtgccttactcctttatggtgccgctatttggcggacgtcgctggacagcgttcagtaccggtatcctcatcgtgccctgcgtatggttaggctttgccgttcaggataccagtacgccatttagcaccttcattattatttccttgctgtgtggttttgccggcgcgaactttgcctccagtatggcgaacatcagctttttctttcctaaacaaaagcagggcggcgcgctgggtctgaacggtggtctgggcaatatgggcgtgagcgtgatgcaactggttgcgccgctggtggtttcgctctctatctttgccgcctttggcagccacggtgtagagcagccggacggttctcagctctatctggcgaacgcggcctggatttgggtgcctttcctggccatttttacgctggcggcgtggttcggcatgaacgaactggcgacgtctaaggcctcgctaaaagagcaactgccggtgctcaaacgtggtcatctgtggatcatgagtctgctgtatctggcgaccttcggatcgtttatcggtttctccgcggggttcgcgatgctgtctaaaacgcaattcccggatgtgcagatcctgcattatgcgtttttcggtccgtttatcggcgcgctggcgcgttcggcaggcggcgcaatttctgaccgtctgggggggactcgcgtcacgcttatcaactttgtcctgatggcgattttcagcggtctgctgttcctgacattacctactggcggcgttggcggtagctttatcgcgttctacggggtatttctggcgctgttcctgacggctgggttggggagtggttctaccttccagatgatctccgttatcttccgtaaactgacaatggaccgggtaaaagcggaaggcgggtcggaagaaagagccatgcgtgaagcggcaactgatacggcggcggcgctgggctttatttccgcgattggcgcgattggcggcttttttattccgaaagcgtttggttcatctttagcattaaccggttctccagtcggcgcgatgaaagtctttcttattttctatatcgcctgcgtcgttattacctgggcggtatatggacgtcattctaaaaataaaaagtaa

SEQ ID NO: 28327 - protein, 465 aa, Salmonella typhimurium LT2
MSHLSAPERATGAVITEWRPEDPAFWQQRGHRVASRNLWISVPCLLLAFCVWMLFSAVAVNLPKVGFNFTTDQLFMLTALPSVSGALLRVPYSFMVPLFGGRRWTAFSTGILIVPCVWLGFAVQDTSTPFSTFIIISLLCGFAGANFASSMANISFFFPKQKQGGALGLNGGLGNMGVSVMQLVAPLVVSLSIFAAFGSHGVEQPDGSQLYLANAAWIWVPFLAIFTLAAWFGMNELATSKASLKEQLPVLKRGHLWIMSLLYLATFGSFIGFSAGFAMLSKTQFPDVQILHYAFFGPFIGALARSAGGAISDRLGGTRVTLINFVLMAIFSGLLFLTLPTGGVGGSFIAFYGVFLALFLTAGLGSGSTFQMISVIFRKLTMDRVKAEGGSEERAMREAATDTAAALGFISAIGAIGGFFIPKAFGSSLALTGSPVGAMKVFLIFYIACVVITWAVYGRHSKNKK

SEQ ID NO: 28328 - DNA, 1314 bp, Ralstonia solanacearum GMI1000
  CDS (1)..(1314): transl_table=11
atgtcctccactcccatcgtttcgcaagatgccatcgcgcaagcggccgttgtaccgcgtgcctattcggtactggcctcatccaccttcgccttcaccatctgcttcgcggtgtggacgatgttcgccattctcgggattccgctgcagaagcagctcggcctgtcggaaaccgaattcggcctgattgccgcaacgcccatcctgacgggctcgctggcgcgcgtgccgctgggcatgtggacggaccgcttcggcgggcgcatcgtgtttttcctgctgatgctggccacggtcgtcccgatctggtttgtggccgaggcgacgcggctgtggcagttcctgctgctcgggatgctggtcgggctggtcggcggctcgttctcggtgggcacgccatacgtggcgcgctggttccccaagagccggcagggctttgccatgggcatcttcggcgccggcaacgcgggcgctgcgctcaacaagttcgtcgcgccgctgctggtggtcgccgcgggcacgtggacggtggtgccgcgcgtgtacgccgtcgccatgctggtcaccgcgctgctgttctggttcggctcggccaccaatccggcccatgccgcgggcaaatcggtctcgctgcgcgcgcagctgcgggtgatgaaggatccgcgcgtgtggcgctactcgcagtattactcggtggtgttcggcggctatgtcgggctgtcgctgtggctcacgcggtactacgtgtcggagtacggcttctcgatcaagaccgcggccttcctggcggcgtgcttctcgctgccgggcggcgtgctgcgcgcggtgggcggctggctgtcggaccgctacggcgcctcccgcaccacctgggcggtgatgtgggtgtgctgggtcgcgttcttcctgctgagctatccgcagacgcagttcacggtgaccagcacgcgcggcccgctggacttccacatcggcctgtcgccgctggccttcaccgcgctgatcggcgtggtgggcgtggccatggccatcggcaaggcctcggtcttcaagttcatctcgaacgatttcaccgacaacatcggcgcagtctcgggcgcggtgggcctggccggcgggctggcgggcttcgtcctgccgatcctgttcggcgtgctggtcgatctcaccggcatccgctcgacctgcttcatgttgctgtacggcgccgtgtgcgtgagcctggtgtggatgcacttcagcttccgcgccgggcgcggcggcatgccgtccgaaccgccgcgcccggctgccctcgcgcagcgcgccgcctga

SEQ ID NO: 28329 - protein, 437 aa, Ralstonia solanacearum GMI1000
MSSTPIVSQDAIAQAAVVPRAYSVLASSTFAFTICFAVWTMFAILGIPLQKQLGLSETEFGLIAATPILTGSLARVPLGMWTDRFGGRIVFFLLMLATVVPIWFVAEATRLWQFLLLGMLVGLVGGSFSVGTPYVARWFPKSRQGFAMGIFGAGNAGAALNKFVAPLLVVAAGTWTVVPRVYAVAMLVTALLFWFGSATNPAHAAGKSVSLRAQLRVMKDPRVWRYSQYYSVVFGGYVGLSLWLTRYYVSEYGFSIKTAAFLAACFSLPGGVLRAVGGWLSDRYGASRTTWAVMWVCWVAFFLLSYPQTQFTVTSTRGPLDFHIGLSPLAFTALIGVVGVAMAIGKASVFKFISNDFTDNIGAVSGAVGLAGGLAGFVLPILFGVLVDLTGIRSTCFMLLYGAVCVSLVWMHFSFRAGRGGMPSEPPRPAALAQRAA

SEQ ID NO: 28330 - DNA, 1386 bp, Ralstonia solanacearum GMI1000
  CDS (1)..(1386): transl_table=11
atgtcgtcaaacgtcctcacgcactgggagccggagaacccttcgttctggcgcgccaccggccagtcggtggcctatcgcaacctgtggatctcgattcccgccctgatgatcgcgttcgcggtctggtcgttgtggagcgtggtcgtggtcaacctcgacaaagcggggtttgcgctcaccaagaaccagatgttctggctcaccgccttgccggcgctgtcgggcgccacgctgcgcatcttctattcgttcctggtgccgattttcggcgggcggcgctggacggcgctgtccacggccagcctgctgatccccgcgctgggcatgggcatggcgctgcgcgatccgcagacgggctttccgaccctgctggtcctggcgctgctgtgcggcctgggcggcggcaatttcagttcgtcgatggccaacatcagcttcttcttccccaagcagaagaaggggctggccacggggctgaacgccggcatcggcaacctgggcgtgtcggcggtgcagttcatcacgccgctggtgatttcggtcggcgtgttcggcgcgctgggcggcgacccgcagacctacacggccggcggcgtggagcgcagcctgtggctccagaatgcgggcttcctgtgggtgccgttcattctcgcggcgacgctggccgcgtggttcggcatgcatgacattgccgatgcccgcgcctccttcgccgaccaggccgtgatcttcaagcgcacccacaactggctgatgtgcctgctgtacgtcggcaccttcggctcgttcatcggcttctcggccgggctggcactgctgaccaagtcgcagtttcccgatgtcgacccgaccgcctacgtgttcctcgggccgctggccggcgcgctcacgcggccggtggggggctggatttcggacaagctcggcggggcgcgcgtcacgctgttcaccttcgccggcatgatcgcggcggtggtgggcgtgctgatgttcctgcccgccgagggcaatcccggcagcttcgcgggcttcctcgccatgttcatcgtgctgttcgcgctgaccggcatcggcaacggctcgaccttccgcatgatcccgatcatcttcctcacgcagcatcagcgggcggcccggggccaggacgacgccgcgcagcgccaggccgtccaggacgccggcaaggaatcggccgccgtgctgggcttcaccggcgcgatcggcgcgtacggcggcttcttcatccccaagagcttcggcacctcgctggagctgacgggctcggtcaatgccgcgctgtactgcttcatcgccttctacgtggtgtgcgcactggtgacgtgggccatctacgcccgccgcaacgcgcccatgccgtgctga

SEQ ID NO: 28331 - protein, 461 aa, Ralstonia solanacearum GMI1000
MSSNVLTHWEPENPSFWRATGQSVAYRNLWISIPALMIAFAVWSLWSVVVVNLDKAGFALTKNQMFWLTALPALSGATLRIFYSFLVPIFGGRRWTALSTASLLIPALGMGMALRDPQTGFPTLLVLALLCGLGGGNFSSSMANISFFFPKQKKGLATGLNAGIGNLGVSAVQFITPLVISVGVFGALGGDPQTYTAGGVERSLWLQNAGFLWVPFILAATLAAWFGMHDIADARASFADQAVIFKRTHNWLMCLLYVGTFGSFIGFSAGLALLTKSQFPDVDPTAYVFLGPLAGALTRPVGGWISDKLGGARVTLFTFAGMIAAVVGVLMFLPAEGNPGSFAGFLAMFIVLFALTGIGNGSTFRMIPIIFLTQHQRAARGQDDAAQRQAVQDAGKESAAVLGFTGAIGAYGGFFIPKSFGTSLELTGSVNAALYCFIAFYVVCALVTWAIYARRNAPMPC

SEQ ID NO: 28332 - DNA, 2856 bp, Brucella melitensis 16M
  CDS (1)..(2856): transl_table=11
atgcaacatgtcgcaggggaaaaccccagggcgcagactacggcgctagcgatgagcgcgaccgcttttacagtctgttttgcggtctggaccatctttgctatcatcggcattgaaattcgatccgagcttggcctgactgagacacagttcggcctgcttgttagcacgcccatcctgaccggatcgctgatccgcgtcattctgggcatatgggtggaccgctatggcggccgtgccatcttcacgctcacaatgctggtttcggctgtcgccacctatctcctgacctatgccacgacctatccgcaaatgctgctcgcagccctcggcgtcggcgtggcgggcgggtcgttctcggtcggcgtcgcttatgtctcgcgctggtatccacctgaaaagcagggcgttgcgctcggcattttcggcgcgggcaatgtcggcgcggcggtgacgaagttctttgcaccgatggtcatggttgcatttggctggcatacggttgccgaagtctgggcggccgcaatggttgtcatggcgctggtcttctatttcaccaccaacgacgatcccgttctggtcgaacgccgtcgcaagggtgaaaagcccaccagcacgctgatggagctggaaccactcaagaacattcaggtctggcgtttctcgctttattacttcttcgtgttcggcgcctttgtggcgctctccctgtggctgccgcaatatctgatccatgtctatggcgtcgatatccgttttgccggcatcatcgcggcattcttctccatcccggccagccttttccgcgcttatggcgggcatctttcagatgtctacggcgcgcgcagggtcatgtactggaccttcgccgtctcgctggtggcgaccttcattctgtcttatccgccaacggattatgtcatccagagcgataatggcccgctggccttccacgccgaaatgggcgtaatcggtttcacggtaacggtcttcatcctcggcttcttcatggccctgggcaaggcagccgtcttcaagcatatcccggtctattatcccggcaatgtcggcgctgtcggcggtctcgtcggcatgatcggcggccttggcggcttcatcctgccgatcctgttcggcgtgctgctggaccagaccggcctgtggacgagctgcttcatgctgctcttcgtcatcgtcgtcgtgtccttcgtgtggatgcatgtctccattcgccagatggaacacgcagccgaaggcaaggctacggaagaacttcccgccttcgccgaattgcagggcctgaaaaaggctgaggtcaagcctgcgacgggcgaatccgtcctcaccgactggcggcctgacgatccggccttctgggaacagaaaggcaggcgcatcgccaagcgcaatctgtggctctccatcccggcgcttctcctctccttcgccatctggcaggtctggtccgtcgtggtggcaaaactgccgctggtgggctatcagttcacgaccgaccagctcttctggctggccgctctgcccggcatttcgggcgcaaccctgcgtatcttctattccttcatggtcccgatctttggcggccgcctttggacgacgcttaccacctggtcgctcgtcattccggccatcggcatcggctatgcggtccagaatccggatacgccttacttcatcttcctccttctggcactcttctgcggctttggcggcggtaacttcgcctcctccatgtccaacatttccttcttcttcccgaagacggaaaagggcaatgcggcggcactgaacgcaggcctcggcaatctcggcgtcagcgtcgtgcagttcgtcgttccgctggtcatcaccgcaggcatcttcggcaagctcggcggcaacccggcaatggtcgcaaccgcggctggcgaagccccgctctggctccagaacgccggcttcatcttcgtgccgttcatcatcgtcacggctttcgccaactggttcggcatgaacgacatcgcctctgccaaggcttcgtttgccgatcaggccgtcatcttccgccgcaggcataactggatcatgtgctggctttacaccggtacgttcggttcgttcatcggctattcggcaggtttcccgctgctcaccaacatcctgttccccgaggtcaatgcgctgcaattcgccttcctcggacctttggtcggtgcattgtcgcggtcgggttccggctggctggcagacaaatacggcggcggtcgcgttaccatctgggctttcatcctgatgatggttggcgtggcaggcgtgctctacttcgtcggcatcaaggatgagccgaatgccttctggggcttcttcgccgccttcatcctgctgttcttcgccaccggcattggcaatgcctccaccttccagatgatcccggcgatcatggcgaaggatatggaacggctgatgcccatggcttcggcagaagaacgccgccgccaggcagacaaggaatccgcagccatcaccggcttcacctcggccatcgctgccttcggcgccttcttcatccccaagggatacggcacctcgatcagcctgaccggaggaccggaaatggcgctgtgggcattcctgatcttctacgtgacctgcctcatcatcacctggggcgtctatacccgaaaaggcggactgctggactgctctacgacgtcgagcgccgcctcaagccggccgcagccgccgcttgaagaaaaactgagaggatataatcatgagtctactcctcgaccgcctgaacttcctggcacgcaggaatgtcggcaccttctcggaagggcacggcgtcaccaccaatga

SEQ ID NO: 28333 - protein, 951 aa, Brucella melitensis 16M
MQHVAGENPRAQTTALAMSATAFTVCFAVWTIFAIIGIEIRSELGLTETQFGLLVSTPILTGSLIRVILGIWVDRYGGRAIFTLTMLVSAVATYLLTYATTYPQMLLAALGVGVAGGSFSVGVAYVSRWYPPEKQGVALGIFGAGNVGAAVTKFFAPMVMVAFGWHTVAEVWAAAMVVMALVFYFTTNDDPVLVERRRKGEKPTSTLMELEPLKNIQVWRFSLYYFFVFGAFVALSLWLPQYLIHVYGVDIRFAGIIAAFFSIPASLFRAYGGHLSDVYGARRVMYWTFAVSLVATFILSYPPTDYVIQSDNGPLAFHAEMGVIGFTVTVFILGFFMALGKAAVFKHIPVYYPGNVGAVGGLVGMIGGLGGFILPILFGVLLDQTGLWTSCFMLLFVIVVVSFVWMHVSIRQMEHAAEGKATEELPAFAELQGLKKAEVKPATGESVLTDWRPDDPAFWEQKGRRIAKRNLWLSIPALLLSFAIWQVWSVVVAKLPLVGYQFTTDQLFWLAALPGISGATLRIFYSFMVPIFGGRLWTTLTTWSLVIPAIGIGYAVQNPDTPYFIFLLLALFCGFGGGNFASSMSNISFFFPKTEKGNAAALNAGLGNLGVSVVQFVVPLVITAGIFGKLGGNPAMVATAAGEAPLWLQNAGFIFVPFIIVTAFANWFGMNDIASAKASFADQAVIFRRRHNWIMCWLYTGTFGSFIGYSAGFPLLTNILFPEVNALQFAFLGPLVGALSRSGSGWLADKYGGGRVTIWAFILMMVGVAGVLYFVGIKDEPNAFWGFFAAFILLFFATGIGNASTFQMIPAIMAKDMERLMPMASAEERRRQADKESAAITGFTSAIAAFGAFFIPKGYGTSISLTGGPEMALWAFLIFYVTCLIITWGVYTRKGGLLDCSTTSSAASSRPQPPLEEKLRGYNHESTPRPPELPGTQECRHLLGRARRHHQ

SEQ ID NO: 28334 - DNA, 1293 bp, Clostridium perfringens str. 13
  CDS (1)..(1293): transl_table=11
atgaaaaacttaaatcttaaaggtaatccaaatcgtggattaataggagctacattaggtttcttcataggttttgcagcagtttctctttatggaccaacttctgcagtatttaaagaagctttcgtaaaccttaatccagtattattagcattacttattgcagcccctaacttatcaggttctttacttagaatacctttttcagcatgggttgacacaactggtgggagaaaaccacttatagttttactacttttatcaataataggtatgggtggtttatacatagtattagctttctttagcgataacttaaatcaatattattatttattatttgcacttggactattatctggatgtggtatagcaacattctctgttggtgtcagccaagcatcatattggttcccaaaaagcaaacaaggtgtagctttaggaatatatggtggtgttggtaacttagcacctggaatatttgcattattaattccaaacttagcacttcctctattaggattacctggttcttacttagcttggttaatattcttaatagttggtactgtaatttacataaaaataggtcaaaacgcttggtacttccaacttgttgacaaaggaataaataaagatgaagctaaggaaatagcatcaaaagagtatggtcaagaattattccctaagggaaaagcaagtgaaacacttttaatatcagctaagtcatggaaaacttgggctttagtatttatctatttcacaactttcggtggattcttagcattaacaggttggttccctaactactggatgacttatttcggattaaatatgaaagttgcaggtcttttaacagctttatattctatattaacttcattaactagaatatatggtggaaaagttgctgataaaaatggtggagaaataactactatagtttctctaggaatagcacttatcggtgcaatttgtatgacttttgcttcaactatgactttagcaataataggtataatcttacttgctattggtatgggagttgcaaacgcagcagtatttaaaatagttcctaacgcagttccagaggcaatgggtggagcttcaggatggattggtggattaggtgctttaggtggattcttaatacctcctgtaatggcatcattcctaaacagatcaggatttgctggatattcacaaggattttcagtatttatagttttaataattgtagcaattggagtaatagctttattccaagctttacaaaagaaatcagcaaaataa

SEQ ID NO: 28335 - protein, 430 aa, Clostridium perfringens str. 13
MKNLNLKGNPNRGLIGATLGFFIGFAAVSLYGPTSAVFKEAFVNLNPVLLALLIAAPNLSGSLLRIPFSAWVDTTGGRKPLIVLLLLSIIGMGGLYIVLAFFSDNLNQYYYLLFALGLLSGCGIATFSVGVSQASYWFPKSKQGVALGIYGGVGNLAPGIFALLIPNLALPLLGLPGSYLAWLIFLIVGTVIYIKIGQNAWYFQLVDKGINKDEAKEIASKEYGQELFPKGKASETLLISAKSWKTWALVFIYFTTFGGFLALTGWFPNYWMTYFGLNMKVAGLLTALYSILTSLTRIYGGKVADKNGGEITTIVSLGIALIGAICMTFASTMTLAIIGIILLAIGMGVANAAVFKIVPNAVPEAMGGASGWIGGLGALGGFLIPPVMASFLNRSGFAGYSQGFSVFIVLIIVAIGVIALFQALQKKSAK

SEQ ID NO: 28336 - DNA, 1338 bp, Corynebacterium glutamicum ATCC 13032
  CDS (1)..(1338): transl_table=11
gtgacacaactcaacaccaaaggcgttgttctgcaagggtgggatccagaagatcctgaacattgggactcgaaaattgcatggcgaaccctgtggattaccaccttctccatgattattgggttctgcgtgtggtatttggtttctgccatcgctcccctactcaatcgaattggatttgatctctcagcaggtcagctttattggctcgcatctatccccggtttggccggcggattaatccgattgatttacatgttccttccaccgattcttggaacccgcaaattggtcggaatttcctccggtctatttttgatccccatgtttgggtggttcctggctgtccaagattcaagcactccctactggtggcttctcacactcgctgcactcactggcattggtggtggcgtgttctctggatatatgccgtccacgggatacttcttccccaaggcaaaatcgggcactgcgctgggcattcaggcaggtatcggcaacctcggcgtctcgataattcagttcatgggcccatgggtcatgggtttcggtctgctgggcattggtttcctcaccccgcagcgcaccattgaaggcaccacggtgtttgtgcacaatgctgcgattgtgttggtcccgtggactattctcgcggccgttttatccttcctgtttcttaaagatgtcccagtcaccgcaaatttccggcaacagatcgatatctttggcaacaagaacacatggattttgtccattatctacttgatgacattcggtgccttcgccggtttcgccgcgcagttcggtctgatcatcaacaacaacttcggcatcgcttccccgatggcagagacttatccagctgagatgcttcacgccggtgctacgttcgcgtttcttggacctttgattggtgctttggtgcgtgctgcatggggtccactgtgtgacagattcggtggagctatctggacctttgtcggtggcatcggaatgactatcgccactgcagctgccgcaatcttcctaagcagagcggagacacctgatgatttctggccattcctgtggtccatgcttgccctgttcttcttcaccggtctgggcaatgctggcaccttcaaacaaatgcccatgattttgcctaaacgccaagcaggtggcgtgatcggctggaccggtgccattggtgccttcggccccttcattgtcggtgtcttgctctccttcactccaactgtcgcgttcttctggggctgcgtggtgttcttcatcatcgccaccgctttgacctggatctactacgcccgcccgaacgctccattcccgggataa

SEQ ID NO: 28337 - protein, 445 aa, Corynebacterium glutamicum ATCC 13032
MTQLNTKGVVLQGWDPEDPEHWDSKIAWRTLWITTFSMIIGFCVWYLVSAIAPLLNRIGFDLSAGQLYWLASIPGLAGGLIRLIYMFLPPILGTRKLVGISSGLFLIPMFGWFLAVQDSSTPYWWLLTLAALTGIGGGVFSGYMPSTGYFFPKAKSGTALGIQAGIGNLGVSIIQFMGPWVMGFGLLGIGFLTPQRTIEGTTVFVHNAAIVLVPWTILAAVLSFLFLKDVPVTANFRQQIDIFGNKNTWILSIIYLMTFGAFAGFAAQFGLIINNNFGIASPMAETYPAEMLHAGATFAFLGPLIGALVRAAWGPLCDRFGGAIWTFVGGIGMTIATAAAAIFLSRAETPDDFWPFLWSMLALFFFTGLGNAGTFKQMPMILPKRQAGGVIGWTGAIGAFGPFIVGVLLSFTPTVAFFWGCVVFFIIATALTWIYYARPNAPFPG

SEQ ID NO: 28338 - DNA, 1239 bp, Streptomyces coelicolor A3(2)
  CDS (1)..(1239): transl_table=11
atgctccagccgtcgacacagcacagcgagatcacatcgcagtccgtacccggtcgggcctggttgatgttggcactcgccaccctgggcttcgccctcaacttctgggcctgggcactgctgagcccgctcggcccccggttcaaggacagcctggacctgagctccttccagcagtcgttgctggtcgccgtaccggtggtggtcggctcgctggggcggatacccgtcggcgcgctgaccgaccggttcggaggacgagtgatgttcccgctcgtctccgccgccaccatcgtcccggtcctctacctcgggctggccgggcactcctccctgaccgccctgctggtcggaggcttcctcctcggcatcggcggcaccgcgttcgccgtcggagtccccttcaccagcgcctggttcccgcccgagcggcggggcctggccatcggcatcttcggcgccggcatgggcggcaccgccatcagcgccctgaccacggtgaagctggtcgacgcgtacggcatggccaacccgttcctcgtcaccgccgccgtcctggccgtctacgccgtggtggcggcactgctgctgcgcgacgcacccggccggaccgtgcccgcggagtccctgggccaccgcatggcggccacgtgcaagttgggcatcacctggcaggcgtcggcgctctacgcggtcgccttcggcggctacgtcgccttctccgtctacctgcccacctacctcaagaccggctacggcctcacccaggccgacgcggccaaccgcatggcgggattcgttctgctcgcggtcgccatgcgcccgatgggcggctggctctccgaccgactggggccggtcaaggtcctggccggctcgttggccgtggtgctggccggagcgctcgcccagtcgccgaccccggccctgatgccggtcggtacgatcgccttcctcgccatggccgccgcgctcggtgcgggcagcggcgccgtgttcgccctggtcgccttcctctcgccggcgaacaaggtcggttcggtcaccggcatggtgggcgcggccggcggactcggcggcttcctcccgccgttggtgatggggacgctgtacggttccttcggctcgtacgcgatcggcctgatcctgctcgccgcggtcgcggcggcggcgcttgccttcaccggcaccggactgagccatgccgtctctcgtcgcgcgaccgcgcactcgcactga

SEQ ID NO: 28339 - protein, 412 aa, Streptomyces coelicolor A3(2)
MLQPSTQHSEITSQSVPGRAWLMLALATLGFALNFWAWALLSPLGPRFKDSLDLSSFQQSLLVAVPVVVGSLGRIPVGALTDRFGGRVMFPLVSAATIVPVLYLGLAGHSSLTALLVGGFLLGIGGTAFAVGVPFTSAWFPPERRGLAIGIFGAGMGGTAISALTTVKLVDAYGMANPFLVTAAVLAVYAVVAALLLRDAPGRTVPAESLGHRMAATCKLGITWQASALYAVAFGGYVAFSVYLPTYLKTGYGLTQADAANRMAGFVLLAVAMRPMGGWLSDRLGPVKVLAGSLAVVLAGALAQSPTPALMPVGTIAFLAMAAALGAGSGAVFALVAFLSPANKVGSVTGMVGAAGGLGGFLPPLVMGTLYGSFGSYAIGLILLAAVAAAALAFTGTGLSHAVSRRATAHSH

SEQ ID NO: 28340 - DNA, 1359 bp, Streptomyces coelicolor A3(2)
  CDS (1)..(1359): transl_table=11
atgaaagcccgtggcggacgctggatcgagtactgggatcccgagaacgagaccttctggaaggagacgggacggcgaacggcccggcggaacctgttcttctccgtgctctccgagcacatcgggttctccgtctggaccctgtggtccgtgctggtgctcttcatgggcccggagtacgggctgtccccggccgacaagttcctgctgacgtccgtggtgaccctcgtcggggccgtcgtacgggtgccgtacaccttcgccgtggccgtcttcggcgggcggaactggacggtcgtctcggcgagcatgctgctcgtgccgacgctcgcggccttcgtcgtgatggagcccgggacgtccttctcgacgttcctgctggtcgggctgctggccgggatcggcggcggcaacttcgcctcctccatgaccaacatcaacgccttcttcccgctcagggagaagggctgggcgctcggcctcaacgccggcggcgggaacgtcggtgtgcccgtcatccagctcgtcgcgctcgcgatcatcggggcgagcggcgggccccgggtgctgctcggcatctacatcccgctgatcctcgtggccgccgtcctcgccgcgcgcttcatggacaacctcaccacggtgaagaacgacaccggagcggccaaggacgcggccagggacgcccacacctggatcatgtcggtgctgtacgtcggcaccttcggttccttcatcggctacagcttcgccttcggacaggtgctgaccacccagttcgggcggacaccgctccaggcggcctacctcacgttcatcggaccgctgctcggctccctcgtccgtccgctgggcggcaggctcgccgaccggtacggcggttcgaggatcaccctgtggaacttcgtcgccatggccgcggccaccgcggtcctcgtcgtggccagcatggagaggtcgctggcgctgttcgtgaccgtgttcgtggcgctgttcgtgctcagtgggctcggcaacggctcgacgttcaagatgatcccgcacatcttccactccaaggcgctggcccgggggctgacgggagaggaggccgtgctgcacgggcggcggctgtcgggggcggcgatggggctgatcggcgcggtgggaggcctcgggggcgtcgggatcaacctcgccttccgtcagtccttcctctcctcgggttcgggcaccggtgccttcgtcgccttcctggcctgctacgccgtgtgcatcgcggtgacctggtcggtataccttcgccgtcccgccgggcggagcgggaccggggcgggaccggcggcggaggagacgcggcgcagctacgccgaggtgtga

SEQ ID NO: 28341 - protein, 452 aa, Streptomyces coelicolor A3(2)
MKARGGRWIEYWDPENETFWKETGRRTARRNLFFSVLSEHIGFSVWTLWSVLVLFMGPEYGLSPADKFLLTSVVTLVGAVVRVPYTFAVAVFGGRNWTVVSASMLLVPTLAAFVVMEPGTSFSTFLLVGLLAGIGGGNFASSMTNINAFFPLREKGWALGLNAGGGNVGVPVIQLVALAIIGASGGPRVLLGIYIPLILVAAVLAARFMDNLTTVKNDTGAAKDAARDAHTWIMSVLYVGTFGSFIGYSFAFGQVLTTQFGRTPLQAAYLTFIGPLLGSLVRPLGGRLADRYGGSRITLWNFVAMAAATAVLVVASMERSLALFVTVFVALFVLSGLGNGSTFKMIPHIFHSKALARGLTGEEAVLHGRRLSGAAMGLIGAVGGLGGVGINLAFRQSFLSSGSGTGAFVAFLACYAVCIAVTWSVYLRRPAGRSGTGAGPAAEETRRSYAEV

SEQ ID NO: 28342 - DNA, 1236 bp, Xanthomonas campestris pv. campestris str. ATCC 33913
  CDS (1)..(1236): transl_table=11
ttggccatcgcattcggagatgcctctatgcagcgttcgttctggcgatctgggcacacgcccaccttgttcgcatccttcctgtatttcgacctgagtttcatggtgtggtatctgctcggtccgctgcaggtgccgatcgcgcaagcgctgggattggacacgcagcagcgcgccttgatggtggcggtgcccatcctgtgcggcgcggtgttgcgcctggtgttgggcatgctggccgaccgtatcggcgccaagcgcgccggcgtggtggcgcagttggcggtgatcgcctcgttgtttggtgcctggcaactcggcgtgcacagcatgggccaggtgctgctgctgggcgtgctgctcggcattgccggcgcctcgtttgcagtggcgctgccgctggcatcgcgctggtacccgccggaacaccagggcacggcgatgggcattgccggtgccggcaactccggcacggtgctggcggccttgttcgcgccgatgctggcgctggcattcggctaccagaacgtgttcgggctggcgtgcattccactggtgctgacgctgctcgtgtttgtgttgattgcccgcgaagcgcccataccggttgcgcgcaagcgctgggccgattacggccgcgtgctggttggcaatcgcgacgcatggcgcttcatgtttttttactcagtgacctttggcggcttctccggatttgctagcgcgttgccgggttacttccacgaccagttcggtttcgatgcgcgcaccgcgggctgggccacggccgcctgcgtgttggccggctcggtgatgcgcccgctcggcggtgtcatcgccgaccgcgttggcggcacgcgcgccttgctggcggtgtacttgctggtcgccaccttggtcggcatcgccggctttggcgcaggtggggccacgatcaccttggggctgttcgtgctcacgctgctgtgcctgggcgccggcaatggagcggtgttccagctggtgccgcagcgcttcggccaggacatcggggtgatgaccggcctgatcggcatggccggcggcgttggcggctttgcattggccgcggggctgggcgtgctcaagcagcacaccggcagctatgcgatcggcatgtggttgttcgcggcgttcgccctgggtggctgggcgctgctggccggcgtcaagacccaatggcgcagtgaatggtccaccgccggcgcggcgcgcgtctga

SEQ ID NO: 28343 - protein, 411 aa, Xanthomonas campestris pv. campestris str. ATCC 33913
MAIAFGDASMQRSFWRSGHTPTLFASFLYFDLSFMVWYLLGPLQVPIAQALGLDTQQRALMVAVPILCGAVLRLVLGMLADRIGAKRAGVVAQLAVIASLFGAWQLGVHSMGQVLLLGVLLGIAGASFAVALPLASRWYPPEHQGTAMGIAGAGNSGTVLAALFAPMLALAFGYQNVFGLACIPLVLTLLVFVLIAREAPIPVARKRWADYGRVLVGNRDAWRFMFFYSVTFGGFSGFASALPGYFHDQFGFDARTAGWATAACVLAGSVMRPLGGVIADRVGGTRALLAVYLLVATLVGIAGFGAGGATITLGLFVLTLLCLGAGNGAVFQLVPQRFGQDIGVMTGLIGMAGGVGGFALAAGLGVLKQHTGSYAIGMWLFAAFALGGWALLAGVKTQWRSEWSTAGAARV

SEQ ID NO: 28344 - DNA, 2688 bp, Brucella suis 1330
  CDS (1)..(2688): transl_table=11
atgagcacgaccgcttttacagtctgttttgcggtctggaccatctttgctatcatcggcattgaaattcgatccgagcttggcctgactgagacacagttcggcctgcttgttggcacgcccatcctgaccggatcgctgatccgcgtcattctgggcatatgggcggaccgctatggcggccgtgccatcttcacgctcacaatgctggtttcggctgtcgccacctatctcctgacctatgccacgacctatccgcaaatgctgctcgcagccctcggcgtcggcgtggcgggcgggtcgttctcggtcggcgtcgcttatgtctcgcgctggtacccacctgaaaagcagggcgttgcgctcggcattttcggcgcgggcaatgtcggcgcggcggtgacgaagttctttgcaccgatggtcatggttgcatttggctggcatacggttgccgaagtctgggcggccgcaatggttgtcatggcgctggtctactatttcaccaccaacgacgatcccgttctggtcgaacgccgtcgcaagggtgaaaagcccaccagcacgctgatggagctggaaccactcaagaacattcaggtctggcgtttctcgctttattacttcttcgtgttcggcgcctttgtggcgctctccctgtggctgccgcaatatctgatccatgtctatggcgtcgatatccgttttgccggcatcatcgcggcattcttctccatcccggccagccttttccgcgcttatggcgggcatctttcagatgtctacggcgcgcgcagggtcatgtactggaccttcgccgtctcgctggtggcgaccttcattctgtcttatccgccaacggattatgtcatccagagcgataatggcccgctggccttccacgccgaaatgggcgtaatcggtttcacggtaacggtcttcatcctcggcttcttcatggccctgggcaaggcagccgtcttcaagcatatcccggtctattatcccggcaatgtcggcgctgtcggcggtctcgtcggcatgatcggcggccttggcggcttcatcctgccgatcctgttcggcgtgctgctggaccagaccggcctgtggacgagctgcttcatgctgctcttcgtcatcgtcgtcgtgtccttcgtgtggatgcatgtctccattcgccagatggaacacgcagccgaaggcaaggctacggaagaacttcccgccttcgccgaattgcagggcctgaaaaaggctgaggtcaagcctgcgacgggcgaatccgtcctcaccgactggcggcctgacgatccggccttctgggaacagaaaggcaggcgcatcgccaagcgcaatctgtggctctccatcccggcgcttctcctctccttcgccatctggcaggtctggtccgtcgtcgtggcaaaactgccgctggtgggctatcagttcacgaccgaccagctcttctggctggccgctctgcccggcatttcgggcgcaaccctgcgtatcttctattccttcatggtcccgatctttggcggccgcctttggacgacgcttaccacctggtcgctcgtcattccggccatcggcatcggctatgcggtccagaatccggatacgccttacttcatcttcctccttctggcgctcttctgcggctttggcggcggtaacttcgcctcctccatgtccaacatttccttcttcttcccgaagacggaaaagggcaatgcggcggcactgaacgcaggcctcggcaatctcggcgtcagcgtcgtgcagttcgtcgttccgctggtcatcaccgcaggcatcttcggcaagctcggcggcaacccggcaatggtcgcaaccgcggctggcgaagccccgctctggctccagaacgccggcttcatcttcgtgccgttcatcatcgtcacggctttcgccaactggttcggcatgaacgacatcgcctctgccaaggcttcgtttgccgatcaggccgtcatcttccgccgcaggcataactggatcatgtgctggctttacatcggtacgttcggttcgttcatcggctattcggcaggtttcccgctgctcaccaacatcctgttccccgaggtcaatgcgctgcaattcgccttcctcggacctttggtcggtgcattgtcgcggtcgggttccggctggctggcagacaaatacggcggtggtcgcgttaccatctgggctttcatcctgatgatggttggcgtggcaggcgtgctctacttcgtcggcatcaaggatgagccgaatgccttctggggcttcttcgccgccttcatcctgctgttcttcgccaccggcattggcaatgcctccaccttccagatgatcccggcgatcatggcgaaggatatggaacggctaatgcccatggcttcggcagaagaacgccgccgccaggcagacaaggaatccgcagccatcaccggcttcacctcggccatcgctgccttcggcgccttcttcatccccaagggatacggcacctcgatcagcctgaccggaggaccggaaatggcgctgtgggcattcctgatcttctacgtgacctgcctcatcatcacctggggcgtctatacccgaaaaggcggactgctctacgacgtcgagcgccgcctcaagccggccgcagccgccgcttga

SEQ ID NO: 28345 - protein, 895 aa, Brucella suis 1330
MSTTAFTVCFAVWTIFAIIGIEIRSELGLTETQFGLLVGTPILTGSLIRVILGIWADRYGGRAIFTLTMLVSAVATYLLTYATTYPQMLLAALGVGVAGGSFSVGVAYVSRWYPPEKQGVALGIFGAGNVGAAVTKFFAPMVMVAFGWHTVAEVWAAAMVVMALVYYFTTNDDPVLVERRRKGEKPTSTLMELEPLKNIQVWRFSLYYFFVFGAFVALSLWLPQYLIHVYGVDIRFAGIIAAFFSIPASLFRAYGGHLSDVYGARRVMYWTFAVSLVATFILSYPPTDYVIQSDNGPLAFHAEMGVIGFTVTVFILGFFMALGKAAVFKHIPVYYPGNVGAVGGLVGMIGGLGGFILPILFGVLLDQTGLWTSCFMLLFVIVVVSFVWMHVSIRQMEHAAEGKATEELPAFAELQGLKKAEVKPATGESVLTDWRPDDPAFWEQKGRRIAKRNLWLSIPALLLSFAIWQVWSVVVAKLPLVGYQFTTDQLFWLAALPGISGATLRIFYSFMVPIFGGRLWTTLTTWSLVIPAIGIGYAVQNPDTPYFIFLLLALFCGFGGGNFASSMSNISFFFPKTEKGNAAALNAGLGNLGVSVVQFVVPLVITAGIFGKLGGNPAMVATAAGEAPLWLQNAGFIFVPFIIVTAFANWFGMNDIASAKASFADQAVIFRRRHNWIMCWLYIGTFGSFIGYSAGFPLLTNILFPEVNALQFAFLGPLVGALSRSGSGWLADKYGGGRVTIWAFILMMVGVAGVLYFVGIKDEPNAFWGFFAAFILLFFATGIGNASTFQMIPAIMAKDMERLMPMASAEERRRQADKESAAITGFTSAIAAFGAFFIPKGYGTSISLTGGPEMALWAFLIFYVTCLIITWGVYTRKGGLLYDVERRLKPAAAAA

SEQ ID NO: 28346 - DNA, 1389 bp, Shigella flexneri 2a str. 301
  CDS (1)..(1389): transl_table=11
atggcactgcaaaatgagaaaaatagtcgttatcttttacgcgactggaaaccagaaaatccggccttctgggaaaataaaggaaaacatattgctcgaagaaacctctggatatcagtcagttgtctacttcttgccttctgtgtctggatgctatttagcgcagttaccgttaatctcaataaaatcggttttaattttactaccgatcaactctttttattaaccgcattaccctccgtttctggcgcattattgcgtgttccctactcctttatggtgcctatattcggtggacgccgatggccggtttttagtactgcaatcctgattattccttgcgtctggctcggaattgccgtgcaaaatccgaatactccttttgggatatttatcgttatcgctttgctatgcggttttgcaggtgcaaactttgcttcgagcatgggcaatatcagtttcttctttccaaaagccaaacaagggagcgctcttgggattaatggcggattaggaaacttaggtgtaagtgtaatgcagctggttgcaccgctggtcatttttgtacctgtatttgcctttctcggcgtcaatggcgtaccgcaggccgacggttcggtgatgtcgctggcgaatgccgcatggatttgggtaccgctactggcgattgccacgatcgccgcctggtcagggatgaatgatatcgccagttcacgcgcctcaattgccgaccagctccctgtcttacaacgcctgcatctctggctgctgagcctgctttaccttgccaccttcggttcgtttatcggtttttctgcgggttttgccatgctggcaaaaacccagttcccggatgtgaatattctgcgcctggcgttctttggcccatttattggtgccatcgcgcggtcggttggtggtgctatttccgataaattcggcggcgtgcgggtgacgttgatcaactttatttttatggcgattttcagtgccctgctgttccttaccttaccgggcacaggctccggtaatttcatcgccttttacgccgtatttatggggctgtttctgaccgcgggtctgggaagtggttctactttccagatgatcgccgtcatctttcgccagataaccatttatcgggtgaagatgaaaggcggtagtgatgagcaagctcagagagaagccgtcaccgaaacggcggcaacgctgggctttatctcagccattggcgcagtgggcggcttttttattccgcaggcatttggcatgtcgctcaatatgaccggctctccggtcggcgcgatgaaagtgtttttaatcttctacatcgtttgtgtgctgctgacctggctggtttatggtcggcggaagttcagccaaaaataa

SEQ ID NO: 28347 - protein, 462 aa, Shigella flexneri 2a str. 301
MALQNEKNSRYLLRDWKPENPAFWENKGKHIARRNLWISVSCLLLAFCVWMLFSAVTVNLNKIGFNFTTDQLFLLTALPSVSGALLRVPYSFMVPIFGGRRWPVFSTAILIIPCVWLGIAVQNPNTPFGIFIVIALLCGFAGANFASSMGNISFFFPKAKQGSALGINGGLGNLGVSVMQLVAPLVIFVPVFAFLGVNGVPQADGSVMSLANAAWIWVPLLAIATIAAWSGMNDIASSRASIADQLPVLQRLHLWLLSLLYLATFGSFIGFSAGFAMLAKTQFPDVNILRLAFFGPFIGAIARSVGGAISDKFGGVRVTLINFIFMAIFSALLFLTLPGTGSGNFIAFYAVFMGLFLTAGLGSGSTFQMIAVIFRQITIYRVKMKGGSDEQAQREAVTETAATLGFISAIGAVGGFFIPQAFGMSLNMTGSPVGAMKVFLIFYIVCVLLTWLVYGRRKFSQK

SEQ ID NO: 28348 - DNA, 1434 bp, Corynebacterium efficiens YS-314
  CDS (1)..(1434): transl_table=11
atgaccttagcaggtcacgccgtgttagattggtttcaatgcagtcacggaagggtttccggaacgcccttcgaccccaatcagaagaggcataaagtgacagaactcaacacaaagggaaaaactctccacgggtgggatcccgaggtccccgagcagtgggattccaggatcgcctggcgcaccctggccattaccacattttccctcatcatcggcttcagcgtctggtacctggtctcggccatcgccccgctgctcaaccgtatcggtttcgacctcagcgcggcccagctctactggctgaccgcggtaccgggactggccggaggtattctccgtctggtcttcatgttcctgcccgcccgcatcggcacccgcaacctggtggggttctcctcagccctgtttctcatccccatgttcggctggttcctcgcggtccagaacgccaacaccccctactggtggctgctggtcctggcggccatgaccggaatcggtggcggttgcttctccgggtacatgccctccaccggctggttcttccccaaggccaagtccggcaccgccctgggtatccaggcgggtgtgggcaacctcggggtctccgtgatccagttcctcggtccgtgggtgatgggtttcggtctgctgggcatcggattcatcaccccgcagcgcacggtggagggcagtgaggtcttcgttcacaacgccgccatcgtgctggtgccgtgggcgatgctggcctcggtcctggccttcctgttcctcaaggacatcccgatgaaggtgaacttcagggaccagttgaacttcttccgcaacaagaacacctggatcctcagcatcgtctacatgatgaccttcggggccttcgccggtttcgccgcccagttcggtctgatcatcaacaaccacttcggtatcgcctccccgatggcagagcagttccccgcggaggcgctgcacgccggtgccacctacgccttcctcggccccctcatcagtgccctggtccgtgcaggatggggcccactgtgtgacaagttcggtggtgcggtgtggaccttcgtcagtggcgtgggcatgatcgcctccaccgtggccgccgccatcttcctgtcacgggcggagaccccggatgatttctacccgttcctgtggtccatgctcgccctgttcttcttcaccggtatcggcaacgccggcaccttcaagcagatgccgatgatcctgcccaggaaacaggccggaggtgttatcggatggacaggagccatcggcgcattcggccccttcgtggtcggtgtgctgctctccatgacccccaccgtgaccttctactggggctgtgtggtcttcttcaccatcgccaccgccctgacctggatctactatgcacgcccgaacgccccgttcccgggataa

SEQ ID NO: 28349 - protein, 477 aa, Corynebacterium efficiens YS-314
MTLAGHAVLDWFQCSHGRVSGTPFDPNQKRHKVTELNTKGKTLHGWDPEVPEQWDSRIAWRTLAITTFSLIIGFSVWYLVSAIAPLLNRIGFDLSAAQLYWLTAVPGLAGGILRLVFMFLPARIGTRNLVGFSSALFLIPMFGWFLAVQNANTPYWWLLVLAAMTGIGGGCFSGYMPSTGWFFPKAKSGTALGIQAGVGNLGVSVIQFLGPWVMGFGLLGIGFITPQRTVEGSEVFVHNAAIVLVPWAMLASVLAFLFLKDIPMKVNFRDQLNFFRNKNTWILSIVYMMTFGAFAGFAAQFGLIINNHFGIASPMAEQFPAEALHAGATYAFLGPLISALVRAGWGPLCDKFGGAVWTFVSGVGMIASTVAAAIFLSRAETPDDFYPFLWSMLALFFFTGIGNAGTFKQMPMILPRKQAGGVIGWTGAIGAFGPFVVGVLLSMTPTVTFYWGCVVFFTIATALTWIYYARPNAPFPG

SEQ ID NO: 28350 - DNA, 1302 bp, Corynebacterium efficiens YS-314
  CDS (1)..(1302): transl_table=11
atgaccaacgcccgcgatcaccacacccccctgaccaccgatccacctgtcgccaccagcccgacacgtgagacacccggtgcctaccgggtgctgaccatggccaccctgggcttcacgctgatgttcgccgcctggatgatgttcggagttctgggcatccccatccaggaagaattcggactgacggatgtccagctgtccctcatcagctcggtggccatcctcaacggttcactgtggcgcctgcccgccggaatcatcgccgaccgcctcggtggtcgcatcgtgatgacggtgctgctggtcgcctccgctgttttcagctacatggtctcactggccgattcctactccatgctcctggggctcgcgtttgccgtgggccttgccggcaactcattctccgtcggcaacacctgggtggcagcctggttcagcaaacgccgaaatggtctagcgatgggggtgttcggtgccggcaacgtcggtgcatccgtcaccaaattcatcggccccgtcatcatcgcggccacagccggttccctgtacttcgggggattggtggagggtggctggcggctggtacccgtgatctacgccgtggccctgctggccaccgcggtgatgttgtggttcatcacgccggcacaggataagaaaccggggcagggtcggaaactctctgagatgctcgcgcccctgaaacagggccgcgtctggcgtttcagtctctactatgtggcggtcttcggtgcctatgtcgccctgtcctcctggatgcccaagtactacatcgacatgtacggtgtctccacctccaccgccgcgctgctgacggcgctgttcatcttcccggcctccctgatgcgtccggtggggggatccctgtccgaccgtttcggggcccgacagacgaccatcttcgccctgttgatcatgctcaccgccagcggcatcctcgcgctccccctcaccatcaacatcgtgctgttcaccctcctcctgttcacgctgggtgtgggcatgggtatcggcaaggcctcggtgttcaagtacatcccggattacttcccgggcaatgtcgggtccgtcggtggcctggtgggtatgttcggtggcctgggtggcgccttcctccccccgctcttcgccggtgtgaaaaccgcaacgggactggagcaggccaccttcctggtgatcttcgtgctcgtggccttctgcctggcctggttactgcgcgccatctccctgatgaagcgcacctcccccgacccgctgtggcgacgcttcggcatctag

SEQ ID NO: 28351 - protein, 433 aa, Corynebacterium efficiens YS-314
MTNARDHHTPLTTDPPVATSPTRETPGAYRVLTMATLGFTLMFAAWMMFGVLGIPIQEEFGLTDVQLSLISSVAILNGSLWRLPAGIIADRLGGRIVMTVLLVASAVFSYMVSLADSYSMLLGLAFAVGLAGNSFSVGNTWVAAWFSKRRNGLAMGVFGAGNVGASVTKFIGPVIIAATAGSLYFGGLVEGGWRLVPVIYAVALLATAVMLWFITPAQDKKPGQGRKLSEMLAPLKQGRVWRFSLYYVAVFGAYVALSSWMPKYYIDMYGVSTSTAALLTALFIFPASLMRPVGGSLSDRFGARQTTIFALLIMLTASGILALPLTINIVLFTLLLFTLGVGMGIGKASVFKYIPDYFPGNVGSVGGLVGMFGGLGGAFLPPLFAGVKTATGLEQATFLVIFVLVAFCLAWLLRAISLMKRTSPDPLWRRFGI

SEQ ID NO: 28352 - DNA, 1236 bp, Pseudomonas putida KT2440
  CDS (1)..(1236): transl_table=11
ttgtactaccgagtgaggtgttcgatgagtgccagcttctggaaatccgggcatgtgcccacgctgttcgccgcgtttctgtacttcgacctcagcttcatggtctggtacctgctgggcccgttggcggtgcagattgctgccgacctgcaactgagcgcacaacaacggggcctgatggtggccacgccgatcctggccggggcaatcctgcgcttcgccatgggcgttctggtcgaccgcctgtcgcccaagacggctggcctgatcggccaggtggtggtcatcgtcgccctggccgcagcctggcaccttggcgtacacagctatgaacaggccctgctgctaggcgtgttcctgggctttgccggtgcgtccttcgccgtttcgctgccgctggcctcgcagtggtacccgccacagcaccagggcaaggccatgggcatcgccggcgcaggcaactccggcacggtgttcgcggccttgctggcaccggcactggcagccggctttggctggaacaatgtgttcggctttgcgctgatcccgctgtcactggcgctggtggtgttcgccctgttggcgcgcaatgccccgcaacggcccaagccgaaagccatggccgactacctcaaggcactgggcgaccgtgacagctggtggttcatgtttttctacagcgttaccttcggcggcttcatcggcctggccagcgccctgcccggctatttcagcgaccaatacggcctgagcccggtcaccgccggctactacaccgccgcttgtgtgttcgccggcagcctgatgcgcccgctcggcggcgccctggctgaccgttttggcggcatccgcaccctgctgggcatgtacggcgtggccgccatctgcattgccgcagtcggcttcaacctgccctctgccgcggccgcactggcgttgttcgtcagcgccatgctcggcctgggtgccggcaatggcgcagtgttccaactggtgccacaacgcttccgccaagagatcggggtaatgaccggcctgatcggcatggccgggggcatcggcggcttcctgctggcggccgggcttggcaccatcaagcagcacactggcgattaccaactggggctgtggctgttcgccagcctgggcctgctggcctggttcggcctgcacggggtgaaacagcgctggcgcaccacctggggctcggctgcagtcaccgcagcacgggtctga

SEQ ID NO: 28353 - protein, 411 aa, Pseudomonas putida KT2440
MYYRVRCSMSASFWKSGHVPTLFAAFLYFDLSFMVWYLLGPLAVQIAADLQLSAQQRGLMVATPILAGAILRFAMGVLVDRLSPKTAGLIGQVVVIVALAAAWHLGVHSYEQALLLGVFLGFAGASFAVSLPLASQWYPPQHQGKAMGIAGAGNSGTVFAALLAPALAAGFGWNNVFGFALIPLSLALVVFALLARNAPQRPKPKAMADYLKALGDRDSWWFMFFYSVTFGGFIGLASALPGYFSDQYGLSPVTAGYYTAACVFAGSLMRPLGGALADRFGGIRTLLGMYGVAAICIAAVGFNLPSAAAALALFVSAMLGLGAGNGAVFQLVPQRFRQEIGVMTGLIGMAGGIGGFLLAAGLGTIKQHTGDYQLGLWLFASLGLLAWFGLHGVKQRWRTTWGSAAVTAARV

SEQ ID NO: 28354 - DNA, 1164 bp, Staphylococcus epidermidis ATCC 12228
  CDS (1)..(1164): transl_table=11
atgaacatgaaaaagggtgtttctcagcttacgttacagacattgagtttggtcgcaggctttatggcatggagtatcatttctccattaatgccatttatttcacaagatgttgatatttctccaggacaaatatctgtcattttagctattcctgttattttaggttctgtactacgtgtaccatttgggtacttaactaacattgtaggagcgaaatgggtgtttttctggagttttattgtactattacttccaatttttcttttaggtcaagctcaatcacccggtatgctaatgttatcaggattctttctaggaattggtggcgcaattttttcagtaggtgttacttcagtacctaaatacttttcaaaagacaaagttggtttagcaaatggtatatatggtgtaggtaatattggtactgcagtttcatcattttgtgccccagtgttagcaggtgcaattggctggcaaaatacagttcgtagttatttaattattctaagtatatttgcaattttaatgttttttttaggagataaaaatgagccgaaagtgaagattcctttgatggctcaagtcaaagacctatctaagaattataagttgtattatttaagtttgtggtattttattacttttggagcttttgtggcttttgggatttttttaccgaactttctagttgatcattttagtattgataaagtggatgcaggtattcgttcaggtatatttatagcactagcgacgttcttaagaccggttggtggtgttataggtgataaatttaatgcagtacaagcgcttatcatcgacttcgtgataatgattattggtgcgcttatattaagcttatctagtcatattgttctgtttacgataggctgtttagcaattagtatctgtgcaggtataggtaatggtttaatatttaaattagtaccttcatacttttctaaagaagcaggttcagcgaatggtattgtatccatgatgggaggactaggcggtttcttcccaccactagtgattacttttgtaacgagtatcactggttcaagtcatctcgctttcttcttcttggctatatttggtgtaattgctcttattacaatgattcatttaaataaaaaagaaaaagctattcgtatataa

SEQ ID NO: 28355 - protein, 387 aa, Staphylococcus epidermidis ATCC 12228
MNMKKGVSQLTLQTLSLVAGFMAWSIISPLMPFISQDVDISPGQISVILAIPVILGSVLRVPFGYLTNIVGAKWVFFWSFIVLLLPIFLLGQAQSPGMLMLSGFFLGIGGAIFSVGVTSVPKYFSKDKVGLANGIYGVGNIGTAVSSFCAPVLAGAIGWQNTVRSYLIILSIFAILMFFLGDKNEPKVKIPLMAQVKDLSKNYKLYYLSLWYFITFGAFVAFGIFLPNFLVDHFSIDKVDAGIRSGIFIALATFLRPVGGVIGDKFNAVQALIIDFVIMIIGALILSLSSHIVLFTIGCLAISICAGIGNGLIFKLVPSYFSKEAGSANGIVSMMGGLGGFFPPLVITFVTSITGSSHLAFFFLAIFGVIALITMIHLNKKEKAIRI

SEQ ID NO: 28356 - DNA, 1380 bp, Bradyrhizobium japonicum USDA 110
  CDS (1)..(1380): transl_table=11
atgacgaagaatccgacctggatttcagactggcgccccgaggatgaggcgttctggaatgcgactggcaagactatcgcgcgacgcaacctgatctggtcgatcgtggccgagcatatcggcttctcggtctggctgatctggagcatcgtcaccaccaagctgccgcaggcaggcttccattacaccaccgaccagctgttccagctcgtcgcggtgccgggcctgatcggcgccttgatgcgctttccctacacattcgcggtgacgacgttcggcggtcgcaactggaccattttcagcgcggccatcctgttcattccgacgttgtcgctcgcctggttcgtcagtcagcccgacacgccgttctggctgatgctgctgatcgcctcgactgccggtctcggcggcggcaatttcgcctccagcatgacaaacatctccttcttcttcccggacaggatgaagggatgggcgctgggcctcaacgcggccggcggtaatatcggcgtctccagcgtgcagctcctaaccccgatcctgatgacgctcgccgtcattaacctgttccaggcaacccccgtcgacggcgtgttccttcagaacgccggcctgatgtgggtgctgccgatcgcgatcgcggtgttcggcgcggtgttcttcatgaacaacctgaccacggccaagtcgtcgatcagcaatcagctggcggtggtcaagcgcaagcatacctggatcatggcgtacctctatatcggcacgttcggatccttcatcggctactccgcggcgtttccgctgctgatcaagacgcagtttccgtcggtgacgatcgcgatcgcgttcctcgggcctctcgttggttcgctgtcgcgcccgttcggcggctggctggccgacaggatcggcggctcggtcatcacgttctggaacttcatcgtgatggcgggcgccaccgtcggcgtgctctatttcgtcgggcagaaggatttcatcggcttcctgtcgatgttcctgatcctgttcgtgacgacgggcatcggcaacggctcgacctaccgcatgatcccctcgatcttccgcgagcagaacctgttcaaggtgcgcggcaagggcgatgcggcgcgcgcagccgccctgaagacggcgagtatcgagagcggtgcggcggttggcttcatcggcgcggtcggcgcggtcggcggctatctgatcccgagcggtttcggcaagtcgatcgccatgaccggcgggccgcagcttgcgctcgcgatctatctcgccttctacgcctcctgcctcggcctgacctggtggttctacctgcgtcgcagcccgcagcgtgaaggcgcgccaagcctcgccgaagctcgcgtttag

SEQ ID NO: 28357 - protein, 459 aa, Bradyrhizobium japonicum USDA 110
MTKNPTWISDWRPEDEAFWNATGKTIARRNLIWSIVAEHIGFSVWLIWSIVTTKLPQAGFHYTTDQLFQLVAVPGLIGALMRFPYTFAVTTFGGRNWTIFSAAILFIPTLSLAWFVSQPDTPFWLMLLIASTAGLGGGNFASSMTNISFFFPDRMKGWALGLNAAGGNIGVSSVQLLTPILMTLAVINLFQATPVDGVFLQNAGLMWVLPIAIAVFGAVFFMNNLTTAKSSISNQLAVVKRKHTWIMAYLYIGTFGSFIGYSAAFPLLIKTQFPSVTIAIAFLGPLVGSLSRPFGGWLADRIGGSVITFWNFIVMAGATVGVLYFVGQKDFIGFLSMFLILFVTTGIGNGSTYRMIPSIFREQNLFKVRGKGDAARAAALKTASIESGAAVGFIGAVGAVGGYLIPSGFGKSIAMTGGPQLALAIYLAFYASCLGLTWWFYLRRSPQREGAPSLAEARV

SEQ ID NO: 28358 - DNA, 1191 bp, Lactobacillus plantarum WCFS1
  CDS (1)..(1191): transl_table=11
atgactgttgaagatgctcaaacaagtacgcgttggcgggcctatttagcgttaggcttggcaacggtggcgatgatcgtttgctttatgtcatggtcaaactttgcaccattagcgggagagctcgcaatcaagtttcacttgagtgtgtcgcaacggacgctgctactagcaacgccagtactactcgggtcaatcatgcgaattccagtcggaattttgagtgatcggtatggtggtaaaaaggtttatctgatcctgatggccttcattttgatcccactgttgatgattacgaaggtacacacgtacggtatgttgttagtcgcagcgttactcgttgggatggccggaacgtcttttgctgtcggggtttcgtatgcctcagtctggtttccgcctgaaaagcaaggactagcattaggaatcgtcagcatggggaacatggggaatgcggtcgctgcgttgacgttgccatccatatcgacctcgtatgggtttaacatggtttactatttcctgatggtattaacggtcattttggctgtcctgttcgccatcttttgtcgcgaaatgccggttgataagacgaaaactgtgacgggcgcattggctgtcgcaaaggaaagtagtacttggtacttgtcattattttattttctaacgtttggtctgtttgtctcattcactaatttgacaccattgttcttggaagatattttccgtgtgccacaagtaacagcaggcttatacgctgccttatttgctggcctttgtaccgttgttcgaccaattgggggagcggcggccgataagtggcgaccgatgcagatgttacagtggatctttatcggcattaccgtctttgccgtgattattacgctgacctttagcaaccagtcgctgtttatctttggtattgttggtgccggattgattgccggcttcggtaacggggtcatctttaagatggtgccgtatgtattacaaggaaatactggtgcggtcaccggttttgtcggcgctttgggtggcctgggcggtttcttcccaccactattagtggggtggattcatacttggacgggaagttatcggcttggtatcgtgctcttagccctcacgggattagtttgttggtatgccctttggcgccggtttattcatggtgacgtccacattgttaaataa

SEQ ID NO: 28359 - protein, 396 aa, Lactobacillus plantarum WCFS1
MTVEDAQTSTRWRAYLALGLATVAMIVCFMSWSNFAPLAGELAIKFHLSVSQRTLLLATPVLLGSIMRIPVGILSDRYGGKKVYLILMAFILIPLLMITKVHTYGMLLVAALLVGMAGTSFAVGVSYASVWFPPEKQGLALGIVSMGNMGNAVAALTLPSISTSYGFNMVYYFLMVLTVILAVLFAIFCREMPVDKTKTVTGALAVAKESSTWYLSLFYFLTFGLFVSFTNLTPLFLEDIFRVPQVTAGLYAALFAGLCTVVRPIGGAAADKWRPMQMLQWIFIGITVFAVIITLTFSNQSLFIFGIVGAGLIAGFGNGVIFKMVPYVLQGNTGAVTGFVGALGGLGGFFPPLLVGWIHTWTGSYRLGIVLLALTGLVCWYALWRRFIHGDVHIVK

SEQ ID NO: 28360 - DNA, 1212 bp, Pseudomonas syringae pv. tomato str. DC3000
  CDS (1)..(1212): transl_table=11
atggatacaagcttctggaaggccggtcacagaccgaccctgttcgcagcctttctgtatttcgacctgagcttcatggtctggtacctgcttggcccgatggcggtacaaatcgccaccgacctgcacctcacgactcaacagcgcggcctgatggtggccacgccgattctggccggtgccgtgctgcgcttgttcatgggtctgctggccgaccagttgtcccccaagacagccggcatcatcggtcaggtgattgtgatcggtgccttgttcactgcctggcaattgggtattcacagctacgagcaggtcttgctgctaggcctgttcctgggcatggccggcgcgtcgttcgccgttgcgttgccgctggcctcgcagtggtatccgccacagcaccagggcaaggcgatgggtattgccggtgccggcaactccggcaccgtgctggcggcattgatcgcaccggtgctggcggccagttttggctggggcaatgtgttcggcctggcgctgatcccgctggttctgacgctgattgccttcaccctgatggcgcgcaacgcgccggagcgcagcaaacccaaatccatggcggattacctcaaggcactgggcgaccgtgacagctggtggttcatgtttttctacagcgtgaccttcggtggcttcatcggtctggccagcgccctgcccggctacttcaacgaccagtatggcctgagtccgatcacggccggttactacaccgcagcctgtgtgttcggcggcagcctgatgcgcccgctcggtggcgcgctggccgaccgctttggcgggatccgcaccctgaccgtgatgtacacggtagctgctgtcggtatcgcggcagtgggcttcaacctgccgagttcgtgggcagcactggcgttgttcgttgcagcgatgcttggcctgggtgccggtaacggtgcagtcttccagttggtgccgcagcggttccgcaaggaaatcggcgtgatgaccggcctgatcgggatggctggcggtatcggcggcttcctgctggcagccggtctgggcgccatcaagcagaataccggtgattaccagttgggcctgtggctgttcgcaggtctggcggtactggcctggttcggcctgttgaacgtcaagcgtcgctggagaaccacctggggttcggcggccgtgaccgcggcgcgggtctga

SEQ ID NO: 28361 - protein, 403 aa, Pseudomonas syringae pv. tomato str. DC3000
MDTSFWKAGHRPTLFAAFLYFDLSFMVWYLLGPMAVQIATDLHLTTQQRGLMVATPILAGAVLRLFMGLLADQLSPKTAGIIGQVIVIGALFTAWQLGIHSYEQVLLLGLFLGMAGASFAVALPLASQWYPPQHQGKAMGIAGAGNSGTVLAALIAPVLAASFGWGNVFGLALIPLVLTLIAFTLMARNAPERSKPKSMADYLKALGDRDSWWFMFFYSVTFGGFIGLASALPGYFNDQYGLSPITAGYYTAACVFGGSLMRPLGGALADRFGGIRTLTVMYTVAAVGIAAVGFNLPSSWAALALFVAAMLGLGAGNGAVFQLVPQRFRKEIGVMTGLIGMAGGIGGFLLAAGLGAIKQNTGDYQLGLWLFAGLAVLAWFGLLNVKRRWRTTWGSAAVTAARV

SEQ ID NO: 28362 - DNA, 1389 bp, Salmonella enterica subsp. enterica serovar Typhi Ty2
  CDS (1)..(1389): transl_table=11
atgacacgacaaaacgagaattataaccgttatctcttgagtgactggcgacccgaaaatccagccttctgggagaataaagggaaaggcatcgccagaagaaacttatggatttcagtaagttgtttgctccttgcattttgcgtctggatgttgtttagcgctgttgccgtcaacctcaataaaattggatttgattttacgaccgaccaactctttttattaaccgcattaccttctctttccggcgcaatattacgcgttccctactcctttatggtaccactgtttggtggtcgtaaatggaccgtattaagtaccgtaatattgattattccttgcgcctggctgggattcgccgtgcaaaatcctgccacccctttcggggtatttatactcatcgctctgttgtgcggttttgcgggggcaaatttcgcgtccagtatgggcaacatcagttttttctttccaaaagccagacaaggtagcgcgttgggtattaacgacggactgggaaatcttggcgtcagtgtgatgcagttgattgcgccgctggttatttttttgccgatatttacttttttaggcgtccggggcgtgccgcaacctgatggctccctgctcgccctcactaacgccgcctggatctgggtgccgttactggctgttgcgacgcttgccgcctggtttggtatgaacgatatcggcagttcaaaagcgtctgtcgcctcgcaattgccggtgctaaaacgtctgcacctgtggctgcttagcctgctgtacctggcgacattcgggtcattcatcggcttttccgcaggtttcgccatgctcgccaaaacgcaatttcccgacgtaaacattctgcaactggcgttctttggcccctttatcggcgcgctggcgcgatcggcaggcggcgtgatctccgataaattcggcggcgttcgcgtcacgctcattaattttatctttatggcgctgtttaccgccctgctattcctcacgctgccaggctccggcgcaggcagctttagcgcgttctatcttgtttttatgggcctgtttttgacagcgggtctcggcagcggttctaccttccagatgattgcggtgatcttccggcagatcacgctctacaacgtcaaactgcgcggcgggagcgatgagcaggcgcagcgcgaagcggtgacggataccgccgccgcgctcggttttatctccgctattggcgctgtgggcggcttctttattccaaaagcgtttggcacctctttggccttgaccggctcgccggtgggcgccatgaaaatctttttgctgttttacatcgcttgcgtcctgctgacctggctggtctacgggcgtcttaagcctaaacaacaataa

SEQ ID NO: 28363 - protein, 462 aa, Salmonella enterica subsp. enterica serovar Typhi Ty2
MTRQNENYNRYLLSDWRPENPAFWENKGKGIARRNLWISVSCLLLAFCVWMLFSAVAVNLNKIGFDFTTDQLFLLTALPSLSGAILRVPYSFMVPLFGGRKWTVLSTVILIIPCAWLGFAVQNPATPFGVFILIALLCGFAGANFASSMGNISFFFPKARQGSALGINDGLGNLGVSVMQLIAPLVIFLPIFTFLGVRGVPQPDGSLLALTNAAWIWVPLLAVATLAAWFGMNDIGSSKASVASQLPVLKRLHLWLLSLLYLATFGSFIGFSAGFAMLAKTQFPDVNILQLAFFGPFIGALARSAGGVISDKFGGVRVTLINFIFMALFTALLFLTLPGSGAGSFSAFYLVFMGLFLTAGLGSGSTFQMIAVIFRQITLYNVKLRGGSDEQAQREAVTDTAAALGFISAIGAVGGFFIPKAFGTSLALTGSPVGAMKIFLLFYIACVLLTWLVYGRLKPKQQ

SEQ ID NO: 28364 - DNA, 1392 bp, Streptomyces avermitilis MA-4680
  CDS (1)..(1392): transl_table=11
atgacagccccgagcacagcccccgcagcgagtccgccgagcaggaaaggccgctggatcgaggagtgggatccggaggacgaggccttctgggaggagaagggggagaagaccgcgcggcggaatctgctcttctccgtgctgtccgagcacgtcgggttctccatctggaccctgtggtccgtgatggtgctgttcatgggacccgagtacgggctcacccccgccgacaagttcttcatcgtgtcgatggcgacgctggtcggcgcgatcgtccgcgtcccctacaccttcgccgtcgccctgttcggcgggcggaactggaccatcgtctccgcgagcctcctgctcatccccaccatcgcggccttcgtggtgatggagccgggcacctcgttcaccaccttcctggtgtgcgccatgctcgccggtatcggcggcggcaacttcgcctccagcatgaccaacatcaacgccttcttcccgctcaggaagaagggatgggcgctcgggctcaacgcgggcggcggcaacatcggggtgccggtggtgcagctggtcgggctcgccgtcatcggggccagtggcggcccgcgcgtactgctgggcatctacatcccgttcatcgtgctcgccgccggcctcgccgccgtgaagatggacaacatcgcgtccctcaagaacgacaccggcgcggcccgggaagccgtcaaggacgcccacacctggatcatgtcgttcctgtacgtcgggacgttcgggtccttcatcgggtacagcttcgcgttcggtctcgtcctgcagacgcagttcggccgtacgccgttgcagtccgcgtacgtcaccttcatcggcccgctgctgggctccctcatccggcccgtgggcggctggctcgccgaccgctacggcggcgcgaagatcacgctgtggaacttcgtcggcatggcggcggccaccggtgtcatcgtgatcgcgtccatgcagaagtcgctgccgctgttcaccaccgcgttcatcgcgctgttcgtgctcagcggcctcggcaacgggtccacgtacaagatgattcccgggatcttccacgccaaggccgtcgccaagggactcgaaggggaggaggcggccgcctacggacgccggctgtccggcgcctccatggggctcatcggagccgtcggcgcgctcggcgggctcggcatcaacctcgccttccggcagtcgttcctgagcgtgggctccggcaccggcgccttcgtctccttcctcgccttctacgcggcctgcttcgcggtcacctgggccgtataccttcgccgccaggccggggccgaagcccatgccaccgccgcctccggggcgaagccgcagctcagctatgtcgaggtgtga

SEQ ID NO: 28365 - protein, 463 aa, Streptomyces avermitilis MA-4680
MTAPSTAPAASPPSRKGRWIEEWDPEDEAFWEEKGEKTARRNLLFSVLSEHVGFSIWTLWSVMVLFMGPEYGLTPADKFFIVSMATLVGAIVRVPYTFAVALFGGRNWTIVSASLLLIPTIAAFVVMEPGTSFTTFLVCAMLAGIGGGNFASSMTNINAFFPLRKKGWALGLNAGGGNIGVPVVQLVGLAVIGASGGPRVLLGIYIPFIVLAAGLAAVKMDNIASLKNDTGAAREAVKDAHTWIMSFLYVGTFGSFIGYSFAFGLVLQTQFGRTPLQSAYVTFIGPLLGSLIRPVGGWLADRYGGAKITLWNFVGMAAATGVIVIASMQKSLPLFTTAFIALFVLSGLGNGSTYKMIPGIFHAKAVAKGLEGEEAAAYGRRLSGASMGLIGAVGALGGLGINLAFRQSFLSVGSGTGAFVSFLAFYAACFAVTWAVYLRRQAGAEAHATAASGAKPQLSYVEV

SEQ ID NO: 28366 - DNA, 1170 bp, Bacillus cereus ATCC 14579
  CDS (1)..(1170): transl_table=11
atgaaaagtcctaattttcaattaagtttacaaacttctaatctaattatcggttttatggtatgggtcattttatcatcattaatgccttatattaaagcggatattccattaactgcgggacaaatttctatggtcacagcagtacctgttattttaggctctattcttcgtattccaattggttattggacgaatcgtttcggagcaagaaaattattctttattagttttattctattattatttcctgttttttatattagtgttgccaattctatgatggatttaattattggtggattatttgtaggaatcggtggtgctgtattctctgtaggagtaacttctttaccaaaatactttccgaaagagagtcacggttttgtaaatggtatttacggtgtcggtaacgccggaacagcaattacttcgtttttagcacctgtcattgcaacttcagttggctggagaacgacagtacaatgttatttagttttacttgcagcgtttgcacttatgaactttttattaggtgatcgtaaggagaaaaaagtgaatacaccactaatggaacaaataaaaggtgtatataaaaatgagaaactttggtttttatgtatcttttactttttaacattcggatcatttgtcgcatttacagtatacttaccaaactttctagtatctcacttcggattagagaaagtagatgcaggtatgcggacagccggattcatcgtactcgcaacaattatgcgcccgattggtggttggctcggtgataagtttaatccatttaaaatattaatcttcgtatttatcggtttaacactttcaggtattattttatcgtttatgccaagtatgaacgtgtatacatttggttgcttactagtagcattttgtgcagggattggtaatggtacaatcttcaaactcgttccaatgtatttctcagaacaagctggtattgtaaatggtctcgtatcagctttaggtggactaggaggattcttcccaccgctaattttaacattactattccaattaacaggtcattatgcaattggatttatggcgctatcagaagtcgcacttgcttgtttaatcattacagtatggatgtatagccaagagaaattgttagtgatgttaaagaatcattaa

SEQ ID NO: 28367 - protein, 389 aa, Bacillus cereus ATCC 14579
MKSPNFQLSLQTSNLIIGFMVWVILSSLMPYIKADIPLTAGQISMVTAVPVILGSILRIPIGYWTNRFGARKLFFISFILLLFPVFYISVANSMMDLIIGGLFVGIGGAVFSVGVTSLPKYFPKESHGFVNGIYGVGNAGTAITSFLAPVIATSVGWRTTVQCYLVLLAAFALMNFLLGDRKEKKVNTPLMEQIKGVYKNEKLWFLCIFYFLTFGSFVAFTVYLPNFLVSHFGLEKVDAGMRTAGFIVLATIMRPIGGWLGDKFNPFKILIFVFIGLTLSGIILSFMPSMNVYTFGCLLVAFCAGIGNGTIFKLVPMYFSEQAGIVNGLVSALGGLGGFFPPLILTLLFQLTGHYAIGFMALSEVALACLIITVWMYSQEKLLVMLKNH

SEQ ID NO: 28368 - DNA, 1389 bp, Shigella flexneri 2a str. 2457T
  CDS (1)..(1389): transl_table=11
atggcactgcaaaatgagaaaaatagtcgttatcttttacgcgactggaaaccagaaaatccggccttctgggaaaataaaggaaaacatattgctcgaagaaacctctggatatcagtcagttgtctacttcttgccttctgtgtctggatgctatttagcgcagttaccgttaatctcaataaaatcggttttaattttactaccgatcaactctttttattaaccgcattaccctccgtttctggcgcattattgcgtgttccctactcctttatggtgcctatattcggtggacgccgatggccggtttttagtactgcaatcctgattattccttgcgtctggctcggaattcccgtgcaaaatccgaatactccttttgggatatttatcgttatcgctttgctatgcggttttgcaggtgcaaactttgcttcgagcatgggcaatatcagtttcttctttccaaaagccaaacaagggagcgctcttgggattaatggcggattaggaaacttaggtgtaagtgtaatgcagctggttgcaccgctggtcatttttgtacctgtatttgcctttctcggcgtcaatggcgtaccgcaggccgacggttcggtgatgtcgctggcgaatgccgcatggatttgggtaccgctactggcgattgccacgatcgccgcctggtcagggatgaatgatatcgccagttcacgcgcctcaattgccgaccagctccctgtcttacaacgcctgcatctctggctgctgagcctgctttaccttgccaccttcggttcgtttatcggtttttctgcgggttttgccatgctggcaaaaacccagttcccggatgtgaatattctgcgcctggcgttctttggcccatttattggtgccatcgcgcggtcggttggtggtgctatttccgataaattcggcggcgtgcgggtgacgttgatcaactttatttttatggcgattttcagtgccctgctgttccttaccttaccgggcacaggctccggtaatttcatcgccttttacgccgtatttatggggctgtttctgaccgcgggtctgggaagtggttctactttccagatgatcgccgtcatctttcgccagataaccatttatcgggtgaagatgaaaggcggtagtgatgagcaagctcagagagaagccgtcaccgaaacggcggcaacgctgggctttatctcagccattggcgcagtgggcggcttttttattccgcaggcatttggcatgtcgctcaatatgaccggctctccggtcggcgcgatgaaagtgtttttaatcttctacatcgtttgtgtgctgctgacctggctggtttatggtcggcggaagttcagccaaaaataa

SEQ ID NO: 28369 - protein, 462 aa, Shigella flexneri 2a str. 2457T
MALQNEKNSRYLLRDWKPENPAFWENKGKHIARRNLWISVSCLLLAFCVWMLFSAVTVNLNKIGFNFTTDQLFLLTALPSVSGALLRVPYSFMVPIFGGRRWPVFSTAILIIPCVWLGIPVQNPNTPFGIFIVIALLCGFAGANFASSMGNISFFFPKAKQGSALGINGGLGNLGVSVMQLVAPLVIFVPVFAFLGVNGVPQADGSVMSLANAAWIWVPLLAIATIAAWSGMNDIASSRASIADQLPVLQRLHLWLLSLLYLATFGSFIGFSAGFAMLAKTQFPDVNILRLAFFGPFIGAIARSVGGAISDKFGGVRVTLINFIFMAIFSALLFLTLPGTGSGNFIAFYAVFMGLFLTAGLGSGSTFQMIAVIFRQITIYRVKMKGGSDEQAQREAVTETAATLGFISAIGAVGGFFIPQAFGMSLNMTGSPVGAMKVFLIFYIVCVLLTWLVYGRRKFSQK

SEQ ID NO: 28370 - DNA, 1203 bp, Chromobacterium violaceum ATCC 12472
  CDS (1)..(1203): transl_table=11
atggaccgtaccttctggcaggccgggcaccggccgacgctggtttccgcctttctgtacttcgatctgagcttcatggcctggtatctgctgggaccgctgcaggtgcccatcgccgccgcgctgcagctttccacccagcagcgcggcctgatggtggccacgcccatcctggccggcgcgctgctgcgcccgctgatgggcatgctggtggaccgcatcggcgccaagcgcgccgggctgctcggccagatcgtcgtcatcgccgcgttgctcggcgcctggctcgctaatctgtccagcttgggcggcatgctggccttgggcgcgctgctgggcgtggccggggcctcgttcgccgccgccttgccgctggcttcgcgctggtatccgccgcggcaccagggcacggcgctgggcatcgccggggcgggcaattccggcaccgtgctggcggcgctgttcgcgccggcgctggccgcggccttcggctggcgcaatgtgttcggcctggcctgcctgcccttgctgctggtgctggcgatctacgcggtctgggccagggaggcgccggccgcggcggggcccaagcgcctgtccgactacctctccgtgctgaaggagaaggacgcctggtggttcatgttcttctactcgatgaccttcggcggttttgccggcttcgccggcgccttgcccggctatttccatgaccagttcggcttcgacgccaaagccgccggcctctacaccgccgcctgcgtgttcgccggctcggtgatgcggcccttgggcggcatgctggccgaccgcatgggtggaacccgctcgctgctggcggtctatctggcatgcgcgctgttgatggccgccgccgcgctgaacgccggcggcgctggcgcggcgctggccctgttcgtgctggccatgctgtgcctgggcgccggcaacggcgcggtgttccagctggtgccgcagcgcttcggccgggagctgggcgtgatgaccggcctggtgggcatggccggcggcatcggcggcttcctgctggcggccgggctgggcgcggtcaagcaggccagcggcgattacgcgccgggcttgtggctgttcgcgggcctctgcctgctggcctggctcagcctggcgggcgtgcagcggcattggcgcgacaactgggcggtggcggccgcccgcgtgtga

SEQ ID NO: 28371 - protein, 400 aa, Chromobacterium violaceum ATCC 12472
MDRTFWQAGHRPTLVSAFLYFDLSFMAWYLLGPLQVPIAAALQLSTQQRGLMVATPILAGALLRPLMGMLVDRIGAKRAGLLGQIVVIAALLGAWLANLSSLGGMLALGALLGVAGASFAAALPLASRWYPPRHQGTALGIAGAGNSGTVLAALFAPALAAAFGWRNVFGLACLPLLLVLAIYAVWAREAPAAAGPKRLSDYLSVLKEKDAWWFMFFYSMTFGGFAGFAGALPGYFHDQFGFDAKAAGLYTAACVFAGSVMRPLGGMLADRMGGTRSLLAVYLACALLMAAAALNAGGAGAALALFVLAMLCLGAGNGAVFQLVPQRFGRELGVMTGLVGMAGGIGGFLLAAGLGAVKQASGDYAPGLWLFAGLCLLAWLSLAGVQRHWRDNWAVAAARV

SEQ ID NO: 28372 - DNA, 1380 bp, Chromobacterium violaceum ATCC 12472
  CDS (1)..(1380): transl_table=11
atgacttatctgatcaaacactgggagccggaatcggcttcgttctggcagcagcagggacgctcggtggcgcggcgcaacctgtggatctcgattccggcgctgacgctggccttcgtgatctggcaggtgtggagcgtggcggtgctgaacatgcccaatatcggcttcggctacacccagaaccagctgttctggctggcggcgctgccggccttgtccggcgccacgctgcgcatcttctattccttcatggtgccggtgttcggcggccgcaagtggacggcgatctccaccgccagcctgctgattccggcggtgggcataggcttcgcggtgcagaacccggacaccagctatgtgaccatggtgacgctggcgctgctgtgcggcttcggcggcggcaatttcagctccagcatggccaatatcagcttcttcttccccaagtcggaaaagggcaccgcgctgggcctgaacgccggcctgggcaatctgggcgtatccatcgtgcagttcgtggtgcccatcgtcatcaccatgggcctgttcggccagttgggcggcgatccgcagcactgggtgaagggcgcggcagccaaacagatgtggctgcagaacgccggcttcgtctgggtgccgttcatcgtgctgtccacgctggcggcctggttcggcatgaacgacctggcctcggccaaatcctcgttttccgagcaggcggtgatcttcacccgcaagcataactggctgatgtgctggctgtacgtgggcaccttcggttctttcatcggcttctccgccggcttcccgctgctggtcaagggccagttccccgacatcgaccccacccgctacgccttcctgggccccttggtcggcgcgctgacccgcccgctgggcggctggctggccgacaagataggcggcgccaaggtgacgcagacggtgttcgcgctgatggtgctgggcgtgctgggcgtgatctttttcctgccgcacggcggccagggcggcaacttctacggtttcttcgcgatgttcctgtgcctgttcgcgctgaccggcgtcggcaatggctccaccttcatgcaggtgccggccattttcctgacgctgcaccagcgcatggccggcccgggcgagtcggccatgcggcaggccacccaggacgccacccgcgaggcggcggcggtgctcggtttcgccggcgcgatcggcgcctacggcggcttcttcatccccaagagctacggcacctccatcgcgatgaccggcggggtagaggcggcgctgtacctgttcatcgccttctacctgagctgcctggcgatcaacggctggtactacgcccgcaagaacgcggaagtgcgttgctga

SEQ ID NO: 28373 - protein, 459 aa, Chromobacterium violaceum ATCC 12472
MTYLIKHWEPESASFWQQQGRSVARRNLWISIPALTLAFVIWQVWSVAVLNMPNIGFGYTQNQLFWLAALPALSGATLRIFYSFMVPVFGGRKWTAISTASLLIPAVGIGFAVQNPDTSYVTMVTLALLCGFGGGNFSSSMANISFFFPKSEKGTALGLNAGLGNLGVSIVQFVVPIVITMGLFGQLGGDPQHWVKGAAAKQMWLQNAGFVWVPFIVLSTLAAWFGMNDLASAKSSFSEQAVIFTRKHNWLMCWLYVGTFGSFIGFSAGFPLLVKGQFPDIDPTRYAFLGPLVGALTRPLGGWLADKIGGAKVTQTVFALMVLGVLGVIFFLPHGGQGGNFYGFFAMFLCLFALTGVGNGSTFMQVPAIFLTLHQRMAGPGESAMRQATQDATREAAAVLGFAGAIGAYGGFFIPKSYGTSIAMTGGVEAALYLFIAFYLSCLAINGWYYARKNAEVRC

SEQ ID NO: 28374 - DNA, 1284 bp, Chromobacterium violaceum ATCC 12472
  CDS (1)..(1284): transl_table=11
atgacttccccgacattcaaacgctacagcgtgctggccagcagcacgctggctttcaccctctgcttcatggtctggatgatgttcgcggtgctgggcatcccgatcaagcagcagctgggcctcaatgaaaccgagttcggcatcctggccgccacgccggtgctgaccggttcgctgatccgcgtgccgctgggcatctggaccgaccgctacggcggccgcccggtgctgttcgcgctgatgctcagctgcgtgctgcccatctacctgatgcagttcgccagcgcctactggcagttcctgctggccgggctattcgtcggcctggccggcggttcgttctcggtcggcacgccctatgtggcgcgctggttccgcaaggagcagcagggcctggccatgggcattttcggcgccggcaacgccggctcggcgctgaccaagctggtggccccggcgctgatcctggcctggggctggcagagcgtgcccaccgcctacgcgctgatcatgctggccgccgccatcctgttctggctgttctccttcagcgatccggcccacaaggcgccgtccacggtgacgctgcgccagcagctggcgctgatgaagcatccggcggtgctgcgctattgccagtactactcggtggtgttcggcggctacgtggcgctggcgctgtggatgaccaagtactacgtcggcgagtacgggctggacctgaagcacgcggcgttgctggcggcctgtttctccttgccgggcggcgtgctgcgcgcggtggggggctatctgtctgaccgcttcggcccctacgtggtcacttgggcggtgatgtgggtgtgctgggtggccttcttcctgctgtcctatccgcagaccgagatgcgcgtggcgaccaccggcgggccgctcagcctgcacatcggcctcaacgtctacctgttcaccggcctgctgttcctggtgggcgtggcgatggcgataggcaaggcctcggtgttcaagttcatctccgacgaatttcccgactccatcggcgcggtgtccggcgtggtcggcctgtccggcggcctgggcggcttcctgctgcccatcctgttcggcgtcttgctcgacctgaccggcgtgcgcagcagcgccttcatgctgctgtacggcacggtgtgcgtcagcctggtgtggatgcatttttccttcaaatcggcggcaagagccaaggcgcgggcgcgcgcggccgagcccgtcaatcccattcccttgaccaacgaacgcggctga

SEQ ID NO: 28375 - protein, 427 aa, Chromobacterium violaceum ATCC 12472
MTSPTFKRYSVLASSTLAFTLCFMVWMMFAVLGIPIKQQLGLNETEFGILAATPVLTGSLIRVPLGIWTDRYGGRPVLFALMLSCVLPIYLMQFASAYWQFLLAGLFVGLAGGSFSVGTPYVARWFRKEQQGLAMGIFGAGNAGSALTKLVAPALILAWGWQSVPTAYALIMLAAAILFWLFSFSDPAHKAPSTVTLRQQLALMKHPAVLRYCQYYSVVFGGYVALALWMTKYYVGEYGLDLKHAALLAACFSLPGGVLRAVGGYLSDRFGPYVVTWAVMWVCWVAFFLLSYPQTEMRVATTGGPLSLHIGLNVYLFTGLLFLVGVAMAIGKASVFKFISDEFPDSIGAVSGVVGLSGGLGGFLLPILFGVLLDLTGVRSSAFMLLYGTVCVSLVWMHFSFKSAARAKARARAAEPVNPIPLTNERG

SEQ ID NO: 28376 - DNA, 1380 bp, Chromobacterium violaceum ATCC 12472
  CDS (1)..(1380): transl_table=11
atgaccgtaagcatcaagcgttgggagccggaaaacgtcattttctggctgagccgcggccgcggcatcgcccggcgcaatctgtggctgtccgtgttttccctgcacctcaacttcaacatctggatgatgtggagcatggtggtggtcaatctgccggcggtcggcttcctgatctccggccagcagcagttcctgctggtgtcgattccgcccttggtcggcgcgctgatgcgcttgatctactcgtggatctggagctgggtgggcggcggcctatggctggggctatcgacgctattgctgctgctgccggcctggggcgtaggccgggtggtgcaggacatcgcctcgccgttctggcagctgctgctggtggcgggattgtgcggcgtaggcggcggcgccagcgcgtcccacttgtccaataccagcttcttcttccccaggtccgagaagggcttggcgatggggctcaacgccggtttcggcaacctgggcgtgtcggtggcgcagctgctgatccccttgtgcatcctgtatccgctgttcggcgcttgggccggcgagccccaggtgtggggccgcggcggcgaggtgcatttcgtctggctgcagaacgccgcctacgtctggctgccattgatcgcgctgatcgccgcggcctgcctgctgtacgcgcacgacctgcccaagctgcgcatcacgccgcacgaccagctggacgcgatgcgcgaggggcacacctggtatatctgcttgctgtacatgggcagctacggcacctttctcggtttttccgccgccttcccgctgctcgcccgcgcgatgtttccccaggtggacgccagcccctatctattcgtcgggcccatggtgtgcgcgctgtcgcgtcctctgggcggctggatgggcgaccgcgtcggcggcggcgtggccaccgtggccagcaatctgctgatggcgctgggcaccgtcggcgtctacctgagcctgccgtctgcggtcagcggcggttcgttctggctgttcctggcgatgttccagctgatctttttcgccgccggcgtcggcaacggctcgtcctaccagctggcgcccaaggtcttcctgatccaggccggccgcgacgcgcagcgtcatggcgaaagcctgcagcaggcttatgccagaggaggccgacgcggcgcttcggcgatgaatgtcagttcggtgatggcggccttcggcggtttcgtgattcccaaggccttcggttcctcgctgagctggttcggcagctttctgccggcattcgggatgttcttcctgttctatctgctgtgctgcgcggtggcatggtggcagtacagccgtccgggggcggcgatgcgttgctga

SEQ ID NO: 28377 - protein, 459 aa, Chromobacterium violaceum ATCC 12472
MTVSIKRWEPENVIFWLSRGRGIARRNLWLSVFSLHLNFNIWMMWSMVVVNLPAVGFLISGQQQFLLVSIPPLVGALMRLIYSWIWSWVGGGLWLGLSTLLLLLPAWGVGRVVQDIASPFWQLLLVAGLCGVGGGASASHLSNTSFFFPRSEKGLAMGLNAGFGNLGVSVAQLLIPLCILYPLFGAWAGEPQVWGRGGEVHFVWLQNAAYVWLPLIALIAAACLLYAHDLPKLRITPHDQLDAMREGHTWYICLLYMGSYGTFLGFSAAFPLLARAMFPQVDASPYLFVGPMVCALSRPLGGWMGDRVGGGVATVASNLLMALGTVGVYLSLPSAVSGGSFWLFLAMFQLIFFAAGVGNGSSYQLAPKVFLIQAGRDAQRHGESLQQAYARGGRRGASAMNVSSVMAAFGGFVIPKAFGSSLSWFGSFLPAFGMFFLFYLLCCAVAWWQYSRPGAAMRC

SEQ ID NO: 28378 - DNA, 1332 bp, Corynebacterium diphtheriae NCTC 13129
  CDS (1)..(1332): transl_table=11
atggcaaccattaatacttctggtcgagtcctaactggctggaacccagaagatcccgaagcttgggactctaagattgcgtggcgcaccctcgtcatcactacatactcattgttcattggtttttccacgtggtacttggtatccgccattgcaccacagctcaaccaaatcggattcaatttctccaaaacgcagttgtactggctgtcttccgcatcgggcctagcagcaggcttctctcgcttagcgtttatgttcctgccacctatcgtcggtacgcgcaagctagtcaccatctcctcctttgttctcgtcctgcctatgttgggctggttctttgccatcatcaatccagcaacaccgtactggtggatgcttgttctctctgttgcaggcggcctcggcggcggtgtgttctccggctacatgccttccaccggctatttcttccccaaagcaaaggctggtacagcccttggcttacaagccggtatcggcaacttcggtgtgtccttcattcagctcgcagcaccactactgatgggtgtgtccttgctcggtgtcagtgccaagccacaattgcgcacagatggtagcgaggtatttgttcacaccccagcaatcttcatggttccatggaccatcctcgctggtgttctggcatggatgtatctgaaagatgttccagtcaaagcaaacttccgtcagcaaatggacatctttggcaacttcaacacctggatcatgacccttatctacttggccaccttcggcgcattttccggttttgctgcccaattcgcgctgttggtcaataacatctacggtgccaattcttcactggctgatacttttgctgctagtgagttgcctaagggcgctgctttcgccttcctcgggccactgatttctgctgctgtccgtgctgcatggggcccattctgtgaccgcttcggtggtgcgatctggacctttatttcctgcgccggtatggcagtctccactgctgttgctgcactcctccttaatccaaccgatccaagccagttctggtacttcctcgcagcaatgctgaccatgttcttctttactggtcttggcaacgccggcacgttcaaacaaatgccgatgattttcccccgtcgtcaagcaggtggcgttattggttggactgcagcaatcgccgccttcggcccattctttgtcggcgttattgtttccacccttggtgcaccagccttcttctggggttgcgttgtgttctttgctctgtgcgctgcactgacttggatcttctacgcacgccctcaggcaccattcccaggctaa

SEQ ID NO: 28379 - protein, 443 aa, Corynebacterium diphtheriae NCTC 13129
MATINTSGRVLTGWNPEDPEAWDSKIAWRTLVITTYSLFIGFSTWYLVSAIAPQLNQIGFNFSKTQLYWLSSASGLAAGFSRLAFMFLPPIVGTRKLVTISSFVLVLPMLGWFFAIINPATPYWWMLVLSVAGGLGGGVFSGYMPSTGYFFPKAKAGTALGLQAGIGNFGVSFIQLAAPLLMGVSLLGVSAKPQLRTDGSEVFVHTPAIFMVPWTILAGVLAWMYLKDVPVKANFRQQMDIFGNFNTWIMTLIYLATFGAFSGFAAQFALLVNNIYGANSSLADTFAASELPKGAAFAFLGPLISAAVRAAWGPFCDRFGGAIWTFISCAGMAVSTAVAALLLNPTDPSQFWYFLAAMLTMFFFTGLGNAGTFKQMPMIFPRRQAGGVIGWTAAIAAFGPFFVGVIVSTLGAPAFFWGCVVFFALCAALTWIFYARPQAPFPG

SEQ ID NO: 28380 - DNA, 1299 bp, Corynebacterium diphtheriae NCTC 13129
  CDS (1)..(1299): transl_table=11
atgagtcaccctcctatccacggcgagaatgcctcgtcgcccgagctcgaaccaaccccccagggcgccaattccgtcctcatcttctccaccgtgtcctttaccatgatgtttgccgtctggctcatgtttggcatcttgggcactcccatccaaaaggaatttggattaagcgacactcagctttcatggatcctggccgttgccatccttaacggatcaatgtggcgcctaccagcaggcatcttggccgacaagattggtggccgcaaggtaatgctgggcatcacgctcttttctgcggtagcttccctcggcgttgcgttctcacaaaactacaccatgaccctagtgctggccttcttggtgggattctgcggcaattctttcacagcaggtgcagcgtgggcatccgcttggttccctaagcacaagcagggttttgcccttggcgttttcggcgccggcaacgttggcgcctccgtcactaaattcatcggccctgtgatcattgctagcaccgcaggtgcaacatactttggctttatcccagcaggttggcgtctcatccctatcatctacagcgtcaccctagtcattgttgccatcctcatgatgatttacacccccaaggttgatcgttttggcagctctggtcgtagcttggcagagatgcttcttcctctcaagcaggtgcgagtatggcgttttagcctctactacgtcgttgttttcggtgcttatgttgctctgtctgcaactttgcccaagtactacatctctaactatgacgtaagtcttgccgctgctggtctactcacagcaatcttcatcttcccggcatccctgctgcgtccagtcggtggttggttctccgatcgctacggtgctcgccgcgctatgtatggcactttctttgttatgggtaccgcagcaggcctactctgccttcccagtaacatcatcaacatcttcgtctttacccttttgattttctcccttggctgcgccatgggcgtgggcaaagccgcagtatataagcacatcccagaatacttcccgcatgacgttggagccgttggcggcctggtgggcatgttgggcggcttgggcggtttcttcctcccaccactatttgcttacaccaaggcgtggactggatggagcaccagcccattcatcgtgttgctcatcttggtagcggtgtctgcactgtggatgcacgtaacggttcaccgcatgttacacagccatgttcccgagctgaaacaccacatggaggtgccagccactcaataa

SEQ ID NO: 28381 - protein, 432 aa, Corynebacterium diphtheriae NCTC 13129
MSHPPIHGENASSPELEPTPQGANSVLIFSTVSFTMMFAVWLMFGILGTPIQKEFGLSDTQLSWILAVAILNGSMWRLPAGILADKIGGRKVMLGITLFSAVASLGVAFSQNYTMTLVLAFLVGFCGNSFTAGAAWASAWFPKHKQGFALGVFGAGNVGASVTKFIGPVIIASTAGATYFGFIPAGWRLIPIIYSVTLVIVAILMMIYTPKVDRFGSSGRSLAEMLLPLKQVRVWRFSLYYVVVFGAYVALSATLPKYYISNYDVSLAAAGLLTAIFIFPASLLRPVGGWFSDRYGARRAMYGTFFVMGTAAGLLCLPSNIINIFVFTLLIFSLGCAMGVGKAAVYKHIPEYFPHDVGAVGGLVGMLGGLGGFFLPPLFAYTKAWTGWSTSPFIVLLILVAVSALWMHVTVHRMLHSHVPELKHHMEVPATQ

SEQ ID NO: 28382 - DNA, 1281 bp, Cupriavidus necator
  CDS (1)..(1281): transl_table=11
atggccaccccacatcccgcgcgggcgccgatcccgcccggtgcctatacgacgctggcatccagcactttcgccttcaccatctgctttgccgtctggatgctgttcgcggtgctcggcattccgctcaagaaggaactcggcctgaacgacaccgagttcgggctgctggcggcaacgccagtcctgagcggctcgctgatccgcgtgccgctaggcctctggaccgaccgctacggcggccgcatcgtcttcttcgtgctgatgctggccaccgtgatcccgatctggctgatctcgtacgcgcacagcctgtggcaactgctggtgctgggcctgttcgtcggcctggccggcggctcattctcggtgggcacgccgtatgtggcgcgctggttcccgcgctcgcgccagggcctggcgatgggcatcttcggcgccggcaactcgggcgcggcgctgaccaagttcgtcgcgccggcgatgatcctggccgccggcacttgggaaatcgtgccgcgcgtctattcgctggcgatgctcgccaccgcgctggtgttctgggtgttctcgcgcagcaaccccgcgcacctggtcaagtccagcaccggctggcgcgagcagctttccatgctgcgcgacccgcgcgtgtggcgctactcgcagtactactcggtggtgttcggcggctacgtgggcctgtcgctgtggatgaccaagtactacatcggcgaatacggtttcgacatcaagaccgccgccttcctggccgcctgcttctcgctgcccggcggcgcgctgcgtgccatcggcggctggatctccgaccgctacggcgcgcaccgcaccacctggtgggtgatgtgggtgagctgggtcggcttcttcctgctgagctatccgcagacggacttcatcgtccagaccaccagcggtccgcaggggttccgcatcgcgctgacgcccacggtgttcaccttgctgctgttcgtggtcggcatcgccttcgccatcggcaaggcctcggtgttcaagttcatctccaacgacttcaaccacaacatcggcgcggtttccggcgtggtgggcctggctggcgggctgggtggctttgtcctgcccattctgttcggcatgctggccgacctcaccggcatccgcagcagctgcttcatgctgatgtacggcaccgtgtgcgtgagcctggtgtggatgcactacagccaccgcaccgaacgccagcgcaaggaacaggcagtgggcctgacccagccggcctga

SEQ ID NO: 28383 - protein, 426 aa, Cupriavidus necator
MATPHPARAPIPPGAYTTLASSTFAFTICFAVWMLFAVLGIPLKKELGLNDTEFGLLAATPVLSGSLIRVPLGLWTDRYGGRIVFFVLMLATVIPIWLISYAHSLWQLLVLGLFVGLAGGSFSVGTPYVARWFPRSRQGLAMGIFGAGNSGAALTKFVAPAMILAAGTWEIVPRVYSLAMLATALVFWVFSRSNPAHLVKSSTGWREQLSMLRDPRVWRYSQYYSVVFGGYVGLSLWMTKYYIGEYGFDIKTAAFLAACFSLPGGALRAIGGWISDRYGAHRTTWWVMWVSWVGFFLLSYPQTDFIVQTTSGPQGFRIALTPTVFTLLLFVVGIAFAIGKASVFKFISNDFNHNIGAVSGVVGLAGGLGGFVLPILFGMLADLTGIRSSCFMLMYGTVCVSLVWMHYSHRTERQRKEQAVGLTQPA

SEQ ID NO: 28384 - DNA, 1395 bp, Cupriavidus necator
  CDS (1)..(1395): transl_table=11
atgtctacctccgtactcacccgctgggagcccgagaacgcggccttctggcaaagcaaaggcgaacgcatcgcctatcgcaacctcgggatctcgattccggcgctgatgctggctttcgtggtctggatgctgtggagcgtggtcgcggtcaacctcgaccgcgccggcttccagttcaccaagaaccagctgttctggctgaccgcgctgccggcgctgtccggcgccacgctgcgcatcttctattccttcctggtgccggtgttcggcgggcgccgcttcaccgcgatctccaccgcgctgctgctaatcccggcgctgggcatgggctttgcgctgcgcgacccgtccaccggctacccgacgctgctggtgctggcgctgctgtgcgggctgggcggggccaacttcagctcatcgatggccaatatcagcttcttcttccccaaggcgaagaaggggctggccaccgggctcaacgcgggcatcggcaacctgggggtgtcggtggtgcagttcgtcacgccgctggtagtgtcggtggccatcttcggcgcgcttggcggcgagccgcagcaattcccggccaacgaggccaacggcaccacgcagagtctgtggctgcagaacgccggcttcatctgggtgccgttcatcgtggtatcggcgctggcggcgtggttcggcatgcacgatatcgccgatgccaaggcatcgttcgccgaacaggccgtgatcttcaagcgcaagcacaactggctgatgtgctggctgtacgtgggcaccttcggttcgttcatcggcttctcggccgggctggcactgctgaccaagtcgcagttcccgggcgtgaacccgaccgcctatgccttcctcgggccgctggtgggcgcgctcacgcgcccggtgggcggctggatctcggacaagctcggcggcgcacgcgtcacgctgtggaccttcgccggcatgatcgccgcggtgttcgcggtgctggcagcgctgccgcatgacggcgccggcggcaacttcatgtacttcctggcggccttcgtcgcgttgttcgcgctgaccggcatcggcaacggctcgaccttccgcatgatcccggtgatcttcctgaccgagcgccagcgcgctgccgccggcaagggcgacgtggcgcagaagcaggccctgcaggaagccggcaaggaatccgccgccgtgctgggcttctccggtgcgatcggcgcctacggcggcttctttatccccaagagcttcggcacctcgctggagctgaccggcgccgccgacgccgcgctgtattgctttatcgccttctacctcagctgcgtgctggtgacgtggtggcactacgcgcgccgcaacgcgcccatgccttgctaa

SEQ ID NO: 28385 - protein, 464 aa, Cupriavidus necator
MSTSVLTRWEPENAAFWQSKGERIAYRNLGISIPALMLAFVVWMLWSVVAVNLDRAGFQFTKNQLFWLTALPALSGATLRIFYSFLVPVFGGRRFTAISTALLLIPALGMGFALRDPSTGYPTLLVLALLCGLGGANFSSSMANISFFFPKAKKGLATGLNAGIGNLGVSVVQFVTPLVVSVAIFGALGGEPQQFPANEANGTTQSLWLQNAGFIWVPFIVVSALAAWFGMHDIADAKASFAEQAVIFKRKHNWLMCWLYVGTFGSFIGFSAGLALLTKSQFPGVNPTAYAFLGPLVGALTRPVGGWISDKLGGARVTLWTFAGMIAAVFAVLAALPHDGAGGNFMYFLAAFVALFALTGIGNGSTFRMIPVIFLTERQRAAAGKGDVAQKQALQEAGKESAAVLGFSGAIGAYGGFFIPKSFGTSLELTGAADAALYCFIAFYLSCVLVTWWHYARRNAPMPC

SEQ ID NO: 28386 - DNA, 1458 bp, Mycobacterium avium subsp. paratuberculosis K-10
  CDS (1)..(1458): transl_table=11
atggcacggacgcgacgcatcgcgcattgggatcccgaggatctggtggcctgggaagcgggcaacaagctcatcgcccggcgcaacctgatctggtcgatcgccaccatgcacgtcgccttttccatctggtacctgtggtcggtgatggtgctgttcatgccgcaggcccgctacggtttcacgaccggcgacaagctgctggtgggcgccaccgcggcactggtcggggcgctggtgcgcatcccgtacgccatgggcaccgcgcggctgggcggtcgcaactgggccgtgctgtcgtcgctggtgctgctgatccccacgctcgcggccatcgtgctgctggcacacccagggttgccgttgtggccgtatctggtgtgcgcggcgctgaccggcttgggcggcgggaactacgcggccgcgctggccaacgtcgaatcgtttttcccgcagcggcgcaaggggttcgcgctgggtctcaccggaggcgtcggcaatctcggcgcggccggcatccaggcggtcgggctggtggtgctggccaccgccggtaaccaggcgccgtactgggtgtgcgccgtctatctggtgctgctggcgctcgtcggggtgggcgccgcgctgttcatggacaacctggaccattccgtcgaggtcggtcacgtgcgctcggtgctgacggtgcccgacacctggacgatttcgttcctgtacatgtgcgcgtcgggctcgttcatcggattcgcgttcgccttcggccaggtgatagcccacaacctgatcgccggcgggcagacgcacgggcaggccgcgctgcacgccgccgagatcgccttcgccgggccgctgctcggatcgatggcgcgggtggtcggcggcaagctgggggaccgcttcgacggcggccgggtcaccctgaccgtgctggccgccatgatcgtcgccggcggcttcctggtcgcggtgagcacgcacgacgacctgacccgcccgtccggcgcgccggtgtcgctgtacacgaccgccggctacatcgccggcttcatcgcgttgttcatctgctgcggcgtcggcaagggatcggtgttcaagctgatcccgtcggtcttcgcacagcgcagccgggcgttggagctcggcgacaccgaacgacgccactgggaacgggcccggtcggcggcgctgatcggcttcgccggctcgttcggcgcgctgggcggcgtggtgatcaacctggcgctgcgccagtcctatgccagcaccggcagctcgacgccggcgttcggggcgttcatgctgtgctacgtcgcggcggcggccctgacctgggccagatatgtgcgcccacgccgggcccgagccgcgcatcgcgccggactggcagccgatggccgagcagccggtcagctcgtgagggcctccgacaggttctccgggtgcagcatctcggcgtag

SEQ ID NO: 28387 - protein, 485 aa, Mycobacterium avium subsp. paratuberculosis K-10
MARTRRIAHWDPEDLVAWEAGNKLIARRNLIWSIATMHVAFSIWYLWSVMVLFMPQARYGFTTGDKLLVGATAALVGALVRIPYAMGTARLGGRNWAVLSSLVLLIPTLAAIVLLAHPGLPLWPYLVCAALTGLGGGNYAAALANVESFFPQRRKGFALGLTGGVGNLGAAGIQAVGLVVLATAGNQAPYWVCAVYLVLLALVGVGAALFMDNLDHSVEVGHVRSVLTVPDTWTISFLYMCASGSFIGFAFAFGQVIAHNLIAGGQTHGQAALHAAEIAFAGPLLGSMARVVGGKLGDRFDGGRVTLTVLAAMIVAGGFLVAVSTHDDLTRPSGAPVSLYTTAGYIAGFIALFICCGVGKGSVFKLIPSVFAQRSRALELGDTERRHWERARSAALIGFAGSFGALGGVVINLALRQSYASTGSSTPAFGAFMLCYVAAAALTWARYVRPRRARAAHRAGLAADGRAAGQLVRASDRFSGCSISA

SEQ ID NO: 28388 - DNA, 1392 bp, Mycobacterium avium subsp. paratuberculosis K-10
  CDS (1)..(1392): transl_table=11
atgggccgcgaccaccgcatcacggactggaatccggaagacgcagcggcctgggaggccggcaacaaaaggatcgcccgtcgcaacctgctgtgcaccatcgccggtgaccacgtggcgttttcgatctggaccctgtggccggtgatggcgctgttcatgcccgcggccgtgtacggcttctccgccggcgacaagctgctgctgggcgcggtggccaccctggtcggtggctgcgcccggatcccctacaccctgggcatcgcggccttcggcggccgcaaatggacgactttctcggcggtcgtattgctgatccccaccgtcggcaccatcgtcttgctggccaatcccggtctgccgctgtggcttttcgtgctgtgcgccgccctgaccgggctgggcggcggcaactatgcggcgtctctggccaacgtcaacgcgttctatccgcagcggctcaagggcgcggccatggccgtcaacgccggcgtcgccaacctgggggtggcggtgatccagctggtcggcctgctggtgctggccaccgccggacaccaggccccgtactgggtgtgcgcggtgtatctggtgttcctggccgcggtggccatcgccgccgcgatgttcatggacgacatcaaccacggcacccagctgagcaccatgcgctcgatcttgttcgaacgcgacacccatgtgatctcgctgctctacatcgccaccttcggctcctggatcggcttctcgttcgccttcgggcaggtgatgcaggtcaacttcctggagaacggggaaagcgccaagcatgccgcgctgcacgccgcccagctggccttcatcggcccgctgctgggctcggtggcgcggatctacggcggccggctggccgaccgtgtcggcggcagccgcgtcacgctgggcgtgctggccgcgatgaccctggcggccggcctgctggtgatcgtcagcaccgtcgacgaccagcacgcgggcgcgcattcggtcagcatgatcggctacgtcgtcggcttcatggtgctgttcatcctgtccggcatgggcaacggctcggtgttcaagctgatcccgtcggtctacgaggcccgcagccgcggccgggacaccagcgaggacgagcgccgccaatgggcgcgcgccatgtcggggtcgctgatcggcatctgctcggcggtcggggcgttcggcggggtggcgatcaacttggcgctgcaccagtcctacctgagcaccggaaccgagacgtcggcgtactggatgttcatggcgtcctacgtcgtcgccgccatcatgacctggctggtgtacgtgcggcggccggtcgccgcgcccggggtctcgctgccggaaacccaggccgcgcggctgtga

SEQ ID NO: 28389 - protein, 463 aa, Mycobacterium avium subsp. paratuberculosis K-10
MGRDHRITDWNPEDAAAWEAGNKRIARRNLLCTIAGDHVAFSIWTLWPVMALFMPAAVYGFSAGDKLLLGAVATLVGGCARIPYTLGIAAFGGRKWTTFSAVVLLIPTVGTIVLLANPGLPLWLFVLCAALTGLGGGNYAASLANVNAFYPQRLKGAAMAVNAGVANLGVAVIQLVGLLVLATAGHQAPYWVCAVYLVFLAAVAIAAAMFMDDINHGTQLSTMRSILFERDTHVISLLYIATFGSWIGFSFAFGQVMQVNFLENGESAKHAALHAAQLAFIGPLLGSVARIYGGRLADRVGGSRVTLGVLAAMTLAAGLLVIVSTVDDQHAGAHSVSMIGYVVGFMVLFILSGMGNGSVFKLIPSVYEARSRGRDTSEDERRQWARAMSGSLIGICSAVGAFGGVAINLALHQSYLSTGTETSAYWMFMASYVVAAIMTWLVYVRRPVAAPGVSLPETQAARL

SEQ ID NO: 28390 - DNA, 1392 bp, Mycobacterium avium subsp. paratuberculosis K-10
  CDS (1)..(1392): transl_table=11
atgaccacgaccatcaccccggtaccgcagcccgcggcggcgcccgagcggcacaaggggcggcactggatcgacgactggcggcccgaagaccccgaattctgggagacgacgggcaaggcgatcgcccgccgcaacctgatcttctcgatcttcgccgaacacgtcgggttcagcgtgtggatgctgtggagcatcgtggtggtgcacatgacggccggaccgcacgggcacccgtcggcgtccgggtgggcgctgaccgccagccaggcgctgtgcctggtcgccgtgcccagcggggtcggcgccttcctgcggctgccctacacgttcgccgtcccggtgttcggcggccgcaactggacgaccatctcggcagccttgctgctgatcccgtgcctgctgctggcgtgggcggtgagccatcccggcatcccgttcggggtgctggtggcgatcgccgcgaccgccgggttcggcggcggcaacttcgcctcgtcgatggccaacatctccttcttctacccggagaaggacaagggctgggcgctggggctcaacgcggccggcggcaacatcggcgtggcgatggtgcagaaggtcatcccgcccgtcgtgatcgcgggcggcggcgtggcgctgtcccgggccgggctgttctacgtgccgctggcggtcgtggctgcggtgtgcgcgttcctgttcatgaacaacctgaccgagatcaaggccgacgtgaagccggtgtggcagtcgctgcgccacgccgacacctggatcatgtcgctgctctacatcggcaccttcggatccttcatcggctactcggccgccttcccgaccctgctcaaaacggtgttcgggcgcggcgacatcgcgctggcgtgggcgtttctgggcgccgccatcgggtcggtgatccggccgctgggcggcaagctggccgaccgggtcggcggggcgcggatcaccgcggccagctttgtgatgctggccgtcggcgcggcggccgcgctgtggtcggtgaaggcggtgaacctgccggccttcttcgccagcttcatgttcctgttcgttgcgaccggcatcggcaacggttcgacctaccggatgatctcgcggatcttcaagatcaagggcgagctggccgggggcgatcccgacaccatggtgacgatgcgccgccaggccgccggcgcgctgggcgtcatctcggcggtgggcgccttcggcgggttcatcgtgccgctggcctacgcctggtcgaagtcgcagttcggcagcatcgaacccgcgctgcgcttctatgtggtgttcttcctgggcttgctggccgtcacctggtactgctacctgcgcaagcacaacgcgatcacccgggtcggcatctag

SEQ ID NO: 28391 - protein, 463 aa, Mycobacterium avium subsp. paratuberculosis K-10
MTTTITPVPQPAAAPERHKGRHWIDDWRPEDPEFWETTGKAIARRNLIFSIFAEHVGFSVWMLWSIVVVHMTAGPHGHPSASGWALTASQALCLVAVPSGVGAFLRLPYTFAVPVFGGRNWTTISAALLLIPCLLLAWAVSHPGIPFGVLVAIAATAGFGGGNFASSMANISFFYPEKDKGWALGLNAAGGNIGVAMVQKVIPPVVIAGGGVALSRAGLFYVPLAVVAAVCAFLFMNNLTEIKADVKPVWQSLRHADTWIMSLLYIGTFGSFIGYSAAFPTLLKTVFGRGDIALAWAFLGAAIGSVIRPLGGKLADRVGGARITAASFVMLAVGAAAALWSVKAVNLPAFFASFMFLFVATGIGNGSTYRMISRIFKIKGELAGGDPDTMVTMRRQAAGALGVISAVGAFGGFIVPLAYAWSKSQFGSIEPALRFYVVFFLGLLAVTWYCYLRKHNAITRVGI

SEQ ID NO: 28392 - DNA, 1170 bp, Bacillus anthracis str. Sterne
  CDS (1)..(1170): transl_table=11
atgaaaagtcctaattttcaattaagtttacaaacttctaatctaattatcggttttatggtgtgggttattttatcatcattaatgccctatattaaagtggatatcccattaactgcgggacaaatttctatggtaacagcagtacccgttattttagggtctgttcttcgtattccaattggttattggacaaatcgtttcggagcaagaaaattattctttattagttttattctattattatttcctgttttttatattagtgttgccaattctatgatggatttaattattggtggattatttgtaggaatcggtggtgctgtattctctgtaggagtaacttctttaccaaaatactttccaaaagagagtcacggttttgtaaatggtatttacggtgtcggtaacgctggaacagcaattacttcatttttagcgcctgttatcgcaacttcagttggctggagaacgacagtacagtgttatttagttttacttgcagcgtttgcacttatgaactttttattaggtgatcgtaaagagaaaaaagtgaatacaccactaatggaacaaataaaaggtgtatataaaaatgagaaactttggtttttatgtatcttttactttttaactttcggatcatttgttgcatttaccgtatacttaccaaactttttagtatctcatttcggattagagaaagtagatgcaggtatgcggacagccggattcatcgtactcgcaacaattatgcgtccgattggtggttggctcggtgataaatttaacccatttaaaatattaatcttcgtatttatcggtttaacactttcaggtattattttatcatttatgccaagcatgaacgtatatacattcggttgcctattagtcgcattttgtgcaggtatcggtaatggtacaattttcaaactcgttccgatgtatttctcagaacaagctggtattgtaaatggactcgtttcagctttaggcggacttggaggattcttcccgccactaattttaacattactgttccaactaacaggtcattatgcaattggatttatggcgttatcagaagtcgcacttgcttgtttaatcattacagtatggatgtatagtcaagaaaagctgttagtgatgttaaagaatcattaa

SEQ ID NO: 28393 - protein, 389 aa, Bacillus anthracis str. Sterne
MKSPNFQLSLQTSNLIIGFMVWVILSSLMPYIKVDIPLTAGQISMVTAVPVILGSVLRIPIGYWTNRFGARKLFFISFILLLFPVFYISVANSMMDLIIGGLFVGIGGAVFSVGVTSLPKYFPKESHGFVNGIYGVGNAGTAITSFLAPVIATSVGWRTTVQCYLVLLAAFALMNFLLGDRKEKKVNTPLMEQIKGVYKNEKLWFLCIFYFLTFGSFVAFTVYLPNFLVSHFGLEKVDAGMRTAGFIVLATIMRPIGGWLGDKFNPFKILIFVFIGLTLSGIILSFMPSMNVYTFGCLLVAFCAGIGNGTIFKLVPMYFSEQAGIVNGLVSALGGLGGFFPPLILTLLFQLTGHYAIGFMALSEVALACLIITVWMYSQEKLLVMLKNH

SEQ ID NO: 28394 - DNA, 1170 bp, Bacillus thuringiensis serovar konkukian str. 97-27
  CDS (1)..(1170): transl_table=11
atgaaaagtcctaattttcaattaagtttacaaacttctaatctaattatcggttttatggtgtgggttattttatcatcattaatgccctatattaaagtggatatcccattaactgcgggacaaatttctatggtaacagcagtacccgttattttaggttctgttcttcgcattccaattggttattggacaaatcgtttcggagcaagaaaattattctttattagttttattctattattatttcctgttttttatattagtgttgccaattctatggtggatttaattattggtggattatttgtaggaatcggtggtgctgtattctctgtaggagtaacttctttaccaaaatactttccaaaagagagtcacggttttgtaaatggtatttacggtgtcggtaacgctggaacagcaattacttcatttttagcgcctgttatagcaacttcagttggctggagaacgacagtacaatgttatttagttttacttgcagcgtttgcacttatgaactttttattaggtgatcgtaaagagaaaaaagtgaatacaccactaatggaacaaataaaaggtgtatataaaaatgagaaactttggtttttatgtatcttttactttttaactttcggatcatttgttgcatttacagtatatttaccaaactttttagtatctcatttcggattagagaaagtagatgcaggtatgcgaacagccggattcatcgtactcgcaacaattatgcgtccgattggtggttggctcggtgataagtttaatccatttaaaatattaatcttcgtatttatcggtttaacactttcaggtattattttatcatttatgccaagcatgaacgtatatacatttggttgcctattagtcgcattttgtgcaggtatcggtaatggtacaattttcaaactcgttccgatgtatttctcagaacaagctggtattgtaaatgggctcgtttcagctttaggcggacttggaggattcttcccgccattaattttaacattactgttccaactaacaggtcattatgcaattggatttatggcgttatcagaagtcgcacttgcttgtttaatcattacagtatggatgtatagtcaagaaaagctgttagtgatgttaaagaatcattaa

SEQ ID NO: 28395 - protein, 389 aa, Bacillus thuringiensis serovar konkukian str. 97-27
MKSPNFQLSLQTSNLIIGFMVWVILSSLMPYIKVDIPLTAGQISMVTAVPVILGSVLRIPIGYWTNRFGARKLFFISFILLLFPVFYISVANSMVDLIIGGLFVGIGGAVFSVGVTSLPKYFPKESHGFVNGIYGVGNAGTAITSFLAPVIATSVGWRTTVQCYLVLLAAFALMNFLLGDRKEKKVNTPLMEQIKGVYKNEKLWFLCIFYFLTFGSFVAFTVYLPNFLVSHFGLEKVDAGMRTAGFIVLATIMRPIGGWLGDKFNPFKILIFVFIGLTLSGIILSFMPSMNVYTFGCLLVAFCAGIGNGTIFKLVPMYFSEQAGIVNGLVSALGGLGGFFPPLILTLLFQLTGHYAIGFMALSEVALACLIITVWMYSQEKLLVMLKNH

SEQ ID NO: 28396 - DNA, 1170 bp, Staphylococcus aureus subsp. aureus MRSA252
  CDS (1)..(1170): transl_table=11
atgtacaaaacaaaaggtggctttcaacttacattacaaacattaagtttagtggttggatttatggcttggagtattattgctcctttaatgccttttattaaacaggatgtcaatgtaactgaaggtcaaatatcaatcattttagcgataccagttattttgggatcagtgctccgtgtgccatttggttatttaacaaatattgttggtgctaaatgggtattctttacaagttttatcgtattgttattcccgatatttttcttgggccaagcacaaacgccggggatgttaatggcatcaggatttttccttggcgtaggtggcgcaattttctctgttggtgttacatcagttcctaaatatttccctaaagaaaaagtaggtctagcaaatggtatttatggtatggggaatatcggtacagcagtttcttcatttttagcaccaccgatagcgggtattattggttggcaaacaacagttagaagttacttaattattatcgctttatttgcattaattatgttcatttttggtgacacacaagaacgtaaaattaaagtgccattaatggcccaaatgaaaacattatctaaaaactacaaattatattacttaagttattggtatttcattacttttggtgcttttgttgcatttggtattttcttacctaactacttagtaaatcattttggaattgacaaagtagatgctggtattcgttcaggtgtattcattgcgctggcaacattcttgagaccaataggtggtatactaggtgataaatttaatgcagttaaagtactgatgattgattttgttattatgattatcggtgccgttattttaggtatttcagaccatatcgcattatttactgtaggttgtttaacaataagtatttgtgcaggtattggtaacggcttaatttttaaattagtaccatcatacttctcaaatgaagcaggatcagcaaatggtatcgtatcaatgatgggtggtttaggaggattcttcccaccgttggtcatcacatacgtagctaatttaacaggttcaagccatttagcatttattttcttagcggtattcggatgcattgcattatttacaatgcgccatttatatcaaaaagaatatggttcattgaaacacagttga

SEQ ID NO: 28397 - protein, 389 aa, Staphylococcus aureus subsp. aureus MRSA252
MYKTKGGFQLTLQTLSLVVGFMAWSIIAPLMPFIKQDVNVTEGQISIILAIPVILGSVLRVPFGYLTNIVGAKWVFFTSFIVLLFPIFFLGQAQTPGMLMASGFFLGVGGAIFSVGVTSVPKYFPKEKVGLANGIYGMGNIGTAVSSFLAPPIAGIIGWQTTVRSYLIIIALFALIMFIFGDTQERKIKVPLMAQMKTLSKNYKLYYLSYWYFITFGAFVAFGIFLPNYLVNHFGIDKVDAGIRSGVFIALATFLRPIGGILGDKFNAVKVLMIDFVIMIIGAVILGISDHIALFTVGCLTISICAGIGNGLIFKLVPSYFSNEAGSANGIVSMMGGLGGFFPPLVITYVANLTGSSHLAFIFLAVFGCIALFTMRHLYQKEYGSLKHS

SEQ ID NO: 28398 - DNA, 1170 bp, Staphylococcus aureus subsp. aureus MSSA476
  CDS (1)..(1170): transl_table=11
atgtacaaaacaaaaggtggctttcaacttacattacagacattaagtttagtggttgggtttatggcttggagtataattgcgccattaatgccctttattaaacaagatgtcaatgttactgaaggtcaaatatcaatcattttagcgataccagttattttgggatcggtgctccgtgtgccatttggttatctaacaaacattgttggcgctaaatgggtattctttactagttttatcgtattgttattcccgatatttttcttaagccaagcacaaacaccgggtatgttaatggcgtcaggatttttccttggtgtaggtggtgcaattttctcagttggtgttacatcagttcctaaatatttccctaaagaaaaagtaggtctagcaaatggtatttatggtatgggaaatatcggtacagcagtttcttcatttttagcaccgccaattgcgggtattattggttggcaaacaactgttagaagttacttaattattatcgctttatttgcattaattatgtttatatttggtgatacacaagaacgtaaaattaaagtgccattaatggcacaaatgaaaacattatctaaaaactacaaattatattacttaagttattggtatttcattacttttggtgcttttgtagcatttggtattttcttacctaactacttagtaaatcattttggaattgacaaagtagatgctggtattcgatcaggtgtattcattgcgctggcaacattcttaagaccaataggtggcattttaggtgataaatttaatgcagttaaagtattgatgattgattttgttgttatgattatcggtgccattattttaggtatttcagaccatatcgcattattcactgtaggctgtttaacaataagtatttgtgcaggtattggtaacggcttaatcttcaaattagtaccatcctacttcttaaatgaagcgggatccgcaaatggtatcgtatcaatgatgggtggtttaggaggattcttcccaccactagtaatcacgtacgtagctaatttaacaggatcaagtcatttagcatttattttcttagcggtatttggatgtattgcattatttaccatgcgtcatttataccaaaaagaatatggctcattgaaaaacggttga

SEQ ID NO: 28399 - protein, 389 aa, Staphylococcus aureus subsp. aureus MSSA476
MYKTKGGFQLTLQTLSLVVGFMAWSIIAPLMPFIKQDVNVTEGQISIILAIPVILGSVLRVPFGYLTNIVGAKWVFFTSFIVLLFPIFFLSQAQTPGMLMASGFFLGVGGAIFSVGVTSVPKYFPKEKVGLANGIYGMGNIGTAVSSFLAPPIAGIIGWQTTVRSYLIIIALFALIMFIFGDTQERKIKVPLMAQMKTLSKNYKLYYLSYWYFITFGAFVAFGIFLPNYLVNHFGIDKVDAGIRSGVFIALATFLRPIGGILGDKFNAVKVLMIDFVVMIIGAIILGISDHIALFTVGCLTISICAGIGNGLIFKLVPSYFLNEAGSANGIVSMMGGLGGFFPPLVITYVANLTGSSHLAFIFLAVFGCIALFTMRHLYQKEYGSLKNG

SEQ ID NO: 28400 - DNA, 1389 bp, Erwinia carotovora subsp. atroseptica SCRI1043
  CDS (1)..(1389): transl_table=11
atgacgcagccttcatcacccgaaaaagtatcgcaaagcacgctcctaagggaatgggatcctgaagatactaaattctggcaatctggcggacaacggatagcacagcgtaatctttggatctctgtaccgtgcctgctgttatcgttttgtgtctggatgattttcagcaccgtggccgttaacctaaacaaggtcggatttagttttaccacagaccagctatttttgcttaccgcgctgccttccgtttccggcgcgctgttacgtgtgccttactcctttgttattccaatcgttggtggttgccgttggacgacattaagcaccattattctggttatcccatgtatttggctcgggtttgtcgtacagaacccacaaacgccttaccgcgttttcgtcacgatttctctgctgtgtggttttgccggtgctaacttcgcatccagcatggctaacatcagtttcttcttccccaaatcacgtcagggcagtgcgttaggtattaacggtgggttgggtaatctcggtgtgagcgtaatgcagttgctggtgccggtggtgattttcctgccgattctgggattctccggcaatggcgttgtgcaacctgatggccaccagatttggctgcatcatgccgcgtggatgtgggtaccgtttttggtgattgccgcaaccgctgcttggtttggcatgaacgatctttcgacggccaatgcgtctatacgcaaacagctgccagtgttgaagcaaatgcacctgtgggtgctcagcttcctgtatctgtccacctttggttcatttatcggtttttcagcaggcttcgggatgctgtccagaacgcagttcccagacatcgtgattctgtactacgcattcttcgggccgctgctaggggcgttggcgcgtccggttggcggaatgctgtccgatcgctttggcggtgtgaaagtcacgttgattaacttcatcctgatggcgattttctcggtgttgttattcttgtctctgccgagtgcgagctctgctggttcattcggaatgttctttggcatcttcatgatgctgttcctgacggctggtttgggtagtggatcaacgttccagatgattgccgtcattttccgtaaattaacggcggatcgcgttaaatcggaaggcgggaaagatgctgacgcgcagcgtgcggcagtcacggataccgcagcggcgttgggctttatttcggccattggcgctatcggcggtttcttcattcctcaagcctttgggatgtcgcttgagttaacgggttcacccaccggtgcgatgaaagtgtttgtggtgtgctacgtggtgtgtgtactggtgacgtggttgttttatgccagaaagaaaaattag

SEQ ID NO: 28401 - protein, 462 aa, Erwinia carotovora subsp. atroseptica SCRI1043
MTQPSSPEKVSQSTLLREWDPEDTKFWQSGGQRIAQRNLWISVPCLLLSFCVWMIFSTVAVNLNKVGFSFTTDQLFLLTALPSVSGALLRVPYSFVIPIVGGCRWTTLSTIILVIPCIWLGFVVQNPQTPYRVFVTISLLCGFAGANFASSMANISFFFPKSRQGSALGINGGLGNLGVSVMQLLVPVVIFLPILGFSGNGVVQPDGHQIWLHHAAWMWVPFLVIAATAAWFGMNDLSTANASIRKQLPVLKQMHLWVLSFLYLSTFGSFIGFSAGFGMLSRTQFPDIVILYYAFFGPLLGALARPVGGMLSDRFGGVKVTLINFILMAIFSVLLFLSLPSASSAGSFGMFFGIFMMLFLTAGLGSGSTFQMIAVIFRKLTADRVKSEGGKDADAQRAAVTDTAAALGFISAIGAIGGFFIPQAFGMSLELTGSPTGAMKVFVVCYVVCVLVTWLFYARKKN

SEQ ID NO: 28402 - DNA, 1317 bp, Propionibacterium acnes KPA171202
  CDS (1)..(1317): transl_table=11
gtgagcacaagcccttcccaccatctcatcgagaactgggatcccgaggaaaactgggattccggtatcgcatggcgaactttgaccatttcgacgttctccatgatcatcgcattttgcgtatggttcttggtgagtgcgattgcacccaaactcaacgccatcggattccacctgacgaagtcacagctgtactggctcaccgccatgccagggctctcgggaggattcatccgcctggtctacatgttcctaccgccggtgatcggcactcgcaggctcgtgggatacagctccctgctctacctcatccctatgctgggctggtttttcgccgtccagaacacgtcgaccgggtacggcacccttctcctcctcgccttcctatgcggcgttgggggcggttctttctccggttacatgccatcaacgggctacttcttccctaaaagcaagcagggcaccgctttgggagtacaggctggcatcggcaacctggggatgtccatcgttcagttgctcggcccatggctcatgggcttcgggctcctcggcctcacgtggatcgccccgcagcacaccgccgggagccccttgtgggtgcacaatatcgccatcgtcttcgtcccgtggaccatcctggccacgattttggcatttaccatgctcaaagacgttccggtaaaggcgaacttccgtcggcagatcgacatcttcaccaaccccgacacttggatcatgacgctcatgtacgtcatgacgttcggcctgttcagcggcttcagcgcccagttcgggctactcatcgagaatacgtatggcaactcgagcaacttggcccacggattttctaacttgcccgccggcgcctcctacgccttcctcggcccactgatcggctcgttggtgcgtgtcgtctgggggccgctctgcgaccgattcggtggggcgatctggacccttgtctcaggaatcgggatggcactgacgttcgggttctgcgccttcttcctcaaccccacaagtccaagccagttcggctacttcctgtggggaatgctcaccatgttcttcttctccggtatcggcaacgccgggacgttcaagcagatgcccatgatcatgcctgccagacaagccggtggagccatcgggttcaccgccgccatcggctgtttcggcccattcgtcgtcggtgtcgccctgtcatcgatgtcagccgttgcctggttctggatctgcaccgtcttctgcattgtgtgctcgatcatctgctggatccgttatgcccgcccaggtgctccatgccctggctga

SEQ ID NO: 28403 - protein, 438 aa, Propionibacterium acnes KPA171202
MSTSPSHHLIENWDPEENWDSGIAWRTLTISTFSMIIAFCVWFLVSAIAPKLNAIGFHLTKSQLYWLTAMPGLSGGFIRLVYMFLPPVIGTRRLVGYSSLLYLIPMLGWFFAVQNTSTGYGTLLLLAFLCGVGGGSFSGYMPSTGYFFPKSKQGTALGVQAGIGNLGMSIVQLLGPWLMGFGLLGLTWIAPQHTAGSPLWVHNIAIVFVPWTILATILAFTMLKDVPVKANFRRQIDIFTNPDTWIMTLMYVMTFGLFSGFSAQFGLLIENTYGNSSNLAHGFSNLPAGASYAFLGPLIGSLVRVVWGPLCDRFGGAIWTLVSGIGMALTFGFCAFFLNPTSPSQFGYFLWGMLTMFFFSGIGNAGTFKQMPMIMPARQAGGAIGFTAAIGCFGPFVVGVALSSMSAVAWFWICTVFCIVCSIICWIRYARPGAPCPG

SEQ ID NO: 28404 - DNA, 1206 bp, Bacillus licheniformis ATCC 14580
  CDS (1)..(1206): transl_table=11
ttgaaattggcggatttgaggaagagcggacacgcgccttccttgttgtcatcttttttatatttcgatgtcagctttatgatttgggtgttgctgggggcgcttggtgtttatgttacggctgattttgatttatcgccttcacaggtcggattgattgtcgccatacctactttggccggatcgtttttccggattgcgctcggcattttaaccgaccgtttcggaccgaaaaagacggctgttggcggaatgctggtgacgatgattccgttgttatggggatggcagttcggttcatcggtcgccgagctgtatatcatcggaattttactcggtgtggcaggcgcaagcttttccgcttcccttcctatggcgagccgctggtatccgccgcacttgcaaggtcttgccatggggatcgccggggcgggaaacagcggaacactgcttgctacgctattcggccctcgccttgcggagcaagtgggctggaacggcgtcatgggactggcgctgattcctttaaccctcgtgttattcagctatttccttatggctaaagaacctccgaatcagccggctcctaaaccgctcaaagactattttgccgttttcaaagaaagggacacttggtatttttgccttctctacagcgtgacattcgggggttttgtcggcctgtccaactttttaagctacttttttgcatcccagtatgccgttccggcggtaagagccggcgaatttgtcacgcttgtcgttgcatccggaagctgcctccgccctgtcggcggattgattgccgataaaatcggcggcgtgcgtttgcttcaattcctctttatcggagtggctctgtgcatgttctcggtcagtatgctcccgtctctaggcgttgtcacagccgcattatttatcggcatgggctgcctcggaatggggaacggcgcgatattccagtttgtaccgcagcgatttcaacaagagatcgggatggtgacggggatcgtcggcgctgcggggggaatcggcggattcttccttccgaatatcctcggaacgctgaagcaaattacaggtacgtattcaagcgggttcctaacctttaccgttattgcatttttagcgctcggtctgcttttgtttgctcaggccggatggaaaaaacagtggaaagccgaggagaaatcaatccgaatttaa

SEQ ID NO: 28405 - protein, 401 aa, Bacillus licheniformis ATCC 14580
MKLADLRKSGHAPSLLSSFLYFDVSFMIWVLLGALGVYVTADFDLSPSQVGLIVAIPTLAGSFFRIALGILTDRFGPKKTAVGGMLVTMIPLLWGWQFGSSVAELYIIGILLGVAGASFSASLPMASRWYPPHLQGLAMGIAGAGNSGTLLATLFGPRLAEQVGWNGVMGLALIPLTLVLFSYFLMAKEPPNQPAPKPLKDYFAVFKERDTWYFCLLYSVTFGGFVGLSNFLSYFFASQYAVPAVRAGEFVTLVVASGSCLRPVGGLIADKIGGVRLLQFLFIGVALCMFSVSMLPSLGVVTAALFIGMGCLGMGNGAIFQFVPQRFQQEIGMVTGIVGAAGGIGGFFLPNILGTLKQITGTYSSGFLTFTVIAFLALGLLLFAQAGWKKQWKAEEKSIRI

SEQ ID NO: 28406 - DNA, 1185 bp, Bacillus licheniformis ATCC 14580
  CDS (1)..(1185): transl_table=11
atggcaaatcgtcaaaaaatacaattaccgctgcagtcatttagtttagtcgcaggatttatggtttgggtattgatttcctctttaatgccccacattaagcaggacatcgccctgacagacagcgaggtctcccttgttacggccattccggtcatactcgggtcgcttctcaggattccgctgggctactacacgaacagatttggagcaagaattacattcatgatcagctttttgctgcttctgttcccggttttttggatcagcacagccgattcgctgttcgacttgatccttggcggcttcttcctcggcatcggcggagcggtcttttccatcggggtcacatcactgccgaaatactaccctaaagaaaagcacgggtttgtcaatgggatctacggcgctgggaacgtcggtacagcgattactacgtttgccgctcctgttgtcgcaaaaaccgccgggtgggaaaatacggtgcggatgtacatcgtgttagtcgccgtattcgctttattgaactttatccttggagatcgaaaagaaacaaaagttacggtatctgtaacagagcaaatgaaggcagtctaccgaaatcagacattatggtttttaagcttgttttacttcattacattcggatctttcgtcgcgtttacgatttatcttccgaactttcttgttaatcacttcgggcttgatcccgtcgattcagggctgagaaccgccggatttatcgctgtcgccacttttctgaggcctgtcggcggctggctggcagacaaattcaacccgctgaagctgttgatgtatgtatttgccggctgcaccttgtcagggattttattggccttttcgccgagcctcggactgtacgggtttggggtattaaccgttgccgtgtgcgccggactcggaaacgggatcatctttaagctcgtgccgctttatttttcaaatcaggccggcatcgttaatgggatcgtatcagcgatgggcggcttgggaggatttttcccgcctctcatcctgtcaagcgtttttcaggcaaccggccattatgcgatcggattcatggcgctgtcagaagcggctcttgcaagctttgtgatcgtggtctggatgtattttcaggaagtgaacaaaacatcgtccaaaacgaaggccaaccatttataa

SEQ ID NO: 28407 - protein, 394 aa, Bacillus licheniformis ATCC 14580
MANRQKIQLPLQSFSLVAGFMVWVLISSLMPHIKQDIALTDSEVSLVTAIPVILGSLLRIPLGYYTNRFGARITFMISFLLLLFPVFWISTADSLFDLILGGFFLGIGGAVFSIGVTSLPKYYPKEKHGFVNGIYGAGNVGTAITTFAAPVVAKTAGWENTVRMYIVLVAVFALLNFILGDRKETKVTVSVTEQMKAVYRNQTLWFLSLFYFITFGSFVAFTIYLPNFLVNHFGLDPVDSGLRTAGFIAVATFLRPVGGWLADKFNPLKLLMYVFAGCTLSGILLAFSPSLGLYGFGVLTVAVCAGLGNGIIFKLVPLYFSNQAGIVNGIVSAMGGLGGFFPPLILSSVFQATGHYAIGFMALSEAALASFVIVVWMYFQEVNKTSSKTKANHL

SEQ ID NO: 28408 - DNA, 1230 bp, Burkholderia mallei ATCC 23344
  CDS (1)..(1230): transl_table=11
gtgctcgcgtcgagcacgattgcattcacgctgtgcttcgccgtatggatgatgttcgcgatcctcggcattccgctgaagaaaaccctcggcctgaacgacaccgaattcggcctcatcgccgcgatgcccgtgctcaccggctcgctgatccgcgtgccgctcggcatctggaccgaccgctacggcggacgcatcgtgttcttcatcctgatgctcgtcaccgtcgtgccgatctggctgatctcgtacgcgaccgagctctggcagttcctcctgctcggcctgttcgtcgggctcgcgggcggctcgttctcggtcggcacgccctacgtcgcgcgctggttcccgaaagcgcgccagggtctcgcgatgggcgtgttcggcgccggcaactcgggcgcggccgtcaacaagttcgtcgcgcccgcgctgatcgccgcggcgggcacatggaccatcgtgccgcgcgtctacgcggtcgcgatgctcgcgatggcgctcctcttctggctgttctccgccaccgatcccgcgcaccgctcgacgaacgcgacatcgctgcgcgcgcaactgcgcgtgctgaagaacccgcgcgtatggcgctactcgcagtactactcggtcgtgttcggcggctacgtcgggctgtcgctgtggctcacgcagtactacgtcggcgaatacggcttcggcatccagtcggccgcgttcctcgccgcgtgcttctcgctgccgggcggcgtgctgcgcgcgatcggcgggtggctttccgaccgctacggcgcgtatcgcacgacgtggtgggtgatgtgggtctgctgggtgatgttcttcctgctcagctatccgccgaccgatttcacgatccgcgccgcgcacggcccgctcggcttccatctgtcgctcacgcccgtcgcgttcaccgcgctgctgttcgcggtcggcatcgcgatggcggtcggcaaggcgtcggtcttcaagttcatcgccgacgagttcccgaacgacatcggcgcggtgtcgggcgtcgtcggcctcgcgggcggcctggccggcttcgcgctgccgattctgttcggcgcgctcgtcgacctcacgggcgtgcgctcgacctgcttcatgctgctctacggcgccgtcagcgtgagcctcgtctggatgtacttcagcttccgcgccgagcgtgccgcgcacgaccagcgcgtgctcgccacccgctccgcgtga

SEQ ID NO: 28409 - protein, 409 aa, Burkholderia mallei ATCC 23344
MLASSTIAFTLCFAVWMMFAILGIPLKKTLGLNDTEFGLIAAMPVLTGSLIRVPLGIWTDRYGGRIVFFILMLVTVVPIWLISYATELWQFLLLGLFVGLAGGSFSVGTPYVARWFPKARQGLAMGVFGAGNSGAAVNKFVAPALIAAAGTWTIVPRVYAVAMLAMALLFWLFSATDPAHRSTNATSLRAQLRVLKNPRVWRYSQYYSVVFGGYVGLSLWLTQYYVGEYGFGIQSAAFLAACFSLPGGVLRAIGGWLSDRYGAYRTTWWVMWVCWVMFFLLSYPPTDFTIRAAHGPLGFHLSLTPVAFTALLFAVGIAMAVGKASVFKFIADEFPNDIGAVSGVVGLAGGLAGFALPILFGALVDLTGVRSTCFMLLYGAVSVSLVWMYFSFRAERAAHDQRVLATRSA

SEQ ID NO: 28410 - DNA, 1404 bp, Burkholderia mallei ATCC 23344
  CDS (1)..(1404): transl_table=11
atggatactctgcgcacctccctccgaagcggcaactggcgctcgcttctcgcgtgtttcctttatttcgatacgggcttcaccgtctgggtgctgtacgggccgctcgcgccgttcatcagcaaggacatcgcgatgacggccgcgcagcaaggctttctcgtcgcggtgccggtgctcgcggcggccatcctgcgcgtgacgctcggcaacctttaccagtccgccgacggccggcgcatcgcgctgatgggcgtactgctgtccgcgctgcccgccgccgtgctgccgttcgtgcccggcacgccgtcgtacacgctgctcctcgtgctcggcgtgttcctcgggatcggcggcgcgagcttcgcggtcgcgctgccgatggcgggcagcagctatccgccgaaggtgcagggcctcgtgctcggcctcgccgccgcgggcaacatcggcgcggtgctcgacggcttcatgttcccgcacatcgcggccgcgctcggctggaagttctcgacggccgccgcgctgccgctgctcgcgatcgcgggcttcgcgctcttcgcgtgggccgacgaccgcgcagagaaatcgggcagcgcggcgcgcgcgttcggcgcgttcgtgatcacgctcggcggtctcgtcgcgctcgtgctcgccgtgcacgcgggcctgttcggcgcgggcaaggcaggcgtgctgctgcccgtgatgggcgcgctgctcgcgatcgccgtgctgcccagccgctatcgcgcggtgctcgccgagcgcgacacgtgggtcatcatgctgatctacagcatcacgttcggaggcttcgtcggcatgtcgtcgtacgtgacgctgctgctgacgacgctctaccagatgccgaagatcgaagcgggcctgttcatgtcgctgctcgcgtttctcggcgcgatcgtgcgcccgttcggcggccacctcgccgaccgcatcaccggcgtgcgcgcgctcatggcgatcctcgccgcgatcgccgcggccgacttcgcgttcgcggccgtgatgccgccgctcgcgggcggcatcgcgctgctcgtgtgcctgtacgtcgcgttcggcctcggcaacggctcgacgttccagctcgtcccgcaccgctggcagggcaagacgggcctgctgtccggcatcgtcggcgcggcgggcagcatcggcggcttctatctgcccgtcgtgatgggcatcgcgaaggaaagcacgggcagctatcagctcggcttcgcgacgttcggcgcgctcgcgacctgcgcgctcgtcgcgctcgcgatgctgcgcgcgcagtggctgcgctgggcggcgcccgagctcgccgcggccgagccgtcggcgggcgccgggatgccgatcggcggcgcggcgcgcgtcggcgactga

SEQ ID NO: 28411 - protein, 467 aa, Burkholderia mallei ATCC 23344
MDTLRTSLRSGNWRSLLACFLYFDTGFTVWVLYGPLAPFISKDIAMTAAQQGFLVAVPVLAAAILRVTLGNLYQSADGRRIALMGVLLSALPAAVLPFVPGTPSYTLLLVLGVFLGIGGASFAVALPMAGSSYPPKVQGLVLGLAAAGNIGAVLDGFMFPHIAAALGWKFSTAAALPLLAIAGFALFAWADDRAEKSGSAARAFGAFVITLGGLVALVLAVHAGLFGAGKAGVLLPVMGALLAIAVLPSRYRAVLAERDTWVIMLIYSITFGGFVGMSSYVTLLLTTLYQMPKIEAGLFMSLLAFLGAIVRPFGGHLADRITGVRALMAILAAIAAADFAFAAVMPPLAGGIALLVCLYVAFGLGNGSTFQLVPHRWQGKTGLLSGIVGAAGSIGGFYLPVVMGIAKESTGSYQLGFATFGALATCALVALAMLRAQWLRWAAPELAAAEPSAGAGMPIGGAARVGD

SEQ ID NO: 28412 - DNA, 1281 bp, Burkholderia pseudomallei K96243
  CDS (1)..(1281): transl_table=11
atggctgcaacctccgcttcccccgcctcgctcgacaagcgcgcgatgcccgtgctcgcgtcgagcacgattgcattcacgctgtgcttcgccgtatggatgatgttcgcgatcctcggcattccgctgaagaaaaccctcggcctgaacgacaccgaattcggcctcatcgccgcgatgcccgtgctcaccggctcgctgatccgcgtgccgctcggcatctggaccgaccgctacggcggacgcatcgtgttcttcatcctgatgctcgtcaccgtcgtgccgatctggctgatctcgtacgcgaccgagctctggcagttcctcgtgctcggcctgttcgtcgggctcgcgggcggctcgttctcggtcggcacgccctacgtcgcgcgctggttcccgaaagcgcgccagggtctcgcgatgggcgtgttcggcgccggcaactcgggcgcggccgtcaacaagttcgtcgcgcccgcgctgatcgccgcggcgggcacatggaccatcgtgccgcgcgtctacgcggtcgcgatgctcgcgatggcgctcctcttctggctgttctccgccaccgatcccgcgcaccgctcgacgaacgcgacatcgctgcgcgcgcaactgcgcgtgctgaagaacccgcgcgtatggcgctactcgcagtactactcggtcgtgttcggcggctacgtcgggctgtcgctgtggctcacgcagtactacgtcggcgaatacggcttcggcatccagtcggccgcgttcctcgccgcgtgcttctcgctgccgggcggcgtgctgcgcgcgatcggcggatggctttccgaccgctacggcgcgtatcgcacgacgtggtgggtgatgtgggtctgctgggtgatgttcttcctgctcagctatccgccgaccgatttcacgatccgcgccgcacacggcccgctaggcttccatctgtcgctcacgcccgtcgcgttcaccgcgctgctgttcgcggtcggcatcgcgatggcggtcggcaaggcgtcggtcttcaagttcatcgccgacgagttcccgaacgacatcggcgcggtgtcgggcgtcgtcggcctcgcgggcggcctggccggcttcgcgctgccgattctgttcggcgcgctcgtcgacctcacgggcgtgcgctcgacctgcttcatgctgctctacggcgccgtcagcgtgagcctcgtctggatgtacttcagcttccgcgccgagcgtgccgcgcacgaccagcgcgtgctcgccacccgctccgcgtga

SEQ ID NO: 28413 - protein, 426 aa, Burkholderia pseudomallei K96243
MAATSASPASLDKRAMPVLASSTIAFTLCFAVWMMFAILGIPLKKTLGLNDTEFGLIAAMPVLTGSLIRVPLGIWTDRYGGRIVFFILMLVTVVPIWLISYATELWQFLVLGLFVGLAGGSFSVGTPYVARWFPKARQGLAMGVFGAGNSGAAVNKFVAPALIAAAGTWTIVPRVYAVAMLAMALLFWLFSATDPAHRSTNATSLRAQLRVLKNPRVWRYSQYYSVVFGGYVGLSLWLTQYYVGEYGFGIQSAAFLAACFSLPGGVLRAIGGWLSDRYGAYRTTWWVMWVCWVMFFLLSYPPTDFTIRAAHGPLGFHLSLTPVAFTALLFAVGIAMAVGKASVFKFIADEFPNDIGAVSGVVGLAGGLAGFALPILFGALVDLTGVRSTCFMLLYGAVSVSLVWMYFSFRAERAAHDQRVLATRSA

SEQ ID NO: 28414 - DNA, 1386 bp, Burkholderia pseudomallei K96243
  CDS (1)..(1386): transl_table=11
atgtccacttctctactcgtgcgctgggatcccgaaaacccggccttctggcaagccaaggggcgccccgtcgcgtggcgcaatctcgcgatctcgattcccgcgctgatgctcgcgttcgtcgtctggtcgctctggagcgtcgtcgtcgtcaacctcgatcgcgcgggctttcacttcagcaagaaccagctgttctggctcaccgcgctgcctgcgctttccggcgcgacgctgcgcatcttctattcgttcctcgtgccgatcttcggcggccgccgcttcaccgcgatctcgaccgcgacgctgctgattcccgcgctcggaatgggcttcgcgctgcgcgaccccggcacgggctacccgacgctcctcatcctcgcgctgctctgcgggttcggcggcgcgaacttcagctcgtcgatggcgaacatcagcttcttcttcccgaaggcgaagaaagggctcgcgaccggcctgaacgcgggcatcggcaacctcggcgtgtcggtcgtgcagttcgtcacgccgctcgtgatctcggcgggcctgttcggcgcgctcgcgggcgatccgcagagcgtcgtcgcgcacggcgcgacgacgaacctgtggttgcagaacgcgggcttcgtgtgggtgccgttcatcgtcgtcgcgacgctcgccgcgtggttcgggatgaatgacatcgccgacgcgaaggcgtcgttcgccgagcaggcggtgatcttccgccgactgcacaactggctgatgtgctggctgtacgtcggcaccttcggttcgttcatcggcttctcggcgggcttcgcgctcctcacgaaggcgctcttcccgaacgtgaacccgaccgcgtacgcgttcatcggcccgctcgcgggcgcgctgatgcgccccgtcggcggatgggtgtccgaccgcatcggcggcgcgcgcgtgacgttctggaccttcgccgcgatgatcgcggccgtcggcggcgtgatcgcgacgctgccctcgggcggcgccgcgggcagcttcgcgggcttcctcgcgatgttcatcgtgctgttcgcgctcacgggcatcggcaacggctcgacgttccggatgatcccggtgatcttcctcaccgagcggcagcgcgccgcgcaaggccaggacgaggccgcgcgcaagcaggcggtgctcgacgccggcaaggaatcggccgcggtgctcggcttttcgggcgcgatcggcgcgtacggcggcttctttatcccgaagagtttcggcacgtcgctcgacatgacgggctcggccgtgccggcgctcgtgtgcttcatcgcgttctacgtgtcgtgcgtcgcgatcacctggtggttctacgcgcgccgcaacgcgtcgatgccgtgctga

SEQ ID NO: 28415 - protein, 461 aa, Burkholderia pseudomallei K96243
MSTSLLVRWDPENPAFWQAKGRPVAWRNLAISIPALMLAFVVWSLWSVVVVNLDRAGFHFSKNQLFWLTALPALSGATLRIFYSFLVPIFGGRRFTAISTATLLIPALGMGFALRDPGTGYPTLLILALLCGFGGANFSSSMANISFFFPKAKKGLATGLNAGIGNLGVSVVQFVTPLVISAGLFGALAGDPQSVVAHGATTNLWLQNAGFVWVPFIVVATLAAWFGMNDIADAKASFAEQAVIFRRLHNWLMCWLYVGTFGSFIGFSAGFALLTKALFPNVNPTAYAFIGPLAGALMRPVGGWVSDRIGGARVTFWTFAAMIAAVGGVIATLPSGGAAGSFAGFLAMFIVLFALTGIGNGSTFRMIPVIFLTERQRAAQGQDEAARKQAVLDAGKESAAVLGFSGAIGAYGGFFIPKSFGTSLDMTGSAVPALVCFIAFYVSCVAITWWFYARRNASMPC

SEQ ID NO: 28416 - DNA, 1458 bp, Burkholderia pseudomallei K96243
  CDS (1)..(1458): transl_table=11
ttgccctttttccaccatccgccgtcgaccggcatacgcgaggcttcaccgatggatactctgcgcacctccctccgaagcggcaactggcgctcgcttctcgcgtgtttcctttatttcgatacgggcttcaccgtctgggtgctgtacgggccgctcgcgccgttcatcagcaaggacatcgcgatgacggccgcgcagcaaggctttctcgtcgcggtgccggtgctcgcggcggccatcctgcgcgtgacgctcggcaacctttaccagtccgccgacggccggcgcatcgcgctgatgggcgtactgctgtccgcgctgcccgccgccgtgctgccgttcgtgcccggcacgccgtcgtacacgctgctcctcgtgctcggcgtgttcctcgggatcggcggcgcgagcttcgcggtcgcgctgccgatggcgggcagcagctatccgccgaaggtgcagggcctcgtgctcggcctcgccgccgcgggcaacatcggcgcggtgctcgacggcttcatgttcccgcacatcgcggccgcgctcggctggaagttctcgacgaccgccgcgctgccgctgctcgcgatcgcgggcttcgcgctcttcgcgtgggccgacgaccgcgcagagaaatcgggcagcgcggcgcgcgcgttcggcgcgttcgtgatcacgctcggcggtctcgtcgcgctcgtgctcgccgtgcacgcgggcctgttcggcgcgggcaaggcaggcgtgctgctgctgcccgtgatgggcgcgctgctcgcgatcgccgtgctgcccggccgctatcgcgcggtgctcgccgagcgcgacacgtgggtcatcatgctgatctacagcatcacgttcggcggcttcgtcggcatgtcgtcgtacgtgacgctgctgctgacgacgctctaccagatgccgaagatcgaagcgggcctgttcatgtcgctgctcgcgtttctcggcgcgatcgtgcgcccgttcggcggccacctcgccgaccgcatcaccggcgtgcgcgcgctcatggcgatcctcgccgcgatcgccgcggccgacttcgcgttcgcggccgtgatgccgccgctcgcgggcggcatcgcgctgctcgtgtgcctgtacgtcgcgttcggcctcggcaacggctcgacgttccagctcgtcccgcaccgctggcagggcaagacgggcctgctgtccggcatcgtcggcgcggcgggcggcatcggcggcttctatctgcccgtcgtgatgggcatcgcgaaggaaagcacgggcagctatcagctcggcttcgcgacgttcggcgcgctcgcgacctgcgcgctcgtcgcgctcgcgatgctgcgcgcgcagtggctgcgctgggcggcgcccgagctcgccgcggccgagccgtcggcgggcgccgggatgccgatcggcggcgcggcgcgcgtcggcgactga

SEQ ID NO: 28417 - protein, 485 aa, Burkholderia pseudomallei K96243
MPFFHHPPSTGIREASPMDTLRTSLRSGNWRSLLACFLYFDTGFTVWVLYGPLAPFISKDIAMTAAQQGFLVAVPVLAAAILRVTLGNLYQSADGRRIALMGVLLSALPAAVLPFVPGTPSYTLLLVLGVFLGIGGASFAVALPMAGSSYPPKVQGLVLGLAAAGNIGAVLDGFMFPHIAAALGWKFSTTAALPLLAIAGFALFAWADDRAEKSGSAARAFGAFVITLGGLVALVLAVHAGLFGAGKAGVLLLPVMGALLAIAVLPGRYRAVLAERDTWVIMLIYSITFGGFVGMSSYVTLLLTTLYQMPKIEAGLFMSLLAFLGAIVRPFGGHLADRITGVRALMAILAAIAAADFAFAAVMPPLAGGIALLVCLYVAFGLGNGSTFQLVPHRWQGKTGLLSGIVGAAGGIGGFYLPVVMGIAKESTGSYQLGFATFGALATCALVALAMLRAQWLRWAAPELAAAEPSAGAGMPIGGAARVGD

SEQ ID NO: 28418 - DNA, 1275 bp, Burkholderia pseudomallei K96243
  CDS (1)..(1275): transl_table=11
atgggctcacggcacggttccggcgcgttcgaccccgcgcccgcgattcccgcacgcgcctggtcggtgctcttcgcgagcacgctcgcgtttctcgtgtgtttcgtcgtctggatgatgttcggcgtgctcggcgtcccgttgcgcgaggatctgcatctgaattcgaccgagttcgggctcctcacgtcgacgcccgtgctgacgggcgcgctgatgcggctgccgctcggcgcatggaccgaccgcttcggcgggcgcatcgtgatgacggtgctgctcgtcgtctgctcggtgcccgtctatggggtcagctatgcgaacgcgctgtggcagtttctgctgatcgggctgttcctcggctgcgtcggcgcgtcgttcgcggtcggcacgccatacgtcgcgcgtttcttcccgccgcggcggcgcgggctcgcgatgggcgtgttcggcgcgggcaccgtgggcgcggcggtgaacctgttcgtcacgccgctcttgctcgccgcgtacggctggcgcgtcgtgccgcgcgtctacgcgctcgcgctcgtcgtcaccgccgcggtcttctggttcgcgtcggcgcccgatcccggcgcgggcgagcagaagggctcatgggtcgattcgttcaaggtgctgcgcgatccgcgcgtctggaagctttgccagtactactcgatcacgttcggcggcttcaccgcgctgtcgctgtggattccgcagtacctgaagaacggctatgggatgtcgctcgtcgcggcttccgcgttcgcggcgggcttttcgctgccgggctcggtgctgcgcgcgctcggcggcgcgctcgccgaccgctacggcgcgcacgcggtcacctggtgggggctgtgggtcgcgtggatttgcctgttcctgctgtcctatccgccgaccgacctcgtgattcacacgatcgacggcaccgcgacgctgcggcttcatgtgccgctcgcggcgttcgtcgtgctgacgttcgtgctgggcgcggtgttcgcgttcgggatggcgtcgacgttcaagtacgtcgccgacgatttcccgaacaacatgggcgtcgtcaccggcatcgtcgggctcgcgggcgggctcggcggctttctgctgccgatcatcttcggcgcgctcgtcgatctgctgcgcgtgcgctcgacgtgcttcatgttcctgtacgggatcgtctgggtgtcgctgatcctgctgtacctcgcggaaatccggcgcgcgcccgtcacgggcgcgcccccgcgctga

SEQ ID NO: 28419 - protein, 424 aa, Burkholderia pseudomallei K96243
MGSRHGSGAFDPAPAIPARAWSVLFASTLAFLVCFVVWMMFGVLGVPLREDLHLNSTEFGLLTSTPVLTGALMRLPLGAWTDRFGGRIVMTVLLVVCSVPVYGVSYANALWQFLLIGLFLGCVGASFAVGTPYVARFFPPRRRGLAMGVFGAGTVGAAVNLFVTPLLLAAYGWRVVPRVYALALVVTAAVFWFASAPDPGAGEQKGSWVDSFKVLRDPRVWKLCQYYSITFGGFTALSLWIPQYLKNGYGMSLVAASAFAAGFSLPGSVLRALGGALADRYGAHAVTWWGLWVAWICLFLLSYPPTDLVIHTIDGTATLRLHVPLAAFVVLTFVLGAVFAFGMASTFKYVADDFPNNMGVVTGIVGLAGGLGGFLLPIIFGALVDLLRVRSTCFMFLYGIVWVSLILLYLAEIRRAPVTGAPPR

SEQ ID NO: 28420 - DNA, 1275 bp, Methylococcus capsulatus str. Bath
  CDS (1)..(1275): transl_table=11
atgaacctaaaagaattcaagcaggccggacattggccgaccctgctctccgcctttctctatttcgacgtgtccttcatggtctgggtgatgctcggaccgctttccctctatatcaccaaggacctggcgctgccgctcgaagagaagttcaccatcgtcgccatacccatcctctccggcgcggtgttccgcatcatcctgggctccatggccgaccatgtcggccccaagccgaccggcatcctggcccaactgctggtgatcctgggccttgcctatgtgttctggttcggtctgcactccaagctggaagtggagctgctaggtctgctgctgggcgtggccggcgccagcttcgccgtggccctgccgcaggccagccgctggtatccgcccaagttccagggggtggtgatgggcatcgccggggccggcaacatgggcgtggtgctcgattccatgatcgtgccctggctggccgagaaattcggctggcaggcggtgttcggcttcctgctcattcccttggtgatagtcctgaccgtctacgcggtgctggtgaaggatgccccggacaagcgcgcgccggtcaccctggcgaactatgcctcagtcatgaaagacccggacgcctggtggttcatgttcttctactccatcaccttcggaggcttcgtcggtctcggcaacgccctgccgctgtacttcacccactggtatcacgtctccggcatcgcggccggcatgatggtcgccatcgtggtgttcgccggctcgatgttccgtccggtcggcggctatctcgccgaccgcatcggcggcatccgcgccctccagatcctgttcgtggtggtgtcgctggcctacctggcgatctcgttcatgcccgaaggcccggcacctgaagcgctgggcaccgccaaggtggccggctggagcttgggggaactgccggcacaaggctggggagcggtcgccgtcttcttcgccggtaccctggcgctggggatgggcaacggctcggtgttccaactggtgccgctgcgcttccgcaaggaaatcggggtggtcaccggcctcgtcggctgcgccggcggcgtgggcggcttcttcctggcgaaaaccctcggcctgtcatgggaaatacagcacggcttcgcactcggattcagcgtattcgccgtccttccgctgctcggcctgggcgggctgatgctggtgaggaaacgctggcgcacgacctggggcgcggtttccggggcgcgggtctga

SEQ ID NO: 28421 - protein, 424 aa, Methylococcus capsulatus str. Bath
MNLKEFKQAGHWPTLLSAFLYFDVSFMVWVMLGPLSLYITKDLALPLEEKFTIVAIPILSGAVFRIILGSMADHVGPKPTGILAQLLVILGLAYVFWFGLHSKLEVELLGLLLGVAGASFAVALPQASRWYPPKFQGVVMGIAGAGNMGVVLDSMIVPWLAEKFGWQAVFGFLLIPLVIVLTVYAVLVKDAPDKRAPVTLANYASVMKDPDAWWFMFFYSITFGGFVGLGNALPLYFTHWYHVSGIAAGMMVAIVVFAGSMFRPVGGYLADRIGGIRALQILFVVVSLAYLAISFMPEGPAPEALGTAKVAGWSLGELPAQGWGAVAVFFAGTLALGMGNGSVFQLVPLRFRKEIGVVTGLVGCAGGVGGFFLAKTLGLSWEIQHGFALGFSVFAVLPLLGLGGLMLVRKRWRTTWGAVSGARV

SEQ ID NO: 28422 - DNA, 1470 bp, Nocardia farcinica IFM 10152
  CDS (1)..(1470): transl_table=11
ttgttgagcacgctgacgcgtaaccgcaacatcgagcactgggatgccgaagacgtcgaggcatgggaggccggtggcaagcacatcgcccggcgcaacctgatctggtcggtcttcgccgagcacgtcggattctcgatctggtcgatctggtcggtgatggtgctgttcatgcccgccgagaagtacggcatcgacgcggcgggtaagttcttcctgatggcggtgccgaccctggtcggtgcggtgctgcgcattccctacaccgtcgccaccgcccgcttcggtggccgcaactggaccgtcttctcggccttgctgctgctggtgcccacgctgctgacgctgtacttcatcaaccagcccggcacctcgtacaccaccttcctggtggtggcggccttcgccggtgtcggtggcggcaacttcgcctcgtcgatgaccaacatcaacgccttctacccgcagcggctcaagggctgggcgctcgggctgaacgccggcggcggcaacatcggcgtgccggtcatccagctgatcggcctgctggtcatcgccaccctcggcaacgagtacgccagcctgatctgcgcgatctacctggtgctgatcgcgatcaccggcctgggcgccgcgctgtacatggacaacctgcgcaaccagaaggcggacctgtccgacatggtgaccgcgctgaaagtgccgcagtcctgggcgatcgcgttcctctacatcggcacgttcggatcgttcatcggctacagcttcgccttcggccagatcctgcagatcagcttcaaggccggtggcgacaccgccgcgcaggccgcgctgcacgccgcccagatcgccttcatcggcccgctgctcggctcgctggcccgcccctacggcggcaagtgggccgaccggatcggcggcagccgcgtcgcgctggtcaccttcggcgcgatgatggccgcggccgcgctggtgatcggggccagcaccgtggccgacggcaacggcggcgtcgcaggcggcgcggtgatggcggtgctcgtgatcggtttcgtcgccctgttcgtgctctcgggcatcggcaacggcgcggtcaccaagatcatcccgtcggtgttcgacgccaagtcgcgcagcctcgacctgagccccgccgatcgggccgcctggtcgcagaacacctccggcgcgctgatcggtttcgtcggcgccatcggagcgctgggcggcgtcggcatcaacctggtcctgcgctcctcctacgcctcgaccaactcggccaccaccgcgttctgggtcttcctggccttctacgtggtgtgcgccgcggtcacctggctggtcttcctgcgccgtccgagcctgcgctcggtggccgacgacgatgtggtcgtcgaggccgaggccctcgttcgccgcgccgaacaggccgttcccgccacctcgtccgtcccgtcggcccgcgcctga

SEQ ID NO: 28423 - protein, 489 aa, Nocardia farcinica IFM 10152
MLSTLTRNRNIEHWDAEDVEAWEAGGKHIARRNLIWSVFAEHVGFSIWSIWSVMVLFMPAEKYGIDAAGKFFLMAVPTLVGAVLRIPYTVATARFGGRNWTVFSALLLLVPTLLTLYFINQPGTSYTTFLVVAAFAGVGGGNFASSMTNINAFYPQRLKGWALGLNAGGGNIGVPVIQLIGLLVIATLGNEYASLICAIYLVLIAITGLGAALYMDNLRNQKADLSDMVTALKVPQSWAIAFLYIGTFGSFIGYSFAFGQILQISFKAGGDTAAQAALHAAQIAFIGPLLGSLARPYGGKWADRIGGSRVALVTFGAMMAAAALVIGASTVADGNGGVAGGAVMAVLVIGFVALFVLSGIGNGAVTKIIPSVFDAKSRSLDLSPADRAAWSQNTSGALIGFVGAIGALGGVGINLVLRSSYASTNSATTAFWVFLAFYVVCAAVTWLVFLRRPSLRSVADDDVVVEAEALVRRAEQAVPATSSVPSARA

SEQ ID NO: 28424 - DNA, 1485 bp, Nocardia farcinica IFM 10152
  CDS (1)..(1485): transl_table=11
atgaccgccacagccgcagccaccggccggcagccgggcacaccggtgttcacgcaccacacgcgcggacgctggctcgaacactgggagccggacaatcccgaattctgggaagccggcggaaagcgcaccgcgcgaaagaatctcgccttctcggtgttcgccgagaatctgggcttcagtgtctgggtcatctggggcaccgtcgtcaccagcatgggcgcggcgggcttcccgttcctggccggactcggccagggcaacccggtcgcggtgagcaacgcactgctgctcacctcgacaccgacgctggtcggcgcggccctgcgcattccctacaccttcgccatcccacggttcggcggccgcgccttcaccgcgttcagcgcggcgatgctgctggtaccgaccctgggcctggcctggttcgtcaaccagccgggcaccccgatgtgggtgttcatggtgctggcggcgctggcgggattcggcggcggcaacttctcctcgtcgatggccaacatctcgttcttcttccccgagggcaagaagggcgcggcgctcggaatcaacgccgccggaggcaatctcggcgtcgcgcagacccagctggtgctgccgctgctgatcaccctcggcacccacctcaccgcgaaggaccccgcaggctaccgtttcggcatcacgctctcggtgctggtgtgggtgccgttcatcctgatcgccaccgtcggcgcgctgcgctacatggacagcatcgccaccgcgaaatccgatgggaagtcctacaagctggcgctgaccaaccggcacacctgggtgatgtcgttcctctacatcggcaccttcggctcgttcatcggcttctccttcgccttcccgacgctgatcaaggccaacttcccgagcctggccgggatcggctggatcaccacgctgggcaacctcgccttcctcggcgcgctggtcggctcgttcagccgtccgttcggcggctggatctccgacaaggtgggcggggcacggatcaccgtgttcgtcttcggcggcatggcggtcgcggtggccgcgatcatggcggcgctggagctgaagagcttcccgctctacctgatcgccttcctggtgctgttcgtgctcaccggcgtcggcaacggctcgacctaccggatgatcccgtccatcttcagcgcggaatccaagaagtacgccgccgaacacggcctcgacccggccgacgcggcggcctcggccaagcggcaggcgggcgcggcgatcggcgtgatcggagcgatcggcgcctccggcggctacctgctccagcaggcactgcggttgtccaacatcaacttcggcagcatggcgcccgcgttctgggcctacgccgcggcgttcctggtgatggccggggtgacctggttctactacctgcgctcgtcgttcgcgatcggccggttcacctcgctggcctacgccaacgtatga

SEQ ID NO: 28425 - protein, 494 aa, Nocardia farcinica IFM 10152
MTATAAATGRQPGTPVFTHHTRGRWLEHWEPDNPEFWEAGGKRTARKNLAFSVFAENLGFSVWVIWGTVVTSMGAAGFPFLAGLGQGNPVAVSNALLLTSTPTLVGAALRIPYTFAIPRFGGRAFTAFSAAMLLVPTLGLAWFVNQPGTPMWVFMVLAALAGFGGGNFSSSMANISFFFPEGKKGAALGINAAGGNLGVAQTQLVLPLLITLGTHLTAKDPAGYRFGITLSVLVWVPFILIATVGALRYMDSIATAKSDGKSYKLALTNRHTWVMSFLYIGTFGSFIGFSFAFPTLIKANFPSLAGIGWITTLGNLAFLGALVGSFSRPFGGWISDKVGGARITVFVFGGMAVAVAAIMAALELKSFPLYLIAFLVLFVLTGVGNGSTYRMIPSIFSAESKKYAAEHGLDPADAAASAKRQAGAAIGVIGAIGASGGYLLQQALRLSNINFGSMAPAFWAYAAAFLVMAGVTWFYYLRSSFAIGRFTSLAYANV

SEQ ID NO: 28426 - DNA, 1323 bp, Haloarcula marismortui ATCC 43049
  CDS (1)..(1323): transl_table=11
atgggactgatcaagatgacgaagtaccggacgctgctgctggcgaccatcggcttcaatttctcgttccttatttggttctcgttcgcgccgtttactggcccgatggccgaggagttcggactgtcgacggcggagatcgggattctggcgagttcggccatctggatggctccgtttggccgaatgctcaccggctggctctcggataagttcggtgcaccggccatctttgccatcgtgctggcctacgttggtgtgttctcgatcgggagcgccttcgcacaggactactccgtgttcttcgtgctccgactcatcgtggcgacggccggcatcacgttcgtcatcggcatccagcacgtcgccgagtggttcgaggaggagaacctcggtctggcggagggcatctacgccggtgtcgggaacgccggcgccgccggcggcgcgctgattctccctcgcgtgttcgggtccgggtggaacgggccgctgttctcgaccaactggcgagccgcgttcttctacaccggcatcgtctccatcctcctcgcaatcgcctactacacactcggcgaggccgccaagaccgaggcgaaacgccaggcgaccaaagagaacaccaacttcaaaggctggctgcacacggccacgcggtacggcactgtcgtccttgccgccgcgtacatcatgtcttttggcctcgaactgtcgatgaacgggtggctcgccacctactaccgcgaggcgttcaaccaggacaacctcgtcatcgcgagcaccttcgctgcgacgttctcgattgctgcgggactgctccggccctttggcggctacggcagtgacctgctggcccgcaaggagaagaacctcctgccgttcttcaagggccagtaccgcgagcagtggacgttcctcgggctctgctttattgtggtgatgatgttcgccatgacgctggccggcctctccggggtcctgctgaacgcggtcgtcatcggcttcctcgtgggcacgggctgtgcctgggctgagggcgctatcttcgcgcaggtgcctgcgatgttccccaacgactctggctcggtcgccggtgtcgtcggcggcgtcggcactgtcggtgggattgtctacccgctgttttactccgcgccgtggttggcgaacctccacctggggtattccgtggccgccgttaccatgattccgattgtgttgctgtctgcatgggtgttccagccggaaatcgcgaaagtcgctaacacggctgggttcgtcggaagcacgcaggaaggcaccaccgtcgcctccggcgacgactga

SEQ ID NO: 28427 - protein, 440 aa, Haloarcula marismortui ATCC 43049
MGLIKMTKYRTLLLATIGFNFSFLIWFSFAPFTGPMAEEFGLSTAEIGILASSAIWMAPFGRMLTGWLSDKFGAPAIFAIVLAYVGVFSIGSAFAQDYSVFFVLRLIVATAGITFVIGIQHVAEWFEEENLGLAEGIYAGVGNAGAAGGALILPRVFGSGWNGPLFSTNWRAAFFYTGIVSILLAIAYYTLGEAAKTEAKRQATKENTNFKGWLHTATRYGTVVLAAAYIMSFGLELSMNGWLATYYREAFNQDNLVIASTFAATFSIAAGLLRPFGGYGSDLLARKEKNLLPFFKGQYREQWTFLGLCFIVVMMFAMTLAGLSGVLLNAVVIGFLVGTGCAWAEGAIFAQVPAMFPNDSGSVAGVVGGVGTVGGIVYPLFYSAPWLANLHLGYSVAAVTMIPIVLLSAWVFQPEIAKVANTAGFVGSTQEGTTVASGDD

SEQ ID NO: 28428 - DNA, 1200 bp, Geobacillus kaustophilus HTA426
  CDS (1)..(1200): transl_table=11
ttgaaagtttgggaggggcttttcatgaataaacaaaaggcgctgctgccgattacgacgttcgccatgatgttttcattcgccgtgtgggccgtgttttcgccgcttgcgagtacgtttcaacaaatgtacgggctgacatcgacgcaaaaaagcattttggtcgccattcccgttttgctcggttcggtgatgcggttgccgcttggcatttggacggaccggatcggcgggcgcaggctgttttcgctgctgctcttgtttcttgtcattccgcttgttggcgcagggtttgcagattcgtatgcgatgcttctgttttgggcgtttttcatcggcatggccggaacgtcgttcgccatttcggtgacgttcgtttcccgcttgactccgccggaaaagcaagggacggcgcttgggattaacgcgatgggcaacttcggcacggcggttgctgcgttttccgttccatcgattgccgcagcgtttggtgtgccttgggctttttgggggatgatcattccggttgtcgtcatgctcgttctcgtttggtttttcacaccggatatgccgaaaccgaaacaacaaaaaacggtgcgtgaatcgctgtcggtattgaaatataaacatacgtggacgttgtcgctcttttacttcgttacgttcggggcgtttgtcgctttcggcatttacttgccgtcgctgctcgttgacttgtatgggttgacgccggtggatgctgggatgcgcgcggctgggtttactgtactcgctacgcttgcgcggccagtcggcggctatcttggcgataaaatcggtgctgaacgggtgttgacgttcgtctacgctggaatgacaatcggcgcgttggtgatcgcgtttggaatggaaaatatttgggtgatgacagcggcttgtttgtttgtggccgtgatgtctgggctgggcaacggtgcggtgttcaaactcgtgccgcagctgttcccagccgaaacgggcgccgtcaccggccttgtcggggcctggggcggacttggcggcttttttccgccgattgtcatggggatcattaaagatgcaacaggttcgtacgtgctcagttttctgctccttagcttgtttacccttatttgcttcttgctgaaccggctcgtatttggcaaaaaagccggcgaaccggcgaagcggttcgcttcttga

SEQ ID NO: 28429 - protein, 399 aa, Geobacillus kaustophilus HTA426
MKVWEGLFMNKQKALLPITTFAMMFSFAVWAVFSPLASTFQQMYGLTSTQKSILVAIPVLLGSVMRLPLGIWTDRIGGRRLFSLLLLFLVIPLVGAGFADSYAMLLFWAFFIGMAGTSFAISVTFVSRLTPPEKQGTALGINAMGNFGTAVAAFSVPSIAAAFGVPWAFWGMIIPVVVMLVLVWFFTPDMPKPKQQKTVRESLSVLKYKHTWTLSLFYFVTFGAFVAFGIYLPSLLVDLYGLTPVDAGMRAAGFTVLATLARPVGGYLGDKIGAERVLTFVYAGMTIGALVIAFGMENIWVMTAACLFVAVMSGLGNGAVFKLVPQLFPAETGAVTGLVGAWGGLGGFFPPIVMGIIKDATGSYVLSFLLLSLFTLICFLLNRLVFGKKAGEPAKRFAS

SEQ ID NO: 28430 - DNA, 1203 bp, Geobacillus kaustophilus HTA426
  CDS (1)..(1203): transl_table=11
atggcgaggaaatcgttttggcgcgtcgggcatgcgccgacgcttttatcgtcgtttttgtattttgatatcagctttatgatttggaacttgcttggcgcgcttggtgtatttgtcgctgagtcgtttgcgctcacgccggcggaaaaagggatgatggtcgccattcccgtgttgggcggggcgctgcttcgcattccgatggggatgctcgccgaccgctggggcgggaagcgggctggtctgcttggcatggcggtgacagctgtgccgcttgtgtgggggtggcagttcgctgaccggatgtcggatgtgtatgcgctcggatttttattaggggtgggcggagccagctttgccgttgcgttgccgcttgcgagccgctggtatccgaaagaatatcaagggctggccatggggatcgctggggccggaaacagcgggacggtgctggcaacgctgtttggcccgcggctggcggaggcgtatgggtggaacgcggtgttcggattggcgctcgtcccgctagttgttgtcttttttctattcgcttggctggcgcgtgaatgtccaacagcggtgaaacccgtttcgttgcgtgaatacggagccgttctccgtcgaaaagaagcatggctgttttgtttcttctacagcttgtcattcggcggatttgtcgggctgacgggatacttaggcattttcttctttgatgaatacggcgtcagtaaagtcacggccggcgatttcgtcaccgccgtcgtgtttgcgggcagtttcatccgcccgattggcggttatctcgctgaccggatcggcggaatgcggcttctttccttgttgtttgccgttggtgcggttttgcttgcgttcatcggcgcattgccgccccttctcatcgtgttcggattgatggtcgttctttttctttgctttggtgcggcaaacggtgctttgttccaagtcgttccaacctggtttccgaaagaagtcggtttgttgacgggcatcatcggcgccgctggcggactgggagggtttttgctgccgaacgtgctcggggtgatgaagcagtggaccggctcttcggcgtatgggttttggatgcttgctttcgttttcgcgatcgcggtgatggctgctcgtcgccttcaagggacgacggttacgatcgaacatttctctcaaaaagcagcagaatga

SEQ ID NO: 28431 - protein, 400 aa, Geobacillus kaustophilus HTA426
MARKSFWRVGHAPTLLSSFLYFDISFMIWNLLGALGVFVAESFALTPAEKGMMVAIPVLGGALLRIPMGMLADRWGGKRAGLLGMAVTAVPLVWGWQFADRMSDVYALGFLLGVGGASFAVALPLASRWYPKEYQGLAMGIAGAGNSGTVLATLFGPRLAEAYGWNAVFGLALVPLVVVFFLFAWLARECPTAVKPVSLREYGAVLRRKEAWLFCFFYSLSFGGFVGLTGYLGIFFFDEYGVSKVTAGDFVTAVVFAGSFIRPIGGYLADRIGGMRLLSLLFAVGAVLLAFIGALPPLLIVFGLMVVLFLCFGAANGALFQVVPTWFPKEVGLLTGIIGAAGGLGGFLLPNVLGVMKQWTGSSAYGFWMLAFVFAIAVMAARRLQGTTVTIEHFSQKAAE

SEQ ID NO: 28432 - DNA, 1389 bp, Salmonella enterica subsp. enterica serovar Paratyphi A str. ATCC
  CDS (1)..(1389): transl_table=11
atgacacgacaaaacgagaattataaccgttatctcttgagtgactggcgacccgaaaatccagccttctgggagaataaagggaaaggcatcgccagaagaaacttatggatttcagtaagttgtttgctcctggcattttgcgtctggatgttgtttagcgctgttgccgtcaacctcaataaaattggatttaattttaccaccgaccaactctttttattaaccgcattaccttctctttccggcgcaatattacgcgtcccctactcctttatggtgccactgtttggtggccgtaaatggaccgtattaagtaccgtaatattgattattccctgcgcctggctgggattcgccgtgcaaaatcccgccacccctttcggggtatttatgctcatcgctctgttgtgcggttttgcgggggcaaacttcgcgtccagtatgggcaacatcagttttttctttccaaaagccagacaaggtagcgcgttgggtattaacggcggactgggaaatcttggcgtcagtgtgatgcagttgcttgcgccgctggttatttttctgccgatatttacttttttaggcgtccggggcgtgccgcaacctgatggctccctgctcgccctcactaacgccgcctggatctgggtgccgttactggctgtcgcgacgcttgccgcctggtttggtatgaacggtatcggcagttcaaaagcgtctgtcgcctcgcaattgccggtgctaaaacgtctgcacctgtggctgcttagcctgctgtacctggcgacattcgggtcattcatcggcttttccgcaggtttcgccatgctcgccaaaacgcaatttcccgacgtaaacattctgcaactggcgttctttggcccctttatcggcgcgctggcgcgttcggcaggcggcgtgatctccgataaattcggcggcgttcgcgtcacgctcattaattttatctttatggcgctgtttaccgccctgctattcctcacgctgccaggctccggcgcaggcagctttagcgcgttctatcttgtttttatgggcctgtttttgacagcgggtctcggcagcggttctaccttccagatgattgcggtgatcttccgtcagatcacgctctacaacgtcaaactgcgcggcgggagcgatgagcaggcgcagcgcgaagcggtgacggataccgccgccgcactcggttttatctccgctattggcgctgtgggcggcttctttattccaaaagcgtttggcacctctttggccttgaccggctcgccggtgggcgccatgaaaatctttttgctgttttacatcgcttgcgtcctgctgacctggctggtctacgggcgtcgtaagcctaaacaacaataa

SEQ ID NO: 28433 - protein, 462 aa, Salmonella enterica subsp. enterica serovar Paratyphi A str. ATCC
MTRQNENYNRYLLSDWRPENPAFWENKGKGIARRNLWISVSCLLLAFCVWMLFSAVAVNLNKIGFNFTTDQLFLLTALPSLSGAILRVPYSFMVPLFGGRKWTVLSTVILIIPCAWLGFAVQNPATPFGVFMLIALLCGFAGANFASSMGNISFFFPKARQGSALGINGGLGNLGVSVMQLLAPLVIFLPIFTFLGVRGVPQPDGSLLALTNAAWIWVPLLAVATLAAWFGMNGIGSSKASVASQLPVLKRLHLWLLSLLYLATFGSFIGFSAGFAMLAKTQFPDVNILQLAFFGPFIGALARSAGGVISDKFGGVRVTLINFIFMALFTALLFLTLPGSGAGSFSAFYLVFMGLFLTAGLGSGSTFQMIAVIFRQITLYNVKLRGGSDEQAQREAVTDTAAALGFISAIGAVGGFFIPKAFGTSLALTGSPVGAMKIFLLFYIACVLLTWLVYGRRKPKQQ

SEQ ID NO: 28434 - DNA, 1332 bp, Idiomarina loihiensis L2TR
  CDS (1)..(1332): transl_table=11
atgggtaaagtttcgcaagcgaatacaatgagcgatgttcgtgattacctcggttctcgcgcgctttcccgtgggttaacgctgagtgtgttattgcttggtgtcacattttgggcaagctggagcgttatcgttgtattactggcaaaatcaaaccttaacttaagcccggttcagttgctgtcattagtcgctattgctggggcaagcggtgctgtgtccaagttgttaggaactttgctagtcaatatcctcggacgatggatgcctacagttattgccactcttatgctgttaatgagtattatcagttatgtgcaattttcagctgtgcagctgagctatcctatattggttgctttagctgcggggtcaggcatgggctgcatgatgtttgcgcctgcattcgacttaacccgccagtcaaaggtcatgatccccttgccgttgtccatgagcctggttatcggcatgatgatattctctctgtttttagctcagctggttgtgcctctgctggctacctggcagttagctgcggtagattccgctctcatactcgagcgcagcagtggtcattttttcgctcgcatcgaggccggccagactattttgctaaacaatttcagttttgtctgggctattctttttggcctgacagccattttgagcgccgcggctgctttattgtcaaaccacaaacagtcattacccaaagtcactttaagaaagctgctggctcacaatggtcacgtctggtattgcagtattctgtacaacatgacgtttggtagctttattggctttactatggcattgccactgatgctggaatttgtgtttggttacagcaccttaattctggtttggatggggccttttattgctctgttagccaggcctttcggacgttggctggcgactatttttggtggcgctctgataacgcaagtgagtctgttactgatgatgatatttggggctttggctggccgctacatgtattttgctcaacatggtgccactgaactctactttgagcctttcttcatcagcatgctgggactgatttttaccagcgccttggggaacggttcagtcgttgtcagtatgaccaaagtctttcccagaacttatactcacagagtgttaatttgggcgggcactatcgctatgctgggcgcggtttatttgcccttgcgctttgcctgggctttgcagtcgcaaaacatggacaccgtttatatcgacttcattgttttctatgttatcgggctcttgttaaacggttttgtctatttgcgccgacgcggccagttctataacccttaa

SEQ ID NO: 28435 - protein, 443 aa, Idiomarina loihiensis L2TR
MGKVSQANTMSDVRDYLGSRALSRGLTLSVLLLGVTFWASWSVIVVLLAKSNLNLSPVQLLSLVAIAGASGAVSKLLGTLLVNILGRWMPTVIATLMLLMSIISYVQFSAVQLSYPILVALAAGSGMGCMMFAPAFDLTRQSKVMIPLPLSMSLVIGMMIFSLFLAQLVVPLLATWQLAAVDSALILERSSGHFFARIEAGQTILLNNFSFVWAILFGLTAILSAAAALLSNHKQSLPKVTLRKLLAHNGHVWYCSILYNMTFGSFIGFTMALPLMLEFVFGYSTLILVWMGPFIALLARPFGRWLATIFGGALITQVSLLLMMIFGALAGRYMYFAQHGATELYFEPFFISMLGLIFTSALGNGSVVVSMTKVFPRTYTHRVLIWAGTIAMLGAVYLPLRFAWALQSQNMDTVYIDFIVFYVIGLLLNGFVYLRRRGQFYNP

SEQ ID NO: 28436 - DNA, 1692 bp, Azoarcus sp. EbN1
  CDS (1)..(1692): transl_table=11
atgtcacctgcaaaactgcgtccgattaccgcgactccgggagctgccggcgtaagtccgggagagcgtccgcgcggtccggacatcgccgaatggcatcccgaggatgcgcagttctgggcgcgcgaaggcagccgcattgcgaaccgcaacctgtggatctcgatccccagcctgctctgtggcttcgcggtgtggttgatgtggggcatcatcaccgtgcagatggccaatgcaggcttccccttcacgcctgaccagctgttctcgatagcggcaatttccggcctgtccggcgcgacgctgcgcatcccggcgtcgttcttcatccggctctgcggcggtcgcaacacggtgtggctgacgaccgtgctgctgatcatcccggccctcggcaccggcattgcgctgcaggacaagaacactccgctgtgggtcttccagctgatggcgctgctgtcgggcatcggcggcggcaacttcgcctgttcgatggcgaacatcagcaccttcttcccgaagcgcctgcagggcacggcgctggggctgaacgccggtctcggcaacttcggcgtcacgacctcgcagatcctgatccccgcagtgatgacgctgggcctgttcggcgcaatcggcggcgacgcgatcccgctcgcgaaggattcggcgacgctgatcgggaagatcgccgccggcaccccgactttcgtgcagaacgccggcttcgtgtggctgctgctgctcgtgccactcgccgtgatcggctggttcggcctgaacaacctcaaggtcgtatcgccgaacaccggctcgaccggcgtggcgatgggccgcatcctgctgatgtacggtatcgcgctcgccgtctccggcatcggcctgtacctctacctgccgacccccaacggctccggactgctcgccggcaacggcatgtggatcgtgttgccgctggtgatcttcggcacgctgttcgccctcaaggcggtcgcgaccggcgaaatgaagacgaacctgaacaagcagttcgccatcttcggcaacaagcacacctggtcgatgactgcgctctacgttgtgactttcggctcgttcatcggcttctcgatggcgctgccgctgtcgatcacggtgatcttcggcaacacgcacgtgttcgatccggcggcaaatgtctgggtgcatgcgaagaacccgaacgcgccctccgcgctgatgtacgcatggatcggccccttcgtcggcgccctgatccgaccggtcggtggctggatctccgacaagctcggcggctcgatcgtcactcaggtgatctcggtcgtgctggtcggcgcatcggcagtgaccggctacgtgatgcatctcgcctaccagtcggccacgcccgagagctacttcctcgccttcatgctgcttttcatcctgctgttcgccgcctcgggcatcggcaacggctcgaccttccgcaccgtcggcttcgtcttcgaccaggaccagcgcggcccggtgctcggctggacctcggcggtcgcggcctacggttccttcatcgcgccggtcgtcatcggcgggcagatcaaggccggcacgccggaaaacgcgatgtacggcttcgccgtgttctacgcggcgtgtctcgtcctcaactggtggttctatctgcggaagaacgcctacatccgcaacccctga

SEQ ID NO: 28437 - protein, 563 aa, Azoarcus sp. EbN1
MSPAKLRPITATPGAAGVSPGERPRGPDIAEWHPEDAQFWAREGSRIANRNLWISIPSLLCGFAVWLMWGIITVQMANAGFPFTPDQLFSIAAISGLSGATLRIPASFFIRLCGGRNTVWLTTVLLIIPALGTGIALQDKNTPLWVFQLMALLSGIGGGNFACSMANISTFFPKRLQGTALGLNAGLGNFGVTTSQILIPAVMTLGLFGAIGGDAIPLAKDSATLIGKIAAGTPTFVQNAGFVWLLLLVPLAVIGWFGLNNLKVVSPNTGSTGVAMGRILLMYGIALAVSGIGLYLYLPTPNGSGLLAGNGMWIVLPLVIFGTLFALKAVATGEMKTNLNKQFAIFGNKHTWSMTALYVVTFGSFIGFSMALPLSITVIFGNTHVFDPAANVWVHAKNPNAPSALMYAWIGPFVGALIRPVGGWISDKLGGSIVTQVISVVLVGASAVTGYVMHLAYQSATPESYFLAFMLLFILLFAASGIGNGSTFRTVGFVFDQDQRGPVLGWTSAVAAYGSFIAPVVIGGQIKAGTPENAMYGFAVFYAACLVLNWWFYLRKNAYIRNP

SEQ ID NO: 28438 - DNA, 1377 bp, Azoarcus sp. EbN1
  CDS (1)..(1377): transl_table=11
atgcttttggcgaatggcgggcagcttccgcaaggcatacgcttcgtcccggcctggagcgatctccgctccacattcgaggatggaaggaacatgccctcacaacgtcaaaagcagttctccgttctgctgatgagcaccacggcattcacaatgtgctttgccgcgtggatgctgttcgccgtgatcgggatcccgatcaaggcgcagttgggcctcaatgaaacccagttcggcctgctcgcggcgactcccgtgctgaccgggtcgctggtacgtctgccgttgggactgttgaccgacaagctcggcggccgggtggtgttcttcctgctgatgctggcggcggtcgtgccgatctacctgatcggcgaggcaacgcaatactggcagttcctggtcgccggcctcttcgtcggcctcatcggcggttcgttctcggtcggcatcgcatactgcgcgcgctggttcgagcgcaagaaccagggtttcgcaatgggcgtgttcggcgccggcaactcgggcgccgccctgacgaagttcgtcgccccggcgctggtcgttgcctacggctggcagttcgtgccgaaggcattcgcggtcgcgatgctgatcatcgcgatcgcgttctggttcttcacttacgacgatccgaagcaccgcgtctcgtcgagcgtgaagttctccgaccagttgcgcgtgctgaagaatccgcgcgtgtggaaatactgtcagtactactcgatcgttttcggcggctatgtcgcgctggcgctgtggatgacgaagtactacgtcgcggaattcggcctcggcctcgagacggcagcgctgctggcggcctgtttctcgttgcccggcggcgtgctgcgcgcggtcggcggctggttctcggaccgcttcggcgcccacaaggtcacctggtgggtgatgtgggtgtcctgggtgtgcctgttcctgctgtcgtacccgcacaccgaattcacgatcatgacggtagccggcccgaagactttcgcgatccatcacaacatctggttcttcaccgtgctgatgttcaccgtcggcgtcgcctgggcgttcggcaaggcctcggtgttcaagtacatctcggacgagttcccgcacgacatcggcgcggtgtcgggaatcgtcggcctcgtcggcgggctgggcggcttcctgctgccgatcatgttcggcgcgctcctcgacctgaccggcgtgcgctcgagcgcgttcatgctgctctacggcgtcacctgggtttcgctgatctggatgtactggaccgaagtgcgccgcaccgacgtgatgcacggcggcgaagcggatgtgctgcatggcggcaccgcgcccgtgaccgcaacgaagtga

SEQ ID NO: 28439 - protein, 458 aa, Azoarcus sp. EbN1
MLLANGGQLPQGIRFVPAWSDLRSTFEDGRNMPSQRQKQFSVLLMSTTAFTMCFAAWMLFAVIGIPIKAQLGLNETQFGLLAATPVLTGSLVRLPLGLLTDKLGGRVVFFLLMLAAVVPIYLIGEATQYWQFLVAGLFVGLIGGSFSVGIAYCARWFERKNQGFAMGVFGAGNSGAALTKFVAPALVVAYGWQFVPKAFAVAMLIIAIAFWFFTYDDPKHRVSSSVKFSDQLRVLKNPRVWKYCQYYSIVFGGYVALALWMTKYYVAEFGLGLETAALLAACFSLPGGVLRAVGGWFSDRFGAHKVTWWVMWVSWVCLFLLSYPHTEFTIMTVAGPKTFAIHHNIWFFTVLMFTVGVAWAFGKASVFKYISDEFPHDIGAVSGIVGLVGGLGGFLLPIMFGALLDLTGVRSSAFMLLYGVTWVSLIWMYWTEVRRTDVMHGGEADVLHGGTAPVTATK

SEQ ID NO: 28440 - DNA, 1509 bp, Bacillus clausii KSM-K16
  CDS (1)..(1509): transl_table=11
atgatcaataagctgcagctaccgctgcaaacgatgaatctagtactagggtttatggtgtgggtaatcatctcggcgctgttgccctttatacaggaagatattgcaattcccgccgatcgggttgctatcttaaccgcaatccctgttgttcttggatcggttctacggattcctctcggctattacgccaacgtcgtgggcgcgcgaatggtgtttatcactagttttattctgctattgtttccggtttactttatcagcatcgcgacaagttttacccatctcgtggtcgggggattgtttcttggtatcggaggagcggtgttttcggtgggggtcacttcgttacctaaataccatctgaaggaaaagctaggtctagtaaacggcatatatggaatgggcaatttggggacggcgatcacgacatttgcagcgccagtaattgctacgcagatcggctggtcagctaccgtccaactatacttaattttgctgctggtatttgttgccctaaacgccgtcttcggcgaccgcaaagaaacgaaagtcaaaaccccgattatggaacaggtcaagggtgtatataaaaacgacaaattatggtatttctcactcttttatttcattacgtttggctcttttgtggccttcactgtctatttgccgaattttttggtcagtcacttcgagctgccgaaagtggatgcagggctgcggaccgcaggctttatcttgattgcaacgtttctccgtcccgttggagggtggcttgccgataaattcaagcctttgtttttgctaatgggggtatttatcggtatgacattggcggcggtggtgctggctttttccccatcactcgctttgtatacggttggatgtctgacgatagccgtttgtgcaggtcttggcaacggcattatttttaagttggtgccgttttattttaataaacaagcaggcattgtcaatggaatcgtatcgatgatgggcggtttgggtggatttttcccgccgttgatgctctcgttcatccattcagtgacaggtcaatactcgattggattcatggctttatcgcaggttgcgctcgccagctttgtgctagtcgtatggatgtattatcaggacaaattgactgttgcttcccaagtgttcaactcgactgggcaaggcattttggtgactgatgctaaaaagcgcatacatgctgtgaatcccgcctttacgagattgacgggttacgaagaagaggaagtattgggcaggaatccaaacttgcttaaatcagggcggcaatcatcggcattttatcagatcatgtggacggaaattatggagaagggcagctggcagggtgaaatttggaaccgcagaaagaatggggaagagtatctcgaactgttaaccatcaatgctgtaaaggacgaaaccggggacatcgttcattatgtcggcaccttcagcgatattacagatcaccccccaaggaagcacgcctga

SEQ ID NO: 28441 - protein, 502 aa, Bacillus clausii KSM-K16
MINKLQLPLQTMNLVLGFMVWVIISALLPFIQEDIAIPADRVAILTAIPVVLGSVLRIPLGYYANVVGARMVFITSFILLLFPVYFISIATSFTHLVVGGLFLGIGGAVFSVGVTSLPKYHLKEKLGLVNGIYGMGNLGTAITTFAAPVIATQIGWSATVQLYLILLLVFVALNAVFGDRKETKVKTPIMEQVKGVYKNDKLWYFSLFYFITFGSFVAFTVYLPNFLVSHFELPKVDAGLRTAGFILIATFLRPVGGWLADKFKPLFLLMGVFIGMTLAAVVLAFSPSLALYTVGCLTIAVCAGLGNGIIFKLVPFYFNKQAGIVNGIVSMMGGLGGFFPPLMLSFIHSVTGQYSIGFMALSQVALASFVLVVWMYYQDKLTVASQVFNSTGQGILVTDAKKRIHAVNPAFTRLTGYEEEEVLGRNPNLLKSGRQSSAFYQIMWTEIMEKGSWQGEIWNRRKNGEEYLELLTINAVKDETGDIVHYVGTFSDITDHPPRKHA

SEQ ID NO: 28442 - DNA, 1206 bp, Bacillus clausii KSM-K16
  CDS (1)..(1206): transl_table=11
atgaaactttctgagttacgcaaaagcgggcatgcgccttcgttgttttccgcttttttatatttcgatgtaagctttatgatttgggtattgcttggtgcccttggcgcatacattactgctgattttggcttgagtgcttcacaaattgggttcattgtcgggattccgattttagcaggctctgttttccgcatccttgttggcattttgacagatcgttatgggccaaaaaagacgagcatagcaggcatggttgtaacgatggtaccgctgttgtggggctggctatttggtacgagcttgtcagaattgatcgcgatcgggctgctgcttggcgttgcgggtgctagtttttctgcttcgctgccaatggctagccggtggtacccccctcatttacaaggagtagcaatgggcatagcaggagccggaaatagtggtaccttatttgctacattgttcgggccaaggctggcagaaattgttggttggaatggggtgatgggactagcgcttattcctctttcccttgtgctcatctcttacatcctgatggcgaaggagccaccaaaccagccagctccaaagccgttaaaagcgtatttccgtgtattccaagagcgtgatacatggtacttttgcttgctttacagtgttacatttggtggatttgtaggcttgtcaagctttttaagctatttctttgtaaaccagtatgctgtttcaggggtcagagcaggggagtttgtcacacttgtcgttgctgccggcagcttattgcgcccaattggcgggttgattgcagacaaaattggcggtgctcgcttgcttactgtgctttttgttggcgtagccctttgtatgtttgccgttagttttctcccgccgattgcgtttgctcttactgtgttatttataggcatgggctgcctcggcatgggcaacggtgctgtgtttcaacttgtcccgcagcgtttccataaagaaatcggcatggtaactggcatcgttggagctgctggaggcgttggcggctttttcttgccaaatattctcggcttgtttaaggatataacggggacgtacgctagcggatttcttctgttcgccctttctgcctgtttcgcccttgggctgttactgtttgctcagcactcatggaagaaggcgtggacagagacaaagcagacgacgtctatttaa

SEQ ID NO: 28443 - protein, 401 aa, Bacillus clausii KSM-K16
MKLSELRKSGHAPSLFSAFLYFDVSFMIWVLLGALGAYITADFGLSASQIGFIVGIPILAGSVFRILVGILTDRYGPKKTSIAGMVVTMVPLLWGWLFGTSLSELIAIGLLLGVAGASFSASLPMASRWYPPHLQGVAMGIAGAGNSGTLFATLFGPRLAEIVGWNGVMGLALIPLSLVLISYILMAKEPPNQPAPKPLKAYFRVFQERDTWYFCLLYSVTFGGFVGLSSFLSYFFVNQYAVSGVRAGEFVTLVVAAGSLLRPIGGLIADKIGGARLLTVLFVGVALCMFAVSFLPPIAFALTVLFIGMGCLGMGNGAVFQLVPQRFHKEIGMVTGIVGAAGGVGGFFLPNILGLFKDITGTYASGFLLFALSACFALGLLLFAQHSWKKAWTETKQTTSI

SEQ ID NO: 28444 - DNA, 1164 bp, Staphylococcus epidermidis RP62A
  CDS (1)..(1164): transl_table=11
atgaacatgaaaaagggtgtttctcagcttacgttacagacattgagtttggtcgcaggctttatggcatggagtatcatttctccattaatgccatttatttcacaagatgttgatatttctccaggacaaatatctgtcattttagctattcctgttattttaggttctgtactacgtgtaccatttgggtacttaactaacattgtaggagcgaaatgggtgtttttctggagttttattgtactattacttccaatttttcttttaggtcaagctcaatcacccggtatgctaatgttatcaggattctttctaggaattggtggcgcaattttttcagtaggtgttacttcagtacctaaatacttttcaaaagacaaagttggtttagcaaatggtatatatggtgtaggtaatattggtactgcagtttcatcattttgtgccccagtgttagcaggtgcaattggctggcaaaatacagttcgtagttatttaattattctaagtatatttgcaattttaatgttttttttaggagataaaaatgagccgaaagtgaagattcctttgatggctcaagtcaaagacctatctaagaattataagttgtattatttaagtttgtggtattttattacttttggagcttttgtggcttttgggatttttttaccgaactttctagttgatcattttagtattgataaagtggatgcaggtattcgttcaggtatatttatagcactagcgacgttcttaagaccggttggtggtgttataggtgataaatttaatgcagtacaagcgcttatcatcgacttcgtgataatgattattggtgcgcttatattaagcttatctagtcatattgttctgtttacgataggctgtttagcaattagtatctgtgcaggtataggtaatggtttaatatttaaattagcaccttcatacttttctaaagaagcaggttcagcgaatggtattgtatccatgatgggaggactaggcggtttcttcccaccactggtgattacttttgtaacgagtatcactggttcaagtcatctcgctttcttcttcttggctatatttggtgtaattgctcttattacaatgattcatttaaataaaaaagagaaagctattcgtatataa

SEQ ID NO: 28445 - protein, 387 aa, Staphylococcus epidermidis RP62A
MNMKKGVSQLTLQTLSLVAGFMAWSIISPLMPFISQDVDISPGQISVILAIPVILGSVLRVPFGYLTNIVGAKWVFFWSFIVLLLPIFLLGQAQSPGMLMLSGFFLGIGGAIFSVGVTSVPKYFSKDKVGLANGIYGVGNIGTAVSSFCAPVLAGAIGWQNTVRSYLIILSIFAILMFFLGDKNEPKVKIPLMAQVKDLSKNYKLYYLSLWYFITFGAFVAFGIFLPNFLVDHFSIDKVDAGIRSGIFIALATFLRPVGGVIGDKFNAVQALIIDFVIMIIGALILSLSSHIVLFTIGCLAISICAGIGNGLIFKLAPSYFSKEAGSANGIVSMMGGLGGFFPPLVITFVTSITGSSHLAFFFLAIFGVIALITMIHLNKKEKAIRI

SEQ ID NO: 28446 - DNA, 1389 bp, Salmonella enterica subsp. enterica serovar Choleraesuis str
  CDS (1)..(1389): transl_table=11
atgacacgacaaaacgagaattataaccgttatctcttgagtgactggcgacccgaaaatccagccttctggaagaataaagggaaaggcatcgccagaagaaacttatgtatttcagtaagttgtttgctccttgcattttgcgtctggatgttgtttagcgctgttgccgtcaacctcaataaaattggatttaattttaccaccgaccaactctttttattaaccgcactaccttctctttccggcgcaatattacgcgttccctactcctttatggtaccactgtttggtggccgtaaatggaccgtattaagtaccgtaatattgattattccctgcgcctggctgggattcgccgtgcaaaatcctgccacccctttcggggtatttatgctcatcgctctgttgtgcggttttgcgggggcaaacttcgcgtccagtatgggcaacatcagttttttctttccaaaagccagacaaggtagcgcgttgggtattaacggcggactgggaaatcttggcgtcagtgtgatgcagttgattgcgccgctggttatttttctgccgatatttacttttttaggcgtccggagcgtgccgcaacctgatggctccctgctcgccctcactaacgcagcctggatctgggtgccgttactggctgtcgcgacgcttgccgcctggtttggtatgaacgatatcggcagttcaaaagcgtctgtcgcctcgcaattgccggtgctaaaacgtctgcacctgtggctgcttagcctgttgtacctggcgacattcgggtcattcatcggcttttccgcaggtttcgccatgctcgccaaaacgcaatttcccgacgtaaacattctgcaactggcgttctttggcccctttatcggcgcgctggcgcgatcggcaggcggcgtgatctccgataaattcggcggcgttcgcgtcacgctcattaattttatttttatggcgctgtttaccgccctgctattcctcacgctgccaggctccggcgcaggcagctttagcgcgttctatcttgtttttatgggcctgtttttgacagcgggtctcggcagcggttctaccttccagatgattgcggtgatcttccggcagatcacgctctacaacgtcaaactgcgcggcgggagcgatgagcaggcgcagcgcgaagcggtgacggataccgccgccgcgctcggttttatctccgctattggcgctgtgggcggcttctttattccaaaagcgtttggcacctctttggccttgaccggctcgccggtgggcgccatgaaaatctttttgctgttttacatcgcttgcgtcctgctgacctggctggtctacgggcgtcgtaagcctaaacaacaataa

SEQ ID NO: 28447 - protein, 462 aa, Salmonella enterica subsp. enterica serovar Choleraesuis str
MTRQNENYNRYLLSDWRPENPAFWKNKGKGIARRNLCISVSCLLLAFCVWMLFSAVAVNLNKIGFNFTTDQLFLLTALPSLSGAILRVPYSFMVPLFGGRKWTVLSTVILIIPCAWLGFAVQNPATPFGVFMLIALLCGFAGANFASSMGNISFFFPKARQGSALGINGGLGNLGVSVMQLIAPLVIFLPIFTFLGVRSVPQPDGSLLALTNAAWIWVPLLAVATLAAWFGMNDIGSSKASVASQLPVLKRLHLWLLSLLYLATFGSFIGFSAGFAMLAKTQFPDVNILQLAFFGPFIGALARSAGGVISDKFGGVRVTLINFIFMALFTALLFLTLPGSGAGSFSAFYLVFMGLFLTAGLGSGSTFQMIAVIFRQITLYNVKLRGGSDEQAQREAVTDTAAALGFISAIGAVGGFFIPKAFGTSLALTGSPVGAMKIFLLFYIACVLLTWLVYGRRKPKQQ

SEQ ID NO: 28448 - DNA, 1212 bp, Pseudomonas syringae pv. syringae B728a
  CDS (1)..(1212): transl_table=11
atggatacaagcttctggaaggcaggccacaaaccgaccctgttcgcggcctttctctatttcgacctgagtttcatggtctggtacctgcttggtccgctggcggtgcagattgccactgacctgcagctgaccactcagcaacgtggcctgatggtcgccacaccgattctggcgggtgcggtgctgcgcttcttcatgggcctgctggccgaccagctgtcgcccaagaccgccgggatcatcggccaggtgatcgtcatcggcgcgctgctggctgcctggcaactgggcattcacacctacggccaggtgctggtgctgggtgtgttcctcggtatggccggtgcttcgttcgccgtcgcgctgcccctggcgtcgcaatggtatccagcgcagcatcagggcaaggccatgggcatcgccggtgcgggcaattccggcactgtactggccgcgctgatcgcgccggtgctggccgccagtttcggttggagcaacgtcttcggcctggcgctgattccgctggtcctgaccctgatcgccttcaccctgatggcacgcaacgccccgcaacgcagcaaacccaaatccatggcggactacctcaaggcgctgggtgatcgtgacagctggtggttcatgtttttctacagcgtgacgttcggtggtttcattggcctggccagcgccctgcccggctatttcaacgaccaatacggtttgagcccgatcactgccggttactacaccgctgcctgcgtcttcggcggcagcctgatgcgtccgctgggtggcgcgctggccgaccgtttcggcgggattcgcacgctgaccgtgatgtatgcggttgccgccatcggcatcgccgccgtgggcttcaacctgccaagttcgtgggcagcactggcgctgttcgtggccgccatgctgggcctgggggccggcaacggcgcggtattccagctggtaccgcagcgcttccgcaaggaaatcggggtcatgaccggcctgatcggcatggcgggtggcatcggtggtttcctgctggcagccggcctgggcaccatcaaacagaacaccggcgactaccaactgggcctgtggctgttcgccggcttggcggtactggcctggttcggcctgctgaacgtcaagcgtcgctggagaaccacctggggttcggccgcagtcacggcggctcgggtctga

SEQ ID NO: 28449 - protein, 403 aa, Pseudomonas syringae pv. syringae B728a
MDTSFWKAGHKPTLFAAFLYFDLSFMVWYLLGPLAVQIATDLQLTTQQRGLMVATPILAGAVLRFFMGLLADQLSPKTAGIIGQVIVIGALLAAWQLGIHTYGQVLVLGVFLGMAGASFAVALPLASQWYPAQHQGKAMGIAGAGNSGTVLAALIAPVLAASFGWSNVFGLALIPLVLTLIAFTLMARNAPQRSKPKSMADYLKALGDRDSWWFMFFYSVTFGGFIGLASALPGYFNDQYGLSPITAGYYTAACVFGGSLMRPLGGALADRFGGIRTLTVMYAVAAIGIAAVGFNLPSSWAALALFVAAMLGLGAGNGAVFQLVPQRFRKEIGVMTGLIGMAGGIGGFLLAAGLGTIKQNTGDYQLGLWLFAGLAVLAWFGLLNVKRRWRTTWGSAAVTAARV

SEQ ID NO: 28450 - DNA, 1158 bp, Staphylococcus haemolyticus JCSC1435
  CDS (1)..(1158): transl_table=11
atgtataagacaaaaggtggctttcaacttaccttacaaacgttaagtcttgtagtgggtttcatggcatggagtattatatctccgttaatgccatatatctctcaagatgttaaagttaatcctggacagttatctattatattggcaattccagtaatattaggttcaattttacgtgtgccattcggttatttaactaatattattggtgcgaaatgggtattcttttgtagttttgttatattattatttcctatcttctttttagggcaagcacaaacaccaggaatgttaatgttatctggattctttttaggtgttggaggtgcgatattctctgtaggtgtgacatctgtacctaaatatttttcaaaagataaagtagggcttgctaatggaatttatggtatgggtaacatcggtacggcagtatcttcatttttagcaccacctattgcaggtattataggttggcaaacgacggtaagaagttatttaattatcattgctattttcgcaattttaatgttcatttttggtgataaaaatgaaccaaaagtgaaagtacctttagcatctcagtttaaaaaattatcatcaaattataagttatattacttaagtctttggtattttattacgtttggtgcttttgtagcatttggattattcttacctaactacttagtaaataactttggcattgataaagttgatgcaggtattcggtcaggtgtattcattgctttagcaactttcttaagaccaattggcggtatacttggagataaatttaatgctgtgaaagtactaatgatcgattttattattatgattgtaggtgctgttattttaggaatttcaagtcatattgctttatttactatcggttgtttaactatcagtatctgtgctggtttaggtaatggtttaatatttaaacttgtaccttcttacttcgcaaaagaatctggtgcagctaatggtattgtttctatgatgggtggtttaggaggattcttcccacctttagttattacttatgtaacaggtctaactggttcaagtcatttagcatttattcttttagcaatatttggtgtcttagcatttattaccatgggacacttatataaaaaagaatatgcaaaataa

SEQ ID NO: 28451 - protein, 385 aa, Staphylococcus haemolyticus JCSC1435
MYKTKGGFQLTLQTLSLVVGFMAWSIISPLMPYISQDVKVNPGQLSIILAIPVILGSILRVPFGYLTNIIGAKWVFFCSFVILLFPIFFLGQAQTPGMLMLSGFFLGVGGAIFSVGVTSVPKYFSKDKVGLANGIYGMGNIGTAVSSFLAPPIAGIIGWQTTVRSYLIIIAIFAILMFIFGDKNEPKVKVPLASQFKKLSSNYKLYYLSLWYFITFGAFVAFGLFLPNYLVNNFGIDKVDAGIRSGVFIALATFLRPIGGILGDKFNAVKVLMIDFIIMIVGAVILGISSHIALFTIGCLTISICAGLGNGLIFKLVPSYFAKESGAANGIVSMMGGLGGFFPPLVITYVTGLTGSSHLAFILLAIFGVLAFITMGHLYKKEYAK

SEQ ID NO: 28452 - DNA, 1380 bp, Psychrobacter arcticum 273-4
  CDS (1)..(1380): transl_table=11
atgggcagtaatgacaattttaaaggtggtaagctcatcactgactggcgtcctgaaatggaagagttttgggaaagtagcggcaaaaaagtcgcccgtcgcaatttatggatatctataccggccttactgctggcttttgcggtatggatggtatggagtgcggtcatcgttcgcttgccagagataggttttggatttgatagaggtcagcttttttggttggcggctctaccaggcctatcaggggcgacactgcggattttttattcttttatggtgcctatatttggtggacggcgctggacagctatctccactgcatcgttattgattccggcattatggatggggtttgccgttcaaaaccctgataccccgttcattatattcgccattattgcgctactttgcggcttcggcggcggcaattttgcctcttctatgtccaatatttcgttcttttatccaaaatctgaacaaggtaccgcactgggcctcaatgccggtcttggtaatctaggcgtgtccgttatgcagtttgtggtgccggtggtcatcctatttgcggcgttcggtagcttaggcggcgatccgcagatttccggttcaggccaacagttctatctacaaaatgcgggctttatttggataccttttattctgctattctcagtgttagcttggtttggaatgaatgatattgctacttccaaagcctcctttaaagatcaatctgttatctttaaacgtaagcacaactggatcatgtgcattctttacatggcaacctttggttcattcattggtttttctgccgcgtttcctatgttgattaagaactcgttccctgccatagacgccctgaaatttgcctttttaggtcccttggtaggcgcgcttttccggcctttaggaggttggatatctgataaagtaggcggcgctagagtcacgttttggaattacattgtgatggtgttggcagtactggctgtcatgtacttcttacccagtgagagcaatgaaggcagctttgtcggatacttcatctccttcatggtgctatttattactaccggcatcggtaacggctctacctttaccatgattccggttatttttagaacctttcatgagcgacgtgcaccggagaaggtgggagcagagtcactgttcgtagagatacgtaaagagtccgcagcggtggttggttttacctcggctatcgcggcttatggcgctttctttattcctaaaatgtttggatcgggcttaggagtctttggcacttttatcgctttaattattttttatatcatttgtatcgtattgacttggtggtattacagccgtggaaacgcagaatatccttgttag

SEQ ID NO: 28453 - protein, 459 aa, Psychrobacter arcticum 273-4
MGSNDNFKGGKLITDWRPEMEEFWESSGKKVARRNLWISIPALLLAFAVWMVWSAVIVRLPEIGFGFDRGQLFWLAALPGLSGATLRIFYSFMVPIFGGRRWTAISTASLLIPALWMGFAVQNPDTPFIIFAIIALLCGFGGGNFASSMSNISFFYPKSEQGTALGLNAGLGNLGVSVMQFVVPVVILFAAFGSLGGDPQISGSGQQFYLQNAGFIWIPFILLFSVLAWFGMNDIATSKASFKDQSVIFKRKHNWIMCILYMATFGSFIGFSAAFPMLIKNSFPAIDALKFAFLGPLVGALFRPLGGWISDKVGGARVTFWNYIVMVLAVLAVMYFLPSESNEGSFVGYFISFMVLFITTGIGNGSTFTMIPVIFRTFHERRAPEKVGAESLFVEIRKESAAVVGFTSAIAAYGAFFIPKMFGSGLGVFGTFIALIIFYIICIVLTWWYYSRGNAEYPC

SEQ ID NO: 28454 - DNA, 1212 bp, Pseudomonas syringae pv. phaseolicola 1448A
  CDS (1)..(1212): transl_table=11
atggatacaagcttctggaaggcaggccataaaccgaccctgtttgcggcgtttctctatttcgacctgagtttcatggtctggtacctgcttggcccgctggcggtgcagattgccactgacctgcacctgaccactcagcaacgtggcctgatggtcgccacgccgattctggcgggtgccgtgctgcgctttttcatgggcctgctggcggaccagctgtcgcccaagaccgcaggcatcattggccaggtgattgtcatcggcgcactgctggcggcctggcaactgggcattcacacctacggtcaggtactgctgctgggcctgttcctgggtatggccggtgcttcattcgccgtcgcgctgcccctggcgtcgcaatggtatccaccgcagcaccaaggcaaggcgatgggcatagccggtgcgggcaactcgggcaccgtactggcagcattgatcgcgccggtactggccgccagtttcggctggggcaacgtattcggcctggcgctgatcccgctggttctgaccctgatcgctttcacgcttatggcgcgcaacgccccggagcgcagcaagcccaaatccatggcggattacctaaaggcgctgggtgatcgtgacagctggtggttcatgtttttctacagcgtgacgttcggcggcttcatcggcctggccagcgccctgcccggctatttcaacgaccaatatggcttgagcccgattactgccggttactacaccgctgcctgtgtcttcggcggcagcctgatgcgccctctcggtggcgcgctggctgaccgctttggcgggattcgcacattgaccgtgatgtacgccgttgcggccatcggtatcgcggcggtgggtttcaacctgccaagttcgtgggcagcactggctctgttcgttgccgcgatgctgggcctgggtgccggtaatggcgcagtctttcagctggttccgcagcgtttccgcaaggaaatcggggtcatgaccggcctgatcggcatggctggcggcatcggtggcttcctgctggcagcgggtctgggcaccatcaaacagaacactggcgattaccagttgggcctgtggctgttcgcaggcctggcagtgctggcctggttcggtctgctgaacgtcaagcgtcgctggagaaccacctggggttcggcggctgtgaccgcggcgcgagtctga

SEQ ID NO: 28455 - protein, 403 aa, Pseudomonas syringae pv. phaseolicola 1448A
MDTSFWKAGHKPTLFAAFLYFDLSFMVWYLLGPLAVQIATDLHLTTQQRGLMVATPILAGAVLRFFMGLLADQLSPKTAGIIGQVIVIGALLAAWQLGIHTYGQVLLLGLFLGMAGASFAVALPLASQWYPPQHQGKAMGIAGAGNSGTVLAALIAPVLAASFGWGNVFGLALIPLVLTLIAFTLMARNAPERSKPKSMADYLKALGDRDSWWFMFFYSVTFGGFIGLASALPGYFNDQYGLSPITAGYYTAACVFGGSLMRPLGGALADRFGGIRTLTVMYAVAAIGIAAVGFNLPSSWAALALFVAAMLGLGAGNGAVFQLVPQRFRKEIGVMTGLIGMAGGIGGFLLAAGLGTIKQNTGDYQLGLWLFAGLAVLAWFGLLNVKRRWRTTWGSAAVTAARV

SEQ ID NO: 28456 - DNA, 1215 bp, Dechloromonas aromatica RCB
  CDS (1)..(1215): transl_table=11
atggacaagaaatcattcctgcaggccggccacacgccgactttgctcgcggccttcctctacttcgatctggctttcatggtctgggtgctgctcgggcccctcggtatcagtattgccaaggatctgggcctgtcgcatgccgaaaagggcatgatggtggcgacgccggtgctggccggtgcgctgctgcgcatcatcatgggcatcctggttgatcgcctgtcgccgaagaaggcggccatcatcgggcaggtcgtggtcatcgcgaccatgatctatgcctggcaggtcggcgtgcattcctacgctgaagtgctgatcctcggactcttcctcggtgttgctggcgcttccttcgctgccgcgctgccgctggcttcgcgctggtatccggccgagcatcagggcacagcgatggggattgccggagccggcaactccggaacggcgctcgctgccttgtttgccccggggctggcggccgccttcggctgggtcaatgtcttcggtgtcgtgctgattccattggtcattgtgctgatcgctttcatcttcatggccaaggatgcaccggatgcgccgccgcccaagacctttgccgagtacctgaaagtcctcaaggacaaggatgcctggtggttcatgttcttctactcggtgaccttcggcggctttgtcggcctggcttcgtcgctggtcatctacttcaacacccagtacggccttgatccgaagatggcgggctactttactgccggctgtgtctttgccggttcgctggttcgcccgattggcggcaacgtggctgatcgcatcggcggcgtgaagtcgctgaccgtgatgtacatgtttgcggctttgttcctgtccatcgtcagctttggcctgccggaggcctggatggcgctgctcgtcttcgtcggtgccatgctctcgctgggcatgggcaacggtgccgtgttccagttggtgccgcagcgcttccgcaaggaaatcggcgtgatgaccggtctggttggcatggccggcggtgtcggtggtttctacctggcctccagcctcggttattccaagcaactgaccggcagctaccaggctggcttcctgatctttgcctcgctggcagtgctggccttgcttggcctgaccggtgtcaagacccgctggcgtaccacctggggcgccagtcacctgacggcggccaagatctga

SEQ ID NO: 28457 - protein, 404 aa, Dechloromonas aromatica RCB
MDKKSFLQAGHTPTLLAAFLYFDLAFMVWVLLGPLGISIAKDLGLSHAEKGMMVATPVLAGALLRIIMGILVDRLSPKKAAIIGQVVVIATMIYAWQVGVHSYAEVLILGLFLGVAGASFAAALPLASRWYPAEHQGTAMGIAGAGNSGTALAALFAPGLAAAFGWVNVFGVVLIPLVIVLIAFIFMAKDAPDAPPPKTFAEYLKVLKDKDAWWFMFFYSVTFGGFVGLASSLVIYFNTQYGLDPKMAGYFTAGCVFAGSLVRPIGGNVADRIGGVKSLTVMYMFAALFLSIVSFGLPEAWMALLVFVGAMLSLGMGNGAVFQLVPQRFRKEIGVMTGLVGMAGGVGGFYLASSLGYSKQLTGSYQAGFLIFASLAVLALLGLTGVKTRWRTTWGASHLTAAKI

SEQ ID NO: 28458 - DNA, 1290 bp, Ralstonia eutropha JMP134
  CDS (1)..(1290): transl_table=11
atggccacccccacacgcgcggcgcgcatgccggagcccgtcccttccggggcatggacgacgctggcatccagcacgttcgccttcaccatctgctttgccgtctggatgctatttgccgtcctcggcatcccgctcaagaaggaactcgggctcaatgaaaccgagttcggcctgctcgccgctacgcccgtgctgagcggctcgctgatccgcgtgccgctaggcctgtggaccgaccgctacggcggccgtgtcgtgttcttcgtgctgatgctggctaccgtcatcccgatctggctgatctcgtacgcgcacacgctgtggcaactgctggtgctcggcctgttcgtcggtctggcgggcggttcgttttccgtcggcacgccttacgtggcacgctggttcccgcgttctcgccaagggctcgcgatggggatcttcggtgccggtaactccggtgccgcgctgaccaagtttgtcgcacccgcgctgatcctcgccgctggcacctgggaaatcgtgccgcgcgtgtattcggtggcgatgctggtgacggccatcgtgttctggctcgggtcgcgcagcaatcccgcccaccgggtgatgacgagtgccggctggcgcgagcagcttgccgtgatgcgcgacccgcgcgtgtggcgctactcgcagtactactcggtggtgttcggcggctatgtcggcctgtcgctgtggatgaccaagtactacatcggcgaatacggcttcgatatcaaggtggccgccttcctggccgcctgcttctcgctgcccggcggcgtgctgcgcgcgatcggcggctggatctccgaccgctacggcgcgcaccgcaccacgtggtgggtcatgtgggtgagctgggtcggcttcttcctgctgagctacccgcaaaccgacttcgtgatccacaccaccacgggcccgcagagcttccgcatcgcgctgacgccagcggtgttcaccttcctgctgttcgtggtcggcattgcgttcgccatcggcaaggcctcggtcttcaagttcatctcgaacgatttcacgcacaacatcggcgccgtctccggcgtagtcgggctcgcaggcgggctgggcggcttcgtgctgccgatcctgttcggcgcgctggccgacctcaccggcgtgcgcagcagctgcttcatgctgatgtacggcacggtgtgcgtaagcctggtctggatgcactacagccaacgcgccgaacgccggcgcaaggagcaagcagtcggcctgactcagaccgcctga

SEQ ID NO: 28459 - protein, 429 aa, Ralstonia eutropha JMP134
MATPTRAARMPEPVPSGAWTTLASSTFAFTICFAVWMLFAVLGIPLKKELGLNETEFGLLAATPVLSGSLIRVPLGLWTDRYGGRVVFFVLMLATVIPIWLISYAHTLWQLLVLGLFVGLAGGSFSVGTPYVARWFPRSRQGLAMGIFGAGNSGAALTKFVAPALILAAGTWEIVPRVYSVAMLVTAIVFWLGSRSNPAHRVMTSAGWREQLAVMRDPRVWRYSQYYSVVFGGYVGLSLWMTKYYIGEYGFDIKVAAFLAACFSLPGGVLRAIGGWISDRYGAHRTTWWVMWVSWVGFFLLSYPQTDFVIHTTTGPQSFRIALTPAVFTFLLFVVGIAFAIGKASVFKFISNDFTHNIGAVSGVVGLAGGLGGFVLPILFGALADLTGVRSSCFMLMYGTVCVSLVWMHYSQRAERRRKEQAVGLTQTA

SEQ ID NO: 28460 - DNA, 1386 bp, Ralstonia eutropha JMP134
  CDS (1)..(1386): transl_table=11
atgtccacttccgtactgacccgctgggagcccgagaacaaggccttctggcagaacaccggcgagcgcatcgcctaccgcaacctgtggatttcgatccccgcgctgatgctggccttcgtggtctggatgctgtggagcgtggtcgcggtcaatcttgatcgcgctggcttccagttcaccaagaaccaactgttctggctcaccgcactgcccgctttgtccggcgccacgctgcgcatcttctactcgttcctcgtcccggtgttcggcggtcgacgcttcaccgcgatctccacggcgctgctgctgattcctgcgctcggcatgggcttcgcgctgcgcgatccgtccacgggctacccgacgctgcttgcgctcgccttgctgtgcggcttcggcggcgccaacttcagttcgtcgatggccaatatcagcttcttcttcccgaaggcgaagaagggcctggctacaggcctcaatgcgggcatcggcaatctcggcgtgtcggtcgttcagttcgtcacgccgctcgtggtatcggtggccgtgttcggcacgcttggcggcgagccccagcagtaccaggccggcgacgccatgaagaacctgtggctgcagaacgcggggttcatctgggtgccgttcatcgtggtgtcgtcgcttgccgcatggttcggcatgcatgacatcgccgacgccaaggcgtccttcgctgaccaggccatcatcttcaagcgcaagcacaactggctgatgtgctggctctacgtgggcacgttcggctcgttcatcggcttctcggccggcctggcgctgctgaccaagtcgcagtttccgggcgtgaacccgaccgcgtatgcgttcctcgggccgctggtcggcgcactgacgcgtcccgtgggcggctggatctccgacaagcttggcggcgcgcgcgtcacgctgtggacgtttgtcggcatgatcgccgccgtgttcgccgtgctggccgcactgccgcatgacggcgcagcgggcagtttcccggcattcctcgcagccttcgtcgcgctgttcgcgctgactggtgtcggcaacggctccacgttccgcatgattccggtgatcttcctgaccgaacgccagcgtgccgccaagggcaagggcgacacggcgcagaagcaggcattgcaggaagcgggcaaggaatccgccgcggtgctcggcttctccggcgcgatcggtgcctacggcggcttcttcatccccaagagctttggcacgtcgctggaactgaccggctccgccgacgccgcgctgtattgcttcatcgcgttctacgtgagctgcgtgctggtgacgtggtggtgctacgcgcgccgcaacgcagccatgccttgctga

SEQ ID NO: 28461 - protein, 461 aa, Ralstonia eutropha JMP134
MSTSVLTRWEPENKAFWQNTGERIAYRNLWISIPALMLAFVVWMLWSVVAVNLDRAGFQFTKNQLFWLTALPALSGATLRIFYSFLVPVFGGRRFTAISTALLLIPALGMGFALRDPSTGYPTLLALALLCGFGGANFSSSMANISFFFPKAKKGLATGLNAGIGNLGVSVVQFVTPLVVSVAVFGTLGGEPQQYQAGDAMKNLWLQNAGFIWVPFIVVSSLAAWFGMHDIADAKASFADQAIIFKRKHNWLMCWLYVGTFGSFIGFSAGLALLTKSQFPGVNPTAYAFLGPLVGALTRPVGGWISDKLGGARVTLWTFVGMIAAVFAVLAALPHDGAAGSFPAFLAAFVALFALTGVGNGSTFRMIPVIFLTERQRAAKGKGDTAQKQALQEAGKESAAVLGFSGAIGAYGGFFIPKSFGTSLELTGSADAALYCFIAFYVSCVLVTWWCYARRNAAMPC

SEQ ID NO: 28462 - DNA, 1362 bp, Shigella sonnei Ss046
  CDS (1)..(1362): transl_table=11
gtggtacgccgtctgcgtttctccggccctaagacatcaatcatctgtactccaatgactagtctaaaaactagtattaagactatcacttatttaagtgatactggttgtctggagattcagggggccagtctagcagttaccgttaatctcaataaaatcggttttaattttactaccgatcaactctttttattaaccgcattaccctccgtttctggcgcattattgcgtgttccctactcctttatggtgcctatattcggtggacgccgatggacggtttttagtactgcaatcctgattattccttgcgtctggctcggaattgccgtgcaaaatccgaatactccttttgggatatttatcgttatcgctttgctatgcggttttgcaggtgcaaactttgcttcgagcatgggcaatatcagtttcttctttccaaaagccaaacaagggagcgctcttgggattaatggcggattaggaaacttaggtgtaagtgtaatgcagctggttgcaccgctggtcatttttgtacctgtatttgcctttctcggcgtcaatggcgtaccgcaggccgacggttcggtgatgtcgctggcgaatgccgcatggatttgggtaccgctactggcgattgccacgatcgccgcctggtcagggatgaatgatatcgccagttcacgcgcctcaattgacgaccagctccctgtcttacaacgcctgcatctctggctgctgagcctgctttaccttgccaccttcggttcgtttatcggtttttctgcgggttttgccatgctggcaaaaacccagttcccggatgtgaatattctgcgcctggcgttctttggcccatttatcggtgccatcgcgcggtcggttggtggtgctatttccgataaattcggcggcgtgcgggtgacgttgatcaactttatttttatggcgattttcagtgccctgctgttccttaccttaccgggcacaggctccggtaatttcatcgccttttacgccgtatttatggggctgtttctgactgcgggtctgggaagtggttctactttccagatgatcgccgtcatctttcgccagataaccatttatcgggtgaagatgaaaggcggtagtgatgagcaagctcagaaagaagccatcaccgaaacggcggcggctctgggctttatctcagccattggcgcagtgggcggcttttttattccgcaggcgtttggcatgtcgctcaatatgaccggctctccggtcggcgcgatgaaagtgtttttaatcttctacatcgtttgtgtgctgctgacctggctggtttatggtcggcggaagttcagccaaaaataa

SEQ ID NO: 28463 - protein, 453 aa, Shigella sonnei Ss046
MVRRLRFSGPKTSIICTPMTSLKTSIKTITYLSDTGCLEIQGASLAVTVNLNKIGFNFTTDQLFLLTALPSVSGALLRVPYSFMVPIFGGRRWTVFSTAILIIPCVWLGIAVQNPNTPFGIFIVIALLCGFAGANFASSMGNISFFFPKAKQGSALGINGGLGNLGVSVMQLVAPLVIFVPVFAFLGVNGVPQADGSVMSLANAAWIWVPLLAIATIAAWSGMNDIASSRASIDDQLPVLQRLHLWLLSLLYLATFGSFIGFSAGFAMLAKTQFPDVNILRLAFFGPFIGAIARSVGGAISDKFGGVRVTLINFIFMAIFSALLFLTLPGTGSGNFIAFYAVFMGLFLTAGLGSGSTFQMIAVIFRQITIYRVKMKGGSDEQAQKEAITETAAALGFISAIGAVGGFFIPQAFGMSLNMTGSPVGAMKVFLIFYIVCVLLTWLVYGRRKFSQK

SEQ ID NO: 28464 - DNA, 1269 bp, Thiobacillus denitrificans ATCC 25259
  CDS (1)..(1269): transl_table=11
atgcagagccaacaatacaaggcatggtcggtcgtcagcatgagcacgctggcgttcacggtctgcttcatgatctggatgatgttcgccgtcatcggcgttcccatcaaacagcaactcggcctcaacgagacgcagttcggcatcctcgtcgccaccccggtcctgaccgggtcgctgatccgcgtgccgctcggcatgtggacggacaaattcggcggccgcatcgtgttcttcgtcctgatgctgacgacggtcatcccgatctggctgatctcctacgcgaccgagttctggcagtttctgctggtcggcctgttcgtcggcctggccggcggctcgttcacggtcggcatcgcctactgcgcgcgctggttcccgcgtgagcgccaggggctggcgatgggcattttcggcgcgggcaataccggcgccgccgtcaccaagctgctcgcaccgatcatcgtcgtcggatacggctggacgatggtgcccaaggtctacgccggactcatgctcgtcaccgccatcgtcttctggttcttcacctacaccgagcccgcccacaaggtgagcaagtcggtcacgatccgcgagcagcttgcggccttcaaggatccgaaggtctggcgctacagccagtactactcgatcgtgttcggcggctacgtggcgctcgcgctgtggatgaccaagtactacgtgagccagtacggcttcgatctcaagaccgcggccttcctggcggccgccttcagcattcccggcggcgtgctgcgcgcggtcggcggctacttctccgacaagtacggcgcgcacacgatcacctggtgggtgctgtgggtctcgctgctgtgcctgttcttcctgtcctacccgcagagcagcatcacgatccacaccgtcgacggcctgcgcaccttccacttcggcctcggcccgacggcgttcacgatcgtgatgttcagcctcggcatcgcgttcgcgatcggcaaggcctctgtcttcaagtacatctccgacgactaccccgacaacatcggcgtgatctccggcgtggtcggcctcgccggcggtctcggcggcttcctgatgccgatcatgttcggcgccctggtcgacctgaccggcgtccgctcgtcggccttcatgctgatgttcggcgtcgtgtgggtgtcgctgatgtggatgtatttcaccgaagtacgcgagatggacgcggcggcgcggggcgcgaagcgcgtcatcgccgcggacgtcatggagtaa

SEQ ID NO: 28465 - protein, 422 aa, Thiobacillus denitrificans ATCC 25259
MQSQQYKAWSVVSMSTLAFTVCFMIWMMFAVIGVPIKQQLGLNETQFGILVATPVLTGSLIRVPLGMWTDKFGGRIVFFVLMLTTVIPIWLISYATEFWQFLLVGLFVGLAGGSFTVGIAYCARWFPRERQGLAMGIFGAGNTGAAVTKLLAPIIVVGYGWTMVPKVYAGLMLVTAIVFWFFTYTEPAHKVSKSVTIREQLAAFKDPKVWRYSQYYSIVFGGYVALALWMTKYYVSQYGFDLKTAAFLAAAFSIPGGVLRAVGGYFSDKYGAHTITWWVLWVSLLCLFFLSYPQSSITIHTVDGLRTFHFGLGPTAFTIVMFSLGIAFAIGKASVFKYISDDYPDNIGVISGVVGLAGGLGGFLMPIMFGALVDLTGVRSSAFMLMFGVVWVSLMWMYFTEVREMDAAARGAKRVIAADVME

SEQ ID NO: 28466 - DNA, 1677 bp, Thiobacillus denitrificans ATCC 25259
  CDS (1)..(1677): transl_table=11
atgagtctcagaaacaagcagcacggcgccgcgggcgtcgccgtcgggggacgcgagcgcgagcaggttcccgcgaccattcccgagtgggacgtcgagaacaatgtgttctgggaatcgacgggcaagcgcatcgccaaccgcaacctgtggatttcgatcccggccctgttgtgcggattcgcggtgtggggcatgtggggcatcatcaccgtacagatgctcaatctcgggttccccttctccaaggaggagctcttcacgctcaccgcgatcgccggcatctcgggcgccacgatgcggattccgtcgtcgttcttcattcgtctcgcgggcgggcgcaacgtcattttcctgaccacggcgatgctgctcgcgccggcgatcggcacgggcatcgtgctgcaacaccccgactggcccttgtggaccttccagctaatggcgctgtggtcgggcgtcggcggcggcaacttcgccagctcgatgtcgaacatcagcaccttcttccccaagcgtctccagggcacggcgctcggcctcaacgcgggcctgggcaacttcggcgtaaccacgatgcaggtcgtgattccgctggtcatgactctcggcatgctcggcagctacggcggcgaatcgatgacgctggtcaaggacagcggctggatcctcggcaagatcgccgcgggcaccgagacctacgtgcagaacgccggcttcgcctgggtgctgtcgctggtgccgctggccatcctggcctggttcgggatgaacaacctgaagccgatctcgccggacgcgcatcacacgatcgcgtccttcgccaaggtcacctacctctacacgctggccttcctgccggcgatcttcatgctctacctgtatctgccggcgccgaccgggctcggcgtactcaacatgtgggtcgccattccgctcgatatcctcgcggcgctgctggtgatgaagcttgcagcgttcggcaccatgaaggaaaacgtcgccaagcagttcgcaatcttcaagaacaagcacacctggtccctgaccgcgctgtacatcgtcaccttcggctcgttcatcggcttctcgatggcgctgccgttgtcgatcacggtcatcttcggcgactcgcacgtgctcgatgcggcaaccggcgtctggacccatagcaagaaccccaacgcgccctcggccttcacctatgcgtggatcggccccttcgtcggcgcggcgatgcgcccgatcggcggctggatttcggacaaggtcggcggatcgatcgtcacccagatcatctccgccgtgatggtcgccgcctcggcctacgcgggctggatcatgatgcaggccttccactcggccacgcccgaagtctatttcacccagttcctcgttaccttcatcgtgctctttgccgccaccggtgttggcaacggctcgaccttccgcaccgtcggcgtgatcttcgaccgcgtgcaggcggggccggtgctcggctggacgtcggcggtcgccgcctacggcgcgttcatcgccccggtggtgatcggcgatcagatcaaggccggctcgccggagaacgcgatgtacggcttcgccgccttctatgccgtgtgcctgttcgtgaactggtggttctacctgcgcaagcacgcctacatcaagaacccctga

SEQ ID NO: 28467 - protein, 558 aa, Thiobacillus denitrificans ATCC 25259
MSLRNKQHGAAGVAVGGREREQVPATIPEWDVENNVFWESTGKRIANRNLWISIPALLCGFAVWGMWGIITVQMLNLGFPFSKEELFTLTAIAGISGATMRIPSSFFIRLAGGRNVIFLTTAMLLAPAIGTGIVLQHPDWPLWTFQLMALWSGVGGGNFASSMSNISTFFPKRLQGTALGLNAGLGNFGVTTMQVVIPLVMTLGMLGSYGGESMTLVKDSGWILGKIAAGTETYVQNAGFAWVLSLVPLAILAWFGMNNLKPISPDAHHTIASFAKVTYLYTLAFLPAIFMLYLYLPAPTGLGVLNMWVAIPLDILAALLVMKLAAFGTMKENVAKQFAIFKNKHTWSLTALYIVTFGSFIGFSMALPLSITVIFGDSHVLDAATGVWTHSKNPNAPSAFTYAWIGPFVGAAMRPIGGWISDKVGGSIVTQIISAVMVAASAYAGWIMMQAFHSATPEVYFTQFLVTFIVLFAATGVGNGSTFRTVGVIFDRVQAGPVLGWTSAVAAYGAFIAPVVIGDQIKAGSPENAMYGFAAFYAVCLFVNWWFYLRKHAYIKNP

SEQ ID NO: 28468 - DNA, 1263 bp, Magnetospirillum magnetotacticum MS-1
  CDS (1)..(1263)
atggcttccttcaagaccgtcatgaagtcgggtcaccccccgacgctgttcgcagccttcctgtatttcgatttctgcttcgcgatctgggtgctcaacggcgccatgggcccgttcatcacggagacctacaagctcaccccggcccagaccggcttcatgatctcgctgccgatcctggccggcgcgatcatgcgctttcccctcggagtgctggctcagtatatcggccgcaagaacgcggcgctcaccgagatgagcgtcatcgtcctggcgatggcctacggcttcttcttcgtctcgtcctacaacgacgtgctcgccatgggcgtgctgctcggcatcgccggcgcctccttcggcgtggcgctctccctcggttcgggctggtttccgccggagcacaaggggctggccatgggcatcgccggcgccggcaattcgggcaccgtgcttgccgtgctgttcgcgccgccgctggcccaggcctatggctggcaggcggtctacggcttcgccggcctcgtcatgatcgtgccgctcgtcgtgatgatcctgctcgccaaggagccgccggattgccacggccagtccttcaaggagcatgtctcctgcctgttcaccaaggacggctgggccttctccctgatctacatcatcacctttggcggcttcatcggcctctcgaacttcctgccgaccttcttctacgagcagttcagcgtgacgaaggtcgaggccgggcggctgaccatgctcgccgcgctgatgggctcgggcatccggatcctcggcggctatttcgccgaccggatgggcggcatcctcgtgctctccctggtgctgctcgccgccatcggctcgttcctggccctcaccgccacgccgtcgctcgccgtcaccacgctgctgttcatgctctgcttcgccgcgctcggtgccggcaacggtgccctgttccagctcgtgccgctgcggtggccgaccaacacggcggtggccggctcgatgatcggcgaggtcggggccctcggcggcgcgatcctgcccaacgtcatgggcttctcgaagcaatataccggcggcttcgccacgggcttcgtggtttacgccctcttcaccggtctggttctcggctgcctgttcctctggcagcgcaaatgggtcggcacctgggtgggcccccgcggcaaggtgctggatcccgcgggcgagacgctcggcgaggcggaaggcgcgcgcgtcgcccctgcgaccgcctga

SEQ ID NO: 28469 - protein, 420 aa, Magnetospirillum magnetotacticum MS-1
MASFKTVMKSGHPPTLFAAFLYFDFCFAIWVLNGAMGPFITETYKLTPAQTGFMISLPILAGAIMRFPLGVLAQYIGRKNAALTEMSVIVLAMAYGFFFVSSYNDVLAMGVLLGIAGASFGVALSLGSGWFPPEHKGLAMGIAGAGNSGTVLAVLFAPPLAQAYGWQAVYGFAGLVMIVPLVVMILLAKEPPDCHGQSFKEHVSCLFTKDGWAFSLIYIITFGGFIGLSNFLPTFFYEQFSVTKVEAGRLTMLAALMGSGIRILGGYFADRMGGILVLSLVLLAAIGSFLALTATPSLAVTTLLFMLCFAALGAGNGALFQLVPLRWPTNTAVAGSMIGEVGALGGAILPNVMGFSKQYTGGFATGFVVYALFTGLVLGCLFLWQRKWVGTWVGPRGKVLDPAGETLGEAEGARVAPATA

SEQ ID NO: 28470 - DNA, 1407 bp, Pseudomonas aeruginosa UCBPP-PA14
  CDS (1)..(1407)
atgggcatgatcgccaatacccaactgaaagccgcacggggaccgctgctgctcgactggcgccccgaggaccccgagttctgggcgcgcaacggcaagcgcatcgccagccgcaacctgtggatctcgatccccgcgctgctgctcgccttcgccgtgtggatgatctggagcacggtgaccgtgcgcctgaacagcgccggcttcgccttcagcaacgaccagctgttcctgctcgcggcgctgccgtcgatctccggcgccaccctgcgggtgttctattcgttcatggtgccgatcttcggcggccgtcgctggaccgccctgagcaccgcctcgatgctgatcccgtgcatctggctgggcttcgccgtgcaggacccgagcaccccgtactgggtgttcgccctgatcgcgctgctctgcggcttcggcggcggcaacttcgcctcgagcatgtccaacatcagcttcttctatccgaagagccagcagggcaccgccctcggcctgaatgccgggctcggcaacctcggcgtctcggtgatgcagttcgccgtgccgctggcggtggccggcggcctgttcggcgccttcggcggcgagccgcagcagctcggcgacggcggtcgcctgtggctgcagaacgccggctggatctgggtgccgttcatcgccgtggtatcggtcgcggcctggttcgggatgaacgacatcgccgacgccaaggcctcgttccgcgaccaggcggtgatcttcaagcgcaagcacaactggctgatgtgctggctgtacgtggccaccttcggctcgttcatcggcttctcggccggcttcgcgatgctcagcaagacccagttccccgacatcaacccgctgcaatacgccttcctcggtccgctggtgggcgccctcagccggcccctgggcggctggctggcggacaagttcggcggcgcgcggatcaccctgtggaactacgcactgatgatcggcggggtgttcacggtgatcgccttcctgccgggcgacggcggccagggcaacttcttcggcttccttggcgccttcatcctgctgttcttcttcgccggcatcggcaacggttccaccttccgcatgatcccggtgatcttccgcaacgagtgggcccggcgggtgcgcgacggccaggccgacgaagccggcgcggcgcgcaacgcgagcatggagtcggccgcggtgatcggcttctccgccgccatcggcgccttcggcgggttcttcatcccgaaggcgttcggcacctcgctgcacatgaccggcagcgccgagggcgccctctacgtgttcatcgcctactacctgagctgcatcgtcgccacctggtggtggtacgcgcgcaagggtgcggagagtccctgttga

SEQ ID NO: 28471 - protein, 468 aa, Pseudomonas aeruginosa UCBPP-PA14
MGMIANTQLKAARGPLLLDWRPEDPEFWARNGKRIASRNLWISIPALLLAFAVWMIWSTVTVRLNSAGFAFSNDQLFLLAALPSISGATLRVFYSFMVPIFGGRRWTALSTASMLIPCIWLGFAVQDPSTPYWVFALIALLCGFGGGNFASSMSNISFFYPKSQQGTALGLNAGLGNLGVSVMQFAVPLAVAGGLFGAFGGEPQQLGDGGRLWLQNAGWIWVPFIAVVSVAAWFGMNDIADAKASFRDQAVIFKRKHNWLMCWLYVATFGSFIGFSAGFAMLSKTQFPDINPLQYAFLGPLVGALSRPLGGWLADKFGGARITLWNYALMIGGVFTVIAFLPGDGGQGNFFGFLGAFILLFFFAGIGNGSTFRMIPVIFRNEWARRVRDGQADEAGAARNASMESAAVIGFSAAIGAFGGFFIPKAFGTSLHMTGSAEGALYVFIAYYLSCIVATWWWYARKGAESPC

SEQ ID NO: 28472 - DNA, 1326 bp, Burkholderia cepacia R18194
  CDS (1)..(1326)
atgaccgacaaagctacccgtatcgatctcttcagcttccgcaccgcgccgatgcgcgcgttccacctgacgtggatggcgttcttcgtgtgcttctttgcgtggttcgcgtgcgcgccgctgatgccgctgatcgcacgcgaattccacctgaccgcggcacaggtcgccaacatcaacatcgcggccgtggccgcgacgatcgccgtgcggctgctggtcggcccgctgtgcgaccgcttcggcccgcgccgcgtgtacgtcggcctgttgctgctcggcgcgatccccgtgttcgcggtgtccttcacgcacgactacctgtcgttcctgatctgccggctcggcatcggcgcgatcggcgcgggcttcgtgatcacgcagtaccacacgtcggtgatgttcgcaccgaacgtggtcggcaccgcgaacgcgacgacggccggctggggcaacgccggtgccggcgccacgcaggcgctgatgccgctgctcgtcgccgccggcctgatgctcggcttcggcgaggattcgtcgtggcgcatcgcgctggtcgtgccgggcgtcgcgatgctcgtgatggcgtgggcgtactggcgcttcacgcaggattgcccgcaaggcgacatcgtcgcgctgcgcaaggcaggcgtgacggtcgacagcggcaagaagggcggttgggcgagcttcttcgcggcctgcggcaactatcgcgtgtggatgctgttcgtcacgtacggcgcgtgcttcggcgtcgaggtgttcatccacaacatcgccgcgctgtactacgtcgatcacttcagcctgtcgctgaaggacgccggtttcgcggtcggcctgttcgggctgctcgcgctgttcgcccgcgcgctcggcggctggctgtccgacaagatcgccgcgcgccgcagcctcgacgtgcgcgccacgttgctgtgcgcgctgatcgtcggcgaagggctcgggctgatctggttctcgcatgcgcaaagcatcggcgtcgcgctggtcgcgatgctcacgttcggcctcttcacgcacatggcctgcggcgcgacctacgcactggtgccgttcatcgaccgcaaggcgctcggcggcgtggcggggatcgtcggcgcgggcggcaacgtcggcgcggtggccgcgagcttcctgctgaagggcgtcggcgacgtacagcacacgctgagcctgctcgggctggccgtcaccgcaaccgcgctgtgcgcgatggccgtgcgcttcagcgaagaacacaaggctcgcgaagccgagctgcgcgaccgcgcgctggctgccagcagcgtcgcgaactga

SEQ ID NO: 28473 - protein, 441 aa, Burkholderia cepacia R18194
MTDKATRIDLFSFRTAPMRAFHLTWMAFFVCFFAWFACAPLMPLIAREFHLTAAQVANINIAAVAATIAVRLLVGPLCDRFGPRRVYVGLLLLGAIPVFAVSFTHDYLSFLICRLGIGAIGAGFVITQYHTSVMFAPNVVGTANATTAGWGNAGAGATQALMPLLVAAGLMLGFGEDSSWRIALVVPGVAMLVMAWAYWRFTQDCPQGDIVALRKAGVTVDSGKKGGWASFFAACGNYRVWMLFVTYGACFGVEVFIHNIAALYYVDHFSLSLKDAGFAVGLFGLLALFARALGGWLSDKIAARRSLDVRATLLCALIVGEGLGLIWFSHAQSIGVALVAMLTFGLFTHMACGATYALVPFIDRKALGGVAGIVGAGGNVGAVAASFLLKGVGDVQHTLSLLGLAVTATALCAMAVRFSEEHKAREAELRDRALAASSVAN
